United States Patent Application Publication US 2014/0057251 A1 - sequence listing, part 156

SEQ ID NO: 301456 - DNA, 5124 bp, Cannabis indica
gctcctgaagtccttctgggggccactcattactcaactggagtggatatgtggtctattggttgcatatttggttaggattagctcttctgttcccttctctcattttttttcctccacattttatgtctttaaactcatctctccttttattaccttatagctgagctagtcaccacacaagcactcttcccaggtgattcagagcttcagcaactcctacacatattcaagttcgttgtactctcccttgagtattggctttatgtaatagtttgatgttattatttataccttgtcgtttattttttacttgcttgtctttttatttgattttcatacaggttattaggaactccgaacgaggaaatgtggccaggagtaagcaagctaatgaactggcatgaatatccccagtggagcgctcaaagtttgaccaagggttcctaacttggacaacgatggattggatctgttgagtgtaagttatgtaatgagatcacattattcacaatataaagacattgttaataccataatgacaagttgctcaaatttgattaaaaatattatccaacttttgcagcaaatgttgcagtatgatccctcaaagcgtatctcagcaaagaaagctatggaccaccctttctttgatggtctcaacaaggatgctctttaataactaaacaaaaccacaggagtgagattgagttggagacaggggttgctgttctcaagcattgttatatttctagttacgtaatagtattagttggtgcaactgtactgggtaggtatgtaacaacttgataaagttgtgtgtagtaagaagacaaagtttatgcaaattttaattcccttaagtcgtgtgactcatttccatcatgtcacaaggtcacatgaaatatgtgcaccaaatagtaagtgaaattgatgctaaggcataagtccaaaacaagataacagaacagagcattctttctctccgactccaaacaactagagatttctggattctctgttctcttagaccttaaaaagacaacaacaacaaagctaatctgaagtcttagtagtttagtcatcttaaatgtagtatgctttttgtgaggctctaagaagatttcctcgaattatacgggtgaggactggtatggctccatccctgtagagttttggagaacagtttagatggttaataagatgtagagattttgggaaaaacataggttgtacccgaacaatacagcagtgtcctggatcactctaagtggagcaccacttcctatcaaagattttctgaatagaggaaccactccaattatgtatccaataatctacataacagaaaataagtgtgttaagagttgagagagtccataaataaatgatcaaaaatatacagaacataattttgttgcctaaccgctccaatagttgaaggggccaacaatgccttgagatttaactctttaaacagtttaaccaaacgttgttttatccctgaactttctgaattccccacctgcatgcaattaagctcaagaaagatgaataatgtgattaattttgtattagaaaaaagaaaggcttgtcagtaaatattgtagaaccttagcagctgaagattcatcatcgtgtgtggtcttcggcagtactttttcttcacctgcaacatacccaggtggtggttgcaatacatgggaaggaagtactactagttcttctatgaacctttagttggaaggaatgaaaatgtaaaaatataaataaaaatgaaaataggaatgaaattgaataaaaattaaaacgcacaaaaaaaaataataattttttttttcttattttgcattagagttgttttttcttccatttcaaaacgcaagtctttccaatactttaaaatataaccaaacaaatgaatgtaataaaaattatttcattttcattctattccattttattatctccaaccaaacaccatatagtttcgacccactccaaacgtgcagatctcataaagaacttagataacaaaaaaataacgatttgacattagagtcaaatttaatcgcaaaccatcgcaaaactatcgttacacattattgtactatctttatttctttcagaagatcaagtttgaatgacaccatcattaaaatatcatttatttatttttttaactataaaacaagttttcatgcccattgccaagttcatacatacagttaagacattttttatttttatttttttgaacaaagacatttttgttcattacgcattaaaatgtaatatgttaaaattaaaaaaacacgtactttattttatcgtaaatatatttattctattcttatatttaatttttcttttgttgaaaatatagtataaaatattgtactcttatacgtaatatgtttcctcaatagggaatattatttttattttatctcaaaatggaaaagatttggtagatgagccaactaacactttattggttgttaatgtttcaaaaatggatcataagtgggttctggtatctaggtccaccagttatggtttttaccccatatgttgaaatttttatttttttactgagggacggaattttaaaaaaagaatactatgtaagttttatactgtgtattgtgttaagttttcattgttgttccacggttattttttagttgttctactgttgttttcaattgttctgttttgttgttttacaattgttttataaaaagacagtatttttgtaaaagattccatgtgatagtaaaattataaatgtttgcctaaaattcagtatttttataaaaactcctctgagtttattatcataaaattgtcatgggtttgggaacccttacacttttcaattccttaaagatattattatccaaaagagaccgaactttatttttctttgttagatattgagtaagcttgatagtatggaaatgacacgtttgcctgtgggttttgagggtatgtttgttgtcgatgttcaagggcatagtgggggattagctttcctttagtgttttgaggatgaagcttctttattgggctttttctaaatcacacattgatttgtaagtttcagttgaagatcggtcaagttggcgtgtcattgggctatatggtgaaccaaataggagttagagctaggaagtttgcttcctagttgggacctgcttcatagtttgcttcctgtgtctttattgccttggtttgtgctaggaagataaaaggggatggtaatccctatcttgaatggcttctttcaagttttcaacaagctttggatgagtgtggtttggatgacttggaacttttagggtatccatttacttggaatgtggtagaggcacaattgattagatagcgattcggttggatagagctcttatttctaaaaattgattggatttattttattttaagttatttaatttggaattctctacttctgaccattttctaattcttcttgatctaactttgagtttttcagtatgttaaaagaacttttaaatttgaaaaggcttgacagagggaaccttacatccatataaatcccaggctctgatggtatgaccccgagtttctactaaaagtgtggggtggtggtgggtgatgatgttgtggctgggtgaataattatttttttgtcaagtgttcttcttaagggtttgaatgacacaagtgttgttcttatcccaaagaaaaagcaaatcgtgactataggagatttaaggcctatttccttatgtaacattcttttgaatttattttgaaagtcctagcaaattgtttgaaggttgttattccaatttccacacagggtgacatgtcattcttctgagtgacacgtaaagaacattataagacctagatgagtagtacggtcctcattatgttgtcgatagtggtttattatcaagaaacaacttatttgaagattaaggtggaacattcggacagggtatatacaactgttcgactaacttcgatcttacaacaagcccgcatacaccgaccagagtaaatgcggctcaagcaaggctttggagatactttcctttttatttatcaattaatccctatttcagtggaattttcacacattattgttgtaaaattagaaagtaatcgagtttcatattttatttattaattgtttttggaaactaaattgatataattttttcctataaataatggagctattccattatacaaggatttgaaatcgttttttctagagatttcttacgctgtcaaattatttgtaaactttcgagagagatcaagatcttacttgtttcttttctcttaagtaatataagtaagaggagagtaggctactaccaaaatcacggtgacaaatctctataaatgattgtgttcttatttgcttaattattatttattattctcgtcgctttaataaactcaacatcattagctaaaaacgtgagcaacaatagtcattcttcctttagtgatttctgatacaaaaagtgcttttttaagggcatttaatatctgataatataattgtttcttttgaaattatggattacttgaagaggaagaggcaaggttgtaatgggcatacgaccttaaaattagacataagtaagggatatgatcaaatgtagtggggttacttgagagcgatgttggttcatatgggttgtgatggtaggttgattaatttacttatgaattgggtagaattgataagtcgatattttgtctcataaatatggttaatttatgtattaatattcttaaattgattctttaaattattgattagcgtgattttatttttttaggctattttaacgactaattatgtatttggagccaatttgagggattttagcatattttggtggaaaatagtggaagccgcgagctcaattttataaggaagaacttaatttcaaatttaaacgacattggaagtagaacttgttgggttttgtggcctaaataaaacccatttcaatataatcagatttactaattaataaagatcagaaattacttttaaatgttgcatggttcacataatttattttatgattatatttaatgtataaattc

SEQ ID NO: 301457 - DNA, 3684 bp, Cannabis indica
tatatatatatatttatgtgtattctctacttttgctgtattccctaatggcgaagcctcgcaaaccgaagaatgaagacgctagcaacaagcctgaaaactctgggcctgttgttcgtcaccagaagctttgcctttccattgacctcgacaagcgtcacgtctatgggttcgtctcatatctttttcgtcttctttccatgtcttcctttgacctttattcttcgtgcatttctattggttttcttcgaaacatgccagattgcgaaaataagggtttcttgaacttcttggttttcaaaatggtggtaattgagtttgactatgcttacttgttaattcttttctcgggcttaggtacactgaactggaaattgtggttccggagattgggattgtaggattacacgcagagaatttagggattgataatgtttatgtggatggtgagcctgcggaattcgaatattacccccataattatcaatttacggagaatgagagcaggtggtgctacgttacatctccgatcactgctgcggatgctgctggctcggcttacatatctgctttggaaagagaattggtaccgaatttgttgattaattgctacaagtcattcaagacgggaggtgaacagcaagagcagccagttttggagaacggggtgcaacaagcctctggagaaattaagcaggttaggctgctatatatgcatttttataaagttgacccagtgtgtaagacatttgtattgttttcgttttatggttgatgatatggtggcaggataatgccctttatatgactttgatcatttagatttcagctaccaatgtcatgtgcttgtactcttttatgtgtttgcaatttcttatatggtggtttcccggctgatagtttgtatcaattgatataaataacagtaacatgttacttcataatatgtcttctttctacgtggtttctcatggatattgatattggatgcagaatgtgagattggtccgcgttaattattgggtagagaaagcagagacagggattcactttgatggcaacgtgtttcatacagataaccagataagacgtgctcgctgctggttcccttgtatagacgacacattgcagcgctgctggtaaagttatctatttcttagtatccggttcttgctttgagtatatgcaatttttgaagtatttattgtggttatcacgttattggaacagctatgatctagagtttactgttgcacaaaatcttgtggctgttagttcgggaaatttgctataccaggtgagatatgtgacaacttacattaacgttcttcaacaatgaatcttgcccatggaagaggaacttgttatagtcatttaaaatatacatacgttatctttttcaaaaatgcattattgtacatgataaaaagattattggtctgcaactcattgtcatattttttcaacaatatgaccattcaatttgatcagtttaattctttgttggagtctagctggcactaaatttgaatgtttccacctggttagatttgtgtaggtcttgattggctggttaatggaatctcttatgacttttcatcatcaacaaatgtttgtgtaattcttttggggttattcttttctattagaagaaatatcaaaggggaaggaaaacttagttctttgtgaataagaagagagtcaactgttagttgttacttggtactaacggaaaggatgtatgataaatgtagcattatattatgattgtaggaaaagaggtacgaagacagtacacattaagaaataaaaaaatgttttatatttatatttaatggtaagtttgagatggaagaagcagccttataatattgaaatgctgacataaaaaatagatgaaatgaaagtaatgaatgttgagaatggaaaatgcaaaactattgttagagatattagcaagctatagaacatttgacgttttttgttgttgcgtagaatttgttctaaaaaaatgcgattgccataacatattactatacaaggaactaattgtggatatctcaagctttataaactcatatattctaagggcatgtttggtaagatgtaaggacaagaggtaggatggataggttaggaaggatagagagagtaggaatggaaatgagatgatataccacttgggtataatttactcccaaaagctagcctaagagaggagggtgcccaagtagttatatcctatgaaccaattccgtacttggttaatgtaggatcccaacaatatactctcctttggagtcgacgtccacagcaacacactctggtggcctactttgggtctaattcacaggtcgtccctttcgcgacgtcaatcctagttcccactcgagggttcatggttatgatatcatttgatacaactacttgggtagaatttactccaaaagctagccttaaagaggagggtgcccaagtagttgtatttttttttgcaagaccaagtagctatatactactaagcaatcccatacttatcaatgtgggatcctaacaagagagtggtacttctttatgttgtttgaaaagttaggaaggaaagaagatgattttctatcattttgttaggtatttaaaggaatattggagtaggaagattgtaattaataattatgaatttactatattacctattatgtaaatgtttttatatttttatttttaaatttttagttattacactagtacatactaacatattcttatttcagttattttattatgaggtgataattgtgttagtaatatatattttttttaaaaatgtcattctctttttttagttaaagaaggaataaatcaaattccaaaattagtagtataattttgaacaatttatacaaaactaggtatagaatatcctaactagacaagtttatcctacaagcaaaaaacaagttgtttatccatccaaaaaatatttcttaatctttgattaagtgtatatatgtaaatttgataagaaaacttatttctcttcctccaatccctccatccttggaaggattagtatttgttttgaatttggatggatttactcctccacatcctctaatccactactctccctccacacctctatatataaatcttccccaccaaacatatggtacgatattggttgtaaggaatcttatttaatacttcattgcatgtagtccaatgaggatgctgtttttagttttaatgttttatcaccaattttgctttattttgtgccttttataagttttttggttctgcattactgtagttgctcgtggcttagtcaagcatcaaccataagaattcaatggaaaagcaagtacctagtcttatctggacattgttattttatttgatgtggcatatttcccttgagatatcatatctctggcctcaactaatttacttacattgtgacctagtaaagccttatttttaaagcaattccactataagtttgaagttttgtttttccctttatgacacataccagggtatgattgctggttgtgcataatttgcggggatagctcagttgggagagcgtcagagttgatctgaaaggcgcgtgttcgattcacgctcaccgcacgcatccttttgatccatttcagtgagagtattgagtttgatggttat

SEQ ID NO: 301458 - DNA, 4981 bp, Cannabis indica
attattattgacacaaaaaaaaaaaaatacactcttttttttaagagtgtgcattgtataattttttaatacttttttttaggtttgcaattagaacttttaatgtcttatttattttatattttttttttaatggaaaagcttctaataaaaataaattaattaattaaaataggtataaacgacataaataccacaaacaacaaacaaacgacattcttctcttcttcttcttcttcttcttcatctcttcgtccactcaaagaaaaaacaacaaaagcttggaacaacgctcttactcttactcttactcttactcttaccctttctgcggtagttgctagtctcaatcggaaaccactcttctcttctcttctcttctaatctgttgcaaaggtagctactttcttttaactcagaccaccaagtgtttgattaaatgcctctttatatttatatatgtatgtatatactcattgtcatgcatgtcatacaatttagctatttctctactatagatgaaaacccttttagtcatttagtcagaatccttatgttcttgatttgtttgattaaaggtctcttttttaattagcataaataacattaccaggacaatcagaaatctcaacttttctcttacaccattttctactatcattagcatcaactagttcaaaattctgacaagggcacactacaaactggaaaagactgattataactacaaaaacttgacactgatcaataactgcagctcatctctcagttttagtaccattgcccttagcagagctataaatccttaaattcccatcattatctaatctcaacaatggcagcagtagccaaatttcttataaatttctataagaaattgctaatgtgtagaaataaaatgtgatatataagatgaatggggtactcttctcattatcaattggttttgagatggaaccccattcaccttgtcccaaattctaacataaatgggaagatttccaatgggttgtaaacccaaactaggtgaactcaaattagtactaatctaagaattcaacccttgagtccaataaactatgctattattccacctaagagtaaggtttcttttcttattgtatgcatacattcatacaggagtagttgcattgctttctcttatactaaattttggtctcatatttatcctatattgtgtcatgtcaacttcaagaggagctgccacccttaaagaaacaacactaaaaaaggctttctttttaggctctcttctcaataatggcatgtgccaccttcaatctcggcggagctgccaccctcagactcaaaaactctctttttcaagctccactccgttcaatctcctccctctcttgtcggacatctccaaactctcttcactccaacaacttcaactgctttactcttaaatcccactgctccttttctgtcaaagccaagataacctcaacaacaaccccttctcaaggtaattcattcctaaaccaaagctccaaacttttatttaccttttatctaaggctgtgtttggaaattggattttagtggggaaagaaaaaggtaaggaaaatgtaaaccaaagctccaaacttttctttacttttttctttccccaccaaaatccaacttccaaattccaatttttattttttatttctttttgaaattttgtatttcttttttcaacagctgagagagttgtggttttggtgattggtggaggaggaagggaacacgcgctttgccacgcgttgaagcggtcaccttcatgcgacactgttttctgtgctcctggcaatgcagggatttccaactccgatgatgccacttgtatttccgaccttgatatctctgatagctcggctgtggtctcattctgccaaaagtggaatgtgggacttgttgtggttggacctgaggctcctctagttgctgggttagttaatgatctgggcatggctggaatcccagcttttggacccacaaaggaggctgctgctttggagggctctaagaatttcatgaagtctttgtgtgataagtatggcattcccactgctaaggtttgtttattttttttcttgcttgtttggtggaggctctctcactcatactagatagataccagaaagcacttacttgtattacttttactactttacttgataaaactttgagcttttcacttagagataacaattcaatttggaatcttggtagatgtagatatgagtagggtaaagttttgagcttttcacttggcaattcaattcgaaatcttagtggttgtagtgtaaacttgataagttttttcttgcttgcttactatttttcttgttaaagttatgagcttttcacttagcaattcaatttaaaatcttggtgggtgtagacttgataaggtttgttttctttcttgcttgtttactatctttcccgataaagttttgagcttttcgcttagagattgcaaatcaattcaaaatcttggtgggtgtagacttgataaagtttgtttttttcttgcttgtttactatttttcttgataaagttttgagcttttcacttagagagagcaattcaattcgaaatcttggtgggtgtagacttgataaggtttgtcttttttcttgcctgcttactacttttcttgataaatttttgagctttataattagagatagtaattctatttgaaatcttggtgggtgtagatatgagtagtgtgaatataggactttatattattctactcatttggtatttcttaaaataatgcaaagaataatacaaatgttcacatgttcttttggttgaactaggctatccacttaatcctcaatatttgatgttcaaaacagactcgaacctcataaggtgtgagagcaaacaatatgcattattagtatgcaatctctgtttccattgtttttgctttattctttttcattttgtaatgaaattttattatcgatgcagtatcaaacattcaccgacccatctgctgctaagcaatacataaaagagcaaggtgcaccgatagttatcaaagcggacgggctagctgcaggaaagggagttaccgtagccatgacactcgaagaggcatacgaagctgtggattcaatgcttgtagatgcggttttcgggtcagctggttgtcgtgtgattgttgaggagtatctagaaggagaagaggcatctttctttgctttggtagatggagagaatgctatcgcattggaatctgctcaggaccataaacgagttggagatgaagatacagggcccaatactggcggtatgggggcttactcaccggcccctgtactaacaaaagaactcgaggatgtcgtgatgaagtctataattctccccactgtgaaagggatggcagctgaaggttgtaagtttgttggggtattatatgctggtctcatgattgagaagaaatctggcttaccaaaactaatcgaatacaatgttcggtttggagatcccgagtgccaggttagttaacattctccatatacatatccattttagattgtcagtgtctttagtcatataattgaacacatcagaatgttgttgtgtcatttgctttagttggtgaaatagtagttgcttctgttggtaccaaagaagagcttaaactgtctgcgatatttgcctcttttttcttcggtacttgattacttcaattgagactgaatatgagcttaaaacaggtgctgatggttcgattggagtccgacctagcacaagcactgcttgcagcatgtagaggagagttaagcgatgtatcactaagatggtctcccggatcagccatggttgtggtaatggcgagcaaagggtaccccggttcataccaaaagggaactgttataaaaaacctcgatgaagctgagcatgttgctccatctgtcaaggtgtttcatgctggaactgccttagactcagacggaaatttcatcggtgtaggagggcgtgttcttggtgtcactgctcaaggaagagatctagaagaggcaagggacttagcataccaagctgttgaacagattaattggccgggcgggttttataggcgagatatcggttggagagctctgcctcagaaacaatttgtatcaaaaaactaaacttgttcaataaatttaatggaaaaaaaaaataataataattatgagaataggtgtttttttatttctaatgtatgaactttgagaaaagagacttgatttatggcttaatttcttcttcttcttaacctaacaaagaagatgatttagttgagtttcattaatttacaatggtcttaacatttgtgtttgattgttttgttttatttttggatacaaaagaaatttatatatctatacgacttgtcgttttcacataacaattctcattgtagcatatgactatgagctctttaactttcaaaagagacattttttattgctcataatgagtggttctatgggcaaaccaccaaattgatcatctttattgttattgttaaaggcacttttagaaagcaaagaaggaattagaattggatgtaatgaagatagttatatagttttgcttgtttatttgaccacgtaattacattggtgattatgtattgagagatttcaattaagggtgtttataaaactgctcacattgcataaactgctattgcactgtatagaaaatacagatagaaattatttgtggtacggttgtggtttggtattttttaaactgcgtagtgggattaacgattttgaatttaataattacggttcaaattgtattgcactatacattataaagttatcaatttttacattatgattttgtttttttttttctatataaaaacaaatataagacaattcaaaaaaatgacttaatgaatagtatatatatcgtgatgttaaaatttaataagattttttt

SEQ ID NO: 301459 - DNA, 4986 bp, Cannabis indica
aaagttaaagccagcgcaacgacgtgtcgttctctttttttaaactaaaaacgacaactcctcctcgttaaaaactggaggaaaagctatacctgtcatattaacggtcaaataaaaaacagaattctgctacggtgtgaccttacataaacttcttttactatttcattccaatcacgccattccattcactgaagggttttattgtcattcaacgagcactaatatttttaactaccaaatatacccctaaacgaatgacgtgtcactaactaattcgttgatgtacaacatgaacatgtaccttcttgcagaagattactatgaaaaccctaggtacttccagactgaatactcagaatttgaccgctgcatttcttcgattcccgggaagaactaactttcaaagattacgatgagcacttcctctttgaagaagcaagatcaatctgatttaaatgccccgttgctcaaatcacagctcaacgaaatggccaaatccgaagacagtactgaaaagaaggtcaccatttttgttctgttttttttttttttttgtttttttttttttgtaggtcttcgattttgattttctgatgaacacccatttattatattaacgaaataaagttacccagataagccttttttaaaaaaaaaaaataaaaaaaatgagattcacccaaaactaaaattccctgttatagtattattgctatgttatattcttcataatgtttatattttattgatgtttgtgtgtgttgttatgtagagtttgagtaagaaaattaaagatgttgaagtcagtcttccaattgtgtatggtaatattgcattctggcttggcaagaaagcaagcgagtaagtgttttttttatagttatgcccaattggttgattacttgatttagttgttacatgaaaataagctgttaaaatacattttttcttttggtatgaataggcaccaatcacataggtggactgtctatgttcgcggtgcatccaatgaagatctcggtgaggtggtaaagagtgttgtttttcaacttcattccagtttcaataatccaagaaggattttggaaacaccaccctttgagttatcagaatctggatggggtgaatttgaaattgtcattactctttacttccacaatgatgtttgcgataagccattgagcttgtaagttgctttgcacattgttttgttaggatttattctgtttttcaggctgtgaatgctccatatgaaaaaaaggttaatagataacaaagatgaaatgatttatagaaggacagatttgaattttatattaattttcactatgccaacctggttagtcagctccttaatttgatctgttaaaatggtattagttcttaataaagtacatgtttcaagggaaatatttgactgttactaagtatggttacagaactgtgtgctgattttataggaattaagagcaacaattaggcttaaattaattctagtgaacttattcatagatatcatcatttgaagttgtatccagaagatgaatctggtcctatgtcaacaaagaagcctgttgttgtggaatcttacgatgagattgtgttccctgagccttccgaggcttttctagcccgtgtgcaaaacaatccagctataaatttcccaagattaccagcaggctatactttgcctcatcctggtatgtttttcttgttttccttgttacgtgtgtttaagaataagtaaataggcctcaatacatgcagtaccagctgaagttgatagcaaaaaaaagcgaggtgacatcaaagatcactccctaagccaatggttcacaagtttctcagaagcagatgagttattgcaactcgcagcagctcgtcagcaggtaaaaatggtcttctcgcattttctcgtggtgatgtcgaattacaacctcttgggtttttcatatgctaaattttgtgtgtgtgcaattgatggtaactatactttttatttgttcatcattcactttaactataacatttcttatagccaatgatttactctctctaaacctgatgaaatttaaaaggccccatgcctaattctacaatatttgaagaacagaaaactatagcaactatgcatagatcagacaacattccattttaaaagagaataataagttaataacctagaagagcaaaccttatgcataagtcttgttagtaaatgtatagcaagtgttggagctttggcattgagtatccaatttgttgtagcccaagcaggttcagttgtctactctgttacatttgtatttccataatcaatttgtcataggaaacaatatagtggagaaaaaggctcactatctcatgacaagagaatattgggttttagttagtaatcatttgtgcatttcctattatactgaatcttaatacttgctttccatccaaaggatacaaacttagcatgagtttaaatgtttgagaatccttataaggactttagagagttgtcattcgggcttcatataattatttaaaatcaaccaacatccttttcttcgtcattttaagaaaatctaatctatatccaatccatctgcagcatagctataatacccgagacacttaatcatttctaaagtagccagagcttaagatatcactacaaatttggtgtctctgttgacttctctaaggtgtaaaaattgcaaggcctgcctcataaccaaggtgttgattgatttatgctattagtttacagcagaccacaattagtaatagtctaaagaagagtagaaaatgagactcttgcatgataaaaacagtttgatgaaatctgtagtcaaattcaaaagaaaatcctctagtcataataacacttcttcaaataactaaaatgattatgcatttgaatgtttcatctgtaaaaagatcacattactgaccaaaaacttgatgtattagtctttgttagaatcattagtgtctaccaccatcattgctcttttgaccttaagccgtacggtatacaattaaaccaactaacataagagctcaacatttccaaatatctgtatacattagatgtagcattgagaaatcctgtagtggtcgaatttgacaaatgaaacacgattaagctcattgaccaaagcaaagtaatacagtaggaccctttaattaaaaagagattagaaaaagaggagaatagctactgcttaaattcaaataattgtttcatgagtttgcatgtgatgtttgttccatacagcttactcaataaaccatcacacctgcctgtcttgtcttcaatgtgcttatataaatgtggtcttttacttttaacttgtattgatttgatggaaactacactaaagattcccatgtttatgtgtccattgtcatgaacttttcactatatcgaaacgacctttaatgtttattgcatgaaacaatttttggctaatccttgctgttgatattatcatgccaccctcgaaaagtttcttcctttacaaaacaaagactctgcatatcaatccttgctcttgatattagtatagttttaaggagatctttagcttcttgggttttatcattattatatatatcttttctacaatcattgagttatccaaaagtaagtcaaattgaatagttatagattccaaatgttggaagtatggtggggtgttctcattttcagaccatgtatcattgcacaggaacagtgcttattgtaacatcatggagtaaatttgttgctgaatgaaaaggaaaaaaaagtttgtatcaattgtagaaatggttagacccaatatttgacagtgtgtcttctccctgattgtattaggttcatgttcatattgctaagcttaagcgacagttaagattgctcgatggtcaaaatcaactatcgaaatctgtctcggaccagtaagattgtacattaatcaccacacttctcttttggtatttgagattttttttccccttcaaattggattagcaataaactcaacacaatggaataaaccatagtttcactctctttcttttcttcctcttctttactattctttctttcatgtcataatttgaccattctcttttaatgaaagaaaatgtgtacttcatcatcatggattatgtttgttgttggttaatgaaaactacagtgtgattatgttgttggcctcaaaattttactgatattacattctgattcatgatctaatgttgaaaatttaaaagatgaatttgattgccctacactatatttcttaagttaagagtaaaaattcaaagtcattgagtgctacaaatcatttcatgaacatttctcttgtctggtaaaggacaacacaacaaattttaagggattttcatggacaaaaaacttccctatcatccgcgattcgcgatatcataccaagataatacaatgctaaagtaaaatgttattattttggtacatcagaaattaccagttgcttcttttgttttccttgttaaattacagttttaacttctaaacaactataacccaccttatctataagttaattacttttgtttccataaagtttcacaaacatggttttgagactacatcacttctcatcatgtaccttcaatatatttctatttaagtacattttaatgaaaaaatctgagggccctttcttgtaggtactgactttagtccttgggggtgctatgagtactagtcatgatcaattgaaatggggtcatttccactctggctagtcagatgggtcccttgcatgtatattatttctttcagttttccattgaagaacagtttcattgtcaattcttatattataatttggtgttgtggacacataccaggtatgagagtgagaccctatccttaaatctcgctgagttcctttgatgatttttcttttataatggggtccaaatgagtaagtagtactaataatagtaatagttttc

SEQ ID NO: 301460 - DNA, 1336 bp, Cannabis indica
acaactagcattacagggctgtcatgatataactgttctgtcaaaattatcaaacacatcaaacttgataaagaagttaataaatgttatgtcggaacaataatctcaaaactatactgtttactgtattttcacagtgccttgagaatcattagagtaatattcttgtagtgtaaggagaagtataccttggtcttcatcttcgaccttcactccaatatttgacaactcgaataattctgttgaaattttccaaatattttgttaattccttggtgtcatccattttgattgtatacaacttctttttcagataaagcttgttggccagggatttattaagatagatcgaagcccaactaatgtttcttcatgaaaactttctgtcagcacttcatctcccaaactcagcagaattgcactatgtgcctaactttttgtgtcctttttcaatttttcgtctttgattccaccaagttcctctgtgtttaatgcctgtgaaattccctgttgtactagaagagtctcatcttgatccttcaatcatttcagcatgtgaatttatccacctcaaattgagcagaggacattgttaaactcttgatctttcaagaactggttcttacttcttccaggcctcgagtcaaatagttcttgatcatagactctaacccatgctgatctataccacttgttgtgattatattatcactcaaatcgaactagatgagactagaacaagaaccaacaagaaagaataatcaaataactaatatgaaaataaaaaataaatgaaacagtacttaataactgaagcatacaaatcgataatgaagaacaaccataatgctgaggatctttattcaataattaatgttcaaacacaaacagattacaagcaaagctaagggattacaagtacaaattcttgatcacatgagagttataggatcagatacaccgatactctctacaaccctctttttctgtctaggattctcttatatttgaatatgtgatcacttatgttccaccaagatatagacaagagctgaatatatatacatttgattagtgagaacgtaagaaaaactaacataactgactcttgtctaaggggttctcaatcatatcataattgggcaatactatggactgagttacacgacaattatggtaaaaaaggtgattttaattcaaagccatggttgagaagggctccaaccaccaaaagtttgatatttggcaagttcatctcttgcacagtatccttcacctgttgaaaattgatcaagaaaaaaaaaaaaaaaaaaaaaaaaaaaaaaaaaaaacgatt

SEQ ID NO: 301461 - DNA, 1254 bp, Cannabis indica
agagagagagagagagagataaaagaaaaaacactaaatggctctaaaaggaaatgcccacttacaaattctttatgtcaatgagcatttttctaacttcaaaagagggtgagcatgattggtgattaacatattgggaggatgaactccatgcaacttctctaagtggagaatgctttatcattaatttaatttaaagtttggaatatggctcttttctttcttatgctctctcctatgatgcttctgctgttctacttctttacctgtttattctttaatcccttttttatttaaaaattgataataataattaaatttaatttctaattattttttacttctcttcttactgttgtttatgtttgatgctaaataatgcaatagcctatttacttataagaatatgctttgagcctaagttttagcaattagcaccccacttaaaatttaaaaggtctcatcagagtgtctagagtagtgtttggtgtattagacccttaagagattattttattctttctttttcttcactctagatttagacacatgctttatttatgcatattatagttcagcaaacactttgtctgttttaataatataagcccaatcaaaattttatgataaacccaattggactctcaccatgattatcatagatgggctttttctattgtcaacagaaatgactggttaagaatagttagttaataaaggctagactcatttcttggttagcacttaacttatcactagagcaagttacctaactctagtggcttgatcccctaattggaatcccttaaagacacaattaagttaattcaagacataaaatgaagttaaaaataacttaaccagcaagagggtgtggttaattactattgtctaactctaagctacatgaagaaaatttctagaattagaatttggaataaatcaaaattatcttgagggtaatcctttttcttttttagatgtttggtatgttataaggatcaagattaatctatggtgtgagactcgtctttaccttattaatgagtatactaactatagtatcatcaatgatgcagatcttcataggaagatgaaaacaagatttaatcaagtctcatcatagcattaggtggcgttcggttgggaagaatgaaaacataagattagaaatgagaatgagaatagaaatggaataaattttaaaatgcataaaaaattaataaaaaaattcaaaatgaaatagttattcca

SEQ ID NO: 301462 - DNA, 2549 bp, Cannabis indica
ctaagagcttcttttgcaagaccgtgggcgtctatgttcagttgacgaggaagaaaatgcaaagaagcttcatggaagttggagaagagccgacgaatctgagataccaaaccagaaagagcagagtgatcatgccaatcactgttaactttggagaccaaattctttaatagttgttattggtggtagttgttgtaatctttttttaccgtttgtaaatagtattatccatatagtggcaattactaatatatgtgagcatatttagacagatatttgttcataatttttaagttattctaaacagtacctttacattcgtgagctggtgatgatattttcgggccaaaaaaggactctttcttttccgtacgacaagcattaattttctattctccatgttatttattgttattattaataaatatatatttttttttatgtaactttattttttatataaaacattttgaaggctctttttctgaattcacatatggtattgccaggtgtttgtgtatgaaaagaaaaatcttaagatgcctatccacgatatcgtagctggactcaacgtaaaactaataatattttgccctaataaaactttcatactttatctctttctcagctcatcgcatcatactcgtgtcaaatactggtgccatttcatatctcttttttattgatcttctctaatgaatcaatcaaccacagaaaatgacactttctctcattcttctcactattaatttttatataatgtcacttttaatattgattttatgatttatatcatttttatatataatgtgcttgcaaaactagtgatgtagatctctaacaacgaatcatgaaataaattagtgtgttttactattattaaaccatattaaaagtttccataaaaaaaaaaaaccatatttgaagtaatgtagatcttttgttacaatattatggtaagattcattacttaaaagtttaagtagcattcatgttttttagacatgggcctatctaaaactggattaaaattaaatgggcctaatcttttaactcgtattacttaaaaatttgtaatttccagaattccattaatcaagttggagttttttcttaaatttcacagcaaaagaatctatgctactttagagtatagacactgtataaaatttcttctgaacaagtgttatatataattaaataccaatgacgaacttattaaatgatcttagatcgtttattttggcaagattcattaataaacactaaagaaaataaatcgtcattagattagattcttagcctcatacgcacgaacaaaataattaaaggtacacatatattatttattattataaagcaaaacataccaatctaacattatatgcaaaaattgataataataataattaaaaggacaatcaatatatcaaaacgatcactagatttcatttttcatcgtcattttcagtagacccctatagctagagcagtactggaagaacaatttcaagtgtttgtagattagtggtaccatcctccatcttaattatttcattttaaaattaatgtaagtggaagattaaaagagaaaaagggagtatatcattctcttaattcgccaaaagaaaattaaaagccaacatgcaactacactatttcaattggtatccaatccaacatgttgggaccatataagaagaagaaaaaaagctgtgtatcatgttaaatgaccaataatattccttaaaaaatttagaaataggataacactgacacgtggaagcttcttcaacggcaaattctcctaattattaatttatttgtattaattatcaaatatatttgtcattgggtttttgggttatgtgagaaaatattaaagtaattaagttaataaaaaccaatacaagtttttgaatatggtatggggaatgatagctattggaggggcaaccaaataatgagccaatcagattgaagaatactgatttataaacaaatcttccgacaaagaccaccaattaggtgtcacaaccaacagaaattaatagatgaggatttcttactacataatgctgcaaaaggagttcttctttcaacaataattaatcaattaattaattaaatttctttcttattcttggcctagatccttattgagggaatccttcaattttagatggaaaaaacacagcaaataagccaaccaaagtggaatgcttttatattttattcatatatagtttaacattatcgtagtactacttacttacccccatatccacacataaaccactgtgctaatgttaagaacataaattaattaatgggtcactgtctttcccccattgagattttggatttctttccactaatagaaaagtgtccagcacaaatttgacaagttacccactaattcatgctaataagagtaagtggagggccttgttcgtacagattattcttggcccttgaaaaatgaagtctttctattatcatctctttgttagtttttagacaatctgtagctcaaaaaaaaaaaaaaa

SEQ ID NO: 301463 - DNA, 2566 bp, Cannabis indica
aataatttagtttattaatttcattatcacttcactataaatatggaattaaactctttgataatatagaattatatttacatgattctttctaatactctattgatataatccatataagtaattcgtcctccaattattagttcataattagagttcgtcaaaattattattttacctttctaattatctcttgaatttcttatgcattattaattctatatgaatagttaatctataattcccattatagatttggatctaactgtagtcatttccataattaacattataagggaactaatattcaatccttttagaaaacttggatttcactattgtatgacatgttcctagcactcatgttattaagtttctaaaagagaagttgtaagaatcatattctctgagaaactttcacgagtgaattaaagaacataatgaacacaaataggagttcatgaatacgcatgatttagactgatctactaatgaccatcattgtgatatgaataactattttatgataaatatacattgataaaagatattagtccatatcggcccagtcatgcataattaaaattatacatagtatatttactaaatgtctatccacgtatgtaatcagaatcaaaatcacatgccactaaagtgtagtgcttagtaaccatactttgtaattctatattaaagattttatactttaatacactaccgatttattttatttatatagtgttagcccaattcttggataaagaaacatgtgtaagaaaagaattattggttcatacaatcattaaataagtatatatcttccttgaagccaagtcacggaaaggctccgcgaatccaaaagagatgtggacgtctaacttgaggataaactcgaattggccagcaacgtttatgctttttctaacacaggatcagatcttgtctcccgtaccagaacatggtagtgcgcgcaccctatacacctttttgtcaaacggttattctagacatttacttttcaagattaaaccttttgcccaagtcagttctccacacttcaaaaaggtggacaatccatctctgacttcgttgacaaaatgctattgataatactcattggatgtagctggatcccccatccccgatcaagatgtcatacttcaattgttaaatgatcttggaccagagtttggttctctattatcatgcatcattgcgcgtagcgatactcctacctccgaagaagttcaggcactcctcttatcttatgagagttgcctcaaacgccataacaccatcacaaatctcaccataaatcttcaagccaatgtggcatttttcgggatcaagaaccaactcttatagaccaccacaaggttccaaaattggaggttgaagcagattttgtggaatgaatcagaatattcgacctcattgtcaattctgccttcaatttggtcacacttcccctgtgtgccattataggtttgacaagaactggaatcttcccaaactaggcacaaacagtcaaacaagcaacaccacgaacccctctcctcgtgccttcatcacagaaaatgaattcgattatgatccacaagcatttgccacttctttcatccctgcctttgaagatgattctagctagtttgtggacactggtgccacaaatcatatcactccaggcactgaaaacttggactctgctatggcatacacttgtttagaaggtcttgtaatagtagacggtaagaaattacttatttttcatattggttctactacattgccatctgttaattagttttctctcaaattaaattatgttcttcatatccctttaattaccaagaacttagttagtgtatatcaactaactcgtgacaatcatgtgtttcttgaatttcataaaacatgttgccttgtcaagaacaagcaaactgtgagggagttgctcaagggaacacttaaataaggactccatgtgctagaagacaatgctaaagcttctataagggatacttcaagacagtcaatggtttatacttgtagtctgctatggtttgtaatagtcaaattgacagtagcaagaaaacaagtgactatgattataataattttcatatgaataaagctacaagtcttaatatatctcattactctcctattgcctaccaaaccaatcacaaaactaatattaatacttgtcacaacaagcttggacacttctccaaacctattctcaacaaggtgttaaaatttgtatctcagttctatagaccaattagccttttacaatgcttgtcaaatgggtaaaagtcataaattaccctttctcatctcaaattcaagagccactcaaccactaaaactaatacacattatttatagtgtccatcacacatcaagtctaaagatggctatagttattatgtctattttttagatgactataatcgatttacttgaatttatccattagttcttaagtctcaagcttttgacatgttcatcaagttcaaaagcattgttgaaaagccttaggtgcatgtttggcatcataact

SEQ ID NO: 301464 - DNA, 3018 bp, Cannabis indica
ttttaccattacactaaaatattcaaactattattttaataataattaaattatatatagggacctcaaaatttaattttacctaagcaagcatcactggacacatcacatgaaatatcatattattattgatacaagaaagaagatattagaacatttccggaccagttacaaatgttgtactcttagtatacttgaaggttatacactacttatcaaaagaagaacttcacaatataggaatttatttagtctaataagttattaaaataatatcttagctatactaaacaacacttagtgatttacaacttgtattatacactggagtacttgaacaacatctctcatggcaggcctgtcttccttcttttcccctaaacatgaaagagcaagctttagaaagagctttacactattcaacacatcatcagctgatgttgctgatgaagaaggctcagtctccaacagtcgatgatccataatttctatgactccatcaccattgttattagctctttgtttaacataaatggccaagttcacatcatcttggtcacgagagaagtcaatggcgttttgtgatgtgagaagttcaagcaaaacgacaccgtagctataaacatcactcttatcagttaactggtagtttctgtagtattcagggtctaagtaaccgagtgttccttgagcacatgttgagatatgactaagccctggtgaagccaatctagagagtccaaaatcagctacttttacattcaaatcttggtctaggagtatgttagttgacttaacatctctgtggtagattggagtatatgcagatgaatgtaaataagccaaagcctcagctgtttgtaaagctattttaagccttgttttccagtccaaaaaagttgtaaacttaccatgaagatgagcatgtagtgttccattggatatgtattcatagatcatcaatggttggtctgagtcaacacaacaacctaggagtttgaccaggtttttatggttgacttgggagagaattccaacctcgtttagtacttgttctgtgcttttgatgttccccactttagcagacttaatagccacaatagttccatcttgaagttcacctttatagacttctccaaaacccccacttcccaaaatcctctctctagagaaattatttgttgctttcttcacttctttcaagttaaacatcttagcagatttcccagctccatgactcttcaacctttcttctctgtccttaacaagctttgcccttttagaagaagtagttgaaaaagatgatattctccaagaccttctaactgtacaaactgtcataactagagctagaatgaaaaacaaagctaccccaactgagacttttaaagtttggctggtttttgagcttcttcccttaactactcttttgcaaactccaacagaagggtcccattgatgacccttttggcaaaaacatctattgacatcattagaataagaagaacacttagaaggtccatgacaatcgagttgggttctacagagaggttcctgtagaggagcccactggatttccaacccttcttcccattgacttggaggtttttccatatccaaatgaagaatacttctgaaagctttacaaccagagctatgaagcctaatcttgtaagccgaaggcatacctccggcgatgaaggtacaacaagggtcgagttctccggcacattgaaaagctctgtttttgtccacatggccggagctctccaagtaacggtggcagagactagaaggagtacagttgagaggagatactaaaagcctaggtgagcagttgaagaggaagattgtgtttgaagatgttacgttgaaaggaagagattggttgagccaaaggccttcactcaactccatatcttgagtaacacatttactaggtagccatggggatgttcttaccacaagtctttggagctcactcattattctcaaaactacataagatgtcccattaagggcttggaagtaaagcttttgagagtttgtgtcacaacgaagagagttatatcttgtgtcaccacaattggagtttgtgcttagagggtatggaatttgtatggagccacaaggtgggcatgttttttgggaagaagttgtgatgattatgagactaagaagaaaaaataggacgtttgtagtcatgaaggagagaggctttttgtatgttgtttttgccataagttcggaaaatatcataagctaaaaagttgtgtatatgggaatgaagaaggtgtgatgaggttataaataatataggaggaggcttaaatgaagaagagaataaagtgggtgtgtaataaaaatagtaatgatcataaaagtggcaaacgagaatctatagggtagaagattattaaaacttttttttttggcaaagcatccatagtaggataggtgggattctctttattgtgtggtgtgattggtgtccttgtgggtggtatttctagctctttcttctgttgttgagagagtggaatgccattaatggcaatacattatagactgagattttagtgttcttctctctttattgagtttggataagccagcaacaacacaataataaggaatatgtattgattagattttagaaataataaagtactaaaggaaaaaaaaaagagagaacaactttaatggtagatcttaataacattgttctttaaggctttagtgataaatttaaaacatatatacccgttaatcgaaacatgcaggagacataaaacaaattacaaaaggtgtgtgtcaccaaactcacggggaatttacaaaaaatacagggaaaaaattaggttacacttttatggccataaaacttattaaacaaaatatgtaagtttagtggaaaagtaaaaactaaaaaatagaaaccccaaaataccataacaaagttaatgtatcaaatattatatatagatgtccatatcaacacaagctttgcaattagtt

SEQ ID NO: 301465 - DNA, 1678 bp, Cannabis indica
ctattatatgaagatctttttttgaatgaaaagtacctaactataaacaaaagtagaagcttaaccaaacatggccaaatcctaacttcttccaaaaaacttttcattttttatccaaacactcctagaaggacttcagagcttatagaaacagtttaaatggttaaattaaatctatggggcaattcggattagcagataagcatacaagtgtatatagttgcgaactgtgcaagatcattttactttcttagcaaaggtataacatgatgaaattgtaggatttatggactgacctgtcttgacttcaccaggtactttggccatggcaaggagctcatctttgctctttcccataacatgggataaatcctaagtggataaatcatggaaaacaccggtaaaggaaactatacacaaacaaaaaaattacaaacgaaattacattaacagcattagtcttacaggaaggggaaaacacggggacttcaagtatatagcatcataatggtcaatacattgtgctttgctttttgttccaacatgttctgcaacttcgttccagttcccaaatccatacatcccaataccctaaagaatgcaggaggttcagccccaaaactcgaattctttgagatactgtttcattgcaaatcactaaaaaaattccgataaatttttttaaaaaagccaaacaaacaagattaatgaataaagaaccaattgaagtttttatctttacctccagcagtaatgtctcttcatctgcattccaatctggacaaatcagtggaaaatacaagttgtcctgttgtaaaccaaaatcatattcttatacatttaaatacgaaatgatcactaacttgattatttatagaaatttatatatttgacaaagtagacaccggtaaaaattataaattctttaaaaaaaaaaaaagaatatataaacagaatgactaaccataaccctataagggtgattggatttgtgaggagtaacctcagctccaactgagaagcactcaatacaaagatcaaaatcagagcagacaacacatttgatccgaatttttcccgagatatctttgttgcaataattgcaatgatataaaggagctttcctatcgccatttacttgccccaaaaccacattgtaagctgcgttctcggctgaatcggaattcaaagcaattctctttcttttggaagatttactgaacatatgaaatagaaaaaaaaaaatgaatttcacgtagtatcatagtacaaaaagctgaaagataattaggttagagtttagaaaaagcttgaattttaatcaaactgagaacctctggttgagatcactatcagcaattttcgatacagctcgagatcgacccatatctggtcgaattagccaaatgaataaaaacctaattcgtcgtcggtgcttagaaattggggaaaatggagatgtagaaatttggcttcacgattttcgatttcgaacccgttcgtgaaatattaacccagaaaaaatttgaagtttgacctttataataggtgaaaagaccaaaagccccaaactataagcgaaggggaatttgatttgggaattttgattttatatacttaagaaataaaaaaatttattattaaaccaaaaacttaaaccctaaaaaactaagggaaa

SEQ ID NO: 301466 - DNA, 1581 bp, Cannabis indica
ggtttttactgttcttgttcactgttgcattgattaattttagttacttagttccggtcttaatcaagttctttgcattgtgttgtttgcgaggtatttgatcatgcattgatcacatcagattcgtagttgagaactcagcaaactgaatctgcaatgaaccaatcaaaatgaaatttctgtatcaacagattgaaacttgagattttgaacaaaatcatacattatataatacatgtacaagcaaatgaacccatcaaattcttcagaaattttaagatatttaactgaaattattcaaccaaaatgagcaaagtagcttcataattaaatcacaagagtgctcaacaaattttagaagataatttgtacgaaagagaaagattaggttgaccttcatgactcatacctggctgggttagagaagaagcaaggctctggtactgcaatttgctccaaggtgaggcttatcgcagatacatatctaaggtttattagaattttcaccgtaaatcatgctcttaaacttacttccagaaactatttaaattattgaatttaaaaatattttgcgttctgttctgtttaattttactaatatgagaattatctatgtactaaaatatgtcttctatctataaaatcttactcccaaattttaacagctactgaatcatacctttaaactttcatctacatgatactggcctaaaaatttacaaaagtactaattagcctgtatttacgtcactatgattttttatatattttatatattcttcctccacttcactgcaagcaaaaaaattacaccgttattaattttgttaaaaaaaaaaatcactaattttacttgaatttatcacaatataatttttgaattactcatcaattagtataaacattaaaaattaatatgatctatgttttgtccttacaaatattaataatcttttatttttgtcataaaattttagtataaacttttttgaatctcagtgttagcttctaggtttcttttcagacatcatgatttcggtgcacaagtactcatttggagctcttgaagttttgtagatgtagaagggaggacacggcttctttccaaaggaatgtgcttcctttgttctgtctccttcaatgttctgaacttaaatgggaggtcgagagtagattggtcttgtcagaagttggcatcgctcctttgcccttaatcagtttgttttgggttgtctcaatggatccattgcactagggagagactttatcatgttgttgtgttattttacttttttagtttttgtagttttttcggtgttttgaactatatgttcttagttgcattagctttaggtcttttttttttatggggttggtccttttggcagctcctacatgagctatgagctttttgctcctttcatcatttatataattagttaacagttaagtcgtgtgatttttcacttaatttataaaattttatacatttgttattaaacatgaatcaacttcaccttagggaaagaaaaaaaaactaggttgtattattaaattttataaaaaaaaactaaaaataat

SEQ ID NO: 301467 - DNA, 1808 bp, Cannabis indica
ttgaatgtaaaattgtaaaatttgtctaaatttaaaaaataattcggaaaattgtaaattttgtaagaaaaatagtaatttgtgtaaattttcaattgttttttttgttgaatcttcacaaagtggttattactttgtgggccggaccctttgggtgaagcccaatcctcatctctgagctatgctatgttcacatgaaattgggttcattacgtgttttgctatgcttcatttggtagctttaccagaaaaccatggcaacttcctgtgctacgtcgaccttctctcctctcctcaacaaattaactggcagaacctctatggctatggtgggtttactctcttatgctcccaaaaccctcactccgatatctccaaccagaaccttcaattttatatccctctccacgccaacgaaacctcttaaaaagtcatttcaaggtgatttcttttatgggtctgctcaagtttctattaagatttcagtttgatgctctttaagttttaaattttcaatttggttctctaaaagttccacatttggtatgttcgaagattactaaggagacaaaaatggttgagattggtagagataaaaggatattgattggtagagataacatattatataacataaaaatatatggatgaacacctttttagtaggataggaattgaatttcttgtggaccatttctttgatcagtgagagcagtggttgcacctacagaagcggtttctgagtttgatgagatggtttctgggaccaaaaggaagtactacatgtaggtgggaaaggaggagttggaaaaacaagttgtgctgcttcacttgctgttaaatttgcaaacagtggccatcctactctagtggtttccactgatccagctcattccttgagtgattcctttgctcaggtttaaacattaattttgttgaaattactacttatagttctttcaactgattgaatgtactaatttttatacttggaaaattggtatctctgttatttttaactttaggatttgactgggggagcattagtaccagttgagggacctgattctccactttttgcacttgaggtatgtggagtttggttcttgtgagaaatgatgataatctccattgtcctgatgattttttagttttatgtacttagtaacttaagtggatagttatgttgcagataaacccggagaaagctagggaagaatttcggactgcggctcagaataatggtggaactggggtcaaagatctcatggatggtatgggtcttggaatgattgcagaacaggtaatgcttacataaaatattggcttctcatttgagagctgtagctattaagtcctactttcgctgcgtctcattaagtttctaaatgcttaaaaacattggcctgcttgacattgttattttcctttttaagatgtgattttgagagataaggatagaaaatgatttttagttgatgttaagaaactaagatgtgtttggttaatgctttctaaacatgatttttttgattttttttagacaattcctgaagagataaattaacagatgtatttataatgagaaagtaatgggaaagggaaagtgaagagatagaaaaagtaagaagaagaaaaactgggaggagaaaaagttaagagagagtatagtaatttgtgagagaatgtgatgtgagatcaactgataagataaaatatgatattgtgacaaataaggagagaaaatgtgtgagagaaaacaaagggagtgaaatttattagagagaaaataatgtgagagaaagtga

SEQ ID NO: 301468 - DNA, 3268 bp, Cannabis indica
gcaggtttatcacgattatgcaactttcaacagcaattgtacaaaaacaattgatctaaattctagtttggaaaggaaaaggacaaaggtagaggttgatctgagtaaaaaaaatggtcgatcaggtcatctgcattgatgctttgtggcttaaaggagctagtttcaactgagtctgccatgaaagttgaaattttttcaattcatatggctctttcgtgagccactgaaaatgaatataaagaaattcatattctttcatattgttggcatgtaatttaggcattggccaaacaccaatgcccatcaaacgtgtaagtcttttagtgtttcattagctatagtagatcttactaaacaatatgagatttgtagtttcttttccattaagcgtagttgtaacttgtttgcggatggctttgctaaaagtgttaaggttgctcgccaatgtccaaagggagggaattcgccctgtgagtaatgaacttagatgttctttcaaaaaaaaaaaatatccaatttatattaaaacaaataatataaataaaatccctaaacaaatagggagctccaccaatagtagtgctaggccataacaatatttaattgaaaaataatatataacacctctctacttagtatattataccacacatgtaaattttcattgtatttatataattttgaaattttatttaaaaaaaaattacaacgagaaaaaccgccattggagttttcaagcttccataagagccttattcttcttctcctccaagtacttctctttctcctcctccgtcatgaacgccgtcgccggaaaagatttcccaatacccattggggttttgaagtaaattttcttcttggccggatcttcaatgctcatctccacaatcggaacccataaaaacatttgcttgctcttaaccccactcatcttcttcatcttgaatttctccacatacgccgtcacctccaccgcgtagctaaccctagtattagtcttctcaaagaagtgttcgtacggtgctttctgtttcatccaaacgaaaccagtctctttcactcttccacattcttccaaatcttgtaatggaagaaccccttttggaaaccctaattcctcaagaagctcaattgatctgcgctggcactcctccgggccgtacacgatctccgctcccgcacgctcgtcttcgctcgccattttttaaaggtgattgtctctgatacactagatttcaactttcttagggttagggttagggtttgtgtgtaaattgggggttttggtgggttgatatagaaacccaatagaggaataattagggtttgtgttttgtgctgtgaattgggggttttaaagggttgatataggaatcaacagaggagtaattagggttgttgagctgaatttaggcctcttgaaaaggaggttgttcaactaatgactagccacttaaatgttctgtctttattgtgggtgtgactcattgttgtgatgaaagttttcacctttgtgagctaaattttcttggaaaacgtaagctaaaaactgagtctttagcgtgtacgcacggttttacagccatgtatctaagctaaactaaatctatacccattacctattcaaaactagagttgttaaaagggtaccttaaggtatcaagtaagaaataaatgatatcgtaattagtacaattcaatatcgaatcacatctcacaagcaatgacatgggtataatgttaacaatgcttatttggaattgttttcatttttagtttgcccttttgtctgtaattttcatatgttttaacataatgaaaaattcaatttaagtgttgatggtgttttcatttgtatttttttagtatataaattgacatgaacacatgggtggtgttaggcttagctcaggtcatgggcaccagcttgtcactgggccctgaatcttatatgtcagaagaaggaaggtgacaataataatgattcaataaatgttctgactttgtaactgtattaaaagtattaattgattcactctcttgcttaataattaagataattattgtatttaaagcaactaaatacctgtcaaagacatttctaatatgatgtttgatttgatcaagaaatgaaagaggaagtagttggttgagaaaatttgagttctgatttactgaaaagcaaacttgattatgaatacacagttattagttttataacattttattgagaaaatcagtagggaattacactcgttaaaggggtgttttggtagatttttgatatgttttagcatcgagaattttttatttttttatttttatgattgtgtaagttatagatatttaaaattatttgtaaatttttaaaaaaattatgaataatctaccgtgttgaaaataaattttaatattttgttgcatgtgattattttttcttatgagctaagtaagcaattgtttgaagttttgaatcttatttaaagtattataaattatttgaaattttctgaaaatttatagatagtcccaaataattacaacataaacgattactaaaaaagtttggactagaaaactcttcataccgaaatagataaaaaaatttaccaaaaaatctttttaaagaaagagtgtattatattacccttatttacaattttattttctttcttacttttcttactttttattcagcacctacctccttatgacttttgatcatattttctttgttatgtatgtttattcaaatatatttggttttcactttttacttccaaaggtacttggctaatattgttaaagagaattgttgaaatagactactagtagtcagtattttttttcagtgtcataatgttattagtgtaattaaatattgagtctcatataactttaagaaaataatttttagaaaatatcactagtcaatcgtaagactctacttatagaaagtaccgagcaacactagtgtctaataataatacttattgttaaaatatggtatttgccaatttttggctaccgatgagacatatatcttaatgagagcacttctattactgccgcccaatactatttgaggtggtgctttacaagcgattatcgattttttatattatttattaaattaaaatttattgaggctgatattaaatgggaaatttgaatttgtatgcatgcattaggggataatgttttctttaaactaatatttttctacattgaaaatatatgactattttttcaaaacccaaaa

SEQ ID NO: 301469 - DNA, 928 bp, Cannabis indica
tttttttttttgttgagaaaagaagagaagcactaatttaaattctaatattgtgagggctaacatgaaattttggaaaaacatcgttttttttagctttacgtcagcaacctctgacatgagaacaaaataggtatatataacgcttttgctttcatgtctttttttttctcctaagattttcttttcgtgttttctacttctatctccaaaaaatactaaataataaacctttgtaacgttgtcgtttagcaacagtgaggttccaaaacaattaaacaaagttgggcctttagaaattctcaaaaagtaaggtggcatttctgtagagggaatgaatggaatgggataggaaggaataaattttcattttttttgtttgttggatagtattagattgtcattctagggtttaatttgaattatatgttatattgtgttttataatataacattatattgaattttattgttgtattctattaatattatttattacaacactatgtttagtattgatttgtattaataatttatgtaagaccataaaatcaaccacaattcgatcctatttgggttcggggtccaaggccaggtcaaggtccggggctgagttcatgtttgaaattggggtcgggtttgagtcggggttcggggttaaagtccaaagcgaggtctgaatttcaaagtttagggttggggttcgagctgggtttaggtcgggttcggtgtcaaggctagggtcggggctaggtccgggctgaggtttaggtccaggtcagggttgggtctgggtccaggttaggattgggtctgaatttgggtttggggctggggtccccaaccccaaaccatttgtaaatattataatagggaaatttgattttatatacttaaaaaataaaaaaaaattattattaaaccaaaa

SEQ ID NO: 301470 - DNA, 2886 bp, Cannabis indica
ttttttttttttcaattttcctataaaataagcgttttggatgtcacatttttacacaaaaaaatattaaaacccaaaaagtttgcaatttcctgtataaatgattcatatttagtttttgtatgttagaacgtgaagacaattataacatttttcttcttttaataaaatttcatataccaagtgctcgagagaaattaccgcaagctatataaaaagcttcaattgaaagattagtaaaacataaaatgttgatgctttatatggaacgcaagcaatacatttgtttaaaatgaataaatcccgattgtcacatgaataatcctccattacagtcctcttctcagtaatgacaaacaactaaagagcatttacaatttcataaaaaagaccaacactgctgtgagttgaaacagctaaggcagattgtctccaacttttctgtcatctgaagcattactaccaccttcaatctgcataagtgaaaaatagaataacataatatactgttgaagaaatagcaatctttgccacgtcaattttgagccttttaaaagtagtactactgtagtttacacaaagttcaacaatgtgaattggcgaggcaaatgctacctgtttagtttttccatgagcagacattatctcgtagaacttccgcatcaacatttcttcctctacctgtaagttgtagatgtcaaattagcacgaagttaggttcgttcaatgcaattgtaattctactgtcaatagaaagttgcaagaataaaacactctggttaaaatccttaagacaaggtttaatagaatgaccacaagttttgagggtaaacatgaaatagtgtccttaaatcctctcgaatgagtgttagtgttaggaaaaaccaagaaaccacattcccttttaacaaagtatatacaaatcaacatgaagaaacacaactgtaagagtaagcaagcgaacaatgctaaaggggcagcacaaacaaagctgcaaattcaatcaaccctttaccttttttgggtatgcaacaaacttctagtagtgttggaagctgagtacttgtggtgccctttgtattggatacataattatagagtggatagttgacaaaattaaatgtcctaaggtttaatccattgaattttatctttgtttcttttcttgcaatctcattttgttcttttatttcaaatttaccgtttctcaagtataataatcgatttccaaatataattaaagctgaaaacaattgataatttgtaatcaatcctcgtagatacataatctattttcattattattacttgttctcaatatgtatacctgcatacataaatttcacaacattaagtaaatagatgcacagcaattatcatctttttttaacctataatactaaaagggaataaatcttagaaagtgaatacaagaaaagttgcatatctctaccacaaattaattttttgcaaaacttaaaaacttgttaacataggccaataagtgtcctataaagtgtaattgtaaattatcaatctttttcaaatcaattaacttaagtaggcaaaaccaagacaagttaaaggtaaattgaggaccaacctgaagtttatgtagttcatgcgacattgatctataggcttccattaagagttcactttgcttttccaaatgcctgcaaagccagtaaattaaatgtgatgtgagcacaccaatgcataagataacttagtcaaaactcttcaaagaaacctactgaaactatcccctgtgtgccttgggtccatttcaattggggaagtgagaaccgtagaaactctagttttgttttgaattactctaaacaatttgacagttgaatggattgtgactccttcgttctataaacagaaaaatgaaattagcattgatcaaaatcaattggtgtctttgctatataaaggactaaaacgagaagaaagtgatgatgtgaacatgatgaataagaagttttgtttatacaatgctgaccaaaattatagtaccacattcctaagaaacaatattacttgtaccaaaactaaccacaccctccaacatttcaaattcaagctcattacatacacaatgggaagaattgctgatagaaaattatttgtccttgaagaacttaaacaagaaaatgcagttgtccaaacttacaaatgaaaagaccatgttaatatcttaaagaacagtgaatatggatttatatatgatgaaatattgtaaattaaaataaaacaattagtcatttttgtttctttatcttatcaagaacttgatacaaaaccaaccaaactcactcactcaaatatcaacaaaatcacttccatttgacattttaccgaattctttttatgagaaagtaggctcagacgtctatttaagcattagttatatggtcaaatttcctagaaccatgaaagtaatctacgttgtttacttccaaattatattctgtatgatcttttctgtgcacaacatgatattttataaattatatgatacacatcatgtatacataatgatataatttttttatggtgtgccgtgatctgaaataaggccaacctagccagtttcattcaacttcacacattgatcattatggggtagatacacagaaacacaaacacgggccttcaacttcattcaggaaatttatcaaacaaaatgaaggcattaagaaacaagcacatccaactaaaaaacaggggaccaaacaagggacctgaagacataaaaatatagtctgaccagttccctacaccaattataagatttgggataatgaacacaggttcatttatacatatatatatataatcactttgcttccaatattcatcacattagagaaaaaa

SEQ ID NO: 301471 - DNA, 1694 bp, Cannabis indica
ctgtttgtttctggatcaaggtctactttaggtcgttgtttacgcttcttgataaactcaaaacctccatatggaacaactgcaccatttccttggtataggacaagtgcattttggtctggccttcgtaatccactgctacttccattgagattaaggctctgaaatttgtatatgacttcgtcaatcgctgtaagatgttcttgtttctttttggacctacaaaaaaattgatagaatgttaggtttcttaagttaacctattaaaatcacaatttaagtattgttaaataagaagcttacctctttttttgggcaagggtttttgtgtattcaatactgacaaagttgattctcttagaggggctttcacagtctgctgagtctctgacatgcaagcataatgagtttgaaatagctgcccatttccaagtgtggtggacttctcaggaagggatgaatgatgtttatttttctcaaatgtggttcctgtggaaaggctgttagtatgattctgggcccttgcagaacgtgtctttcctgtttgtgaatgttgcttggataaaatttgttgatttttcatattatgctctgaagggatagagtgatcataaatgttgctgttgaatatgctgacttcattcatttctctctcagcaattcttctcaattgtgcattcaataatgtgcaattagcttttgatttcagtctccttgcattcacactgtgtgctcctgttgtttcaacatattccaaaccctcagctgcttcgacattagaaggaatgttaacgatgcctctgcagtcatccacaatcttctttttctttgtagtttgggaaaattctgagcaaaactcatataactcttggtgcaacaatgttctagcatccatatgctttgtggttgagagacgtgcatgttcagtggtctggaaatggtccctttttgaccttcttgcttcactggaggagggggtctttggaactggctgaggcatagcctgcttcgttggttctctaatcttctgaagggttttacaattatctcttccttgaactctatcttggactattgcttctgcgcatgcatgttgctgtttccaaatgtattcatcttccttcctctttagctgttgatcaatatttttgtttatttcatgtcttcctgttacattgaaatatttcatatgcatatcttttgatgaatcaaacagaggaactgttgcttgcctgtcaaatggaacattgccattcagcagttgattcatgaaatggttttctaccacatgttcaacaggtatgccacttagcatggatggaattgtatcccttgcatgatcatttccattacatagctctgttgcttgatattccaaggtggcacttggagtttttccattcatgttgtgcatctcgtgctgcactgctatgttgcccagattcgcatctccaattttttcaaaatcaaaagttaagattttcttgcttctttttttgggcaatgtagttttatgatttcctgtcccctccaaaatatccaccatttgagatgttgactcttttggaacatttctgcgtacatatttcctcttttggtgcttaggttccgtattttctgaaactttaggcttttgtccccttttggtttgccttccacaattaccttgggcctgtgtttcctacgttttggtg

SEQ ID NO: 301472 - DNA, 2326 bp, Cannabis indica
tctcatattttatccaaacatatttaaagtaactttgagacttcaaaaactcttctaaagccatgccaaacatgccctaactaacagaccagcacaggacaactagcacaagctaactaaaaagcaaaaagctgacatggcaacacaacagatttaacgagatcatatgcaaattatcacagcatagatgacaaatgacaaatactaagtcagataaactaagcacaaagtatctacataatttgccacataaaataatgacacttacaggaataattctttactttctattttgacctgagaactttgtattatttctttttctttcattatatttttcaggttcttataaaaataataataataataatattttatacactaattagatgatataaaatgtgttaattaactaatattccttcgggattgaaatgagcccatatataatctaggtcatgcatgcaaaaacttacataattaaatacatggaatattaattgggaagaaattagctcggataatgtgattgattcctcaagtaaagtcatatttaattaaatatttgatattatatagtttttttttttttaacaaaaatatttgatatatagtttagtagtgtacgtcttggtcttggaacctgttgtttctgggtaatctgtggggctacctcaatcttaggtagctagtcttctctaattaagtctcttaacccaactatcatggattacattacatatagtttaatatatcttctcaatttgcatccttatctataagaaatgcaaaatacaatatatatataaaattatacaataaataatcatataggccatatagatgctacaatatgtatagagctaaattccctaaaatattgatcatattccctgtgaaaaaagctgcccaaattagaaaattaacttaactaaacaaccggtatttgatggacctaccttatgaatgttttcttatttttttagatataaaataattcattttggagtgtcaatgtttcttctcaagttctctgcatcttatatagtttaagtttatcatatataatcaaataattaatataattttttttccaactttgcatgcaatcgtgtctgtattattatttttagttatcctttgacgttgtttattctctgcaggttcttctccactgaaactagcaaagattattttattcctttaactagccttaattctttaagttgcctatttggacttattataatatgtggtccaaaattcctaattaaacatactcaaattggatataattgtaaaatttagcgccaatggtttaaagggtttctttttcggttagatgtggactttataattaatcagcttctggtttatttggtttggtgtgtgattacttaatcagaaattaattttagtctaatttttacctaaaaaacaaacaaattaattataaaattagtagggacattgccatataagggttaggacaagagagtgcccacgaaaagattctgaaaacacatggaattgaaatggtgaagtgaaggtcgttgaggggcaaaatagtaaatttgtgggaaagcgcgtggcatacacggtcagaagagttggagtggggtcacgtcgaaacccccaacaatacgacgtggaaaaacgtcacctgaggtttcgggcttttagctcctggtttttaggaagtcctttaatccttttcaaaaccgcttttcaattttaattaattttttttttctttgtaccacgggcttaggaggagtctaaactcacaagtcatctaaatctcacacccaacctataattctaatagttttataattataataattttagtaattaaataaatattactttaatttgattaaaaaaatgtaaatttcgtgttcatatattatttatttatatattttgtttgaaagtaaagattttattaaatcaacaaatcaactgttacagaacactaataaaacgaggacagatatccgtctaaactgacactcctaacgaatatgtaatagatttaactagtgcatggactacaccattcgtaaaacgcggaatggcacaacacgaaccatcaccagccgcagccactaaaagagaaacatcattaataatagcatttaacacgacatttttaacagacccattaatccaagaaataacaacaaaggaatcacagtccacccgtagtccactaaaccccatctaaactgccctttgcaaccccaactcgcacggccaagagctctgccaccccctaaccgaatatagtaactacgactttagcctacgtcgacactacggg

SEQ ID NO: 301473 - DNA, 2132 bp, Cannabis indica
tagggcataaaacacaacagtaatctccctccataatttcctcatttatcccttccatattcgggttccctataacaagagatttaccattattgccaattgatgagtagtcaactccatgaagattaccacccattaatgagaatccctaattttcctctccttgtccacgtcccccactttgccttactaacatcgaaataccagttggagcaccaccatgactactaaaaccagcaaacatagtcgcacccttctttgtagctatccccatacgcaaccatcttgacccatcaatgtagtttcaacgtcttggggctgcctttaactccacactatagtttttgacgatttgttcctttggagtatcaaacaacttctcccagaacctctctgaatggcctagaatcccacacttaaaacagaattttgggaggtcttcatatttgaaagtcacatggcacacacggccaccttggatttccagttttttctttttctttaaaggaacattcacaagtattttaacgcaaacacgtaagtaatcacgccaaacccctgagataattaccaataccactgattattctctcggacatgaaaccaatagacatattatgtaattgaacccagagttctaaccttgttaacgggagaagtcacagattaactcctgatttcacacgttcgaagatcagcggggtccgatcaaatgtccaaggggtgccctcaatcacccgttcgatatccacttcgtgatagaattgaaagaggaataggttcggatccaattccttaacgtatagcccccatcctggctgccatagagtggccattttgttctgcatggcttgaaaatctattgattggttagtcaagaaacgacccactagcaaccatctatcgtcaatcttcgacataccattcgcacattcttcgaacagcaggccttcgtcatcatcatcttcaaatgtgaacgatgaatattgctcctcaagagctggacgtacaaaaaaacagtgacacgaaaaaaaaactacccacagccaacaaggaaacaaaggacaacaacaaaactaacatattacaaactatagactaaaccaccatgtcaatatagacaacacttatcaaaaaaaatattagttattatctctatttagtgaaattataatttaaatatactttttcgcaaaataaaatctaattgtagtcaaatattttaccttaacattaaaattttctctttttaactctcaataacacaataaaatctaattataatttaaaatatgcacaccatttggtccaatcgaaataccaaatattgggaggataaagtagttagtagcaatacaattttttatacaggttcaaaatgtgacaaagagtcaaattaattgtatatggacaaaaaaaagtatctagaagtgacaaagcatggtttgattcatcgtaattattgtagagttaaaggtcctctattttgtttgaggatgcttgtaggttgtacaaattgagttttggagtaatgaattatcatcttattcatcaaaaaaataacgattatgatctaatttataatctaattatactgaactaatcaaatctaatctaattacaaaaaattagacatcgagttatagttggattaaatttgaagtgactagttgtattttgattgaatttaatatgttattggaagaaacttttatatccaattaaaaattgatttaatttaattacatgtattacatataatatttattcatatacaataatttaaattataaatttcttttttatttgttgtttactaattgtcaataaactctattacacttaattaaagaaattcctaaaccaaatcctaagaacttacatatagttggtttttatataatttttagttaacattaaaaagcaagtgttgaataaaaataatatttatgatacccacccctagtctaaacattgtgagagtttttttactaaggtgtaaaataactttgttgtgaatagtagagttttttttttctacagtcattattttataatatattttatcttaatactaaacttttgataaaaataataaattaaaagttataactaattaagtaagattagat

SEQ ID NO: 301474 - DNA, 3254 bp, Cannabis indica
gaattgccattatttcctacataaaatttagttctaatttatttttttaaaaagaaaacagctttaacaattttttgatgaagaaaagaagcttaaagtgcagccaacaaccgatcccttcataatatattcgatgaaataaaaccattgtgtttgggccttttgcctgtcaatttagaggccacagctgcaaaactaagtggaacactagtcgtgccggccggcaaaccaagtaagtattagtcttcgattagttgataattatatttatatgtatataataacaatccaataaatatataacgttaaccacgttctaataatcctagaccaattctcctatctcaccctggcctcgtaatattgagctgcagatcgctgactgatatctgatcatctgacaatatatatacatatatatacatgcatgacagcctgacattatatatatataacgcttgtaaaagattcctctcaaataaactttagttatatatagagcttcatgcatatagaccaaagtcctataaacttttccatggcaaaaaatccaaataataatgagaataataatttggtggcctctccctcttattattcgttatgtgggaattgttttgagggactaacaaatattcggcggaaaagaagggacaaccagcagtggcatttgttaaagcatcatcaacatcaaaaagatgaagatgaagaagaagattatgatcataataataataataataagcatgtggtcatgatgatgatttggggtgttaagagtggaaagaaggttagagaggtttcagaattgttggcaggatccaaatactactggaagtggaacaatttcattcgccgcttcagtactaccagatcgtcatcatcatcatattgttattattattattattataccaagaaaagacggttgcaatttcaatatgatcctcaaagttatgcacttaactttgatagctccaatgatattgaatatatatgatgatcataaggactcgtattatatgtatacacacaccttgaattttctgataaaataaaataaaatgcattttctgaattctatacggcatattatttccatgtgtcgttctttcatatttttttttcttcatatattaattattaaggagaaacatattaatagtatcgactaaatgattaagaatatgtgagtttatatacgtgatctttgtttattattattattattttttttttatgtaaatcaactaacaaaaaaaaaagtatatattaagtcttttatgataatcaatagaaagaaaattccaagggaaactcttcaactaataacaagtttaataaagaacaaacaatcctcaatttccaacatataggaaataaactgattaaattttatttgtaaatgtactaagtgatgataaatgaactccaccaattaccacacaacacaagtcaataatatctttcaaaagattacggggaacaattacattatatttataaattataatcttaaattatgaaaaataaaataacaatcaacaagacgtatatttaaaataaccaaatgtatggtgtcaacaaattataagataagagatcaataacacattcgaacaaaccgcgcgcacttccagatatacaaagtgatccattcaagagttttctggctatatggctgaataaatcagtatctcctctagataaaaatagaaaagaattttattacctcatatgctaaagcaagaaccccaaaaggtctggcatatttattagatccaatacatgttgtatggctgtcgatatttctttttctctttctgggtctacaaagccaacacagagaagcatgtaccgcaaaaacaactaaacccatcaataatgtagtgagacggtgggtgataatcaccttgttaaaactaacggaaataaaacttgaaaaaaaaggtaatataattcagggatggcagcattgatcatgtcattgcaattgtcttcaaccaacatggcatacccaagacaacggagaaggcaacatttctgtttcattttttagcatcaattcacaactgacgttgttgacacagtaggattaccactagagatgtatatcacaccacccacaccgcaccacattgtacacaaaaaagatttggtttgaaattctttctggtacagttgcggattgcatttttatcaaattgtgcgggtttgcagttttgaatttaagttttatgggtcaaaccgcacttcactgttatttgatttttaaaactaataactatgtcattttgacattgaaaatgtctttaaaattatacggaattgatttgaaactatattgtagttggaaataaatgaattgatgcaataattcagccatgaattacttggacatcagtgatagaaaaatttatgttttactgtagagttatatatatatgctattataaggtaaagatagagatatattctatatatataaatattctataaatgacagttcaacataatactgaatatattagctagcaatattatgatgttgtgttgataatagcaatatatccatcgtacacgcatgttgtcaattaatcgggtggaaaacatgacctacccataaactaaatgtcgccatggtttgaaccccacaaggcaacttgaacatgccctaaaaagtgcatcccatccactataccaaatggttattacacattcatatatacatgatcaaataatagcacataaacaataagattgctatatttatatatataaacataataatgccacaatttgctaggaattatatatgtctacataaatttccaaagaaaaagaactatataatcaatgcgatcattgtatactaaaaacatgcacagatctttacactatacaccccccacaaaaaaaacccctcgctatccttattcacaaataggacaaaaggaagaagaagcaaaacttatatgactcggctactaataattaattaattaagcatatgaaatgaaactatccataaattgagtagtcccaataatataattcctaattaatcaatttgtgttggatatatatgccattatatactagctagagatacgtacgacaaaacatcagtttcatgatttataaatatagctataccatcttcccatctgcccatctgccttgccttgcctttgatgctgatagttacttgaatggctttccattccatagcaaataaatggttatgaatagca

SEQ ID NO: 301475 - DNA, 2593 bp, Cannabis indica
attttacatgaatatacaaagaaaaaaaaaaaagaaaaatccaacatatgactcccttgtattttccctcgagtataacttcatggcgatgcttcttgatattgatcaatgtcaatccaacatcttatgtatgtatgcatgagaaagctgaagagatacatgaacaatatatcaaataaaacaacattttgccgcatgaagtctttcaggaaagttgtaatgcattaatgatgatgtatatctatatttgaaaggttactgagagttaacttttctagtttgtgttccaagtctagcacatttcctaaaacttaatgagtctttgttgttttcaatactccaggagaggatgcaatgtcctccgagggtgctgaggatcagatgaaaccggccttcttcttgagcaaaccggatttcatgctccatcattcacaacttggtggcagccattcattggtagtttggttgagttgttggcttggcttgaccaaccccggaactttgtttatctcttaaaatgttaacttgggtttcctgtcttgcaggctagcgttcaatacccctatgctgatccatactatggtggttttttgacttcatatggcccacaggctcttgtaagtttttttcgtctaatttgctttttccttgttagagatgagattatattatatgcattgtttgcaacataatgatcaaacctcttattatatctttaaagaggattagaggttatggtcattaaattagtacattatagtaatggcttgaaagccttgccttcttttagtttgagaacacaggcattaagcaacccaccttttgtttttgattgtgttctattttcttctgttacaagtaaagtatatatagatgcgtatataatttatgtgatcaacttactttgatatgaatgtggcctcagatggtggggttgcaatccacacgagttccactgcctttggatcttacagacaatgggcccatctatgtcaatgcaaagcagtatcacggaattctcaggaggcggcagtctcgggcaaaacaagaagctcagaacaaactcataagaaaccgcaaggtgatgcatggttttgtattggaatttcttttgatgcatttacattgtcactctagacatgttttgtacgtagaatttcatctttgtcgaaataccagcgtgttttctcgttttatgtaatctatttgatgcatttactatctaatctaaaaatggaataaaattggaaaggaatacatatttgccaagctaaaaataggaaaataattgtaaagtgaaaggttttggagaggtaatgggaagtgtagactgagtgagactgacctgaaatgatagaaaagggaaaccagttctttatttccaatcattttaatattttaagcattagaataatgacctacttagagcttgaatttagtatacaactggttaaaggttcaaagtcattcttgactattcttgagagcatgtgagttttttcatttttggtagaattggtagtaaatactttattggatggatttttggaagagtgattgttaattaaagataatagatttttaaaggaaaaagattgggtttcaaatccttaagagggcataaatatcccatcatacaagaagtaaaagtagtctcatgttatttatttcttccttggctattaatatacttatgccttcctattatatcttcctagtttcttctatctctacacacagccttaagtgtttattatagtggaaaggagaaatgattttttttagtactaaacaagcatagtaaacatgacataatcattaattctaaccattttacttaatcacctttttgcagccatatctccatgagtctcggcatctgcatgccttgaatagggtaggggatctggtggacgctttctcagcaaaaaacagctccaacaccagtcttctgattctaactcctcgtcctcctcctcctcgaagctgctgcatcagaagaatgacagaatgaactctgggtatgctgagtatgtcacctcagttaccacctgctcggacaccatgagtgtttccgacagcagtgggctacggttctctggagcaacgtcacacatgggcgggaccatgcaatgcagtgagaggctgttgcatgggggaacccagcactgtgcttcagttgttcggtgaaacacaagaccatgcatcgtccatggtcgggcaaatcatccttggcttttgttactgtttacgttctatatttggtgttctactttggttcaagcaaaagaagaagaaaaaatgctgtttgctgaactttgttctggaaactggaccagagctactactgtatcctatgttgtttataaacatgtcataaaaaaagtgcttgttgtactgctcgaattcctcaatttgtgactactttctgtgtgttgttatcttactacgaatattaatgtttagtatgcactttggttggttggttggttgttgaggtcgcttgtgaacattttataatatgtaattttttattttcttcgttttaagaatcagaatttataattggttttatttcttgtgttttcttgaa

SEQ ID NO: 301476 - DNA, 3251 bp, Cannabis indica
tcgattctcggaatgcccctattctggttttgttttgctattcagctaatcattgaaatttaacaaaaattataatatttttttcttgagatcaatagcaaaaataatcattcacgattggtctctgccaatggcaaattataaaaacagtaatatgtaaataaatataaaaaaaatattactacttaatggaaatgtaaaattattttatttggagatgaatagcaggaaaaattaaaataaatggggcattccgagaattgaactcgggacctctcgcaccctaagcgagaatcataccactagaccaaatgcccactacgttgctattttaaatttagttaattaaaaaataagtagaccttcatacaaatactgcttgtttttttttttccagtatataacatcatttccacaggttcccaatttcatattataggaccgacaagtatgtactcagtatttgaattaaaaatagaatatctattaaattgtgaaatcgaatttattgtctatgtgaccatcattttgccttaatttttgaattaagattttagaatgtcaactaaattgttgaaaaagtattgcaaaatagtgtgaactcttcgacaagtctattactactttggattagatgatcgatttgtatacaaaaagaaataagaatatttcctaatagatatcaagagataaaatcccttttcatgtagttagatttaatttatgttaattgtgttgagatcttgggtttattgtttatattagattcaatacaattttttttaatacttgatccttttttatgcttttgctgagactctgatatgaaccctaaataccaacactcatcaacaacatttacaagctgccatcagaattctaaactatctcaaaagctctataggataatggttatttttttatgcagcaactctagaacctctctagcttcaagcatgtattgaaactgattggggtgcttatcctgacactcgaatatccatttcaggctattgtgttttcttagaatagtctcttcaatcatagaaatccaataaacaacaaatcgtttcaaggtcatgagccaagacaaagtatcactccatgaccaatgcaacaagtgaactcacttggctcacttcaatccctaaagacttcaacattgccatcattctccatttcatacaataatgcagccatccactttgttgaaaatctcgtctattacgagagaacaaaacatgtagagatagactgccacatagttcgaaagaagataacaaatgacacactcaagatgaactctgtctcatcaaagacaaacattgtttatattttaactaaactattttcccaactcattttcattatattgtgtccaagatgggtgtaaaaagttttacactccaccttaaaggagcctatgactatgagagttagttatcaggtttgttacaagttagttacatgattcatattctgtttttgccaaatataaaggccatcctttgtattgtaacacattcatacaattttctctatgttctaatatttataattttttagtaaaaattcatagaatttcattaggcaatcaactaagaagaatacaataacatgagttttaaggccaaagaccaccaaattctagtagaattactagctctattataataataaataaaaaatagaagaaaaggagctgtgcatttataattttgtgtaataaaactcccaaaatatttatctttctataagaaaccagaaaaaaaaattaagcaattattggttcgaccaaaaatattaaattacgcagttattggctttacctgtaaataagagtcgtattgtgtcggatcatgaaaaaaagtagatcgtatcgtaccgtgtcataaaaaaatatgagtcatgctattaaaagtatgggttgtgatgtgcaataattgtataggataggtccaacacggtttgcaagtcagtaattttgtattgttctcggattcgtataatgctttattcgagtcgatttgtttttcttaaatagaccaacctatttttttatacgaactcaaattcgtgtctttcttaaatactattttggaccctgtattttatataagttactaattggacctttgttttgttaaatgataaaatagactctgtattttccaaaattgtacaaataggacccagaattatttttttatcaaaataaaacttaataataatctgatctagagatgttatgaaaaaattagttacattgtccgtatctgttcgtgttaaaatttatcttaaagttggttatataaaaaattaaattattgaaaatttagctcatggtcttatttttaccattttgaaaaatatagggtcaattttgtcatttaacaaaacagagagtcaaattaataactttcacaaaacataggatccaaaatgatatttacccttttattttttattagctaaatactaaaataaatatatatatttatagttttagttaattttatatatttttttaattaatagatacagacaattatttaaaagataattataattattataatttaaatattattattattattattattatcaaaatatcatacattttatttatttatttattttgaatggaaagagaaaacttcgttaagatagaacaaccaaatcgactattacaccattgttaatagcaccaagaacattgctaccaacaaaaaaaaataaacaaaaaaaaaaaaccggagcaagacaatgagcgacattattaacagatcgtttaacataactaacattgacatgtgacatagactttaataaattaagacactacgtaatagttgaaccacatatagaatgcatcacaacattactttaaagagtttgaaccaccacaagagaatcggtttccacaataacatgcttccatcttttcttcttaatccaacttaaagtctttttgacaacaatggcctccactaaactgggttgaacacaactagctttatgcaagcaaaatgcctcaataagctgaccatcagcaccagctttatacatcttattagattgtacttttgagctaatttatttgtgcttacgtattgtgttttcaaacttgtcgtatcgcactgtattatgcctaagcacattattttttttgtatcaggtcgtgggtactgatttcatgcagtgtcaaaagaccctaccatatcatatatttttcttttgacatctga

SEQ ID NO: 301477 - DNA, 1420 bp, Cannabis indica
ttcttttatctttgtgtttaaaaaatttgaaaacgttagtgttaccaaacaccaatatagtttttacatatttttaagaatattaaaaaattaagtatgtaattagatatcaaattaaaaaactcatataatccaattagtaattagagtgaatttgatgggacaataaatttttaaatctaattacaaattaaatttaatggaatgagaagaaaaaatttagacagaatcaaatactcagccctagtatacgtggaattcttcattattttttttttttttgaatcaattattaaattcttcattaaattactttgttgttaaaaagttgtacatatccttatgtcccttgtccctttggggagccaactcttgaaaagttgtcaaaaacattagtcttttggctaatatatacggattttgtgcagtacagatgaacaaagtggatgtcttagttggtttcgtatataagattatataatatgatggctctattatttccactatacttcaacttttctagtggatgagtaagcaagccccttaataacattactacttactgtataggagatattgtttcaataatgtttggggcagaatatcctttaaattccatattaaggtatacaaatatatataaaactaggaaaagaaaaattaggcatcattatatatatggagaaaattgctagtacaatcactattacgtgtactatatattattttatcatttctattgggaaaacaaaatttttaaatagtactttatgctacttctttttgagttagtaactctcttttctttttcaattccatattctaaaatccctagtttcaggatttccctagtacttaaactatttattaggtaatgtcacgtaaaccaagtttattttcttctttttccttcaagcattccattattctgtgtgaatttttttataatatttatctttgtgttgacttcgcttttaacaaccgacattgagtctaaattgtaagtgacaaatagtataatatgtgcgtaatataataaagtaaataaagacatgagaattttatagaagttcagtcccgagcagttcgataatagcttaatcctcttggtttgtattgacttaagaacaaggaaaataatctcttttcttagagctcttacaacagtatctctgaatatgagttcttaaataagtttttcgatcttttcctcagtgagtatgaatcactatttatagggctataagcttgggagggaagaattttcattctgattacaattaatataagtggaaagattacatattaaatacacaatacactaatcaagggattcagatagcttgccatatctctgtgatctgatcccaaagttatagggatttattcggtgacttacgatgcgaaagctgaatttatt

SEQ ID NO: 301478 - DNA, 2716 bp, Cannabis indica
aattagataaaaaaatttaaatcaaaaattcgaaaactatgctatagttcttgacaaaaattcaaaaatccacattggagaaaaataaataagatacatttattttgtcaacctaaaatcaattattaatagatacatacatatttatagcaccgactccagtccagcttgtgtgacaaaaaaaaccaaaaaacgtagtgaagaagacgtgatttgcgtgataacacgcgcaaaatgaagcgagtggaggagaggagatatttggggtgtgtagaaaaatatagtgaaggaaaacaggggtaatattaatattattattattgttcattgatggagcatatgaccatggtgggaatggaatggaatggaggctttggtagtatttgatattggtgttgttgtttgcatttggtactgagtgattcaagcaatgaatcccgcgtttcccgttccatcatacataaacattctctctaaatatttctacactttcacatctctctttttcttttttcttttttatacttccaaacaattaattatttattttcctaattaatcccatattatatatactaaacattctcaacaagaattttgagtctttgatcaccactcaaattctttgcatctcatttaccaactttctctcttaatcttcggaggtggtggtggtggtgggcacctgtgaaaatactctacacacacgcagccatcgttatttgacttctttttctttctcttacctttttcaatcttcaatatcatcgtccttgtcgttttcttgcttcctaacgattacatatataatttattaaacccaaatccggaactgggtttcgataatttcgagttcttctttgtttattgtgtgccaaattaatgaaagtattcacctttagatcaatctctggttctgtttctttctctctcattggattagggaatgaacaagaaggatttcaagattgagtttttaggaaacgaaacacgttctgggccacctggaaaggaagcttcgcagttgtatcatctctttttccacatttttttcttctttattttatttctcaattttcatggaagttgcgccaaaagtttctttatccagctcatctaatcgaggaatgttctactgttaaatcaggtttttgaataatttaatcacagctttccaaaacccaaatctttattttttttcttggttttgttggtgtattcattttggggggggttaatgggttgtgcaagctctaagcaaaagcgatgccggaactgtcaagggccatattcgccggtgccgagaagttactcaatgcacgtccaccacccaccggagaagaacggcgacagttaccatttggttgctcttacttcctcaaccttgggctcgatcaaactcgaaaccccatttcaaaacgacaccgttcacaaccatgatgatgatgaaactgattatctaaaaagcaaagatttttcagttggacttgttgaggcaaagacttggtctaatatgatcaatgaaaaaatcccaaaagttttacccaagaccccaatcagaacacctcccggtgagcctgaaacgattaatgcttgggaattaatggaaggtcttgaagatattagtcctttcagatcacccattcatgttagaagcttctcctttgatattgttagagatccaattccaattcccacttctccttttgatcgtcccaaatcaagatttcaagagaataataacgattcttcttcccctaagcccatgtggcttcatttatcagacaaagaagacttgaattcagattccggggttactgaattcgaccccgaaatcatctcaagtttcagaaaatcactcgaggacaaaccaaaagagaagctaattctatacttcactagtctccgaggagttaggaaaacgtacgaggattgctgcaatgtgagggtgatcttaaagagcctgtgtgtaaaagtagacgagcgcgatgtttcgatgcattcggggttcaaagacgagcttaaagagctattaaaagatggctttcatggtggtggtttgccaagagtgtttatggggaacaaatacattggtggagctgatgaaatcagaagattaaatgaagatggtcagcttgagaagttactcgaatgttgcgaaaaggttgatgatgattgtggagatggtggtggagcttgtgaggcttgtggggatgtaagatttgtgccatgtgagacatgttcagggagttgtaaaatatattatgaagcagagaaagaagaagaagaaacagaggaaggagaagaagaacatgaacatgaagaagaagatgattatggtttccaacgttgtcctgattgtaatgaaaatggccttatacgttgtcccatttgttgcaattaaatcaatgaattgtgacattataattaacaaggtaaccttcttccatttttgttaaagttggttttttttcttttctttctttttttgggcttggtgagttgttttgttgtacagtcattttggttttgtttgagagaagagatcaacaaggataatttcaattcaggtttcgtaaaccttgtaatgtgtcattacaacacttgtataatttcatttccagaaatacagaaaagaaaaaggctttgtatactttaatcttttttgtacacttgagaagatatatgaaatgtgcatgaacagtttctgcttcat

SEQ ID NO: 301479 - DNA, 6719 bp, Cannabis indica
gaacctcatgattctcaacagcctcaagtgagattatgtttgtaattggtgtgtatcaccactagtgttctttatgttcttgatccaaggatttgtaacattaattcttgccattcaatatcaaaaccaacacagctaacagagtataaagtgtatttttctctttttctctattctgtaaagcccaaccaagcccaaaattgaaagagaataaaaggcccagccccagtccaagcccaagcccaagcccaagcccaatatatccttaaagcttcgtcttcttcaaatggtccttatccaaccaaagaaaagggagctctgtaaactcaatacatataaacatatatataagccaaaacctcccttcttcttcaacaatggcgggaatggcgaccttcttcactttctcatcatcgtcttcttcaatccttacctctcctccatcactttctttctcttccaacctctctctacttccaataccgactttctctcgctctcttcaatttcgccacccaacatttcccagttacctcctttttcactctctcttttgtgctttgatttctcattttcacttcgatttagcagtgaagtaataaataactgcttcttttttatttttcacaggaattatggctttgtctagtaacgatattaaggttggcactgaacttgaaatcgacggtgctccttggcgagttttaggtaatgtcattggttttggttatgagcagtttttgtgatttttagattggtttctgattttaactttcgtgattggataattgtgtgttgttatagttgaactgtttattgtagtgattatcaggaattcacatttgagaaatggatcatttctcatgtttttcttgtactgttaagaatttcatatgtactagttatcgactctcaactatcaactgtataaattaacttacatttcaatctaataagagagttgattcaagatagttaaatcaagtgaagagccatgattttctgtcatttgggttcaatttcttatagcaatttgctagagtttcttagctcatatggtcctgcagaaacacaagtaaatgaataaagaattgaagtgttgatttgacatttcctaaaagagtctagtttagacatgattcaaattaaagttctgagtactttatcgaaattcttggtgtgtgaagtggtgtgatattccttacaaatgattaacgatttcctatagtaattattaaattaattgatgttagacccgatacttgattacactaatagtagtatgatacattagtgtcctgtaccacttttcttctagattcctgtaagtcatgcattgtgtggtagtttatagcaatttattggcatccatatctgcagtgtgtttaaaacgttgaagtacttctttctgaaaaatctttgcctttttattgatttgtatatttaaaaactattcattgtgttactgaattgaagttaatatttgttgcttattgacatttatagagtttcttcatgtgaaacctggtaagggtgctgcatttgtgaggaccaaaattcgtaatttcataacagggaacactatcgagaaaacttttcgagctggagtttcggtatagtcttttgacctatgaatttatttatcattagtcttgttgctgacacatttgaagtttcttagaatttgcactgctaacatcttctgtatttaatgaaaaaaaaattgcatcacaaacatgtatgaaaggtcaaattaaaacaaaacatattctgttaggtaggtccatgagaaatcgaaaccagatggtatcaagctctaattagaagatacaacatgcatttcccaattttattccatacatctataatagtattacatattattcttgttgatatgtaaatgttaatggtacaatgagatagaacatggtttcctctccttcagcaacatattgtgatttcttggaacttttatcaacactgatatagacaataaagagataaaagaaaataaagggatatccttaaatttaatcattctaaattgctaatgatatccctgataaatatgctcaaattatacaattttgtattactcaattatatgtgtttttattgttccttacatggacttattttcccagattgacgaggcagaagtatttaaggaaaccaaacagttcacctacaaagacggttcacagttcgtcttcatggacctggtatttttttaatcttcatattctaatttcatatattggtcttcggttgcaggagtttttacaagattcttgctgaagcaggaccgatttagtatccaggggctatgcctcaaggaacgcgtcactgtaactgtcaagatttgaatttcaactaacttcattttcatactttataggtgtaattctactcttttgcagatcacatacgaggagattcgcctcaatgatgctgatgtcggggataaaacaaaatggttgaaagaaggaatggactgcaatctcctactttggaagggaaaggtacttgtcaaatcctttccaagtttttctgagcatttgttataatttgattacgtatgattatctttctttaatggcgaattgcgtttgctatatcgttttaggttattggccttgaacttcctgtcacagtgcagttgaaagtagaacaagttgatccaggactcaagggtgacacggctcaaggtaatgttatttcgtttcgttgttaaatttcgaaggacctaatgtcttgtccttgtactgaatttgccatgtgaattttttctttgcaggtggtggaacaaagcctgcaactcttgaaaccggaacaatcgtcaatgtcccgttattcataaatacaggggacacaataatagtcgatacaagaaccggacaatacacgagtcgggcatgagttatagcttgtagattacctaccattagacaattcttttcggccttttgtttaccattaaagagagttctattctatcttcactgtatgagaaatgtacacaaagttttcacttgaaattagtaaaacctcaacctttgttgtaaactacttggctcatatttgagaatagcttaatacatttttgtatctaatcaaagaaagtgaatcaatttatcgtcgtagtaatattacaagaagcaaagaatcaacaacattttcttactgttgcggtttcttgctaggaatcaaaccgcgcttcgttgcagccccgtacacattacaagcaccgaagaaattaccatgtttgtttaacccatcaatcaaaaggttataacttcctctactaggaactatacccccttcattcaacaaaaccaaaacaaacaacgcctcgttcgcctttccctccacacaaagcgcttgaattacaccgttcagtgtgataatctgcggtgaaaatcccattcgaatcatcgtctgtaaacttacactagcctcatcaattttcttccctatacacagagtttgaatcactagatcgtacgtactaggttccaacaaatcgccatcgtttttcatcttctcgaagaattggtaagcatctcgaaacaagtcttcttttcttcccctacaaaatctcctacacaatcctcttaacaaagagttcatcatcttcttctccacattcaatccaatctccaacatttcgttacaaatcctcaaagcagtctggtttttcgccatttcaataagccatgtaacaaagtactgtaactgatataatcaggctgacaatctctctctttcatcatcttcaaaatcttaatcccttccaatggtcttccctctacacaaaacccattaaagagagtattgaaagtgacaacatttggtgataaactcatctccaaagcttcattaagcaattccatagcctcatctgatctaccaactttacaaaaaccacccataacagctgtatatgaatacatatcaactccaacaatggagtctttcttcatcctcattaacatatcaaatgcttcctctactctccccacataacacaaccctttcaacaaacaattatatatttgaacagttggcttaaaaccaatcccacccatcaaatccaaaaccccaaaagctctctgcaacttaccctttttacataatgaattcatcaaaatatttacagcagaaaaatttggaacaaacccattatccaacatataccttagaacactctctgcctcatcaaaatcattattctcacaataacacctaataattacagaaaatgtccaagaatctggctccaaaccatagctagacatttcatcaaacagtttcaaggcaagataaggctcctcagcaacaacaagagctaaaagcagttcattgaactcaaaaacagttcccaagtcaccatttagcttctgaacagtgatgatttggtgtttttccttaaagggtaagcctttgatttcatcaacaagaggttttaggcttaattgggtggtgggtttctcataaaaatcatggctttctttgatgggtatttctgtaatgttgtttttactattaagagcataagaagaagaagaagaagcatggtgatgggttttgttggttttgaatgttttgtagaagcaaattgggttggtcactaaaatagagttgaacacatgaattggaggaggcattagagattagagtaagaaataataatgtactacaagtatttattgggagtagtattgaatttataaatatatttttcaatttatttcatttttatttatgtatttatccacaccattttaatattctatataaaagaaattatataagaagaaaaattactactttacaataaaacattttgaaagaaaaaaaattacactactttatgattatattagcttaccatttgtttatttatttattttttgagtaattaacgtgaaaatttttatatatttaatttttttatattattatactatttacataatgacaccttttaagataatgttatcatcactaaaaaaattggaagtacaattatactcttattgtatataattaattcatgtaatatcataacattcatataatatataacttacatacatttctagttacattagataatatatattatatatataatcatccaaaaataaatatataaatttaaaaacgtagagatctactaaatgttttccaaaacattggatctgccacattaatattattggcatcattattattattattattattattcttactattactattgctatttctttttcttccaaatccaaatccaaaaataggtttaagcaatttcttcataaccttccgaaatccaggccgcccactacggcggccttggctcacctgagataccaaacccgagggtgttggtaagctcttttgataagacgaagcaacaaaagtagtagtattaggaggaggaagttttgtgtggcggtggaggtggcggtggccgagggtggcgggctcggagaggcttcgccctaagatggctttgttgagttgaacttcaaaggagagcctttcgaacttgtcgagtagattgctttgttcatcaccaaattttcttcttacaatttctacttcattattattattattattatgatccattttcactttattcattagctcatcttttttctattaatatatatatgtgtatgtatgcttgttgagtgtggtaatgtatctaaaaaagtgataacacaagtacactttagtttgagtgatgttatatgattatagattccatagggagtacttgttttattatatttagatccccacttaaataacattggaataagtttgatcatgagattgtattgtagcatacaatacttctttttttactttataaaataaataaaattagtagaagaagatgataggataaaatgaaaatgcccttggtattgagagaaaagtgaacaaaggttttattcttagccatccgttagatgatgtgtcaaattaaatgacatgtcactacttaattggttggcataaatttgggatcgaaaaaatgggatagtagatttttgagcactaaaacactcccaagtatggatttacatttctgccatcgggatgggccacgctcctaatgggcaagaattccctgtctaaatggagaatggggtgggaacgagaattattttttatccccaaatattaaacgggatagggatagggatcacactctccgccttgatggggatccgtttagtattttattttatatttataataatattttgcaatttataatttatgtttgtattttttcagtttacgtagtagtatcctttttatgattttaaagttgtgttttgaataataattagtttattaaataataattaatgtgtaatgttttaatttttatgtagtttaatattttttatatatatttaattttttattataaactttattttttattagaggattcttcgccccgtccctgccctcattaggggattccctactgtgtggtcatccttactcttaagacgatcttcaatgaaagatgtaaaaattgtgttatatttggcacaaaaggtagttaatgtttcaataatgcagagaaaaaaatcgagaagttaatgtatgataatgtaaaaatttaaggtaacacgaagaaagtgagatttgataatgtatttaaagaatagaatagagaaact

SEQ ID NO: 301480 - DNA, 4623 bp, Cannabis indica
aaagaggttgtctggcttagaaagttcttcaccagtcttggtgtagtacttggaatgggaaagcctctagtcctactttgtgataacaatggagcaaaagccaacaatggaaaagttctcatacttttatgtgtttaatttattatcgttttagaagttcatatttaggttgttaaatcaacatacttgtgagtagatctaagatcctggtaaaataattccaacaccatgaagcagctctatcctcaaagagtgtacctgtttctaagtatttgagtattggagccatccaggaagttaaatggttgatgacagagacccctagtgtttccatgctcgaagttatcaaatgtgaatggggactactccgtatttttctatttatggatatgttgctaacattgccaacatatcagcgaaagtattcttatgcctgcgaatttgctttacagaataattcttggaatgctgcaacaactctcaagttttacctacataacaagccattttcccctttcatccggtactccccaaacacctagttgaccacaagctatggatcactacagagttcattgttctaagcatcaacttcttttgctacttgtaaaccagcaatcatagccttatgtttagcttagttgttggaggctccgaactcaaaacaaagttcactttgaagctggaggttttgtcgatatattaagatgattttggctccagaacctttctcatttgatgttccttctacatatattttccaaacttctctttcttggattgacgtctcatgatcgttatttacccatgtgcattctacaatgaagtcagctaacacccgacctttaatagagattctaggctcatattgtatgtgaaactaactcaattccattgcccactttaggagtcttcctgacgactctagtttctacaacacttgacagagagggtggtttgttaatacccttattgcatgagcctgaaaggagagtttctttatcataggatatttggactatgcgctcagtagtcttttccttacataatatactggaaattgtacctttctttcttcttgcactaatgtagctcttacggcatgatctgatattgccaagtacaaaagcaatggttctccatcaactggttttggcagtattagagccttcactagatgttcttttagttgctagaaggttgtttcacattttgttgtgcattcaaatttatgatttcctcgaagtacattaaagaatgctatacacttatttgtggatttggagatgaatctgctaagtattgctattcttccagtcaacttttggacatctttgtgcttcctatacaatctaggaatttctctaaagacactccaaaagtgcatttctttgggtttagcttcattttgtactcctggataatcgcaaaggcctcttttagatcttggtaaatactttcaaatgtctttgactttaccagcatgttgtctccacattttttcccaggacattcttgaacatcttgttcaccatttgctggtaagtggctcggtcattcttcaacccaaatggcatgaccttgtagttgtagattccattgttagtttggaaactaatatgctcctaataagccacgtgcatttttatttggctataaccagagtatgcatccattaatgtcaataattgaaatcccaacatagcatcaaccatctgatcaatgcgcaaaagtgggaaattgtctttcagacaagccttgtttagctctgtgaagtctatacacatcctccatgtcctaacatgactttgggaccaaaaccaggttggaaagctatacgggatacagagcttccctaaggaagtcaatgtttgtcaggttgtctgcttttgtgttcactacttttgatctcattgggtctaaaggtctttgctttttccatgctagtttagcattgggatctatgttcagtgcatggcaaataatgtggggactatgagttgtttccttcctggaccatgagaacagttctacttgaaatgctatagcaactcctcacgcttctctgatctcctctaatagttcctatgcttctggtatcattagggaactttaagcatagatgatggatggacgtcacgactttgaagtccatcagaaattgtcttcccagatagcattataagcagtagggcaatcgactatcacaaatgtgctatacttgaaggagtacacaacattgcttccaacaacctccttatttatagtcattgggagttgtatctttcccataaggatcaacgtatctccattgaaaccttgcagttgaatcggacagggtaacctgttggcttttcctagactaatggcatcaaaggctcttgtgaaaatgttttttacagagctttcatagtccacgaggattttggaaactcttttgttggctatttgagcctctattaccagcgggtcattatgaggatagtgcacgtgcatggcgttgtcttctatgaaagtcatggcgtaaattcatcatccttggatgatgggcaggtgactgcacaaaatggtaagatttgccttagtttaactcattatgataccaattctatagattgtgagtgctttcggcaatatggggtccacctaaaatagttgccacatgaccacctaaagctggtaatgcaattccaagagggtaaggagttttgggaatgggggctacagctactacagctgctaaagcattttgagccccctgaagggcttatttggagcctatattctaggaggctttgggtggcctactccatgaggaggatttatggctccctgctatttgagaatgaaaacctatcaatgtgcaactacctgtcttgattagatgactgggattctcacttaattggtcaagtctccgtgtcttaccaacccttctatttcatcctataagtagtcacactcattggtagtgtgaccaatatcaccatgatattaagtctttttgtttgggtctattctgtgttttctacctttgtacattattgaaggcttcatgtagtgtaccatgttacaagtttccttatataaattctcttgagtatctatgagacttgtgtactcagtgtaccatgattcttaggttttacccttcttcaaaagctcactccgatttggaccctttgtactccttttactccttgaattggttatattggactctggaacttctgatttttatttgtttgtccaggagcagcactatatccgatcggtgcagccctaaactcagagaaactaacctgtatagctagtaaaagaagttggcgaagggtaaatggatggagtcatcatttgtgaaggttaggcatttgttacatcagcagaaggtgcgggaagtactctatatgcttgggcataagtgtgttctagatttaagaatccttgggcttctattaagaattcactcaaggtatctgcccttttacgttggagatctctccatagtaaagttccagctgtaagtatttatgttagagccaccattttcatgtcatcaatgactttagtgttggttgtctcattaatcatgcactggatgaacttcttcaaactttcttcttgttgttgcttgacagttgacgttggtgaaggagctaggttccaaatcataatccttggctgctataaactgttttttcaacattaccattaggtctctccaattgtggatcgatccaagagacaacctcttccaccagtcctctacggacttacttaatgttaatgaaaaacttcaacattttgtatcatcattggccttggtgacttggatgatgcgattgtattgtgacaaatgttccctggggtctgtccgtccttcatacaattccatctagggcatcctgaaatgctactgcaatggtgcatcaataattctcttcacacaaggcttcgtatcctcttccttcgagttggatacgaccccaatttgttttgtagaaatctttttagcaatcttcatcaactcttcaactttacgttcaaggcgttgagtcttatcattataggattctcttccgtgaatgcgatcgttgatatggtttgtcaaatcatttccgtgggatcttgctttttcaactttagctctttccttcttggtgtttaatcttcttcggagatcaatagtagaaaggcttcctccaatgtcatccaataccagatggacttcttcaacctactcgtcatgttttggaatcactggcaggaggtgttttcttttgtaatccaacatccaaactccagcatccttcttgtttttcttcgtgactctacctctagaatcagttttgtcatcgttcctttcggcatggtttcctttcctcttctgttgaggttggttagcagctttagacttcttaggctgtttcgtagaattccacagcgatgccttatcccttgtctttgtagatgcctaaagttctagggtcctttagatcagctttctcaggtgcatttgttgctggaggggatagtacattaggagatggttttttcatggcagttatcacagcctacatgttggaattaattttaccaagatcttagatctactcacaagta

SEQ ID NO: 301481 - DNA, 4539 bp, Cannabis indica
ataatttttttttattatttaaataaattatatactcacccacctaatgtagttcatttaaaaataaaatcgtataactaatacaagtaatgtaaaaactcttatttgtttgattccgaagattgataacccaattactgttgtggatttttgtcttattagtctttgtaatgtgttttacaagattattatcaaggctatgactaaccacatgcgtgatgttttgggtcatattatttctgaagagaaaattgtctttctcccttagcatcttatcacggacaatgctcgcattggttttgaatctattaatgctattaaggaaaaaaaaaaaaaaaaagggagggtttttgtgccctcaaattggacatgtttaaagcctatgatcgtgttgagtggtgttttctgaaaacaatttatgttgaagcatggcttccatggtaactgggtaaggaaaattatagatttcatttcttttgtagaatactcggtgttattaaatggtgagtgggctctattattccacaataggtgtcaaggaatgagaaaattgcctctacattattgattttccctgctgcaatattgttgtggtcgcctgctgaaataacagaaacgtgggcttaattgtattcccttttttgtattttatcaattctgttatgccaaatcattatgtaatcattagggagattctctagtcagaatattcttgattccttttcattgtaattgtgacagttgtaattgcctaacagctattgtatttcatcactctgctatataaagaacctctcatgctcactgatatttgagctgagattcattttcatcaatctatatatcttatcttggtatcagagctaaaaaggcctctgccatggaaacacctagaaacgatcctccctcagccacctctgtcgctgcaggtagaggtgcctccaccaacagtgcttcctcatctcagctcccaaactcttttattcagccaaccctaaatcagcccttttccctaaaattggaccgtaacaattacactttgtggaagacaatggtctccaccatagtcagaggtcatagacttcgtggctatctcaatggcaccaaaatgtgtccacccgagttcatcatgattgaagatacccaagaaaccaacccagaatatgagaactggattattagtgaccagttgctcatggggtggctctacagttccatgacagaagggattgccacagaagtcatgggttcaagttttgctgcaaatctgtggagaaacttggaaagcctttatggggcttactcaaaatccaaaatggatgacattcgcaccttgatacaaacaaccaggaaaggttctacgcctatgaatgagtatctcaaacagaaaaagaattggtctgacacactcgcgctagttggagatccttatcccgaagcacacttggttgctaatgtcctcttcggagtcgatgtcgagtacctctccattgtcgttcagatagaagctatacagaacaccacttggcaagagttacaagacattctcttgagttttgatagcaagattgaaagacttcaaagtctcaccattggaggtaataaaatctctggatctactcctcaagccaacatggctgctaaaacaggttcaaatggaaggggtcgtggcaatcaatctcatagcatgggtcttggaaatggtggccgattctctggttcacgtggtaatgctagaaggtttcgtggaaaaggtcgaagctccagttctggatcgagaccaacatgccaggtttgcggcaaatatggtcacaccgcggctgtctgctataatcgttttgacaaaaatttcatgggatccgatccaaacaatcctcaatcttagaacaaatctggacaaaccagcaaccacaatgcctttatcgcaacacctgaagttcttgaaagcgatgcttggtttgccgacagtggtgctagtaaccacatcacctccgactcctccaacatgacccaaaaataagactacggtggtaaggaaactgttgttgttggtaaggcagcaaacttcagatatcacacattggtagtggtaaacttaacactaattctgggaattatttgatgcttaaagatatgcttctagttcctaaaattgctaagaatctcattagtgtttccaagctcaccactaacaataatgtgctgattgagttttattctgacttttgtttggtgaaggacaataacaaggagaacactgctcaaaagggtgcttaaggatggactgtatcagcttgagccaccatgaaagcaatttttcaacccagttttcacaccagtaaagtcgagtcactcttcttctcagtcgacacttttttctatttttaatgtttctgtccaacctagtgtaaatcagtcccagactgataatgtttctatttccaaacttgatgtgtggcataggagattaggccacccgtcgtctagagttttaaatcaagtcttaggacaatctaatgtaagtttttccaagaatgaaatgaaaagtttctatgatgcttgtcaatatggtaaagcacactcccttccatttcaaaactctcataatcgtgccaaagctgtgttggacttgattcacaccaatttatggggaccaacccctgttgcatccaatgttaatcaccattattatatccactttgtcgatgattacagcaggttaacctggctgtatccttaaaagtttaagtctgatgcattggctgcatttatccaattcaaagcccttgtcgaaaatcagttcgacaagaaaattaagtgtctccgatccgactctggaggtgaatataaaccattcactgatcttgtgcaaactcaaggtattgagtttcaacacccttgcccccacacctccgcttaaaatggccgtgccgagcgaaagcatagacatatagtcgaaatgggtttaaccttgttagctcaagcaagtatgcccttaaaatactggtgtgatgcatttcacactgcagtttatctcataaataggctcccaacacccatactccaacacaaatctccatttgaacctctctatgacaagaaacccgactatgccttcctcaaaacctttggcactgcctgttttctgtgtctccatccttatcaatctcataagttccaatttcactttgtgaaatgtgtgaaccttggatatagtgactctcataaaggctacaaatgcctcagcccaaccggtcgtatctacatctctcgagatgttgtttttaatgaattggaatttcctttccaaggtggtttcctcaataactaccaaactcctacacctgtcatcatacacagttcatcatggtcatctttacccatacctcatctcgtttctactcccggttcttcttacctatccacggctgacagtccacttcctcacacccctgcggcaccatctccaagttctcctctcactcactcaccctctacttctccccattcagtttcaggtcatgaaagggggaatgacacctcttctgcacaccagtttgctcacaattttggtgatgaacaccatgtttatcatgacttgccacctcatgaagaacctggtgctgctggtgttgaaactgccccaactattactgttgaacaggttgtaccatcaccctcacatcctatgattacaagaggaaaagcttgtgtttttaaacctcgcacttttctcagccaaagtgagtcaagaaattcaattactatatcggctaatatcatggaagcccttgcacatccatgatggaacaaagccatgaatgtggaatttgtggcactaaaaaacaagagaacatggactcttgtgcctccctcacttgggtacaatttgattgggaacaaatgggtctacaaaattaaaataaatgctgatgggactgttgagagactaaaagcgaggctagtggcaaagggatattatccaaaggccgggaatagactttggagagactttcagcctcgtaattaaagctgccacggttcgaattgttctcaccatagccatatcaaaaggatggggaatttgtcaactcgacataaacaatgccttccttaacgtagaattagaagaagaagtttatatggtccaaccccaaggttttgaagaaaaaggaaaagaagattatgtttgcaagttgcataagtccatctatggtcttaaacaagctccacgggcatggtttgatcgattgaagatgtaacaccctaactatcataggcgtattacgtgatttttaaacatactgtgcagctcgttgctaatcaacgaggtttatgaaaatcatgattaattaaaatttttgctttttaattaaacttataaaatatttatacaaaatactcgggatcctgattacaaaaccatttacaaaagtttactgtctatacaaaatacttgtcgcctagcgactaattacaaaaatagccttgctgtcccgaggatcgtacgctccaggcctaaccgccccgacatgaaca

SEQ ID NO: 301482 - DNA, 3744 bp, Cannabis indica
ttccatatatatatatatttatagtttattgtgtaatatttgttaaggtatatttcaacatttatgttcttcaaattatttattttctttctactatttgccctttgtggacaaattttatgagtctgtacaccatcacttgaaaacttctactataaattaatttcaattacaatacccattcatatttaaccggcctataaacctaaatagaaaatattatggtttgcaccaaattttgcattttccaaacaatacctatggataagaatttgagcaattttgtccttttgccatttatatagaaagttaataacactattctcgtcacatgattaattcttagaagttgaagtcggaggttgatgaagctgctggtacattgcagccatcctactataagcctcaggtgtcatagactgcaacaattgcatggacagttatatatatgtgagatataaaaaaatttactttggtttatggaggaggtgtaattagttttcacaaattaatgtacctgtggttggcatgcaaagaatgaggccaggtgatcaggaatgactggaggcaattgaggctgcaatctgctttgatcagcagcagcggcagaagcagagccatgatcccaggcgttcatgggcatgaatggattgggatgaagtattggattgattccgggaagattaggacgacccattgtgtccatggtcatccccattcccattcccatccctgccaagctattcatcatcgacatttgaagttgttgttgcatagccattggcaacatcatagccgcgggcatgttcattctgttcatcatttgaacttgagcttgtaattgcttcaaataatcgatcacttcatccagcatcgaagctttatcagtctgcagtaatcataataaaattaattaattaaaaatgttaatatttcaacaaataaataattcaatctatatactaaacatcaatcagaatcatacttttcgaactactattttacatatcagaatgtcatgtattactttatagaacccccgctaattttcgtcaaataattttatttttttatagaatattgttaatactaaaagtaaaaaagttgaccattagtaaaactaggctcttcaaatcaaattaatttacaccaaataaaagacttataattgcaactttaatttttctttgacatgaagaagctaacatacacaaaagccttgcacaatcccaaattcaaaaagcactaattctttagttgtagttaaacacgagctatattgttttactcctacatagacaccaagtactctattcgtttccgtttatatatttttaacaaatgcacgatacattatcaagtagccaacacaataataaatttttagacatcacttacatcgataattagagcaatatgcattttttgtattattcttcaatcttattttaagaattggacttacacagttacacatatgtatgtatttccttggatgtagcttattccatcttctaaagcatcaaactaaagtcctatttttacaacttgcgaaataattaagacatatagccataggtagctaggattgtatagtagaagggtactgttgagcttagacagacttgataatgagggcccaatagggtctaccacatgttagggatttaatatgtttatgtggagctgcaggtagctgtctccacacctaacactagtagcctcctcctatcaactttcaactcttaacaaataagggtttgtgtggcctagaatcgttgggtctttgtgccattgccccaagacccttaacaatttgaatgcatttaaaggctttggaccacccccgcttataagttatatatctatatttatatgtatatgtcaatcattgtctcttaagtttgtgaccttttttaacatattccgagctctcataaatatgtggaatcttacatgatccatgtgtcaatctcacccttggatatgctagtttaaactggttatacccacttgtttcttaatataaacaaattattgaagcaaaagtactactacttctactatacacatctatagctatatgtaggcatttattttcaggcaacatgttgtgcttcttattattgttattattacaatttttcataaataaaaataaattttgtaacttgttatattaggaagcttgtggtggtaactatttacttatatagaaatatatatatatctgtacggacgaaagtttcaatggttcaaatataaagaaagtagaaagaaatgataatatatatacatgtataaataaattaagcccacagaaataggaatagaatatccatcgtagtcataccttgctggaattcgggaccagcttctggagtgtcgtcatcctttggttgatcttatctctccttttctgatacaaccagcagcacaaacagaaacaaatttcatttataattacgaaaatgtcaacataaatacataatatgcaaattatatattaaaatctaaaagtcctcatttatcatcacgcaaaaacaatagctaccatagccacaccatttatacaataataaaacatatttacatcaaaaaatatctttaacaactttaaaaatatttttgttataatagaataaaacagataatgagaaaagtatttgttttataatggaacgaaaataattttgtgggaagcaagatagcccacttaaggtaagttttatttgtgccgacaaaatatttgttttatattctaatattaaaaaaaacataacataatagaaaaaaaacaatcacttttaatatgtgtttaatttttttttaatattatatgttttcatttaaataatgattttcattttatttttataacatttttaagtaaggtataatttataaataaaattttatctgatttattatattagtatttttttccttaaaatattatattaatattttttgatctaaatatttaaaataaaatttattttatttttgatagtatatttttgttgaatataaaaagaaagaaaaaaaaataaaagtaagtattaggtagtgttcagtacacgtttttgggtttgaattcaaagtcgagatccaggtcagagtttgtgttttggatctaagtctgaaattccaaaaatctaaagttagaaatcggaagtttcaaaaattttaattaaagaaaaaaaaaattttaaaaatttgtaagtcatttttttttttccaaaattttaattctcaattaaaaaattgaaaaacaaaaacagttttataaatcatgactttagaaaatatttttccatttctaatttaaaaaacaaaaaactaattcaatataaaccaaaagcaccctaaattttttgtaagtgtttagatgaaaataaaactccacatgttatgcccctgtacaaacaacttcctataaaaaaatcaaataaaattaaatacaaccaaatttcggtcattctgattcattacccaaacaatttaataaagtcttagttcccactaacaagcgattttgtgacaactaaggatggaccctaccacatgttataaagctctttgttttgatttatgtagcattaaaacagctcaacaattttttatttatttattatttttttttttgacaaaaaatagcttaacaatttaaaataagattaaaaagggaaaacaactttggttgatgaattcaatcatctaatctgtgattggaaaaataaa

SEQ ID NO: 301483 - DNA, 2201 bp, Cannabis indica
tcccctgtagttaagtttcaaagatgatcttatcattgaatcactactgatattccacatgtaatagaaagaatcattccttgaagttgatgctcattcagttgctgtaattgttgtgatagtgtatgcattttacaggtagctgttgctctttcccatgctgctattctggaagagtctatgaggtctcgtgatcagcttatgtcccagaatgttgctttgaaatcagctcaacaagaagcagagatagcgattcatgctcggaatgatttccttgctgtcatgaacaatgaaatgcggacgccaatgcatgcaattattgcactgtcttcacttcttttagagacagacctaactccagagcaaagggttatgatagagactgtactaaagagtagtaaccttttggcaacacttattaatgatgttctggatctttcgagacttgaagacggtagcctaaagttagatattggaacattgaaccttcatggggtgcttggagaggtaaattttatcaataacacaacacaatgccaaacagaatatatatactctctatgcttcattttattacacttagtgttgagcttttttaccctgtaggttattaatttgatcaaacctattgcttcggtcaaaagattacaactgaatttgattcaatccccggatttgccagtctatgctgttggtgacgaaaagcgtcttatgcaaactattctaaatattgttggtaatgctgttaagttcacaaaggagggttacatttcaattatagcttctgttggaaaaccagaatctttaagagagttgcgaccttctgaattctttcccttgtccagtgatggtcatttcttcttacgaattcaggcatgccaacttattatgatttcttttccttttgttatagttttttaatttctgtctatttatatattatattctatataactagtgtagttttactattcaagatgtgcctaattaactttgtttctctcatatttttgttatccttttatgccatttttaaggacaaattactgatatgagcagatttaaaacaattaaagaaccattttgttaaattgtaataattagtattagcgttttgagatggctctggctactgtaatactaacttgtggttcttgtcccatcaatccatttgcttaacctgctacaggttaaggattctggctgtggtattcaccagcaagataaaccccatttattcaccaagtttgtacagcctcaaagtggatctggtcggactgctaatagtggtgctggccttgggcttgccatttgtaaacggtgactcacatttctatccttaacatattatgctcacttcctaatctatatcatttggaaccatccttggtagttacactatgcatttcaagcttaagttaccatttctattggcttggttgcattttttgagatatgtaaagatagtgaatactatagtactgttgatgcgaagtgtaattatttaactgtaattttttaaatggttgaattaggtcgttaatctcatgggaggtcatatttggatcgatagtgagggagttgacaaagggaccacatcttcgtttattgtaaaacttggcatttgcaataatccaaatgactcatccataaatgttcaaatcggagaagtggcaatcccaatgaacattaaccaatgctcatagccatccacacaacaaagatgcaccatggatggtttaccttgatgtgtgaagatatcattgtacatcatcggttgaactggtggtagcagttgcagaccgggtttattggcaggctgaacataattttggttcattgacaaggcaaggcttaccctctttgattgattagtctaatgttgtatgatcacttagtatgagatagatgtcttaacaatgaaaatttactttatatgaaggaaaatgcgcacatctttccaatttcacctttctctcagtcttattattaataattaaatatttcattgattctttggcaattgccacttgaaacctgaaagttcaagataatccgaaagctaattgatcaattttaagtttgaatcgcaagtattaaaactgaaagtgtacatcaatgaacacagaaatgaaaactcattcccattgagtattgcttgggtccccaagaattgggtaaaataaccttcattatgaaat

SEQ ID NO: 301484 - DNA, 1828 bp, Cannabis indica
ttacaaaccgtaaatttaagtggtttagccgccaatatcccaatatattataatctaaatatatattttatatagctactaattgaaacttttcaaatgatttacatatggttgaaaactagcttcaaattaacttattttaccatatagtagattttaaataatctattttatattttagaccttgtaaattatttttaaaaaatttataatcttaaataactagttgtgttatgaagaaagatttatatataaaaaaaatcacataattatccaattgtttacctcatactattttaaccaattgtttttatgcccaatgttaatatttttaattcaactatgaaattaattatagcacgtacgtacaataataaaaccagacattgtagtattatagtcgttaattaatcaagattagttatgtttactgtcatgtaacaaatgttgttagttgtgttctgttatttttggttcggtattagtgattaatcaagctctataaatactcagctctttaattatattctctttattattaatttcaatcgaacaataaattaaccctttattttttctctctctctgctctcttttgttaactaacatctatccagatgcaatttcatatcgtttcaaaatcaaatagagtctatatatctgttttttgaaataaaagtatgtttatttttataaataagctttttttttgttgataaataaaataagtatataatcggccccggcccaaactttttttttagttaattaattaatctaatcgtagtctttattatgaacttaagcttttttttttcttttataatgaattacattatttattacgtaagttgattgttgaattattatttatcgttttgatgtatatataaattttggaagaagtatctttatgtatgataaaaataggaaagggataaatgtaatgttcataataaaaattttagtcaactagtcaagtgtcatgaaataataaaaaaaagaattaaaagtaattttaccaaaagatcatacgaagattttgcactgataataagaaggtatatatcgtcttatagtatatatagtaatgataaataaatatatgtaaaattttaatccaaattctgctcaggtctcttgcaaataatcatcttgatggtgcaatcccagcttggatttctgatgtagctgcctcgactaatgtgtacgtaaagtattccatccatattattattaacatttcactctttttccacataacttattaggttattaattgagaattgtaggtattttttatttttctcatattattattgatgtaattaaattttaaatttaatataattttaaaaaaataacttttaacaatatcattaactaattataaaacattaccaataaaaaatactaaataacactcctatctaataacaaagatcttattaattagccactttattttctaaacactatccattattctgacgtaaaatgatgtgaaaatatgaatatatatatacacacgtattttagacacgtatttatatcattactcttgaaaatactgtttatataggagtgtgcataaatttgatccaatctaatgagaatagaccgatttaatatgacaactgaccgccaaacattaaatatctaattatgatcgaatcggattaaatgttatttttaaatatctaattggattggatcggatggtggatgaggtgtccgaaaatccaatacatccaatatccaatcgaactaattagtatttttatttagtttgaatgaataattagattttatattgtcatacgtaaaa

SEQ ID NO: 301485 - DNA, 2036 bp, Cannabis indica
tatttttgaaaaaaaaatcatgtgacagtatttttgaaaactatctaatatagccatgtaaggagaggatcgaagaataaagcccaatttgcttatatgatcggcccactactagccgaggcccagaattaaaaagatgccccaatttccttttttatttgggggaagttaaaaaatacaacttttattaatcaattaatcaaatttacctctaattttatatttaattgaaatatacttctttttatatgtattatacctaaaatatcctgacataaaagaatcacatggatagtattttgaagtgacatgggcaaaattggtacaatatttaaaaaaagaggtaaaaatgatagactttaaaaaagagggtaaaaataaaagaagacaatataaaaagggtatagagtgtaattttctccaataattttgcccaaaattattattgagtcattgttttcgaaatattttcatgggtgtgctactttttcttgttcttttattaaacttccttaattacattgagaaatgtatttactaaaatatttacagggttatattatttgggtttatttagtacaccgtattagctcgtattgtattatgttaaattcaattgtatatcatatttttatataatactatgttaaattttagtttatactaaaatatttatatttaagtgctcatacaagttaatatcacatataattttacattgcataaaatacagtttaatataatactatacaatacaatacagtgtagcaaatgaatcctcaaaataataatatatcttcttccttcctaacatgagatctaattgtgtaaaaataaatagtaataactaagtactaaataaaaaatattatgcatcttgataaaagtacatttttgagccacatgacacaacgggatcaagaggtttacaaaattgacaactttgcaaacctctcggcctaactcgcgttgctacgtggctcaagagaatacttaaagaatgatataaaaaaagtaatgagatgtttagttggtgattttggcacacacaattgccaatgtgtcacttttgaaaacaagaaaaagtgacaacatgaaatgacaacggggttagttttagcattaacttgttttcttggttttatggatgtattttttaatataaatatgaatataaagcttgttttcactcttcatttggtgatgattgcattagcttttgtgacactcttgtattcatgccattttgtttcagtttgtcatatgaaagaggttttaggttggctagatctagggctgacactaagtccacacttaaggcccacatattttagggccggcccaaataaaaaaaatattttagtaaatatatatattttgtaataatttttaaaaaatataatttatttttataacaaaagtttaataaatttatttttcttaattcccaaatcaactaagggggctttgcctgtgaatcttctctaccttaaatgcgctagatcttcgaatgggctgagttaacacacttcattgtcaagaccgattttacgagtagacaaaatagattcgtgtctagaactttcaccctaacaattgagcccaaaaaaagttaatttatttctaaatgtacatattagtactagtttaaaataaaagaattctctagtatgttagttctcaaatgtttttgtaacgtctccgcttcaaaaattttctttttgatggactaccgaaaaataagttgtaatttgttgatataggtagtaccaatcaatttatttaagtcatcttcaattacattgtctcatacttacatagtctcggtatcattacacttgaacttcttcaggcgatgtgggattgcacaacttccatagtgtttccccttacgatttacggaattactaactgtcacaatttttattttctcctgatcatggttaaaatcccaacaacctcatataatatataaatatatttattataataaatatagggatatgattttgtcccgtgatgtactttcacggaat

SEQ ID NO: 301486 - DNA, 1052 bp, Cannabis indica
tagagaaatgaaaaaccaaacaatagcaagtaataccacaacaataaactcaaaaaaaaaaaaaaaaaaaaacccaaaaaagtttcactatgctatatgaaactgcagcaaatttgaataactaaaaaaagctgtaagtgaaaaaaataagtaaacctggatctgctggaaggaggcaataaccgtagatggaagcagtgaatgatgcttggatgggctgtaaaacgaaaaggagaaggaaaacaacaatttagatggttgttggatgattgaaatcatcttcaaagacgcggtaaaacagtgaggcgcagtctttagggtggagcggttctcaggccaagaggcctcccaccctttttttcttaatatttatatatataaacattaaaaccaaaacacaattttgtgatgaaatgacattttctgctaccggtgaatcatttctttcttggattcacaagattgagaatcccatttgaccaactatatacaattcaatagcaattattcttagaccataattaacaggttttgaatgaaagaaagtaaacgtgaaagtatccctctttgacatttcatcaaatacatcacaaacagttttaatctatcattcgttgacagcacaactacctcatagaaccataatcccaagaggaaagggaaatattatcatgaataatgtggtcacagaaacaatgatcgaactaaagaacataaaatacaaaacctaaccgcgaaaaaattagaaaaagattcatattggtagaaaaatcctacccctaagaactcgatttagtcattgcgccatttttatatcgatcctagagcccttaaattgcaaatgcaagatatcacacattaacgaggaaatgttgatattgagagaaaaaagcagttggttcatatgaaggagacaataaaatggtacctgaagaagtagccagaggtaatagcaagtgagagtggagtagataacaatggcgtctctgaagagagcacaaaaattggctcaggagtggagagtagagaagaaaagaacagaaaagaaaagt

SEQ ID NO: 301487 - DNA, 2081 bp, Cannabis indica
aaaacaaaaaaaacaaaaaaagacatcactttgtggttgaatatatataatatatttatattgtttaatcgtagagaaatcaaatgtctatgatgtattgtatagttggtaacatgaggatatatacagaaatctattacaattcatgttgtttaataacctggaaaatgtctccggcccttcttgattataatattaatttatcaatataaaatcttctctttcttatttaattatagatggccatatgtagtagatatatagtcatagatttgtttatgtaaatatatgaattttgacttatatcatatatgtatctgcatcaattaataacatgttgagcacatgtatacaacgtcattttcgataaataaataaaccaatatagaatatgatatgaatatttttaggctggagcaaaacatgattaagatctatcactataaaataaaagagaaatgctaaaatttactctagcatcatttagaactatcatattagtattagtgtaatattaagtataagatctcgtgtaatttaattcatcaataattattataaagatctattagtgtacaaaataataccttcaattaaatggtactagacactattagtgtctactaaaataagatgttgaatagatcataaagatctttaaacaaaatgattaccatggtgtcactttccatgacctaaatccaaatcttgtacagagtccattattgctaaaaagtcaattatcttacccctaaacatattttaaaaccattaacaacacataagtgtaatttcattattaaatgttactaaaatattagaaaagatactatacatataaaaactcgtttggaccgagtcaaaagaaacaataaataaataaataaataaatatgtatatgtaataataagaaaccccatttgtcacatactctcttcaaagcacaaaaggaaacccacaaacccaatcgtcgacataactctaatgagcactctctaaccaccgtccgaccccacgtgatggatcgttcaaatccccaagcgccgatgacctcaaattttgaacgaattttttggccacctccgatgtttgcttgacaagtcgtcttcaccactagactcggctcgttaaggaaaacaatctatactatgccattttgtcaagcccgctacttttttcgatgacatttttgtatttttgcccctttctggcaaccttttggcgatatcgtgtactgttttgacaaatggatggcatgggtatgatctacttgtcgaggtgatcgttttgatatatactacacctatttttggcaataattctagtacactaatttttacctccaccgatagttaatgtgcatcgcttaggtgatgtctcaaaactctaaactttgaatatagtcatattatatatcgttagactcaatttttaatgtagaatgcaataattataattatttagccaattgatggtatagatgagagtgatatctaagattggactaaataattggagctcgagacttgagagcttaggatcatctttctgacaaatttaacgacttggaagaggtagggacttagttgattattggacttgattttatgtgttgaataacattagacatattccaattttaatgatttccaaattatttgaaaaattaaaaacctaatctgcatatttttctaaactgccctagggcactaagtgctatatatatttttgtacaaatatttatgcaggttataatttttaggtttattcaaaatacagccattatactgccaaattttctagaaaataaaagggaatatgttcttgtgttattcttattatttgcctacttttggttatacagatgagagtcatgttgatcatgatttttgcatattgttattgtaaagtccttttttggcaagttagttgacaaaatattttttccatttatggtaagattgttgagcattcatattcgtattcttaccttataaattcggtttttagttgcccttttccttgttaggaaagttgcactttcagctgaactttcctttgttgaaaacttcttaaaaga

SEQ ID NO: 301488 - DNA, 1488 bp, Cannabis indica
tggtttgatatttttaaaattaatatttatagttaaatttgtttagtaactattcataggtaataccccttaaaaagtgttatatatatataatgtattgtttgatttaaaaagtgtgtataaatttccaaattatcgataaaatgttttgaggattgtaatgaatttagctttttagagtattatcacttttatatacaagatgatttatctgtatgtttgattagaaaatactataattcaatctcttaaaaggatatatttatgcatttttatctatttcgatatctaggaaaattatttaattttttttatagccgtacatgttatagttatttaaaatattttataaaattttgagacattcgaaaaatttaacacgctaaaaataagattcaaacaaattattgtactcatgactcttttgttttacacacgtataaaatagactgtttaaatattaatttcaatattgtatgaaaacttaagtctaattttcatccgttggaagatatgaattatagatatatagagaagaataaaaaaataatattacctacataattactaataataacacgaacggtcttgagttgaaacagatcataagtaaatatttttttacctttattataaaaataaatggtatttttaaaaattattaaaatatacatattttttaaaaagtatttttttttatttaagtccctaaaataggtagactctagacgcaaatctaattcactcatacttagggccaacctgaataataatacaatataactgtgaatatgataactaactttttttttgcttaacttaatatataaaaatagaaaataaaaactaaaaaggatgacttgttaacaattaatttcctctgaataggggtttggtaattggtatgaggtttaaataaaccaagtgaataattaataaatatctactttaattaataactagggtaacgtataattgaaacatctcatctatgctctactctccaaagctaagttatataacttacaagcaatgagtcaatatctccatctattaatatatttctattataatataaaaaatatacataggataataataaggttatacttttcacccataattttatttttatttacattcatttatttattcatatttttattttattagtggttactttatatccttgataaaagagtatttccaaaatccaatagtattctccatatatttctattatttttattgttgttgtttcaaccatctctttattatagttaatatttaattattcaaataattttttataatttaaaattttcaaatataaattaattttagattttaaatcactttttttgtttgtattttacgaaatttcgcatagagactcttatagcaactaacgaagtaacctaaatcgcaactaaaatccttatagcaatccacatagaaaccaccgaagtaactcaaatcataaattta

SEQ ID NO: 301489 - DNA, 2405 bp, Cannabis indica
tactaaaaaaatgttaaatcttttctatctttattttaagggggtactatttgatagttgacaaagtttagagaacaaagttgctaattgacaaagacatgtcatcatctaaacggaataattagacggaacctaacattaaatttctataaatgtaatagttcatgaaatttttaacaaatcgtatgttttaggggccaaaatcaatattatcaaaaattcaagaggcaaaattataattatttaaaaagaaaaatactaaaaggcactacttataatcataaaaatattagtattagtttaagtatctagtttcatatagtttaatttgttattaaaaaaaatcattattaatattacatctactaagtggtgttcatttagtgggaaactctcgaagggagtgagaaaagttttggtttaaatttacaaatttgaacaaaaaataaatatggaagaaagtacttatagagaagagaattaaaaaatattacttctttctcttcttttcattttcgaaattcactaaatttttctttcaaaaaatattgttccataggtgatttgaatatttttactttttcattttgcaaaaactgatccaccatacagtattttaaattcaagatttcagcttgggaaattgagcatgcaaatgtcttcaacctgaatattgtaaccaaaatatgtaacttagaatctgtgtttctttaacaaaaaaaaaaataaataaataaaaatttgagactcatcttgtagccgtggacggcaacaacacaatagcatattaaacacgcgctcacagtaacaataaacagtggtatttggtggcgacgataagcggtggtagctgtcggtgacaaaagatgcggtatatagaattttaatccgagtgttgctcaattttctaacttatagttacattacattatataattgcacaaaatttagcatatggtaaagtttgtaaaatgaagagattgttgtaatttcaaaaatataaaattataatacattttacataaaaatggtacttcatagaatcagttctttggtttttttcaagtatataattgaatccactttgtctggtttcttttaataaacagagctaagtagttggatatccaagaaaggaacgtgatgatggtggcaataaattgggaaaagaacttgtctgatcaacttctatgtattcagccagtcgaaaatatgtaagacagcagagtaagaatttataccgaaatataaaaccttatataatgaagatcataaacttcatctaactttattgagcaaaacctcatctttgagaatagcaatcaagtttcacagggtctagaccaccaaaagcatttactttccaactctcgagatctttatgatacacataaaaaattaggcaaataatgaccaaatttcattcaatctcaaagctcgttttagataggtaatgacaatagtttattgacatttgagttgaaagccttatcagttagataggtaaaacatcaaataatgaccaaatttcattcaatctcaaggcccttttgatgaagctctgaaattacctcatttctcattctgagccatagtttctgagcttcctgattcagcttcttgtcctgcagctctttgtgaaaattaaaagaatctttatccaactctggaatccctttgggaccaattgctgtgcctatcattccacccttggtaatgaactcatccatggcttccttgtctcccggataagggaactccctcctctcatacaagtgtgccaactcttgctcctccttgggctgaaccttcagtgaccaccaccccaatggcgaagtttcgttgtaccaccaacaagcaccggctaaggcataggtgtacataaggcccttcccaaactgtttccagaacaagtaatgtctttttcctgctcctattttatcaaagtatttgtcgtaatttatggacttgaaccattcccaccctgaacattgatttccaaaaaaaaaaaaacgcttggttaacaaaatttcattcgaaaccattggagacattttatcaaacacatggagggcaatgaccagaacttagacaaaagaaaattacatttgctccacatccatatctaattatagtttgatttctccaataagttgtaagaaaaataattggtttggggaaatttacctgttttgggtggttcgtaacgctttcggaccattttgattttgttggtggaatcggtcgagtctggatcgtttgggttctcctcaccggctacaccttttgggccttttatactataataataataacaataacaatcacataattaatcacatttactgtgttattacaatagaaagacaaaagtgaatgagaatttctgagttgtttattccaat

SEQ ID NO: 301490 - DNA, 1692 bp, Cannabis indica
aaagaaaatgagagttttagatttgacattagggttttatacacctatatttttggttatttcaaaataattgaaataactgaaaacataagcttccacgtgtatctaatatcgtgttaggtagtggagacttgtgtcttctattattttgaattaatcgaagacataagcctccacgtgtatctaatatcgtgctaggatagtggaaacccatgttttcaattattttgaaataactgaagatataggtccgtaatttttttgatctccttacttttctcttcagattatttattttgtactgtaaaaataaaaaatgtacaccgtatttctaataataaaacgagaccgttttacataataaatgcatcaaattaaataagaaatcattggaaaattaatgaatcagaaacaattcaaccattctcattaaagtatgaaacacatatgagtaccgtaatcatgtatattttatagatatcacgcgcgacgtgcttgattctttctttgtcctgcttttatcttattgttatgcaatgcataacacgcgattagactttgtctatcgctagccttctcacaagtttatatcatgcgaggatattaatttcatcggggttcatacccttaaaacttcattcttttaccctttataagtatgagtcctagtgttaatcatctctaagattgtactcattatatagatggaaaaatcaactgataagatatatcaatactaatatatggcagagaattgaggaaagtcacttgaaaatttgtactagtgcacaagtctatgaaaatttggacattttttattatatattctcaaagaatataacaaagatacttttggatgcttaagtgtgtgaaagtacttattaatgaaagagaaatttgtatatatatatgaactcatatatataaatatataaatataagtatagtgctccattaacaaccgcaaataaaattggactgattcactataatatatgtctatttttcattagatgagagaatcaaaataattaatgtaattatacatttaaagtctctaaattaatcttcacattagggtagaaaagccaaaggagagtatatgcacttaactttgattagctacctagtacttttcatgatgaagattttaataaatcaataattaaaagtgtatttataatatatacaaaaattctagaactaataactagtaatatcttaagaggaaagcaatattaaaaaagagttccattatagactttactagaataaactatatatcttatcataaagctaagccatacaattcaaaaagcttaattaatttataataattaatatatatattttttttttaaaaaaaagaaataataagagagtaaacgacaaggtagttaatgtatatgggaaaacaatgattattattaaagaaaaaataattggtctaatggaatgccaaactaaccagtcgaaattttaatttataaataataaagtcataaacaaacaatcatattgaataaatagatggagaaattaattaaaagaagcacatgaaataatacatattcatggtttaattagaagaattaatataatagaataataatattaaattaaataattaatatttttactcttagatggcttgtaaataatagatattgaaatataacttttacagtaaca

SEQ ID NO: 301491 - DNA, 1299 bp, Cannabis indica
ttttttaaaaaaaaaaaaagccatcatcttcttctcctccttttgtttctcttgaccaaacaccaaccaaggaagccaagcttccaactgagtttctgtccagaaaactcttctcctctccaccttaaattaagctaggttgtgaactatcttgaagaagaagtgaggtaaaggttgtagcttcttttcctttgggttaccatgggaaaaccataggttttgagtttaaaattttgtgttgttgcatgttgcaagtttggtaaagttttaattatgcttctaagtgggattaggagtgttttggacgttcatgtttgtagcttagttgttctgttggttgagagagccaagcttgagtttgtcgaactcaaagcttgagctctaatgacacttttcgatttttaatttgattttggtttttgttacttggattatgttctatggatgatatacaactgttctgtaaagttcgagctcatttggttacgtttggaaggtgtggagataagagaaacttagggtccatttctgtagaaaaatgatagatcgatttcgaaaaactggtttaatgtttttccctggcaggggcactttttacggttctccatttttaaaacggtttgccgttttgggtgatgtttgggacctatttttcatattttcacgatatttagaggattctcattgatgtgtgttgtaagccacagtaaatttaataattatttttatttttatattaccaattactttagtataatggtaaatacaggtcgattccacgaagtctattatcaatttattattcaaaaattagtgatatgaattaaaaaatgggagttttgactatgagaataaaataacataacttataaagtaaattaaaggagatgctacgatataaaataaataaaataaatagttaaatgttattctttaccctcaaaaatcattcttaatttctaataatgaatgcaatttctaattcctaatcaaactattaatcatgcagataatattgaagcagttaattatcacaatctccctattgcatgtaatcaaggcgaaacttttaataattaacttttctacctaaggagtaaatccacgaattatgcaatttatttaacttagataaaactttaaattcaatggagatagattaatttaggcaataaattaattaagcatataaattagagtaaataccattttggaccttgtgttttgcaaaagttatcaattggaccatctattttgttaatgacaaaatggaacctgtattttctaaaatagtacaaa

SEQ ID NO: 301492 - DNA, 4316 bp, Cannabis indica
cgtgttgctagacaggtatttgttgcatttccaattatctttacatttgagttggaagccatggatcttaacaccaacaactaaagttagttgatgctcattaatatttttcttcatctccaggtttttaacaactgtatcaaacaagagttagaagggaaaactaggctacttgtcacaaaccagctacactttcttcctcaagttgatagaatcattctagtatcggatggtatggttgcagagcagggaacgtacgaggagttgactaaaaatggaaaattgttccagaaactaatgcataatgcagggaagatgggagaaaatatagaagaaaatatggacaatggaagttcccagaaaagttcgataccggcttctaatgaagaggcaaatgattcttctaaagatgatatcaattcaaagagagggaaattgaagaagtgtgttctgatcaaacaagaggaacgagaaacaggtgttgtcagttggagtgtcttgatgaggtaacatcctgaatcaatctaagaaacataatttgaaaatcgttacataatcttttatgttctgtttaacaccctgaaacatagaacatcaccaaaataaaatttaacaaatttataccaatgttgcaatgtgattttgtttcctatattaccagcctggctaattatgatatcttgcaaatttagtgattcattcttgtcctatgctcaggtacaaaaatgctctaggaggaatgtgggtggtcatctttctcttaatttactatttattgatagaagttcttcgagtttcaagtagcatgtggctaagtttttggacagatcaaagcaaatcaacaagttataaacctggattctacattctcatatatgcacttctttcatttgggcaggtgcgtggcattggcattcttttgtttgcgcttatcatctacctatgcttgccattttcagctgtttaaattgtttggatgttgtctttgaaaaaagaaaaaaagaaaactgagcataagtagaaacaaatttcacaagatttaattgctgactcctctattcggtttaggtgtttgcaacactggcaaattctttttggctaatcatgtctagtcttcatgcggccaaaagattgcacgacactatgttatgtgcaatattgagagctccactggttttcttccacactaatccaactggacggataatcaatagattttcaaaggatctaggtgatgtagatcgaaatgttgcaaatttaatgaatggatttctgggtcaggtgtggcagcttctttcaacttttgtgctgatagggattgtgagcacaatttccctctgggccatcatgccacttatgatcttgttctatatggcctatttgcactatcaggtatgctttattgtttgctgtgatttttccaaatttatacatgagtggcttcctctcaagtttattaaaaaatcctcacttatggttcagtaatagaaatgaagtttttctttcttaaccatactgttggactgaattactcaaaatggatcatttgtttttattatcatatgcacacagagcacagctcgtgaagtaaaacgcatggattccattacaagatctcctgtttatgcacaatttggagaagcactaaatggattgtctactattcgtgcatacaaggcgtatgatcggatggccaacataaatgggaagtctatggacaataatatcagattcactcttgcaaactttagttcaaatcgttggctttccataagattggaaacattaggaggtatcatgatctggttgacagcaagctttgctgttctgcagaatgggagagccaataatcaagaagtatatgcatcaacaatgggtctacttctcagttatactctaaatatcacaaatcttctcagtggcgtactaagacaagcaagtagagctgaaaatagtttgaatgctgtggagcgtgttggcacatatattgatttgccttctgaggctccagaaataattgaaagcaaccgacccccaccagggtggccctcatctggatctattaagtttgagagtgttgttttgcgttataggcctggacttcctccagttttgcatggattatctttcacaatttctccaacggaaaagcggaatagttggaagaactggtgcaggaaaatctagcatgcttaatgtattatttcggatagttgaaatggaaaaaggaagaatcatgattgatggttgtgatatttctaagcttggactaacagatttgcgaaaaattctcagtatcataccacagtctcccatccttttctcaggtatgcaatgtaaagacagattcaatcttgtgtttttattctaaatgtgttgttgtgtttgtatgcctggtatgtagaataggttgaaagcgtgtcattctaatggtaaattcatatttccaggaacggtgagatttaatctagatccattttgcgagcataatgatgctgatctttgggaggcattagagaaagcgcatcttaaggatgttattagaagaaaccctttcggtctggatgcagaggtatacccctacaacatactctaatttataatcatgatgatgatgatgatgctttgatatcctgtgggtttcaaaataattttactttctttttttccacattcaaggcagctgtagtgatatgttgttttgttcatctaataaagatatttccacatggtatcttgaaatcttaatgaatgaaacaacttgtggttgatcacattgtgtgtcattagtttatgaagtatttttgtgctcaataccttaatacaagaaagatgaaagttgttaaatggaatggaagataacctgtattcttcaactcgtgtctaggttcttgaaggaggggagaatttcagtgtagggcaaaggcaattaatgagcctagccagggcagtgctacgaagatcgaagatacttgttcttgatgaagcaacatcagctgttgatgttggcactgatgctcttatccagaaaactattcgcgaaggatttaaatcctgcactatgttgattattgctcacagattaaataccataattgatagtgatcggattcttgttcttgatgctggtcaggtacatacaaacctttgtgttttctcaaactcatcattcttgttcctacttgcaagaaactatgtttgattgtacttcattttctaaatgttaccttccaggttctcgagtatgattccccagaaacactattatcaaacaaagaaagtgcattctctagaatggttcaaagtacagggcctgccaacgctgactacttacgtagcttagtattaggagaaaaaaagaacgtggcaggaagggacttagagcacaagcagttgatcaaccagaggagatggctagcttcgtcccaatggtgtgctgctgctaagtacgcgctaactgtttctctcactgcttcacagaaggatcttcaacaatctgatattgaagataagagcaatatcctcttgaaaacaaaggatgcagttgtaacattgcaaggagttttggaggggaaatatgagcaagatataaatgatgcactaaaccattttgaggttccaagagataattggtggtcatctctttacagaatagttgaaggtacatatctaactatactgcaaccacaatttatgaaactacacataacatttttcttttctaagaaaagcacaataattccaagagtgtcttcctatttatcttgatatcaattctatcttggcttttgtttatgttctcatcaagttcctgttatctcttccttttggactttcataatgaggttgtaaagtttatatgaaaatcttcttagtcattactcaggagaataattatggttttaatccaactctttctcatcaaactttggcctttatgtttcaggtcttgctgcaatgagtaggctctctcaaagtagacttcagcagttcgaaaataattttgaagaaacttccttagaatgggaccaacttgaaatatagggtccatagttaaaatcctaaatggttttggacgggaatcgtgctaggcttaccgcaagcttgacaggatctcattctgcttgtactccaagtaagaaaagtgaacaactgcacataaacacatgtattaagctatggtgtttattaatatgatatgaattaacgcctactatgtaaatatcagtatgattaaatgatgctcgagttagtggctgttgagaatcatgaggttccatcttaaaatcaattggtgatgagtgtagtagtccata

SEQ ID NO: 301493 - DNA, 2869 bp, Cannabis indica
aacataaaatgttatttctgatctttattaacaagtaaatctgattatattgaaatggattttatttagggcacaaaacccaacaggctcttctatcaaaacttttctggatgatcatgaaggaggacgacaagttctaggtaaggatctttaaggataaatactgccataaaagtaatgtgtgggttgtagaaaaaaatggcaatgactcaagatgctagaaaagtctacttgaaccgagaaatgtatgcttggatggagcgggtatcttcatcgttgatggatcgtgtgaaatatggtataggccctagatcccttggaggggtctagatgatatcaaagcgaacttccaatttaaacacaacaaatcactttggaaggttaaggatctatttcaagatgagtctcatatttggaatgaaaggctgattcaggagtgttttgcagaggagatagctgatgatattctaaggatcaagcctccgaatgagagatctgatatcctatttcggaaggtggcaaagtcgggtaagttctcggtcacaagtgcgtattggatatgtcaacaacatcggtttaaagagccaatgaggttatgggaaaaattttgaaagatgagaattcatcctcgtttgaaacttttctgctggaaactcttcattgatatacttcctaccaagagtaagcttggcttcctacataaggagcaccaaatttgcaactactgccaatcgaaaattgaatctacttttcacttgttctatcaatgccatttctctcatgggatttgatttagaagaggcataaggattgattgttttaattgggctaatctgatggattttggatcatggtggagcagtctgaatgatgaagaaactcaagtcttcatcgcctgtgcttgtgaatccctgtggaaatggcacaatgaagggattttcaatggcaaaataagtgatttggatctagtgtacaaggattgtctcttgagaactgatgacttcttgcagaactggttgttttttgatcaaagggttgtgtatgatgcagagatggaggggcctgtttcgatccaagacaagggtccctggtgctgtaaagtcgacgcatctgttgtgggggaagaggctggttttgctgttgtccacactcatggtcaggcaatcaaggattcctaggtttctgtggggttttctatagtctatggggtacttgaaggggaacttcagggcattgcattggcgctgcatttggctttggagaataaggcgtcaaatgtccaaattgaaatggattctttggcagctgctactacttttgcggctatgactttaccttttggttggtgcacttttcccttgttttcgtcttgtctgaacctttctatgtcttttaacaaagttgttgtgtcttatgtatgtacctcgatctgagaatgtcttaactgataggctagctcgatgggctagggagtcaaaagttgaggcttctggtttgttaagggatgtggccccctgctgtggctactagtgttttttctctttaataaaagtctctaattataaaaaaaaatagttttgttatatttttacatcaatttttactattgtactccaatgcataattataaatattaacgtaaaatttaatgtcatttaatactcacttaataatttattaaaaaaatattaaataataatacaaagacaaatataaaatttaatgataataataataataatacaagtcatgcaaatgagtatgttaactaaaattgataataaaaaattaaaaatattataatgctaaatataacagtataaaattttctgtgatacaaattttgaataatgctataatgtgatttaaatttgaattattttctgttatgtgagatatttatattataatttggaacactattaaaataatttttttcacaaaaaaaaaaaaaaactaatattttacattcacatcctctaatttaacatatttcactctaagatttctctcattatataacttgttgatattccaggtgaaattttaatttcacaaaatcgtattttgtagcgtgtttgtgaactttacgacagatatcaattaaaatataaatagttgttacatatatatagtgacaatcgtacaataataataatataaaagttattactcttgtcgacgtttcttatttatttattttgattttaaaattcgtctaatttctactaaagttagtcctatattgctaatgtgtagaaataaattgtgatatataagataaatagactattgtatattataaattttgatttagtagtggaacaaaatctttggtccgcaacatatctaagaaatatctatataaagttatgacactatggattatggtgtgacaatctattgctagaaagaccttcaaaaaaaaacaaccagaaatgtacggacagccaatatctcaaaggccctacagaggatttccttttgttttcttttttgtaattttttgataatgtaaattttcttgtgagttgtgccaccgtcagaaaccagagatttgtaaccgtacattgtactttagagaaaaggaaaaaataaattaactccatggatcctttagtacttggttgtcggtatttttatattagaagaactacaaaatcaatgtaacccttcaaattaccacgcctctatcggttaccggtggtggccgtactcagtactaatagcatatgcagggcttataccatctagaagaagtagaccaaatttagtgttatactattattaaatttaatgttaaaaattattgaaataattatattgggtactactttttataaaaaaaattatattttacgtttaaaga

SEQ ID NO: 301494 - DNA, 2599 bp, Cannabis indica
tttgtgacagaagatttgacttttaaagcgtttcttttaacttatagaattaaaatcatattttgagagtgtttgtaaaagaataaggagtatattatagttttagtaaataacttactaattttaaaaaaaaaatattgtgccgaaaatatatgtttaacaagcacatattcttaatatttttatacgtgtaaaatatattgtttaaatgttaatttcaatatcgtaaattattcaacaattaaaaattaaaaacttggtgagatagtttgttacaagtagaatgtaaattatatcaaaaactttcatctatagcttctcctaacataatttttccacatgccctcccaagaaaaaatagacatttatacaaggggcaaaagttaagccacttcttaaaagcttcctttccatcaaaattaaaggctttctactttttctattattttgttcaaaagaaagaaaactcttaaaacaagtaccacaattatagcattaccccacatagccatgtgattatacctttcataaagcagatatttgaacttaattggcaaaaaaaaaaagtaatccaatcatggataccaaagtaaatagcaatatatcaaatcatcaaactttcttcttttttttctacccaaactgattataaacaaaaacatttgtctcatgaatgagaaaacacaggtctctttgacaatggaagccatgtaaaaccatacataatattatggcatatacatattatgcctttgggtgaagttatgaaatttcaattaagcctttgcaacagcatcacttgctgttgctgttgttgcttctggttctggtgatggtttcagaatgatttcaacattgtcatggactccttgcagcaacaactcaccatcataggtcaagaattttcgcctctttgctgctcgtaatgtcccgaccaacgcttcaaaaatattggcacacttgtcatcatgaaacagcacaccaaatgtcaccttgaagaaacaattcaaacttgtaaatcagccaccattgatactaagcagcacactatatttgttcaaattagatgaacaaacattgttcgagtagtgtatttcattagaagtaaaatttggcccaacataatgcaaaatatgtcaaattgaactttttttatttaagcgtttatatattacaagatataatttggaactcgaacccaggacctccaactcacccgcaccctctcatggtcacttgagctaacctcaaatggttatgttagtaatgcagaaagattgagtcatatatttttcttttttggtaaatgcaggtggaggaatatgatgaagaatttgtatggttgagtcaaattttcatcaaaagttgacttgggccatatatagatcaaaaatggagtttgattgatactatgatcatctaatgaaactataagataaagcattggcacacattaataaaaaagataaaaattgtagaattttgcaaagtgggttttgttttttcaaactcaaaccttaaagttcccatctaaaagaaaatcttagacagcattttcctaagtctttcccctctctactaagcagaaattcaagtcttaaacttgagcattccaatcatgattgaatggattctatctaggtcagtcatgtgatttttttcatcaaatcaacaaagtaaagcatcaaatttgcatcactatactctaaattgaaacgaatttggtaaattgggaattggcaaaaaagaaaaatgagatctcagatccatccagattaaatcacaaggaaccaaaccaatattcatagattcaacaacaacaagaacaagaaggaaaaaacaaaggttttgtcaattgttttaccttgtaagacccatcaggctggagctttccaagccttttgatctcaactctgagtcgctcaacctcttcttccacgttcatggcgggtttttcctttcttcttcttcactttcttatgggagagaaacaaataaccgcacacagctctccccctatgttaccttctcttatataattataatatagatttctttttaatgggtctaatcatttgatatctttatatcttatctaaatgtgtttttaataacaacatggtggtcttcaaccttgtttataagcgacattttataattagttagcgatattataagaatcatcacttagttacaccataatataacaccgatgatgctgctagatacgagtgatatcttttaacaattctcttttaataatcctctaaagtgtcttatattttaaaattataataatttgtaggataaataactaagtttaatttttgatagtaataatacttagattatttttagaatttatgttggtagctggccggtaattactaagttaacattcacatgttattttcttattgatatatttaaataaatttttaaataaaaaataaaaatttaatgacttgaattaatcaagatttgtcttgtgactattaactttatacttaacatttaggtacttaaagtttttgttgcgatatttagcacacgcaagtgtacgtctcgtttcaagtagtagactcactaggagtgaggt

SEQ ID NO: 301495 - DNA, 714 bp, Cannabis indica
atctacacttaatgtgaatcatgtactatgagcaaaataatacaaattggattagatgaacaccctcctccaaaaacacataaaaaataatcggcagcttcacccttcacgaatctttgctacaataataaaatgcatattgaaaggccatacaaaaataatatgatattcacagaagtaccgaaattagtttcgaacacaataccaatattaaaaaacattaagtgaaacaaacactaaaaaaataatgaagctttgtatattgttaatagcttaaataaatttattacatatcatatcatattgtgagatgatgaattgttgttttgaattgaaaaaaaaaggacaagattctgagtgtataagcttggagattcagttggtgattgaattaaggtaccagtagatagtgttctatggtgatgatgtgttttcacatcaaaaagttactaactcatcattcttattcttctactttgaatttcaatagcttgttggaattgagcttgttcttctaatttctttctccataaacatgtcttcactctggagaattaacacacatgggcctaaaatacataatcataatttcttaaattataatcactataaaattaaacatacttttttagtgttatcttttactaacctagttaaagatcgaaagggtctttagaatcaagtccagttggagtactacatagtgaaatattt

SEQ ID NO: 301496 - DNA, 2689 bp, Cannabis indica
gaaaataaattgtcatatataagatgaatggagtactcctcccattgccaattggttttgagatggaacctcattcatcttatcccaaattctaacactacttgctggatgtgtttggttgttataattagtgtcttgacaacattgcagtagaaggcctgtgttagatatgtcgctcactttttttttattctccttattgcaaattagctctatgacacctttttttttcatttgcttaatggttttgtctggaaacaggtgagtggcagcctcttgcctgcatctgtcatctctgtatattgtgcttatgtttgctacacggggctttccagtgaacctcatggctatgcgtgcaatggtctgaacaaatccaaagcagtaacggcaagtacacttattcttgggatgctcacaactgttctctcagttttatattctgcagttcgtgcgggatcttcaacaacatttttatcacctccgtcttctcccaagtcaggtactcaaaactaatttagatgttacttgtaaacattatcaactgggttcattactcaaaattattattctcaaaatttcatggcaatttgatcatgtcccacaatttcaaataccgtcttgtaaactgattcctgtgaatctagtagcttcacattgctcagttattaaacatgacattgtccactaattatgaagtaccgttgcgtaggtgccaagaaaccttttcttgaaggtgaagatgttgaagaaggaaaagaaaagaaggaaaaagaagcacggcctgttagttattcctatacattttttcacctgatatttgctctggctagcatgtatgctgcaatgcttctttcagggtggaccaacacatctgagagctcagacctcatagatgttggctggacaacagtttgggttcgaatctgtacagagtgggttactgccggactctatgtatggtctctcattgctcctttactcttgcctgatcgcgaattctattaggttgttcataacctatcttgcactcactttctctgaatatatatacaattggtggactgtgctctgatgtgttgaatatgttagtaccccttttttttccttgggtttctggttctgttattgttgtcatgaattgtctttttactcagcttagttaggcttggtatgtatgtatgtaactatatatgtatgtatactaatatattacagtatattatttataattataatattattactgcagtataattcatttatgtgtacctcttactcttattgtagttaaagcaccaattaatctaaaattagtccatttccaagttttattttaaaattgaagctctcattatataaagtatgattgattacttctcttcttcttccaaatgtttattaatcattgctactatttgtttggagcaatgtatgggacctgaaaccatgaacaatttattatggtagcttaggcataaggattaaggactacatacatacacaatcattacttttcatacctaaattggttcatcttgtttgtgacaactcattaccaatatcaggcaaattttagttgattagtaagtatcaagctttttcgttttcctttttcttatttaaaactagtggattagatttgatttgatagcacataatcagtgtaaacaaatcttgattgaattttgggtcccaaagattatgccccactatcttgtgttgcacatgaggctgctctatttaatatttatttctccactaattttctttttcttctcgaaactacatttcataaatgcttaccacttcttaactagccaaaattaagtaaagaatccgaatagctaggtggaagggtagaattttccaacaagttaaaatttaaaggcttgtttagcatctcctagtctattatatatcttcaaattttgtgaggaatacaaatatatactagagattatatatttatatactacaaatttatatattatctgtatacaatctaattgatgtgtttaatatataggtttttatatatatatatatatttttacagttttacaaaattaaatttttaacactctttctctttcttacaaataaataaataaataatagcactattcttatatctttatctcttttacatgattaataaaagtagtattttttagatattttgcagtttattcggagttcatttatgaatgatttgcatattttaacttgatgtcttgttactttttttatggatttatacctgttttttgttattttataattattttatattattgtttaagagttttatagttattttatagttttttttgttatttttatgtgtttatttttgtacagttgtgctttagttaatgtatattttgtatggtgtatattctgagtttattccacataagtttttttttgttgtatatatatacatttgttttgttatttttatgttatttttttagttgtttttaagtgatttttagaatatttttttgttcaacagttatttttaaattatttttttattcatgtgtattttttatagtgtatatttttagtttttttctgacaattttttctgttggtgtatgtgtgttgctttgtagtttagattcttatatttagtttattttatttacacattttattaaaatacaataataagatttttttt

SEQ ID NO: 301497 - DNA, 2265 bp, Cannabis indica
ttttatttaagtcaggtctatataggattcgggttcaagttagaggtcgggctcaacgataggaccgtggagggggatttggctctggatctcgtcggagtctaaaatattgattaagaaaaaaaaaattgtttataaaaatattgaaagtaattttttctttttgtttttaaaattttgattctcaattaaaaaattgaaaagtgaaaacagttttatagaacatgtttttgaaaaatattttcacttttccaattttaaaaacagaaaattgattaaaaaagtgttaccaaacgtcactttagtatttgagaaagtaggtaattagttgtttttattaatatttttattttttttttttaaaaaaaaaagtaaaactttaattttattgttcacagatctactatggtatcaattttttctctctgtgaaccttcgactatttttttattccgtcgtcgatctccatggctcgaactcgaagtggtcttcctcctcgggtaagaccagtggcgactcccactgctctcatgaatcgacgaactgctcaacttgccactcctcaagtttctcttattgttcaagatcatgtaatttttggctcgtctgatcgttactattgttgtttctgttgctctagttcccattgctttgattccttagacagtgtcgacttcatcttttgacgctgccatcggaggcttcttcactattgttgacgataagatttcatcaactacattgtggctagaaatcttaagtaatgattgatgaaatagtaaagtgatgttaatgtaaaaatgtaagagagagtgactaagagagaaaatatgaaatgctttgtatttagaaaatggtctctccaagttataaggcccttctcaaatgaaagtgtgagttatttataaggggctctaatgcccttcattacaaactagggtactcttaagtgctcccctaaggggaccatgtagtaggctacaaagtctaggggacaaggatcaggatagtggtggtcggatgccagattttacttacacttgggataacttgtaagtccactactttgtttcagcttttacaggtgttgcgatcgtgtttctggctttcatccttcccttagctagccttccttatgctttgcatattaaggaggatcaaagctccttttgtgcttatgtcatgagaatggcctccttcacgtttttggtctcgagtcttcttcttttggtagattttttttgagtgacgagagtcgtatgttaagtatttaggattttttgtagggggtgagtggcctaatcctttgtttatgttggtgagaagcaagcctcatgaaggtgtggtgcaaggtgatggatgttagggttatacgccttaaataaaatctatttcaatataatcttatttactaattaataaatgatcaaaaattattttataatgcttagttcacatgaatactttcatgattatatatttaacatataaattctattatatctcaaacatatagttactcgtaattatagcgttgtctacatagtaaaaaataatcataattatatgtttcaaattatttagtctcatgatttattagtgcatttgatttacgctgacatgataatcaacgacgtagtttacttatacttggacaagtagaatgttattttcaggacattatagtaaagtaaacttgtatcgaatgtattagctatacatcagactggaccgatgttaacaatgtaaaagatatcataaacttacatttatatcattgtgtaaaatagtttgtttggcaatcatccacatgggactcggcctactcggcctgggctgacccctaatgggacacttggtctggtgtaatatttacgggacgaacacttgtgcttcttatattgatatcatttgggacttcttagttttgatcacgtgtgtacttctctacttgtagttattgtatggagattgacccatcaacacgaacgaattttgagtatgcaagacgaaccttaaaaccctaaaaaattagccatcacccatgtccaagtggagacaaagcattgtatgaaagttgtacgagaacgagagccaactccctcttgttgagagaagactcgatctaggccaacccatacttggtttgggtcgtgccctaggggcagggacggagggacttaagccattgtgtaggcttaagccctcactcaattttataatatataaaaaacttttatgttacatatatgtatttaaattttt

SEQ ID NO: 301498 - DNA, 3439 bp, Cannabis indica
acatattttgatcagtactaatacggtattgtgttggatgataatactattaaacatcattggagctaattctttttttagaacatgaaaataagactggccagaatacagatagccctccactagtactgacaccgatgtcaaaaagccaaaatcaactcctttttttattggttgagaaaaaaatcaccaaagttcatggaaaattaattccagttgaaagtaacgccaagaacatgtctccatcgatgagagagagaaagaaagatctggaagacatattaaatatataattgatgagaaaattatgatgtatgttatagaacagaaaaatattggtcattgcaataaaggctattgtaaaagaaaaaaagaactaagtgtccgcaaacgtaggtaatttcaacttgcttttatactttgtgccatgcatatatattatacacacattaatgtatatgacaccccacatgaaatctctaatttaatgttgtgttgtgttgtcttgttcttgtttctttgacttcattcattgtttttggaacaatgatcaaaaccccatctgtcattatgaaatttacaatttaatatgtgaataattgaaacttgggattcttcttttgaattccaacataatatagatggaccagacctatatattaatatgtagtaatcatgaaattatttaagcaattaaacaaatcttaaaatctcacttattactttattacaaataattaaaaaaatgaatatatagattcctcttttctacccttcaatctatcgatatctgttgttgttgatgatgtattacatcctctaaataaaacttccaataattcatattgaatatttggaattattttgtgttgtgaaaagataaaaacgtacttgacttttccttggaaagtttgataaggaaaaacatgaaaaggagacataatagtccaaaaaaattgaaaattatttccaacaacaacaaaaaaaaatgaacagttaaaaggaaaagagagatggaatggggcttaattgggattgatatgcacccactggccagtactccactactcacgacgaccacaacaaactatgctttttaaattattgcttttgcttctcttgtaattgtatttatttgtaacctcttctttttcttaaaaaaaaaatcttgaatttttctcagaaaatatacattaacattatttccatttcttgatattgacatgtcatttacatagtgtaccattatttctcaacacatctaaatctattgcgatatgcatgtatgatattgtttcctccattattatttaaggcttctttttcttttttggttcctagctagtaaaattaattaattacatatgcacttctaaaattttaatttatagctagatattgacatttgatgtagtaatattatacttataatttgacaaaactgtcatgttgatgaaatatcaaaatgataaatcaattttagaaacagtatttaaatctccaaatgaatattgtatttcaaagtagaagtctctattattatgatattattgcaaataaatctgccaatagattgttttttgaacaaccagataattttaattttttacaaaaaaatctcaaacatagaaattgttttagaccgattgttgaagtgtgaagctgtcttgaagagctattggtgctctaaattgatatgaagggaattcacatctcggatgttgaagggattcaaagagtgagcttgaggggatcttgagctgtgaatcaatggagttaattcaaaggtttcaagggatttgaaactagggttcttaaaatggatactcaagattaattttaggataaattgtaaatcctatcaatttgtaatattggtttatttttattttgaggtggataaaatgaatgtaaaaacaactttctttcatcacattactacgaaacccctccttttaagtccatcaaaattggacttaataagtcattctaatctattttgtgttggacataatatccaggtaacataaaaaaagtatttttcaagtccaatattattggactagaaaaatgtttctagtccaacaaaattggacgtgaaagtgggactaatgtttaaagtccacctttgttggacttgaaatgcaataatctctatttttttttaaaaaaataaataatatttaatatttaataatttccataattattttccaattgtatataaattatataaaataattatacataaatcaataaatatataaaatattttcaattattaccattctttaaccttattattaaaaaataataacaattacataaaaaaatatatacataatacagaaatttaaattaaaaataaattaaagattacataaatacaaacattggacaataaattaaattactcaaaatacaaaaataataaacaaaaaaccttacacaaattactttataacaaaataaaccactgataaaaactacaaaccaccacaacaacaagaaccaaacaataaaacactgccagaccaaaaaataatgaaccacaacaacagaactttgaacaactgccaacagcgaccttggcgacgcaaggagagagagacaagcaggacaaatgggaggctgagagatcgactatggagatggtggtggtctcggatggacctaggtggcgctggtgacggaatgatagatagagagtcagagattgggcgaaacatagggacagatggacggagagacggacggacggagagatgtcaaaaagagatcgatgggatgacagagagagtgatgccggagagagcacctagttttttactccggcgccggcgccgcacctacagaagaaagagagaatgtgaaaagactcggtttgaccgagtcaaatgtacttttatatatataaaataataataaaataatatatatatgtatagtaaaaaaaaaaaataaataaaattattttgaatatatacagagcatctcgtccccctcactctctatctatatttctcattttctctctctttaaaataccaaaaataaaaacccataaacctccataaccaccacactccggcgacccacctccggccaccgcccgacccaacgcgccggacaaatcgaaagcccaagtgccggcgacctcacccccaagcggcgccgctcctctcgccgccgttgactcgggatcgcaagtcaaagtttgggatttcaaactttgaacggattttccggtcacctccggcgtccgtttgacgaatcgtcttcaccactaaactcagctcgtcgaggagaacaacctacactaaaccatttttcccggttcacaactttttccggtgacatttttgtagctccgcccctttccggcgactttccggtgacctcgtgtaccgttttgacaaacggttggcatgagtgtgat

SEQ ID NO: 301499 - DNA, 2020 bp, Cannabis indica
tcatattatcccctcatatttattttaacaacagacactcattgaaagttgtgatcagccaatcatgccttccttattcttaggataaggggctagcaattgctagatactgaaagaaatgaaccattcctgtttggttcaaatgtgttagtgtaactaaaccatgtaaatcatatgataatggtacactcagaataagtgtttctgctttaaaaaaaaagagaataagcgtttctaaaaggcaagctaaaaagtagagtaaatgaaacaaaacttaatcttacggagctagatattcgcaaaaagaagacattgcagcaacaacttcagcatagttttcagaggtagctggggctgtcacttcaaccaattgtatcccaggagttacaggcacagcctcatcagtagcgtgtagctttagcattttaccaactgatgaaacagtgactgcaattttagcacctctttggaaatggaaggcaaatcccactttcagtagctcatgatctaacttgtagccaagtgcataaaataaacgaagcacgttcttgcttgctttgctttccaccacggtcctgactagaattgaaatctgatcagcacctgcacccctcattggaccccctacatgcctaacagtcctaaagatttgaattttatagtgagctcatattcaagaagatataaatttgggaagagatttcagaattaccatgttggttcggcctgttcaaggtcacatagaagtcgaacctctgaagatacaatccctacaaaataggatttgatctcctagtcagcaagagatctcccgtttggatggtaaaataccaaaacaacatgtaagtttcagtatcatacatagtatttagtatatctcaaaaacaaatcgacatctgagtcatgcaattatcctaccaaggtttgggccatttttaaggcatatctcatggatttttagccgttccctttgaacaccacaaagaccttgaagaagaatctcaagagcctcaacatgctgccacatggaaaaaaaacaggagagatcacttgttgaaggattttttttcttccaaaaaggagatacagacagcaatctaaactttaaaatatgcacacacaaaccatgagtgttgaatactgcatgaatatatgatagtagaaaagaattatgggcacttcaaaacatcttaagcaattacaatggaactcttcaattcattacagtatgccaattatgcgaaagcagaaccaattgcaagaaatgcctgattgagttaagccaaaaaattgagtaagttggtgttccaattaatgatgggtaaagaggtggaatactgctatagattttgacatcaaaatagtgcagtagagacttcatcataaatgataaaactactctaaaagtacaaaaacatgtatagagatcttctccatttctttcctccttagagtaatcacctacaatttaacccatcaaacattcactcttctgttttcttttactataaatttaagcgttaagccaaaataattgaaacttcattatttatcgctgaacaaagaatagatcaacattcccaaagattagcctccaaactttaaatcaattttgtcttaattcaagcaaaattaatggtaagaaagcattaagacgggagagaaggtgttacctgtgtctctataattccccgaactacgcattccatttttgttgctttcgttctcaatttcctaccaaagaaacacctttagaaaatatatttctgcaaagcaacccaaatagtattagtgcatcggagaagaaagaagggtactcccataccagagagagagcgtcgcaaggggagggttccgtccggactccggatgattgagagaggtagatgggcgtgctttgcacgtgatcatacgcaattattatctataaatattgcaatgattatcataaaatgaacataagtgctcgtttaggctccggaatgattattatatatttagatgtccataaaagttaata

SEQ ID NO: 301500 - DNA, 6346 bp, Cannabis indica
aaaaaaaggtaaaaataaataaactttaaaaaagaggataaaaataaaagagaacaatataaacctcttttatttaactaggctttgggctttactattgtacatttcggtctttgtttccaaatttgaattatttcgtatattgttggatggctagctagcttattaattatgtcttctgaaattgtttaaaatttaaatatttggagtgagtgacacgaaagtgattatgagggtgtttttccacattatggagtctctattatatatatctttggtggttaaaaaagttattaatatgttataatgaatgggagactaataagactaactactaattggattggttcattcaatttcaacgtgacaagtacttggaaatttctgagtaccccttcttcatttccactaacacaccaacttttaactaccttttttcttttcctttttaatatttctatttttaataaactaataaaaatgtctatttatttatttatttagactatggtgcacatgtttcacacactcacatgtaatattaactacatacatataagttatgacccagtttaattatttacatggcattgttaatttaatttcacactatttttctttggtacatatatatatatacttttgtcaccctaaattattgtattacgaattttctaattaaaaaattgtaatggatgtagaagttttgttgtaactatataatacaaataatcaataagaaaaataatatgtatacactcataattcattaattaattactgattcataaatataaattggtttctgcaaaatatataatatattaattgcatgtgaatgagtgtgactatatacagctaattaagttatttataataatatccatttggctatataatttgatcgactgctgagattatattgatcgatctggttccacatatgcatgataaaataattaatagataataacaaaatcatatatatatattaattagtaaaggctaaatgagtgtaaactataaagtagtaaaggaaaagatattcagtgatacttatcctttcatcatgaatgaaataaatatatatatttttttatattttgtttgaattattatagagacttaatttgatcaattctcttgacttattctgaaaactgtacaattaatatataatttaatacaattattaattattattatatatacataagatctggatatatatggatgttatattaattaatgttgaaagtagtagcctagctagccatgtctgagatagtgaatgaattttgggaaaagtatcttaatcaacttcatcttcatcctctcaggaccaaggtacgtatatatagctactatatataatactatatatttttttctttaatttaattaattaataagttgattaatttcaggccatcacagcaggggttttagttggatgcagtgatgtaatagctcagaagatctctgggatcaaaaagcttcaactaagaagattatttcttatgatggtacgtataataattaagtcattaactatttccttttttcttttaattaattaataatatatataaattaactaataagccttaatgttttgataattgggtataagattaatatatgtatgcagttgtatggttttgcatactcaggaccatttgggcattttctgcacaaattaatggacaaaatattcaagggaaagaagggaaatgatactgttctgaagaaggtaattaattaataattatacatatattaaatggttggttgttttaatattaatattaataatatatataattattaattaattaggtgttgttggaacaatgcacatcatctccctggaacaacttatttttcatgatctattatggcttcctcgttgaaggtacgtaattcatttattatttcatcaattactacttttcatattaactattttatgcatatatctaattaatcaattatgtctcatttaatattattctcaaataaattacttcttttttctgaatataatatatatattcttaacatttaaaataactacgtacgcacaccactccactcatttcatgtgaattagaaaacaaaattaagcttaattataattttaattaacccaaaaacagagaaaatgatgaaattatattttgaagtttggtttaaagtgtgcattattaatttatagaaaatagtatatagatgtaattagttaataattgtgactgatcttcccattaaaatatatacaggaagagcatggggtttagtgagaagtaaggttagaaaggattatccttctgttcagttgactgcctggaaggtatatatatatatatatatatatattaattccctaacaattaattataaaaatgatttagagtttatattaatatttgtaataatttgattgaatgaattaattaattgcagttttggccaatagttgggtgggtgaattatcagtacacgcctttgcaacttcgtgttctctttcacagcttcgttgcctcctgctggtaataataataatatataaccataattaattaattaattacttaattaatatttcttaattagcattaatgtattatttaattataaacataacagggccatctttctaaatctcaaggcaagatcggtagttgcagcagtgaagaaggcctagcttgctacgtactactaataataataataattatatatatgatgattaataagctacctaggggtaattcattatatatgtttattattgtaataatgtatacttacaactttcctttttcttctcttttatctccatctatctagatctctacctatactaattaagtacttaatgtggaatattgtattgtatcatcaaaactgttggaatggtaaatttcataacatcaaacctcaaaaccatgccacagagcgacaagacgaaaacgctcaaaactatatcataaagacaatactaacacactcaaatcaagtcacaaagacaagactaatcacagtaacaaaaatcgaattacagtaataaaataccaagccgcacctaaacccaaaattattaacctctagagagagtagagtagtttcataacatcaaacttaatttaattaaaactacgttgttaaattacaaaaggcaataattaaaataactaacataacggtcatgactcatcagttcatatctaaaagaaaaggttaaaacgccgtctgtgggaatcgaacccacgaccacgtggttaaaagccacgcgctctaccggctgagctaagacggcttcttgctatctacttcattatcaaaatattaaaccattagttaaatttcagttggaggagaccattgaccacagcacaacaaacacactaccatccatccaaaatcttctccattcttcctcacaccatccatggctgcagcatcttctcttccccactactctctcgctctttacccttctctgtctcactcttctcttgttccaaccacacctcgcttccctatacgaagtcgtttcttgggtcatggacatcgcaggagaaccctttctttgaagtcatcatcagctggggatggtgtctctgcagtggtagagcctccaccaccgcccccacctccaccagagcctaaaaatgagctcatacccaacttaaaactcaagttattggtcagttgcttttacccattttacaaatttcagattttttttttggactctgagcttataatattccaatttgtgatttggttttggaaattggaatggaaagctttcaactttaacacccaaattgaaattagattagaattctgaaatgggatcgttccaattttgtatatatacagagtggtgtgagtggagtaaatagagggcttgcagcaagtgaggatgatcttggtaaggcagaagaggctgcaagagagcttgaagcagctggaggaacagtagatttgtctaaagatattgataaattgcaaggaagatggaaactcatatacagcagtgccttttcatctaagactcttggtgggagtcgtcctggtcctcccactggaagattactcccaataactcttggccaggtaataaatctatggctagttaacacttttgctccccgaaccttggcaatggcatgtaccaaatcatgccgttgttgaactagtgattcttggattcaagtatttttgtccaattttactaacacaagtctaacgtaaatgaaagtttaagaaggtacatgtaaaaaaaagttggattagcaatttaacaactgtcattactatatgatttactgatttatttacatgatatgagtgactctatataatctgtgtgtgtgtgatattataggtatttcagcgtatagatatctttagcagggactttgataacatagtagagcttgaattaggtgccccttggcctttgccacctattgaagttactgccacattagcacataaatttgaactcataggtacgttggtatatttcatcaaccatagtgatagatagaggcatgcatatcttgttcttttcatgattatacgagttatatatacttttcaggatcttcaaagatacaaattacatttgagaaaacaacagtaaaagcaagagggaatctgtctcaacttccaccattggagttaccaaggattccagatgtattaaggggtcagtctaattctagtccagggagtggtgaatttgaagttacttatatggatgatgatatgagagttactagaggagacagaggggaactaagggtgtttgtggtatcttaatcttcattaattactacttttacattgtggctagacgctctcgattctactctgatcgtagcattcttgagaataatgttctagctgatcttcaagctattttgtaattagaatgctcatttcaatgaagttgatatttcattttcaaaaaaaaattactacttttacatttatatatctcatcatttcattctttttgatgatccctttcttattatggttgattattcacaaccatgaaaatggaaatggacagaattaaactgtgttcaaattatacatatataatgatgagcaaagtcttgtacttgtatacttgtaaatttaaacgtttttgaaatatattgacaaattcaataatgcaattattattattatcatcaattagaaaagccttgcttgtattcttgtccacatgataaaataattaatattaataatagtattgcaggattatgtttaggttgcttataaacaatgttcatcaattttagaattatttgttttgaggggtttaatcaaatctaggctctacaatgtcatttaatgtgtgaaatgaaattagctaactatatctattattggaagtacaacaatgttttgaggggtttaatcaaatctaggctctacaatgaaattagataactatattcctatgttttgcataatcacaaacaacttcgaatatagcttacacttttttttttttttttgcagtggaacctccttaaaccaggatagctcattgtctaaccgaagggcatgttttgtcaaaccatgagctgcataatatttatcgcgagtcacatgggacaaaactgcccctgaaagtttagacaataaaactataacattttcaatatagctacacttttgttatttaataatattacttttgtactttgtatttgtatatgaagatttggttgaattttgccaaataatattttagaagtatgtttgtaaatatgttgatcaatctttcaaataacacaaatgtcatcaagcttcttgtattgtggtggatttcaagaccacatggcatcattttattcacatttttaaaaactaacacatttaatgaaagttatgatatctaatgggctcataaataggtaagctataactttgatccgattggcgaagcatggctaaagcataaaatgaagagccttgattctaatcagtaaatcttctaagttctaacgacacatcaaccattattatttagtggaaattacgctcaaactttgttgataccaaatgcaataattcaagtatacgcgttgtccttgatctttttagtaggggtgatcaacggtcggtttggtcggttttttacacaaaaaaaaatccaaaattcgattttcggtttttatggttctaatccgaaaaccgaccgaccattataaaaatataaaaaacctactgttttaatccacggtttggtcggtttaaaccgaccaaaccgaacttcatttttttttttaaaaaaaataagttttaa

SEQ ID NO: 301501 - DNA, 3983 bp, Cannabis indica
tatttatgcataagtcaattactttgtattttggagatctatttaatgaatcttatctttgggcataacaacctgaaaggattgtcagattgttaaaaccacgtaccaaaactttgtgtgtttttacttatctgtttatttttttgatttcttctggagttacacagctgttctctgtagttacagaaaaattatttcagtaccagtttcattattctgcatttaattaaataataaaactaagaatattaaaatgcgaaattttaattatagtagtgcattttagtatttctctaaattaaattatataggacttgatactattgtttaattgcaaagtattactactggacactaatagcgtttaacaccttttagaagtgacatcctgtgattggttagtgatattatctaaaaattattatattaaattatatcagattcaatatttaattagacgaatagcaatataataataaggaggatgatagataatttttcattaatataatattattattaacttttctttgtcagacaaaaagagtagtgctactactcacctcacctgcttgcttctttttatacctttatttattttttattttctaaattaaacattataatatttggagtatattgtgatttacttcattcttgtttatagttattggggaaacaaattatgctttatttttattttgatatatagaacagaatagggggacaagagattatgggatggtggagcttttgtttgatagaaaatccatataaattattagttggtatctatcttggttgtgtaataaatgtgttatgttcttgtgatttgagaagagagagaaaaaagagatggataataatgacaaaaatttcttacaaaaataaatatcaaaaatggcaaatggtatggtaccccaataataagtccatttgcacgtgaccacacacgtgcatgcactggtgggttgcatgtgcccaaatcataataattaaaaaaattgttaaaatgtaccattagtagtcacaactctcttcagtattatattattattagtataattaaatatcgaatcatatataacttaaaaaaataatttttaaaaaatatcactaactacttaaaaagtgttagatactaccgatattcaataacagtgctctaataattaataataatgactataaatgagtatatgaggtgttattatattataatgtcaaattgattgaccctttagcaatattagatttgaatgatatgaaatacgtaagcataagaataaatgtcttcttacaaacaaaaaaaaaaaccaaagggacactatgtaatttacttaacataacatgtaaattaatatataaggtttggggttgttgataaacttgacaagcatagtattttagtactaaaatctaactagtaagtaatagtgtatcatatcatatcatcatcaatgccatcatcatcagcagcagcagcaagtagcataagccgataagcttggctataagtcagtcctactcgttagttgattcatgcatatcatgttcacgatcatcatcatgttaaaaatgctaacacaatctaagaagttaagatcctaaatctagtactaagtaacaactaggaaacaaaaaaccaatcatcatatcatatccctccctcactataccctcctctcctccttctcaaaccccccaccaaaatgtccaaccaatctaataattagatggatgcctaatcatattgacaaaactagctatttcattcaccttctcttccattttagccttccaattaaacaactcttgaaacatttcctgccacaaaagaaaacagaatacatatttcgaatgagattttcggttactcttatgcagtatcattgattgagatgaaaaatacagattattacctgacacagaaatgatgaattgtggaaatctgatatggagttagcagtaatagaagaatcgggtgtcacgttagcatgatcttctttctgatttctcggaaactcctggccatccctgagtttgcaaaacacaaattaatcaagggtaactcttagatatgattattgtgttaaactttatggtgatcttcttactttatcattttgtctttcaatcgttccatttctcttgaagaagcagcgccttgagataggcaatccccggtcttggaaggaagaggcaagaatgagtagagatcttgcatcacaatatcttgctcaagattaagaaggctggtagtagtagtagtagtgctatcgaaccatggtaaaagttcgcttccctggccatcatcgagtttagtactctctaaccaatcttcccactgttcatgagcttgaggactggaagtaggatgttgtagctgagattcttgcatactacttaagaaatttttaatttccaccagctgctgctcgagtttcgctttccatgttattaagtcctcatacattccctattgagaaagaacattcaaatttggcttcatatgactaaatcgaaattgaaacacaaaatgcatcttctgtccaacagaaaacagttgcaagtaaacatgaacgagcaaaaaaaaaacctgcatgctcttccaagaagttaaaatcagtttcaggttttgatcagtctcagctttccatttcaccatttccttaaacatttcctgcaaatttgaacagcaattggggtttagcaagcaaaaaaagaataatgatgatcatcatcataattaatactaaccaaacaaatgttgttttgagagctcacctcaattcgattgccattgtatggctcttgcttcttgcgcgataactcttccatatcactttttttatgcagaagaaacaatttagaaacaatgcacatcatctttaataaaagtaacaacaaaaaactgaaaacaaactagctttactacctcttcattttgttcaactcggttctaagcattttcagttctcgagcagcagtaacagaatcatcatcatccactggcttcatgctcttcccagatgatggaatccagaaaggatcttccaccccggcttgctgtcgtatgtcatcaagttcagcatcctccaaccagtattccatcgcaccatctctgttatgccaccttctaaaccgctcagtcccacctggagccaccttcccatcaagatgcttcagcatatgatcaagcaggcctgtatcgcctatggatttacgagcagcacccctcagttcttgtctcgaaattgggttctgaaaagttgctccttcagttttcaaaatgttcaacatgttttcctctgccatcttatacctgcacatttcaattatcatcataaacaaaactcaaccagaaaagaaaagacaagacaagacaaaacacaacacaaccaaaattacctctcagcagaccacctttctatttgacaatcattcttcttcctggacttacgcttagaactactagtctgcttctgcttcccatgtaattttgcagccttagcttctttgagttgtgttcggttaaggcgcttcctcttggtaagtccttcttgtggtaattgaagggtttcagtcttgacaacaacaacaccaccacctttctcttttggttcaggtgatgacgatgatgagtctaatgaaagcaaacaaggattcttcttgtcttgaattacattggggtttttaaacaccatatgaggacgaataccccactcagccattgagggcacacctcaaaaatcacacacaaacccttcttcttcttagacacagtacattccagcagtaaatgagttttgagtttgagtttgacaatgaaacaccttacctaccaactgacaaccccaacaaaaaaataatatatattttaataaataataaaaaaacaaacaaggatttgggtttgtttcaacaaaacaaaccaaatgagaaaatgggtcaacaaaaaaaaaaccaaaaaacaacaaaag

SEQ ID NO: 301502 - DNA, 3161 bp, Cannabis indica
aacttttctgactgtatgcatttgatgatatcgagtcgtgttaggtcggtagttaaatcttcgtcctccttactttctatttaacacagaatttaattccatccataagtccctgtaattgataattataggttgccagcagtcacttgtaatgagtaaacgaaaaaaataaaatatggaagatacagaaatatatattactttacacaaataaacataatggagatacaattttctaaaaaaaaaaaaaaaaaaacataatggagatatattaggtagtaactcatacttttatcatcttttatcaatacatcatcattagtttccatataaaaacaaaaataaactaagaatgtaatgtttaaaagatcatgacctatgcaaataaacagaataagagtttactttgtgaacactaaacatcattagtttttcctaaagttaacgcatttaacaagcttataggacagaatttgacaatgaaatgtccatttcaataatgtgcattaaaaaaaaaaaaacgaacgaatatgcaactcaagggtataactaatgctatctcaatcttcttaaaactgaaaacctgtcttattaaatgtgaaaaatacttttaacagaagaaaggaaactacgcattaagacacatttggcaattgaaatggatgattaacttttgatgagcaaaaaatgagcatatagaaatcagactaaaaaaagaccgatgcaatattctgaagctaacaaaaaataagtattaaactctacttactagtagctgatagtattctgcctcccgcaaaagctctgaatagtgagagtcttttagtgtgggaacaacaccatcccttaaccaattaagtatgtgtcggaaatgttttccatccctatcgacaaatacaaatccctgcaaataatcagtgagtttaaggactgatgttttcaaaattaattaagtattgactgttttattgccttaaaaagacagaggtcatatgtcttagattgacctcctcccaagtttattagcgagcctcacataaccgtggtaacaaatcaaaacaaaacatacaagagttacgcataaataccaataatcaaacagaaactctacacatgtacccttaaacttgtctccgaaataaagactacccaaaatacttagaaactactgcatacgatttccccattctctacttaaatcttgcaaagaaaagtctacaaattatttgttttgtaagcccatgtagaaacccagaatttgactttctctaggttgatatgaatataacatactgtcatacgggttttaaaatgaatatgcatatcttctaaaaggtttagtggttatgtgtaatctacataccatgccttaaatattcaacaaaattagttttatacagttctcaaacgagcataattgcttacaagtatccctatagacttggagaaattgaaatgttaagtaaaatgaaaaagtcaaagatcatcccaagaatagttaaaccaaagtacagcaactcaaattaatgtgggataatggtttctgtggacaaatataccacacaccaccactcaaacattgggaaagccagcatttgaagggaatgatatgtcacggattaataatcaaattaccttttcaggatcctgacacacagtatgtctaccactgaacattgcagcaagcatggaataaggctctcgttgagtcaaagtatcaatagtagtgtaaaatttctccccccctgcaaacaataataatatacacccagttacagattgtttgtaaatcatgatcaaaaagaaaacctgtagggcgcatttgggaagtcatgaggaacttggaattgggtgtaattgaaggtaattatatagtttgtgtatttgtttaaccatataataatactgtaattgtgtaattagaggtaattgagaggtctcgattacaatctaattcccataccccattttaaatattaagtactaaaaattattattttcctgtataattactaactattattctaaacaagacattagaaattagtaagtaattaccacctcatgacaatacagttacttccaattgaaactgtaatgcttaattaatgaagcttcacataacaatgcagagagagagagagagagagttgcttaagttacaattgagcatgaaaggaaaaggccaactttgagtggccatatcacatatgtaatcaacaagtatttgaacaagagaattctaaccactttggcaaaactaaaaattctcaaattcacatcccatcattcctttttttttaggaaaaagaatggagtaatctaaaaacattgactaaacagcaaaagatttccttactcagctcttattcacaatacaagcacaattatatcatctcaaaactaaatgaatcatcattcaataccgctattcacaatttcatctaagtaaaaatttacatggaaatcgatcaaaaccagtattgtcatagacaatcggatccaatcataatctgagattagttaaatcaaaatttagggttcgtagaaggttcaaaagcaatgaattgaatgagaattgggggaaacattcaagtaattttaaaaaagaatatgcgtgaataacaaacgtgtaagggagagagagagagaagaagaagaagaagctgacctatgttgagacgaaccgtagaggaggagtctgagcccatgattttctctgtagagagagagagagagagagagagaatggttaaataagcagcagaaggtggcaagcaatggagtccacggcgtattgtagcgtaggtagcttaagccttttaacttgcacatttctttccttcgtttccccaaccaaccaaataaatatttaatgtaataaaaatattatttttaaaaaaatttatataataaacaaaaattataaaaatatgtctatgataagaatttcatttttatcctttaattttttttatctataaaatattattcagtaaaatagtaaatatttttttttaatttatagttgttataattttagggttttcaatattatacttaaaattgattttatttactaaaatacctttaagaaaacttaatttgcacaataccgttgtgccacgtcagcatatataccaaaatttaaactaaattac

SEQ ID NO: 301503 - DNA, 6181 bp, Cannabis indica
cttttaacagatatgcaacttgcaagtgtgccccaaggccaagtccaatacagacactcaaatacaaagactctcaaaactgttttagtaacaacaaactaacagaaatagattacaacaagaagacaaaaatatagctcagcaactaaactccctaactgcaactacttctacaacctatagatacacagatccaagttgagagaacaacgtaaagccttttttcatctccttcgagctgagttagagtgagagggagagagagaagctccgcggagctcaaaagaaagagacttagtgagagatcgagaaagataaatagagagaatatcattagagattatcaaccaaaagttctgtggttgaaatctgaaatcacacttgtaattacctattgaatctagtggagaatcaagctattatgtgtaactcatactttagggttttgtttctttgcaattgggctggaccgagttcaaactggactctttgtttttgaattttaccaactttcatggacgcgtgattaagtttgcaataataccataatatgcaattttattaattttgtgttttgcgagttagaacttgcagattctaacacttttagcttagttaattgttagttatcactaactaattctggttctttctcttttcatgtgcacctatataattgactctttcattcagccgaagaaaaaaaaaagacttttagtactgattattcattcaatcaatatacaataggattctttgctttgctaaagtcttttccctaaaaaagctattttatagtttttactttcaaataatactgaatattgaagcaaaatatatgtaagaaatattatttagactgtttttctgtgtaacaaaaagtatcacaaacataaagatcgtgagttacaagattattatctagctagcggatgataactcactcagaatacatgccagaaccgatactaaaggtccaacttaacattgtgtagaaaaactacagtgatgatcaaagaccaaccgtatatatagaggcaagggtgcaccaaaatgtcccatttttcaaatacgggatgggattcctcacctcaccttaccatgaatttaacttccattccaagtaccattgtaccacatactacatagggtgctaaataaacaataatataagctgcctagaggaaagaaggacaagaatttgatatgactgacagaattaatacaaatatgcctactatcatagtatgaaacagtaagaaactgtttcattataaccaaaaacctagtcatataacttaacatggatgatcatctctatttctggcctttctttctccacaagtctccaaacatttttatcccagaaccctttcgttttccactaccgaaaccatcatccaaatcaggagaccccatgaaacctccaaagccaccagcttggggctcgtagctaccaccgaaatgtttgtccatggagccacacctctcagagattctcccattcatgtccatgcctccggaaagtacagctgctgcagcatctgctgcttttctccactgctctgtctgcactcttatcttcttcatctcagtctcgagttcctccttggctgcttccacggatttcagctgctcactcagttgagctgcattcgatttgctgctttccaggtcttctccaagttgactcaacctcagggacatttcctcttccttggtttgaccagatgagatttttgaagcagcttcctccagcttgttcttcaggttttcattttcttgaccataaacatccacttccttttccttctcttctaatttggttctcagcatttttatttcatcattctttagagccaattctttcatggttgacttttctagctcctccaatgcaggtggaggctcaatagaaatgtcaactagtttgctgtctttttgaacctcctcttcagtgagttgactagtttcaagttttggttcaactgtcattttctccactagaacctcaaaaacatcagtttcctgctgctggttatctcccacaacatcattagagggactgatatccctttcattgaattcttgtgttacctttgggggtttctcctcctctggaactattggtttctcaatctttttctccaactgttcttgggcttctttctttgcagcctcagcagaagccagctgctctttgagattcttcagttcttcttgtgcctgcccaagttgtgattctaaatcagcaatgcgtgtgccaaatttcttctgagttacaggttcagattttgtgcctcttggggaacgacggtccaatggctttggactccgctcagtaattggccgatggtgtagaggatctgaatcagagcttgaagtcctgagatgtggtgggactctagcagctgacctttgaggcccttccgatgctcccctattcaccataccaaaaattcaacaacatttccttctaataaatgtaatacaaaaactactcaagccatttcagtatgcagagaaaataatacagtgaggatatgcttaacaataaccacatcaccaaggaaaacaaaagcatgcatgctcccatccatgtaatgaatgatatggggaaattcccatgtagcttgttcaggtatcaacccaagtcctatgaagccttttgggaaagtgcccaaaaataaaaccatgagagattagactcaaagcggatagtatcatactaatatggaagtcaatgtgacgtagcggccccacaaagtagaagaacagggcccaacaagtggtatcagagctgctaagggtccttgaaaaactcattgaatggccatatggaacatctaagatacagagtatcttgaaacaactactggattatcatattcaacttaagtgatgcaatcattaggttggttgataaagaagaaactccagcaaaaaattggaggaagttggaggagcaattccaacatggcttgatttcagttcactttaccacaacaaatatttgtgataacagacagagaattgaacaaaaatctaaagtatgaagctaaaacataaccccccaatgcaactttgtaatcatgataaatatgcatatatatttttatttcaatataaggtttcaaagtttctaaccttgatctcggcatttggttatactgatactgaacaagagacagtagaatatcaataaaagcgtgtgatctgcatattacgatacaagtagaagaaaaataagaacagttgccaacattaaaattttatatgaaaaacaaatgcttttggatatatcccagatcggctacaactacaagatcctaaattgaaggaagctgtcttcaacaattcaacccacttcaatgcataatgtggtgtggcaacaatgccctttccaaaccaaaactcttcactcagaacaagcaaaatgaacagcatgttagaatatatttgcatatactgtactgtaatattacatcaatttcttttaatatatttattaattttaatttatttcatatatatatcaaagaatatatgtaataatgtaacaaatttaatttcttaattgattgtgaaatatttaattgtggtggaaatttgatgaaccgtgtcacttatatttatatggtaaagagttagtgagaagttggaaatccgactatgagttctaattcttttttcattttcttttgcagatcgaagtttatctcaatccgtataatgttcaatctattatttcctctaacacaatctacttactttccctacttctgattctacggtttttatttggctagttatgccactacatattaatttaaagagacattttaacaattagcagcagaatcccatctgggttatggtttttattagagtctgaaagcttgacaggctcaaaaagatctacaggcttccaaggtttggtctttgctcaaatttatttcaaacaaaggcatatacttctatggtgtaaacatatcgaaacagagcaataatattagcatatcacatattagcatgcatgctggttttcctgtattctaccccccataaaggccaagcaatagatattgttctcactaagaaacatttgatgggcgttcaactttgacccaccactaagtaaaaaagttctaaggatatcaacgatggagattgcaggaatagagatctgagctcatttttgactaaactgtctttcgtttgtctacagccatgagtagaaccaaaaaaaaaaaaaaacaaggcccaaactaagggtaaatacaaaacatctctctcacaagatttgaactctttcttttttctttttccgtcgttataggatatttccgaacagtgaatacactagtaacacatcattacaccaaggtattaacttgaattctcaagtgaagaaaaacaagacatgaaaaagatttgtagagaaaataagaagacaaaaaacagagaaagaaaatacgaaattctaaccttttaatgtaagtaaacagcaccacagtagctaaatttgagctaaaaaatgcaacggcataatcagagattcagagttgctgcattgaaattctagtaaagatgaataaaactactcagcacctaatgataatgggcaagttgcctagtagtggtggggagacaatgtttatgggttgttagaaagaaaatagttgtgggactgagaaatagtgtaataaattgacagctttttttgaaacacaaaggctaggcggtaaataaataaataaataaacttgcccagaaacagtttaagctagaaagagaaagtggcatagaagagagtgaggcctagagagagacagagaggagtttgaagtttgaattaaaggtgtttgaacaggctgagaagagaagtgagaaggacagtggctttggagaaaggcaagaggaagaggacaagagggtcattttggggacatcaaataattcaatatccattactgaagagagtgaaaaaaaaaaatactaataattcaaaatctatacaatagtaatatacatatttctattatggctagataggggatctttgggaatccaacctgtatcttaactcttgtccttttgtcccattttaaagttcaaacctttttctattcacaatgttttcattttttgttttctctctactttttcgatgacaatacgtgcgtttggaccatacgactatatatatatatataataaaaataagtccaggtgtgcatgcaaagcaatattatacatatgggataatttggatatttagctctcaactttaataaattttggcattaaaattttttcttcaattattaaaattgttaaatttaaaaattttatctaattttattaatatagcaattgtgcatatgctaaactctacactcaaattttaatatctactaaatttataaatcatgtcttctaaactttcaaaattacaaaattgtatcttttaaatttttattctacattaaattttgttaaataaaattacacagaagttttaaatctaatatcttaatagttggggaaaaaattttaatgacctaaaaaatttaaaagacataatttaatacatgtcaaagtttagaatacaaaaattcaaattagcaccatatgatagttggaactctctttgccttgtttctcctaaaagctctgcattattgtacattaagatgccttgattaattatattatacagtttatttcctttataaaagagaaaggtgtaattttttttatattgcatttgttgggaatttgggaacttgggaacttggaagttgaaaagtattattttatgttttctttttctcgatgattaagtatcattttgttatttcccactttatcaaaaacaactaactatggtggccaagaccaaacaatgtgattagtatatatatttgaattcacataattagtcattacaagtgtagtagtaatgagtggattcaaccaaaggaaaagagggttttctttacttcataaataatatcaacaataatgaaaaggtcatagaatgaaagaaggaccactactcctctttctcattagtctgtccatttcatgatgagaaagaaaaagagtacaagtagaacaacaccacgatagaaagttaaaaaaaaataaaaaacatgtaaagctcacttttatagtt

SEQ ID NO: 301504 - DNA, 751 bp, Cannabis indica
  modified_base (16)..(16): a, c, t, g, unknown or other
aaactaaaaaaaaacntaaaagtcgcttccatataccgtaataaattgagagtgtaccaaaacaccccttacaaaatgtactgcatacttaccctaataacattttcattactttgtcctcatcatcgattatatcttatatatattactgttttcaggtgtaactaattattaatcaggaatttaaagattatattttatggaattccaacgtcacatatataatttggtgagacacgcaaggcaagtggtgtggtagaattagataatgcacccaggggatcagtggactgttaaaggtataggctgacgtgtgatgcaacatataaatagatagaacaaagtgggagaattaatagaccacaatacaacaattaaaacaatcgatatcacactcccatgcatgttagctttcatatattattattattattattattattattattggataatatataactaattaggacatgaacagtacttctgatcacactcacacccacatcacatgcatataaatatatataattaatcgatgcgttatatatagggtttacatgataaccggtgggaagagtacttacaaataatgtgacaaaacgaaacttaataataaaactgtacgcatatgtaataattagttcatgaaccatctactctcaaacgaaaaccatgtgatcacttactaattttataatattaatgaatatattttgtcaaaatttaataaaaacaaaaaaaaaaacaa

SEQ ID NO: 301505 - DNA, 6567 bp, Cannabis indica
atatcaatatttgattaatggttaagaagaaagaagaggaagaaatgtttaatcaaactggtggaatatcgtagtggaactagtgatcaaaattgttattattattaggaaacttcttctacaattcagagaacaaagcaaggttctctttgtgaagaaggctagctgtctttctcagcttcttgttctcttcaatgatggtttggttctccaaataaagcttcaaattcatcagctccatatccacagaccctaactcttcatcactacatcttattcttctcctgctatataaataaatttatgtatatatattattattgttcaaacgatcagtacggtagatatgatatatatatacatatatatatatataaatatatatttatatgagttaaagtctctggacttgaacttttgatcgctttgttcttttagaatagttcaagatggcagatggagaattctcagatgatgagctgagacacatctttatattctgaagttaattagagaaaaatataataaatatcagaactatacaatacactactgaactacacttgtatgtatatcgatcatatgtcctaattatatatagagaaacaataaagaacaaggcactagtggtgtctagcaccctcctatgtgtcaatatcgctattggtgcaagtatcggatcacatttaattttatatatattttcttacaaaattatatagataatttatataagaatgatttaatatatattttttgtaaggatatttaatttaaatttaaatacataaaatactatatatatttgtaatcacacaatgccataatttattcatggatcctattgaataatactccatatttgttgtggttagtttccatagaatgaattcaataatgatccagtattaacttctatatagaatgaatcaataacaaaatttatatttttaagtgaactggttatgtatgaatctgtcacattgcacaaaagttaaaaccccctacatctaaaacaatgtttgaaagtaaatagagaaagagtgattggcaccctatattggagacacacagtcgacatttgatggctttatgtagcctatatatatatctaatctcacacaactcaagtggctcttaattctgcccccatcaatttacgccatatacgtacagtatatatgaaaatctatttaatgaatgatcgatccactctggtaaaagtactacaagaacaatatatactctttaaaattcatttgattaaatgaattttgatattcaggagaaaggaaacgattgggctctgctaggatttgttgatagttgaggtttttgcctttgggttcgccttcgtattttggctctctttcaacgaagagaggatacaacacatggttatgagtaaagtttaaagaaaaaatgcacagaattaatttgatcagctcaaatgagattgatactattgcttctcattcatagccaaaaaagtaatcaaagggaaaatgtacaatgcaatccttaccttacatgtacacaatcattctaacaagggaatattacaaaattcatgcgaacagtaaggaaaggatagctggcaatgattgcctcgagattgcttattctccaacaaacttggacacacaccactaagattgatatgcccttgcatattttttctttaactcacccctcaagcgtgagggtgattgcttcacaccaagcttgtctactaagaactaaaatcgagtgtgtgtgagtcattttgtcaagcaatgacaatctgattgtgaaggtacatatcgtatttctagctatttcttgagtaccttgtcccatagaaagtgacaatctgttttgtcaaaacatgataaattgggttttgtagctagtgtacttgcactcatgttgtcacataaaattataggtatggcagggagtttagatcgcattttcttgagtaattcttgcaatcaagagagttgagtagcacgttgagaaaaggccatgtactcaaatttagtacttgaccttacaacaatggtttgcttttttttaaatgaccaagagatgagagaatctcctaagaaaacattgaaccctgctatagagcatcgatcatctaagcaacatgccaaattgacatctgaaaaacttgtgaggaataatctatcacttggagggatatgaaagccatggcttatggttcctttgagataccttagaactctcttagttgaattccaatgatttgttgtaggacactttagaaactatctaagctttgtttactacaaaagaaatgtctagctttatgtacacttttgtagtgtgaaggatatgtcataggctcaccatcgtgtatagacataggtttcagtgctatcatgggggtaggactaggtttcagattgctcatgttgactctttctgaaaaccatgagatatacttgctttgagacacatatagactagttttatctctaaacctcaattccaagaatgtagtgtaatgcacctaagtatttaagtgagaaggtcttgttgagctgatctataaattgttctacctccttagaattgctccttgtgatgattatatcatcaacataaattaagaccatcaacacagccagggtggttcaacatgaataatgaagggtctgctttggagttttcacatttccactacggcaatgttgactagagttgttcataccaggcccttagggctttctttagaccatagatatattttgtagcttttcaaacatggtatggttcgattgtgtcttcaaaaccctggggttgaaccatgtatacatcttcatccaattttctattggcaaaggtattataatatcaagctgcctaatctcccaattattcgcaacaactatggcaagtactacccgaactgtagatgccttgataatagagcttaaattttctcaaaaatgaaccccaagtatttggcgaagcccttagctacaagacgagccttgtacctttaaaatgtaccatttgcattaaatttcattttgtagagccacttatttccacccacattgtaatcaggtgagaaaggttccaagtaccaagtcttgttattcttcaaggctacaatctcagtattcatggcattattttacccctcatggtgaagctcctcttgaagagaaaatggttcttggtagtcatgggaagcaagacccatgccaagcacaactttaggcttaaaaatcactgttttaccttgagtgatcattgaacgagtaggcacaacagtaagggctagagctggaactgattcagggctaggaaactgatacttgaggagtagagtcagggctaagaacaacatgattatatgtaattgactcatgtatgggactaatagcaatggaataggtgagttgtcaaaggccatatcaaagtttgacaaaagaggcaataagaataggagagctgatttcatggctagaggatacctgatcttgtggagaatgtcctggagatggtgggtatgcatttaactgagctggagctaatgaaaaaggcaagttaatctaaatataaatacaaccatgaggacttaagtatttatatcccttatgcaccttactgcaatccaaatttacacatttaatcgaatgatatttgttgacctcgtttttagtcaatgcaacatagtcaataaaatgataataacaaagattatgaaaactgtaaacgataaacgaaatttatagaggtttgacccctttttgcagtaatagcctactcccctttctgttgtattacttttatgaaagtatatgaagatcataagatctgactaggtgagttttctaatatctctcaaaaatgttacaaatatttcagagacttttctttcttactaatgcgtaaaaaagaagtccacaaatagtgaattggcttcactatttatagggaagaatgaatacataaattactctaaaaaataggagataaattagaacatgtgatgtgaaaaatgaatattgatgatactgtactaattcaatattcattcataataaccaagttttcatttttattcaaatccttgtttccattttattggttaataatctctacttttatgatatttgtttcaatttaacatatattagttttcatttcgattttagttgtttctatttcctaaacaatggtttccattggaggttaaaaggtgtctatttggatggtgaatggtttccattttccaaactatagtttctaatttgaagttaaattatttctatttttatgatatttatttccatttcatatacatatatatactgttaaatattagtcgtttctattttacaaactatagtttctattttgagattaaattgtttcaggataccataattttgatataattatgttttaagcaatgattaggttgtgtaactctgttataggttaaaatggttgagctcatgaaaaaaaatggaaattcttcgttcactatcttctaaagccttttcttttttttttttttgttaagaaaatgaatttttctaaaggggtttttattttgatattaatggtgtgtgtggtttgatattttgcagggttggaataaaaggtaagtttgtcatctttattatcaaatgttttagtttttaaagttcagaatttagattcatagttgattgatatggatggacacacattggatagattagttatattttctcaatctctacaataagttaatgggattttaatacctttaaaaaatcagagggtcgcgaaagtgtacacgtcgggaaatttgtggattttgaaaaatgtcaaagatcccaacactggaaattggcacacaaccaattggcaatgggggagtagcccattcattttatatatcacagtttatttccacacattagcaatgtgggactaactctaatagatgaaaatggagattgtgaatgtgattaaactcaggcagttgattcatccatcatatatttatagctggaaaataattatctttatcttattaccgaccttgtcatagaaagctagagctaccaacttgatattagagagcagggggtacctagactcgtaaaagtttaatggaactatttactttcatttttgataattataccctttcaaaaaggggatacataaatcattactatggcttggacatcttgccaacagttgagactaatgagtaggggctgattgattgatgaaacttattgaagagaatgtgctgaagcaacaagagcttgacaaaagcagggtgtggacaagaatgtaaaatcaggacgttctgcacatactacacctaaaagttctgctagtaatttttttttttgttctattgatatgatattattgattattctacaagtagctagaggaaacactttttgagatgctttctctaattttctgataacactttttggatgcatattcaggatgggttgtagagttgaggaatgaactagagatagatgcaaacttcatattcaagttcaaatctacgctacaaatttaagtttagagatgggtttggatttgcattttgtgttttggctttaaatttcttcattagtacttacattttttgtgttcagattttggtttcagatctgatgttaaattaaagcatctgatgctaaattaaagcatttgggtcttcttaaaatcaaaaaacttcattgtaattatatgaaatcattcttcttcgtgggttttcaattatgggttgtaaattaaatttggggtagaacatgttttgcattaaactgaaacaaaggccaaagactaggaccaaacaaaagttccaaaacaacagtaaatctctctctaggccgatggcagagggtaaaggtaggagagtgagggatagagtagtagattttaggatttattttttttttttaaaaaaaatattaaatttgatttttttattaattaaaagaaatattatgtaatctggaccaattttatcattttatgaaattagttttatcctggtgtttgaagtgacattacttcctttcatgcgttttattgtgaagactaaagaagtttaaaaagtttatttgcttgatcagtgtgagtgctaacagagaaccccttttcatggtgtagtatttgttgagacacaataatttcaataaaaccattataattttcttaaactaatgatgtcgatattggctagagcttagaaggttcttaaacttgtccacatatatcaaaacttcattttattatatgaactcaataatattaaaatcaaccacttaatttaccagttatttgttaagaaattaagtgatgattattatactttaatagaaatatattatatatttcaggtgaaattgaatattggagaacaaggcaacacaagtaaagaaataactaaccagtgaagaaaaaaatgatcataaggtgatttgcatttataagaaattaagtaatgattattagactttgatcataatatattatatacttcaggtgatgtttttgcataaatttataacttattta

SEQ ID NO: 301506 - DNA, 1636 bp, Cannabis indica
aaacaaacaaacaaaaaaccaaactattatccccatatttcgagcttcaatatatgagattagttttgacatgtgtattaacatataacaacatgatttggctcacatattaaatgacttgatatttaacatatacgcatccaaacgaaaagtaattatattttccgacggaaaaaatagtgcctcaagaaaattaattaagaacagatagaattatatataacctgggcatgctattgacgaggtgggaaaatcgaacttgaagcaagattaaatatcctcaaattcaatagagcataagagatacaatattttaaaagaacttataataagattgaacaaaaattatccaaaatctcattgcaaggttggaggaaatttgtcttgcaagttgagccatctttcatcttacaagtcaaaccatcattcgttaaaaaccacaaatagagttataactcgaggagaagaagatattatttgaagtcgcgactcgaataaagcatgtgttggataagatcaaacataattgtaatttatttgtagtttaaatagaaaacggttaaatgtttattttcccatctatattaagagataaataaacgtgaaaattatcgacgttttatgaactattagttgcgggtatatggaagttttctgacttgtttgggttatgagtctcgcttccgttagttggatgatcaaactataggaagtttcctcgtagcgagatggacatctcgcattcttgttcttcgagtcgattctacttttacacttagtttgcttattgtaagctaaggtatgtgttactcttctccggtgtctcgctattctcctttagctatttagggtttctcattaatacactaagtactagtttgtacattgactcctcgcctaaaaccttacagtcagcgggttacaaatgtactctgatacttacgtaattaatgagttattccaaaaaagatatgacaccgattcacatttcttttatcttgatacgtgtcctccagtcgaatttcgaggtataacaggtttctacgtagaatttcataaaaatacttaaaaaaagaagttttgaagtgtaaaaataaaaaagcttatattttaaaatagtttaaatagttatagacaattaggtagatatttatggaaatttttataataaattatttgtcatggcatgtaatttttttaattaaaataatcattaataaatatattttttaattattaatttttataaactaatatttaatatatttttaattaattattgatcattaatatttataaattaaattaaaaaaataaaaaaaatgagataattaaggagagaagaaatagtgctatttgaagctattttaaaatatcatgtcatcgccttataattctcccttatatatttatatagattaataatttaatccatatttcttttgtcgtatactatggtgctgtttggtaacactttttgtttttttaattttttaatcacaaaatgaaagtaaaatttttatgtttaaaaaatttatttttgaaaaaaaaatgtgttctgtaaccacttttattttttaattttaaaaacagaaaataaaagtgtattctgtaaagttcatttttatttttattt

SEQ ID NO: 301507 - DNA, 1425 bp, Cannabis indica
atgggttttcgttcctttgtacacttcaatcaagctctccttgcaaaacaagcatggagaatttttgaaatgtccaactctcttctcagtcgactactaaaacatagatacttctccaacaacacctttttggaggcacgtcttggtcattcacccttacttaattggcaagatattcattgggggcgtcagctactagttgagggcttgcgttttaagattggtaatagtttcaatgtgttggttggtgttgataaatgaatctcaagtcacaacaatttcaatctagtaagttactcgggtccgaacaatgctcctgtatcatacttcctcaccgaccaacgagaatggaacttaccactcctaaatgcatatttccaaccgattgatgtggataaaattgtttctattcctctcagtttttttcctaacaatgatcgatacatttggcatcacaacactactggcctttacacagtaaattctggtttccacttggctgagaatatagttgagggacaagaatcaagtggttcaagcacacatagagattggtggaaaattttttggagtcttaatctaccttcaaaagttaaaatctttgcttggagaatgatgcaaaacgctctacctgtggctactacactatgctgaaggaaagtcataaattctgccacttgttccttatgtaataatgcgtgggagtcaatgttatgttcaattgcaccaaggcaaggaaggtttggagggatacaaagttcaccattgatcatgcacatgcacaagatatgcacaagtgtgacaatccatttatcttcaatacactcaaaacaagatttcaaattgattgtatgcacaatgtgggctatttggcatgatcgaaacaaagtgactcatggaggtgtaccaagatccagcctcaccattgcaacattcgcaagcacgcatctggacaaataagctcggttaagataaacaaaccagcaactcacaacctgcaatagccattctactaatgctgtaatagatccgcaaccagttaggcatgagtttcgagctattccatgggcaccaccaaccactccaggaaaacttgaatgtagatgctgctgctaatgaggagttgaaaatcttggcgtgtggtgcggttgtaagagaccatcatggtaatgttatagctactgtatccaaaccggtccaaggatgtttttcgatctgatgaaatggaggctaaatcgctctttcatagtctcaattgggtgctgcaattacaacttccaattacacatatagaaacagatgcattgcatgtttcttcggcccacaattctacatttaggaacctctctagttttaatgatttaattgttgatattagttgtcttttatcctttttcttcaagagtaactgtttctcatgttaag

SEQ ID NO: 301508 - DNA, 1351 bp, Cannabis indica
aaaaaaaattaataatataatttagagtagagaagctgatgagagtcgatgaatttttggtgtgtgagatgtaattacaatatatctatataaaatgtgagatagagatatatgcttttaatggtgattaactaattggaaagtaatccaatctttttttctttttgaaagaaaaatactctaatagtgcctcactaattgttacataaaatcattagtacataatatgtaccatgtatccaatatttaattattagcttaagaaattagtagggtttctcaccaaatacattacccaccggatcatagttacaaatcataaatgtatctttattgtcacaaataaccctagcacaacccactttcttagtattccgccacacaatttgtgtataatggccacacattttgccatccgcgcaactattactatcgtacgagtagttattttcctcctccatccatatttttacagcatattttggtgtccaatcagagccactacccttaaatatgttctccccgagtgtgaattggccatcctgaaaggaatgctctagctcacaatcagatttccttttcaaggcccaatcttgcgcgtatttagcaagtttagagtcccacatgagcggcatcaaccctttcttggcacgagccaagccatgcgcagccagaaactttgacttatcagctagatcatgtgaagcccctttcgtcttatcattaagataattcgatattttatcatctaaagattgttgcgagtattctattgtacaaagaatgaagagcaacaacaatgataagaaatggggtttccccattttttttgggggaggggagtgggtttgtagggattgagattgttagacaatattgaaatattttgtaaatgttagtgtcttgataattaattacatatataggtgttttttggagggttatttttgtatgcatgacacaataagacttaatttggttgtgttgctgagatgtgtgttgactaattttgattggtgaaaaatatagtattattatttggatggttaccatgtaattacattggttataaattgttgtgatataagtctcacctccaagtcttaaccacaattcatttaaaaacttctgagctagagaattagtaaaggctaatttaagttaataattattttcttcagatagtatattgttaaatatatcttaatttaattgagtaaaatagtaaacacaactacttaagtatattttccataaaatttgataacagtcatacaaaatatagagaacccttttaggcgtaacaaattagggattatatttcacaaatacacaaaactaataaaaaaaa

SEQ ID NO: 301509 - DNA, 827 bp, Cannabis indica
atctttaatatatgtggagaggattggatatcactgctagctcacatcgttcgtagaataaattcaaaacaaaccactatatatgacacactaccatatatgttactccacactcctatctactatatcaagtctttattcacttcattaatattccattagtctatataaaaatatgtttgatatggggtttgttctctaatttaagtactccaatttcattgaggtttaaaattttaaaatatgtatttataaatatttggaagtttgacaccaaaatgagatgccatgattatgggtgacactagtggtgggatgagaaggaagaggagggcctttaaacccactcattcaacttttgtttcccttctcaggtgaaatattatcaaggaatctgagactctaatggtgatgtcttcatattggtagacacttttcttttttgccattccattaactattaaaattaaccacaaaattttcatatatagcacttggcatagctaagtttatacatggtggggctaaaaatcatagctacctagtaatgcttgttcattctttcttatcaaatgaaccccacgatcccaagaaaaaaaaaacttgtagatgtaaatgttagtttctttatcactcataaaatatgcaacaacaagattcaattccatatataaacatattacatataattataagtgtataactatagatctaaagaatacctttgttgattcaaagagaagaattcaaatggcggaagcgtaccttaattcatagatagtgatgatcttaatccatcttgtagagataatctttgtggtgatttt

SEQ ID NO: 301510 - DNA, 4512 bp, Cannabis indica
tttgtcttgatatactttccaaagttcatttctctttaagttttggctcgttgtgatcaatgatcatgatatataaatatttatatatataagagagatatagcttaggagtgccctaatttcttgatatttttaggtcctttgaatatgatccgaaattatatgtcagacacacaaataactactatatatatttattaatatatatatatatgtatactaatatcggttttttctaaatatatatatgtacaagttggagatgaggatttaatagaaaacaagctagaaagccctaggcctatagttatagtactactgtactagtgtacatgacttgtaatttttgatgtagattgtacataaattcatttattttatttgattactatgaaattaataattccctatttttatggccgacttttgaagattgatatgaatcatgatggttcaagtacgtatatttataaattataattggtcgaacaattatacatatttattatattaattagtaacgatgaaaaagcgtaatctagacatattatatattatatatatatttatatatggcgcagcagttcgttcaactgttttcattgtatctcttctctcacgagacagattagtactatgtataatcttatttcactatctccataaatacacagattcgtgtgcgtgtttaattaaagttgctaatcttcttagtctctgtgtatatttattttctggcaacagggatttcttaaataggttaactatttatatgttatacatcagtctacgaggagagcaaacttctggttattattaacatgaagaaaaaaagaactcaaaactaatgaagtcatcgtatttatgcatgatatatgttgcttgtaattttggaaagaaaggaccatccatatatgtgtaatgtatatatatatatatatatataattaagagtaatatataatatgtgttatccgtgtacacaaatttaactctcgtgctgatgcaacgcagaactcgcgagaactgaatatgtctccgtttctgtatgagctgccattttgaacagctatccaacattttgtgccgtagcagccacacaactataccatatatattatgtattcattttatatatatatatataaatctaaagtgagtgatatatacatataaatgagtgggtgatgattaagatctagaaattagtatcttttaaaaccgcagatcctcgaaaatgtgctccatcatgttgtcaacttgtttgaacaacttgaaagatcatctttgttattcaatcattttaatgcatctaataccatatacttgtcactatatataattattaaacagttctcttttatttattaaattataatgtgtaaatcctaatattaaaatataattaaaatatactaataacagtatatgttatatattttataatgctcacaccataaattaccagttaacatttctctattcgacaatataaaatttttgagtgaagttatttataaatttttgtgtctcttaattacataataatttagacaagttaagaaaatattattcaattaaaaaaaatatcttatttctctaaaacatctagttttggttttcttctaaattttttaatttctttgactttggttcgacgatatagtgtaatcatgcataatgcaagtttttgtttattgtttttattcaacttaaaaaatataatgaacccaaataaattaaagtaaaaaaaaatgaataaacacacaaattttacctaaagctcaaaccgttaataaaagctaatccacgagtcacttgtattatgatcgaaattcttacagtgataaaatatatagaaagattttgacagcgtcatttagactgaaatttgagatccattaattattacaaaagatggatggtcctatatataggtatttatcgagatttttcaaaaattaattagttaaataagagctcacaaagtaataaaaagcaataaatgaagtagacaaagattttttacgtgattcggacattaactgttcctagtccacgaatctgtatattagccttagaaggcttgtctaatgtattacaatagtgtttacagtaaaaacactaactctagtctcttggtttctcttgatgaagaagaaagcttagagagattttgacaaagcttcgactatctcttttttgatcccccctttgtgtagaaataaaggggtatttataggataaagtacgagcatgggcataaccatgaatcgtctagggtttctgcaaaaagctcactcactattggggtaaaatacataaaatatctaactattgggcccccaagatggttcttcctcgtgtggtgaatcatctgtatagtggggaccattgttggtgcagggcacgtgtcgggcaaaggcttgcacttggtggacaaagtgctcagaggatccatcagacaaagatgagtatccagagagtggtgtctgcactaccatgttctgacacagggacaagatctgattccgtgtcataaaagaataatcgtcataaagccatcagctctcaccttacaagtggctttcggttctccttgcgcaatttgcatccgtcttagactcttcgcatggctctctggcatttgcctgcacttataggtaagttggtcttctccgagtcccgaagcaatgataaggcttccgggtctcggatggtcatttactttgtaacaaatctctgtgcctctcccaaatcaaacctttcccaaacaagcataatttctctatgaccttttgcgattaaggagacttaatcggtgatcatttggattgttctctttaattttttgccacatgtccttcgttagaaaacatggataacatttacccctaaggttcttatactcttgagtggtgaaagcttacagcctccctctagatttttagggcatgctctaggataagtgggtaaactctggagatgcagaagcatcttttgacacctaaaaattgaaaggtctaagaccctatgtgaaataattaatggtacacatgtgtcatgtattctataaactcgtgagtcatacacgcctgtggaaagcgcgttcgttgcagagaaatacaactggcagtagagttatgaagtgacaactctttaatatgcatggggcctgaggtgaatgatgattagatgccttgattcttccaatgagaattaaatgtagtctttccaactccccaatcgttcgatcattttgtgcttttgggctaacttgatctaggcctttaattttaaatttcatgagttggcttcctctctataaataggtgccctttgtttttcttttttccatttatgaacttttcaaataaccctgcattcaaactttttgataccctagttttccttaagacatagggtatttaattgcttaggtttctttccttcttttcttttccagtggttgacttgaacgacgagtttgacttggagggagttaacattaaggaggtaagggttgaggtacctgcaaaggggcctcaacaagaccctgccctcgaagttgattcgaaagggaaaataattaaagctaaagcaaatggcaaggcaaaagcctcaactttatctccattgtttataatgatggaatctgagaaatggaccaaaacattaataagttcatgtcatacgggatgatggagaacttattgatggaatcaggagtttgtaacatccctggattaatatggaaaaggttatcatttgcgaaggagtttgcctcccggagcaccgacgggtttagcacttggagttaggcccacattatgagtggggcacacttgcccttaaagacttacttcctagagctctacgtaaaaactgggattgcttcgttccagttaatccctccatcttacaagcttttgtctaggtggtatatcctgtgcaagatgcataagcttgaggttccctgaggagatactatattgttatgttatgaaaccccaacctatgcatacaaataagaagaagactgggttttacaagctgtagaagtatctggaagcacatttccctaccaacttcacactgcgatctcctgaactctgagagtttggttcttctctacaggcttcctagtgaagagggtgtcaaacctctctctgcatttcaaaatacgaggtatagaatttttgcatcttcctttatttaatactcttcttcccctttttgcacttgtaactgatgagacctcttcttacccatggcagagcctatgcctcggactccagggagtgaagagttaaagaaaaaattagccctgtacgactctatgacagatcaagatttaaaagtggaaggcttagtcaccaccaaattgcttcgcgagcacggactcattgccaggttccaaagtgttgataacatttgcagtaggggcctcagttatgctaattggagattaaggaataaattatcgtcgagattattgggttttatgcccta

SEQ ID NO: 301511 - DNA, 3034 bp, Cannabis indica
ttgtgaaaataccataatattttactttcgcagtaaataccactttaacaatctttagaaaattaccatgcataactactctaagtaatattcttaacttacaaacaatacacataaataagataattatcctcgtgtaattaataaaaaaaattaaatactattttaatctagctagcttcatggagaagaaggtcacgatttcacgacagttgcttcaaggtttttatttatttatttattttttaaaaaaaattattgaagaaacagatcgacatcattggctgattgtcatgtggaaaagaagataagttgctggaacaagcttgggcttaggagttgggctaaaagattttgttatatgggctaaaatcatagtgggttgttaaagattttgttaaattgatatttcttttatttttgttgattttaattacaatttttatttttaccaaggaattagtgattgtgaagggtgaaaaagtgttagactaaaaaaatattataggggcttattagtaaattgtaaatagtgagaaagcctataaatatataattgtgtaactattttagaatatggaataaaaaaataaaattttagttcaattaaagatcgatacaatctcaaagagtatatttagaatttgacactaactcaaagagtgtgtcccaatacaagtgatattatatcactagtaaactcaatctgatctttaaagtatttcaataaatagttactcagtctaatctgacctaatatgacattaggatgcatatatagaaattgctgagagttgaaagcttgggaatattctagctatatcttaaccacaaatttggtggatgagttcaagcaatgttaacttctgccatgttagcaatctgataagactttagaatatgactcaaatctcacaactcttcatattgagtcaccaattctaagtttgagtctattgttgagccttattattctttgattttaagcaaattcaaagcattattgaacttgcctatattggaatcactttagtgattatcttgttcaccttatcctatactatgtttagactaattaaggtaagagagtatttgtaaattgtactttttttttttaataaaatgcatctttcattaaatcaaatcattcctaactaaaaatgaaatttcagtggataaagaattcctactaaaaatacaatcaacaacatgaacaaaaaaatcacggaaattaaaacatgaaaaagttctaacaagatcgtcttacacaaatgtaaattataacaatatataaattgttgttgaactatttgtatgctaatatgctatgatgatatatattatgatttatttgtcagagtaggaataaatatttttcaacaaatgacaacaacgtacgcataataataataataaactgaaatattcttctcaatgcagaatttgataaaaaaaaaaccaaaacatctcttttggaatgtactagactttcccaatattttgataataatttactagaaaaaacatgctaacattactaatttattttaacaaagctagcattattaactttgtttaaactttaaagatatattcaattcatatatctctaataattttcttaacagccacgaatttggtgttacatttataactttgctaatatatttattataataatgtattaatgtttacgaaagtagttatcttaaaatactgtttcaataactaatggtatcctattaaaataatcttcttctatctttttaataatttctttaaggaaatatgaccaactttgcaatttgtttgttttcttttaagaaaatatacaaattttctctatcaaagaaaaaaaatattataccattttttttcagcattaaatgaatcataaccatccgatgttaaataaatataatttattcaggttctttcaaaaaaattacatcaagaggcaaatatcattgtaaaaaagtgagattgttgggatttgatttctaaatttctcaattgttaaattaattaaattaggctaattagcaatttttctctccgaactttgacatgtactaaatcatgcccactgaacttttttggccgttaaaaattctccctgaactattaagattcttaaatttaaagactttcatctaattttagtaaaaaatttctaaaatagatgaaagttcagggggcatgatttaatacatataaaagtttgagggacatgatttagtggatatcaaagtctagggagcataatttagtacctgaaacagttaaattgaatgaaattagaaaaaagtccttaaatttaacaatctcaatagtttaaggggaatttttaacggccaaaaaaattcagggggcatgatttggtatatgtcaaagttcgggaagaaaaattgctaattagccattaaattatcatcacagaattgaaacacatatttaatattatgagtattaatatttattattactagttatattttaatttattttttaaaatagaggcctgagcggtgggggctcaatgcggtagtagtctcctttatcctttatctcacttcagggccgatcaactaccagaaatttacactttaaaaatgaaaaaaaaaagttaaaaaaataatttataaagaaattctcaatactatttatgaatattaaatattcttcaacaatgggattcacatgtctaaacttgattcactactgattaaatatataacactaattggtttagctagcataagtttgtctcatatctatactttactttggacccaaagtgtctactagttgttatatatatatgtccttgtaataattaacaaaacagtttaattgctcaactgtctgcctcatggccttaattatacaacaaaaccttttctttcttttcttcaaaacatgcttaaacatgtctcaatataggctatgtgaattttctgtaaataatttaatcaaaatgagaccatataaggtaaacaattttttattattattattattatatatttttcca

SEQ ID NO: 301512 - DNA, 1890 bp, Cannabis indica
atttctctctctctttctctttctctctcatctcttgctctctctctctctctctctctcacttgaatccacatgaatcgttccttcagattgttaggcggcgtgaactcgtcgtcgtcgcctccgacaccgtcgtcaccggaaccctcagtagactcagacttcgtagtaatcctcgccgcccttctctgtgctctaatctgtgttctcggtctggttgcggtggctcggtgcgcttggctccgtcgcctttctaccgggaacagtggtagtagtagtgttggtggaggagctagctcgaaccggcctcaacctccaccaccgaacaaaggcctcaagaagaagatccttcgctctcttccgaagctcgctttcactcccgaattagcttctaagttcaccgactgtgcgatctgcctcgctgagttcgccgccggagacgagatccgtgagctcccgcagtgcggccacgccttccatgtcgcctgtatcgatacctggctcggatcgcactcttcctgcccttcctgccgtcagattttggtcgtcgcaaggtgtcaaaagtgcggtggtttccctgcctcttcgagctcttcaagctccgatgccgaagccagattgaaggagagagaggactccattaataggttcttgccttagccattaactttcaactgctatctctctactttccactttccaccctaagttatattactagctacttacttagtactgttattataattactataaattattattttagatcttaactcgatcttatttatttccatatagatctagttcatcaatcatataaatacatatatatatatatataaatctatgtataaatagggatttcaaggatagcagagagaataattctgttgccattgctgtttatgattataattacttatataattatgtttgtatatagttattattactatctaatctttaaacttgtctctatctctgtctattttaaatgaatttaattttgaaaatgtattaatttaaatttagggcttttaaataaacactatctgtcaagattagttaaggttaatttagagtcgatttttttaaaaaagttacatttgggctaataatatataattatgaaatttgaataattaggtttttgggggaaaagtattgtggagaggagaccccatcgtaagaattgggttgggttgggttgggtgtgctctttaaggacgaaactgactaggtctggggaacttctatttgtcaaacccataatcatatattatataaatataattctttttttttttaatgaatataacaggtacaaatgatttagtgctttgaattttcattatttctttttctttctttcaactcataaaaaaaaaaagaacaaaagaagggggttcacatgtctagcattactaataaagattttgaagaggttttgcttttgctgttgattggtgtttttatacctatttactttcaaaatagcttaggttcgtatttttttaaggtaggccatggaatggaatatagtgtaaaatgaatttggactatttggagtttgggattgggactgaaaatggacccattttcaaaagagtatctctattgggtaccaaagtgattagtacttctacgacataataacttataattggttaacagttttttataatttttattaaattacaataataagtatgactcaatattacacattataacgatactagacaccataaatcaactttagcatttctctttttagtgtgttttgttggctaattagtaatttttcttctcgaattttgatatgtactaaatcatgctccaacttttttggccgttaaaattttttcctgaactattaagattgtt

SEQ ID NO: 301513 - DNA, 1368 bp, Cannabis indica
actggtgagcacatggggactcacctcccaaaaccgcagcaacccattgcactggtgggacaggccccatcttgcaagagagtgcgcggcattattaatccgaaagacccaacaaacatcaatcccccccgagtgcaaagcaccaacaaagagaaaaaaacgcaagatgcagattctaaaaagggcaggacatcgccttgatagactgaaccaaatggaggttgtccgagaggatacacagactccccaagtgtagcctagccgcaagatccacgccaaaccgcatagcctccaactccccttgaaacacagaggaaaccgaaactttttttagctccaaaagccataacagaaccggaagggtcaaagaagactgcagctaccgcaccatcctcatccgattttgcaaaatccacaaaacctttgattcttcctgatctcggaaggccccagtgaaccttctccacactgccaagctcctgcgaagaaccagaaaaagactgcagcaaacacctatgctcaatgaaggcacccttcacttgcttctgcaacgtagttaaatccaaaagggttccatgatgatacatatcattcctcatcatccacaatttatggtacagcagagtgccataaagaaagaactcctgagactcctctttagagagcaggtgcctaaaggaaggcttatgaagccaaagcaccaactccctaccagaagagaaattcagggccgaggaacaaaaattccattgagaagcaaaccaaagatgttgagtgaccgtgcaaatcgaaaggaaatggttagcatcatcccccgcactttgtccacaaaacatacacggacccgaagtcttaccaaatatgcactgaagtcttgatccgaatggtagaacatcacaacaaagtttccacaaaaacagttttgacttccaaaaacagtttgagccttatcttattgataccacaatttttttagatatgcgaggtgtacctttcttgatatagcaagatctcttgccgttaatattatgaagtacttttaatattgcaaaccactttaaataccgtgagttctatatagtcaagtacttctcacaaagagggtaaatttatgcaataacaaagattatctttcatctaatatgtaaatttaaaatatagctaatagtaagccaaaatatgctcaatatttgttatgatgtaaaccgtgttatttgcttaacaaaattaacaatacgtagttattaaaaaaaacaaaactaataattaaggtgtcgtttgttaacacttttgttttttaattttttaatcacaaaatgaaagtaaaatttttgttttttaaaaaattatttttgaaaaacaaaaatg

SEQ ID NO: 301514 - DNA, 5481 bp, Cannabis indica
tttcaactactatctatgtataatgccacattattaatttaacagtcaactttagtcaattttaacagaattagataaaaggattatactattctaactgatatattttagggggtatttttaactacacttataaattaaggagcatcatagtatagtatcataactacagggactaaaaaagctaattattcaaagtaaaatataaccatatagaaggtatcgctggtagaattttcctacaaattctctttttttttgaaagcaataatagccctattcttttaattacttttattctttattaatgataattttagaaattaaaaataaaaagactagattgtctacttgactttgcatatggcagtctacttcttcactttccagtaacttccctcatttctttctcccttctctcaaattattattattacaaaagttgggagttaggttacatagtttcaaattcagatcacgaattgggaagtttgctattccaactctaatctctcaaaacttccctattagtaatatcaatttaattggttcatggagaagaacaattccttcaacttcagagccaatcaagagaatgagcttcagaattccttcaatggagatttaggacttggactcaatgatcgaagattcgcgttttcccgccaagcctcgtttcagcaataccaggagcctcggacgccggtttccaacaacctggacgattccctcgcgggtaggccttttctgtcaagaactgtgtccagtattgatattcctcttccggaggcttatgcggccgaacagaatgttaaattctttggagcaggagaagtttcgcctcataaattatcggtttcattgcttctgggttcgatgttgcggatcatgagttctgggagtaggtatatgaagaggttgttcatgttgatatcgcttaacgtggcttattcaactactgagctatgcattggtcttctcacagggcgtgtaggtatggatgttgcattgggttctctactaaaaattttaagttgatacattgttgtttgttgctggcatttatatgtgtatatttattctatattgcttctttttgtgtttgtgggctatgcaggtttggtgtctgatgcatttcatttaactttcggctgtggtctcttgactttttcattgtttgctatggctgcctctcgaggaaagcctgatgggatttacacttatgggtgagagtttatttttcgtggaaccatgaatctgaactttaattgttaagtcttggctaaatgaccctgtttctcaaatgatgtttcttatttctctacagtgaatactgactcatgccttttttttttaattttttttgttgagaattctatattaatctttttttttgataattgaattctatattaatctaattgtttcacatcaggtataagcggcttgaggttctgtctgcatttaccaatgctgtaagtggtccacttttctttgttatttagagtagctccacctttccttatatgtccggttttatacattttgggtgtttggtccatcttcccttattactattaatgtatgcttttgctgatttgataactcttatgagtttactggaaataggatagcattaaattccttcgagttactatatccttgagtttatggacacaaattttaattaggatttatatatgtcattcctagttgtttagtgtttggatttcttataaaacatgtcttgtgtaactgtttgttatataaaaagaaataaataaaaaaggtctatatttgcataaaacgagtttgcttatgattatttaatttttttcttcttctttgtgtgtttgtatattgttagtgctaatatacgaagttttttttattcttctgtttagacagctgtttctgttgtttatgtcattctctttggccgtggaagctcttcatgcattcattgaagatgaatctgaacacaagtaagatgtccatgctaatacttgataacatatgagaatatttgttatggaactttatttatttgtttttggtaatgtactttgcgacccttactttcgcaatccctgttacatctgttgcttatcctagtttttccagttgattttttttagctgtcttgtgcagttcatcattattccttttgagtttcaggctcatgccaacctaggaaattagtcgtatgaaaatgtttagctgaaagtatagttctgtgcatttttccatatgctcttactgcattttcatactacagtagctcggcttttagaattttcatatgatatgagcatgcgagactgcatgatgtctatctgcatgtatgtctttaagttatgtagtcaggatgggtttattagttatgactacagtgtaattgttgcaatgtttgtgcatttaagcgtagattaatctatccatttgtatgtaaatatattagtgctataggtgaatattattttgtgttttttattagttcatcctatcctgtctgtgtctgctaataattgttaatttataggcactacttgattgtatcggctgtgacaaatttgctggtgaaccttattggtgtttggttcttcaggaactatgctcgtataaacttaagtaagttctttgaaacatcttgagtatttgttttcattcttcatttctcttcctgcagagctttcctgccctttatggcatccaaggatgctgattattatgttagtcagcaatgattgtctgacaataatatgtggtgattactcacctctttggaaagttgtgttgtggattctaaacttctggttaaggagctcactgatgatctaagcctattgaagctaacattttttctgcttaagataaggcatgatgttacatactcaagcaacataatttccctttccacctaagacaatgcttgatatgttttctaattaaatgggctggaatgctactatgaaaatatctgagacatgcaaatgaaccctttacgaatgtgatactcacaggactgagagaacaagataatgataggcatccaccaagggggataaaatggggaattgatagaactatgatggtaaaggggtatgtgggtatttttgtagttatgtttagtggatgagctggtttagtttgttaagttgggtttatgaatgtataaatatgcatagcctcttttctcttttctcttaaagggtcccttagcgtgttgattgttattttgtatgagcgcttcttgaggaagaggtgaggtctctagaatggttcgagtctgtttatcaataacctactttatcaccctttggttggattctatcagtcaaccaatcaaagcatttttttcttctctgcatctagtgttaagcatgatgatttttgtgtacacttaacaatgtttccttatccagtttttatgcgttgcagcatacagaaaagctgaagatatgaactatcactcagttttcttgcatgttcttgcagattccattcgcaggtattatattctccttacactccttactctaatgtaaaacttatacatgccttcatttagaaaaataagaagaatgcatgagtgacttcgtttgttattttcccagtctctatgcacgtccatctgaaattgttttgttgggcatttgtgtctcagtgcaggtttgatattggcatcctggttactgtctcttgggtaagttttgcttcatttccacttccagtccaacttctctttcattttcattcatcattttcaacctgtatttgcagtgttcaaaatgctgaagttctgtgccttggactagtctcagttacagtttttatgcttgtaatgccgcttttcaaagcagctggtggtattttgcttcaaatggcaccaccaagcattccatcttctgcattaagtaaatgcttgagacaggtgctctaaatttgttctacacagtcctttttgttttctaaatatatttacttctttcaatgaagttgtcaaatatcctgttgtagatttctgccctggaagatgtatctgaagtttctcaagctcggttttgggaattggttccaggccatgttgttggctcactctcaatacaggttacttgtttaaattttttttactggttgaggagttcaataatctatatactgaacgtaatttaatgtgtttttttggtgttcaacaaatttaggtgaaaaaagggacagacgatcgatcagttctccaatatgtgcatggattgtaccatgaattaggcatacaagatttgacggtgcaaactgacgatgtctgagctgttattgttataaatatatatatacatatatatctattttttctttcttgcaccttgataattgaacgttgttttggggtctaaattttgtgtagagttatcattattaacattctttaatctttggtaataagtagggaaactggtttacaattttcattttttttatcaccgcctttgcattaactgtagaactgtaaattcgttttatatatttgattgagaatatatggcagagtggtacactttcttagtctggcaactttaaaccgtatatacatgtaagatacaaaacaaatgaaaatataatgtattgtttgaaaattagaactagaattttattatgttattagttattgtgatttttatttattcaccgggctcagcagttggagctcttgctttgtttcttttcgtcgtggaaagattcgaccattctttcttttgagttcattattaattgctactatattttaaactcaagacttgtttaccctttttatttctcagctaattctcaaagagaagttctatcacacactctacttattttaatgacaaatgtcatcttctaaacaatgcttaatttttcaaaacacgtattctttttggtatctacttttaaaatcctatataagttaattaaataattttttgttataaatagtattaattatgtggatgtccaaatcttttatttattaccattaatgtaatcaacatttcttttttcttagtttccctttctcttagtttcttaatatttgattcttgtatgtgtataaataggagattacctattggaataaaacattcagaaaattctcatctcttctctattttctttctctaaattataatattacataatacgttatcagcacgagcctctaaccaaggtatgacaatgtttttgttatgtgatctcgaattgcttcaaagtcatgatacactaaatatatatatgtatatatatatactcatctgactgaaacacattcgcgttagccatattttttaatgaattaatatttatacaatatatgtctatgcttatatatatctatatagatgcttatatattatatatgtgtgttgatttgtttatcatattatattgtttaatcttattatcttattctatattgtactatattttgttgtatttttt

SEQ ID NO: 301515 - DNA, 5653 bp, Cannabis indica
attaaaaataagattcaaacagtcggttgcacgcgtgtaaaataggcagtttaaaccctactatctgtattgtaatttttttcaattttctcaaaattttacaagatgtcttaaataactacgatatacatttttatatatataagaaataagattaaaactaaatattaaaaacacgaaaaggtataccagtgcaccccaaaatagaagcatcaagtgttttatatgctaaattgtagtttgacaattcaagtcacgacatgacaaaacgacacgaatttgatacgaattattgcgggttatggtcataaaaaatagttgtgaattaaaattaggacaaactcaaatgacacgataattatttgagttaggttagggttaacctgtgtaacacgaaatcaacacgtatcgacccatttgtattcaatctatcattaaaattattaatttataattaaattattatttattttcataataaaaaaatacttacaaaagtataaaataccttatatttaatttcatattaagaattttattcatattgatattttaggataaattattaattaatcaatattatttatttgcgaatttaaatatttttatttagtatattatttaaatgagtcaaacaaattaatataattaaaattatttataaaaatcaaaatatgcgatacaataattatgttgattagtgtaagataagttatagtggacaagtaatacgataagttaatatgcgaacagaatgtgtccagttaaaattgagattttttgacgaaatgtaataaattgggttataattgaccgattaacccaaataacacaaatagacgataacacaaattgttacacctactaaattggtaataatttttagtaaatcttttatataatattgtttcctcatgcatgtaatatataaataaaaagaatgagaacaatcccagaatattctttcatcagaagcatttccttattattccctttaaaacatagtttagaaagaaaagaaaaaaagaaagacaaaacctgagatcctactacaaacatttaaggggaattgtttatttctattttttataattttgatcataaattttactttgaaattaaaatattgctcatgatgactcatgacatgcatatgagccttcaaatttcaatcttttgccgattgtgagatttttgtggttgagaaattagagtagatatccctttttaatacaatattctatgacatataaatataattggattattatatttcaaccattttgttaagaatctcttgctttgagtatctcttcttaattataggtaagcaatgaaatggctatgtattaatattaaaactataaattagaattataatattttccaaattaaatttttaactataatagagaagacattaaaaagatgaaaaaaaaggtaaattgaaagttcatctttcaaataaagaagaagaaaagaattgcagatgggagaaaatgacaatgatgttaaaattgaattttttttttttttctatcagtccaaatttaaattttccatgagaattatatatattcacatattgaaattgaagcaagttgccatgaaataaatcaagtctcttaaagaaacttgacttaataattaagtgcctcaaaatttcatttcagatagtaaactgataaacatcattacaagattataccaacccccagatctgttttttttttttttatataaacaaggatctacccataccaacccaaaatgaaaaacaaagattaaaaatcaaaattttatgtctgcctcatacaaaccttccacacacctttacagatcacagactgatcatcatcaacacccttttaatcccaatgtccccaaatgaccattttcaacatgggaaaaattccttttcttttactccaaaagctcaaagattgttattaatgttaaatacacagctttgtatagatcatcatcaggctactgaaacagtgccagtccttgaggttttgcttggagtagagtccttattggtctctgattttctcatggctctgctactcattttccagctcttttcctttgcttcatcaaactctatttgctcttgtctacattctttgctacagaatggagtatttcccctgaaaaaagatattccaaaaaaaattagtaccaataagattccgaaacaattgattttttttatttcttttttaccaaaccaagaacaacccagatcaagaaaccccttttggaatcaaaaagttgaaaactttccaagaattgggaaaaatctacatctgggtatcaaagatttatgatgaatttaaaaataaaggtatatgtaaactacacacctgtacatgaagatgtctgagttatatccaagtggttttctgcaaaggtaacaagcttcaagaaagtgggaatcactggagtaaaagtcttcagtcccagccaaatgaaacatttttgtggccatagttgaaagaaagcttaaagaggaataagaataactgttgaaaaaatcacaaaaagagtaagaaaaaaactgaaccaagaaaattggtttgagaaaaatgggctttttctatttttcttttcttttgcttgagcaaaaaatgagagagaagaagggagaggagaactatggtttagtgttgttgtttataaagaggagctttggccaagacttgcggtacaatcaagtggtttattgggtattatattatggtggattccaatccaggggtatttcggtaaattctcagaagcaaattatatggacttcgttggtctgacgtgtcaagggttttgtaatatagtagagagacagtagttgcaaacctgtccaataataaagtgtattgtaatgatgaaaaccagaagtggttttccaagattccatgggattcaatctattggctctaccttagtttagttcatgcatctgttcatccaatattaacttttctattttatctttcttttttcatttaggtacacatgaaattcttattttaacttttggtccccttagtgttgaacatcaataaattagcctttgtcatctacatttgaaaaaaaaatatattttcaaattagcctttgttttttaaggttctcttaacctatactagtagaagagacatttcactagctatggcagtaaatgtgttgatttctttattaatgtttaggagaatctagaatagattttctatgtgtttgttccctcattttgaagaagagaaagttattaactattggttaaacattaaaaatatgttttgctaattttcaatgtgctgaatgtaaagattataactattaaactaaatctatgaggaaacaagtaagtgaatgagaactattttattgctatgtgtcattgatttgagtgctttatatatatagcttgggtttgcatgtgagcctagaaaatgtagagtggaatctagctcaaatgaatggtttctttggtagctcaaacaaaggataaaaaactcaattgggttgaaatgcccttaataattaattagttgtttaattagtagagctaaccaactttttatggactatttttatgtttatatatatgattagtattgttggaaattctaattggatgggacttcaattttaaattgatttggtcagttaaaatgtctttaaaattagtgtttccgacattgtttattataaaatgttaaatcactatattttaattattgttaatacgtattaacttatttgttaattatatttatttattaatacttgtacggtaatgtagtatttaatgataagatagatattgggtgtatacattttggagacataaaatctaaatcacatttctatgtgattattaagtgttttatttatttactattatggaaattctaaattttgggtatgacatacacaattacattaaaaactactatatttttaatttctattaatagcattgaaataaaatgtttttagactgttttcttgaccaaatgcacaatttaagagactttttaagactagagtgcataataaatatgaagggtgggaatttagggtaaaagccaaaattatagccactaatatataattctcacaaattagtgggaaaaaaaaaacaaaaatcgaaccgaaagtttattctcagaaatcaataaaatatcctacattgattttataattacaaagagaccatcatctagaacatatcatacgtagacttagaagatggtatttttgtaaataaaagaaatatcagtggtaaacatgtaagtagaaaacgtcacaattattctagacccttaattattcaatgtcagccgttactttcactaactgggacatgaacgaagcaaatgggccccacagcccaataagaggaaattaaaaaagtaataaaagccctaaaacaaacaccaaaacgttggagctgactaggagtggggcccatttaaggcccacaaaacaacagaagcatccaatttgtgggacccgcaccgagtcaggaccatgctggcgctacgccccaagtacatgtcccctgggtcccacacacacctacctgcccgtagaatccggtctgcccgatcccttcgctgcccgttacacgtgagccagtgaccgtgcaccagcgaagcccccaagaagaagaattattgagactgacacgtggcagtgactgagaataaaagacacggaatctgatgttttctattttgtgggaaagctgccacgatgatcgaggttagtgaatcaacggtggaaatatcgccacggaggcaagtctttttcaaatattattactttatttatattttttgggaagtgacaattttgggttctcaattattgggtggtaccactaccacttttattttcccacgttggggcacgagcctttggtgcacttgtggttattgtaatttgttttctttgaaaaattatttcaatattttattttgtttttaattttattggtattgatgaggtgtaatgcacgagtgtgactcttaatcgtgttggacttataacgtgtattttttaatttactttttctttccaatttattaaaatagatatttttttccttattaaaatagattttttgtgatcactaaaacattaaaacaatttttattccattaaaaaaaaaaacaatttttatttttacatatgtgaaaaactattggtgacacgtgcaccgacttatttagctggggctacaagaactaaccaaatatattccgtaaaaaaatcagagtaattaaacaacttcatatgtttatttatttaaataattatataataactatgtaatattgtaattagaataattgaatttggagctgaataatatgccttaatataaggcaggatacactgatacatctctatctgttttagtattcgaaaaaaaaatttagtcaaatttgttctcatggtcatgtaaattatagttatttaagacattttacaaaattttaaaaaattcggaaaagtttaacatgtcgaaaactacgttcaaacagtatgttgcacgcgtgattattttattttatatgtgtgtaaaatagactttttgaacattgttttctatattgtaaattttttcgaatttctcaaa

SEQ ID NO: 301516 - DNA, 2025 bp, Cannabis indica
gtcggatctgatccaagatccaataactatccgaatgtttcggatcagtaatgatccgtcggatcggatcactgatccgatccgaatgaatggatctttttgccatgcctactttcttaaaagttgttccatacctctctatttaagagacttttaatctatttttttataattatataatcatgtaaggtgtaatttatttttatgactatttataaaaatatttcaataatttatattgtcgaaaaaaaaatttatacatttttttactatgcatataaaaaaaaaataactatgtatacaccaaaatattttaatctttttttttttgcattgtttctattcagtcatcgacgactggagccatggttttgatgcaatcatcataatggtgagtttgtgagagatttgtgagtgacgagttagatttgaatattagttttttttttaattaattagatttattttgttgtaaaattaatagattctttgaagaagaagaagaggaggattagggtgagacttgagaattaataataggtattttttttttttttttcttagataatgttttttttttaatttaataaaagaaaaagaaaaataaatattaaaatttttatttttatataatttctaattatttaatttttaataatatttattaagtgtactaataatgctttggcatgtggtgatattggtagcaattaagagactatttaacttaggtactaatggactaacaaattttttgatttttggggactaattgcatcaatcttaagttttgaagacttttgctgcaattatctcttttaattatactttagttatttattttaaggagattcattaagattaacaaaataacaaagttctataagatcagatataaaaaaaccacacaatctcacaaagagaaaccacaaatagcaaattacaaagaggagcaaaagctctaactgcatctagaagaacaaaggggcaaagctcacaaaacggcctaaagtcaacgtcacaaagacaaaagatgctaaacaccattattacaaagaaaataaaactaatgatctcgtcaccaagtttgtccaaattatctaaaacaactagaggaagaagtcttgatatcgactcaaaagggttccaaactgaaacagtgaaggagattggataggaacacacttttactcaagtccttcgctctacatctacaaatctccaggagccatttactaaacaaagtttaatgtggatgaaaatttagagacacacttttgtacttttgaaagttcacaagacatgatttagtatcaaagttcgggaataaaattcagtacatgaacaatcgccatattagtaaaatggaatgaaatcaggtagaagtctataaatttaataatttcaataattcgaaaagaatttttaactactgaaaaaatacatagaatataatttgatacatattaaaatttattagcaaaaattaggaaccttaatacacaagggtggaacgctgtgtttttatttataagtacaagtataatgcaatgtaatttaataaaataaatctcaaaccccaccactaattctaattctacttctattcccttcgtatacattctttttccatcgtattatattgtaatcaaaggaaaagagggaacacatgattattgtgtacaaagaaagagtggacaccttctcaattttgattgggtgagttcatctccccccatgagcctaagattaatggccgaggaagaatataataggctttatttttgcctttgtcccctcccatcaattattaaaataccttatccaaaacaccccaaacaaccctttcttgcccccttcttcactttctctctctctccaaatattgtcgtgtagtctctgcaatcacataaatttggtgccaatttatacacaacaatcccctgccaactgtcccaatttcaattcaaatactctagggtaaatactattttggactctttgttttataaaaattatcaattg

SEQ ID NO: 301517 - DNA, 1912 bp, Cannabis indica
aaaaaaataacatacaaaataataataataaataaacaaaaaaatacaaaaataaaataataagaatacaacataaaatatactaaatacatatttatagtaaataaaattaaaaactagttaaaaaaaaaattgaaaaattccgtactaacttttacttttgttaattttatttgtttagttttttgtttttagttttttttttttttttttttcaaaaaaaatttatcccaaaaataaagattataatactagttagatacattcatttctcatatcatgattagctattatggtgatttagggcctgaaagcccaatcacttttagtccatagaaactagaaaggggccattcttggaccttgggcctacaactttttcatccatatacaattcaactattacaactttattagaagtttagaccaaacaaaaacaatcaataacaaataaaacctataatattacatagtatgtaaaatattacaaaattaacttcataaatattatttagttaaataagataccatgtcatcgaactactaaaattagaaaaatattatgcctgaaaatggtaatggtgaattttgataatttagtgaaaaaagaaaaaaggcatgaatccagcatatttgtatttttttttttggcatttttaattttttgttataccgatggttacttcattaaaaatttgatttttatatcatgtatttttttttgggtaaggttatatcatgtaatttagatgcattgctattttttgagactacaacacaaagaaaaagaatttttgaggaaattatattatatatttattttatttttttttacttttatttaaccttgagtatattttaataaaatataatataaaagtatttttgattaatagattaaagcgaagctgccttgttatctcacatatacaaaagggataattttatggaattttaaatatttttacgatttttttgattttatttacataaaatacggtatttttatattgaaattttgttcatttgtcgttaattttttattatctgtatgttattttttgttattattttgattttattttcatgttacttttatgttgttttcttgttgattttattttgttttcgtgttattttttggaaaacggtaaaaatgtaaaaaaaaacaatctttgaacgtaaaaatgtaaatattttacaaaaaatagtgtcttatgtaattattcctaaaaaaaaagaacttgttttgggttaaggcatatcagatcactgcctagagcccaaaaaattaatttatttgcaaaaatatacacattttttcttggcatttttcgaaattacaatatttcttcggagttagggaccaaaaatttagttagaaatcttgtgataacatagatataaggggatttttttttttttttttattttttgtgtaaggtataactttgtaaaaatatggtatttatcaacaaattattttatgggatagttttagaaaaagggttaataaaatagggaaatttacacccactactgttttttcccaatttattacatttttactgttgcacggaaaaatacaaccttttttactgtttttttttttttaggcagtttactgcctttaaaactttagcttatttttttttttttttattttaagtgataaaaaaaagatgtgatgggaattgtcacatttgtggctagttcttttttttttttttttttttttcttttaattcaatttaatcatttatatcaataaaaaaaatgatgtgatgggaattgtcacatttgtggcagcttttttttttttttttcttttctttttaattcaatttaatcattatatcaatacaattactctctttcacaccacgtttttatacctactatcccatttaat

SEQ ID NO: 301518 - DNA, 1359 bp, Cannabis indica
atacaagtcaatatcaaactattttattgtaattaaataatattaatacaatgcaattcaattcaatacaatactctatataatacaatataatacaaaacagtatacaaaacagtgtaccaaacaagtccttaatcacaaacttttaagtaagaatatagaattcatgatattttttagccacaagttttataagtaaaaaattattatggtgcataaaggtcgtgatttagtataattttcatattagttgttgtgaacaactattaaaatattattttataaatatgtttttctttaagaaaaaatattaacataattaagttttattagactcattcatttctaccatatatgattgaattagtattagtaattaagctatatatatactcttttcaaaagggtcaattaattattaaatttaaatggtatatattatatataaagaatttttggattaaagtggtttaaaaggaaaagcaataaaagattaagatgctatcatggaaaataattaaggagaaattaatgtcaactacttagaaacaaaaactagtgctttcttttcgatctagtatatgtatatatatcaattaatttaaattttccacctactatactctcacacacatatatatatataaataaattccttttcaatataaatataaataaataaataaaaatagagaaaataagaagaaaaatactttactcctacttaaactatcattttgcaatatgtgctttaagacatatccatatatgtcttcatttcacatttgatcaccacaaacacatttttatattcatcatattaacaatgagtgtatacatataatatattaattcaatgtatgtaacataatgtaatgtattagaataattaagtactagctagtctaagtcttggtcttctcttctatataatttcaatatgaaccaaactaatttcaactaggagtcaatgtcacatttgatcatataattttcaatttatttgactcattatattatatattacttataacaataatgggtattttgccctgaaattcttatagtattaagtttataccttatgttataggataagttgagaattacattttttttattacatattaactaaatataactgtaaattaattttaattaataaataccctcttttaaaatcaaaatactaaatataatctcacataatttattaaaattagagtccctaataacacacataataggaatatggcctataaaactagatataaattaaaaaaataattaacgaaatataaaaattaaaatcaaaaaaataaaaagtgggtatatagagtgtaatttcctctatattat

SEQ ID NO: 301519 - DNA, 2151 bp, Cannabis indica
tttttttttttgtttttgtatatataccttaaaaagagcccttaattaaataatttgagagataatgttcaaattgctataaatatagaaacgccctaatatatagataaaatgtgcccccattatagagtttcttaaaactatatatgaaaatcatagagttgaagaataatagtgcacccatactaacttttaaatatgtatatgaaatgatagagtagaagaatttgtattgctagagagatagaaatttattagcttcaaaagtactgctatatgaatgtaaaaattggtacaactgatgcagatataaaataaaagagaaaagtaatgaaatgctcataagatggttttggtaccaaattggacaaaagaaagctaagtttgagggaacacaatatgtcccattcttttactatgcttgttgatggatgatgccctaaccatgccatcttcaaaggggacccaaaaatcacttcatcaacaacaattatttggtctctttgccatgcgccctatactactttaatttactttcttctgtaaaactgttaaataaaattattttcatatacaatgatttctttcctttttctttttcattatttatatttttcttggatgggaaaatctgcctcccaaaagggtctttggctattgtgttttcaaagctctagggacccttttgggcacttctgccgttctaaaagtaaatattcatcattgggtttacgttacttcaaaataagattccaaatacctaatataattcttataacgggtgactaagtatctttgcaacattatattgaactgtcctaaagtgacatttttgtgtgtcctttttcataaaggcctctctctctataaatatatacatgtctcccctcctttaatgtcatgtactatttaataggttggtatttaagcaaaatatataagttggaaactagtgttattaattgtcacattttagctcttgacatcccatgtgtattgagatttaattttattacaagtatatatgtgtgacataaatgactcaataaactttcaaactactatgatacttaattttctaaagcctttaatatgttcatttataagagtcaatgtaagactcgaaacatggactgaatccattcaattattatatatatatatatatatgtacacttatataatatatatatatatggtcccctcactttaacaaaagatagaggaattcagtactagtactctataagtgtgggggaaaacaatagctactaatcatcacgagatgatggccactttgtcccactctctgttacaatatcagttgtcgttcctctctaaagaaaatattcacaatgttaaaaaaaatatgaagataaatattcacaagagaaatttgtagggtataaaaaaatctctctatctagaataaatttgagtgagctccaatataaccaaagatatatagtgaaaaaagacacaaaaatattgaaaaccttcatagtctctgtttgttgtatagctaatataaacatagctgagtgctcatgttgtgtcacactcatcacgttttgccctcgttgtttagtcttattcgatatcctttttgatagacagacgagcaaagcttgtcttcacttgaagaacctccaacactatttaatatttacaaaacaattacctctataaatattaacatatttattatgccatgcaactgaggttgtttgttatgatattaatgtagtttttcaaccatctcatacatatttaagtcactcataagttaatcatcaagtcaaaatcaaatccagatatataacgtaccatacagattattaattagtgtattttaaaattttaagtttaattatatgtgtggcacttctacaacactaaatcatgattgtgagtatattagaccagaatttagtactcttaccacttaagccttttctttggagcccatttattgccatgtggcaataccctttaccaataataaaccgaagagacagctgggtttatttatattttttacacacttgttggtgttttatgtttgttttccgtataatattttgatgatatatatatttatatatttatgggtacaaaaattatactagaagaatatgcacattcaacacc

SEQ ID NO: 301520 - DNA, 5047 bp, Cannabis indica
tcaaaaaaaaaaaaagaaaatatgaagagagggaatctctcacagtgtagagagaatggaaagtgtgaaaaagctagggaagctctcattttgtagggaaggatgtacaattaaattacaataaattaaaaaaaaatagcactaaatttgctgggaaatcctacatgagttcgtgagtcaattttgaggcttgaatcttgagaattgtggcaggggtgtgagacacacatatacccaacttgaaaagggcttattggccacttgaatcacatcatttgaataaaaagtgagagagttatgaccattgtactgagcaaatgtacactactaaaaagtgactacgaggtcaggttgaccttcgggcgcccaagttgtcataaactttaacctcggcgcccaaaacatgttatttggggctttaggaatattttgagatgcttgaataatgtgatagctacccttagttcattctttgacctaggtgaagttcttttggaaattttactttatatgcatgggtgatgcccggtgaattactagagacgactaggttacactccggtgattactagtgcacatgggtatcaatggacttgagcgtggcacatctacatgagatattgacttgcagaagaatacaaatcttattttggaggcaaaatatgataaatcttattttggaggcaaaatatgattgatgccaggagtaaaattgttgtttgaaggacaaaacacagagccccaggctaatgtcaacttgggcaccttgtgtgattgcatgctagcgcccgatgatgcctgggggataactcattactcgaatgatattttctcttgattccaggtctcatatcttttcttagagtaaaataagaataatgtctgagacataatcacagtcgaatcgacagaaacaccaaaagtgttttatgtaaacctgatcgccagcttttcatttgggctccagattgcttcatttgtttctcgaaagcatttggatcttcctcgtggttaaaaataagggagatgcctagaaaacttctccgaaaagaagttttagagttccctaggttgagatatgtcaacctgcgtgcccaagatggcctaagggtctgcactgcgtgcccaactaggggaaacagctccaaattggtctcgttaatgtacaatgttcttttttgggaaaattactccacaaatttcaattttgtcaaatttttaagggtgtaacccggtgaaacaaaatcgatggccaggttgaaatgtcaacctggatgcccatagttgtgaatgggctccttcgagatgtagttgttgaaatatcatatcctggcattattccttgatgaatttgaggaatatgttagttttatggtactaaatcaaatctatacgtacaggagaattgtatatccgatcatcaatttaccatagtcccaaggatctctagatgtatatatatttattaaaaatataaattgcatgaaagaaataaatacattttgatgcttatcagggtatccttaattctttttgtaagttgtatcttttcgggtcgattaaaaactcacaaagaatagtgtagactactaggataaagtgtatatgaagttattgtataaatctcaacacatgaatatataagaacaatttcttatgtgatagagagtagaaggcttttggtaaaaatcctttttaggctttaagaaaagtaacgtgaaaatttttattccaaaacttatgttcaaaactatgttatacagtatatttaaataaacccaataaaaactttatttaattaattatttaaatttaaatatatttatttaatcacatttaattatttgaataaataatataaccaaatttggttatagatatttacatctaataaccgattgatgaaatctctcaaccacttaagagaatatttcaactactttttaaatttaaatatatttattaaattatatttaattatttgaagaaataatataaccgtattagattataaatatttacatctaataactaattgagggaatctcttaaccacttaagagaatatctcaactactttttaaattcaaatatttatccattgaatcaatagggactctccacagcatgggtcgcatgcactgtgtatggacacaatgcatgtggagcatactttgtctcatttaagacaaggaatgtgccttttgtcttgataattttgtcttttttcctgtttaattaatttaaaaaataaattattcattaaaaaataaataattactattttgctaactcaaaataattttttctaaaattctatatacaatatttatcctaacccttaacaatgtttcaaggtggcaatccgggaaccatggcctataattctaagctccaataaaactagatttattaattgaatctcatcaatcaaataatcttgttcatcaattccatgattactctactataaatatggaattaaactcttagtaattatagaattatatatactgagttttactgcacttgttactgatataatcaattctattgattagccctctttgtgtcagttcgtaattagttttggtcaaattactattttacccttctaattacttctttatcttttagtatcgctaattgacttgtcaaagtataatttgagtctaatcttgtgcacaacttttcaattccaaaattaacacttaaagggaactaacattcgacccattagaaaagttcgaattccataattgtagatgtattcccaaccatccacattattaaattcccaaaatatagattttaagaatcatcttctctgagaaactttaacgagtaaattaaagaacctaataacatgaacatgagtttatgattactcaagatttaggcgatctactattgaccaccattatgatataaattaggtctttacaggaaaaatgtaagtttcatatagataactttattcatatcaattcttgtataatctctatgatttatatagcactttcacttagatgcgatactacatcagtaaatcgaatcgagattacttacactaaataacaggcattagtgaattgcactagcaaccattgattaaagattttcaaactttaatatgttactaactattttattcatggctaagtgatcttaattctccatacaactacaagtcacaacctcatgtatgaataaagaattcttcaatatttatatatataaattattcaatattatatattaataatgtaacattcatgcatatatcagaatgtttgactcttattaataatcagaaatatctttacaggcttttcaaggtataaaccctaacaatatcccacttgccttaaaagaaaattgggcatctcccttagtcccatattagttatatgatccataaaagattttattggtagcgtctttgtgaatggatctgtcaggttatattttaatgcaatctttaagatcgtcacatcatatctctctactatatttcttagtaaatggtacttcctctcaatatgcttgcctctattgtggcttcctagttccttggagttggccactgctctactgttgtcatagtaaagcaccagtagtttttctacttctggaactacatctagatcagtgtagaatttctgcaaccaaacgacttccttatttgcttcacgagccgctatatattcgacttctatggttgaatctgtaatactagtttgcttaatgtatctccagactacatctccaccaaaagtaaatactgacacaaatgtcgattgttggctatctttgtcttactaaaaatcaaaatcagtatgtccagtaggatttaactctccactggaatgatcaagcatgagatctcttgttctccaaagatacttgagaatgtgctttataactatccagtgttccaaacctcgattaaattggtaacgactaacaatacctacaacatagcatatgtcaggccttgtacacaatatttcatatattaagctcccaattactaatgcataagggtactatctcatgtcctccatctcttgaggagtctttggagattgattcttgtatagagtaattccatgtctagacggtcactgtcatttcttggaattgttcattgagaatctttcgagcaccttattaatataagttgcttgagagagtgctaatgttctcggctttttatctctatagattttaatgctgagaacatagcttgctttttccaaatcattcatttagaattttttagccaaccacttctttacgtctgataatcttcctacattgtttccaatatgtagaatgtcataaacataaagaattatgaaaaccactacattacctttaatgtacttgtattcacacacttcatctttgttttgttcaaagtcatactctttaatagtcttatttaatggtgatattccaagatctagaggcttgcttcaatccataaaaagatttaagcaatttgcatacctttcgatcttcccttggtagcacataccctccaggttgttccatataaatggtttcatcaagatttccatttagaaaagcaatcttgatgtctattggccatatctcatattcataagtgccagcaatggaaagaagaatgcaaatgtatataagcatttccacaggagagaaggtttcgtcatagtccatgccttctcgttgtgtgtaacctttggctacaaacctagctttaaaggtctctaccttcccttcatcatttctcttcttttttaacatccacttacacctaataagtgtaatgtccacgggtggagttttatattcccaggctttgttggtacacatagaatccatttcttgatccatggcattgttccacttgtctgagtcagtgtcttccattacttctttgtaagtcaatggattgtccttatctgtgttaaatgttgggttttatgccctaaataaaactcacttcaatataatctgatttacttattaatatagatcagaaataacatttaatgtt

SEQ ID NO: 301521 - DNA, 1286 bp, Cannabis indica
ttaataataatctgatctaaaagtattatgacaaaactgtttacatttttcgtatctgttcgaattttcaagttagttatattaaaaaaaagttgtcaaaaattaagctcaaggtcctattttggaaaatacagggtttattttgtcatttaacaaaacagatggtccaattggtaatttttgtaaaacacgtggtctaaaatggtatttaccctaattttgacatttttttaagctgcaaaaagaataaattatagtgtaatagaaggtgatatattttgtcagattaaaatcatcaatatgagcttatatattggtatattactaattgtagtttgatccaaataaaataatcattttagtaattataagtcatgagtattaaaatggcatgagctaaatttgtaagtaccttaagcgatatttttaatttattgaggggctaaattagaaaaacttaattcaaaaatattgaaggcatgcgtttcagctgtctccctcttccatggcgaagaagaagtaagtcgttcgaaagccgattcagaataatatttcggatccccctttaatccaagatggtgtggatggtgagaattcgagtgagcagttcacggactgcttagaacaagaggtagatcctcaaattgatgagctagtgcgatctgagattaggggaaaaatagctgaggaaatagaactatttgaaagtgggaataaaccgtgggttgaggaggttgaagatgatgattatcaaacgaattcccaacatcaatggaagcaattcactattgataagatctcttatcaagatgcaaaactttcgtacatggaacctttaattcaagatggaaaaaagattggtaaggttgatctgaatgaggttaaatctcaatcgacattttggaattcagctgtgatttgtatggtgcttggagtcaatcctccttttgccatttttgaaggattcattaggagagtttggggtaaataaaggatagctcagatagtgagaatgaatgttggatttacaattatgaagttcaatgacgaagctactagggatcatgtgcttgaagagggagtgttacagtttgatagaaaacctgtcatagttaggccatggtcagctgatatcgatgctttgaaattgattaaatcggtgcctctttggatccgattatatgacagggccagtttgacacagctatgctgtggggaaaagcagttgtagatgtgctgtagagaaaaaaaatagttgtagatgtgctgtgagaaaaagcaactgt

SEQ ID NO: 301522 - DNA, 1137 bp, Cannabis indica
ttatttaccattagacttattgggatatcacactagtgcctcgacttccgtccacttggtaaaataatctactgcaaccacatcatattgcactcttcccttcccttttagtaactgaccaattaagtctatctcccatattgcaaaaggccatgaactttgcatctgtgttatttccttgggggcaacccttggtatttttgcagacttctagcatttgtcacacctttggatgtatgccatggagtcctcgatcatggatggccaaagaaacgttgtcgtagtatccttttggaaagactttgccctggcatgattttcgcaaaacctttgatggacttcatctaacaatctttaggcttgggcttggtgtacgcaccttaagaagggcattaagaacccctacgacacatgacaccatcaatgattaagtatcaggctaattttcttctcacttttattgcctcgtttctattggaatataggctaccatgttctcagtacgcgacgatgggggtcattcatgatgggttcatgtcaagtagaaggacattttctttcacgttgatgctgggatcaggtaagtactctatgggtacaaggttggccttgtctaccttggtactgcttactagtctggcgaaagcatcagtggtagcatcttccctcggtatttgttggatggaatacccttctaactgagcaagtatgtcttgtattttgttgaggtaagccataatcttttcctcgctttccatatagtcacctagaacgtggttcaccattagttgggagtcattgaagatgtctaagtatccagctttgacttcccttgatatttcaaactagcaatcaatgcatcatactcagctttgttgcttgaggcagggaacccaaagcggatggcagcatggattttattgctcttcgagagtgattaaggtgatactggcccctgataattgatcagtagaagagccattaataagtagcttccaagcttctttttgatgatccttctctttctcttgcttcttctctgagtgtaatatctcgaaaaatttaattattaataattaagacatattttataaaatgtggattgttaggttatttttagtattaattttagattaa

SEQ ID NO: 301523 - DNA, 1743 bp, Cannabis indica
gggcataaaacccaacagttgatgagggggtaagaaacatgtatgaaaccctccttcgccaatcaggtttcccccatcacttataaggcatcctgagcctcctcgtactaatgtagcaccaccacatcaaccagcccagagaggaaggtcacgtcaaagggaggcacctcatagtcattttccaggtcaagacttgctttgaatccctagagataggcaagaggactcctgagttaactatgctcgctagggacctcaacctagaggatgtggatgggaaaggagatgcaccgtctcccgtgataactatgcctattcaagatcgacaccctaagagacttgaccacaacatgcggaatctcatccaccacgggacagtaactacttatcaagatcttgaactatagcaacacaatcgtatgctcaacaagggcctgcacctcagggggcacaacaatagaggacaaatagtttcatggaggatagttactgctctaactcaaagagccaatttatgagcattcataacacaatgctcctcctccgtattatgaggagcatcatcgataccccccacatgaaccaaggaaccctaatcattagaaccatctaaatcgaaggtgacaacctgatttgagagatcacttgatcatagggggcaggcaaaaattaatggaggctccttattaggattcttaccctgaaaagcctataaagatatttttgattattaattaagagttgaatattttgatatatgcttgaatcttaaattatgaatcttaaattattaatatttattattgaataatttatatgtaaatatcgaaaaattccttattcatatatgaggttgtgacttgtagctgtacatagaactaagatcacttagctatgaataaaatagtaagcaacatattaaagtcatagaatctttaatcaatggttgctagtacggtgcactgatgcccatttatcagcgcaagtaatcttagttcagattactaatatagtatgacatctaagtgaaagtgttgtaaataatagatatatattatatatgaaaagaaccaatataaataaagctatctttatttaacatgtcttttactataaagatctaattcatatcataatgataatcaatagtagatcggcctaaatcttgagtaatcatgaactctttatgttattagtttttttaattcactcaaaatttttcagagaagatgatttttaaaacttctgttttgaaaatttaataatgtgaatggtagggaatatgatatacaattgtagaatcttaactttcctaacggattgaatattaattctctttctgtgttaagtctcgaactagatatagataaattctctcatagatatagataatatattacaatgtgtgagtctactatagagttaaaaaggaaatactatgtatagtaattaggtcatactataggaaaatgcttaggtagagtcacaaaaaatgtgtctacatacagacatttttttacattatgtgtcactctattatttaatactaataattaattaattcttttttatttttatttctttttttttaacaatttagtgacccataataaggaaagttacctaatattcaaaattgtggatcctaaagcctcatttactaaaaaatcttcaaataaagtgttttacatgcaattttttttattgaaacacgtaatatttttgttttgatatatagtgaaa

SEQ ID NO: 301524 - DNA, 2610 bp, Cannabis indica
attccattgcatgatgagaaaaaatttaataattttttatcaattttttttatgcattttaaaatttattccattcctattcttatttccattctcatttttattcctatgttttcattcttcccaccaaacgcctaagtgacattaaccattgacttagaaaagatataatggtaagtttatgatatattttccactgtcaatatcggtccattctaatgtatagccaatacatccgatacaagtttactttgctattgccgtggaaaagacattcaacttatccaagtgtaagcaaatcacatccttaattatcacgtcaatataaatccagcacttacaaattgtgagactaaaaagttcgaagcatataatcatgattattttccatcgtgttaaacaacactataatatgagtaactatatgtttgagatttattagaatttatatattaaacatagaattatgaaagtaacatgtgaatcaagtaacaaaaaatgatttttcatcatttattaattagtaaataagattataataagatgaattttatttagggcataaaattcaacttcaccatgggaaccaggaggtctaacaagcttaattaaaaatgaacggaaggaacaataggaggaggtaggggtggcatagctcctaaccctaaaaaaggtgacatccctacaactctaggagtgcctgtacaacctaacaatccagcagcgaggtagcaatattacaagcacattttagatgtaaggaagaagagtttgatagagataaatagaatggaccacttggaccgatagtcaaccaacaagtagagaataaagcgaattcagtgatttctaatcaaggatttgagcctatctatgaatgattccggaaataacacccaccaagattcgaaagaaaagttgatccaatggaagcagaagaatggttgggaacaatatagggaatacttgaccatatggggttggggaattgagacagaatttcatgtgaagccattttatgaaaaaggatgcaagaatttggtgggggattttcacaaaaaattgtgatgttgctaccgtgactttggaggaaatggtgacaatattcaatcataagtattgtggtacagtagtccttgaggtcaaggtagatgagtttgtggcactgaaacaagaaggtgttaccgtgacggagtatgcttagaagtttcatcaactggctaagtttactccagagatgattccaattgaaacactaagggttcataggtttgtgaaatgactaaaattgacaatttacaaggacataaaatttttggacactgtgacaatctatggagaggccctagaaaaggccttggaagcagaactgtgcgaggaacaaatctagaaggaagtagctgcaaagagggaagctaggaaagctaatcaaagggagttcaagaggaagtcccaagaaaacaaaaatagtggaggggataagaagttcaaaagagatgcaactaatagtactcctcacaactagaaagagaagcctatgtgttctacattaaaccgtaaacatcctggaaaatgcaagttcgataagaaatgcttcaagtgtggacaaggagtccacttcaagaagaattgtctgtaacaaaacaacgtagtagaataagagaacaaagatctagtccatgctcgtgtgtttgctctaactcaaggtgtggcagaagctagcagtaaggtggtaacaagccagcttgtttgtatttggtgtaaattatagactattatttgatttaggggccacaaattcttatgtgtcactagatatagtagataggataatactaaacgttaagatgtttgtcaatagttttgtcataacacttcctttgggaggattaatgatgtcttcaagatggtttcaagctgtacccataatggtggaaggaagggagtgccttggaggtttcatagaacttgatatgaaggactataaagttatacttggaatggattgattagcaaagtttggagctaccatcgactttaggaggaagatcgtaacattcaaaccagaagggaatgcacatttcaccttcatgggagatataactagagtttagacccctatcatcacaacagttaaggccaaaagcatgattcaaaatggatgtcaagcttatctcgcaagtatagtagacaaagtaatagatccaactaggaccccgagatgttagaatagtgtgcgaattccctgaagtatttctaaaatatttactaggactaccaccagatagagaaattgaatttgtaatcaagttagcaccaaaaattacatcaatatcaaaagcaccctacatgatgacaccgacaaaattgaaggaactaaagcttcaactacaagagttgttggacaaaggaccatttggcaaagctactcaccatgggggacaccagtcctattcatcaaaagaagaattgtagcatgcatatgtctatcgattatagagaattaaaaaaggtcaccataaagatcaaataccctttgcagaggatagatgtaacaccccgatttcccgagatgtcacataggatagtccgtataaaacaatttaataa

SEQ ID NO: 301525 - DNA, 3679 bp, Cannabis indica
atattgtgtattttttttttttaaatatgcccaaatatgacatagaacactcatccttcaaaaacccaagttttatatgtcggtttcagagaagcttctatcttcatcaatgaaatcttcttcttcttcttcttcttctttcttaagcttctttccgcctgaaacacctcgactacgtctttccagctctgtcttacattctagtgtcagctatagttggaaacaaaagagaccctctttccaagtctatgcagtctcctacgagaaattcattcaatttgctttaaatcatacaaagcaccatacccatttgtctccttctcctctgcaggtaccttccctcccattactcatgtcattccactgtttgctgtaatctctcaatttatgtatgtagatatatgaggcaagtgaagttagtcttttgtgatactttaacactattattgcagaggagctcccaatgtcacttcccttttgattagttttggtgtgcttaaattgtgtgatatgaaatagtttttctatttgatctgaaaagaatcacaagagctttgggaatcttctcctcctgggtaaaaaatagtatcttgttcaggtccagttggccaatctgctttctttaactgtcattcatgtcaatatggttctcaaattataactctagcaaaatccatatggatttttgtttcaaattgtttctgaatatccttggaagacaaactatcaatgtgctttctcttgtcagtgtaatttatcttttatgcactcttttattgcaaatggtaactaaagctcaacttgttagttgtaaccatgtgttagatctatgaattgtttctttgttagatagacatgtttatatttatgggaataatttctataatgtcaggaaaaatttagttcaatgatgtctacggatggtaatgtagagcttcaaatggggtccttcgaagctcccaagatcagacttctacggagtcttagtattgagactgaaacaatgcaggtagaactatctaacttgctgggttgcattttcatattgtgtggtttgttttaagggatgataagatgacaccaattccagtgccttctcatgtatcttttagaagtagttaactatcatgtcatacttaatgtgtgagattatctcaattggatctgtgccatgaagaattaaattgataaaataacctgatagcgttgtctataactgaacctctacagtgctcaagttagagaaaagaaagaaccatgatgaataagtgagatcttagtggttgtttcacagctttaagcacaaagagttgattttacagaagcaggacagtattccaaacattagccctggcttttttattaaatctttaattgtaggttaagttaaattttcttatatgtttaccttttcagttgaaaattttctttttcgtttttatggcaggttttagattttgctgccttcccaaaaccagaatacgatgtacccatcttttgtgctaatttttttagcaatgcaagtacaagcatagttttactgtaagctttcttgtctctgaattaaaactcgactaaagagtcgatacttttttttttttttgagaatacaaagagtcaaggagagtaaaatcagtgctgaccattaaaagggatttcgtaattcaatactttccttgtcaaaatgtttcctgaactttgtgagagttttcacttcaccttctcaaccctttgtgtatattttagtctttagacatggtttattcataatgttcctatttacttgtatttgatattataagtaagcatctacatgaattggtcatttgatacttgttgaagatgagaattcatcaactacgttgttgtgggtggaatattaagaacttagtcaaaaaatgaagaactaaaagagcttaatggaaatggagaagaaaagttgcaaacagaaagggatttgtaagaatcgggcatgttgaatttctgatcattgtggaattagtgcgcacaaattcaacttgcttgccatattaaacatggtgaatctaggatataggcttgcctctgttttaacaggaagtgctactagaatggaattttaagctgggttttctggtgaaattagaacttaccctgattaactgtttgtagggatctcaatcctttgcacgatgtcatcaatcaaagggagtacaaagagaagtattattcaagcctaattcctcttggagttaaatattctgaggcaagtgaaagactaaaacaaatcataaagcatttcctaatgtttacaatagcctcttaatgactttcaagaatctttgtcaaacttgttggccatgttgacttaatcactgatttcatgcagcttttaccatggggaggaaaacttacatcagagtctttaacattcttttcaccgattgttatatggaccagatttactccaaaccaacacaaatatgatgtcttgtattctgcatttgttgattattacaaggtatacatgttatagcttttacaaaattcagttattcatgaatattaacatttatttggtgtttatatttcaaatttgtttcctaaattctaaactctcactactttgttgctgcaggcttgggttgagctaattgatgaagcagcagaggagaatgatgcatccataattaaattcaactgtgaagcacaacatagatatttggcatggagagcagaaaaggtggttaatcttgcttactttgaatcaaccctattgatagagaatattggattttcccatttttgaatcataatttcatgccattgttaccggagtactaaaaaaaaattcagagtgcttcaagaaataccaaataaaattaagaaaacaaaagtgtgttaggaaagaagggagtacgtgtatgaaaacaaaacgaaatcatgtggaaagttcataaattgttcagtcaactcagatgtataagcttcacattgaaatgctctttgattagtgaattcatcacttgggttttcttccaactccaactttggaacttccacatttatttccaattaccttgacaattttctggaaagcaggatcctggtcatggacttctaaaaaggttaattggggacacagccgctaaggtataattccatactttttctttctgattttggaacacaatcaggagtccagttccttgaatttttgttctttattctttgaaatcctgcaggagttgctaaggaacttccttttccatggaatagatgaactaggaagcaaaagcttcttggactactttccagattatcgttctgaggatgggactgtgattgagaaacgcagtataattggaaagtcctttgaaaatcggccatgggacgcaagaggagagtttgttggtaatatatttataaattaacttgtaatataaaattgcctaatttttatcgactaggccctctattcagtccatggttcatacaagctactaattattaggattttttctcccccgaattttggcatgtaccaaattatgcccctgaatttttttaaccgttaaaattattaagattgttagatttaaggactcttgtctaatttcatttaattttactgtttcagtatttgtttatgtactaaactatgctcccaagactttgatatctatcaaattatgtcctt

SEQ ID NO: 301526 - DNA, 2905 bp, Cannabis indica
gctcctaattttcactcctagtaataaagatacatacaataaataatttcattggcataaaaattgatgtatcaaatgcataacatatcaaattaatatttatatatattcagctcagataaaaaaaaaatgtattcatatattcaacaaaaaaaataataataaaagtttgtaaatttagatttcatttggacctcatttttaactgttatataattttaattcaactcaatctgtaaagtatataaatatttgcaatttttttttttttgaacataatataaatatgtgcacttgaaaaaaatctaaaattgacattgtggcctgattagatttactaatagtataaatttaattagatgaacatcttatagttaattataattgttcaatatatttatcatataattatacatatttttaatcattttttggtaaaaagaaaaaatgaaaacagttttgatggataataatttaatcaaacatgtatgaacacataatacacgtataaatatatcaaattattgtatgtacttttcattaatttggcctaattaatgtgcacctaatatctgtattgctttaaaaaaaaaagtatatatattctatatatatttatataactactctctaatttttcaatgcaaaatttttgttcttattgaagaaaaaaaaatctctgatctggaaattaattgatatgtgcttagctaaaaattgatctaataaagagaatcaaactaactattattgataatcactcaaaacacaatttattaatattttcattgaaatattatggtaaactcactcaattgcacccaaaaaaaatcttcttcgaagaaatcacacttaattaatttatgaactatatagcaaaaaattaattaaactactatgaatatttgatattctagtttttttttcttttaatcattttttcaactaataatattcataacaaatgcaatattaattaattattaactaagtcaaagaaaatatatcaaattaatcaaaagaagaagaaaaaatggcaaagcttcacctcataattatattaaaaaaattacatcaatattaagttcttggatctatatatataagacatagatagattagagtattattacacccaaaaaaaaaaattataattaccaaattaaattcaaagaaattccacctatggattattaaaattatataaaaaaaaattaaaatttaagcaaaaaataaaatccaaaagtaatatactagaattaattagagaagatgaagaggattagatggtaaataatcttcttgaaggagaaggagtagtggtggtggtggagtagtggtacctgttgccggagacggcggtggttggccggaaaatgatgccggagaattgaagggttgatgttaaaacccaaaagaaatccttaaacaacatacccatttcactaatcatttgtatgttttttctcattactacacatatcattgtccaaactccttctttcatctctttccacattttctttttccaaaaaaatttattgtttatttcttatgatatgatatgatatgaaatacattatgatcttgtaacaaggaactataagaaagtcatatgctattattattattattattattattattattattattatatttatgaagacccctttttactaaaatgtccttttcttataaaaataacttttatctatgtgttataatgcatttaatttatttatcatattttctttaattacttggtgtagatgtctaactaggtttgaaatttaatactaatacatttaaaaagataataataataataataataataataataataataataataataataatagaggatttcactaattgttacacttttttcaattaaataaaattttgagttagaacattattatgatggtaccaaaatgcctaataattttataacatggtgtcttataattagttagcgatttcaatataggcatgattttttgaagaaaaaaatgaaagggatataaagtttaaacacatgatcaattcaattgtatataagatgaggcatgccttagtttttaatttgtttgtgtgtataatttctttaaaatgatatatagttattttattagggggaacatataggggtataagggtaatttgatagtttgtcagaagagaaaacgtaagatgaggacatggtgtactcattccatagaagatctatgcttgtacattataatatacaaatgtccgtacgacttgttttggggcaactcactccaaacatgtcgacactctttctcatcattcctctctattctattctcttactttcattttaatttatgcttcttttaacttctttttataatatcataccttttgctaaaaaggcacttagagttatgttttgtactctcttaaatcacatatcacttttagggttgtttctagtactcttttagatttctagcattcttcatttagcatttgttttcatgttatatcgttattggtgttattaaatatcgaattttatataattttatttaataatttttagagaatattgttaacgaattgtaagacatcacatataaatggtactaggaactattgatacccaataacaatatttgtttttcttttagttcttaaacttgacgttataactcatccttattattttcactcaacttatgaaattccgtatcttaatattcccagtttgattatttaattaaatgattaattaaatgcggaataataaaactggtactgaaaacagttttctgtagttacagaatgcaactccgtaactccagagaaacccagaaaaacaaacagtgcataaaagtaaaacacacaagatttttgtacgtggtttcaa

SEQ ID NO: 301527 - DNA, 2926 bp, Cannabis indica
attattattattctttattttgaagtaattatatttttctttttaccaggagaattgtaaagcagttggggatgaatacattgaatgcgaaatcatggtaatttaaccatttcgctttcttagtcaaattttgaagttcaacattttttaagttttccttttattggtggagggttggcagattgttgttattgatttgattcttcacaagcccaaagcttatagacatttactctacaatgtgttagacccacaggctctcaatttgcaggtatagttagtttctgcttcaaattcttttgcttgaccgatcaattagagtgtgtctaactctgatgtctttcagggtttactgtggaaatgtagttttggttttcttctattggatgcttgtatccattcctctcctgaatttttttatttacttttctatgtgatactgtatataatatatgaatataaataagtgccttaacacccctgaagataggagtttgttaatttgaagcaaagaagaatggagtttgtccacaagcattgattctttcatttggacatgtcaaaaggttgggactttttattttgattgcaattaagttttatgatttcttatgttttcatcttcttcatattaaagaatgtataaatgaacagattatgtgaactcttttccttctgctcattgtagatattgttggatgtatttcttggaaatctcatgtttttttctacctttgtacttgccatgaggatttttttgggtacatggtttggatccctcaggtaaaatttcttgaaagcttatatacaaaaatcatgtccaaaaatagaagcaataattgagggctgatatttctttcaatggaaattatagttttcattattaagcatgattcagttatatagtgggaatggtgatgaaagagggcattaaagggaccgttctctgttgcacatacttattcagccacctgcattgtataatttggtctattgtttcagcagttacaaagacattttgcttgcaattctcatctcaagttacttcaagttgtgtctcttagctatgatggtatggtttgacgatctctcatccttcctagtcgaacacttatctaaaatagtaccaagtttaagctcaaagttgaactctaattaaagcttgtcttctgcaggtctgggaatttccgtcttctgcggtttacatcattgatttgtatgtcttctcatccaacaccgtagcactaaaaggttagtgatattattatcagttcaattctgtctagatatatttgatcaatctgatttgttgaattttatggggatatatttgtcatgctcctggtcgttgatttactcttcttgttttgggttgaaacagtgatctcaaagtcacccacaagtagatgtgtattgacctgtttcagtgcacatttgatgaagttttttatcacacaaagttggagttgaaaactttatgattttaggacatttgatgtgtaattttctatcttcttgtcaaaacttcaactgccaatggtcttttaacttacaatcaatgatggttcagggctatatatggtcaaatccctttttgattcttgccactctacaaaaatgcatacctcaattatatatttatattgtcaacctgaagaattctcataccaggaatgttgcgtcttaaggaactcttaataaaacccaagtaattacactttcaactatgcttgcagtttggatggatgattcaacagcacgccatttaaaagtagacaaattcaaatatatctcccaaaatagcatcagctcaagctcaaccttacatatgcaatcagtaaacattaaagtacattacacgattgaattgcatcaaaatcttggattgagaaaaatgaaagaatgctaatttaaatgaaggtcttagacatttcttcattgcatgtagtagaatcttaagtgcagtaaacgcccattaacgattctttttcttctgcacaattttaacacctctgtgtaacaccaattccagaacgaagctgtttgcattgaacaattattgtcataaaatgatcttcaatttttttttttcaacaagttgctgctttcaaccttcatctaattttttcactcagaggctagacttaatcttcagaggcagtgaaaagaggcactgtggtgttttggcagcttctatagtctgcattattttatatgaaaattgaagagtacatatttatgtatgatagttttgagtcatatgcaatgcaacttgagtttttttggtacactcgtggatatggttgctgatgactagggttattttctcaccttcccttttctctattgacataaacgtaatgagataccacagatgttgcactagagactagagttttcattcatgaaagtgtgtgatatttcatttggtgagttaaccattttcttcgagagcctaataaattcaaccccaagtttgcctatactgagagtgcaataggatgaaattaatgaagtctcgaattaaatgatcaagaaacgtaaggttcttatagaaaacctaatctatcacatcgaacaggggtggtggcgcagttggctagcgcgtaggtctcatagcttcgagtgatcctgaggtcgagagttcgagcctctctcaccccaaagtttttaatattgttattgttattattattgtccctaatatactagtattatatttcacattttccaattattttagcttttgctctaattatatgtaatggtaccacactttgattaatgtatgaatggttgtggaaagtaaataaataaaactttactactagaaaaagcagtcactaacaaataagtattttgacctttaaattttggttaaaaaattaaatttactttctaaattattattgatgttaatattttt

SEQ ID NO: 301528 - DNA, 990 bp, Cannabis indica
actgtcacaccgaagcctcagccaatatccttctaacaataagcaacacactttttcttgcagtccatggtgcacccgccaccaccgccaccgccaccgtaccccttccctgaccggctataggaggtgaaacacttagctggacacgtcagcttcttttggtaacagggtcccttttccttgcacaccacagtgggcctcactactccatttctggaatggcccccactcggaccaccatacccggatccgtacccgccacctacgatcccgttgccgaaaccgtttccgaatccgggtatgttgaaagcgggtccgggtccgaaaaacccgcctggaataccggggttgccactaccacctttgttgttgttctggtttgaaggggttcccttggacttggaggagtgcttgagttcagcagagaagggtttgtcggaagcgggtcgggtcgagtaacagagtgaagatgcagcagtgagaagaaagatggtgaagagaattttagtgatggagttcatttttggtttcaagtgatgagttgggagggagagtgtgatgaggagagaaggcagcgtttgggtaaaggaggaatatataaaaggtggaggatgggaaatgagattgggtttgaaatgaaaagagcattaattgagggtattagtggacagttgagggggcctccatgaatggaggggtaggtaggttgagtgccattattaagttgctttttactccttttcgcattatcatctgccttgccttgccttgcctataatattttatgtaattaattataataagcttccttattacaaaataaatcttttttcctctaatagattttgtttgatactatttttgtagcattaatttataagtgtggtaggaaaaatttgactaaatcatatatttcttttattgattaatttgttttggaaaaattatagtatgcccatttatactttttaatttgtttattttattttt

SEQ ID NO: 301529 - DNA, 1047 bp, Cannabis indica
tctttgtacacatgcagacaaaccaaaccatcaaaattcttacaattagctgcatgtaacaaacgatataattctcatgaaactttatcatgtatttaaccaatattttgactagttataagattattatgaaaaagggagtaaacatgcattactaataaagattctctaccaacacagttcaacaatgagataaaataataaacgaagatcaaatgttccttactcggggaaggcatcaagcaagagctcaacagaatcatccaaaggacgaccaagcttcttttcctcctcctcttcaagctccttgagccaaagaatggcatgaactctctgcctcataatcctataatcctttgccagtttctccactgtgtaaacttccggattttccttgtgcagtttatacatctcagccttctcggagtccttgagataagatcctctagcaccaggttcacgaacttgcttcaataagacagtcgtctcctgcatcctattaccccatccatccaaaactgccctacttctcttgttctctgctttccattcttctaagctatcatcaactttctgaatctcagtaatcactgtagagtgagacttatcactaccactagaacgatgacctgcaacctccccatcgaaatgatccttggtaattccagtagaccaagaagacactgaatcccaacccaaatcccctgatgtggtggaatcaccaaatgttccagctacagcctttccccattcacctccgctatcattttcaccatcaccgccccgagatgttgatgaaaagacacgagaggtcgcatatttattataaacttcactaccattcctcgactgatttacagcaccattttgaatcacatctttagttttctcattcaaaactctcaatgtggaagtgtttgcattaagtgaaatagaggacagacgggttataacacgctgcagattctgcattgctatagtatttcactcctagaattgactctgccactcaagaaattccgaaaaaaatcctgaaaatcataaaca

SEQ ID NO: 301530 - DNA, 915 bp, Cannabis indica
atttttgtaagttttcctattttattagtatataatgaatcaattaaaaaaagactaacagatttagaaaaaaacgtgaacttgaagattttaccggtaatttttgaagttaaaacttatgagcatcaaatataaatttttgagagcttgtgttataattttctcttctattaataatataaaaaagacttaatttagaatgaaaaaaatgagaactttatgtttgtttttatctcactattagtaaatcaccctagccatcaatatcatcaatttaattattttgttttcttgtatagattattattgacttttgaattttagttggtcacgaaatttaaatgaaaagaaagatatatgaatcttattgactaagttttcttaaatgaaatataaaatatgctgttatttcctcaaccacatatgaaaaaaatgaaacattaagagatagatatttgtatattttaatattaagttacaacttatatattttaattttaataaataatataaaaaattgttgaaaaattataaaatggtatatgaaagtaatgttaggcataagatatattatgctctaaaaaagatatgtttatcttgttttatatctaatttttatttacattttgttttgttatttttttattttattaaagaaaattgcaattttgtttaccaactaggaatgtaaaaaaaaaagtgtcatcaactttctaaccaaggaatgacaatagtgcatattagggatggtttttaaattactatttctatcttctttaaatatagttaaactaagcttgtgcctaaaacttgtctagggagtcctaaaatttttctcttttttttaagaaaaacataatgcatgtttgacatcataaactaaaaaaattggttttttgtttttaaaaatagaaa

SEQ ID NO: 301531 - DNA, 1098 bp, Cannabis indica
tcgtttttttttttttcaattaatggctctgttcttgtccaaaaaaaaaattgatggggttaagagaagttgcttatttgttggtttaaattgattatggcataaattgagtattgggatggtctttagttcttaaaaatttgaagtttgagatgtataatgtatttgaggttcaaaattaatgatctagatgtgtttgttattatatttcttttgagtttgaattgtcattgttgagtttaaggcttactcaggtattgtttcaccaaattatgtatctttgattgtatggtttgaatcttgaaacagccttttctggatttatagtttcaaattaatctggatgagagattttttattattattgtttatttatggctttgttcttgtctaaatcaatgatttctatgtgtttgttattatattttcttgagtttgaattgttattgatgaaagttttccatcaacttatgtttctttgattgtatggttaatttgtgagtttactatatagttggaatgggaggaacaacaacggcttgcataccgcagatgggagcgggaacaaggacgaagggatgcaactgaagacatgtctgaagaattttctgagggagaaaaaggagatggtatgggggagatggtaacttgtgagattccgagtaaaaagtttcatcgtaacatttcgaacttggaagtatggtcggatgataaaaaagagaagaaactttatattgttcttataaggtatgattttactttcctgtcatgtttgagtttcgatccaaagtaactttaaggcatttgatgtgtttaaaagctatgtttggaagttggattttggtagggaaaagaaaaagtaaggaaaatatagaatatagaaagaagaaaaaaattctcatgtttagatttagtatagaaagaataattgtatggaaaaaaatatgattcaacaaaaaaattcgtactaaacatgattttttttctatattttcctttctgttttcttttttggttgggaggaatgaaaatataggaatgggaataggaatggaataaaatttaaaatgcataaaaaaatttgataaaaaaatcatt

SEQ ID NO: 301532 - DNA, 4894 bp, Cannabis indica
atatatatatatatatatatatataataaataaagtaaaaaaattaaaaaaaacattaaacagagacaaaatcaatgagaagaatgacagagaatagagctaacctgggtggtatctggattcaaagtaaagatagcctcttgcaaattccccaaaaaagcatccatgactagagcacccgaaatcattataacacccaagactcgaaaattgggagatgtctgagcatcagctaaggtgaaaagtatcaaaccaataactaggagtattgcagatacatattcacgaagagggtatctccttctcagtcctggaatgaaggctcccatgatcatgacaggtagtacctgaattttcatagccaaaagaataagaacaaagaaagatactagaaaagagggtcaaatttaacagcaaatcgttttacagtgtgtttttctaccttagtggatttgaacatgatttgagcaggataattaagaaaagccaaagatcctttagtgagtccttgagaacccattagaacaccagagagctttacatatgtcttccatgagttaaccatttgtttggtggtgaatccttgtaggtatattagtataatgtatacaaatccttgtacaaaggtgaaataccacccatagctggtaaaatggaatgaagattaggttcatatttttctaaaaatattaattttcatataaataaatgaaagacagcttacctaaactgaagtcggttgtacacatactcctgagaataggcagattaatatgtcaatgaccatataataatttttttttttttttttaaaaaaagagcatagaattttatgaacacgtcaaagcaaatcattatattgttcatacaatttttgcacaaaaatgatgaagtgagaaatggtaaaattgaaaagaacaggggaatttcaagaactattgtataacaaatcagcgagacaaaatctcaaagagaaaattggtaatggcaaaaaaaacatctatattatatacggcgattatcatttacgaaaaaaaaaaatacaccgcagattattatttatacaaatccgaatatatatgaactgacctcgcaaacgccattaacaaggtaaccaaagaaaaacccagaagaacaaatgaggaactgttgccatttaggcctttccgtaagagaaatcccaaagagggatagagtttgatcatcgttcctcatttagagaccccaaaatgaatccaaaccttagaaaaccaatcaatgatcaaagcagaggcagagataaataaaataaagacagaacaacagaaaacaaaaactttctttttaaggtaaagaaaagatctttggaaaagggttgatctatctttttagtgggtatagaagagaagtatcaagaaagcaaaagcaaaaaaatatatatatataaaaaaaagtctttgtaatttggttgggtttagtactcacttggtggctaccaaagtttgaggcatgaaagaaggaaggttttttcacttacaaaaagaaattgacgagtgtgaaagagataataaatgggatgggagtgttgcgattcacatgaatcatggtgcacatggacggttcactgagctcacaagtttatataaaaaagaaagatttacccggaaaaaagaagaaacgggtgggagaattttctcgcgaaaaacaagtgatgatgatatatatgatgagtttgctggtacgagtttggtaatggttacagtctcattccgccaatctacaagtcagtcaaaatattgactttttaattctctatgtgcctcctcaaaaagccatgcagtgtggaccagccaataagatccacacaccacattttctatggagttcttttcttgacaagttttttgcagtatttgtttttgcatttacaaaacttcttttagttttttttttcttttgccttgtaattatttaaaaaattttgtcaatttttaaaaattataaataaaatttaaaataattatttattacacttatgaaaaaatataattattcgtgtaataaaatatttaaattttattattaatattataaattattaatttttttaaacaaatttatatataatctaaaataattatagcatactcaataataaaaaaaatgcactaaaattctttttaatgccaaaacatattggatactatatcaaatatctctttaaaggtgtactgttcttattcattataatattatatgtttcttatatttttggtggagatatttctatgtttgtagtctcatgaaatatggaattaaaattatttattttgaaaaaagaattcattaattaacatagaagacaattacataatagatgtgatattattctatgatttttttctctttctgaaaatggtattagaagagcattatattaggtagattatgaaattgaattaaaataaatatacttagatatggatttttttgtgtctaatttaagaagaaaaataaaaaggaatatagaatgattagcaaataaattttagaaaatttatttaaatttatgagaaaagcctgctaatcatattggaggctagctccggaatgtagaggtttcataaacttaattcactaaacaaattaatgaaataaaaatacgagtatttttattgggtactaatagtatttaatagtttttaaacgtatctttttgtgattggttagtaatattccttaaaaattattatattaaattatatgacacttgatatttaattatacaaaaacgatataacaccgaagatggtactaagcactactggtatcttttagcatatttttctaataatatacatcatatcattttattatttttaggagtttcgtcttccaaactataacttgtgcattatatattgtgccttttgaatttttcaccgggataaaaaaaatgactattttacaactctatgaatagtttggggactatatttaacggattgaaaaatttaagaatttaataatatatattggtcatagtttgggtacaaaaatcgtaaatagcattatttcaatacaaattatacaaattacaaaacatcattatacaatttctcatggggtagtatcttttttgtttttctaattgtaattttaatatatattattacatagatgctattcaatcatgatatctcatatgatcaatcatttaatcaaaaaaaaaatcatgatatgaattattttttactatttttagcacgattctaataatctgagcttttgccttaaaaaaacatattaatctgagctttctgaggaaaatattccaccaatatttgattgtcgcaaaaatgttgtggttaacgtttttagaattttaaattaaatttcaaaatttaatttaaaaaggagacacaaatttaaatgtaaatgaaactaaactttaagaaaacaatatttatttcatttttcatttttttacagcaacaatatttatatcacttttttatttaaaaaaaaaaaataatttatatccctttaagacaacacataatatctttagatccaaaataaaaaataaaaaaaaaaaaagcccaaatataccttgaaggaaactattagcaaagtatgtcttagtttcattatcttagatcaagtaatatgccttttattgtcttagatcacactttggctaaatatatcttttattagtataataagttatcatatttgtatctattttctcattcttaatgagcttgttgatcaatcaatgaatctgtatcttctccttctttaagctttattgcttagaaggtagtttcttttgaggcctttctaaaaaaaaaaaaagtctaaataattttctctgcaccaaataatacgcattaaagtataacttaaatattaatacttatttaggtacctgataaacacaacatatggttttttatcggggatttttacacgtcaaatttgatttatcgtgattttgagtccatattgatgatcacaacgttataacaaacaaaacgtttttctacgtccattaatttacaagtacatagcatatctacttcatagatagaacctcctttattcacattagtttggtttacttaatactcatggtaatttcttttagtgaaggtgaagcgtacatattatatctatataaatatatattgtgtatattgattagatggcacgtgttacttgaattactttcttttatatattaatatattcttacgttagacttagattcatcatcttcaaactttaatttggttagaagtttggttgaacacaaataagttacttaaaaagatgtgaaagagaagacacctatttaaaaaatgaaattaaaatggacaaaggttatgagtgctatactttgggcttgggcaaagtgtcggaaatatgagtatgaagaaagacaaaacgtgttttgtaatgaattttagttgaggtggaataaatagatggtagatgcaaatataattgttcgaattaagaacacctccttaattatgaaagggtgctatccttattaattatttacaagcaagacttgaaatttaagggagcaaaaatgagaaattaaaattaaggggccaaaccataaattttgaataattcaaatgagtagagatatacaaagaaataaaaatattttcttttttaaaatttgggggagagcatcaccacactactcacaaagggcacaatatttttattctgtggagcttaattgataaaaatatttatatttactttaaataaaaattataataattttgtggttttttcttagagaattaccccatatactattttttaatttttttttcaaatttacggtttgggtttttaaagtggtagcaccgctagttgcaataggagt

SEQ ID NO: 301533 - DNA, 1605 bp, Cannabis indica
ttatctttattttcccatatttttgtaaatagcccttaaattaattataattagacttaattacactagtttgcatctaataaaattcatttaacaacaagattaattcttaaataatttattacatttgttggcatggtattttagaattgacgaataattttactaagttaagaatactaatttttgtaattaatctcagataaactaggttagcaattattcaaatatttattttaatagaaaattgttcacttatcatcaaaattaatttttgtaattaactttagaaaataatatagttaatattttatgaaaaattatatttaagtagaaaattaattttaattaatttgggatctatttaaattaataatttttataggaaatttattttatcttgaaaatttatacttaagtagaacattaatttttgtaatttattttgaactaaataagttattaattttcataaattatttataaaattaatatttgggatataaaattatttttgtattaatttttagtacctaaattagtacttttattagataagtaaaacaaattattaaaataaatgaataaaatactgtttttcaaaaataatgaactcatttttaaaggatatctgatctctactactaatttcataaggctgatattctaattgcccctcgagatgtgctgactttgtacccctaagggttgagatttaccagaataactttaacactatttaatcttgaaagataaatatttatagatttaattctagtagattcactcacaagaaaactgctagaactagatttatatatatcgaaacagtggttgaagttcataaaaataagaaaaattatttttcaattattttttatcgaataataggttcccatgttcattagaagagttggctacttaggtgatatctttgacttaaccctatcaggttacagtacatcatttaattgaaaattttggaaattttgaaatgtgcataattttagtatttttttccatgtcttctatatttttttttatatgtttacgaatttcttaagtatttcaataaatttattttgaactaagcgttaatttatgttcttgataatataataattatatagaaatgaaaaaacttgatcctatcctctttaggttttacgaaattggtaaagaaatgtcatcaagacacaaagttcatgaacatctacttatgatactactctagtttcttacagcaaagcaattgtaataggaatactattcctaaaatttgtctatttatcccacaattggccttttcatcaccatatagtttgaatcaaatttcattcacgaaattcagatccagaaactataaataaaagtagatgaaaaagttatcccatcttctaagaaaatgaatagagcccaaatggtcttattttgtgtagtaatgatgaaaaccctcaattttcaaacaatgctactgaatggattgaattagtggctatcttagctaatgtcataaaatcgatataatgggatataagaaggcaaacctaaaggaaaagatgatataataccaatttgtgagatgtttgttttaatctataagta

SEQ ID NO: 301534 - DNA, 2405 bp, Cannabis indica
aggtcaggaatgttattaattagtacgattgaccataatatcagcttatactcagcactcttgtcgcactgatgtgatagcaccaatccatactttctaaaagcctagcacatatctgttggcatctcggtgcaactctatgtacacctcactaataccctaatatactaatctgatggcttactgatttgcctaacatatatttgttggtacctctgtgcaactctatgaatacctcactgataccctgatatattattctaatggaaactaacatgaatgctaaacatgtatatatatgcaactattatactaatcttaccttgattgtaaatgcaagtgtgctcgtaactctaagtagaaactactactcgacgatttaaggccctaagtcacaatttaagtaaaactggtaagtgactcgctaactcacttttggagacataaactcgaaattaaaagttttcctatcgataaataggtggcaataccttaaaaatcgagaaaacatcaaaaacaagatttcagaaaaaattccctaaaaaaggcaggttgtttctataaaaacgacatgtcgtctttctgggttctgcttggaaaaatggtagaccattttcctaaaaatggtagaccattttcctaaaaatggcatgccgtttctatagcagaattggcccaaaacctcaaagctccaccaaatcaattgcaatccatccaaaaaagtccagaacttcaaataagactaaaacaaacataatccatcaaataaatgcaacaataaggacctgaatcaaattccaccatttttagctaagtttgagctctaaaactcaacctagttcaaccaataccatggctagaaattctacacaaaaacaatctcatacaactcaaaaccaactttggaaacaacccttaaatatcccaaagtcaaacagaaactaattcccaaaacacatacttaaacctaacttttacattgaaaaatataatagaagataggtttaaaagcttaccttggataaccacttgctaacactttaaaaccttgctaagaatcctcttaattttctctgaatgtgatgaacaactcaaattttcctttgtgtttttgttaggcggccgaagcttagagagagagagaatgaagagattggtttagtttgtggtaaagtctatcttaattgacatttgttttatttagcttgtatctatcaaataaaacctggagtgttatttaaaaatttcactaatttcaaactaataaaataaaagccaaaagacaactctaacatttactttactaagaagtaacctcataatctaggggtaaaatagtccaaaaccataacattgaataaattttaacatcttaaatgtctaactatcatgccccgctaattctaagatactcaaccgcatttaagtgactctattagccaaatcgtcacattccactgttaccgggcataaaacataaaaacaataaaattttatacatagcatacatattacatgcatccataattcaaatatatctttgtaattaagaaaatattttcttaaggcctatttctgacaataagccataactttttactatgaagcacataatcataaaataataattaaatcttctatttatctgctaattctcataatttaactatgtggtcattacactagcacccatgtcaatttgggtgtaagggccatattttggctcccaaaggatctcgtttgctccccaagattacttctatccttgttattttttaaaacagaaaagaagcccggaacacttttttgtgaaaacacttagaactagcctttgttgataaaatatcaacctgggcactgggcccaagcaccaagtcaacctaggcgctgggtcccatttttgcccaccggatgcttccgtttaattcctaaaaacacttgtatctcgattatatattggtgaaaatagagaatattcctagaaaattcttaggagaattgtttggaattggcccaggttaaaaatatgccaacctaggcgctcgggcctagcaccaagtcaacttgggtgttaggtcccagttttaacttctagatggctctatttgtttctcgaaagtacccatatcttaattgttgatgaaaaaggagaatattctcggaaaactttgtctgaactgctgttggaaatggttcaggttgacaacatgtcaacctaggtgatgggacctagcattaggtcaacctaggcattaggtcctaattttggcctcaaggttgatctgtttcctcctcgaaagcacttgattcctcgttttggatggagttgaataaaattctcaggatacttttcaatattgtgcttggaagctgttaggttatttttagtattaattttagattaa

SEQ ID NO: 301535 - DNA, 1815 bp, Cannabis indica
aaaaaaaaaaaaaccacaccaaatattcttttctcaaacgcttcttggaaggatacagtggttggattggcaatggccctcatcaataaagattaatacacttaggagacttttatagagaaagcaatggcaacctcaccaatggaagggttaaaagaaattcagctagctttagatattgctttccaaaagggttgtgttacaagccttgaacaatgatagatatcctccaatttgcaacctaagggtttttatcttcaacattattagagtgtaagactaagcttagttcctgttgttttaagtttactaattgtagttttaatagtgttgtccatggtatagctaaaagagccaggttctctagcaataatgttggtatccctaagagggagggggcccctcatgtggttccatataatatggttttgttgttacaatgaacattatgctctagcaaaacaataaattgtgaaaaatctacttcaaagtacttctacaaaatgttctattacaaggaaaccatgttagtaaccaactcacaaaccacgacattattctacaaacctgtaatgtaagaaggtcgaatattaaactgattgaaatgatggaatgaaagtctgcttatgacaaaactttcatacacaattaggattagaacacctccatccaacacacaactcacatcttgagctagcctcagatggcaattgctgataagtttattcaaaacaaaaataacacaaaaccacatacctctttcatcgagctcaataacatatggcacttgcttcaactctttgaaaacagcttttgcccttctacaatatctgcaaaatacctaaattttgtcaaagaaaaccaacgatgcacagccatgatcactccataacaaacaatcgtgaatacatgcagctaattagccattataatcaataaaatttttaactatgaattatatgattttttatttttatccaattccattattagtagtattgtaataggcagcagtaggatctcaagtagaaataagaaaatcatagagacatgacaattgaaatattgctaaaatgcttaactatataagaaaagaagaaagaaatacagcctaactgcgctaactctcccaaaggaaaaatgcttcactcaaatacaaatactccataatccccataagagtcgtattgtattaaataacaatgaacattatgtttagataaaattttgtattgcattaattagtacaactataaaatttaatacataatcaataatccgtattagcttattatgatatttaaaaagggttcgggattcaatattgggtgtttggggtcgaggttgggtttggggtcgaggttgggtttggggtcgaggtttggggctaggttcgaggatcaactccgaggttcgggtccaggatcgagtccaaactcccaggccaaagtccgggtccaacaccaagtccgtgtccaaggtcggggtccgaattcgaggtcgggatctagggatgaggtctaagtccaggccaggatttgtggcccgaggacaaagccaaagtcgagtttatggtatagatagtataatattacacaacctattaatccaagtaaataccaaacatagtattgtattaaataatgccaatacaatacacaatccaatccaatactaaacaacacggtgtaccaaaattctctaactaactccacgatccaagaccactgctcacttttaacaatctatccaacactaaggtgtcgtttggtaacacttttttaatcagttttctatttttaaaattgaaaaagt

SEQ ID NO: 301536 - DNA, 2157 bp, Cannabis indica
gtgagtggtttcatcaataatgggagtgctcctaagctttacacctggctccctataatggactcacattgacgacttgtcttttttaaattaaattatcagaagaaataatttagaaaataggttaaaaaaaaaattataggataaatatttaaatttaactttcttataaataaatattatatttttgaaatttttacaagtattaagtcaatgatcatgtattttaattggtccaccttattaaatttttatttttagtgaaacaatgtaaataattttttttttaatataatataattacattcaattttcatgaatattatagtacagtataattacactcaattttcatagaatcatgagaattgaaaattttcaattacttctaattatacaataaacgtgtaattctgtaattatacaaatatgtcaaattatataattatttttaattacacacaaatttaattacactcaattttttcaaacgtatggcatttaaagtgcaaattactaaaaaaaaatatctattctaatttttaaaacaaaattaaacgttagctcagcaaaataatgttccatagagaagggtattatttttttttatggttagttaaggttttaacgtatttgattaaataaaaagctaaaaaagaatctttgtaacctgaaatttgtttggtctgacaatatttatattttaattttgattttaataataataataataaaacataaaattattgaatggataaacttcaaagttgtatagattagaacaagtgtacttttaactctgcaaagtcaacatttcaattactagcaagtgatgttataaatataaatagttgaattagtgtatgtttataaatagttgattattgttgttgggagagtccaatagttaggcctagaataacttaaatgggcctacattatgttgtatttcaagtattgggtttataaaaattgctcatattgtctatgccccaaaattgtacctttttttatcgttaccattttatgggaatttttcccatattgttttttttctttctttatgataaccggttactagtatcaaaatagctatattaatattatatcactaataaagtaaaacattagtaatagtaatcacttattataccacatagatatttaaagagaaatgttagaagacaccattgatacctaacattatggctgcacacgggtccagttttcaggttttcggatatcatcgttaaataccaactagattgttattgtattgactttgaagttttacttttacgtatatacaagtgtacacaatgaccattcagttgatatttaatgataatatttaattgacgtctcaaatttaccaaaaaaaaattaaaggattttaccacaaacaaaataagtaagttaagtgtataaaaattaaatgagtcttttttaagagtatagtatagaataacttttacagtgctaaataggaaattttatcgaatgctctttgtggcgaggtggctgcgtattgcttagcacttgatatggtaaagtttaaagggcacaagttcattattgcggagatcgactatagagtggtgatcaattcttttagttgtttgtcatcttgttggaagattgagaactatttttctttttgctttaggttctctagttgttttgatagttgcgttttttatttgtatactgagaatttataattttgctgttcataatatgattaaatgagcttatactcacaaacaatttggtaatttgtatatttcttctattccaagagacttattttattaatgataacttttttttttaaataaaaatttggaaatacagtaatttagtaataaaaatatttgaacatctttaaaattaaaaattgaactagcaagcatgagctcaaaataaatacataaaaataaaaagtacatggaattttcaaaattggtcaaaacgtcgttttttttttccctttttattgggacaagatcatttatattatatgcataatacataataatttgcaaaattatatacccttaaaaacaaagtaatcatattagaaaaatctaaaatcataaccactaaacttataatggtcttgtcaaatttacctcatacataataaatggacaacta

SEQ ID NO: 301537 - DNA, 5413 bp, Cannabis indica
ttttattagacatttgatgctatgtttgagttttatgagatattttatagtatgtatggtacataagatattatttatctttgatatttttaatatttttaggtgctctaaaaatattttttttaattaaatatttgaggtttacgcctcaagcttacgcctcaatgcaccttgaggcttacgcctcgcctcacaaaaagaaaacaccttgaggattaaattcgcaattttaaacattgcccaaaatatttcatatgtactctctctgttgagtcatcacctcccacacgtcattcttttttttctccattctttctcctcacataagtgcattttaccacaggctttatcatcacttccccccgcagtcacaccttgtcctcaaggtgaaaagaaggaaattgagggttaacaagctcgaagtcctcccaagaattctcaaaggaagggagatgttgccattttatgagcacttccaatgggcctttggcattgtagcgaagaccttccacattttcaagttcaactttccattctaaatttgcctagaggattataggaaaaggttgagctggagtagtagcacctaccgcgtgcttcagcataggaacatggaagacaggatggatgggaacacttgggggcaaggacaacttgcatgcaacagttccaacacgagactcaacaaagtaaggacacaaatattgtggagataacttttcattattgcactgagcagtggaacgatgacgatatgtcttaagtttaacatacactaagtcccccacagaaaactaaacacctcggcgtttgcaattagccacatccttcattcgttgttgtgcccatgaaaggtgatttagaatggaaagttgaacttgaaaatgttgcttatcagccactgctctcctctcagtggccactcgggtgagacaaaagaatatatgtgtttagcaggggatgtattttgaaaatggctatggagccttatattggttgtttgtgcttttgggcggggtatgtaagaattgaaaacttctctctctacatctttgagtccgaaagggcttttcctttttctgtttcttttttgagtaatacaaggaaagtcatggctgtaatggcttaatttttctactgttgcgtgagttattgttttattgcttttgttttgctggtttggttgaagtattgattagcaggtagcttgaatctgaataaaggatgcggattgctttttaaacttcgcggattctctaggaggcttcaatccttgaaattccactattcatcaattatagtatttctctagactaaaggctccatagccattttcaagttttggttcctattaaagtggcatcaaaacgacatggtgaaagaatatttagacgttgaaacaaaagcaacagtggaatgtttagatgttgaaacaaaagcagcagtggaatgtttagacgttgaaacaaaagtagcagtggaaactaacaattggagaagaaactaacagaatttggtaagcatacttgtgaagtgtttcatgcttcatcaaatcaacgatggccaagctgttggggggataagagtttttctaaacaacaatggaggaaatggaaaaataactgaaaacaacaacaaaaacaaaaagataagctcgcatgagttgaataactttatccgaattctctttttcaacccttctatggagattgcttgaggttctacttgtgaagtgagaattaagactactcaacatttgaattcttgaaaaaagtttcttggaataactcttggagtaaatagttgatctatgagagctagagatagaggttaaaagagtgcaaaagtatgatcagccttttttttcactttttttaaccttccaaaactatttaaatagttggagtgttagcactaacctagaaaagtccccatttgttttcattgaaaaaccacaatttggagccaaaatcaagaacaagcaacacatcaccgccttaagtgtatgtgttgccctgtatggcgtcaagtgacacttccttactaggtagcaacacgtcaacccgtgccttgcatttaagcaacacgtcagacttgagggggtggcgactaaacaccaccctctctacttttgctacctttttactacctatcttactccaaaaaagatcaaattgcttccaacatgtttagatgtatttaaatgcttcattgtactagtctaaactctatttggtcacatattggtgctaatcacaaaatctcaaatgtacacatacttgcatacaatttttcaaataactttatttaaccactcaacacaatattaactcctagattcttatgatgcatctcaggttgttgttgatggaacaagccaaaaaagataatgatagcaacaaataaactctacaactagtgccaaatctggtgttcaactaaggcactattgttaattctcacatacgtacaaggcaatggaaagcacaatgccctgccatttctgctacatgttagggtgttatgtgccaaataagatggtgatgctgctggaaaaattccaagacatacaaatcattcaagtagttgaagaactcacaaaagatgagggcaaccacaactcaacgacccaatggtgtgttctagtggttgtttcccaaatagtccaatgtcatgggattgagtactacaaagcataatgtgtgggacaagatattctaggtccaacatcacttctttcttgcccaacaaggaaaattctccttttcaagtgcaataaaaactttttatattgtgaaagctattgaggcacttaaaaactaagcctcaacaagtttagtcaaggcttaaaccttgaaatgcgaggattacttttttaaggcaacacctctgaagcatgtgaggcttaagcctctcatctctggagacattgggaattttttgatgtatctagtcttttcgattgggttttttaattgggctttattttaagtttttctaacacatttttgacttataaacttagtttaaatcacaaaagtaaacccaaactcccaataaataagacatttatttcattcacccattctcggcctcctgtaactgtaactacacttttattttccaactccatttttagaaaatctcaatagcaatgataatgaacatgaaaacttcttggtctgtgaagttgtctgagactttaagttctactctttaatgaagtttttgttatcaataatgaggcttaggcctaaccgagctaaagcaaaatacctcagcttcagattaagctttttaaaactttgactggtacataacaaaagagttgactctatactttctgtaaagcagaagtctgtcctcattgtctgtgtcttcactgtctgacataaccaagccacctcttcaaaagttaaaggtaaaatgaaagtctgcctactttgttcctttcaatcaccttaaaggttttgttcatcataccaaaattcttataatgaaacagttaatgttcaatctgaaatttccacgtaattgtttcagaattcttctatgacttgtgtttaaggcatacatagcgatgcaatgtgtgaggtgctaggaccttattttagacaaacaataaagcaggagaggaaagatggcatggaagagaagttttttccaaagtaatttaccaacaactacaaataattttgtcccaaattcaccacaagcagactaagaaaaaccttcgtttcaaatgcaccacaaactcgtaaaggtgaaaaaaataggtcagtttttcagaagtttaaacacattcaattaaccggtagtccaggctccaaatgtaaccacacttacgtaactgaaagaattggggaagttcatcaagtgtcctatcctaacaattacatatccatattatggctctatttcttttgttttacaaataaaaataaagaaataaatatatttatattaacaaaatacctcttgtaaacgctgcttgattaacctcttgtgtacatctaatgaacatctctccaatcccaagtcattctctaacaatctacgaactccctcaaaagtcaaagagctacaatacaaagaaaattacaataaaaaatcgaccataaagaatcaaagatctgcatttctcttaaaagtgaggtcacagttttagccattaacacacctagagtctagagagcaggatccaactgtataaaccttgcaacgggtgggtaaggagtggacaaatatctcaaattggctttagcccgtaaaccctacccactcaactgaacccaccaaacacttcatacctaactagattaacaagggaccttaagcaaactcaaacatttacaaatttaatagtaacaaaaattttactgacaacccaaaactattggctacaatttctgtcactcatatttctttttttcttctttttctttttcccttaaccgaaagacccctgtgacactcaaaaactccataaaacaaatttatggatgcgataaaacctactttaattatcaaaacgactgtacattcacaaatccgaaattatacttaaatcatttacagtattgttttttttttttaaaaaaaaaaaaaaaaaaaaaaaaaaaaaaaaacctaaacgcgattcaaaaactgacagagcaaactaaataaatattacaaaataaattgttccccaacaatatatgaaagcagaatcactatcagatcagactaacattaactctctcagaaagaccgtaacttatctagagagtgtgagagatagagagcatactcggattgttccttgaaataggcgattcgagctcgcatagcagcgttaacctgcgagccgatatcactaaactctagcctctcagctttaacaagggtctcggtatctttggcctcctgttccgtcattgccgtgagcttgagcttgagctttctggtttttccagtggtagtgaccaaaattgggaacactcaacagcggtattttctttttacgtttttttttttttttttggtagatttttatactacatcttttttcttttctttttatgtatatactgatatgaaatatatgacgtataaaccaccatcctgaaattacattaatgcccttacaatcttcatttaagcggcacatcccaaattttcgacttttacaaatgtgtaatggtgcgcgccttttcacatttgcataatttttagtggttttttttaggaagttatatttagtgttaaattaaaattacaattaagccactaaggctagcttagtggtgagggagggatgggaaaaagggagaggtcatgggttcgaacttaggaccttgaagctattaagctattaaatgattgtaaaataccattacactacactcaaaaaaaaaagattacaaggatt

SEQ ID NO: 301538 - DNA, 1130 bp, Cannabis indica
ctagtatatatatatatatatatatatgctgataataaaattccttctgaatattgtgtcattgattgtaagtatgaatatttcacttttgaaattcaagaaacttatcatctaaataacgacaaagaccaaggaaggaaaaagagtgcactataccgtgtcacgcactcatccatcttttcagctatattgataacaaaagccaaaaggtagaccgtagacaagtataccactcctatagtccttataataagtctataaatatacagccgatctatgcataactttaggccttgcaaaatcataggcgtttgaaatcaacattattgtatatttatataatcattattattaatattaattacacgcataacataagtaagaactttctgttgcagctgcaagctcatgattctgatccctctatcaattaattcaatgcgactcataatttagctttttgactgagtttttatccaaacaacttttaactttttagtgattcgatcttataaagggaaaaggattaggtacatatacgttctatatttatataagtttatttattaagtaatcatttactacaataatgtaatacgactcaagaataaaacaaaattaaggtaaaccaaacttattatatatccaatttgtcttgtcaatcaattatagaagacaactaattaatcagcttaattaatttgttttttcttaattataattaaaaatgaaattgatattacatatacattagcaaatatattagcaactataaccgctctcattattggccaaggtgcgggtggaaagactttttgccaactaattaggcagcgatggttgatagaaaataaaaatatgatttgtttttatacatactagataacgtggttgttcctgcggtaatttaattttaaatagggatattggcagttaaacctgttgaattttacggtttgtaatacttaatcacaaaaattaaatttttggcggctaaactacctaaatcctggttccgttttgctctacacacctccgtccaaaaatcaccgttaagtactacggtggactgtccacgtgtacacacttgtacacgtggcaaatttttaatagtccacgtaatattaatt

SEQ ID NO: 301539 - DNA, 1798 bp, Cannabis indica
aacatacttgtgagtagatctcagatcctggtaaaataatttccaacaatatttaatttagcactagctttctgaagaaggaaaaagaaagaagacttcttggactttctaaagattggagaacacctaggtatttaagaaaaaaaaaggcttattattaaggttaagagaagtatagaaaaggttcttatcagggaaactagtgttaggggaaagagaataaaagacttagaaaaattcacagactgaccagtggctttattataaagggatacgatgtcctgaattgccctacaattattgggagtaacaatagtaaacaaaagattatcatccacaaaaaggaggtgagaaattggtggagcagatctacaaatagaaataccacaaaaaagaccagctctagttctaagacaaattacagtagagagaccttttgctataagtagaaaaagatagggtgataaaggatcaccctgtctaattcccctagaaggagaagatgaggggagtaagacattgttaatagataacttgaaagacacagagaatatacacttaataatcagggaaacaactacagggaaagccaaaattattaaggatgcccttaataaagcttcaatcaactctatcaaaagcttttttttcatgttaagtttgagagctgcccaaccaactttaccccatttcttattgttgaatagcaataataacttcattagtaattaggacataataaaaaatgattctatatcacaaaagaaagcactttgattattagagataagatcacttaaaatcattttaagtctgttagcaatagtctttgcaatcactttataaatagtagaacaaagactaataggcctaaaatctctaatggaagaggccttattctttttaagtgtaagaactaaaatagtttcattaatagtagagaaatcagcatgattattcaaaacaacaagaacagaagtacataaattacccataatagaccagttcttctagtaaaaataaggattcaaaccatcaaaaccaagaactttaacactagataattgaaaatgagccaacctgtcctcatctgaagtgaaaggctgactaagaaactaaaactgagaagaagatatagtattagtaataccatgaagaatacaattaattgagtgaaaattagaaaccttagtatattcgtcttctctactaggagggacaaaatgtggttcgcttaatcccttatctgaagagcaggaatagagcatttgtaaatgcgcactctctaaaaacaatggtgccaaacttgctagatatctcatggaatgaagtagtttcaggcatatccccccaccttcgacaaaggcatactattggtgtctcccaaccactaatagccaatctggctagagtagaagtaccctatccgattctacttcagagcagacttcaaggcaaaatagtatccaatctcataaggagtaggttgaggcaagtctagctctacataaagaataaacatcgctgaaaagtacttgatacctttcggggtgatttgtgttgggcacattctgaagtatgctgcaatgtctctaaagtaggggtgcaaaggtagcactaccactgctgaatgtggcactccgacaatgatatccaagtgagggccaactagtgcgctcgttggtccttcgatggcacctcacacttgaatcctctcgctagtccattctctcttatcttatcgagagtctcgacgttgataacaaatgtaggagagatcctgttggaaattatttta

SEQ ID NO: 301540 - DNA, 1961 bp, Cannabis indica
actgcttccaattctttcttaatagtaaaattgaacatgcaattttcttgacaggtgcgggacatgcttggagatgggcgtttaataaaacgacgtatacaagatggaaaaggtatgggctggatttcatgttatgtgcaaatctgtggataatgtagatggttcattattcttctaaatcacatttctgtattatacacaagaacaaaatcagatatttgtcattgtactgtattttgttttataattagatatatgttgaccatttaggtgagttccctatggactgccctctccatgacagtttactacgtgtccattacaaaggcatgcttctaaatgaggaaaatagagtcttctatgatacaagaagtgataacaatggagagcccttggaattcagttcaggagaaggccttgtaagttgttgttgttgttgttgtttcaaaaggatgaaagtagttattctgtttttttgctttctcttcttttagacaaatcattttcttgaggacctgacaaatttacgaactgatattctgcaacatgcgtaaaatagttcttctgtaacacattcattagtctttcaattgttgctgtaaggctttcgtttactgtggtaggtgcctgagggatttgaaatgtgtgtccgattaatgctgcctggagaggttgcacttgtcacatgtcctcccgattatgcatatgacaagtttcctaggttactttctaaattattttgccctttcacttgatgctatttatctttacatgtcctgattatgcatatgaaaagtttcctaggttactttatcaagttctgcatatcgtgaatgtaatttttgtatcgtgtcatactaatggtttttctttccttttattcccaatcttctaggcctgctaatgttcctgaaggggcccatattcagtgggagatagagcttcttggctttgagatgcctaaggtaaatttatttggcaataatgaaatttggtgaagcgctttgtgatttgtagttcttctaattttgtatacagttaggttatgtgaagacattctatttcttcattagtttttgttgcatatctcataaataattgttgagtaatataatggaattattaaaatcattgttgcaggactggactggtatgaattttcaaagtataatggatgatgcggaaaaaatcagaagtacggtatgtatttgttagaccctgtgatagaaccagtagggtacagcagtattagtaacacctaacatgtatatatagttaccccatttttccatttttggatatggggattgttgatatctgacagtacttttaattatagggtaacaggctcttcaaagaaggtaaatacgaacttgcaaaggccaagtatgacaaggtaatgtatattttcacttagcacacacgatatagttaatcatttgagggctagttgaccatttcttcataaacctttttatatcttagaatgcaatgcatcatgccataaatatgtttactagatttgcttagaaaatgtcttgtaaatggtaacattctggttctcttggcagttcctgttgataggtagctgattctcctatttataatgctcttggctgttcgtctttgtgcttcaatgctttaacttttttttttctactaattctcttattgttaaatattctgagaaatcagaaacttattttgtttggtttcattgtttttgtttttttttttctagatgagtttttattgagcttgctgttattatttttaagttatctcatgctgaggtagttgctgtacaggttcttcgagaatttaatcatgtaaatccacaagatgatgaggaaggcaaagtgtttgtagatacacgtgtaagtacttttttatattgccgatcctctttgaaacttatttacttcatctttacaacttccatcaacctatttgggactgat

SEQ ID NO: 301541 - DNA, 926 bp, Cannabis indica
gaaatgataatttttcatgtatataataacgtgtacaaaaaaaattcgatctacgaaaaacaagaaatcaattataaaaataataatatttttttccacttttgaaagacaattagttattattttgatcttaattaatcaactatgtttaaagtttaagtagagggagagaaggtgtgtttttttagccattgatcacatttgaagtaagaaaaaaatgttttacctattcactacaatatatgtattttataatagccatatactttaaaatatatacttacatatacagacatctctagtatttaatattgtgtattttatatttcaaattgatcgctaattaaaatttaaaactaaataaaacattataataactaattaatataaataatctccttcattaaaatataatgtgttgaccgatcctaagagggggaggggcacatgtttgattggagtgtgaaaatatgaaataaaattttaatgttttcagcccaagaaaaaaagttgaagaagattgatgttcatgatttctagatcatcacatgcaattaacgtacaccgtcttaatctttcattttattttttctaaatcaacaactcggccacgtcatcccacatccaacaactttcctactcatcttttatttttcatatattttgctaaaaatcaatctttcattctcactcaaatcatatatgttaccaatataccctccaaaatttgcaataatattgaataggagtgtttattcgatttatttcgcactaaattataaattttatattttagatccaaactcgtctacataataactcaaatctaatcaattagtataaattgattacttttgatattaacttatttaatatttattaatagtatttttttttgaatgaaaataaactttattagatagaaa

SEQ ID NO: 301542 - DNA, 2485 bp, Cannabis indica
aaaagtttccctatcaatggataacatgtaaataccctaaaaatcgtaaaaatgggaaaatctagggtgctctaaaatgcccccactggtagaccgattccaaactggaaaactggttctgtgggttctactagaggaggaactgatagaccaatttttacaggtccacactgaaccggttgatcggttcattgcaggaaacccagaaaaaccttctaaataaacaaacgcaaccccaaatgaaaccaaactttccagaccacctatttataccacaacaagtataattagagcaataaaacccaacaattcactcaaaaattaaaaacaccagtgtgagctcttaagctcaaactttgcccaaacacaaccacaagcacccaaatcagcttaaatacactaaaatcatcaaacataaacttcaaaacactctaacaaacctaaccaaaccaaacagcaaccctaatctagaaattaagctaccaagctaacttgaaagtaagaaaacaaaagggaaaagagtgtaggagcttaccttgagttgattccttaaagtcctaggaaaaactttcttacacatctagcaattgaatcagcaaaaccctagcttcagctgggttccaagaggtcgagagggagagagacttcaagagagagaatgctatcctattttgtgttgaactttttaacttcacattattaaattttaacttaataaagaaaataattactaatattcagcaataaggaaataagagaatataaattctcaaaatttcactaaggataaaagaaggtaaattacctattcgccctttttctcaccaaaaataatcttgctaataaagggaattttggtcaaatctaaatatttctaatatttccgacattcctaatatctatctaaattactctgctatttctaaagtactaaaccataagtaacgtgactctaacaaccaaaagtcgcgttccactattaccgggcaaaaaatatgaaaaacataaaatttcacatataacataaataacacatctagacttcaaatatatctccataaattcataaatcataattaaaaatctaattccaaattgaaccctaattatctgcttattcacatactaaaattaagggatttttacaatggccacactcttatatgtcattctccatgagatatcaattaatgtgggcaatgtcatccaacactctattatggatcatgtttgcaatgtcataaagagattttctcatccaaatataattacggtgttgtgtgccaaagctagagtaaaatactttacctcagaacaaagtctacaacctcagaacaaagaagacattggcatactcatctaaggaagagccaccatctgtagaggaccgtagccaaatgactatgtcggagcgctttgaataatagagaataagttggcttctgttactaaagacatgaagcaacaccgccaagagttgagggagtgggcaatgtactagaatgcttgtgctcaaatgaatgttatgagatttggagttgatatgtctactaatccctaaccaccacaagggatgcaacaatacaatcaatatgcaacatgagaagatgaggcggaggcagcagctgacatgagagattaccatggagatgccatggagtgattggacgctttattcaggttgtttttctttacttgtttgtgtcttttcttatttttgttgttacaataagttccattggggataatgtcatgtttaactgtgggggtgtacctcccaatttactttatgactttatgtctttattgtgtgttgtgttaaacaatgattttagttgacaacattgagtcgatgatgagacttttaattaatctagagacaatgctaggcaggtgataaattcttcatgaattgagtgcttaactgtggtgaatgattgctcaagcttagttcttaaattttttagataattaaatcatcataattgctaacattttaaaaagataagtgcatgtgtaattgttaatttttcatctcaaccactctagaacttctttaaaaatcatttgaggcgaaatcgacaaattacatatgattttgagatttgatataggcagtttctttggatcgtttgagcttttcaagcctaccctatttgtaaattccctagttttacccaatttgggccaaaatgttaaaatcttgttttgtttttggccctatacaatcacctttgagcctacaaaaattcttgtttgttgacctcacttttagccaacgacagtgagtctaatttagtaagcgacaagtagtttataactattgaaatataataaagcaatatgaagacactggaattttatagaggttcggccccaacagttcggtaatagcctaatcctcattatttgtattaactcaagaacaaggagaaaggttccttttcttatagctcttacaacaatatctctgaatatgaattct

SEQ ID NO: 301543 - DNA, 661 bp, Cannabis indica
aaaaaattaaaataaatatgtttaaagttaattactaatttattgtttactttttttcttttaatagtattatcactaagctacatcgccatttagaggtagaatgaacttatatatattatttattttgtctgatttccttgtattttttttttctataattaaattttgttaaaatcccaaaaatatatacaaatataaaaaataaaaacattcaagtttccaacccacaataaattcattcatttattaaagagtaaataataatcattattaggatagtactttatatttatttttgggaaagaaatgtatttgggtagtacatacaataacaatacaagactatgtaataaagtagtattagtaaatactaaaatagttattgttacaattttagataggtcccaatcccaagtctatatatatagtccatacaccatatgaccccaatagattcagccacgtgttaagtattttccaatgaatcacgtctccttaagatgatttttttttttatttatttattataaaaaagataatgttataagaaatagaagtgctaaaagtattactgatccttagtatatttttatgtgttaacgtcgctattagtttaactaagtatcgagtcatatatagtatgatgtaataattttta

SEQ ID NO: 301544 - DNA, 1905 bp, Cannabis indica
taatgtggtgtatttataattttatggggtgcaaatataactcccctttttcaaaatgggaaattaccaaatcaggtgaatgaaactcttctcatgctcattccaaatatagaaacgccttcacaagctgtggactacagaccaataacatgttgtaacaccttgtacaaatgcatataaaaaatgctttgctcgagattgtcaaaagttctaccgaagattgttgatgagaatcaaagtgcatttattaagaattactctcttgttcataatgttcttattttacaagatttgttgaagggttatcaaagaaagaacatctctcctcaatgtttgatgaaaattggtctaagcaaagcttacgatacaattgattgagagttcttggagctattactaaaagcttactgcttttcgaggcagttattttgtggctgttggtctgtgttaggaattcaaaatatgtattggtactgaatgggaaagttcaaaataatttcaaggtgcaaaaggattaagacaaggggaccctatttcaccccttatctttgttcttgtaatggactattttactcggaccctaaaatgaaagactagagaaaagtattttgcttatcatcccttatgcagaagcttgaagctaattaacctatactttgatgatgatctaattgttttctgcaaaagaagtgctaattcagtcaagggcattgctaaagctttctctcatttcagcaattgttcggggctaaaagtaaatcaccaaaaaatcaaatatttactttataggtgttaatgaaaatgctagacaagagattcagcagctggtttcttttaacacatggagtcttccattgaattgtcttgggattttccttagagctaccaaatggagacaggagaattgtgagaccatcatcaagaagctcaaaatgagactacatacttgggctagtcgacatatctcatttacaggtagagctctcctcattaacacaatcttgattggaattagatgctactggatgagtatatttcagcttcctcaaaaaggtggctaaagagatagattggatttgcaggaattttttatggggagaaaaatgaaacacaagtaagttgcacatggcttcttgggagcttgtttgtaaaccaaaacaacttggaggagtgggtttccgagagggacccaaatggaacaaggcggctttagcaaagtacctttgggtgatcacttcaaaacgggatatgctttgggttaaatgggtggataacatttatctgaaggacaaagacatctggtcactagagctaaaaattgatgtaagttggtactggaggacgctcttgagacttagagatgtcttcatcaaggaggatattgattaaccagggatcactggtaaatttaagattggacagatgtataataagctcgtatgtggggatcaatatgagttcttggcagctacttggtgtaagctatcggctatgaagcacagattcattatgcggcaagctctccacaacaatctcctaactagagacaatctagtaaagaaacacataccaatagatacaagattttgtcttgtatgtgagtgggaatttgaatcacatagtcatttattttttgactactcttgtagagtcttacgaaagattaagagttagcttagaagtcatctttggtctaactcttttaagaatctttgaatttgactcaaggcaaagagattgagaagacttattttggatgtgttctttgctatcctagcaagtacaatttattgtatatggttaaattgaaatgcatgtatgtatgagaacaaatgtttaagtccaagatgtataaatgagagtattaagaaaaagggcttttttcataaatgtacaacaaaaaca

SEQ ID NO: 301545 - DNA, 2570 bp, Cannabis indica
ttgagatcatgattatgtacatatattaatgatcatatatgtccagcagaaaatgacagactgaacaattgtacatacaaaccagcactaaatttgtatctaacaacataatctgtatctacatcatatatatatatatatttaatttgtttttttaattacaacccaattatcatttaaattaactatagtagatattgttaccaaaatgtgggataccttatcactatgaactgggtgtggttgttaattttgccttcatattttagagtaattaataactagtaatatatatttaaaacctaactattagttttctttacaataattttgtgcatatgtagttaatttattgtcattacaatcatacatgtagttgtaattataatctaattattagttagtccttatctaattcctcaatgaaaaagcgcattttatgcataatgtcattctaattataacattaatgtgtttggatttcgttgttaattacttgctagcaataaaaataagatattatatatagacataataagaaattagaatttcagcaaagtgaaaaacaaaattagcactcataataatatataacatatggcttattcactacaagccatgaaaattttacagagtcttgttgggatctatgccttaactttgctcatttcttccttagtattccatgcaaaagcaactgttcaaggtaattaataattaattattgtatatgataagcatcattttcttaatataactctttttttttttttttaatttaaaacaaataaaaaatcaaaaattttttttctgaattaattatgacactttcttttttctttggatatgaagatttgaaagtcaagagatctgattttccatgtaattttatgtttggagccgctacatcagcacaacaagtattcatctcacttcattttcatttttagttttcttgtatgtatatatatttgggtaaataatattttggatcttgtgttttgtaaaagttattaattagaccatttattttattaaataacaaaatagaccttgtattttcaaaaatagtacaataggactgtgagtttaattttcgataatttttttttaatataaccaaattgaagataatttctaacataaacaaatatagaaaatttaaccacagttttatcataacacctctggattgaattattattaagttttattttgacaaaaattaattcaaggtcctatttagactatttcaaaaaatataaggtctattttgtcatttaacaaaacagaatatcttatctataacttttgtaaaatacagagtctaaaatgatatttacttgtaatttgtatatgaacttatatattaattatatattatatgatagattgaaggctcaggaaatgaaggtgggagaggaccaagtatatgggacacctatgctgcaacccctggttaattttcaatagaattatgactaattaattagttcaaagttaatttcttatccaaattatataatacaatactgcttattaattttgatcaggtaatattaaggatggaaataattctttaatagcaactgattcatacagaagatacaaggtttgtagagaacttaaaccactattatatataatattattatacattactcttgaattgatgatgtattattaaaatgccttgttcttacaggaagatataaagctcttaaagaatctgggagtcgattcttacagattttcaatttcttggtcaaggattttgcctagtaagttatttatatatccaaacaatatgatttaatcataaataaaaatttgtttgtactaagtttggaaaactttctttcacttgttcaagagggttcactatgtggtggaataaatcaagagggtattgacttctacaacaatttgatcaatgaagtaatagcaaatggtatgagggttatatttgtatacaaatttcttttcttattttgaatagcattactaattaaaacaccatataattatggttttgattgtttgtaggcatgaaaccatttgtcacaattttacattttgacacaccacaagctcttgaagacaagtatggtggctttttgggtcgcccaattgtgtaagcagcctcacttatgatgttaattagtgttttattgaatcataattcatgttattattattttattgcagagatgattttaaggactatagtgaacttttgttcaaaacatatggagacagagtaaaacattggattacaattaatgaaccatttgtggttgcactgggatatgacttgggaaaaggtgcaccgggaagatgttcgctaccgccgcctgtcggcccatgtccggcagttggtaactcatccacagaaccttacattgtaagccataactttatccttgctcatgctgcagctgcaaagctctacaaggccaagtaccaagtaagctacacattactatcatattatgttcttttggaaaattatttttaaaataatttattataaaaaaaaaaagtaaatacaattttggaccctgtgtttt

SEQ ID NO: 301546 - DNA, 1726 bp, Cannabis indica
aatttattaattataaattaatttattgaaataataaaaaaaagtaatagtacttttatcaaaataatattaaaaaattgcaccttatatttaaagagttttctatttattttttattatagaaagtcatttgttttatatagttgaagtttatttttgtaaggctcaagttttattttagctattgagtgtatttaaagagaatgattggaaaactctaagttaattttcattttgttcagtgacttttcttgtagagtctatataagaactttgtggacagaggtttgaaagtcccaatttaaacaactgaaaattattatataagataaactaagatggcatctattgaagttaaagaagacaagtaccgtacacatatttatggggaaacagagaaaaacaccaaatggaggtatggaggccctcccaactatgatgttgtgaacaagctctttgaagaaggcagaactaaggtactatataaaaatacatactaaatctatttggggactaaaaagctgttcaagttattgtaatgatcactaaaattatgtgtaaatgtggtagatatggccaacaggatcacttgaagagaaagtgcaaaaccttgtgaagacatgggaaatggagatgttccacaagacaagttttgatgactacaaaactgttgataaaaacaagtacactctaagcttaaatggtaagtaaagttatattagtgttcaaatatgaaattcatgtttatatcatatgtcttagaaggagactatattggatctatcatctatctatataggtagaagagctttgagtttagaggagaagcgtaagcttgggggaggctacaactcgttgttgcagacatccttaccagacaacttgcggtgttacaacccagcagaagaaacagcagattcttctcaccgtgcttttacaactgcctttcctcgaggatttgcagtggaaattcttcatgtctactctggtccaccagtgattgtttacaagttccggcactggggctatatggaaggtccattcaaaggtcataaccccaccggagaaatggttcaactctttggcatgtccatttttgaggtatattttctgcaatcccttttctcagttttattattgtttatattactcgaatcatttcattttaagatcggaaaagctgagcccttcctattctatgttttattaaattgattttccttaagttgttctaggcatgagacacttacaaatgaaaccaatttcttgttgtctgaatttgtagctggatgaacaagagaaaattgtgaaggtggagttcttctatgatcgtggagaactacttggaggtcttctaaagggttcaaggtcggatagtagtatctctcaagatgaagcctcaacttgtccttttatgaagaaaactgggtagtattttcaatcaaatgaatgaacccatctcgtaaaatcaatttatctattattatgttatattatgtaatcatgttagctacaatttctataatataaatacatgtataataaaaggctttttcacatatatacaaacggtaaagttattatatatgcgcacacctaaattaatctggcagtcaccacagtttctagctctcatcatttttttttccttctaattccctgcacatgaactttgtttcttttcctttagaaaagatgctgttatttaatttttaatatatttttt

SEQ ID NO: 301547 - DNA, 3337 bp, Cannabis indica
caacctttattgtttattccttaattaatgtgatttattcactcgtaaccctattaaatagtggatcattctcactattcaagcatcaaattctagactttcacaagagttctcacgttgccaagagattgaaggatcacttgaagatgaagacgagctatatgcacgaaagggttgagttattttcgaacagtactccgagcagctcatcaaacatttgatgttcacctcctcaaaattaagcagggttcctctacgaaataggaaggttagagaggtgaaacacttaactgcgtggaaggtgccttctcaagaaaaacatttccaatacttcgaccaactaaaaatgaagatttagctacaagactttcatctctttgagggaattttgaaaaataaggatttttggattttggggaaacctatatttctagaaaaatcaaagttcagtgcagaataataaagaaagaaaatcacacaaatacttgtaccaactcaattcctaataaatgacaaaataattgttgatcatcgcaatatgtctctagattcaaaagaagaatggtactacacacattccaacaaatgaaattcatacaaaaaagaaattaaaacatgtaaacattcgtgcaaagaaaagggaagaaagacttactcactgtttggtttgaagttttgaagaagatagcctcctggggtgcgtgcaagaagcaatctgaggaaaactttgggaatcagaaaaaaggaaattttcttgctctggaaatttgaaggtttagaaagatttaaaagaagtgtgaggagatatttacaaggaaaaaggtagagtgggaaatgttttttgaggaaataaatttgaaatgattgcttttcccactatttactagaaccatctcgaaaaatgcataatcgtcgaacacattacctgactcccgacttctaaggtaaatggtcattatggttggagacttaaaaaggtttgagaagatttgatgcaagtaggtatgagcccttagggttcggatcacatgggggaggacacttgtcacttagttgtttaaggaaatgacaagtccacgtatgaccagatgatcttatgaggacttgggggcaaatgttatcccaaaattacctgagtgacgtggcattgataatgacacgtggcggtgagaaaggaggttggatgacacatgttaagttcttaaaagtcgaataaagacaaaggatttggggaatatagagatgtcgcacgatgtattacccaagtatctgaccaatgcacttggctggtcggaaggagtaagtcaattatatcgagagagcaaatgttatatcctggacggaggatctgaccaagaggattgcgagaccaagtccgtattaactgccaaatctttgaacactaggtcattttggatgcctagagtaatgagattgagagaattgtgggattgactcaatcaacctttattgtatattcagtaattaatgtaatttattcacttataatcctattaaatagtggatcattctcactattcaagcatcgaattctagactttcacaagagctctcacgctaccaaaacactatttataattctttcaaaaaaaaagtatcaaaaactcacttaaccaaattcttttgatcttgatatatctcaaacaaatactaaagagagtaggtcataaatttagagtcaaacttctataattattgtgtgtcgtttagtacctttattaattattatttatcgagcatttttattatcgttctattagctttgcgttattgaataaatatgacgtcaactgatttttctttttctgtcatattatttatcttttatatttccaaaacagtcccttttaatactgacggtcatgaataacaaaccaatcataaacatccagccaaaaagtgacacgtgtagtctcatatcgggaaagctaatccaggactcctcttgtccatcattcattcatgctcacccaaaacttttcttcacccactgtaaaccagcagagagagacagagagaatggctgctaaagccttgtttggctgcactgcaatatttgagaagaatgcttctttttctccccttctcatcaaatctatggctacccagaagcctattccagcagctagtagaactgttagctccaagaaggtcagctcctcctcaaccatgcctctttttttctgctaaatattaaattacgaaaactactttctccaattctacattttattttgcaactctctgtgaacaaaacaatgaaagatgagggattttccttcaagaattgaattataatgaactagcattagtttgttgagtcgccactttcaaatttgatgagacaaagagaaaaatgaaaacgttggtcaaaagtgtgtactttaaatgttggttgaattttgtttgctttctatgttaatttatggaatttcactgaaatgggggttggttacgactacaaaacaatgcagaattcaactgtgttccctctaggagaaggtccccggagtagccctttaacaagtaccccaccagtgaagttgctgacaagggtggagcagttgaagctactgacaaaagctgagaaggccgggttgttatctgcagccgagaagttcgggctctcgctgtcgacaatagagaagcttgggctgctgtcaaaggcagaggaattgggagtcttatcagcagccactgatccaggaactccaggagcattgttgaccctcagcttagtgttactggttttgggtccttcttgtgtttatcttgtgcctgaggattacccttgggagctagcccttcaagctcttgttgttttgctttctgtgatagggggttctgcagcttttgctgcatcaaatttcgtatctaatttgcagagatccaattgattaatgagattaaattgaagaattaaacttaaaacagaaacggcatctgatttcattacgagttctatcatattacatgcacagtgagtgagcccgaagtgaggtggtacatcttatgacagggtgcaattaatcttttacaccactaataaatgaacaaatatatgatttttgataattgttgaatatttcttttcagcatttgatgccatgacaaaagtgagaacctgtaacaagctgtaattgaatcactcataactataaaatgatttcagccagtgagccagcgtcctattaacaacaacattacagaatattgcattctcaaatcattagcccaaatatatatatatatatactagtaaaaaactacgtgctaggcacgtatactaaatttatgctagtttttttctatgtta

SEQ ID NO: 301548 - DNA, 1951 bp, Cannabis indica
caaattattaaaacaatgtgtagttcttaacgatctaaattaaatacataaattataatagtttattttattgagtattagtattaggcacgggtagtactaaatgtgagacgtaagacgataagaaagtcttaggcatcactacagaaaatctataaaaccagcaataataataataattaatcaaacattcaaacccgaactccaattgccacaaaacgacatcgtcatagggaggtccaaatccgaagctgcgggagccttattagtaccaccagcagagacggagatcttattccgaaggttagtcaacatagctaagtgattctccaactcttcatacgtcatatcctccaccggttcctcccaccacgcgcaactattattatctaaaatcgaggccaatctcgcttgtctcaccaattgcttcttctttttctcggcctcttccaactcagtcatagcttttacaaaagtactagtactagtagtagtagtagcagtaatgttatcattactaccaggtaatactactactgtttggttattataatcgagatacgagcgaacgacgtcgtccacagatggatgaccgaagcagaagagtttgccagtgggagagaagacgatgactgccaccttggacccacaaagaaggctgagctcgccagctttcttgaagagaccagagcgccgtttagagaaagtgacatgtttgttactcttgttttccaatttctttatttggatcttttgtcttccttgacttctcttattgttagttttcattttctgatcatcaatggatgccatcatttttgaagaagaaaaagaatattgagacacggtttattatataattaccatatgaattgactaattgtttgttgtggtttccttttttattttagctaggtttaaataattatcatttgagattgtgtaatatcttttggttaattatttaccaaaaattaaggaaatttgattgtaattggaaagcgaccgggcagtctctcattttattggctaataataataataagacaaattttcataaaattaaatcacaacattttagattttagagtaactaaaataatatattattttcatatttttgatggagataactaatatattttgtacgtgtaactttgcaaaataagtttattagtgtgattatttgttcatagtgaaggcaataaaattgttcatatttttgcaaaaaaaaaaaaaaaattgtaaggatatctttgcaaaaacttagtcgtacgtaaggataattattttcagttattattgaactatgtattgatcttgatgataatcttggtattagtgatgatatttgactaatttatatggaatttcttttttgaaagaacattgttattgggctttcaccactacctttaaattttataggtagttttacgattgattaatgatattttctaaaaattattttattaagttatatgaaatttaatacttatttacactaataacaatgtgataccgataaagataataggaacaagtggtacttttagcatttttctttttgaaaatgttgtaaacaatttcatatatatcaatgctccaatatcaacaaccattttataaacaaaaaaaataattaattttttacaccccgttactttaaaattatattatatattgtggtgaatcctcaccctcaaaataagttgttacaacagtaacaatgtccaagaaacacaattcaaaactaaaaccaatcacaaaattaaaacttgaacttaattgaaaaatagataaagaaaacttagcttgataatgaatgaatgatagatctttattgaataggaatagccagtattacacaatagaatgagcctaaggttacaactttacacagtaagtaattacaaaaaaatacctcatattgagggaaatcacttcaaga

SEQ ID NO: 301549 - DNA, 3461 bp, Cannabis indica
ggcggtttgtaattttttttaacagccctagtctataatcatttacagtgcttggacatgttgcctagattactagtttttggttttagtttctttcgatcatgttttgctttctgactttgacatatatctcgattattatttttgtgcaccaaattcatataattgtcgtctttaaaactcaaaactgcacaactacaaaaaacacatcaaatttgtacaaaacttaagaaatcaataccaattcatctaataattaaccaagaatgagtgaaaaaaatgtgcactcatcaatgagaacaatgttggtggcattgatgaagtgcggtaactccgaagacataaaaaatgctttaccatagcaaacagatcctccttaactgtctcccagtgttaagtatagaagcctactagcattctatttgggccaggggatttatcgctccccataaaatagaggctcgcctcaatctcatcattaagagggaccaggtttaggaaatccatctccttggtggaaaggcaaagatctcccaaaatctcctttgcgggggtttgagcaaatttttttactgaagatgttattaaatttgtcgatgaaaagcttggatattccagaggggttgtcaacccactccccattctcattttttactatctggatgaagtttatctgtctcaaaaacaccatggaggccataaaaaatttggtggaatgatctccctcgttaagccatgccactctagacttttggcgccaaaagatttcctccttgagcatggcttcattaagtttagctttcgcctataagagactttcctcaccagaagggttgaatttttccaaattaagtagagtagttttagcctcctcaacttgacatttgactttccttaaatgcaccctattccaattagaagttgcagcttagttttcttcaacttgcgatgcatgttaatcataggattggagtggagatttgtcaaccaagcctgacgtacaacccaaaaacattttgggtcctgaccccactttaactcatacttgaattgagccattttacaattagtgcccccttttgtgtcaagcaatattggtgtttgatccaagacaactgatgtctagtgatggatgatcgcactgggaaacaaaagtctccactcaatggtttccaatgccctgtcaagccttgctcttttgagtgaattcataccaatagcttgatttttggaactatgtaaactttcttccctggcatccaaggtcaataactcctgtatggtttaccactcttctgaggtcaaaggagtatctcgtcgagttaccctgacaagagtagttgatgctctcatggtcttctagtgtgccattcaaatcttccataagcattgttgaccttattttggttaatgaagcggagtcaaaaaatggcgattgtacgtgtttaaatacaaaatataacaagaactataaacaacacatgaggattatagaggttcagcccctaaatcggtaaggacctactccacttttagttgtatttcttttggaaacatcaagatcacatgaacctggtcaagtgagtttcttactatctatgaatattacaagtaatttggcagcataatagctttcttgagaatacaaatttcgatccctaaataatgaatatgatccactatctataggaaaaataatgtagtatctttacatttaattacataataaagcatttaatatttgaatgagtcaataccacaaaatcctctaattccccttattctcacaatccctcaattgttggtatgctgattgacctattcttaaggaaataaattattgagatgaagatggaaattaccttccacgaactcgttggtcggatgtcctttatatggtgagcctttttgattgctcggagtactggttgatatactctgtccagtacatgcctaatgttggacgactttatctagtctatactgtcgaccaacatcttttggggaatcttttcaaaggtctcacgtccgtccaacctcttctatacttgccatgtgtcacatcattattggaataacttttacccccaagtccgtgaagggactttttggcttctctttttgcacgattaggtaacgcatggctttactcagatggttcgcctagactgggcatcttacctacccaaagtaaattttctccttatcttttcaaatatttttctatgattacttcccttgaaaactgcacttttagagatcgtgtctgatagttacacattttcccaagtggtttttaatgcaaaatgagacttttggattttttgggagaaaaaactaaccatttaaaatttagtccccaaaaatttttcccacacccccatctttcctataaatacttcatcaaaagaaaaattatttggaactttttcatctttgaaatttcagagctcaaaaagagagagaatttccaagttcttgatttttcttcttcgatcaagcgttgtatggattgttcctttggggattccttcttcaaccttcaagtcgaacagtgagtaagttctctcatcttatggaagtctaagaaacgacttatttttttctcaatcttcaactgaagtagaatatatggccatgacaaacgcaacatgtgaactatcatggccccactcaatcttcaatgatttcaacattcacatcaacatgtcttcacttttattctgtgacaacatagcaacaatacacataactgaaaatcctatctaatatgaacgaaccaaacatgtaaaattaaattgtcacattgttcaagagaatgtcaacaatagcaacatcaaaatgaaccatgtcttttaaaaaccaaccttgcagacatcctaacaaaacgtcttttctccaatcactttaatgatattgtatttaagatgggtgttaaaaatttctacattccatcaaaacttctacactttaatgatattgtatttaagagtctattagattactaaattagttgttagttttgttaggtatttcagttagcttagaactagttctcttttcttaattctttatttcaattgcctataaagcactactcttccctcaattgtaattcattcaatttacatttaataatagaatcatcttcctttttctctactttctctcttctaatacaaatcttattaaaataaatttccacaataggccaagcaaggcaaccaactttttaaatttactagtgagatagcacgtgcttcgcacgtgagtggctcctaaaactatttaagtataactattttaagaaataattaatattttgtctcttgaacttacaacactatataattgtatcatttaaaatgtatatcatgttgaaaaaatttcgtaaactcttctatttagagatataatatttttgttaactatcattcttttttatcatttaaaagttgatg

SEQ ID NO: 301550 - DNA, 1213 bp, Cannabis indica
aaaattcatagatgactcatttttaattagtgaagatatatatggggtaacagagaggctcacaaatggtccacaaatcaacaacttggagccaatcttaaccattgatttgcaataaacaaagttcaaaatagaaatcaagagtgacaaagaacagcatagctgaaatacttaatcaactcttctcaaatttcactaaatctcaagaaagctactatttttcagacaaaacataaatgtcaaatatgattattttggttaatcaaatcaaatgtttacaagaagagacctgctggccacaatacagataatgatctacaaattagtaaaattccagacccccctccatccaaaagattttgttagataaattgattttgttagataaattgattttgtagatcaatgagattgagagacagccagagaatgtgaaatggtcaaaccatagttactgaaaaatgttgcaacaaggagcttaatatgccattgacttaaatatgagaagaacttatatgctattttcatgtggcatcatttacgatatacccaaaatattatttagaacaaatcctatctgtatgacacaaaacttcagattactaaataaaaattgaactgcaagttccctcctatagatgtttaaaatgaaattgagcaggtcaagactcacttggaagaacattgaagaaatgatagacttcttcctcatccattaccccaacctctgttgagcataccatgcaatgaacttgtttgaatgtttcaccaacagtctgatctacttcactctcatctgtttctcttcgtctcttgccactctttagttgtgaaatgctatcacgcaataagcatttacttccgaccttgcaattaactacgaaaattgctctgtactgcgtcaagtacttttcatgcctggaagaaatcaagttaagttgtattgtaatacatattaaatggtagaatttgcaagcaattaaaaataattcataagcttatttcacaagacattattgtaagacgaaatcaattatgaacatttttaaaatagttgaagtttgccttctatttctgaaacaaaagatatacacagacaaaacatattacaaaatgtagtgaattatgtttagtggcagttgatgttgcaaataacaataattactatagctacaatgtcttcctcatatgtttataacattcattatttttt

SEQ ID NO: 301551 - DNA, 2017 bp, Cannabis indica
ccaagcccacggcaattccaactaaggatactcatgatcctaggtgggcctggattccaggacccaccaacgacccattttttgacagcccaattgggtcaaggctcatatcctcctccacgtcatctgacttctcaatcccttctatatctgtccttcttctttttgtatcagtcacaattaatgtgagagctggcattcgttcatctttgtcaactgatataggttgattggagtgaacaaaatcaactttattaccattgactccatgattctctccagcattaatcatatagatatgtccttcatcatgaccacgatccacgctagtatgattcccataatcacgggctgattgatttgttgtattgaattcgcctgagaaatgtttgtcagcatctgttccggtacgcaaccagtaagctccaatcttcttctttcctcttcgtgtttcagccttcatccataatccataaggcttttctatctgatcaacaggtgtttcgaatagtctatcacaaaacctttcagagtgaccaataataccgcatatgaaacaaaaggttgggacgaattcatatttgaaattacaccacagccaatctccattagtcttcttaagcttgatcctccttttcagtggttgttctatattaacttttactctgattctgagataatctctccatatgcccatgaaattcttagggtccgacttgataaaagtaccaatgtagtttcctacatttttggcatttgtttctgtcataaaccctgttttcagattatgtagttgaatccacatatcaagatgatgtagacgaacacttctcggattttcaccttgtttcagacgttcaaagattaattggaatctattgaaagtccaaggactcccctcaatgactctttcaatgtcgatttcatggtagaattggaaaataaataggttttgttccaattccttgacgaacattcctctgccaggctgccataaagaagctaaagtattctgcatagcatcaaaatctatgattctcgtagtcagaaatttgccaacaaggcaccaccgatcgtcaataggttgaccaatatcctcttgaatatcacataacagttcaccctcctcctcttcatccagttgtatgttgtcatattggttgttcagatcattaacctgcttactgctagacgccatcagatcgtacaacagaagtccaaaggaaaacttagagcaaagatcatacaatcacaaacttaaaacacacatctcacacacacatgtcaaaagacaagactattgatctttatagaattttaattcaattctattagaagaaaatctcaaattattgtaattactgcaaatctacctctgttgcattttatttatttttctaggtagtttgatgatttagcattaatgtgacactaatttaatgcaatttaagaatttataaaattatatatgtataaataataatttactgataaattatgtaaatataaatttataacttagagtaatgtttgtttaatgtcaataaatataaattggacttttatatagtttaagttagttaaataaactctgatattgtattgtagttttatacttttgactcatcataactactacataggcaaattattattatttaaaaaaaaaataatagaagaatcctcaaaataataaaattaagttaactactagaaattaatgtcacttatcataactactagaaattaattttatattagttatattagaaaacattataaaaaattgagattggaatattattttacatcattttaaaaaataagtctttaaattatcatttaagcaaaccatttggttgagtttcgagaacatcaaccggaaacaagatacatcttgtttttcactcagtagtccattataaaagaactctatagttaagcgtgcttgacttagagtaatttcaaaatgggtgacattctggaaagtttttctaggaagtgtgcgagtgaggac

SEQ ID NO: 301552 - DNA, 1403 bp, Cannabis indica
tttttatatttaattattttttaaaatattaaatgattatttaaaataaaaataaaaataaatctacctggaccaatcacaacgtgccatgtaggtactgacctggcacttaacgtccaggtacctacggaagttccaggaccctaacagaaggtatttttaccgccaaaaataggacttaggtatttatctgctactcggcataaaacttaggtatttatgccgcaaattactcttttttatattaactaaatatatatgtagtattgtatcaaaacttgaggcatttattatattttgaaattatatcatacaagatcatcaccatcatatcaacatcatgggccacgtcatcatcaacatatgttcaaatggtttcgaaatgtgtatcgggaaggcttctgggaaaattcttcaatgcctcacaaaaacgatttcgattatcaacagagtggtctgttgttcccgccacttccccggaaagccttcctcgattcttcagccgataatgtttgctccgacgtcgaccaacttttctccaacctcaaaaatcccaattggcccaaacgccttttctctttatttgctcatgctttttgttgcactagatgaaggttatataataataactaataactatattattactatggtcgctgtggaggtaaacggctcgaaactcacgcagaggagggagatgggtaggtggtttggattctggacgtttgatccggttgggtgaggctttgagtggggtgggttgggtctttttcacggcaaagaacaaagaggatcaagttttcaggccaaggtttttggtaaccgagggtgtttcgtattaggtcatgtctaatgttttcgtggtctgggcggagttttgactgtccttagatagaatcattaagttgattgtggcaaatatcgaacagtcatgttgctgctgtctacaccgataaccaattcttgctggtcaagtggtggacgttttgttgtgtggacgctgtgagcctgtggaggtggagattcttttccgatgacaatcaaagtgtttttgtggagacgttttgttgcttcccttccttttatgtaatgttatacctttagggggtgtttggaatgggttaatgctaacaagagagtagaaatgtgaaacattaccttgtttgttttgagtctttacccttggaatttcactacccttgatgaaagtaatgttgatactttaaaaaagggtaggattgaatcattaccttctattatattaatttgaatagaatttttgaattaataaataaatttaaatactaataatattatcttttattataaataaaatattacggtatatatttagtttatgagatcagttttttttaactaagttattttttatattattagca

SEQ ID NO: 301553 - DNA, 1232 bp, Cannabis indica
acccatgcaagagtctcagcttatttccttgtctaataaagaaggaaaatagaacaggcaaaagtaaccatttttccatgatgtcttattacattacagccttgttcaaaatttacatggtagtaccaccatagggcttacttacaatgatgtcaaacatttattgctagaaataatgcacttttggatgttatttatgattatacaagcaaaaatcaaaataatgtgaccagtcttgtgcaagaaaaaaattgtattgaaactttaagacaaatattgtaaatgttatggattcaaatttgaagttgttattttattatttataacagggaaaactgtcctgtgaagttgataattgatcaactacctaatgactagtgaataatatttgatgaatgattatatatatgttggctccaatagcattgttcccatgttatcctaaatgacagccagtaaagtatgaacaactggacttgactgtcaattattatagctaatgccaaatcaattctatctatatttggttcaaaaattcaaccattatgtcaggtttcttcttatgttaattaccatttaatattgtattattatttgttaaaaaaatattttattcagttgtgcggacgaaatcctctttgttcttggtttttgctagttcgaaacatgttgtgcgttggattatatcggcttttaatcagatcaaggtaaatgttgacagagcattatttaatgatgctgatagttttgggttcagatgtttggtccaaactcacgacggacggattttggaggcctttatagctagtagaatacgtgccgtctctcaaaaaattgcataaataatagggattaaagaaactctgagttagattcaacgacatttattatctaaagtgattatgcagactgatagtctagtttgtgttcagactatctaaagtaatttacatatgccttctagtaattgagtttagatgattgcaatgttattttgttatctttaagtaataacgttatttagtttgttgaacgatctgcaaataaaattgttcactatttagcccataactcttgtttttattgaggtcttatttttcagaagcataatttacttcttaaattacgtgatattacaatagatgaagtttcactttaataaaagtttacctttattcaaatatatatatatatatattttattcatatatatatatataaaaaatttatgt

SEQ ID NO: 301554 - DNA, 1512 bp, Cannabis indica
cagtcatcaaaccataactcatgttatatatttatgggagaaatactaagtgcaaccgacatatcgttgttgaaataaattgatattgaatcccacacaattcaatttaaataacataaaaaattacttataaccaatcacaacgtgccatgtggatatggtatatgatggctaaatatgcgcatgaactatttcatcaaaatctaaacattttaacttactgaatttcagtgcatatgattattattcaacatatatcatgtatcttttaaacacagcaactaaataaaccgattaaatatatataatacttacttaaatacttaattttatcatcatacatatatattaaaaaaaagaatgaaaaattttatgataatatacgtacgcagttaattattagattatatagaaagctagaattggaaattaaagtatagaaccgtggggtttttatccatatatatgtaccctacaaaagaatgatgcatatatgttattacacaggaaacccaataacatgtgaccacgcaagaatccaataatgattattatgttagttgcgtaaaccaacaaaagcgtcaccatcctaaaaaaaccctaattctctttaactagtaaaaaaaattagatgagtattgcactggtttggggtgatgatgatcagaggtttagtgtcgtttttgtaaaaggtgtctgtgtgtgtgtgtttttattatatgataaggcaggaaagggggaaagggtcactatcttcttgttccttatttctcttccccattaggtggcttgaaaacgacattgcttctctgaataaactactcctgtcttgggcctccacattaatgtatagtactgtttctatatgtatatatatatatatgcatgtataatataggcgtatgtatacactacactctacgtacactactacacatacatgcatgtcagccaactagaatgatcgatctcatacatgtataattaaggtcgttttatatgatacatggcattctttttttcttttctcgtaattgtagtttgtccttaattatttcaataattaactacagatttttcttcaggaaaatcaaattaaactcaggtgtatcgaatcaatgtgtgacccggcatgcaaaatccattatatattgattcatgtacatatgaatatgttggcattagtttaatctttggccaacatatgatgggattgacaaaaacaatgagacaatgcatgtttttaattattagccaacaataatatcagctgccgatttaatgcataacttatatatatatatagatagtgaatatatatgtgatttgataaaatgtataaatcatcatcaattatgctcagattatactctcttaaaaaaaatgaactctataaataagagaggtataagtagtgtcacttgagtgggatcaaataaatccttaaaaaaataaataaataagagaggccacagtcatgatgaccattttacaaaaccaaaaaaaaaaact

SEQ ID NO: 301555 - DNA, 1634 bp, Cannabis indica
tgttgcaggttgaactgattgagcctgctgtgaatggcacactaaatgtgctcaaagcttgtgttgaagcgaaaattgaacgagtgatttacgtgtcttcaagtgctgctgtggccttgaatcccaactggcccaaagatcaagtcatggatgaaacatgctggtctgataaggattactgcaaaagaactgaggtagtttatccaagtacagatcattctgtctttaattacactatgattttgtaaaactgactatgcccctattcctgtgtgtaccagaactggtattgtttatctaaaacactagcagaaagtgaggcttgggagttttcgaagaaaactgggcttgacgttgtggctatctgtccgacacttgttttgggaccgattctacagtccaatgtgaattcaagcaccttggttctccttaaacttttgaaaggtttgtaactgtattacttaattttctatcataggcatgttggacaaaatatcatatagataaaacaatgcaaaatacctttaggcttgaacctttacaaatgaatacacagctagaactcttttacactctcaattttcaaaagaacagattaaacctttacaaatgaatgaagagaggtgtttataactctcaaacacgaaatacaaaatcgaaagataactaactgtatcatcagcagagataagcttaactgattccatccaatctgtttgagtttgttactgttctaacattttctttgtaagaattttctatgaacaacacaaaatgtgtatgcagaagggtacgattccatcgaaaacagactgtcgagttatagtagatgtacgcgatgtagctgatgcaattcttatggggtacgagaagcctgaggctgaaggaagatacatatgtacatctcacttaatcaaggcaaaggatttggtggacaagctgaagagtttatatcctaactacaattatcccaagaagtaagttcttattttacatccatagatgacaaaatgctttgaatttttggagaccattgtctttgtgaggtgaattactaatatagagtgtctgtatgtgagttgcaggtttactgaagttgagaatgacttgaaattgagctctgaaaagctgcagaagcttggttggagttctcgaccactaaatgagactctaaccgattctattgaaagctaccgcgcagctggactattggattgaaaaaaagactaatcacagtttccacaaaagcacatattgtctaaatagcattttatagttgtgattacagactaaagagtgttcttgtttgtttaataaagtgtttgagacaagtaatgttgtttagctttgtgaagtgtgtgatccctcttttgtgtttgtgtaataagtaaaagatatcattgaaagaaacttgagttgtttcttatgccaaaggctattcataagctttgttattaagtaaaaattaagtctgcaagaaattcaggtctcaaaaaaacataagctttgttattatttttagagaaatgctagctgaaggaaaaaaaaaaaaaagggaaatttacaaaaatactggaatttgggttaatttttacaaaaatactgtcacacggaaattttttcaaaaatactgt

SEQ ID NO: 301556 - DNA, 946 bp, Cannabis indica
aagagttcttgcaattactttcgtattttgaatgagctttggctaaactaatattgaagtttacagtgacagtagatcaccttaatactattcctcattcaccaaacataaaataaaaataaaaccttgatacaggtcaggtttaattagttgccgaacaaataaaatcagcaaatgtttctttattccacataataaatttttgtaatatttagaattttctcgcaagatcaaattccatagctgcaaggccgattctacagaaaagaagtcaatctggagtgcaattctaagatcgacactgactgaatctattgttcaaaaagttgcaaatttgacctatctctttactgaactctacacatacacgtcgaaattgagtcaatgcaatgtcaacgagatcaaagcaatgaagttccttccgatcaccagaagaaaactcactgtttcatataaattaattaactttcttgaccatcttcaatcggagtaagaaaatacgattaaaacaaatatataaatgaaattacaagatttggcgagtttgaatgagttggcggctttatcgaagagatcggcggcgtcttcatattttgagccgaaaattccccagctgttgagctttttctcagctttcttctcaaattcttcagccttagctatctgatcccccatttcttcaactccttgctttaattttccgatttcggaggtgcaaaaatggagggtatcaagaagaagaaaatcaaaataatgaaagaggaaggggaaaactgaaatttcgaccaaaaagggagtcgatatttgataatgtcaagggtcggttaagacaaccatattcaagttttttgattttgggaattttacaaaaatactgctttttgaccaaaactttacatttttactgggacacggcaaaaacaacttttgtactgcccaagcccaa

SEQ ID NO: 301557 - DNA, 4631 bp, Cannabis indica
atcgatttgaaagactacggtatgaatttctaatcagccaaaaaaattcaacttacgagaaatttcgaagataccccttagatacattagatacaattctaagtttaattaaataatatttaaagtacatatccatatttttcttccctatcagttcgtaaaatcccactttaagaaatggtcggaccatttaacaaacatgttttggaccgctaaagcattgcacgggagcaagcctaacattaaaaattcgtgttgatgaaacaaacacttctccacttgaaaattatcatattaaggatttcaaaccacgtacaaaatagtgttagaagaaatggtttctaatctatcttcaagagatattccttctctactcttgtagaagataaccccacttcctcagctgaactaatacaaatggatacatttgacaatacaatgcgaaataagaaagcaccatccacctagtaaaccccagcaggcaccttgaaacaaatatacactagacaaaataatcaacttatatatagaaatctttatggaagaacataccaaggtaccaaaatccaattctctctaaaaacaatccagccgcaaattattgctattgcataatatactaaaagaacatgaagagacacggtagcctacttataacaactcaaataaccaaagaggggataagcccactcacatatagcaaggtagatgaaacaagaacagacaggttccactcagaaaaaatgcctctagatataacaatgacagaacacgatgactagaccaaagcaaaatcagaacctgcgactgaccatgcttgtatcccgtgtctcccatgagggtctactctcctgtgcaatatcacccctgattgcccactcaattggttttatggcaaagaagtactgtaaacaagacaaacaaaattatcaattttggcaatgaaaaagacagaaaaaaccaccgcaagtattaaaatttaaaatgaagaggattcttttgtcgagaaaaagtgtgagaagaaatcttaggggcttacttggaaagctaaaaatataggaatcaagatttttcctctatcgttggggtttggcccttcgatcaatttcttgtcaacaacaatagacttgcttccattcaaggccacttctgtgataatttgaactaaatgagaaatccaaggagtgccagttggaagaacctgtcaattcaatgatatgaaaatgataagaattgacaaaagatacactcaaggggttgacatgtaaacatagaatagggaagatgattgaccttttcttcattctcattcttattacacctcccactgttctcaaccaaaaccacaggaattgctgaaccctgagagagaataaggtagaaaataacaaagtaatggcttagtaacacagactaacacattgcccataaaaaggtaaggaaaaacaaacatcaataataagaatagatgacagctaacccctatgaaaataaaatgcagaagaatatgagaaatagaaacaattttatgatgccatcatggtagaaatcaacgcctactgaacttattcttctcacttgatggtagaaatcaacgcctactgaacttattcttctcactttaatgtttgggcatcagcgcatatgtgtaaaataaattcatatagcagaaaggaaacagctaaaagcgagagaaaacacttaatataccaatttaatccaacttgatacaaccgaatttatagatcaaagtctcatttaacttccataataagttacatcatttaaaaagacacatctcagtttgagacgaaggaaacaatccccaaggtgtaagcatcgcctcagatggcgcatcatagagttgagggaggcgtgcatctccctcaatctcttgaattaaaggccaaaaaactgattaaattgggttttaattttaagagtttaagatactataaaaagaaaagcccagtattttctagaaaccttagtccctttagtagctgccctgcccctttatcattctagcttccttcaacaaattgaaaagaaaaaacaaaaacgaatgccaactatccactactcaaatttgttctagaataatagaatctaagattcttgaaactaaacttttgtctttattttagagttctagacaacttatgagacattttatattatgcttgagtttgattgacattgaatgtgttatgtaagattttagggttattcttagttttaaccatttgctgttatgttatgtttaattatttttaattattcatccttgatattattaggttttataaaagtaattttcaataaaatataataggctttttgaggcttatgcctcgaaattaacattaaaaaaattgtgattttttcattgagaaagttctatagctacaagggcaaaccaaaacccaacgcttaggtagcgtttggttgggaggaatgaaaacataggtgttaaatctgtatgcctaggttctatacacgtgtccatatgtctttagtcaattagttaagtagttagttgttaacaggttcaatagttaggtctgttaacttctcaatcttaactcgagtcttaacttgagtatgcaagtattctattagtaacttcttaactgtaaagcagatgattctttattgtaaatactcagtataataaagatataatttcattagaaaggttttgccttgtgtgtgtgcgcgcttatgttctatgagttgtgagtgttctcagattgttcttggagccattcctggcatgtgggattgagctcgaattacaacaagtggtattagggcttggagatcgaagagaaatcttgttttggctcgaaagtttaagattctagtgatcaagcaagaaaatgaggaatgtgaagttcgatcttgaaaagtttacagggaagaacgattttggtttgtgacgtgtgaaaatgagagccttgctagttcaacaaggtctgcaatcagctttgttgggagagaagagtatgcctgaaggtctaacccaaaaagagaaaacacagattctcaagaaagcacatagtgctatagttttgagtcttggtgacaaagttttaagggaaatgtcgcaggaagactcaattatagcgatatggttgaaactggaaagtctttacatgacaaaatcgttggcaaatagattgtttcttaagcacaaactgtactcttttaagaagatgcaaggaaattgaagatcgtcttgatgatttcaataaggtgatcctcgacttggagaacattaaaattaaagttgagaatgaggaccaggccatcattgtgctgaactctcttcccacagagaactatgaacactttgtggataccatgatgtatggtaaggattcattgacattagagtaagtccaaaatgcattaatgtcaaaggaattgaagagaaaagcagggaagcaagatgaaggtgctagacatggattactgatttaaggaaaagggtccaagaaggagaacaaggaccagaacaacacagggaagtgtcgaaggaagactcagctgtagagatacggttgaaactggaaagtctttacatgacaaaattgttggcaaacaaattgtttctcaagtagaaactagactttttaagatgatgccaggaaaggaaattgaagatcatctcgatgatttttttaaggtgatcctctacttggagaacattgcaattaaagttgaggatgaggatcaagccatcacagagaattatgaacacttagaggataccatgatgtatggtaagaattcattgacattcgaggaagttcaaaatgcattaatgtcaaaggaatggaagagaaaagcagagaagcaagatgaaggtgctgggaaatggattactgattcgaggaaaatggtccaagaaggagatcaaggaccagaacaacacagggaaaggtaaatcgaaatccaagtttcaaaggagatgtgcaacaaaccatctcaccttaagaatgattgtccaatcttgaaggattacaaatccaagaaagatggaaatgcagacattgtttcagatgtagaagacagtgatggctaagacaatgccagtgtgttagccatctcaaagaacaagtcaaaagtggactagatcatagattctagatgttcatttcacatctgccctatcaaagaacatttgaatacagaaatgttcaaagtggaactgtcaaactgggagacaatagagcttgtacaattgctggtattggaacagtcaagttggaactggaagatggcaaagttgttgagttgaaacaggtcaggcatgtaccaagatatcaagagaaatttatattctatgtccatgttagaccaagatggtttcaatgtcaagattgaaaattgcactttgaaggctatgaaaggttctttaattatcatgaaaggcaagattgttaatggtatctatgtcttacaagggaccacaaagaaaagtcaaggctaatgttgttgcaactaatggagaggattagaccttagtatggcacagaaggcttggtcatgtcagttatggtggtttgaagatactaggcaagaaaggtattcttggatagtttcatgtcaaccctataaggctt

SEQ ID NO: 301558 - DNA, 4147 bp, Cannabis indica
ttttgtatttctttgcccaaattactatctaaaccatctttgttagcttatatggttcgaacatcacacgcttgatgatatttccctttgattttgtttaagcatttcttctatggaatctgaaaacggggtcaatttggaagatgagaaatgtgttgttgagggaaaccaagttgaagaaccagtgaataatttggataatgagggccagaatgctgatcttgaggataaatctctcaccatgaatggaaaatctgaacctgtggcagtcactgctgatggcgtagattctgcaggtgaggcggttaaggcctctgtgactgctccaccgagtaaaaattctaaaactacaaaggtaaactgtggcttagaataaaaatgtagaagttctcttagcttgagctctgctgtcatcattttgattagtctattgtgtggacaggattctcatgcttcaaacaatggttcctctaagaacagcaaaattattaaggaaaagattttaaaaagcaccactcagtcctctagaaaccagaaagggattctttctcagagtttttccttcccagctagaggagctcgggctgatggaatgaagaaaagtgtggatgggctacctgtgaaaagagaaaccaaacaagctcgagcaaatggaaccaaacctgaaccttcttttgccaatggaacagtcacttcatcttctttaagtcgcccaaataggcgttcaactgttgcaggagtacaattgaaggaaggaaacaaacctaatggggctacttcccggagggctacattgatatcaattcctagcaacaagcaatctacagtaagaatcttttctccattttttggttaatttttctcttttgtctatgcgatttggtttgctacatttctttattatgtgacttattgtgtgatttatatctttttggtattagtctgggaagattggctctgttagtgaaactgctaatgacccttcatctgaaacctcattgtaagttaccataaacttcaactacaagatttttatgttcaattgcccaattgtaacgaaaattataaatggggtacctgtactaactcatcttatgccttcataaaagcacagcataacatgaaaattctattttcttaaaaaattaataaattaatgaaagaaaagaatttgtgatattattcttacaatttttgctgctacatatgcagatcaattgataacagctcagttcctgtcacagcagcacagcaaataaaagaggaggatgatacatactccactacttcgtacgatccaagatgattttgtcatttgatgttcctctttttattgtttgaaccatttctccatttgttttgcactcagccttttgtgttactgtgtactatcatcagaagtacaactggtggtcggagaagcaatgctgcaggatttgcttttaggctggatgaacgtgctgcaaagcggaaggaggtaattaacattgatttatttacctttccttcgaatggtctaaatacatgcttaaagagttaactagtgtcctgctcattgttatttagttctatacaaagcttgaggagaagattcaggccaaggaggaggaaaaatctaccttacaagtgaaatcgaaggtgttgttggcactaacaagttgaaatacttgaagttctttatctcctattgtgcatttttatttaatgtttatatatattatgcaggaaagccaggaggctgagatcaagcaactgaggaagagtatgacatttaaagcctccccaatgccaaatttctataaagagccacctccaaaagttgaacttaaaaaggttgcaaagactttcaagtcctgaaccctatttgattattaacatatcagtaaaaaatttagaggaaagaaaaggcataactttaaatctacaaattatttcagataccaactacacgtgcgaaatctcccaagcttggaaggaataaaatctccaatctttcagtgagcaactcttctgaaggaggtgtttctttaggccagcctctgaaccaaagccagaacaatgggaacaaggggtacgaaaaaagaagttacagaaccaaagaaaccaatcaagaagtcacaagctaaggttcattctcaggaaactgtggctaataaaatccagccaaagcccatcaagacaaagaaacaaaatcagttggcaaagaaagacaaattcagaaagaagccataccagaatccgaacagttgaatgagaaaatagaccaagatcctgaaacaaatgtcaccggtgagaacattgatcatgtacttgttgtgcctgctgctcatgagatcatgcctcaggaagttacagtgggtgtgtgaggacaaattttctgatacatcattgtgtttatacttttgaaaagatgctatgttaaagctccaaattgttgtgaatatagcggttattgaatcactggtgaaagtgtcatttatttgttactttgatggttaatgtaattactggtgtgctttataaagttatagaatcattatttgggaactttttgaagtgttttgacaaaacaaagagttcaaatttcttgtatttgagttttgcatcactttagacctttcctacgtctctaagtcgtatgcattaatgattgtagatactcctttgttgacttctcccattgtatttctttttatgtttggaaaaatagtgttccaaccaggtgcctgagactctggcatgtcagactgctggggtggacattgttgaatcaaatggttgcataggcaatattacaactcagaattggattaggccattgatgggttgctatagaagctttcagtaaactatttgtgcctccattgtaatatttcgctcggccttctcctgtgccatcaggccatcaaagcaagctgttcattgacgacgcactctttctcttggatattggattgctttgctcgtcatcagtttgtcgggggctcatggcagacgctaacttctaaatgctaaaatctacaatcaatcgaggtcgaaaattttcgttcacaaacaatttgtagaccaaacaacgagtaatgagggaaagtttgggaacacctaagaggtgaccacctgaaggcacttagacaagcaactccataaacttgcagtttaatttccaataaataatcaaaaaaatgtttaataaactatttatctcgatgtttaaactttgatttatgaaatgattatcgttattggaattgagatttgagagcaagagtaatggaagtgtgagagtgagtagtgatttttctgtaataacaatatattctaatgattgtcttcctcttttagaaaagacttttttgtaagccttcagagaacatttttttttgttgtatttgtataaatcaatattattttattttatgcattgaagtattttttttttttgtaagtttatataatgtaagcaaagaaaatattagattaggtgactgactgctgttatttttcataattagatgcgattacaataggttccgttttaaaaaaaggaacactactaacaacttttagaatacctccaacgtaactttaaatgttgaatttggtgcaaaaaaataaatttaatatattactatatcttacattgttatacagtatgtgttacagtacacggcatatatgtcgtacactgtaattatgatatttttattattattatttttattttatatttgtataataatattttctatacatatatttattacaaattctacaatgtaatttttaaaagaagtttaccgatatactcttatctgtttcagcattcgggaaatttttttaatcaattattctttcatgctcgtattatcgtatatgtatgttgtagctatttgagacattttgtaagattttgagagattcaaaaaaaaaaaattagcatgccaaaaataggattcaaatagtctattacacgtgtaactcttttatacacatgtgaaatagactatttaatattattttaatttatattattacatgaaatttgatattttaaattatagagttttaataatttatagtagagtaatttatggtataaatacttaagtttatctttccagttgtaaataagtacttaagtttaatt

SEQ ID NO: 301559 - DNA, 711 bp, Cannabis indica
aaaataaaaattgataaaaaaagtattactaaacgcatcaaaaattttgaattcatgctcttcttagtttttttataatgtttttttgttttgtttagtggttgaaaattgtaaaagtttattgtgatttttacatggtgttaatgttttgcattatattttgttcaatagtttgctaattgagttaagaatttttttttgcgaaacaatgtcattattatgttagtcgtatgttaagggaagtgatgtctcttttgaactttctactattcttttgagtgaaaagaaagattagcactctttcaatgaagatgaatttcatttaaaaaaaatgaaatatatttttgggtgattttataatatctctttataaagggtgtataaattttattttatttttaaatagtttactgtgtgaaaataaagttaaaatattttgtgattgtttttcttttgcgtgtagtaacaattgtttgaattttgtttttgacaatgtaaacaattagaatttttaagggtatgattggtttaggatttgaaaactattttatgtttttgaaaattaaaatggtggggtccacctaagaattcttgattggttgagtgttttcaaaaacaaaatttgaatactattttgagttttaggctaaaaaatgaaaacactatttttatgttttttgtgttttcaaatcattgaatccaaaaactctc

SEQ ID NO: 301560 - DNA, 9025 bp, Cannabis indica
tttttggtcctttttaacccgaaataataaacaagatgagacatctcgggccgatgctaagtgttatctacgtttccaaaataggaacatgtgtattttcatttatccaaatcatctaacacaggcccagtcatgggcccaatttggataatgggctaaactcactaaaggagttgggccgcagttttggctctatggcaacttcaattatcctaatagccaggcttcctaggatttggaagggcgttccatctagatagagagaaagcatagcagaaagaacatattcaaatatgtctaagtggtatttccagaagagcaattaaagaggcatctagaagtcaagactgatatggcgctcgattaatgatgaatcccttgatatatgaaccttgtcccctacgagagactcggaaattgtgtgtattattaaaataaacatgcgttttggccaacaaccattacttttgcaaaattatatgcaaagacaatgcacacgtgcaacctgtatccatcaggaggtctccacgtgtactaatgactgctgcctcatgcgtacaaccacactaaatgggatcaatgttaatatattacttgtatttatcctattagtgggccaggttcatttgaaaaccctaacgggtctaggtatagccatatccaatcctagcctataattataacatgagactttcatgttgagggattgatttttcttcatagaagttaagacaaaaatctaggtttaataaaccagagaagaacacttgtgtaatactcaaacgcttttctggccaaatgatattaactcgtggagtgggatttactaatacctgaaccacgtaaaaatcctcgttgaaattttaacacttcaactatttctttagctttaattttattataatcggtttatgaaaatctcaataaatattttggtggaattaagagctgaagaaatatttctaccaatgattgtctactgcaatgacagtagcaccttttcttcaaaactttagaatgccacaaataaagttaaatgagggaagaatggaccctagggcccatatgtttaaacatatcaaattgatgcaaggggaaaaggcaaaagatgacatgaaatgcctctgtttttcattaactttaacaaaatctactcaagatttgtggaaaaggctatctcgtagatccgttcaaagctagaaggacctacaattaatgtttaagaagaaattagtagcggcaaaagactacgacatggaggtcagttctataaaaaaacatcaagcaacagggaggagagagcctcaaaaattacatccaaaggatgatggaagcagtgaatagaacaaaagttaatgatgatataaagctagtgtccctaacattgggaatatttgttgggtccttgttatggggtgagctacaaagtaaaaggtttgacaccctgtctgatttcttatctagggcccaaggcttcataaatttggaagaagcatacatacaagcttttggagaccctccgacaccatcatgaaacgtaagcaattcaacttacactccacaattcttagctctggtgataacccctcgtggaagccaattcacaactcccatgtttacgggcctactacctaaaggtgtgtgcctacataaactaatttctccagcatcagggttacaaaatttgaatgtagtgtagctcctagataggcaagccaacaaacaaaggctctaaaatcaaatgtgagtcaatctaggggcaagaggggtggtaaaagctaaagccagagcaagtcaaaggcttcgaaaaagaggaaaaatttagcgtgaattaaggtgttctgggtacgccagcatgatagatactcgggaaaatatgtataaggaaacttgtaatatagtccactacaataagctacgaccagtgtataaaggaggtcggcacaagaaggactaaagaaaaaaatttgaatatcatggtgatgttacgcacaccacaaatgaatacgattattttaacgatgaaatagaaggcctgatctgaaatggccatctttctcagtggatacggatttattcgatcatctatctggaacaaagagtagcacatgtgcaactagtcattcctggacagaagggacccataaattctcctcagggagagggttatcctcaaactctgggaatacaagccttgagtacacaaaattcagccatataggcccctcatgggatgcctaacgcctaagtaccaaatactacttcgtctcctaagccaggaaatcaatatccatcaggacttgctccccctcctatgaatggtcatgttataaccatttatgagggctcgtatatcgctagaagcacgagaaatgccctgaagaggtacatcaatgagctagactaagagagggagatatgtgaccttgtgcaaactccaactcaaagtttgcgaatgatgaacctaccaatcaccttcacagaagaggacgctaagcatatacatttctcacataatgttccattggtgattgaagaccaaatttccatcaagagagtgtccaaagtattggtggacaatggaagcttggtcaatattccgttcaagggcgccttccaagaaattggtttcgttgaagctaatatgatgtcatgctctatccaactacacgactttaatggagattccttattacttatggggaagatttagttcccgattatactgaacgagggaatagctagaagcaacacaaccttcgcattcaagtactccatgtatgtagtagtggactatcccaccacctataatgacattctaggacacccggttctagtcaacttcggagtagtaacatccatttgacatttatgcatgaagttctcatgcgacaatggaagtattggcataataaaaggcaaccagagaagcaccaaaaattactataatgtctctgccaagacattttttatggtcagagaagatggttccaaaatatctgcccatcagacacagggggtaatccagaaagaggatgagttagatccccaactaggaatggaaaatatgatcaaaccactggaggaagttgaaaaaatatgcattaatgaggcagatcctacgaaattcatcaaggtcggacgaaatttgcctctgatggtgaaataacatatcgttcccacagtgaaaaacaatcatgatgtactagcgtggagccattcaaacaagactagaattatttccaatatacttttccatgttaacattgacaaagacacagacccaatcttttagaatagaagaccattaaattcagtaaaggctgatgtagtgaaaatagaagttgagaaattaacctctatagagtttctttaggtagttttatatctggtctggttggcaaacccaatgttagttccaatactaaatgggacatggagaatgtgcatcgacttcacagacttaaataaggatttttcgaaagatttcttaccacttccctagatcgatcaagtggtggatgccatatcaaggtatgaacttttaagccttataaatgcgtactctaattacaattagattaagatgcatgtagcagccctataacaaaccaatttccagatggacaaaggggagtatttttcggtggttataccctttaggctcaagaacgtcagagcaacatatcaatgtctattgaacaagatgtttaaagaaaacatggaagtttacgtggatgacatgttggtgaagtccaaaactttcgaggaacataatagtgacctagaagaagctttctctgttatttagaattatggaatgaaggcaaatcctaaagaattcactttttgaagattctttagggaaattcttgggtttcattgtcaattttcgaggaattgaagctaatctagaaaagattaaagctcttctttacatgccttccccgaggaaacataaacacgtccagagtcttactagaaggaccgcagacctaagcaaattcatttcaaaatacattgataagtgcggtcttcatttaatgtgttacatggaattaacaacaacggactactgagtgcgaagatgccttccaaaagttaaaggagcatttaggtaaggctatggtcttgtcaaaactagttgtgggagaattgttgtacctatattttgctatgttgaatcatgctatcagtgttgcctcagtgcgaaaagaaagaaatgtacaacttccagtgtattatgtaagcaaaagactattgggagcggagtccaaatattcaatgattgagaagctttcctattacttgttgatcacgttgtggaagttaagaccatacttctaggttcatggcaccaaggtacttacgaaccaccctctttgctaagtattatagaaaccaaaattatttgggagattactgaaatgggccatggagctgagtcaatttaacatccattactagtccagagtttcaatcaaatgtcaagctctggtacgctttattgtagagtgcaccaaaataaataatgacttagaaaaactagtttgagaattagaaatttagaaggtttacattgatagagccttgaatgaaaaaggttctaaacctagaataatttgatttctttgtaaggacataagcttcagagtgccctcccatttgaattcactgcttccaacaacgaagaaaagcacaaaacaacgattacaggtttacatttagctaagaaagttggggctcaaaacatgaaactctaaagtgattctaaactagtggtgaatcaaatatccggagaataccaaacaaaaggagagaaaatggcttcctacatctcttaatctagagagttgattcaaaacttaaaagatacaccgttagacaggtccattgggatcaaaatgccctcacagatacgtttgtaaagctaacaataaattaaaatattgagcaatgcagagtagttcccatcgctcatctagatattttgagcacagatccactgtgggtaaacatcattgattaatccacctccttgataggcccgatctacaagtttttgagttctagggaactactaattgatagagttatagccagaaaaatccaatatcaggatccaagatatttgattcttgatggaagattttactaaaaggggtaatcagtaccctatttgaagtgcatagtcagaacagaaattagcgatatttatccatgaaatacgtgaacgtttctttagagaccacacatctagacccaatttgtctaagaagtttgtctggagaggatacttttggccaaaaatgaaaggattgtatcgattatgttcgaaagtgagaacaatgtcaatgctatactaatgttccaagagctgcaccaacataaataaccatgatgaatagtttgtggtcattttctagttagaagattgatttggtacgttccctttcaactgggaaatgagggttgaaatatgccattgttgccatcgattacttcactaagtgggttcaggtggaaccaacgaatgcagttacttctaagaagtctttggactttgtcataaagaacatagtatgttgttatgaccttccacacaagattgtatcagacaatagcaacaaatttgacagtggtcacttcactgacttatgtgtcaagcatggaatcacaaaaatcttcgcggcagtggccagaccataggcgaatgggcaagtgggtgaaagtttttaacaaaattcttatgaccacattaaagaagaagttacaagtgtacaaggctcaccagccaaaagaacttcctagagtcctttaggaatactagatgataaaaagaacttcaatgggggaaaattcaatgctcaatttattacaagtgtgaagtcatcatcctagtagaaaacactgtaccttctcactgatgggagacttatgaccctacccaaaatcatgccttacttcaggaatagttagatttaattgaagaacttcgagagtagtcacaagctcaactcaaaatgtactaaggaaaaattgcccgatattttaattcaaaagtcaaaagctagaagcttaaaatcaaagatctcatattataaagggtgtttcaagaatctcaggaactaggagtggaggttctaggacctaacagggaaggaacatatgagatacaacacaaggtgcataacggaacatgtcaatttcaaagacttaatggatccaagattctgcgagcttggaatgcagaccacttgagccaatactattagtaaattgggggtagtcagatcaattctcaattaaggcattttcttattccttttgtatgtacatctcagggcaatagcaattacataaaaatagatgaatttttaagagaaaaatgtgaagtctttttaaatttttagttgtgttgtaataagtaaccaagatctgaggttctcacctcacttgggtgatggtatatgcagcaatgtatacttaaaaattaaaatttcttaagcgttaatgctcattagttagtttgggagcaaaagtataaactaaaatccataaggttcaggcatttaaaactagaacattaggaaattgggagtaagttgctatcttaccatatttagattataaactcaccagttaacttaggatgacaaataaaagaaagaagttcagacttcagtgacaataaggaaaagcaaaaacatcaaagacatgaaaatgaagcctaaaaggttcagggttttagaactgaaatcccaaggatctagaagtaagtaattattttattctttccaacctttattattttattcttaaaaaggctataaagttgaaacctcaaagcttatgctgttagaattggaacctcaaggtgtttagaaagatgacatgtggcgtttacaaagtatgattatcttgatatggcctagagtaaagtccttccacaagggaaggtccaatctaggaagaaggtgggcccgagcccatttgaagcctagaaagcatgtctcccaaaaggaggctcatccaaatcaagaaggcctccaaccttcttgaagacagagtaaacgaaggcctctggatgatcattaggatgaatctagaaaggaattctaagaggcgcctttgtaagccctttgtagagtgacatggttgtcctctaatgcttggtcccacaaaatcagatcttgtctcctacgtcagatcaaggtattgtgcacaccatcaaaaggaatacctcttctttttccaacgattcctacctagcatatttttctattggagcaacaccccgtggcacctgtcctagactacatggtcctcattcatacgaaaagccttgcccaatagccaaattcctgccaatgggccttaggtcatgtatttcagtattttcccaaatagtgggcctaatttgcacggaaatcatagcaggtcacgggtctgcccgaatttggatcctagcctatgaaaacctcttttataccttcatgcagggaggataaaaccctacacattctctctagcctttcttcttctctaagttagaaaaaccagagggaaaccaatagagtaagaagctagggttcattagcataccaaggagtggagtcttgatttaccaatcttaccatcaatagtgcttcattgaggaatatttctttaattggctgctgaactccctttttctcatccccacgatcaagtctagaaaggtggtccactacttaattcttgttcccttttctatcataaatttccaaattgaattcttgaagaagcaacacccaacgaatgagtctcaatttcgcatccttcttggaaatgagatacttgattgcagaatgattggtgtaaacaatcactttggttccaacaagataagatcagaattcatcaaaggaaaacactacaaccaacaactctttttctatgggtgcgtagtggatttaagcattagcgagggttctgcttgcataatagatagagtgaaattgttttctctctactgcccaagcactaatccaatagcaaaatcactagcattacacatcaaaaggaaaagaccaatatggagctacaatgtttgcggtagtcgctaaagccttctttagagtcacgaaagcatcttggcactccttggtgaattcacatgggcacttttgttccaacaaagaacaaagaggctttaaaatctttgaaaagtttttgatgaatcttttatagaaccccacatgcccctaaaaacttctaatacccttaaccgtggtatgaggtggtagcttttcaatgacttctaacttaatcttgtccagctcaatacccttgtgagagactttatggcccaaaacaatgccttcctttaccataaaaaaggcatttctcccaattcaaaaccaagtttgtctactcacaccttttcaagactttctccaagttatccaaacaatcattaaatgactctccaaagacagaaaaatcatccatgaaaattttgagaattttttctgccatatcagagaagattgccatcatccactgttggaagtagcgagagcattgcacaaaccaaatggtatccttctaaaggcaaagatgccatatggacaagtaaaagttatcttttcttggtcctccagaactatagaaatctggttgtaacttgaataactatcaagaaagtaataaaactattttcccgctaaatgatcaagcgttttatcaataaatggcagcgggaaatgaccttttgagtagcattgttcaactttgataatcaatggaaacgttccaaccagtaatagttctagtaggaatccattccttattctcattagccacaactgtgactctgcctttcttaggtacacattgagctgagctgaaccaggaactatctaaaattgggtacacaataccataatccaaccactttatcacttctttttacaacaattccttcataacaagattcaacctttgatgctgctcaatggagttactgttggaaatattttac

SEQ ID NO: 301561 - DNA, 1021 bp, Cannabis indica
ctcgtgtataagagccatttattccgtgggtgtaaggacacaatggaggcttgaagcggggacgttacagtaatagttttaatttcttattttgtattctcaactctggacccttttcgcaggggcagttgaggttggtatttgtgttaagctttgctttaaagtaatcattctatttcagtgtaatgatgtatttctcaaggggagtttaattgtatggtgtcactaactttgatttgcaggtaaattttagttaagaatattttgattatctaaaatgcgggggagattgtaatgtgttttttttttggaaatttaggtgtcaaaatagtttttatttattatgtgatttccttgttcaattgaaccgatttgtgcattttgatttcgttcctttattgattattttcatctaaggaaagaatcttttttcagctgacttattcttgtttagaaaactttttgtgagaaaagaaattctcttaaggaaagtggtatttatttggaatctttgactttcctctttctcattaatgattttgggtgtttcttgataagatcagatcaaacacaatgaatttggcaagtgttatccatgttgtcattaattagacacgtggcatgatcggagggaaggataaggtcacaacacgcacgagttattcgaggtaactaagataaggaatgactcccaaaccataaaggcaatgagaggcgatggccttcgggagtaacttccctctgtaaggaacccaaaaggtgataagggtcttaaagatgttggccacgttagcatcttacaaaatatcactccgtagatggctacaccttttttttgacatatgatcagatttgaaccacgtgccagagtatggtagtgcgcgtacacaccctcaaatatgatttttgcccaacggcctggttagagactattttgcaagggaaagacctttaacaacacgtgtccacgatcatacaatgtaaagcccgcttagttaatttggaaattagcagttgttta

SEQ ID NO: 301562 - DNA, 3892 bp, Cannabis indica
tttattcaaccaattgaattttactaaactattttaattttacatattaatatctcatatttatttttgatagaaacgtttggagatcaatgcataaaataggaaaaaattgaaggagttgatccatggaggatctcaaactatacctgctttgcattataaaatagtataattaatttataatataattatcatatttctgttttgttgctattacttgaataataaatatttaaaaaaaacatctatctcacagcgtgatctggagtttaggagattggcaccgatcccagatacttgacaggccactcaccataagtagggtaaaggatggatgactaacactgctagagagacatgggtatgttttaaacaaatattatctatctgatatatatgaattatttaggtgggatgcgattattatttgtgactgtacattcccattgatatctgacttgagtttctagcatcatcaaatatttgaacccacatttacatataattgatgacactgtatgtataatatcttgatgtatatttacattaaaacaaatatatggaatttagactaaatttgaaattagtgtagttgagaaactctcatgcttagttcatttggatataagttgttgtattatagaaccctcagctattagggctattgaaaatttactgcaagaatctagaatgattggataggaacttggtttctgttagtcatgatagtaaagatgaagatgcttttgctattgctcttcgatgccgaggctaaagcatcttgagattgcttatacatgtgttactactaaaggtgtattcaaatatttagacatttctgaatgttccaatctcacacattctcaagatttgttcaacaatttttgtcctggtttaaaggtcgttgtagaaaattttgttgacgatgacagtgtgttctgtattgttattggttcacatcgtcacttaacttaaaattatgctttggaatactataaggtcatgaatgtataattttaaaggttttactgtattcatgtgtgcttatctatattcaacatcaatctagttaattttttttcttttgaaaaaaatacagtacattaaaagaaatagatggaatttagtctacatctctttatattttttttgtctaaataaagtttataatcaatttaaatactattgtgtaataggagaaaataattgctatacctgagacacaacaaacacagtccttccaaaatactgaagtaccaaacaatgtcattaatccagaagatgaagatctatcacttgtccaaactgtttttggaagacatcgtgggcaccaaaacggttctggacgtctaattagcacaagagagatggcagcaccacctacatttacccaacctcctccgtctcaggctggtgtatatgttggagctgatgtcatagttgatatgcaggagaggattagacagttggaggggttatgaaaaattgtgtcacttcgggatcgtagaatctgcctcaacaatctgatcattctgatgatggaggactgagtcagtagttatgtttatctgtagtgcctatttctttcacgaacctttttattagcatgtttagtatttaggtaactaaacttataattttaaaaatataaaatgtaaatttatggtatttttattaatgaattttatttttatcattatttgagcaatattaatgtgaaaataaatatgcatatgatatatttaatatgaaaattaatattgaataaaaaatgtagtttttatataaaaaaaacttgtgttctcggtaaaagacactataccaataacaatgtcctcggtatagatgagttagttgggccaaaatgaaagccaactatcgacaacatatttaacctttaccgacaacaatgtcttcggtatattctttaacgagaacatcatagttgtcctcggcagaaatatatttttaacgacgaggctctaacaaagacatatcctcgttatatggttctaccgaggacatttgtcctcgttataaaccttgttttttgtggtgagttattacaattattattattattattattattattattattattgtcaagttattgagttgcttaatatgtgatgttttgaagctaatttatttatactatcgtgcttttaataaaatatcgtattgtatcgctcacttaatttaatatattttatactgtattgtgtcaatttgtaatattatatcatatcatattcacatatatttttttaatgttcggttatgcttatacgtgttacctgaactcatttcaatttcgtatcgtgttaaaaaatgtagcttgtatttgctattagagaatccttttgaactcacaaaactatttgacaatatatataaatacgtatatatacgaaaattccaaaatatccttagattaattaaaatcagaaacaacctttgaatttattttatataatatatttaattaaaagactcaaatgaaacagctctacattatgaacgactcttttttttttttctttttttaattgatgattgagtttaactaatatttgtgttttgttcctaaaactagaaaaaagaaaaaagaaaaaattgtgagttgtttttcatataagttaggtgtagttttgatataattattttcgagtaataaaaaataataatgtatagactatgtagaggaaagaataaggttggttggtaggtaggcctaggttaggttacattcgattccgtacaatgtttgcaaaggtttaagcatgctaattaaattaatctaatctaatttcattcatggacttgaacttgtacttgcatatcccacataaaattaacaatgatatatcacaaaactatttatattattatatatactacaaaagaaaaataatgtttctagagaattaattgctcgacgcagttgacatacacacaattattatttatgtcaacacaataattaggataatttatgcctatataatgatcagttaagaagtggtaatcatgtctaatttatataattacatggtttaaaaaaaattcttattttaatattaattaagatgaattattacagctaaattattgtagtaaaataaaatataaacgttggaagaatagcatagatagcgtggtgtggtgggcagtgctgaaatcacatgataatatgaaaaatgttagttttatatgaaattattgcaaagataatcaattatatattctacaacaagagatttcaggttacgcatgcatgactatatacaaatttagacttttcataaatattattggattcatagaatttacatgactatcaagaaacaacacttttgtcaacatatatttttgtgctagtaaaagttagatattatactgataaaataaaatttatttttactaatgcatttttgtattggcaaaaagattagtgctcgcaattgcatttctatgataatcagcgatgatgtatacttacagcttggataagtgttatgtcatttccatggcattggcaaagtatgtcagtattaattggatgtatggactatacattggattggaccgacattgatcttggataaaatatcttaaacttatcgttttatctttgtaagtcaatatcactgattgatctctaaagtctatacatcttaatcctgatatgtttaggttcaactcaacagtattatttatgttcttcaagtttttcgtgaaagttaactattggttctggtggatacttacatcttgggaacatgatagttcaatttagtgggagcaataatcatagatatagaaactataacttttaataatatttagaagtgaaacgatgatttcttcgagtttggcttgatagaga

SEQ ID NO: 301563 - DNA, 3842 bp, Cannabis indica
taaaggattattatagttatttacagatgttaaaaatgtgttaatgaaaatatttaaacttcaagatggaatctaagattaaaattaagatttgagatgaaaaatagtgataactgggatataatgattacaataggtaagataaggtgataaaatatgaaatacggtgataacaacttacgagagatacaatgataacaataaatttaaatgaataaaatataaaaataattttatgagaaaagatgtttatcaattcttattatttctcaataatttatctcatatgtaatttaaagcgaattaggatttgtttactagttgaataatatagctcgtgcaatttggtaacgtactcgttgaggggcgtcatcagtaccaaaaataagatttaaaaataaataatgttacaaatttcatttataaacgtatctgactcgtgcgacaaaaacagtgtaaactgtatttatagtgtatacccaactttaattttttttatccatcctgtcaacattattaatgtgcctattaataagtcaatgatatatttcaaaatcttcaaaaaataaaattcttaattttatgcttatatattctcaatcccaactaattaaaaaataaataaataaaacacagcacgtaaaaagaaacttcgaagctggttggttaaggcaatattaattagtggagtcaaagtaatgcaatggtgagttacattaattttggtgtaacaaataattagtatatatcagaatacatgtagaaattgaaaaaacaaaatattccctgcctctttctctttctctttctctttctctttctctttctcatctatatctctctaaggtctaatctaatatatttctaaccatgtaataagatagcaaaagtaaaaaaaaaagctattagaggagtgagacctaaaagatcacatgggtaaggcgctgaatccaaaggcatatttggttttcttcaaaatacagtatatataaggtccatccaactgagcctcctgacttgaatatataatacattattattatatatttcctcctcactactatttcccatgaagcagtactattactatactataccccaagaagtacgtaatacagaactgtgatgggcaaagcgatcagcattccgaaaataaccctgcaatattataaatatatatacttacatgtcagatttctcttatatgattaattatataagtgttatataagtctgttcatctctataaattatatatgttcatttcattagtgtggagatcatgaatacttacgcagtactaagtatatctggatggacattgtattcttttgcaaatacaaagggaacaattccttgtggaagtgcagcctgcatatgataataatgtaagtgttataattaaattaataatcattaactacttagctatatattattcaagtatagttttcagtgataaataacttattgacaaaataatttgaagatcttttgaccgttttaatatagatgcgaaatcgaaaaacaatacttttagcaagtcagcattttggactaccaaatggaaggcaaagactgcataaaatgaatatgtatattattttctctatttattataaaacaataatccttttggttcaaattttgatgagtaaaatgctattcgattacgaacctaccttgaaaaaaatagacccatatcagaagcattaagtcaacataattgtattctattgctgtcagatattatgtactattaacaaagttttcttcaaaatactgttcaatctctagaaaggtacttttcattttaaggttagttggcattaaagtatacttcgtagtgagaaaaggggtttgactttctacaaaagcgatatatacacatccagctagcaatgtacatatctctaatgattatataaaaaagtgtacaaatgattatttaattaagtaattaagaaatgagaaagtatattaaacctgaacaattgcaatatgcaaaagggttccacggagaccaattactatagaagttgcggcaatcactgcggggccagtcaagaacctaacagccattgaaaaggtcgccactgattttccacaagcaatgatctttggctgtaaagccatgaataaacctgcgcacatgcaatttattaatgccaatgtcattgtttgtttatttgcaaagatattgtccaaatgaaatcatggatttatatatatgtatatatatataaataaataaataaatatttacctaaactgaacatagccattcctagaccagcatcagataatatggatatggacccgcttacaattgttggcatcttgatgttccatctgccaacataaaattattatgtgatgaagaatgtcaaataatatagagcatatataaattacgttgtgccaaatacatatgtactttatcaatagtaagctgtacccaatataattttacattaaaatatagaattccatatttgtaatttgaatcaataatatggtaatgtgttttgttgcatactttttaacattttgttatttacagtacaaaaacttgcacaccttaaaaagctacggtatataaatccttaatttatgtagttttggtacacttattaagactgtattgagaagatgatatttatggggggagagagaaagataggtaattatattgattgatgtagcaataattacctgaaggagactagggaccaaataaggccaatgagactagagtaagtgttggggtttcgaatgagtttcctccaaaccatgataaggataagtcttgtcatgacactagcaggtggcatttggttcttcttctgacctcctcttcctcctcctacatcaaccacgtcttcaaccttcttctggaaattgttagaactatatggcgaacctccattcattataccattattatacttcatattgttcagaccttcttctacttccacttgattatgttctccaacaattttccctgcaggactcacgtgcccatttaactcttgcatacctacgcaataagtattgttttttttttgggaagtaagaatccaataattagtatttattaattaactttaattattatcagtgtactactgcggattaataaattgcgagaaccaaaaattcttgatactacaaaatactataaataatgttattgtgaagagttatattgtgcaagagatcgaatgtatacaaaagggacacaataagtggtgcccaatattagaaataaaaatgtgttataatattaatgattcagtatcaaaagagtaattaatatggagaaaaagccaaatcatttacctatacgctatttgtacaagtctgattttcctaatttctttagcttaatatataattaatgaaagagatgaaaaattatctgtgtttttttttttttggtgtattcatgctacaccatcgtaaaatacaaaataattaatttttatgactaatgattgattaaatagtagcaattggatcagtaaagtaataagggttatcatgtgtcgtgtcagatcccatgcaaaaattatcatcatcatgagtcaaacctatatagagacaacgataatttataaagaaagattaataatttttctgatcccctacctctttcgttctgaggcacgccagaagatttggaagtatcaatagctccaaattcagaagagacacctctgttaacggcgtgtctaaggttcccttccgacaccggcgacgcactcgagctccatacgaacatatgaaggtccttgttcggcagaccattattagcagcagcagcagcaggaggaggt

SEQ ID NO: 301564 - DNA, 1645 bp, Cannabis indica
cctaaccaaattgacagcttggagagaatcattattttcaacccaaaatcgtgaggaattcttctgaactctagtttggatccttgccgcaatagcttgtaattccccccatagaggagtcatttccttttggccctcgtgatcacgtagaataaaactcacactaccctcacttttgccagcctttataccagaatcaacatgcatcttcaacagaccattattcattcggaggagaccatgcgatattatcctaagattctccattgctttactggtatgaactcctttacattttgcaaagaatttactacaccagtcaaggatttctcctgcttgtggtttatggccagcatgtgtaacatcatttcggatataccacaaagtctaagatattaccagaagtaattcgtactcttcctggcaccataaatgggagactctcataaggaatttcctgtctttgtaacttcccatgaaaactactcatattccacacaacattattagctctacagccccataagagtgaaacacattctcatacagacctgatgaacatcgactatagtaaggatctatctgtacttctctatatgtaagggatgagttgataggaatccaagaataagctattctccacacaaaatgtttgactttcgccggtatcttcaacttccacatctttttccaccacgtctcctccaactcaggattagattgcatctccttaatttgtaaggttgataccattctgtaaccattgcaaatagagaattctccattcttgctgtaataccacaaactcttgttctcgatatcccaatcaaaagtatctagggatttataactcagcatcatttggattgaagacagctcgaataaaatcctcatcccactccccattaccttgctttaaatcaatgacatacaactactccagagtggtggcatgtcatagatcttgaaagtcacatgtcatggtagctagggatcctctaaaaccctaacagaatctccaatacttatactttatctatatccctgttgtattatttttttttatatatattaaataaaaaacaataattgaaactttatccatttattgtgtcatcttcttctgttctctcaactaatgtgcttcatctttcctattcccagtgcttcatatatccatcaaccctaccaaaatatccaccaaacaaggaaactaatgctaaagatcgtgaggatgtcctaaggtacattacttacattactttaaaatttgtaatttacgaaacactcagctcaatttttttccacaattttgctacaattgttttttcttacagcatagctacagcagcttctcacagcacaactatgccaaattggccctaaactaatgtactaagtataattagattatatgccaaattggccctaaactaatgtactgagtataattagattatgcgtgattggattgatatgtaaacgatatataagataaacatctttcatcaatttgtcttttataatgaaaaatagtttagggtgattctataatgcacccccttaaaagggatgtactgatacactcttaacttgtttcggcctccagaaaatttttttagtctaatttttttttcatattcat

SEQ ID NO: 301565 - DNA, 2975 bp, Cannabis indica
agcttgcaacacataaattaaaaacaacttaattaaattaaaaacggtacaaataaaacaataatattgataattttaaaagccacgttatttgtgaaaattagatacaatataaggctctagatgtaaattttccaaaaatgtacgtgcataattatgtttgaaaactctaactttattatttatattttataattatattatggtgttgtgcttaagtaaaatatagttgggcaatgcataatctaatgagttagatatcaagtttaacttaataaaactataattgttttagggcattaaatttacgctttaaaatttatatattgcaatcttattatgtaaagcataacaaggccaacgtatacatatatattgagtgaaatatttacctggtgcaacatagccaaaggtgccagcaagtactgtttgattagaagaattaggatttaagagtctagcaatgccaaagtcagagacagaagccttcatttcttggtccaatagaatgttgctggtggttatatctctatgaacaattggtggactacaatcatggtggatgtatgataaggcatgtgctatgccttcaattatgcttattctcttgctccaatccaattgcaaagctctgctatcatctctcagaagattaaacaaactccctctcttcacatattcatagaccagaaacatgcatggtttgtggtaacaaaaaccatgaagcttcactatgtttctatgtcttattttagataacagtttcacttcattcttgaaactctttacaaattcaggttcctctgcttcaaaactatgaagttttttcaaggccactattctgccattgggtagtcttgctttgtaaacactcccaaacttaccacttccaatgcagtatttgttgtcaaaattctctgttgctttaatgacatccttgaatgcaattcttccatcataattccatatattgaataaatctccatgtttttcttttcttgaatccctatttatgttagcttcgcaaactttgaaaaccagatatccaagtaaaactataccaaacaaactgattactggaatgaaaatctccatgttgagtgtaataatttcggtcttgcttttggtagatgtagagctagggagtgatgatgcatcagtggaagggacactcattttatcagtgagtaaatttctatttctaaaaaattcatgaggtggagaataagaaagaaagttattttgaatttgattaggaattgttcctgtcaattcattgtggctaagatttaacaaccttaagtttgacatactcctaagttgagaaggtattttgccatggaataagttaccactcaagtccaaaaccttaagtcttgacagtgttccaatttcaagaggcacctcaccagaaagctggttagaggataggttaagatactctagttgggttaactgattaagctcactaaataagcaaccataaatcatgttacttgacaagtctagagatatcaaattggttagatggcttataaataaaggaatttccccagtaatattattatcaccaaggaacaaatgttctagtttgctcaaatttctcagttctaaaggaatagagccacttatttggttcgatccaagggacagagatttcaaattggttaaaaggccaatgtttgaaggtattgatccccttagtttgttgtcactaagattcaattgctccaaacttttcaaatatccaatttctacaggtatagagccactaataagattagaatcaagtgaaagagagaccaaattggtcaaatgaacaagactacaaggaatagaactaacaatcttgtttctacccaagtttaaggtctccaactttttcaagctccaaatcccctcaggaattgaacctttcatctcattgaaagaaaggtcaagataagttagtttatgaagagtacttatctgatcagatggtatattgtctatgagtccatgtccaacgagttgaagacgaacaagatttgggaaggcagagaagttaaacttcacaaacttgtcccgtaactgaaacttaggaggcattgatatttccatgatgctaccataaccgttgcaagtaatgccaagccactcacagtgatccggcggcacgtagtcaggataaccactccaccacccactctgaagcagagcatgagcttcttcgtccagtgacaacatgagttgggttgatgatgtcattgagaaagacatgaacaagaacaagaacatgagaagaaataaaaggaagggcgtcatcttaatttggttggcaattcaaaagtagaggactacaaataacagaacacacattatatgtctcaaagttcagttaagatgtttgcataagaaaacagatattggaatttcccgcgttgacccatctcttccgtttaagactttggaaacatatatttcgtttgacattgactaccctctagtctacgctacttccacgttataccggagataaagcagatttgaattgtcaaataagagcaataactcattacatacaactatagaagtatgggataattgactttaagagctacaattgtagatttaacaaactcctaataaactaacagaatgactaaccagaatgtcataactagaaggaagaaaccattagtacctttctctgtttctttacaatatcgattgaacaagttataattttattacagtaattgaaatttctcatattgcaattaatgagaatcccttatataataatttgctagagagctgctattacgtacacgtatgtgtggtccgtgtggagatttatatgaacaaagaaaaggtatatagatacatatttatatatatatatatatatatatatagtagtaggtaatatattaacaaagtaatacatatgctagagagtaaggtatagtgagtgacgtagtaacggtcggacg

SEQ ID NO: 301566 - DNA, 3633 bp, Cannabis indica
aaagaaagaagaagaaacaaatgctgacaatttgatatatattagtaggactgcctttgcaagagttttgtttaactttgtagatactttgtagtcctcaatgtttttctttgcggccttaacttttcgttatttgtattttataaatgtttgtaaatgcattacatgtgggcatgagattttcatttcaaggaatgtgacccaaaataaaaaggaaaagaaagttgtgtttttctttctgtataaatatctttataacttcaacatagtatcatattttagaaaaatgtccctaatgcttttgtaagcaacttcaactccaaaactttaatcatctcatgttatctcgagatcatttttgttatatcatttctccacaatctttaccaatgctcttcattcctttttgtagtcatatatacttgtttcttgtgatggaacttgccttacattgtttgaatgcttatttgtctgtaattttcttgaagtgtatgctttttattttgtgattacgatttgaaaaacctgtaaattatgaatccactggcggagttgtgccaccgtgatctttgtagaaaggaatttccaagtgaccctactgaactaccgtcttaatgtttcagagactactctaaagttagaagctctggttggagatctagaggatgctgttttctgttttatgaattcccagagtagcattatgttctcagcaaagctttcaaaatcctcattgtctaatgtaatgcgtttgtctctctttcttgtgatatttgagtcattgtcggaatggtaaattcactagcaggaggatagtgttacataatgacctagatattcggaatgcaggagtttggaacaaagcatgaaaagttgcttcaagccataaaagccatgaacgatattgaagacaagctggttgatcttgtgttacttcaaccacactggcatcatcttttaaaatctgttgatgctagggttgaaaaaaatttgactattcttcgaccgcaagtatctgcagatcatcggtctcttctcatttctcttggatggcccccaaaactttcactatctaaagtcgaaggcggacacatttcagaccttccaaacccattagttatcatggaaggtgaaaaaagaaagacttactcaaatagcttcataagtctttgtgctttacaacattttcaaatccggagggaaaaacggcagagtaatcgtttggaacaagaaaaatgtaacattcgactttgggccattgatgaactggtatctccaattgcatcacgaatggagcaccacttttcaaagtgggttgatcagcccgaatttatgtttgctcttgcatacaaaataacaatagatttcattgagggaatagatgaagtgttacaacctctgatagatagagcaagattagtaagctgtagtgctaaagaagcttgggtttctgcaatggtccaaatactttctaggtttttggaaacaagacttttctcttctcttgctgaccagtataatgataaacatatgaaagttgaggttataccgtcatggcttcatcttatagatctacttctcaccttcaataaacaaatacaatctcttgttagtttggaaatctgtcactttttgacagagtcagatagatttcaagggctttcaagaggtatttctttgctgacaatgttttgtgataggcctgaatggctgaagatatgggcaaaaattgaaatgaaaaatgcctacaagaaacttaaagcagaattgcaggatcataaaagttggaatgttgatagcaaactccaagctggatttctccccgatacagaacgcgggcattgtatactctctactagagaagatcacaaagctccatttattgcagaatctgccctaaagattgcctgggagatgattgaccggtgccaaaccatgccggctgttttaccacgtatacaatttattaggtcaactgcagtaaggtttctctggtacttccttaaagttttgcttttaaggtacaaaggaactgaaattgattctgaaaatctcaatgatgatgccttgggtagaagatgtatattaatcaatgctgctagatacattgagtttagactgcaacaatggagtgactctgttgattttctggagatgaaagttgctgaaaatgattgcaagaatccgcgaaatgttggaaatattgatcataattgcttttttgaggaagaaattaagagcttgtgtgagcttgaaacaaattggttgatggacattattgctgttattcttcgtcaatttgaaactctttcatgggattatgtcaaacaagccaaacatcttcagcaggaagtatcagttgcctcagatttagccgtttcggttgattttgtcgatgcattggatgctttgaaaagtcatctccatgctttggaaatgactcttaaccccaaagattttttagatttgtggagaagtcttgctgaggggctggatcattttatatttttcagtaatatctttgctgagattcagttctatgccaatagggtgaaccagtttgagacagatattcaggtctttgttttcagtttttaaatcttattgtgttcggccggaagcattttttcccaatattagaaaaggtctaaagcttttaaaagtaaataaggaaagaggtaaatgaatgaataagaagggctggagacctttccttcatttttggcttatctttctccatctatgtttatttattttttttttggagaaataccacctaggtttaaatgttgtaaagttgtttcatttatattgctaaataaaaagtgcattgctatggggcactaagcatccctgtgacatgtagttttataattagttagtagttctctataatttttattaaactaaaataagtggggttcgatattaaattacaccaataacaataggtaaaagtgtcctttagcatttcttaaataaaaaggctgtatcatttatatttttatgtatagggaattggtgctaaaatcatttaaatagttataattaaatccttgtcaaatatttgagcaacaaaagattcttctgtttatgttttgttttatattaattgctaaagaacactataaatgatcatatgtaatcttaaattgagttttaacaaattttaatttattaaataacacgaaaagttgctaattactttggggctgtttgttactgtgggttgagtaggtttgaatttagtattaatgtgtttagtaggggtgtacatcggtcggtttggtcgagttatagtgtatttttaccaatctaatataaatgtcgggttgtaaatatctaattgtaactcgtccaatgaaaaaaaaaaatgtgtaacccgaccaatgatttttgtcggtttggtcgggttaacccatttaaaccgatctttattttttattttttattgttgttagtttttggtgttcaaataattgatttgaaaaaaaataaatatatagtatatgccttttaaatttaaaatagttatagtttaaattaatattaaaaaataaatatgaattgaatcaacattaaagtattaaataatatttttcaaaaaatagaataaaaaaaatatactcatat

SEQ ID NO: 301567 - DNA, 4634 bp, Cannabis indica
ataacaatcgaaaaaatttgtctctatactacattttattactagtaatgtgaatataacttggcagtcgaatcggataggtatgaaatagcgaaagctgcatggattgatgccccaatgggaagcacatcctcatctacaataaaatatgggctatgtggtaagtaaatagatccaattttgtcatttttaatacctaacaacaagaaagaaccagccactttttccaagtagaaagcaaaatcttcacttcccataaaggtttgggagagaattgtgttgtgttgtcccacaatttcacttgaaattctcttcacatgttcataaattgtcttatcatttacagttggtggaatactaatttgtccctcttcatcgaaatcaatctccacagagcatcgatgtacagctgcttgacccttaatcacctattcatccaaaaaaaattattagataatggatattatataatttttactattatttatttattaaaccaaacataattactttctaaaaagtacacctaatttattttataaaatactatattattaagaaaaaatttcaattatattttaaatttttaccaatatatatatatatacaaaaaattgtaaatttttttggtataaaacaaaccccaattagatttttttggccaaaagaccccgtttttatactatatactgaaatttttaatttttttactttttttactgtaaggcagaattttttttcaaaaatagtgtaaattttgtactgtgtactgtgttaagttttcacggttgttccacggatatttttttaattgttctgttttgttcttttacggctgttttctaaaaaaatagtctttttgtaaaaaattcggtgtgacagtaaaattataaatttttacccaaaatttagtatttttgtaaaaatcgctgtaataatataattattagccctttctatatatgtattataagtatgttacctcttcaattctttccctcaaagcattgaagttttttttgctgaaagctctaaatgtaccagcaattgtagctgagtcagggataacattaaaggttgtcccagcttgaatcatagccacagataccacctacacaatttcaattaattactcttccataaacaacattataatcactcaaagaaaattaaacattgtaagtacattacctacctgtgaatctaaagggtctgtctctctagatacaatgctttgcaaactaattactgcagttgaagctgccaaaattggatcaatagattgttgtggaatcgcggcgtgaccgcctttaccgcttattttcgctttgaagctaccgcaaccggctaaaaactctttgggccttgccgcagcaaagcccgtggggaagacagttgatatgtgtatgccaaagatggcctctactttatctaatgccccttcttttatcatctccttggcacccacaccgcgttcttctgcgggttggaatagaagaattactgtcccctgtaatgcaaccgaccgcaaaacatatagtaactgatgagttcctagtctttgaagaggagacacaagaatgttttcattttttcgctaactaaaaaagagatcccgtgatacagatcttttctccactcattcggtcattttgacaatcttgggtactaggggtagcaatttgagttagatataataacatggctcgaaatccgcacgaaatcaacggatttggatcatttttagattaacatgtttaacacgaaaatgacaagataatgacatttgtaaggatatacactcttaaaattattatatttattgtatgtaaactatatttttttttgttaaataaaatataaacatgttaaattactcataatcgtgtcataatatgacccacgaacacaaattgttactcctaccaaataccacgtgctaattataagagtcttatatctcagtctgtcttatttggattgtcaataactactacttcaagagttcttatctcacagataacatcatctacgacaagctagcattcaaaagggtcaaacataatccctttcgagagaggctatagtgggtttagagtccttgacttaaacaaagaaggatgcccagtaaaatcaattcctaccactacaccacgcaacgcgagactagaaaaagaatgtttgagaatattaaatggaattcacctgtaaaacatcttcaagctgtttaagtatctttgcagcaccaaggagcatggtcacatgagcatcatggccacaagcatgcattttcccatcatttttgcttttgtgcttccattcaaccaattcctaccaaaattataaaatcaaaaaccacattccaaaatcaacaccacacagaacactctgttccaaaatcattacattctaaattgagcctttagaaaaagagccaaacatcaagtttgttccacatattttgatccattatttggttactaaatgaatgaatgaacagaacatacctgaataggcaaggcatccatgtccgcccttagagcaacaaagggcggagaaccggacccaatagtcgcaaccacaccggttcgagccacgggccatcggtacggtatgccaagtaaatcaagctcatgcctaattagctcactagtttgaaactcttcataagcaagttctgggttctcatgaattcttctccttatgttgctcatccatttaaccgttttcgggtccttagccaaccccacaatcttgtccctcaaaacattatcatagcttggttttgaggaataattcaagcttttttcacttgaacaagtgtggagaatcaaagaccagcttaaatatatggtaactgaagttaggaacatggctttagaaaactccatatggcacaattggtagtagaacaacttgtttctcttataagtaagagcgtttcggtagaccttctatctgtttcggtatctgttttctataaatttataagttactaaaaggggtgtagtattaaaatgtgtgaaatattttgaagtgatttaagtgaagaaagtcaagaacatgatcatccacaagaaaaaagaataatgacatgtgattttttaaaagattaaaaagacatgatgtgaattattggaaagagtagtataatgaagccaaggaaaagtgatatgtatgaatgtgatgagtggtggagaattaaagctataatggctagctagttgccaagagtgactagggagagacatactctagtctagagtttgatggaggagtgggagtgggacctttgtgcactaagagatattgtcaaagatgatgaggaagaaaaaaataataaaagaccacgtgatgaattggattgagtggacgagtagaatactgcacgtgaagccaagtcaagggacaaacatttctgcactttgcagtactcatccaccgtctaaaagagggcaccatcgagtgagtaatactacgaggtgacgttctataattggttaaataatagtattgaattggtctcatataggagtgttcgtagtgcagatagtgtgggttgtgatctttgtttcaaactaactaaatatgtggtttttgtaattttttaaaccgcactgtaagattttaaaaatgtaaaaatcatattatgaaaatatattgtcttcgttataaaacattataatgaaaaatcaaaagtgaatctaataaaaatatattgtattaaaatataacgtcataacatatataccaatcactaagttatcatattgtattgtttctaaaaaaaattatgtaatatatgcatatattatatgtatttgttcatatataaaataaaacacataaaataaaactatatgattaaaattggtaattttgtaatacacagtgtggtgcggtttcaactgtattattaaatttaaaactacaaaccacacctcaaaggatttcaaactatattttttgtacattgtgagcagttgataaacacccccaatctcacacgcttggtcttcctctttgttttgtggtgttcgtttgtttagttttggtttctgatttttcaaatagctctttcatttgcattcagctagattctttattagaaaatattgctagtttacttttcagttttcctgagaccctagtttatgttcgtagtacaaccaataatcaggatcgaccatgaggtgagacgaaagaggcggccatcttaggccctcactgctcaggcccccatttagaaaaaaataaataaaatatagttaataataaaataaaaaataataactcataatactaaatatatgttgggcagtattttaattagagtaatatttaagaggtttagtgttcaaagctcaataacttcacttttttattggaccctatttttatttttgcataaggcacaaatcagcataggactggtcctcctaataatgcaactcataaattagttgcgcatgcacttagagtggatgataaattagcatgaattgaggaatatcatttctaagtttagaaattgtaatacatttagttgcatctctaaaaataaacatctttaaaaccattacaaaaaaataaataaaaaaataagtaggaccgatattaaattataccaataa

SEQ ID NO: 301568 - DNA, 1054 bp, Cannabis indica
cacttatccaaggtataagtataccttagattacatatcttcaagtgtatttagtgaaaaatacaccgtagatttattaaaattaattaataacaatagaaccaaaaaagaagcaaagaaatgtgcattcataaaatagtataaaaaattctaaagccaatgtcaaagttaaaacacaaaaagaaataacaacacaaataacaagtagagcctagaaataaaataatattaaattagcataagaatattttcataatttagctaaatcataatagaagtccaaagttcatattatcataaatatatatatcctcacataataactaaataatcatcaataatatatttattaatatgtgaaaaaaataccaggttagatgctttagaatatataaattaaagagcgcaaacaaaaaagaacatgaccggaaaaaaacgcggcattaaagaatactatcataagcgaagaaaaagtgagtagttaatggaattgaacgagatactttatatctaattatgttttttttattctttaacttatataatagggctaaaaaactttccacacaaaaaatataatatttttttggaatctaaatttatttaatattataaaataatataaaataaataaataaataagaagaaaaaaaagaatatgaagagaaaaaaaaactaaataattttttttttcggttaatttatattaatacggtgaagtctttttttttgaataaaagcgtaatatcataaaatgaattagtcagacctcatagttattacaaaataagttctccggtaaggaaaaaaccagatagagccgtacaaatggtgggtaaaagcccacttaaccacgttatgggcaacaaaattacagtacctactaacattaataaaattacaactaataaaagagggagaagacttagtacaaaatgaagacatagctctcaagagcccaatgggactccttcccattgagagcattgataactagtctcgagtcactctccactattacaaacttagatcctagttccaacgccaccgagac

SEQ ID NO: 301569 - DNA, 2915 bp, Cannabis indica
acgtttctttctttctttcttctctctctctctctctctctctctcgttttttttttcgaaaacattgtcagattttggtgtctgtcatgtacaaactatttatattcattcatctcttgagcatgttgctcaacaagctataggctgactggaaaacttatatttattggttcaagttttttgaattattcatttttgtaaaaatcaagctagctgtaaatttacatttaatgcatttttttcattttactctaggattactaggtgacattgtattatatatacgctgtgtataatacttaaaaagtccgaaaataaaaaacattttcccctcatttgcttcaattttctaattgcagcaaaagacactggagcacttcaggcatataatcctgctatcttcgcaacaggtattacaatattgattatgtcatttccagtaaagatttaattactgaaaatggcctttcttagtttgattaattaatggtttttcacgtatctatcttacaatttctttcatttttcctctgctgattttagtgcgctatttaattgtgctgtaggacggttacgtaccataccattctgctagaattgatatgtgccaggcagcttcatgggatcactcaaagaaaggcaaaatatttttggagatgctgaatgattctttggaccaaattcgggctccttcaccagaacagagagtgtttttgcgttgtgatgtcaactttgatacttcttcctatgggaagaacttaaacaccttcataggacgagctgctcatatagagtttttggaatctgacatttttgcaaggtttgtgttgtggtcttttccggaactatttcggtaaaagctgcatgaactgcttttgcagtgatccagcttttctgacctgttatccatagcgatcttccatcagtctaattttctctaacatagtggacaagaagacggtggtgttttattatgtccttgcagatggattaagatgatgaggaaaggtgtgggagacattggccattgtaaattattagcatgaagctaatttcatgtaaggaattttagctgaaaagttacaccaaggctctgaaaaatgatagtgttgtgtaaattagtgtaggtttagataaaattccttttttttttgtgataatgtccatcttccaagtacagctagaagccgtaacaaggagttggacacttggaatacgtagtggtcctggtataataaacttggtaaatactagtttagtttttagtttttcttgatggagccaaacaaagaaaattattagggttgctctcgatataatttctgataagagtatcgttttgagattttctttgtcaagtattgtttttagagttaaattttagttaatgcccatttttattttactttattaaaggtttttttttaatcattcgttttttatttcttatacgtatttatataaataaattacttcgtcatgttagtgatgaattgatcctactggatctaatttatacattttaatagagaaatgctaaagggtactactggtatttagtattctattacgtgttaatatcgctattggtgcaattaagtattaggtttcatatagttaaatataataatttttatggaatattgttaattaattgcaagacgacaggtttaaaaggtgctaagcattactggtgcctaatagcaatgctcattttaatattattgtatttgtttatattaatgtccattgcgataacaataaaaatggttcagttaaaatcatgcagatacaaatcacttggcaattattttcctgtgttgttgatagtattttttatcatctttagggtgtgtgggtttttaccaaaaccaagtcttttgtgtaagaatgaacaaaaggtgtttgtgagagttaagtttactctcaaaaaatttattgatgatagttcatcattttgggaagagagcaattctttttatgatgatgacctctcggttatacagagaacaaatgtgacaatcactgtgttgagatttatgaaagtaagcgattaaattttaatgaagaaagatttgtgtgcgaaaaatatttaattgatccaaaatagaactacaaattttaaaaaaggttattgttttgttttataacttttaactcgtaacgtttagttttgacacaacgtagttgttctttgtaatcttgaaaaatgtgactatttgggcgataacatttagtcgttactcgattacgaaatttcatatagaataaccaatcatatgctggcgaatattatatctatttgagcgacttgatatgttattttcacataaaatgacatcaatcatacgttaacaactttattgtgacaatatttagtcgttatagaagattacgttttcctttgaagaacaacattaacgacgttggaagtgctaaaggtagatgtgcatagtacgtttgaagtgctcaaggtagacgtgccttgtaatcgctttcgcttgctaagataacagtctcctagatattttagaaggactcggatacaaaatgatcctaaatttagaaactaagttactaaatgtacatttttaaaaaaaattaagaaaatgaccaaatataataaattagctaataaaaattataaaaatatatttattacatattattttttttaaaaaaatatatataataattaaattaagttatataattttttagtattgcatattattatattgtaacaaaaacagataaatatattagatcattaaatatatacaacaatatttgatatatcgtatcattgaaaattaatataccgtagtaataaaattatataatgaaaaactaagtttttacaaatgccaataataaatacaaaaatataaaattgtatacgtctgcagaagca

SEQ ID NO: 301570 - DNA, 1365 bp, Cannabis indica
tatatatatatattattaagtaattgtttatatatttttataggaacaaattgttcgtatgctgaggatcacagaaaatgatggtaaagatttgagagagtttcacaaagtgtgtccacaagctaaggagattggatttggtaggctctttcgttctccatctctctttgaagatgttatcaagtccatccttctctgcaattgcacgtatgtgttacatttttccttattagttacaataatgatagcaaaggactaaggcattgtatataattatcgatcattaataatgaataatgatgatgtataattttgttgtgcatagatggggaaggacactcaaaatggctgaagctctatgtgaacttcaatttgacataacacaaaataatcttggaagaagaggtgtaaagaggaaattgatgtttcccaaagaaagagaagatggtagtgtagtgaaaatgttggggaattttccaaatgcacgagaaataggtgaccttgatgagagttatttcatgaaaagaatgagtcctctgcttggatacagagccaaacatatttataaaatggctaaggacattcataatagtggaacacttagtattgttatgagagaattggaagaagcttctgagaagaggttggtacgagaggacatgatcatgaacaagatcaagggttttggtccctttgcatctgccaatattttgatgtgtctcagttactatcaaaaaattccagttgactccgaaaccatcaggcatttacaacaggtttatatatacagacatcataattcaatatattttagtgttattttagaaatttttaatagtttacagtattaaaaataaaattcaaacaagaaaaaaagttatattagttggtgttgcatgtgcaggtacatggaaggaaaaaatgcaacaagaaaacaattggaaaagaggtcaaagaaacttatgacaagtatgcaccattccagtgcttggcatattggtatgtaaagttatatttatctttatctattgtattaatttcttttttaaatgtttatatatttaaatatccttaataatattattcaatatattgacaggatggaaatgttggaattctacgaaaacaaagtcggaaagttgagtcaattgccacagtctagttatcatatcattagtggtagcatgctttgaatgactagtcgacaatttttttaatagaaatatttataataatggaaataaattggggtatatctcttttatataaagtgtggttatataacttattttttagtttaacgatatttttatatttctatgttaactttaacagaatatcctattaattaatagaatattcttt

SEQ ID NO: 301571 - DNA, 1839 bp, Cannabis indica
cacatacaacctctcaatatgttgtagtgccttgggtacagagagaataatatgttagaagatttttgcgaataacatcttaagcatttttcatcttccccatagtttttaaacagtacttagttctctaaagaaaatatcaacagccttaaaatttgacacttttcatgggttcaagaaacagtcgctaggcaatatttactcatccaaatttcagatgttggaatctgagctccaaaaggaaaaaaacatcaaaagtaattggggatcatttctgtattaataataagaacaattacaaagttaaagaagagttatgagaatgaatataagaagagcagcaatgagagagtacttaacagccgcaagaagaatggctaacgaaataaacaagagttgccataacacttgaacactagcccatgtcagcagccctgttaatccaacggccaatatgttatcaggatctggactcaacactagatctccccatcttaagccactgaatatagaccgtcgattttccttccccgattcatcaccatcgctatcgctgattcctcctttatcggctccatcattttcttctctctctcttggatctttcttcaactctttgtcgtttttggtcgcaaatgccactagtgttgttggtctttttcttcttcttcttcttcggttattgttgtaaaaatcaagattacttctgtatgtaagttcagacagagaaagtcttagtgttgagggtattgggatacggattgttgggcacaagggggtggtgaggcctaacattttatgggaaaatggcaaaaggagaaactttctaaaaaatccaacaaaccaaatacaaatatcataagtgaagaagataatcactcaattctgaagcaccaataccagccaatatttagaaaaaaaaaaattagtaaaatataaagatcaaacatttataaacttgttcatgtaagaacagagtaaacagaactataaagatgctaaatggcatgatgtactaaatacagatatataaaaacagagttatttaaggctaaagcttctaattttcacattctataacaactaatccctcaaattcttaatttggtgccaaactacaattcaatttacaaatttggtttggctgttttatttaaaaatgaaaattaaattaaactataaattttaatttcattcctttttccattttttttttgttctgttcttgttttgttagaagcttctccctaaaccctaaatcattacaaaaccattattatacataaagaaaaatcaaatagttcaaatccttccctctatctcaattctcaacccaaattccattagcatacacataaattctcttaaattcttatcaaatcaacatatatattcaaccatgggaatacccatttccccaaacactaaaattacattcactatttaataacaatacataatccccaaactcttatatgaaaaaaaaaaaaaacagatataaaatcagatgtaaacataatcagaaatacaagacaaaccagatctgggtttgaggattggacgaagccaaggtgctggttgggcgagtgaaggagggcagatggtgcggcggcgagagagaggggaagggagaggggttttggtatttgacgaatatcatcggcgccggagaaacacagaaagagaatagagtaaccgtattattaccatttactcataaatataccttttgcaattttattcaaacaaaaatattatattataaatttttttttattaaagaaaacgttcttacatatagaagacactcttctttataaaaaaaaaaaaaaattatat

SEQ ID NO: 301572 - DNA, 1312 bp, Cannabis indica
atctcgtcgatgatagaagaacagaagaacattccagctctggcatgatcgaggagaaggagagcaagagagtaatttggggctttagggttctcgggtattaggaaaactgagcagtggggccagggtggccggagcacagccatccatcatgagggttaggtgagactgttgtgagagttgggtgtggctgggtgtgttgtcgtgagggttgggggtggttggtggtgttgtcatgagggttggggggtggctggacaaagaagataaagaaaaaattatgactttgaaattatttattttttatattattcaaattaaattataatttggaccaattatatttcaatacgtggcatttttgaataagtaaacggatccattaaaataaggactaattaacttacaagaaatgtgatcttaggaactattactgctatttctcgagcttgaagactaatctacatcaaagtgaacttttcgaagactttatcgcaaatttctcttttttttttgctgaactgcgtaatatattaaaaacaagctctaaactagagcatctacaaaacaagtctagttgatcacaatgaagcattgtataagagcatctccaatcaagtgttaaaaatgtagtgtattcctatattttagcacacttaagaaatattactacttggacacatcaccatgggttgcttcttcaaggagtagaagccaatcttcattctattcttcctcatcgggttgggatctagcttgtagaagtataaaattttgtcaagagacggaacctctctaagctggtccttacagatgatgtgtcatcccgccaacaatctgtatatatgtggaatgagctggaacgaagccactcctactgtcgtacagaatcgtggaaagtaatttcagaaagagagatgggctcaaaattcggcatggtcccagctccagaagctaaagtcgtccacgcaagaacaagatgacttgtccttcaatgccagcctgttccagaacaagctaaatatatatatttaatgcattgtgatctcgaaacaactcaagaattttaacaaaaactatttatctcgtgttgataacgtgttataaaactattattaatatactaaaatagagaagaagaaaagaagataaaaagaaaaagagaaaaagaatctgaatttcttagtaatttagagtgaaatcttttttgtacaaaaatataactaaacaaataaaaaattaaattaataaagtaaagagaaatataataataattatgatattaattgatttgagtaatttgaatatctat

SEQ ID NO: 301573 - DNA, 1137 bp, Cannabis indica
attaaaatacggaatttcaattttcattaaagtaaataagtggaattcaatatttaattgtaccaataacgatattacattacactattactgccttttaccatttttttaagagaattgctaaaaggcactattggtgcttatcacctttctcgatatcatagcgttattagtgtaatttcgagttttatataacttaagaaaataacttttaaaaaatactgctaactaattatagagtgctacctctaaaaagtgatggaccggaataaataggagaaatgttaaaaggtaccagtggtacctagcatcctcctatgcgccaatatttttattggtccaactaattatcgggtcatatataatttaatataatagttttttgagagtatcgctagctaatcacaacgcgacatgtcgagaaggtactagccactactggtgtctaataacaatgctcggataaatgacaatgctttttctttaataataacaacttttatgagctcctgaatggtgattggtccacgtgtatgtgttatattaatggtatatatttttttatttatttacaagaaaaaaaacatgggacaaatcctgttcaatacggtcaacgttttttacccacttactcttaacttaacaccttcgttattagcgcgtgtataacactgacatatccgtacatggtactcttccttggaaacatattccttgcagagtgcgtgtcacgcgctgaaataattaataaggttcgtatacggtttcgtatattactaacatcgtatcgtatgtttttacaaactagcatttttgtttcaccgtacatgtgcaattatgctctaattatttagagtgaatttgtaagagtattgctattagaaaataggaaatattacaatatatgcttaatattcttttatgtgtaggtttgattttagggatagatagattaagtttgtatttagtccatttttgcgacatatttaaaggcgttaaatattattggtgtctaataacaatgttcaaaattactttataattttaaaaaatactacattttctctaaataaaaacctaatacagtagaacctctattcaagaatactctattcaagaataacctctaatttgtta

SEQ ID NO: 301574 - DNA, 3492 bp, Cannabis indica
tgtagaaattttctatggacaggtcaagataaagccatgggtccaggtttgatagcttgggagaaactatgctattctaaaacacgcggaggacttgggttcaaaagagttcatgaatggaatcttgcagcaatgggaaagtacatttgggccatatcaaacaaagaagatagtctttggatgaaatggatccattgcgtgtatatccaagatgagaattggtggcaatacaagcctcctatccaagggagcttgtattggaggaggcttgttttgctgaaagatacattcaaggaagcttgtgctggtcaggtatctattcatacaccttatagtgttgctaaaggttatcttttgttgaggccaaatcaagagaaagtgagttggagccaataggtttggggaagattgaatactcctaaacacagcttcataacatgggttgcaatccaggagagaatgaaaacaaaggacaggttagctcggatgggaatcactcaagatacaatgtgtgttctatgttgtcaggatgttgaaacatgtccccatctattttttgactctacagttgcagcaggatgcttgttagcagtgaaagcatggctgaactggcatgcttttgctactgatcttccccgattactcaggtggatagggagagcaaaaatgagcaagtttcgaaagcttacctttgcagcgtgcatttctggtctggtgtacatgatatggagtgcccgaaatgccaaaatctggtgtcaaagtcaggtgcattcagaccttctgatgcagcagctcaagcattcagtcaagcagcgcattactctttgttggccaaaacgggtaaaggaagaagacaaagcctagtttcacaagttgtagatgattgtaaataagaacagacaaatgatacatgatagttattcttggcctttaaaaggtgcaattagtttgtaaaaaactttgtttgtgagcaatacaacttctttgattcataaaaaaaaataataataatactgcgacctttactagagtttttcttcctccaaaagcttgccattaacttttcaatttcattacatgtcccaatgggaaggaggaaaatgctcatgtcatatgtaggcaaagattggagaacatgtttgatgaggatttctttacctgcacgagaaagaaactttccttcccagctattaatacgagagatgaccttgttcttgataaaaccagctattttatttttattacgaccgataatattgggaaaatcaagataaaggctaccttcagtagcttcatgcatgccaaatattgtacagatatgagaacgagttgaggtgtcggtattagggctgaaaaatagaggatttggagctattaaccttctggcaagatgcagtttcaaacaaatgaagcaatgtgcgaataccatcagtagcgcccctagctgcttgataatagagataactgtcatcgataaaaaacatatgtgtaatcggtggactgcgttgagccacacgacaaccttgaataaccttgttggccttgaatttttgaattaaagaacacaaaccttcaacatagattttgaaaagatatgtggacagagggtcgccttgcagaatatcacaagaaggacaaataaggcccaacacatggcccccatgaacaaccttatatcgtatcgaagaaacacaagtcataataagcacaatccaagtacgatcacgaagactttagtttggttcaccatagatgcttgagagatgccatttaatccttccaggaattttgacttcaatatcaatatggttgtgggaataactaagaagatgggcctctgaagaaatttgctaaaataaagcaagaccaccttttctaccatgaacgtcaattgagaaacaaatttcgaagcccagacgagatttcacacgatccacagtatcttttttacacaaggttttacttaaaaataaaaatttgggtttcttttggacacacatgtcttcaaggaattgttgggcccctgagttcccaagcccacaacaattccaactaatagtactcataatacttgatgggcctagaatccaaaacccactttctccatgttttttggcacatcaacaactttctgtgaggaaagattaacaagagtaacatcggtatccatagattcacttgttgtaagtgaagggccattaagaggatcaaggcccaacctcttcctttttgaatcaattatttcaaaagtcacatccatagtaaaagccaagatattatccttgaccacaattgtatggtctttaataacatgaatttgttttccaattcacgtgattggttggccatgatatggggatttgataagctgggagactcgagattggttgctgataaggcaaaattttgtgggggagcattaacaccacgtaagtcaactgtctttccttctccctcagttcaaatctcaacctttccagaacgcagccatggagatgcagttagaaaagtttggcgtttggtcagagctttcatatcaatattgtaaggtttgacaatttgatcaataggagtatcatagatcttctcgcataacctttcagtatggctcgtgacccacaaatgaaatagaatgtgggtactcttttgcacttaaaatttgcatagaaaggatcgccacctcgacgtcggaacttccttctcgtcttaagaggtaattcattattcacccttactcgaacacatagatagtcgcgcctaactccttgaaagttatttggatctgaaacatcatactcatcgatataacgtgcgcctcacggatggcccattctattttaaatctcgcttggaagttatgaatctgaacccacatatccaatatattcatagtaatcgcgtttgaactattcccaagtttcagtctttcaagaatgagctgttttcgatcagaggtccatggactttcggtaataaccttttgaatatgtatctcatgataaaattgaaataaaaaacgattttgtcaagaatcttgacatacatacctttttcgggttttcataaatcaacaatgatattttgaaatatctggaaataagagacttttctaattgacaatctgccaataaggcactatctttcatcaaattctttctctatattataatcatcaaagaaagcttcctgatcttcttcttccaagcagatatcaacccactttttagtcagaagatcatttgcactacttctaaaagccatcgagaaccaaaaggaaagcaaagcagggacaaaaacaagaacaaacaaaaccaaaagagacaaagcaaacaaaacacaatgtaaagaccgcttattctaatttggaaattagcagttaattatgtttaattatgaaaattatttatagatatttaaataattattaatgctgttattattgaattctgaaatccattttatgtcatatagtgaatttcataattttgcatt

SEQ ID NO: 301575 - DNA, 5129 bp, Cannabis indica
gctgggcttggctcacgggtgctctactgtgcagaaaagggtaagtcagtggctgatcaaccatgagtttgaggagcaagacgaagaatgtacatgttcaagccatatcagaccaagcgggttaagggtctatcagtgatgaacttttgaattctattttgccgtttaggtcggctagaaagaaatgacttgtaatagcggttgtaaatatttttgggatcccaactattttaaaagtttaaatatattacaagtttattttcattcagtttaatataaaagtttaaattctgcgctattttgattagtaatcccgattaggggattagggtttcataagcctttttgggtagcgtgcctaattattcagggcgttacactaaaggttagaagaattaagtcaaacaaaactgcttgtaatggtgaaaggatcgtgataacacaaacctgcataaagtgtggtggcaaggggcacaacagaaagttttgcacctacatatgttaaaataactattgaattttaataatcatattgttatgtattgtagtgttccatattattgttgaaatcttgttggactttgttgaacattagtatttgtggcatgagcaggttttcataaaaaaatagcaacaatttcaacatttgttcctataaaaaaagcacaggcccgatgttagttcgatgtgagtttgatggttctccgacccttgcatggggttatgatgaaaattattgcacccatcgagcaagcattggaccaacatcggacatgcatcgaaccagccattaagttttaaaaatagcaaaatgttacctcagtggcatcatcaaaccatatatcagacccactgaaaacctttgaattatgtatatgcaatatataaaaacagttccagtctgacgtatggaccgatgtatacgaccatctatgacgatcagaccctatcggcccatacattggacaagtatcaggccttttggaaaatattataaacaaggatctataatcaccatcggaccctatcagtccatgcatcagaccaatatcaggctagtgaaaacttcttaataatttattcttttggttgtgctttttgtctaatacttcttaaaaaattaatcaagataaattgctaagaacataatgaaaccaataaaaaaataaagttacattgtcatcccaataaattcatatacatatatgtatatatatatattagaaaaagaagttcatgctaaattttggtataataaatctacacactaccgctctctaaattatttcatattgtcatcatatacattatcaaacagaagttgtagcatgatatgcttgacatactctattacatacatcctgcaatcactgctgtatgagacaataaaaataattaaataaaatattgaaaattaaatcaagttactatataaaaatttacatgtaattaagttaccttaattttgtctgtcgtacaatgttgcgatcgatgacttttgaggtaaaatttctaacctgactctctgatgctatcaagtaaggcacgacgatcatttcacgattctcaaataggctagattggatcaacaacgttggcaataacttttcccacacttccatgtatatcttcaattcatcatcggaaatcgatccaagactcgagtcaaatacactcaacaaccaacgatcgaagtttacctccacagttatccaatgctttgggccatcgaagaagagggccatatatattctctctttattcttccaactctccaagtattggacatcatcccctcaaatcaaattcaatatattgtcatcccactcaaagttagagtggtcattacccgcaacttcccaccaagtaataactcatgatgagaaaatgttaggcattaccacacacgtatttgggtacaccttcgaaaaacgtgttgttgcctcctcatcaagtgaaatgccgcatctaaatgctaaaacatgaaaacaaaatctgtcggagattaaataaaaaaagatagaaaaagtcttaaaaaccaaaagcattagaagtcataaaaacttacatcgtctccaagcaatagccccggagtatgcagttggaggaaccaagtcgcatcgtgtctaccagtttagcactccctcggatacttgttcccaatttgactgagaacccaactttggatagacgaaagcaacttccgatcaacgaccctaagtgggtccgcattcacatttttctttgatgccttggatttcttcttcattttagtgcactcatcaaaccacctacgttgttttctctttctcctattctccactggttctagagttgtttccaatatttgtatctcaaaatcttgagtatatctaatgctggtaatcttcatatggtcaggttcacacaatacatcatcaggatcatctagtctataatcattcagataaatgatttcattttcaagagattggagctcttgttgtggctctacctctgaatttggtcttctctgatcttctatcagtcccattagggtcttcaggtaacccataatctttgtttgcccttttaaaagagtagtctggccttgtctcaaagcaatctgctccctctctatagtctccaaccttgccaaaatggcaaagtatactggttcccgagcctttgaggtgttgggaatagatgctgatggggcaacatgaggatcctctggtggtggagatggtgcaggtggtgtactgtctctaaagattagggctgcatccgtctcctcttccaatgttgaggtaagcttctgggcctggttgcgcaaagcatcctgagttggttgcccctcgtcacccaacaatagttcctccaagtcaacaaataaaggcccctcaccgccgatgatggtccttacgagctcttcttcatttactggagacataacaaagagtacactaccaactgaaaataaaaacaaatatattattagatggaaattaaaatgaaataaatatgactaaacacaaagcataaaaaacttatattttaagcaaacaatcttataacttcgttcttaccgattatggtattctccttattttcccagttgacaatttttggaaagcgatgcaacatcctaactgcatatgcattacttagctctaagatggcctcatacgcccaatattgcaaacactgcagtatatctgtatgatgagtatttcgcctccttctgagaaattccattctcaatcttcttatgcatctaattcttcacctctataaagtttttcttacaagtttccatcaacttgtagaaggaaatctttccccatggatactcgtagaagaattcaaggttgtcaactattcttatcacaaaaagagaaacgattgtcttctcctccttaccagcgagtacgtccataacaaacaaggccatccccaacttgtagacatcatccacttttgtgcaactctcaaaaactttgtgtagttggccaaagctaatggatggatcaccgttgaaatactccacaatcaaccagtttgaacttcctttcccttcaattacttatgcagtaggctcgggtaacaagttcaaccccgtcactaatgcaaactcgacccaactaaatatgcatctcttcttcgcgaaataaaagtgtacctcatctagcttctcggatttgatcttacgcatgaataactgattgatcaatacccctaaaaagtttagtggctttctctcgaagaattttttgaaagggaattccttcaccataacccatgattgaaattcctcaaattttgccttaatcctcggatagtaataacttccgctacgccgagtaacacgacttgtgtaatgctctaagactagaattataaggcgtggtggtcttgaattatgaaaaaaaaatacaagaacatacaagttagaaattctgcagcaaaatattggctcaatattgggcccatattagaccagtatcagacacacaaatataaaaataaataagaaatgcaataactatcgatcccactatcgagccacaatcgccctttatcggacctacatgcatattttgaaaaataaaaaaatgcttcaacactataaaacaacaatcgtcctctatcgaacccactatcggacatataaaaatttaatacaaaagtataaatgttagacacattatcgggcccccatcatcttttatcgaacataaaaattctattaaaaaactaaaatatgcaataacaatcggacccatcatcgggctaaccatcatcttaagttggaccgagatacattttataaaaaaaatataaatacataaataatcgaactcactgttaacccttacatcgtcctctatcgaacctaggcatatgtggtttagcatcggccctatgtcagacctacatcgtcctttatcggacctttatctttaaactctattattttctcaaaaacacttgcatcagatctatatcgggtctatattagacatgcatcgggcctaagctaaaactcaaatttctcgcagtaacacagataggacccaaaacaaaccctaaatctaatcacctcacacatatcacagatcagacattacaaaacaaaaacatatcctaaattaatgaacaattaaatcctaaaacaaacatatgtataaattttaaataagagtttcaaaacttacgttagacatctctatgtgtgactgtagtcggggttttcatagtgacagtggtcctggccgcgagattgagttgagatagtggtcctggccgcagttttgggttgggacagtggttgtggccggagatttgagttgggatgctggttcgagcgaagagagcgagagagaatggagggagagagggacgagtgagttgagtttgtgagagggataattttgaatttgaaagaaattgtgtctattctaacaattatgatacacttattttagtgtattaattttggccaatatagtaaatatcattttggtctattttttagttttgagtttatgtttcaaatttacttatgaaggtataaaaggatgtaataataacaaatgtgactacaacttaaatatttttaactaaataattataagtggattttatct

SEQ ID NO: 301576 - DNA, 2140 bp, Cannabis indica
cccctctttctctctctctctcacctattttatatttttaacttaattaaaggccttcgaaatccactctataatcttgtgtgctgtaaaatcaagaatccaccactaaattatatgcaattctcgttagttttttctcaaaaaatatatatagagaaatgcttaagcaccatttaggtctaaattccttctactatttcaattaagtattaaatagaaattataactaaccaatcgtaatacaacatgtttaaaaatattaagtattaatgttactcaataaaaatcatacagagaagcaaaagtgcttaacgattgtaaagttacggtgggacataacaataatatgaaccaaatttccactatgagcctcacacactatctcccacaaactccttctactagcccccctcgacccaagggagcgacctaccattgaggaccaaaggtgtgcctccaattgcctccaacatcgacgaagggctagagacacacccgcaaaacatcatcaagtactcccaattcatgttagaggcgtttccacctacaagtttcaaaccacctatactcgaagttgtattcctctccaaaaaaggcaagatctcgcctctaggccgacaactgctttagccgagaaagataataaaatgaagagaaaaaaagttttgaaataatggttagaaatacaaaaagagttgcaactccgataagctagatgatcatgatcatttcattgttaattaatttcttataaaataatgtgaatcatcactctaattgtttaattttgtatttacactttattggattacattttcttcgtaaattaaatataaaaatattaaatcatatataaataagagcataaattattttactcattaacaattatatttgagatgaaatttaaaaaaaataaacattttaaaagaatattagataatactatcttacatggattaaataaaaatgttgaactacatataaaatatgaactactctgcttattagtaattggtaatttttttttgtttttgttatccattcaatgttagtatattgacaacaataccattataatgagatgattttaaattatgaaaactcgttgtgaaggaatttttctttagctgagtaatattattggtagagtatacaacattatacatcttatcttatactttgtaattgtggagtagattttttacatttgttttcttatctttttcacttaagtaggtatttcgacaaaataaacaagctcgcttttttttttttttaaatttaaactcttattaacaataattagagtttaatacatcaataaaaaagatagaaaactatcaaaccaagctcgttcacaatccaccctaagtgcatgcacgactaattcatgaacgaagacatgaactagggatgcctcaggaaaactggatagtaaactagcaaaaacagctaagaaagcgtccaaatcattacaacacgcttagaataagctgagatcaaagctaaacaatcaaacactataaatgaatcgaaagctccaacaaacaagagagaccagtctagcactcccatcaagttaattgttctctgcttgaatgatagaaaatccccctacaataataacaaaacgaagaatgagttcttaggagatattttgtaacatcaaatacactaattataggaaacaatcataaaataagcaaagaaaaataaaaaaaaaacaagctctttatttacattagaaaatggataattaaacctattgtcagtgtgttttatatgttgatctaattattagttattctttgggtgtggaagatattttagtaaattcgatgcatatttgaaactgcttagcttctgccatggaaatcgacaacggcgaggtgatcaaccacactgtaactgctggcattgttgaacttcttcacttccttctcgttaacgttaacagtataggaatatatttataccacaaaaatgtataaggaatatatttataccacactgtaactgctggcattgttgaacttcttcaattcagggctaaggacttaggggatttggatccgagtctagttcgagttcaaaatattgattaaaaaaaattgtttaaaaaaatatcaaaagtgat

SEQ ID NO: 301577 - DNA, 3793 bp, Cannabis indica
aaaaaaaaaaattatcatatttagtgtgattaaatttacaagacaaatataattatatctcatgttaaaagaactgttaatcaagcagctcatgaactcgctaaatttgttttagggttagatgatgacatatgttagataggagaaatatcctattttattttctctgttgttgtaaatgattccaatttataataagagtgattattctcaaaaaataaagtagaatttgatatacaaaggtaaagggttttcaatgtaataaatgaatattttagtagttgataggttcctttcaccacgtatacaattagacattgcttcataatcttcgctattatttatattattattattattaacattttgaccccacacaaagcaattatgttacattttgggcctactattttgtttttttttttttgcaaattatttaaaatagaatacagaaaatttattgtttacttagaaaaaaacgcggatatggataagaatagctatcacaaatttaatatttaataagtttcattactaaaattttacaatcgcaatgattgattactctgcttaatactaaattatagataaaaatgtattttaaaattgcaaagagaaaaaagcctatgcttttaaagcttaaaaagaataaagatatggtattttccgagattgctgagaggcctggttcagtacgaggcacgcaaacgacaaaattcggtgcacgttagcataaagtatagagcaaatgacttctatgcgccaggtgttaaggattattgctattgttataactgacggaaaacgtttgagttttcgtctttgaccggaaaaggaaaacgactaaactaaataaagacaaacggcgttcatctctaccacccatctccttgtgcaacggaaaataacagttgtgctttctcttattgttatttctagctacaaaatatattagcaccattctcttattgtttcttcttccctttttcattttaatttttaaccacaaatgttaccaaaagtaataattatggtatcaattcaaaacctttatttgatgattttaaaaaaaataaataaagaacttgtactgttgtccatatgttgaacaaatttgggactttgaagtttgatacccatcttttttttttttcttttgcaaagtcgtttgatacccatctttaattcaatcaatcaaggtcaaatgaaaactgtattataccaatatgtatccaatccaaagtttaaaggaaaaaaaaaacaactgacatgtacatacaaatacaaaaactcgatccaaatagaaaaaaaaacatgagacaaaactcgatcgtaactttcatcatgtttttctctttatattatcaaactgtatattctatgctagtctcttgatattaagtaaaattagacccttacaacaaaaaaacagaaggggatcgacatgttacagtagtactatcacataagcaaaccatatacgaacgtgattcttccacagttaaaaaaaaaaatcaaaaatcaaaattttcatggctcatcgaccataacagaagccaaaccagtgaccttttccttgaccccaaaaccaataagttgtctgggcaccactatccattctttcagagctttagatttttcctcttccaccacacccgactcggtcttcttctccactaaaactgagttgcagcagcaccgacaactcggaccggactcgccgcagcagggaggcgcgtttcgtttgtgagaagaaagccacttggctttgatgtaatcagccttcctccacggcgggacaggcattcctttcttctttaagctctgcttcgccgcctcagcaaccaccggaataatcctctggagccggccggctttcccgacgaatatgtacggtatagtttggagaattgtcttataagtcttggttggtcgagcgatttcaaactctgatctaaaatcaacgtcgattatcaatcgttcaccatcgattataacgtctatgtattcgtattctcctgtacatagatacagacaaatttaattaattaaattggattggatttttttcttcaggaaattgagcactgattttcttttcttttctttttttatatatatattttttaaaatttattttattccttatgtcagaaaaaggaagatgaattaaattggattttccttccgtgtttcccagcaaccaaacaatatatatccaaacgattatttaggaaatattagatttaaaatgacaaaattagtaccggcagggtaggagggggatttttcccaacgagatttgcagattgaagcgtcgtatccgagagccaataatccatcagtaacgatttgtctgcaaatttcgtctttacgcttacagatcttgttccgatcaacgatcctagcagtatctgctaataaattcctttcactaacactcgagcaaagaaccaaaccctaaccacacaagaaaactgttcagaaacgaagaacagttggacagattttttttaacattattatactcaaacgaaaaattcgttcatacactctgatcaatttaccttgagaacttcacaaccctcgccagaattgactaaattggaatcgtgaccaaatccattgaataagtccgaatcttcttcggagctatcgttacagctcctgttgaagcaattgcagcgggtccggccacacctcgaagcagaaatttgtttctcgtttccattacctccctcgataaaattctgaaccattttcgctaagcacaccgagctcggctcgaactgcaggtcgccggagctgttattgttcgcttctttgatgaaacgcggttcgtctccgctgccggccttctccaccaaaggcgcaggcgcagaaagcctcaagacactcgtgaactgccgctcgaagagtcgcttgaaccgtgacgtcttcaccgccggtttaactggttcgattaaccgagtcggttcctgagtcggagtgtgacaatcgattggctggatcttcatcgggaatggcatcacttcaaaagctctttcttactcgatcggtagcacctctactatttgaaaaagctatcttctgaactccattttcagaccagaaacagagctagttttcccagtttgaaagtcaaagaatttgaccgatatatctttcttctccaagtcctaaaataaattaaaaaatccccaggagggcactgaacttcagaaaccaagaaggaaagaagtacaaccactctctaccgaaacccaaaattttatataaaaagaaaaaataaagtgaaactcaaaaagggaaaattatgagagtcacacaataaagcctatgcttttaccaaaacagacattgaaaactctgcatcaccttcatcgatcagagctacgtacagaatcgactcagagatccacaattttgcaaaaaatgacgcagttgagcaaaattcgaggctcaaaaaccagacaaaggctcgttttaatctctgcgtgttatatatttataaatatgtatataaaatattatataaggctttcgcacctctgattgccaaaccaagtatggaataacttcaaaactctgccaagttaaagtcgcttttgcttcagataaaatggttagagattccccgtgatacgcgagagtaagatactatataagacgtcatggccatttaaatttgaataagcaccgatcaccggatccttcatttaccggcgaataatcaccggcggtaagttttgaaaatgtgaaagagagagagagagagagagagaggagtaag

SEQ ID NO: 301578 - DNA, 2216 bp, Cannabis indica
taattgattattaagatatttacaaaaataaattttggaggtaaccaaattctatctcaaattatataatataaaaatgaagttttttttttatgtaaaagtaactaattagtttcttatcaacattataagtaagtaaccaaaaggtaagttttgaaaatgcagctaaattaaaaataaaaagtagaatttaagattaattttgtttcaggcatattaatttagaattaaggtattttttgaagatgtggcaaggtattattgtaaatgagatttgtgaaggtatttttgtaattagtttgtattttaagtatattattgaaaaaatccctaattaattcctcctaactccactatagattcaaaattgcactcttgattatatagaatacttaattcaccaagaatagatacgctatgaattatctattatttcaatctaaacaatcaacgatcctctctctctatagatgatttacatcaagtagggacaaaattaccgttttacctctcagtgtagtttgtctttaaaacacttagctacttgtaaatgatatttaagaaaactaatataattatcaaaatgaatactccaccatttaaacttatttaaccaagctctaagaaaactatcattttacttctaactatttatagaagctataaattttatatctatgattagcgctcccattcaattgcactaccgaattgccaagatataagtatgggctaattcttcaaataagcttataacgaacaagttaaggaacacgtacaataccgttaagtcagaacctaaccatctcaggattgcgatcatcgatctaagatcaacatagtgatattgacttaaaaaaaatattacggtaagtttacgatatcttttccactataaatatcggtccagtgtgatgtatagctaatagattcaatacaagcttactttactgatgcattggaaaagatactccacctagataagtgtaagtaaaccatatcgttgattatcatatcagtgtaaatccagtgcattgataaatcacgagactaaatttgttaatcacataatcatcattatttttcacagtgtagataaaactataatcataagtaacaatgtgatagggattttaatagaatttgtacatcaaacatatgatcatgtataataacatgtgaaacaagcaaagtactaaataagtatataaaatgaattttgttctttatttattaataaattaagattactttgaaattgagttttaattaaggcatgaaaacacaataggggtctttttgtcgaatctctagagagaaattagggcaagaaagggagaaaatgtagatgagatttgaaaaatttgggggtcttataaattttaaaactataggccccaatttagaaaggtcgcatacggtctacaagggtcgtatacccttaatcgacccttctaaatcgacagctcttcccttttgtgagggggatgaactgacgaaaatcatatgtgtagtgattgttaagaaccgacagtaatgtctttgactattctaaactaacgttaattttaaaactatagacgtttgttttaaatggtcactcaattttaatagtgtcggtcctcaaaaaaatttgatttaaaaactaacaggaattgtctttcttgtagaagtgaatgatctgctaattgagttgctcatagtcttgctaaacaatgtcgatgttatgatgatcgtcaatttcatgagggtgattatttcattgatttgttatctgttattttgagtgatattcttgattagtggagcttaaattttcattttaaaaaattgttattaattatagttaatggatatgttatattaattagtttgaatacatttaatacatttaagttgtgctaaaaaaagaagtgataaagaaaataaatgtacattgagatgataaatttttgtttgaaactagcgattattattattattattattattattattattattattattattattattattattattattattattattattattttgaataaaaatcataagatctattaattaataaattagttcaaaataatacgcactttagaggaacagtccttcaactgaagtacacgacttgtagagaaacaagagtttcttgccaaacaatgagccaacttatttacagatcgttttacaaaacacaaatcgtgaag

SEQ ID NO: 301579 - DNA, 6026 bp, Cannabis indica
accatagattgttatgttaccttggatagaactgaaccttagttggcgtttggtagttggcgtttggtttgaggtaatgaaatcgattggaatggaaagagaacaattttcattccattccgtaatttggttgtatttaaagtatcggaatatcattttaataagacttttctcttattttagtagaatgactatttatttaaaatagaagaaaaaaattgataatttattcatcaatttgttttatgtatttaaattgtttccattcttattcttctgatttttatcttttcattccttctaaccaaacgttacctaagactttgtgagaacaaactctcaaagccacatgcttgaaagttttgagtcttgttgagcattgctatatagcatcttgtatatgtataattatttgattgatgtaattgagtagcgggttttatatgtttgagatccgatattaaattgtaccattaatgacgatatgacatgtaaggtgatgttgtattgggcaacatctcaagtgcctcttagcaatatttttacttggtacctatgcagatttttatggtgttttgatttatgcagatggggttttcaagttagagaatattaattcgtattttaatcaagattgtgatatgtaagggagattagaggaattgtttctgaaatcttgtcttttgtgtagcccttaatcttttcttaagaatgtatagaactgtttttgaagaattatatttcgttcgaattctctgattgaaagtaactttgatcttttgcttcacatcttttactgatttttcttgaaattttcttaggtgaaaggaccaacaggagatcaaatccacgattttcgtgacaaaacgagtgaaaagttcgaatttgttgcccaacgaaaaggagttcaccgattttgctttactaacaaatctccttatcatgaaaccatagatttcgatgtacatgttaaccatttttcatactttgaccaacacgcgaaagatggtaagaattttgtttttatcaaaaatatggattcgattttctttttcatttttcggttaacaatgcagagatttacatgagttttgtgtcaatttgcagagcacttaaaccctttgttagaacatattcaaaagttggaggaagctctatggaacgttcagtttgaacaacattggctcgaagctcaaaccgaacgacaagcaacatgtatgtatttatctatctaattcggtttctaaatctttttgctcaatttaacttaaaggattcttagcttgataggtagctctcatgattttgcaaaatggttcccgaattataaaatgtgtcgaaaatatattgttccaactaattattgaggagaattctcttctcccttatctaatctaatacgaaagaaaagaaagaaaaataaccaacataaatgaactgattttcttcttccatgatttttgttttcttccttaagcaatctatttcgtcgattttgatcttatcgctacattcatctttttctcgagaagccttcgaacaactttagtaatcgagaaatagtaaatttcgatgtttgacttggttctttcttttgcaactcttaatgcagtgaatgaatcaatggggaagagagcagttcagaaggctttctttgaatcggccgccctagtaggagcgagtttcctccaagtttttattcttcgacgcctttttgaaaagaagctcggaatgtctagagtctaaccttggttggcagcacagcaacctcagtagtaggatacaaaatttccaactatgcacatttagtatttttcatgttttttttacatatataaaaaatggccttgtcctagagccaaggttgttgtaagttatacacttacaaaaatgaggattaagtaacttttgtttttttaaggttttgaggagaatttcttaagatttgagcctttaatttatttataattattaatttttattcttacattattagaagtgaaatgccaaagagcatctgatacggattctatttgaaatatgcagaattttttacttaattgcaataaaggaaataattattttggatccttttgtagaagttattgattggaatttttgtttcgttaaatgataaattagattttgtattttttaaaatggtaaaaatagtactttggattgattttttgttaaaaaaaattaataataacctgatctagagcttttataataaaattggatatatttttttattcgtgttagaaattatctttaagttggttatattaaaaaaaagtttatcgaaaaattaaattcagagtactattttgtactatttaaaaattaaaaggttttatttactattttacaaaacaaaaaatctaattgataacttttacaaaatgtaggtccaaaataatattaactcttataataataacatgtacagtatttgtgatagaatgtatgaaattaatgtgtgggattggacacaattatctactctcatgtttgggaaactattaaaaaataatctcctagtaaactcaccaaaattatcgatttaaattcttaagaaaaatattaatataagttatttgttataatattaactttaacgacatgataataatattataacaaaaattctcgaattcaataatctcaataattggagagaatttaactgcttaaaaattcaagaaacataatttggtaattaaagttttggaacaaaaatcttaattagactcaagtatttaagccctttctcaacttttcttctcatttagagctttattcatttacagttatatttgttttttcttcttataatcctctaaattttcttagtgagcccaaattaaaataagcccttcatttgaaacaaaaacaagaaaacaagaaagggtatgatgctgcattaatattgaagaagatttacaacaatataatgaattattattcaatacataaatgtaaagcaagtacaaacaaatagggcaaatgcaactgatttaactgtcaaagaactaggcatctttcccttgtccttcctaagaaaaaggccattgtacaaaggcaagtttattaggatcaaaaccccacacaacaaaatttgcatagacatagtctcgaaaaccctggcaatatcctttccgacgactacttcttttgctaccccgataaagcaaaagaggttgattgtggcgagcactgcaagtatggtgaacatcggtgaggttgtcccgaattccatgatttccttctcgaatctctcagagacatcttcgtctgttactttggccgtgatgacaaatgctgagtttgtaactccaagcaagtttagaattgtgtcgatgaaggcgaataggtaggatgttgttctcttgtaaagccaaattctttgctcattccaccaacctaagactgtcccaccagaccatagaaattctactagactatatgtgtacttggcaaaaatcacatagacaaatggtataatccatggactagagacctgaaatcattacaaaacatgagtttattaaagtaacatatgtgaaattatgtcaacaatcataaaaagattttcttacaaaaattactttattttgctaggttttacaacatgatactcaatacagggttgatcttgggttaagacaggttagacttgcgcttagggcccactcaccccaaaactcccaaaaaattagtttcatttgaaaaatacataaattttttggtaattttaaaagtacccacacattatcagaataagggtctaataattttttttttcctaaaatccaaacactgtcagggccggccctgacgcaatattgtttggtaaataacattttcttatactcatcttccaaaaagacattattcgatagactcgaaaccctgtcaatgactcttaacactgaattcgaacgctactttttaaaagcaaagtaccgaaacaaaaatatttttttgagtgaccctaaaaaacaatctattttcaccgattactcgaacaataaggtttgagatgaaataattattacctttggaaacaaaggagtggcattgagaaggtaaagtgaaggtataaatgagtaatagagagtagccaaacaattaggagcccaaagacaataggcagaatatccaagttgaagacctaagctgattttgttgtaagcataccaagctgggctgtatttggacaacatgatcaaaagatcaccttctgaccatctcttgtgctgcacaagcacttgatccaatgaggttggagccacacctaagaaagctggtcttgttggattgcaatacactgatttccatccttggctttggattgatagccctgttattacatcttcaactgggcatccatatttcaatcccatctattattcatcataacaaaaacacaaatttaccaaacattgttaaacttcattttttttggttaaacttgacaaaatgggatcccacatagataataaacatttaaataataaaaaataaacattataataataaatatgagtggagattgacaaaccaacctcttttccccaaagagagtttttctcacaagaacaactcgctagctccttcgctttctcttctaactctcgaacactttctctttctcggttttctttcttctcttccttctcaaacttggtaccaaatttccttccactaagaacatctcttctatgaaaacaaccacttccaatataaaggggccctccatagccatcaagaccatggaattcaaccttaaaagatcacaagtataaagagttaatatataagtctaaaataaaaacttattatttgggttctttaatgaaattgagttgtgtagagactcacactacttattgttctaagatcattaccatacaaatcattcttagtaacattctcaaatttttgtgggaattgtacatatgcaatctcatggccttgttcttcatctagtaagaaacaaagggcatcttttatggattgagagttgtttgtgtacatatcacaatccacattaagaatgatttctccattgctaatctcagaagatactctaatctgcaattatagattaaaatcacaaacacaaacatcaactgagtgttacaaaactaaatttttaaaaggtatttgatttcagagtaatttgtgacataaatacttaagtttaattttcgattacatataaattacttaagtttaattttttatggtaaaatacttaagttatatttctgaaactttcataggtacttgaacattaagtgttaagtcaatgaccacgtggcggtctctgattggtccaggtcattatattttttatttttttatttaaaaaatatatttaaatatactaataagataataacatgtggataataacttaacacttaataggagtacctacgtaagttttaaaaatataatttaagtattattatcgtcaaaaattgaacttaagtatttacctacaaccgaaagttaaacttaaatatttatactgcaattactcttcaagtaagtactaatttttcttatacaaaaatatcattttatatataataataagataaatttcatattttgtaccaatgcattcatagctccagctttgaagttatggtgaaattgtggccttttctctcttgccaaatatactaaagttggcagtgtacaaccaccaacatctttcccattttgttctctcccatcaattattatctgcacataaataaaatacaattaaagaaaattattatttctaagtttttttttattattattcattaataaaagatataaattataaaacaatgcaagagaacatgctaagaagttatcaaaatagaaaacatgctaagacactctaaccactcacttgtaattttttatggcatgatcatgcacaaatttcgaatatttatagggataagttgaggaatatatcttttgtgtatccattaattaaaaatatttttatatta

SEQ ID NO: 301580 - DNA, 3049 bp, Cannabis indica
ttctatgctttttttaaaaacacttttcttaattcctttctttccaatcactctactactctatatggtctctttcaattaaaaaaaaaatctagagaagggtgaaagtgaaaacggtgagaaagtatttatatgaatatcctcgtattatgtttctgtttaaaattttttacagtctaaagctaagtgagaaagaaagtacataaaagcaaattagatttagtcaatattgcctttgttgtttggttggaccactacaacaacaactactaacttatataatatatttatttatttttcatttttgcatgccttgctgttaaaaagcatgaaatattaaataggcaaatgacaattggcacttatatatggacattagaccatcatgcaagtctcaagaagtgaccaattttcttttacatattttattaagatttattagttatctttggtgaaagaaactagtgatatttataatctagtaaagtattatattatttattaatgtaattaagtattaataattatataatttaatttaataattattataaaatattgttaattattcataaagtgtcacatttagatggtattaagtaccacttgtacttaatatcaatgctattattatagtgcttagtactattataggattataagatgacataaatagttagtaattttttataatcattataataaagtaaaataagtaagacataatattgaattgcttatgctatggatatgacacaattatagtagtgctaaacactttgggtgtccttcaacatttctcttttaataattagtattatttttaggcattagcagtatgcatcattaccaagtaacattttaaaaattcttataatataataatttataataattattaaattaaaatatacgaaagtcgataaaattgtgacaccttaatattaacatttctctttaataatattatgagtacttaagtagtttaataaaaaatattgtcgttagtatgcatgaaataataatccttgtattatggagtttttatgatgagataagatgcagaaattaatttgaaaaatatggaattaaattaaaaaggtcatgcaatgctggttttagggctttattattaaatcaaggggaaaggccaaatttaaaaatatataaaattataaatacttatggttgggattgatttatggaatggttgttgattacaatagaagataagagcaattatttaaaaaattcagaagagaggatgagatttaatgataccccatttagtgttttttatattattttttcttataaatatggtgaccaaatatcaccatctaaaactcactataattaatgttgaaaagaagaatatggtgccaatgtcatgactttagtaataaattgctctatatttattacaaagaagtatgaactaagtaatgttcaggcccaaatcactatcttccacagactgcatttattgtcaagcccaaataagcccacaatcaaaaatacatataattccacttttgtttatttatttatttattattatttttttcaacaaacaattatgtatttggttgggataatttgtcctcttgtttcagacaataaattcacccaagagttctgttggtttgctctcatcttgtacaataatcacacttaacaaataaataaatacaaaattactacactttataagatttactttccttttgcaataataatggataaccttatacaagttgtaaataggtccatggaaatagacatagatagaacacatgcattgtagcctttttttttacacttttttagtcttttcttccttttatttttcggtttggcttggtttgattattgaaatgatgtaatgatagcctttacttttcacttcccatgaccttttttctttggtaagttcattgtttggaaaataaggcttcaatatcttgaatttggactatactccaataaaagttaaaatactaagtgtgtttggtttaggataataaaataataataataaatatcttatttttttattccattgcattttaaaatattaaaatatcattcaaatagaataattttttaactatttcattttttgttttaaaaaaagactattggaatgtcaataccaaagttatataaatatataaagtatattaaattttattttattatattcatgttttcattcttagtcatttatttttttactcttaaccaaacgtgtcttaaaagtaacaatatatgcatacaaaatagtaataaaaaatcttatgatgacaataatttttaaattgtgaatctcctcttaatatggtgttagaggttaaaaaattgtcatgttattaggtgtactgttttgatgtatattttgaatagagagagctaattacaacttcctattataattttttagtcaacagtgtctaaaatcacatgttggaatattttttttcatagcgatattcattactcattcctgtaaatttttaaaattttttgaataatttacagtacaaaaaatagagttcctgatattctagttgaataatttttatttttgtcccttaaacttttacactaccaagttgtgcctctaagatacgacttgtttataatacccctcaaaatataaaatataacttttacagtaacgtgacatttccattataatcaatttaattttatcgtgaaacgagtgacatgataaattttttttgatattggggcaaggaggattcgaacttgggacctcttctttatgataaatacatacaaattaaatgtatttcaccctttttactttaacgattaaaaaagtaaaaataaaaatatgtattattatatataagccttttatcctattattcattcaagtaaaaaatgtgaagtatatttaatttgtatttatttatcaagtatcatctaccgtttcactaatttcataataaaatgaaataaaatgggatggaaagactataccacttaggggtgttcacaaagtatctgatccaatccaatc

SEQ ID NO: 301581 - DNA, 2318 bp, Cannabis indica
cccacccccacccggcccccttgattatatatgttaccacaggttcaatcacgggagacagctttttcaaaaagctagatacttggtaaaaatttttggttctgtaacaatgaaagtagactccactactaatggaatatataattattggcagactatatagttaaggatcgtccttcccataattgtccctttacatactatacatatactttataaatttatagattaagtgttcgtgaacgtgaaattaataataacattattattgtactctcttatattttaatgttagtgtaggtagtaggaccagtggaccacgtacattctaatgactagaagtttgttgtcgaacgtcaattctaaggcagtacaatgaaagaaaagtgatcgactgaatgatacgatagtattttatattttaatgcgtgattcataaagaaaagatacctgaaatgatcagtattattatggtgattagcattatcattgggggacgaaatactgtggagaggaatgtgaaaagcctcagaccacgacaactggcctaagcatgtggccgtaggcgtcccccaacggtagcttccagcagagaatttgaggtacttatcttcttggctttttttctcaaagggttctttaaacactttctcttgctccgacctcacctcctccaacagcccttttgagattccatgatttattacttgaaagaagccccattcccgtgaagctctagctatctgcgacttgcattcctctctctctgctacctctccgagactgagtctgctcaagtcgatcaacggtaactcgcactcgtctacggtgacagctgacggtggtgatgatggtgacaatagctggttcttattattattattattgttattactgttttgaaaggctaattcgttgatggttttgtcgaagagggtcttgtaagccttgtacaatggtgggtccgagtccattatattggtcatgagtggctgaaataagacacatagtacaagaattgggaagatatgagattatattaatagctagcctagtagagttctagaaagagctacaatatttttatcaagtggggttctgtagacagagacgagaagaaaaggtatagacaaaaacacgttttcttttatgtgtatgttttccttgtgtttgatttccccccttcgtcgtcgatgaaaacgttatggtatttaacttttctataatatatataacattttattgtttgacaatacaatctgtttttaatctcctcttgtatattaacttcactacctatatgtatatacttatttctcccgttcttacaaaaataaatatgattagttcccagaaattttgccccattattattattattattattattattattattattattatatatttgcaaaatgtcttctttgaatattaaaattaatgtaaatattccctttcaattataatatgcttatttctttagacattttgttgctctaatactaatgtgatataataattcgagctcaattcaaaagttcaaacaaaaataaatacataaatagcaatttaattatgcaaaatcaaaatttaatttaaataacagtctaactttatagttgttaaataaattacctaggtgacaatcaaaatctacaggtggggtatgttcacataaaaaaaaatagtatttatataaataaacataataattatataaacaaatgttatgttttttttcacacttctcccattttcaaagctagtgactgacggcattacactttctattcctctttccaaatgtggctagacttcaaattgtttattactaactatacaattatgtcctctcactcataatttttttactcttccatcggtcatatatacttcttctgctcctgcgattcaaatattgtctgtggttagctagctagctctaactctagctctagctcaagtttctatagtctagctagtgcacctactaagcacttttcgtcatatcaccactgaaaagatatatgcagaaagaaactgaaaataaaaatacacaaaaacaaataataaaacttcaagatatataattaaaaagttttacatgggtaacgcaggggcgaaaatgttaatcaattcaccacagagaaattcctaaaaagaccaaacaaatcttatttaaaccggagtaataaaaaaaaaaaaaaaacaaaaaaccttagctaaattttacctaagatgcatattcttccagagataattaccatattcctaaataaatattatatatatatatgtagactgtagtactatat

SEQ ID NO: 301582 - DNA, 3923 bp, Cannabis indica
ccgctctccccgactctgtttatcctgggagctgatgttctatcaaaaattattattgaaaaggttgagaggggcctaatcaaaggattcaaaatgaggagggatggtctggccgtaagtcacttctttttgctgacgatatcattctatttggtcaggctacacttcgtgaagcaagccaattcatggatagtttgaatgaatactgtaagtactctggtcaaactgtaaatgtggagaaatcctctgttttcttttccaaaatggttccaacacgcacggctcaagcaatctctcagcttctggagatgaagagaatgtccaaaaaggcaaagtatttgggtataccattattcaggtccctcaagcgtaccgaggacacaaaatttctagtggacagagtgttggctagagtgcaaggttggaaatccaagctcctatcctatgcgggcaaggcgtgccttatcaagaatgtgggttcttctttggctaactatgttgcatcctccgatgtcctaccaacttcaacggcacaccaaatcgataaactcctaagggatttctggtggggtgactcaactcacaagagaaaactgcatccgattgcctgggagactctttgccgtcctaaagttaatgggggacttggattcaaatcaagcgaagccattaataaggcattcctaatgaagtgggcttggaaaattttaacagataaggaaagtctttggcgtcatctcatggaggccaaatatttaaagaatcgaaatttcttggatgttgaaagtaagaattctgattctactctatggaaagccattctaaaggttagagacaatttgggaaaggggttatgtcgaagaattggtgatgggaactcgacttccatatggttcgacctttgggtaccggggggcagccttaaaccaaaacccaagtttgatgcctctgctggaatgagcatggtccacaactttattactcaaggtggttggaataaaccgctcatccgaatgtggtttctagagacagatgcaaaacgaattttaaacatctcgcttccaagtacaccccgggaggatacttggttgtggcttcctgagagcaacggtaatttctctgtgaaatcggcttacaaggtgatcaagaacatggatgttagagctgacagtgacaacaagtggaggatcatttggggttcaaaaattcatgagagactcaaaatgttatggtggaaaattgtggccaattgtctcctcaccaaggataagctcaattccatattctctatcgcagatccaaggtgttctttatgccatagcgaagttgaatcctcactccatctgttttggcactgcgactttgcgagagcagtgtggtttggcagccggtggcagataagaacggattcatttcacataagctgctgggaagggtggcttgactggtttgctttagatactaattgccccgttgggcttcatctccatccttttcttggaggggctgccatcatattcgaaagcatatggcgtgaaagaaataatttgtctcatgagggaacgcctacacctctccacattatcatccatcatatcaatacaaggattctggaaatcacggaggatgtgcaatcacagcaagctagattaattgaatggctccccccctcccgaatgggtgatgtgtaatacggacgtttctatcgggaatcaccagatggcaggggctgcggttttcagaaatgaagatggaagattcatcaactgtttcacatttcggctgaatgtgagtgagccccttatcggagataatggttctttgtaaaggagctgaagaagcgctgaagcatgggtatgcgaagatgatctttcagaatgattcatccaacgcaatctctgccttgaagtctaatttgcaggaagttggaactcttcatcataatattcaggatcaggtggcgaccttcaggtgtttaatggctcagtttgctctttgggaagtctcctggatcccgaggaactgcaatggtgtggcccattcggtggctaaatgggcgaatcagaacaatcgttttggttggattgatttgtcttctgagattggcgctctgccctctgcgccagcaggggttgattgtccttaattctctgtttgttgtagatttaggatctttttatttaaatagtagttatctttctcctttgctagttggatttcagttgtctctttgtttgttttgctgttgttgttctcaatttgtctcctgttcccagggttattaatcaaaacaaaaaaaaaatatctatcttagtgtgatatcactattggttggtgtaattaaatagtaggtcgtatataacttagaaaaataacttttaagaaaaaaaatgttaaaagataccagtagtttttatcaccgtcctacgtgttaatattactattggtcaaattaaatattgagacacatatagtttaatataataacttctaagaagtaccattagccaatcgcaagatgacacgtctagaaaatgctaagtatcactagtgcccaataacaaatatcgttaattaatcttgaaatgtcacttgtgaaaaatattaggtactaatactctgtttatatataataaaaaattgaactaatgtctcctcatcacaactctacacactcaaccattgagctagtctcacatgtacggtctattcacaatattttttatttatttattttatattgtaaacaaatatataaatatatactaataaaaaaacatatgtatattaattatgtttaaactcttgcaatttcttttaaaataagctgttttatttaataattttaattattggagtaataaacgcaagaattgtaggctagcaacgagggtggcaggtagggtagggtaggactttcgtatgtatgtatatatatataaatgacaatgagagatgctactactgttaactatttatacaacatcatccagcaatggactgtacgagttagaaaagaattttagttaacaaaatttgataataataattacaataaattttatatattttaatttaataattattgtaaaaaattattaattatccctaaaataacaatttgcaataatgttggacactagtgttagctaatatggttaggaagaatttgaattttattaaattgtgatttgtatatattaaacattttactatggtgtatgtacgtaaacatttgtgggctatactaatgtaatacacatatgaggggtcaaattcataccgcgtcattttgtctggccaacccaacatgggcattttcctgccatgttctattattaacaaaaatatatatatagtgaacttagtcaatgcatatcgttatcagctattaatgttggtactggagtagtgttagtagttgttggtgttcactatgccaaaacataatctacatatataatacaaattactattaatatataatatttagtgtaattaatttgataatattttcagcatcgtaataaaatgatattatatacatatttagaaagttaaacgataaaactatagttaggtgtagtagtggactcagaatagactaatttttttttaaacaagtaaatttttttaaaaaaattgttttagacgaaatttaaactcttgacatctattatatatgcaatttaacttaactattaaactaaaattaatattatgtctatacatatttttcatatattataagggtgactattcaatggttacatttttattgtaaccatatggttacatttttttttgacctgcaatagcaggttaacaataggtaaaaattccatttttagaattaattaattataattaactattttttaagtaattaaataaatatttaacaaagacctattttagcaatt

SEQ ID NO: 301583 - DNA, 2952 bp, Cannabis indica
agcactgagacatacttgaacaacttcatcaattagattgacctccagaactccagggatgaatccagctccaattccttggatcttatgcggacctttgacatacacatatattcatttcataatttaggcaaaagcgaatataagagtaatagttatagctattatgaaaaaatcagggctggaaatcgaatgaattcagcaaggattataaagttgtttgccacaatcggaaggggaatgacacaaccacttgggtagaacacactccaaaaagctacgctaggagagaagagtgcccaagtagttattaccaccaaccaatcccatacttagtcaatgtgggatcctaacagcagattttttgaaataagaaataatacaagttattttagataacacatcccattttttcctgctatttgcttttgccttcaggataatagatgtattttttacttcccctagagagacttgggatcaccatgtattcacaataaaagaacaaaatattgaatacatttgattcccgatctgctagagctatgacaaacaaagaagagttttgtagaataaattaactggaatcatggctcaccaggttttcctccggacaaaatagcactttcaacaggctctacaccaattagctaaacataaggagcaagaagcttatcagtgacatgatatgaaagaataccagaaaagcaagaaaaagcttaaatttgaataactggtattttctaaatgcaaacaaaccaaccttaacatcagggttttgctctttgagatactttccagcccctgatattgtacctccagtcccaatccctgaaacaaaagcatcaactttcccacccgaggctttccaaatctctggtccagtagtctcgtagtgaatctaaacagagaaaaaatcagtgagaaaagctatgcagtcagcttgtcatatatgaatgaacattaacaataagtaaaccttagggttggcagggttctcaaattgctgaagcatgtatgcatttggtgtcttgtttactatctcttctgcctttgaaagagctcctttcatacccctggctggatctgtgagaactagctcagctccaaaagcacggagaatagttcttctttcaagactcatggaagcaggcattgtaattattaatttatagcccttcgcagcagccataaatgccaatccaataccagtattgccacttgttggttcaacaagaacactctgcagcatataaatggaatctcttgtcatgtcaaaatttatagagcacaattataatgacaaagtagatacttaccacaccgggcgtaatgagacccttctcctctgcatctttaatcatactataccctatcctgcaatggagatagaatagtaataatttaattaacttaatccgtgcataattctaaggttatattcaattccattgttaattcaatctgtggcctggttgtccctttgatttttagtaaccttttaacttctgaaaacattagtgagtgaaacaatagtactaaataggaatttcatcatttcgtatcttcaaatcaaaatccaacttgctcagtaaatcaaatcatcccaaacaagattacgctggaaggatcataaagcacgctacaaaaatctaggaagaccaaataaaactcgatacagtacctgtccttgacactagaacaaggctccatcatctccaacttcgcagcaactcgaccaacacaaccagcagtaacatggttgaggtaaaccaatggtgtattaccgatcaactaaaaaattcaaaaaaagaaaaacaaatattttccattgtgagctagacaattatcaacttattattgtatttaagcatcaacatggagcagagttagtaatgaaatttcggtagcgtcttacttcagtgacatcttttgcaatattagacttctcctccaccattttttatctgatcactgtgaaaccaaccaataatcccagagaatcagcatagaaaaacatacttaaaattccataataaaaatgtcaacgggaagaaaaacaaaagaacaaatgtttgttcattgctactcaaacctcgaaagaggaaacaaaaaatgatcatattttcaaactcccccaagttttaattactaaataacatagataatcgagtgatgggtctcttctctcatctttaacaacaaataaaccgattacaaccatattctctgtatcactaaatcactttcctatataatctcagctacaaatcgagtgagagaacttaaaataaaaaccaactacacaatattatcaccagctgaaagtaaagaattcataaacggatcttccaattacacttaaatacctgatcagaaaccgaaatatacctgatttagtattggttcaaatgaaaaaaaaaaatgaaagagtttcaaattttcaatgggaatacatgtcacatactctccgagcaaattaaatcttaaaaaatcataattaaataaagtaaataaataaacgtcaaaatcagaaaccttatcagataatccgaaaatgcagaaacttagcaagaaatcaagattatagcgagtgataatcgaacttcaaccaagcaatacttatcttagctcacaaacccagatttagacaaatttcagagctagagttgcgtctgatcctatgacttttccgtttgtctttttatataattttccatatttcactttctccgcccttttttttaatgctttattttttttttctataaataaatagatatatttctaatgtactttactatctttgtgggccaaatacgatattcggctagtttaggaaaataaaaattatagggcttgtttggaacgccgtattaggtcgtattgtattgtaatgtattatattgaattgtattttatacaatatttttatgtaaaactatatgtggt

SEQ ID NO: 301584 - DNA, 784 bp, Cannabis indica
taaggctttgtttgttgtacttaataaacacttccattaataaagaaatatttcacatcagtgaaatggtttctgtatctattacaatttacaagcagtactacttttacttatttatcatataataacaaatcaatgaatataacagatttcaaatatatgattccattgcacttctttttaataacgagatttctatgtaaacacatacaacagtacctactaataacgtctttattaattaatcacgtttagcatctttctttcttctaataaaatatattattaataagattaataaatgtgtctcaattaataatacaacgttagggaaaacaatgtatatgcaaatgaatagtgaactataattaagtggagtacctttatcctggtcaaatttctttaatgtgacacgtggaaatggaaccattatatatatcacatcagtattttttagtacatctagacatgtcatcttgctgttaactagtgatactttttaaaaattattacattaaactatgtgagactcgatatttaattagaccacgtagaatgatatttctttgatacctatctatatgtaaatatcgttattgatccaactaagcactctcttatgtgtcaatatcactattattcgattaaatatcgagtcttatatatatataggtggcgtttggtaacacttttttaattaattttttatttttaaaattagaaaagtaaaaatattttttaaaaacatgttctataaaactgtttttgcttttcaattttttaa

SEQ ID NO: 301585 - DNA, 2004 bp, Cannabis indica
ttttttttcaaaacaaactcaaaagctcttaacttagctcatgatgttaatcaaaacaaaaacccaattaacaaataagaaaaacccagaaaccccatcaatcaaaaacccctaaaaaatcaaagaaatgactcataatccttaaaaaaaaaccccccaaatgaaagatacatacatacaaacataaacacacacacacatacacacatatatatacacatgttgattatacctaagtataagagcctttgagcagtttcgttgggatccatagagcactctctgaggacagcatagatttcatcatcgctgtgctgcttcccagtgatctcccttatgtcattgattgttttcttcacattggttgggattgaaaccctagaaccaccaacgccgctgctactgctcatacttgtgttctgtaagaagaaaatgaagaagaaaaggagagaagagagtatgtttgtgtgtaagaagagagagaaagaagagagagaagagagtttaagagaaatgtaataattaaaaatctgacctttatactaaaatatatacaaacaacatatgtaaagattgaatatgaacactgtttttttggttatggaaaaatttttaggaactaaaactgttgacccttttgctctaaattggacaaaattgttgaattttatatatttatttttttcaattttatgttgtgaataaagattggatttttatgttgttaaaaaaaaaagattagatttttatgtgaaataataaaaatatttgctaaaaatagaaataaatttttatttcgaatgttttttcttatttttattgaattaaattaactttgttctaacaattcttgttattgtatcaacatattgactttgtgtgtaagaaaatgttaatgtctaaaattaacattaaaaggatgtaacaatgttgtacactttggtttggtggcttttttttaggaacattatttttgtaattattttgtgttactatgttaatacttcaagacttcaagtaaatgcaatatttcaattttcaaagctatgtagtactaagatatcaaggaacaattttgagtcatagttcatttagtaaaccatttttttaggtagttaagtaattgtgtgacaaagttttttacttttctattgaataactttttaatgacaatattgggttgattattgcaagtgttgtcttgttcccattgttgtaatacttttttctttgtccttttcaagatgagttttatgggcaaaaatagtctttgaagagtgggtagggcacaccattcataacatgctctttgcatagttgttttgggctaaatactaaaaaagatttggattagtgggtctaacctaattgacaaattattaattttttaggcttattttgcaaatattagttaataagaggccaaacttaattagatattttagaaagaaaaaatcattaaggcataaggaaatatatagtatgtatttaatatgaggattctcttagtataaatcggaagaaataatagaaaacggtcttttctgaggaaagaaatcaaatgtcttgctgttattctttcattttaaaaacgcatatacctaatttagccttcaaaattaaatacagtaatgaaaccgccagtcatataaatttgactattgcaattttaacgtgactagataacaattacagtcagcaatcttatctttgaaaagtagcgataaaatatcttgtcgacataagttgtatgagtgtttggttaacgggataaaattatcggactagacaaattatttaatccaatgtttggaatatagaaagattggatatctttatctcattaatcattcttatgattattttattttaaataaacatatacatgaaaaaaaaaatataataataataataatattttcattaatgttttaaaataggataaattgcggcataaatacttaatgtttcagattttatacacttaaatacctaatatttatt

SEQ ID NO: 301586 - DNA, 2987 bp, Cannabis indica
gggtctcctgggtgaaagccagatatcctaaccgctggacgacaacggatttattggtcagtaaatgaaaggttatttaaatatataaaaatattaattcatatttgagattaaatatatttaggaattttttttattattaaattagtgagactcaggaaaacatggtacgaatgagaaagatgggacatcacaagttgaaaataagggcatggttagttgctatcatcattcatcaccatacttaattaattagtactcttgattcttgaaaaggttcgtgaatgaatggtcaatttttttcaggtatgttgggattggttcatgtactaaatcttatgcattgttatcaccttttttttttttatagacactaaactaatatatgcactcctctctaagaatgtatgcataggtagttggggacaagttaaaaagagagatttcttgaagcaaagaaatattgattctcaaagaatatcacaaacttgtgtataggaattatgtttaggtaactttttaatttatctctattaattatatttcacacacacacacatattatcccattccctgttttgagatctacgacactaatccacatgtaacacttttatgttattatctcataatccactagatggcataataatcaacatttgaacactacgaaaaatgttaataaataaaaaaactaatatatttatgagtatgtataatagtcatcacttaacaattcagtaaaaaaagaataaaaacacctagtgacatttttacttatttggactatggtacttatttgcttccaaaatctccaattgctgtaccacttcaatgatgttaggacgttcctctgcatcatttttcacacacaagccagccaattccaatacagattccaaacaatcttttgggtactgaccagaaaggcttagatcagcaatatctatcagatgatatttgtctttcattatggcttgtacctaagaaaaatcacaaaaacataacttaactaaggcatttttccaaagaaaaagaaaaaggtcattttggaaaaactctacatacccattgagtgagccatattatttgaccactacggctcctcctattgacgatggcttgatttccagtgatgagatgaagcaatagtactccaaagctataaatgtcagtcttagtggacaatgttctatttgtaatgtactctggagctgagtaaccaaaattagagcccatagccctattggatctagcccaacttgggatattaatacttggaagcccaaaatcagtgagctttgggctaaatccttggcccaataatacatttgatggtgttaggtttccatgaaccaccggtcgatttgtgccattatgaagatactctaatcctttggctacacctaaggctatcttcattctgttgttccaatctaagggcctccttcttcttggaaaacggtctgttgtgattacttgtaaatattatggtatttttcaaaataatgacatatttagatatagttagaaaaaaaaaacaggaagagtagtaagtgttaccaataaagagatggtcctttaaagagtataaaggcatgaattcataaacaagaagatgaatattcccttgagaaaaatagccaacgagagtgacaagattttgatggcttagaagtgaaagcatgtgagatccaacccttttaactgctacaacctttatcaattaaaccatatatatatacttttaatttaattaatgtcaagaaaaacaaacaagaattaagttaactatatatataaatgtttatacctgattagaatttggtaaggttcctttgtatacatatccaaatccacaaagattaacaatatgagaaaagttgtttgttgcatcatcaagttcattataagtgaatatttgaggtacgttacttctaggatttgaatttaattcttctccagcttctggtcataatcaattaatcaaaattaaacattaatatataagttacaagaagaatatgatcaagattcatttttgtatgtatcatgtaaaatcaaactttttactacattaatgtataccttgaatcttgatgatcaagaagtgacattaattataatgttattttctttcttacatgaagtacttattaatattattaaaagattgttttttagttaatttcaaaaaggaaaaaaaaacaaggtgtagattaaaaatgttacaaatattgatgagaaatactactaatactaataataataatttgatgaggaaatgaatagaaaagatacctaataatgatgatgaagatggttcttgaagttgaagagtactagggtgtggtggaggttggttttggttaatattaaggtcttcttcttcatggtaattagtattgtgctttgatgagtttgacattattgaccgggcacaaaaacatgagaagaagttcttgaaccaactcattttggctgtaatactaataattaatatgctaatattgtagtaatcaccaggttatatatagttataaacttataaatgtgtgttgatgttatatactaaaatctctgatcatcaactcctattactactcaagtaatttttcaagatattggggaaaaaaagtatttctgaatattttccttaaaaggagttttctatttaaaattattattgtttgagaataatgattttaacacacatacagtatgaatgtgaacaaacatagactagagattctaaaaaaacattaagagggaccaatgtctaacacctgttgaaaatgaaatataaaagattacaatcaaatacacaaaatgaatataaagtaggctaattagatttttccccccaaattttgacatataataaatcatgccccctgaactttttttgccgttaaaaatttcccctgaactattgagattgttaaatttaagtacttttatctaatttcatttaattttactgtttc

SEQ ID NO: 301587 - DNA, 1711 bp, Cannabis indica
tgtacttgcatagagatatttacaatatagggataaaactctataaaaattatagttgaagaagaaaaaaaaataccacttattttcatctaagttagtaatcatttataattttgctcgcttgcttagtatagtcttaatgtgggtggtttgttactaaagtataatacatgttaattaaccttccttgtggtgataaagcctaaaagcccatactttaacagcctttcaacattaatgtgaaattaatctaaaactcatatgcaaatgtagaaatcctcacaaaatttccacaagattattgattaaccaataaatgctctgtcattattcatatgtaaaggtaaaaactcatattttgctattatgttttgattgttaattgtagtaaatttatatttttctcttttacactcaacgtactcaagtcattcttttattgacatgtaccactaagagacctaagtgcaccgttattcaccaaaaagtaacaatattatttattttcattaatagaattaggttggcacatatttttatattattttataacattgttattttccttcaaaaaaataaataaataaagtataacattgttattaaacaaagtggtgcatatgaccatgagatatagttttacaagtggttgatattttcttacaataactgtttaaatcaaaaattataaaatccaatattgaattagaatatggcatatatttgtaatattggttatttggtagtcttttttagcagcattttccttaatttatttttaaaaagtattgattgacacgtgtaacttgattagccgatataatagataaaacttttgaccataaagagagagagaaaagaatcctaatcaatataacctttgttcggttcataatgggttctttgattttgatattttattttccttttattttataaaaataaactaaacatgagaagagagaaaacagaacgtaaaatgccaatagttgtacattattgggcatctacaaggtagaaaaaaaataaattattaataatgataaaaacaaagattgaaaggcagaaagagacccgtgagaaaagataaatccctttgtccatctcaactcaaacccaatttttttttttttgctcttttatttttccttaataaaaaaggtttagaagaaatttactgagaaagtattgtggtgggaaaaagaggtttcactttgaaacatttacttaagataataacattccaagatatcctaaaagtgggtccttctacatggcagtcattaaatgagtaatcaatagccacgtggacaacaaacgacccaataattaagtcaagcttatgatcggagccattacagtctaaaaaatcctcatgtgaataaaattattaaattaaataaataaaataaatatttggggaaataacaggtggatatatagattttagattatagaatatagaatagacacacacaaatacactgagagaggggtccgagcgtgactgtcaaatctacatattctctctctgaaaactcttttgtttctctaaaaattctcacaatccaaaatcccagacaccggtctggctctgttccggggattcgattaaatcgccgatccttttctacagttcctcgggaaaagccttcgcctctttctctttttccagtcccagaatgtaatgtttcagattttcaaggtacga

SEQ ID NO: 301588 - DNA, 2452 bp, Cannabis indica
tgatataagtatcaaaaagttattttacattagatttatattttcaatcacttagaattaaaggagagaaaataatatttagttaacaaataatatgtattataactaaaaaattatcaattgtaactgctaaagagtaaagttacatgattaatcaaattaattggtcactacaatagagtaaaatttactacaccacatcatgtattgtgtagtgtaatagtaaggtgtctttattgagtcaagagttcaaaaatttactacaacacctcattaggagagactagctctatgaagatgtcattcttaataggataggaatctttcatatgtatatggataactcaattaagataaattaagatataagacacttataactgacatataaggatatctttactgtttttaaagtaaattaaatcaaataaaagtataaataatttctatttccatattatagaaattaaggtgctgcatgcatattatagctaacaaaaaacccaaataaaaagacacaacaagaaattaattcatctatttatattggacacccaagtacttttgtaatgttgtacaaaaaaacaaaagcctgtaaaagctcttctgtaaagaaaaaaaaagtaggaaaacgaatagagagaattacaacaatctaatttacattagaagaaaaaaaaaggatattaatttaaattaatgtaataacatatatatagtttaattaatttagagataatttcttaatttggtgttcataatttgaggacccatatattcaatcacatccatttcacactcctctcccatctcaatctcttctaaccatgcataattaccattctctccttcctccaccaccttacaataattctctccatctgcatttataataatataacacaacaaattcttattaatcaattaacattaatccaacttatatacttaataataattattatttaaaaataaataaattactagagttctttcttcacaatgtttggcaatccattaaaacttttataattaattttttcaaattaaaaaatttcaatgaattgaagttgtcattttactatattagtatatgacctaagaaatatttttcaattaactcaaagtatgtaccgaaatattaaaattaatacttttaatccataattttttttgtgcatatgttagattactatttttcagagctggttggagactaattaggcccttggtagcaacaaaattattagagatttttttaaaaaacattgtggtaatttcaaaaattattaaaaaaatatatatgcattttttaatttgttagggcagattttaggccggagcctaacctgccttagctcaagctcagcctcggtactcttgcaaatagtaaattagtgtgagggagacaccattttttaatcgttttaaaaatttgcagggtgtaaataaattaaaaaaatgaaaattaattaaggttacattttacataaataataacaataattaagggtacttagtagttaattacctcttgaataggaagaataaggatggtctttgtaataggagcaatctctaccatcttctttagaataaggtggtccaataacatcaagaacagcacaaggtgttatggctctaaactcatgtatgttccctccacttctagggtacaacaccgaagtattgcacggggctcgaaacacgctattcgctttcaacttcgccaacccaactaccaaaacaaaacaaaaaaacacgcgtgcacataaatttttttaattttattccattccattctattcagaagaactacgacactattaaaagttcataaaccctaataactcacatcgagatgaagatcgagttgttgtgttgtcacgatctttgacatcaccggccgcttcctcctgatcaacccaatcgtacgattttatatgcatgtcccccaataagagcttggagaacactgtcattcccgggtggttgtgtaggggaatgacaccatttgttggaataaagaatatacataactacaaacaaaaaacaataacatattattattagtcattataagtaaatagatttgtaataaatgaaaaggtaaaaagtagcataagagtactcaaagttttaggtttgtaagcggcataaacctaatgattttttttagcggcataagtactcaatgtttataaaattgtaattttcttccaattttcatcagtacagaatctgttattgtcttaaacaggacacatataagactcaaattttagattatttggtttggacgaaaatatgtaatatcagttacttccaaatctttttttaataaatttaaaacggaacctgtactaacgaaaatagagaaaaattacagttttacaaacagtaagtacttatgccactaaaaaaaaattattgaatttataccgcttacaaa

SEQ ID NO: 301589 - DNA, 5013 bp, Cannabis indica
aaaaaaaaagttcaaatataaaaataaaaaagaagaaaattaaacagaaaaagtgtggaagaaatatacgaagacagaaaggagaatatgttaagataaattttattttcttgaatgccaaaattggtgaagatatatagttgattcacaagtatagcattgaaactctaaggctctgtttggttggtgtgaaataatgtacaaaaaagtgatttgtctctctcttactcctctttctgtcactcatcacttttcttggctgccaatttggtatgtttcatcttgatagaacatgcctcaatccttgttaataaacaatgtttgggaagctattatatcttatgtttagggtggttgtacgcaatctcaaatgttaggtaacagaaatctacctgcaataatctaaatattaaagctgccttgttatgttatgtgtacatgctaacattattgtagttgaagtttagttaatatccaattaatgtgtatggtcttacatatacaaccacgtcgcaactagtggcttgttcggacttttttattctgaccattcatcaccaatactaaatctgcaagaaaaataaaatattcctattatatatcaactacacattttcaaccaaattcatttaggtaaacttgtttatcacttaataatgatgttcaaaaactggaatcatcatctgacttttttgctttttttaattaatataaactttggaaggtgaagccaaaacattgagctacaaaccaagtgagagatatgaatttaagtaattaatccattctaaaagttcacttttgcaatttctaaagggattcttatattatgtaagctataattgattaggactaatctcccagctagatagataggccgaataatagaacgttggggagccatgtatatgatataggcatgatattatacgaagtattaaaaaaaataggtcgtcattaaattaaacatcaactctaattgcgttcccaagagacttaatcaattacggtgacttttggatttagcaattaaatttagtctcatttatgtattacacaagaacatgatataatctttattactttggagtcctcagccatttaaagtttgatgtgaaagttcccaactacatttgcaacttcaaataccaaagatttctccctttccttccaactccccaagttaattgctctttgtgttaaaaataaataattaataaaaagaaataactttcgaagacttacacacaaagggagaaagaaaaataaggaagcaaaacaagtctcttgtcatgttttggaagctcaaaataatgggtactaattaatagaggcaagattcataaaaatcagatagttattctagttgtcagcaacaaatatggatgtgccatcaagtatatagatgaacacgaatccctttacagaagtcaatagaaacggaacttataagttagaaattttctcttttatttctacaatatatgattatgactatgttgtgttttgtgtttgttagaagtcttaaagtggaaaagaaattgaaaaggatctcattggttagtcattctttatggggacttttgaaagtcataagacgacccattagaggtggttttatatgtttggtttctttttctctttcaaagtagtaccatccccaccactcggagtcattttgtgtgtatctatctcaatataagaaagtggcactcactctcacaacccaatccattgaaaaaaagaagaaaattaataaagttaatattcatagcggtattcatttatttttatttctaactgaaaaatagagtacgattctcttctcagttgttacagccgacatatatccaataattttattattaccaacaatgaatcatttttggtggaaagtctaccataaacttttttaaggtgcaaatgtgtaattacaaaatagtgtaattattaattaaagtattaattagatattatatttgaaatataatgtgtatttagaagtgaaatagtaattggatatcaatttttatttatttttgacatatgagttcggtggcattaggtagtatttctagtttttaattttttaatgatggtaatgaaagtagaattttgttttgtaaagaatatgtttggtatacaaattttgttatttaatttttcaaataaaaatagtatattttgtaattattttgattttttgttttttaaaaatttatttttcgattttaaaataaaaaaattaaaataattttaaagaatatgtctttttgaaaataaaactacttttctaattaaaaaaaaaacaaattacagaatgtactctaagtcataatttaaaaatattaataattttgttgttggtggttttttaacaacaccaaataaagatgaaaatataattatttaataaaatgcgcgagtactcaacctagaacagcgagtatataaaggaattacatagacaaattggaaaaactgaaaaacacaatgaacacaagagaagtatagtggttcagtcagatcagggtctgcttagtccactgttgcaaggatttctatcttatccttattcatattggatcactcctttatatacaaagcaagtgtccctttgattacacaaaacttaattattgaaccgttttacaatgaatatcaacattaagttaagaaaaaaagttaatgcaataaatgaagaacagtttcgatcagttttaataaatacgacaacaaacgcgacctctatggtgagttgtctgttcatattctcgcagaagctcgcgggcctagggtgcgtgtaggagtaatgagtctttatgttatgatatctgcgtcctattcgagtcgcgtatatggatacctcgttagcgttgataactcaagacgtgcgagtccttatcgggtcattgagcgtgttaggtaattcagaccagcttgctaagtaaagaatcgatctttactaatttgcacgagaagtctttatggtcatcgcatatatcttggtatatgtaagtcttgaacacggcctttttaggcctacatcatgcaacctataataatgtgccttggctctatcaaggtcacatcatctcgctgagtttggttcatgcaaggtttattcttgagtggtctcattttcatagctctgcaatcctcgagaagaatgagtccacttgtcatccttacgtgagcctgatctcgagtttctagaaaaattcacactataacatgtgcccctagtttcgcgattgacagttatgtcgtgagggaaactatgagcgagaagcaagcgagtggttgtcacgagatgatgagtttcggttgtcttgttgagggttttgaaaacacggttgtaattattattttattcctttgaggtgccgtgtcatctgaacccttcagggtatgtgcaggcgagattattggtgaccgttggattgagagaccttaggtattcctttgccatgtgtctctatcccaataaataagggatattagtattttaactccctaatacgaaacgatattttattaatttccctctcatttttgttttctcctcttcctcttctcaaacttttattacatttcctgagttttcttcatttgagaacgacttcgaaggttgcagtacttacataatcattcatggagaaactgcacttgaaggttagtaaattaccttttctgtaactcctttctttcctttgtgaatttgcatgcgttctatattttttaggggttgaaaatgaataaaataataaggtttgctacatgctctttgtagtataggcaagatactatatttttttggaaaatttatgcctaaaatttgaataatcgcgggttttacagagaacatttcgaatgctcgtgagttttttgatgagtatctcgaatactcgcgggctcttctttgaatgcacaaatgcacaaaaaaatatattggatcgataactaagcttttcgaaccctcatattagagtctttaacccttaggcctttttagcttttaggttatatgtgttttttttatgaaaactacctatgttcttgaaatggtgggcgtgtcacattaacataatgttcatgcgatagtcgcatgccccttggcatactgtgaaacgcccagccattttttgagaggcgcggttagttttcattttgctcgcatatcgttcattattggaacaaactaggttctttgaaatgcttagtgtgtcccattaactctatgttcatgcaatcgtcgcatgtcccttgggatactgggatactgggatacacccagcaattcttggagacacacgattagttttaatctggctcgcaatttattcattgtctgaactgactatattcgcgaaatggtgcgtgtttcttcgtgacttaatattcatgtagcgacatgacccttatgtcactgagatatacctagaaatttcaagagatatttggccagttccttgaacttttttgcttttgaactttgcacgggtgagggcacttgttaaaattgaacttacaccacggtaaaaagatattctatctttcagatgagcgacctgtcagatagcaagagatatgattctggagaaggggccttcacggatgaatcgggaagaagtgacattttcatcctaagcacgatgtctgacgatgaagttcctacagctagagctcgtgagggttcgttatttatcgacaagataaataggatggttcaagaattagctaaaccagtgatggcagaagtacacgacagttagtctaccttctaagccaaaggataccttgtccactcgaggcatgccccagacaccgaggttgaagagatgggcgaggacttttaggtaccagatcacaatttcaaaagacgaggaggagggtgaaggaagcgagacagattttgttgataatacctgtagtggccaaaaattgcaccaggcccaaatgccttttacaacccaaattgaaattacaacccttcaaaccaagtcagtaaat

SEQ ID NO: 301590 - DNA, 2425 bp, Cannabis indica
aataattaatttttattattattattatcttaagaaaatctaatctatttggtgacacactctgaggatttaaatctggtgctctgatactatttttctgtcacaacctagactttgagctatagcataaatgtaaaatccataatttaggtggtcaaagatcacactttgaccttttttgaaaaataatacttacaagcgttcctttagtttatattaaaaaattaaataaaacacatatttaaaataattgaataacttctataataaatagaaaataagtgtaataaaataggatccatcaatctatatagaacaataatatctccacaattatgtaatcaccaaatgattagatttaataatttgtaaaatactaaaataatactatacatccatcatattcgttcatagctatttaaatggtacagaccatccatcaataattagattcatattcagagtttaaaaaaatagttaattattaattaagataagactaagctaatcacatcgttctccatcaacaattctcctttatcaacaagtattaaattgagtttctaaaagaagaaatataggggtctcagtaagaaaacaactattatcaaaggactagtagtttaataaaaattcctgcatggttggattttaaaccaaaacatcttgtcatcatcatcatgtataaaaacgaaaaataaccacaagagataagctactcgtgcatatcatactatccactagactcataactcttaatatcaatcataaaaaacgacatccaaaattgggtagtcgcacctgataactaccataatatcgaggctcatattcaatttacttcctgtacaaactctagctctttcacctacaggtgagtgcacacctggtctacctatgatgacacagagactaggtcgtgaaataataatatgcacaaatcatgatcaacatggctctcttcagtaaaatcgaaagcagacaaataagaatgacaaaagaacatatttcctttattttagaaattctgatagcataagggttgtattttgaataaacctaaaaatcataacctgcataaatatttggcactcagtgctccagaacaatccaaagaaatatgcaggttaagtttttaatttttcaaacattttagaaatcataaaaattaaaatatgtctaatgttattcaacacatataaaatcaactctcataatcaagttgagtccctagctcttccaagtcgttaaacttttgttccaaatgacgatcctgagctctcaactctcaacttccaaatgggattctagctttccggaactcttttttagacgacagctaactttttaaagacttgttttgagatctttttatttaaaagaactaaaccacaagtattataaaaaaaaatataataataatactcatcactatgtaccattaagaatactaatcccatatggtggaactttttgtgaatttttataaagatgtgagaagtgaaatatgtaatggtgcaaaaatttcacataggattaacgcaaaaagtcctacatgggataacaagggataggaacacttattattaaatgtatataagatggtactttctattttagatatgggtttataattaattaaataaatatcttttttttctattcatctatgatgagtatttggtcatttgtgcttccaagttctcattaattctcttggatagagttactaaaagatgaatagtgagcttgggccgttaattataagtgacatactcctttagtatttagtatttatgtcacaattaattgtcagaatattttaataattaaatcgaataattgatatatttgataattaaatttggtcataattaaaaattttaattaattatattttataaattaatcaaataaaatgtttaatttgttaccatacataaaattattttaacattaagttatcaataagtatatcatctcagacacgaagtttatttatatataacaaattacatatttcgagaaaatcatggagctattccaacaacttcagcaaagtttaaccgcttaaccacctacaactcgcttgtagaaaaaaaatagaactatgatcaatttcatggaacaaatttaaattcttgttatctgtctttatggtgtacctatgatttttctttttgtgttattatattcaaccaaaaaggataatgaaagaaaaaatgaaatgaaatacatgcatttgagatagtaaatgaagttatttatttggagagaaatcaaatatttttttctgagtaagtttatatcctataaaattacaagtcaaataattttaaaaaattactctcaacatttttaattttttttttcgcattatcttgtaattgttgcccctgattttgtccaatatacgtggaccaac

SEQ ID NO: 301591 - DNA, 2432 bp, Cannabis indica
tataacaactgaacaggcaaaaacttaaaaatcgtgatcatccacactatcaggaaaggcccacttcactttcgtatgatatgttacagatgggccagttaaaagtgggccttagatggagcctgaaccacgtttgtacaggcaacaaagtcttatatgggccaacatgggccgaatccatgttagggacaccacaagtataatcagcagggaatgaaaaggacgatgggaatgaaacaaaagactgcaataatacaataaaaaggtgacaacattcaattaacacaattgtgggactggacaatgttaaaaatatgaaggcgtaataaagaatgtttacagagattgccacaattcacaaatataaattgttcaaacaatcctgaaaattgtctttcccctataattcattgtatcttaattcttaaccctcttgatcgtcatcatcgctatctagtagtatacggtcatgatttttcctctgaaacattcttgaggtgaggctatccaatatataagtctaacataacctaatttttttgtaaaagctaccatgtaacaagaatcaactgggcgattcttggctggcccaactgactcgaatgcagttcctagttgctttacaagctagtatctcatcatgtcagcatgttcttcttccattctcacaatgtgtgaggttctggagggaataatgtgacaaggaatcgatgaatcatttcaaagctagtgaatgtaattacagcagctggagtagttctcacaagattggttgcgcatcctctgtaaaatccagggatgccatcttgatgaaatacttttttcacgcaatcgattacaccagaatatcgcttctcagagtgatgaccttgttcttgaagccttgagcgcactacctgaacatgacaaataaataattgagatcaaagtttgccagcagaataacactttaactttgtaatctttaacttcaaagtgtgtattttcagaacaaactattttaacaaatcaaagtaattgtgatccaggtattaatgctgtacctcatgtgggtatgtcaaagtggaagcaaatattttggaaatggacgaggctatggcaacatcacgtgcaccaagtttgtccatggtagtgttctctgttaaaaccacatcacacaaattagaaacttttccgaggagttctatagaagctacacaacagcaagacaattacctcgttcagccaaatagagttttattctttcatatgttggaaattggatggcaacatgactaataccagccaaagcaggaactaaaccactgatgatcacaaaaaattaaggccacaatgaaaccaaaattgcaatacgaacaaacaaagaatactaatatggtccaaagataggataaaaacctgtacaacccacggatgccttcctcgtgagctattctcctcagagcagaaaatgtgctccggtatggtaccacacccggtctcattccttgagtctacagaagaaaagagaaaatgaatgctcaaagcttctaaacaacctatctatattctatcatatatgaatatgatttcattaaaaaggacagccatgttaaacaaaatcgaatctaaatgagtttctaagaggataaatccaatagaaataatgtaagataatggttttagattaaaaaaactcctaaacagtgacttcaatctgtagtccttacataagcatatagttcttgctattaaagatcatttatactggggtcataatacatgcacacacagatccgcccaaaaaaaaatgcaaaagttcaaatacacacctgaagtcttgtcttcacaacccagagaggatttgtaaaaatagttgttgcagctccagcaccagaagcagctaatacattagcaccaacagaaagttgatgatgaccgtctatacagcatggtccagacaaatattacacacaagaaaagatatgaagaggtaaatataaccggaactcaactatttcagaaaacaggtattagcgggactaatatatagacttctccatcattgacagtaatacttaggaactcaccctgagagcagagtacgcttttaaactgctcatatattgtaaaatatacctgaaacatgggagtgaaaagaacagcatttgtcattagcattcatgaagcagtgccaacttcttaaagtacgatctttctcaaagttataaacctttatggtatactatgctacagcatggaatggaatggaatcaaatttcatttcattcttttgtttgattgcattttaaagtattaatgtccttccaataatgaccattccattttgaaatggaaaaaaaagtcattccaatacaagaaaagaaaaaatttaacaaaatttttatcaacatttttatatattttaaatttgattctattctattcctatt

SEQ ID NO: 301592 - DNA, 3827 bp, Cannabis indica
gtggttgatttgtaagatcacataaggttccgtttgtatattgatgagcatgatacctagaagaacacaaacatacaagtaattaataatcatctatctctgccaaaaaaaaaaaaaaaaaaattacttcattttaatattaagaatatcctgcctttgggatgcatcttttgagcgagggtccttaagtgttgatatgtctgagagattctgattgtaagcggctgtagcctctgcatcatactcaccgagaatgaactcttgaactacctgaaatgaaaaaaatatccaataccattattatcagtatagtctggttctgaccgattttaaacatgaacaaggctactggcatttagacttcgtcttagacatatcaactgtaggtttctgaagtaagagcatcataagcacacaactagtagtggcataacaattacaacacaaaagatcagctgtgcaactaaagtggataaatgcatcagaagatgtgtgtgtcaacatcaataccccctgcccttccctccaatagatacatgtaaaagacgacaataaacatgacataggctggtagcctaaatagtaaataccttttcctcctccaaatgaagttgccgtactctttttggatagcagaattcgtatgaccaccaaccttcttgctgcaatggagaataggtaaaattagtaactaaggtctcgattggtgcgtaaagtaggataacataggaaataattatcaagtaagattaaaaagaaaaagaagatgagtgagttgcctatttccaaacatgaaatttgaccaaataagagggctaagaagagctgtttgtttgcaatttattgtcaggtatacatggattggtactgtaagtcaatattcacccatgaataaatgttagatgtatattccacaatcgtgatccatttgaaaaaaaaaattatccgatcactagaaatgccaattcataaattgaaaatcattaccgtacaatttgctatatttttttaatgcaacttttcatatgttcatatatgtgtgtgtgggaagatgaaatatattgctgggaaaaattatctcggatttcctaatgaaataaaattatctagtcgatgaattagtttaaagtttgggctaatttttccaatatattctaccaaatctcatgataaaatcatccagtctcattcatgtcctatccagcattccaaatattccctaagagctacaatcacttataagggcataattgcagattttagaaagacattgtggtatgcatttgtgcgttttatattcaagaactacgtttataagttcattattaaaacaatgctaaaatgaatcacgaattttcaaagtaatttcacgacttatagtacttactctaacaaagcatcgatccctgagttcttcaagcaactcatctggtgtcttcaacttaatccttttctcactctctactatcatgctgctgatattatgctgcgtaaccgtctttccactcttgactttttctaccttaggtaagtaacataagtaattctgcccattgttattgggcatcaccacagactcttggtcatcttcctgcagtttatgtgcatcgtgttatcaattgacatgtatattaaagttattacaaaaaatgtatactatccaattgatttaattctaatcttcccattgaacaccaagatctttaggaaacaagaaattctagcacatagcttgataagatcccctgagaaatcaaaaaccttgaaaattgaaaagctaacaatatttctagtttcgagccttttcactacaatgttacactgcccagaactttgaaaagcttaataaataattaaagtgggagaatcttgaatctcaaaatacaaactccattcccataacatcaataaaatcactaattgaatcaatctagtatctaaactaattaacacatagaactacaaatcatacattcagaagatccaagaaaaaaaaaataataataatagaaacatacaggatgatatggtgagtcttcagaatgaaatttgatattgtattttggttcacgagagcttcgagcaaatgagccacctattttttttaaagataataatcaacatatagttaattaaacatcaaatatggcattcacaaccttattctatacataaatatagtaattgaaagagataaaagggcatgattaattcgaagatgggtttcagtatttgaaccccaaatggcccaaatttagatgaaaaagacaaactgagaatagggttactgagtgttacctccgacgtgaaactgtaagacttgttcggctaagagaaagtgaaacagagaaaatgaaatcgaaaggaagagcgctactctcatctttgatctttctttcttcaatcccagagatcaaccgctctgcgctattcttctcttatacgatccttttcttctgtttttatttatttagttttgaagttatttagcattgttaagtgtgtgctagcacctccacgcagattagccaatagttatttgccacgtttaatagaagactctgacctgtgacgtggcaatatacatttttcagtataccaatgtggcgtgttgtgattgattaccaatttccaatatactttattaaatgataatgtgtgagattcaatattgaattgcactgatagtagtatgtcaccttttgtggtgcttgccatctcaaggtacctcagagcatgatgattaaattttagagaatgcttgttaataggggcgcacccacatgtaggcgaggcgggacagttgtcctcctaaaaacaaaaatcagaaaaaaaatatatatatgcaatttagttagttacgacaaatatttgtaataaaaagtgaaatttatagacataatattagctttagtgtaatttaaaccagattatatatagggtagaggttaataggttcaactcccataaagagcattgtttcttttttttttttttttatctttttaagtttatttttgccccattgccttataaaaataaatttacgccccctcactttaaatcttgagttcgccacagcttgttaaggccgacagcttagttggaaaaatttgaaggtgttataccattagagaagaatgcatgtcattctacgaatttatattgatgtcatacaatgacattgatgctatttattttctaaacaaaaattaaagtatataaaattatacaatttataattaaaacaaataatatatttgtactagtaatcttgaagggtgtcatatcactcactatgatatttttagaagtaagagtgttgaaaataatgtgtaaaaaaaaataatgtgtaaaaaaaataaaataaaatattatatttttagatgatatggaaattttagcacttttatcgagaatgctatcatgctttacaaatgaaaagaaaatctgttgtcctcaaatttgtaacgcccgtatttctatatttactaaactcgaaagataactttaatatattatatctttataaccctatgggtcgggatcccgagtatcaaaataaaatttaaaagtattttactaatatgtacatataatatttttattttaaaaactcgctagtatgcaacctcaaaatacagactccaaaatagaaaaagatcgaaaccctccaagctgcactgccgcgatatgtacaatcactgccgagctccatctcactgttcctccagcttggctttccctttacctacacaaggtagcaaactgatgagtcaacagactcagtaagatatgcaagatatatatatataaataatgcaatg

SEQ ID NO: 301593 - DNA, 2666 bp, Cannabis indica
tgaatgaatgaaaaaggtaaaagcaacccacaataacaataggagaattcacacaagagttttctacttcagaatgttctttctcattactttgtgcctccaataactctttaattatgtcaatttctgactcccaagaagttagttgaagctcctgagtcacctaatatatggtaagccagcaaaggacaagttcaaatatagaaactcaagagaaactaagcttaaactaaatctaactcaccaaatataattacctgatcattgtgtagagacttaaactgtgacataatctgttgtttactgtgcaatttacttttatcccatttgaacacacgaggaaatgaaacagagctacccaacaaggcaggtcgagctatgtcaatatgctcgaaagaccatatctagtaaaacaagaccaaaaaccattccttcaaacaaatgataaacatgacaagcaacttcttcacaatgtttaaatgtaaacaaactcacttgaagaaatagaagacaacctcccacatactttacactcttcattttcctttgatctaaccaattacaaacatctttaagaactgcttcaccccatgaaaaccggcgaatactgtccacatcttgaatataagaaagtaaacgggaatctacagttccatttgcattggggaaaagaaaagtcccaaatgtatacattaaaaaagttattacaaattcatcactgcaaagatcaccaaatgaattcagtttactttctagagatgtaactgtgatcttccttttccatataacagcgccataatctctttctaaatccccgaaaagtatagaattaacaagtgatactggaggaccaacaacacgcaaactcaatatcaatgcgatatccataagactaagagaaatttcacctcgaggaagcacgaaagcttgtttattagtgtcccatctcctcattaactcgtctaacaaacttttgttgagcctctggttaggaatcgatagcaaatttccaaaaccagttttctgtagagcttcaatttgatgatcggtgagtcgttttacttgcttaagaaacgaaggcagagaaaaacgagtactaaaactcccaatctgcaccaaaacaatttgaactaaactgaagccttaatccaaaaaatttctcaaagtcaaaacacaaaacagctaaactccaatcttcaccaaaaaatttaactaaactgaagccttaatccaaaaacttatcactgcaatttctcaaattcaaaacacaaaacaactgaactccaatctgcaccaaatcaatttaaactaaactgaagccttaatccaaaaactttctcaaattcaaaacacaaaacagctaaactccaatctcaccaaaacaatttgaactaaactgaagccttaatccaaaaacttatcactgcaatttctcaaattcaaaacacaaaacaactaaactccaatctacaccaaatcaatttgaactaaattgaagccttaatccaaaaacattcaatgcaacttctcaaactcaaaacacaaaacaactaaactctaatctgcaccaaaacaattttaactaaactaaagccttaatccaaaaactttcactgcaatttctcaaattcaaaacacaaaacaactaaactccaatctgcaccaaatcaatttaaattaaactgaagccttaatccaaaaaaattcactgcaatctacaccaaaacaatttgaactaaactgaagccttgatccaaaaacttctacagcaagttctcaaattcaaaacacaaaacaactaaactccaatctccacgaaagcaatttaagtggtgtttggttggaggttataaaatgaaatggaatgaaaataatttttatttcattctttgttggtagcattttagagtgttgaaggtagtcaaaaaaaaaattgtcaattttttttacattttaagtttgattccatttcatttctgttcttacttccattctcattctcattctcattttttttcctatattttcattccttccagccaaacgccaccttaaacctttcactgtaatccctcaaattcaaaacacaaaacaactactccatctcattatttttccaccaattttctcacgaattccaccaaattttcacgttcactaaacaataaccagattcacaaatttcttccacaatttcttaaaactccaatctaagaactcaacttcttacattttgaaacaagaaagcagagacaaatagcttgaaaaacaaacaaaccaaaaaaaaataacctcgtcgggagagttggtagctccgatggatgattttccagctgctttgaccatctggaagctgaagaatcgaagaaaaatggaaaagttggagagaaagtgagatcggtgattgaactcgtctactctgagtctgaactgaaagaacgtttcgagagagtgaagcgtccgtaagaagctttgatttcacaaaataaagcgccaaagctcataaatggagcggctttaacccgacccgttctatccaggatcaatccgacccgttttctttcaatatcaatattttaacgagaaatttacattgtatactaacttttgtccatttttttactaaaaactaacaacaagcggtagtttttacttttttactatgt

SEQ ID NO: 301594 - DNA, 2630 bp, Cannabis indica
gcagttgatacaatccctgaaattcaggcatctgcaactttgagaccagccaatatatcagaattcaggacccctgtatcttcatcttccctatctacatctgtaaataccaagttcttcccatctccacaagtaccactaccatcgtccttgcccacacttccatctctttcatctgattccacttttgtgactactaatgcactgacaatgccttcatttacatcgtctggccaagacttaaacgtacacggaactcaaattgttaataactctgtttctgaatcagaacctgtgcatcctctcccctctgtgacatattctgcatcttctttacttggatcaaacttaggtcccttgctaacacagtctccaattttgccaacaccaaatcaatctgcactccacggacctcaagtgctttcttctgcacaaaaagcatactctaatcaaaatgaaatggctgctggggtacctatgccaacttcgtcaattaagcctcctgttactcagacgccattattgccattgccaactgcccctcaacaggttttctttttcttttctctttccctctttccgacaaattgtttaatggctataatttatcttcatcaattaagcctcatgttactcagacgccattattgccattgccaactgcccctcaacaggttttctttttcttttctctttccctctttccgacaaattgttttaatggctataattagtttctctgttatattatactttataacttgctttattttgaacatagatgttgccaaggaaaaaaattatgaggaaaagactaggaaaattgaagaggaaaatgatttactaacttttattttgttttttttttcctaatatatttatagaagctcttaataacaaaaaaattatgtcaaattgaagtctcacttttctattaaaaaaattctcttcttctttttgatttgaatttaaaaagagaatatataatcctttgaaatttatttcatttccttcccaaaatccaaattctgaactctgctgctcacttgttagccaagaatgctttaaaatgtaaagctagtgcttgtaggaatagggacctccctttgatgtttgtcaagctttgtatctgatttgtttgctggttcaatgtattccttttccgaaggaaaaaaaaatccaaattctttgttcgtgttccaggtgatttttagtttttaatcaaaattgtatattcactgttctcaagtatatgtactcattcaatggaaaacaaaaaaaaaaaaaaacaaagagaggagagagaagaccattggtgaatatatggtgaaagaagaataggtttacttgctacttgtaattaccaagacttcgtcattaatatattgcattattttgttctgtttcttgaaaagtgtattattaatatcataaataattatttatgcagacagtgccctttactgaagagtttgattttactacaatgaatgagaagttcaagaaggacgaagtctagggataccttggaaggggaaaaccaactaatacaccagatggaccagaagaaaatgtaggcagtcgtcacttggaagagaaagagggtcctgctttgataactaacccaaaagtaagacctgttataatctctagcttatggttttgaagatcttatttttttggtgcagtgcatgttaatatttgaattgtcttaaatcttttgttgattcgatgcacagcctgcatataaaaaagatgacttctttgacacaatatcgtgtaactcactcaatcatggccgtgggacaataaatggacagagtcggttttctgagagaatgaagcaggacaccgaggtatttgtattatattaatcagtttcagatcttcaaagttagaaccagacaatagcatacatatagtaggactgaaatgatcctttcttatcatcttgcttttcagacatttgaatttcaccagagagctaatttaggatatggtggtggacgtggtggcgagaatttcaggggtggacgtaattggggtaggggatacggctatggctatgcatatggttataactatggtgggcaaggaggccgaggaggaaacatacctttctaataccaatctgcattacaatacttcaacgctgtaactgttgttatctttgttaagtcaaatatctaccttggtttttttgtgagggttgagattgagagtcagaaacatattaggacttaagtgatcatcttgggatttttgtttcagatgctgggtaagggacaaaactacaagcatttgcttgttcatgtaatttttagtgctcatgaactagccttgtgcgtcttctgtttctagcaactgttgtccccaaatcaaacatggactaagaactaatggtgttctagtagtagacaagattaatatttataggatttttcttaggtgagagcactacttttgctcgctcttagctataagagcattttatttcagttttaattggtttaaaatgagggtgtataaaattaaaatgaattgtgacacatgtaattaattattttattattatctttaattagcttttaaaactagtttttattgtaacataatatatgccaattgaa

SEQ ID NO: 301595 - DNA, 5199 bp, Cannabis indica
agtcaattttccgagatcaggccaccaccgccgccgccggtttccatggcgtctaggccacctatacctccagctagaacgacggagaatttcggtcacttctctaggctcgctaaaccgtcgacggttgaattcaacccgtcctgttcaaaaaccgcggtggattcgtgcgatacgccggcggcggtcggtcccaatctgagaagccccgaggatacatcgttcggtaatttaggtgaaggaggagaggggaaggagattcgatgcgaagtgactgtaatttcatctccgggagactcgagcgccagcgcagaaccactagtagcggcgaaaacaatggcggcgagcgatgatcggaagagaaaaggagtggaaatagacgacgccgagtgtcagagcgaggtgagtgagtttatcattcgagtcaattaatttcttgtttgtgttttagttggaggatgctaattacaaaggttaacctcctatgtctaaaattgctataacattttcctgtacagaaaatagagtttcggataatttaaattagcacgcttgtataaaaaatttacactctaacaaaaatttattttgtaaatagaaaaaaatttggaaaaaaagtatttctaacacatattttcgagtactgaaaattagataagaactagacggtagcacgttttcgttaaccgaatcaagttttttttgtatggttgtctttcccaatgtgtgtagtgtagcgtagtgtcgtggactgcactgcacccctcttggctaacgtgcgcagtgggggtgtgtgtcgttgtggtcgtcggtaagcgtgagcatcctttgtttttgccccgcacctgtggtttcctttaatttttctgggtttttgtctctttgcatttcgcgtccacttcagtccctccgtcccaatcttttctttttttctgtacacgtgtctctattataaatgccactgaactgcttggctgcttttatgtacagaaatttcaaatttccaaatgattaatatttcatttatgggattggcggcggccattgcgggactgcttttttgtttttgtttttgtttgttagggcaacgttactattatttattttgttttcaattttcaattatttaatatcttagtagtcttgattcaagttagtatcaggtacttaagtgttgtacgtgttatttttctgggttagtggttgagaattatatcttttgtcttatgtatgtgtactatgtactaacacagagttagaactaattagcgggtgcaataattgcttagctgccaaaaagtaaagggttggagaagaagaagaagaagatatagttggacttgactccccctatgctttaaattctatatgctaggtgactactaataatagggttttgtatgatgaatgaaatgactgatcatttcaggtaaagggtagatacttgagtgctttgattataattagggaggaaccattatgcttattggattggagcaatattgggaagcatccaaggctctatggagttgaattagtgctaaaaaaacttataaggactactgtaatgtaagtcacttcagtgtcaaatattcaatggagaagaatattttaagattggtgctcagaaaaaatattaacaagctatagtctaaaatgaagtatactcgcatctatttgaatgatgatcatgtgatgtgagacacttttatactttgaattcgttgattcatttcttttcctctccccttcctcttcactctttcttatctttcacatccccaaaatatgttaaaagaattagaaccattgctgcataaaattagaaaacttagttcggtgaaattgggataagagtttgctgatatggagataatctgattaatatagttactgtatttaattttgataggaagttgagtttgaatctggcgatggaaagaaacatgcacgtggggcatctacaaaaagatctcgtgctgccgaggtccataatctctctgaaagggtctgttcattaccaaggattattctaagtttggttgaatttaagttattttttgatatatgtatctatatacgttgttacttttccttctaaagctggagtttttatcttctaatgtagagacgtcgagataggataaacgaaaagatgaaggctttgcaagaacttatacctcgctgtaacaaggtttccaaacaaataccaaaccgtcaaatattgtatttttagaatggattgtgggaatatgtttgggattaggtgctctctctttctctctctctctctctgtcttttaagaagctttttgctttttgtggatttcagtctgacaaagcttcaatgctggatgaggcaatagaatacttgaaatctctacagctacaagtgcaggttcactatctagacttactttctgaaaattcattatgatatcgtaaatttgttcatcttgtggaagggtatttgtatacaagtccatataggcagcagagtcctttgcacatagaaagagaaaggtgaaaaatagaattaagaatgatgaagccttaaattctttctgattccagacctgtaatataattcttcaaggtctcatttccagacagggttgtacatattcgtacaagatatttgtgaagcccatgtgagaagtagaagtacatccatgcatgattgatacgtgaaatgagcaggttcaatagtttgcatgcttccatgtggtttcattatttggggttgttttcttagggtcccctgtctagtaacagaacagtttctataattaataggaatagtaaaagtagagtagagacaattacaacgttgtaatcatagaaactatacatagagaaggtacttcatttcccatcttcatttcaacttccttttatatgatcaaatggtgcagatgatgtcaatgggttgcggcatggtcccgatgatgtttcccggaatgcaacaatacatgccaccaatgggaatgggaatcggaatgggcatgggcatgggaatggaaatgggattgaaccgacctattatgccctttccaaatgtgttagctggttcaccaatgtctccaccagctacagcagctcatttgggaccaaggtttcctatgccagcctttcatatgccccctgtgcctacaactgagccacccagaggtcaagcaactaaccagttagattatatgtttcagccatttcccacaccacaaaatccaaatcagtcacgggtgccaaattttcctgatccttaccaacagtattttggttcacaacagatgcaattgccattacagcaggtaaaacaacttgtactttccttcattacttgcttagtgtgctgtgccaataccattatccatttgtcccttatgaaatatttaatgtttttcatatcagtacttgaccccatttcatttatcacatttattatgggatccatttcttactgtttttttccacttttaattttaacagaacccagcaatggtccaaccgagtaccagcaaaccgagtactagtaggggacctgaaaatccagaaaatcatcaatcaggtgggctcctgtatctcattattattctctctcctcataaaaatacaaggttaggttagttaggatagcagaggtcaacatgcaggcatggtacagagcctgccgtcttgcccaattcattgtaattatttttattcaattttttatttatttggtaggatagctcataactcctcctagctggctctgtttagagtttttagaaaaggtcatgtggctctgtttctgatttggtcgacataggtgataagttatcgtgcattgcatagtagtatatatatatatatatatagtaagtggaggatatgatatcatttactatatactaaaacttttttggcattgcaggttgaaagatttaggggtaggaatattttaaagaagggctcttttgttgcctgaagttttgtagtgtaaaagagagaagttctcatcaaggagtagagtagattccttggctggctaatcccataatagaacacacctaaattaacatgtaattattacaaagctcacagcaataaatctctaccattttccaatttggtgtgtgtactatgtgtgttgttatatttttatttagttttcttattttccatattctctacatttttctttaattcatcatgtaagtcaaaattcaaatccaggaaaatctaataaatcccaagtgtcataaaagagtgtgaactagataagaatggaatgttgagaaaagggaaagaaagggtgaggggactctcccaccatacttttggaccatagtgttttttttttcttcttcttgtagattcgtatttttctttgttaatcattgtcactcttccagctattaaaaaaaaagagcaatataattaaaatggcatcaactatattatctattgtctttatgatcttttttgtttgtcggtaattccatgttacttgatatcaaatgtaaggaaccccatcatgtctctttcaaccgcaagtattaaatttaaccccatcaccataatataaatatatatatataactaaactgattcctaggcaaaatttaatcatctactcaaggttgcaactgacaatatattaaagtggttttgatttttatcctatttttcttaacttatgttgtgatgaatgcaatgcactagacaccaaattcaaataacttcactttttcccattaactatttgccttatcttcctagcgttaattgccacacgagaaacaagagacaagtaggggtgtttataattggatttgagttattatataaatttgatttgatataaaatttacaaaatgtgaattgaatgttgttggagtatcaacctaagtctcacattagaagaataggtaagagtttttttgaatataagtgttttacctacttcattagtataaggccttttgagaagggaaacttacaaaaatgctgaaattttagtttatttttacaaaaatactcacacggaattttttcaaaaatactgtgtttttataaaacgccagtagaaaacaaaacaaaacaattcaaaacaacagtagaacaactaaaaaataccagtagaacaacaatgaaaatttaacatagtatattgcagtatgaaacttataaaaaaatacagtataaaagtaaaaa

SEQ ID NO: 301596 - DNA, 2633 bp, Cannabis indica
aactttgaattattaaactcaaaccactttagttgacattttcaatgattttaaccatgaaagggctattactacaatgaataatgaactcacaataaatataaactaatggtatagtgacactcaaagtgtataccctatctacaaattaataacacatttactagctacataatatttaaaattaaaataaataaaaaaaatataacgatataaataaagagtaattaaaattaatattaataatatttaattactaaaattatttagaaataaaataataataatttatattattatttaatttataatcaagaaatgttttatttccgaacatattgattacaaagattaatcaaacttactcatactcaacctagtgttttgaagataagtatatcatcataaatatatatcttatatgtaatgaaaaaataagtatattatcgtaaatatatatcttgagtgactatggcctatatatatttatagaattttcattcttatatgaatataaatatgtgttactgtaaatatttaattaaatagtatttattatgaacttaaataggtcatttagaggttacacacaaattgttagaaacattcaacatttgctcaaaattgaagcttaaaaaaatgttgatataggttgttactcaccttgatgtgatgagtttatctctccaaacattttaaatatttcccacttgattttgaactaatgtacaaatattaataagttataacataaacactttatttatcaccaattttaagatgaaaaatgataaattttgtccttataactaaatcatgtgactatttaggagtttgtattattaacatacatggtgataagatatatgttagctagtctcttctctttattaatgatcctttaaatgctatccaaaaatatcaaatcaattactatcatacagttgaagtaactaattgccaactagggtttaatggacaggctattatatttacgtatactcaagtcaaggtgcctttgtatatataggattggtattagacactagtgatatctaatactacttagaaattgcatcttgcggttgattagcgacctgtgtacacatgcatatgctcacatggtacttaacagctacgaaactataaattgctaacggtattgtggttttaggaattttagcgccaaaaattgagttttgggagttaaatgtaagtaaagtaaaaatattgggaattttgctacaattatttactctttttataattttatttaattttaaaatgaattttaagataataatatcaggtgtaccaatataaacgcgtcatgtacaagaatgtatgcataaacaatctatgataacagttaaccggatgacacattaaatttactaatagttctgtaatttagaaaattttgccgccaaaatttatgcttgaaaaattaaatacaagtaaaataatagttaagaagttttagctgccaaaaactctttttaatattaatacttattatttttttaaaagatgattttgatatttgtatattcatcttatctttttcttatatcattctaaaaatggaggattacatttttaaaatttacaaggaaaaaatctccctcctatcaaacaatattctaccctctccctccacccatatctatggaaattttattatataactatatcttctaataattttttttatcaaaataaaaattttataataattcaatttaaaaaattaattacatttttttatttatttatactaaaaattatattaaaaaattatcaaaaagtctcctatttttatcattttaaaaattacaaaatttattttctgattttacaaaacacaaaatcaaaaacaacaatcacttttttttttttcatttcttgaaagataatggcagaaaagagaatagtgacacaaaagttgccattaattgatcacacttccaaacacaagtagtaatagtcttgagggtaaagataaaatagagagatataaatgaacacaaccctcattattcttattaacaataccaaccaaataactctcaaatcgatcagactcttagtcctaacaactactacagatccactccagctatggctgtagtctcagctttagctaccatgaactactttcatggccattgccattgccattgccaaataattaagcatctgcagtatcagcagaatcagctgcagctaagatcagctctggctggacatcaacagcattggggagtccaagtgctttcaaggccaagtgtgctgctttctgccctgacatcatcattgctccaaatgttggcccctgcaataaccatatatatcattacattagtatagtacttctcatagtttggaccacaccttctcttgtcttctacccaaacaaaataaatatctcaactagtggtctatgcttacttatatcatatctttcatacttgaaaaagaatacagagtaattagcgggaaaaccctcttataatcgaatacaatacagtaataattcagctggtatttataaaatcaaaacataaagaatttcgccgcaaataacccaaacactaaatggaaaaagagaatgatgttagggtttataaaac

SEQ ID NO: 301597 - DNA, 1602 bp, Cannabis indica
ctccaatgattatataattcggtgagtaacgtgtaagaacctgcccttgggaggggaacaataactggaaataactgctaataccccgtaagctgaggagcaaaaggaagaatccgcccgagaaggggctcgcatctgattagctagttggtaagacaataacttaccaaggtgatgattagtagttagtccgagaggataatcagccacattaagactgagacatggtccatactcctacgggaggcaacaatagacatagcctaaggattttgatattaaatgctctacaaataagagttttttttaataccacaccttaaaatttctatatatatttattacattcgcaacttataattcttacaaaaaaaaaaatccttgttgttaataacttgttatcgtgatatatcttatttatataaatcaattttgttttgtacaccacctattaaatatagagaatatacaaattaagtgatttttacatataagatcttctaattaattttcaagtacattagtggagatggctgcgtatagaccacttagacagcctattaaattcaaattatataaatatattttatcatattgctattgtgtcaccacattaggcattagccactccaatatgctacatatatataactgtataatattatttcactttacctttttacagaatattacatagggaaatttgcggcaaaagtcctcaaaaagttcagtttgatacagataagtccccaacctccaaaaatagcggcaataatcctcaaggtcatgttttttatttgtccgttggtctccaagttaacaagtccgttaaacccatttcaaatgccacgtgtcgaaatattattggtgggtgttattattttaatttaaaaaataaaaaataaataaataatttaaaacagaattacgagaaaaagacctatagagatggttattatgtaataactgacactatatagctacaagcaaccttaatttgctatataaaagatcatttaatattataaaatataattaaaaagatattttgttaaatacttttaaaaatatatttatatgttgatataaaaatattgaatctaatactcatcaagtgcatgtatgatatactatataaaattaaataaaaaataaaataaagttgaagtattatatatgttatgtatatactttgtggagaaaaaaaaatatatatgttatgtatatataaagaaagtttaagagtgtgccatgtgatcctaattttttaaagtcttgtctagttatggcctaatagattatagtgccaaaaatatataatttaaaaaaatatataatatatattaattgataagtttaggattaaaagaagtgacttaccttatttgtaattatttcttctaagaagtgcaattaataatttttttactattgttaatctaggctttgagggctgcattgtataacaaaatacagatttggaaatgaaaaaaaattagccttgaagtatgatatgataaaagcttacaaaaaggtagagtggggtttcattgaaaatgtgatgttaagattgggctattgtgatagttgggttaggaaggc

SEQ ID NO: 301598 - DNA, 1852 bp, Cannabis indica
aagataacaagcgtgaaaatgctccaaacatgattaaaactcaattaaaaatatactaaacttaatctaaaattaataataaaattaacctaacactaccaaatgtgtcaacctcggctactctcactctcacaagggatataaatgtctcagctccactggccgcatttatatctctcgtgatgttgttttcaatgaaatggaattcccctttcaaaccgactttctaaacaactacaggtctgaaactcctgttgtgatacacatctctcaatggtcttaccttcttattcctcccactggaaaggccacggcaccccctggaacatctgttgtttcaccattatctcatgagtttactgtttcagatcagtatcatggttcaggcagggagggggagaaaaatgcagcagatgatgcagcccttgcatcaccacaatctcagcagtttcatcacgattttactgtgcctacatcgcaaattttctctcctgctgtctcaagtacaccagcagtctcaagtacaccatctactgctgcatgtactcgtgatcaactgcccgaaccagccatagcatcgactgttccaccacaacaaactactcaccacatgataacacgtgccaaggcgggtatttttaaaccacgagtcttctgtggttagtcaaattgggagtcccttatcaaagagcctagcagcctagaagaggccattaatcataaagggtggaaaaaagttatgaactctgaaattatagcactcaagtccaataaaaacatggtatttggttcctactgcccctggacagaacctggttggaaataagtgggtttacaggattaaaaggaatgcagatggatcggttgaacgactcaatgcgaggttggtggcaaaaggatttcaccaaagacctggaattgattttggagaaactttcagctcagtaattaaagcctcaagagttcagattgtcctaactttggctgtcacaaaaggatgggaaataaggcaattggacataaacaatgccttcttgaatggtgaaatcaaggaagatgtgtttatggttcaacctctgggatttgaagagccaggaaaagaaaattatgtgtgcaaactgaacaagtctttatatggtctcagacaggcacccagagcatggttcgataaactaaagactgcccttctgacttggaaccttaaacactcaaaggtagacaactctttgttctttttaaaaacttcaaaagtcattatccttgtactcatttacgttgatgatataattgttacaggaaatggcattggtgaagttaacaagtttatcactcaactcaacagatccttttctctcaaagacttaggtgcactacacttcttccttagaattgaggttcacagagatgaatcgggcctatatctcacacaaaccaagtatattgaagatttgctaaggagggtcaacatgactaatataaaaccttgcccaactcctgtaactgctggaaaaccgatgtctgcaaccgatggagatctgatgcacaatcctacagcctacaggagtgtgattggtgcactgcagtatctgtgccacactcgtgctgacataacttatgcggtcaataagctgagtcacttcctccaatcacctactacgactcactggagtggagccaagagggtcttaagatactgaagggcaccagaactcacagactgcacttagctgcaacaacagcctgcaaatcatagggttctctaatgccgattgggcgtgctgccccgatgacaggcgttcaatcacaagctaatgtgtctatctaggcgaatcattggttatggtcatcgaag

SEQ ID NO: 301599 - DNA, 858 bp, Cannabis indica
tttggttcaaaaactatgaaaatccggaccaaaccaatccgtgaacacccctagttaatatcggttgtaaagtcgaccgtttaattttagaatgaaattagtaggtaattaaaatttaatttggaattagacttgtagttatgatttataaatttatggagatatatttgatttctatgtgtgctaattatgcgaaatataaattttatgttttttcgtattttgtgtccgataacaatggaacgcgatgtatgacctatagaatcactttagtgtggtttagtatttttaaaatagggggcgacctacgtagacatttgaaatgttgggattagtcggggttgtgatttttgactattttacccctaagttattttaccctttagttatgtgtatgaggtcattttggaccttgtgattaggtggcatgtcttagtagtggcagctggccactaaggaaggaaaaataaggttggattatctttagtgggaattaaggaaaaaagataagaaaattagaaatttgggtttttggtctctctcttgttcggttcaactaaggaaatcagggggaattcaattttattttttgcaattcaagggggagttggcaaggttgtagtgatcctaactcaaggtaagcctaacccttttaccctttgaatttttgaaggttttgtttagtttaagcatgcaaatttccgaatagttgctgtttaggtttgaaatgtttggctgctattttcagtggttaatttaaattttattgagcttgtttggggtagatttaagggttgtggttggctttgagcaagtttgagttcaagaactcaaacttggctcaactatggtaatttt

SEQ ID NO: 301600 - DNA, 3049 bp, Cannabis indica
tatgttagtttactttctagatattaaatacatttttatatattatatggaaattttacaatgcacccccttaaaatagatatattgatggattcttatctgttttaacacccgaaataattttttagttaaattttttctcatggtcatatacgctatagttatttaaggcatcctgcaaaattttaagaaattttaaaaaatttaacacgccgaaaattatgttcaaatagtgtgttgcacgctatcttattttatacgtatataaaataaactgtttgaacattgttttctatattgtaaattattctaaattttcaaaattttgtaagttatctgaaatagttataactacataaatataaaaaaaaattaaactaaaaaattttctgaatcgaaacaagtcaataatgtatcaatagatccttttttaaacgtgtacatggtaaaatcaacctatattatatattatacaagacatacacaattgatttaataaagttataatgtaggagaagaacagtatattgatatataaatataaggtattaatctagtaatattattaaatataagtaacaaaaataataaattttagtcttattatttatattgtgtaatatattgtatatataatgctgaaaatatgaaaacgtacagtaatataaagagattaattattagcagcggaggtaaagttaaagtttgagcaagtggtttgggtagcgagaagagaggaactgaaaccgagtctagaagcagccaaatcaatctgaataagattgtcctcaatctgatgccctccaatcacaatagctgttctcgtaaacttaataccccaatcaacaaaccgaagaggaccaccatcaacgaatcccaggcacgccacatccttgttaacaaaaaccatggagttggcaccattaatcctccacacaactttctcgctctgcaacacaaactcgatcagcggaacaccgggccccgttcgggtgctaacaaagctctttgcactaaagcatgcgctgaaaggagccactgccgcaactctagttacgttgcccacagctttaacaaatgcatcaactacggccttgtgtatggaagtttccaacgaactgtaaggaaaaacggtactgatcttcgttcctccttctccttctttgttaaaggacaatagggtagtgttcaccggcactgtttttccaccgatcttaatcgattttacaccgatgaagtactcggcagatggttcgctgacaccaaagaaacccccaacaaggtttataggattgcgaatcaatggagtataagtgagtaacttagagacatcaataccaggacccaacatatagggtccgtcaccgaataaaacgacgccgttagctgaggttgaagaggacaagcagagagcgaatttccttggaaaactgaaagctgctgagaactgtaaagggagcgaaagcacgttccatccaagggcggccaagcctttaacgccactggcaaggccttctaagagaagagtaggggcacaactgaagagaaatttcgggatcgaaacgagtcttcctggagatccatcactggattgtattgaaagggtgtcttgagagaaatagtctgagcttccgaggttgatcacggtgtttgtgggactctccatacagttgttagctgtatcacaagatttcaagtctcctaggttgcactgagctgaacggcaacggacaatcttgtaggttgaggacctgttagcttgatcgcaaacagtccagaggaattcaccgcccaggtcaatgattactttgacctgaattgggggtgttccttgagtaataatggtggtgtattggagagtagaggcatctttggttactggaagtatgagagatttgggtcggaacgatgtcgtttgggctgaagaagaggatattatgatgggaaagagaagagagatgaagagcatgaaatggtacggagaagccatttattgttgattaatggttttttgtgaaagagtgagttgtagtggattcagaaaactgagcaaattttatataggcatacgcatgttgctaaataattgaggcaaacttcgtctgcttggggatggacatactttgactatagtgaaataaatgataatttgtttatcatttattagtatctataatttgactttgaatttcttgtcaagttgtatatgtgtgttgatttgcttcttatcctttgatcgttattgaatatgtgggtcatgttgttgtccagctaccatgcacaataataactagttttacttcaccatattaatgggcacgttcttcattttgtaattagaagatctatataatgcaaaatacttacttcaaatttcgttaaattaacgacttgtatttcttcatcataatcacgacgtcgcatacgtcttccgttgaaagtagaaactcgtgctcatattgtatatatatagccagtttaacatggccgattgttatttaaatggtcaaagtgttaatgtgtaatccaactttttgtataataattaagtaaaagaatagttagataaagaaaacaaaaagtaaaaagaatattttattttatttttttatggacgtatattataacatgatatatctttctgtatatgtcgtcgctatttaatgtaattttttttttttgtttagtttaacaaaatattttgttaaatttaagctagtaagataacaaaaacaattataaacatatttccataatcctggttgatgcattaaagaagcatatgttattaaaaattatgacacatacttttcataatactttctgagacttatactaaagttcaatgacttatgcttttcataatatttataatcggttatttttataaatatatataaatattaatattatttattttagattaatttaaatatataaataataatattatttattttaggttaattgaacttatacaatttttaaattaatttaaatatatataaatattaatatattatttgcaatattattatatttttattgt

SEQ ID NO: 301601 - DNA, 5898 bp, Cannabis indica
tcccctcaatctgtgtttctttatgctgttttcattttgagttgagaaacatactttgttattactttgatgtgtacacgcatatgttcttttgtgtgaatgatgtttggatggtaaactttaggtaaagactgacatgtaattgtttaattcttaaaggcgggtccttcatgctccaagacaattgatcattttgttgggatgggattctctgaaaagatggtggcaaaagtaattcaagaacatggtaattgttctgtctgctatccttgcgaataagaattgttttgtggcttattcagttattaatatgtttgttactcaggagaggagaatacagatactattttggagacactcctcacatattcggtgagttaaatatttctaattctaatgtggttatttcacacctagataaattgtttgctagtttggttttatttttccttctttctccccggcacttagacattgtacttcgattggcctttctactttgtgtgggtcgggttgggaaattcacatctcagtagctattcattgtcaagaaattgtttgaaattcatcaatagttcaataccttgatcagtgagttaatatctctaattcttttgtggttatttcacacctagataaattgtttgctagtttggtttcatttttccctttttctctccatcgcttagacattgtacttcgattggcctttctactttgtgtgcgtcgggttgggaaattcacatctcagtagctattcactttcaagaaattgctcgaaattcatcaatagttcaataccttgatcagctaaattgcttttgcctatttaggttacatacagcattaggattactttggactagaaatttcaaacaatggcaatatatgttctgtttgcttttttggatagagcagattaggaggtggaataaaatggtcatttagttttcttgttgaggcatgttttcttccttaattttgttcttttttgcttaaggggatccttcttcttgaggattcatctgcagtttactgtgttgctggtccaatgattttttgttcttttttgtttaaggagaatttctgttgatggaattttatggtacgcagcaaatttatactgtggtaacactgttactgtgaaacattagcttgcacatattgatacaaccttctcctttcatgacaaatcaattgtagttatgttttgtttttaataatcttggagttctttttcttacattcttacttggcaggctcttgaagaatctcctgaagaacaagtacaacataacgaacctgataacttttcttcagattgtgattatgaggggagctttttgagtgatttctcagatattgatagttctgataatgaggtatctaaaacttcaattattagttttgtggtcgttttacctcatcccaccaatttatgcaccttctgtaaattttgacaggttactttaatttaagaaccttgtggctcttatatgttcatgttacatgtattcactgtctattaatttgatctgctttccaggatcttgcaaatcttagttcagatgaggagaataaaattaggcccctgttggctatgggatattctaaagaagaggctgcaatcgcactagaaagatgtggtgcgcattctcatgatgaataatgtctcaaagctttgatgtgtcatctcattttgttaatttgttatctcaatttgttaacttcatgaggttatatcaaattttgctgctcctatctattagaacatagatagagctctggtattcttgaaatattgggcactgcataaatataacttatttctgcttattaatattaaaatgcactcgtacttggcaaatgcagaatgtgggggtatttttcttgaactttcagtgattatactagtcaattatgtatcatatataaatatatattaactttattctaatttgacccgttttaaacattgcaggccgtgactgttcacttgcagaattgactgattttatatgtgctgcacagatggcaagggcagcagatggggattatccccttgaagtgaaggtattctttctcctttttgtaaaatatagcagtaaacacaaaaagtttcttaaattactgttggatagtctattttaaaagagtttttcaaaagaaaccttggtttctcaagagagagcttgtgggtgaaactggtggatactttatcaaagaagcttccaaacacattaaacagttttaaaaattcatccaaaacatttaaaaattaattttaggttcttgaagaacttttaagtgatgccaaatagacccattgtaataactgattttttatttatttcacagccaagacttaatggtgactattctaatcacaaaagaagaagacttcttgaatgttctaaacaaaggaggttggagaagaggattctgactgaagatgatgagacaattcgtcttccaaatccaatgattggatttggggttccaactgattcattccggcgggttcggagagatataccagaagctgctatagggcctccatatttctattatgagaatgtggcacttgcccccaaaggagtttggaccaccatctctcggttcttatatgatgtagaaccggaatttgttgattccaagtatttctgtgcagccgcaaggaaaagaggttatgttcacaatcttcccattgagaacagatttcctcttcttccccttcctgcacgcaccatacatgaagcaataccattaactaagaaatggtggccttcatgggactcaagaacaaagcttaactgcttgcagacatgcattggaagtgcaaaattaacagagaggattcggaaagctcttgaagagtatccagattctgaaccacctatgagtatccaaaagtacgtcatggatgaatgccggaagtggaatctggtctgggttggaaggaataaggttgcacctcttgagccagatgaaatagagatgcttctgggatttccaagaaaccatacaaggggaggtggaatcagcagaaccgatagatataaatctctcggtaattctttccaggtaattgatattacctttttctattgtcaatgttggcatccttcgctcattttctttttgattgcagaggtgggattaaactcttctttttggaaaatgttaattttagaaatactttctgccattatatctggtgcttatattttctctcatttcaggttgacactgtagcataccatttatctactttgaaagacttgtacccgaatggcatcaatatgctttctctcttctctggaataggtggagcggaagtagcactccaccggcttggtatccctctgaagaatgttgtctctgttgagatctcagaagtgaacaggaacatagtgagaagttggtgggagcaaacaagtcagaaagggtatttggagcaccttgatgacgtgcaacaactgaacagcgatcgtttggaagaatatatgaggaaatttggtgggtttgatcttgtagttggtgggagcccatgcaataatttagcaggcagtaacagacatcacagggatggacttgagggtaaggagtcttcacttttctatgactacttccgaattctagacttggttaagtgtattatgacaagaaatgaatagttctgtgtctatctatgcaaagaggcaaatgatttctgataggtgttgctaattcacagacgacagtccatagactgttctccttctttaggtctctgtttcaaacttctttttgttttttaactaaccaccactcgcagttgaaacattcaaagaaaacaattttcaattctttgcgagtttatcataaaggacacctgaagctttggaggagatttgaagttgttttatgatgtttaaatatctcctgattcttttcggaaaaatgtgaataataattctaacgcatggtttcaatagtttcactttgttagtaattaacctttaaaatttaaggtaaaactcttgtaaactgttagttaaattttactttcgttcatttgatctcgttgtttgactacgtggcctaatggatcaagtgcttgattaacacgctattgccatgtctcctaaaattactggcattgctaaatctaaaaacttttttaaaaacaattatttttaattattttttttttcattttttcccaattccttcttacagattttttcttttcttttttccagcttttttctttcattcttcttcttcatcatacaatacaccaacaccaacaccaacatcctccaccagcactgaaaccttgactccccaccaccacctcaatccatttttcagatcaaaatcatatataaaaaaaaaagtcaaatcaaatttaaacaaaaaacccagatataaattttaacaccactacaaccaccacaaaatactaacacaaaaattaatcacaatagcagattaacggtcctagatttttttttagagaaatattttgttatcataaattaaaaagtgtgaggcatttacaacaataggtatataggtggttgaacagaatccatccatattggcactacgtttgacatgggtagcaacaatttcaaagaaagcggataagagacttgaaatatttacaagtatatcattaaaagaagaaagagcactaagaggttttctcaaagcatttgaaaccatcaatgcgtttatctctatttggttaatcgacaattgcaattgaaggatccaaattaagctatgaaagatggcctttgcctccatttcatgagatacgaagtttccaagaataggctttgagagagctgaaataacacaacttgttttatcctgaataattgcactaacgccaattatatttttgtcagcatccaatgcaacatcaacgtttaatttaattgttctaggagctggaggttgccatggagtttttcctggtgctggtggcaaccgtggatctcgaactgaagctgatgtcgagaagctttgagttgcactaatagcaagacataatttttccctagcctttgtgaaattctctaagtaattagctacaaagctagccaccttgtttgctagtttgctggttttgcgatacctccatgaattactcggtttcgctctgtctaaatagaccacagtgtgcaaaagagttactccatctctgactgtgtatatgtagttgaaaggtggataagatagtcacctttgctcatagaacaagaccgattccaatcgaaaacctgaccagcaacaccccaaactattcgagcatacttacaaccaaacatggtgtgcccaattgattaccaagcttgataacaaattaggttgcatctgtgataactttctttctaaccaaattttttgctatagatagagcatcatgcataagacaccaagcaaatattttgattttttgggggagattcaaagaccaaaaataggaccatcatgaagaaaaagaattagaggaggagatttcaacatcctctattgaaacagccaagtggtaacttgatttgacagtatagtgccccgaattgtgatggttccatataagtacattaggagttggaaaaaagctcaagggcaaagtcatgatcatttcaacatcaagaggtgaaaaatattgctgcaacaaaaaaaagttccattgctgctcttctataattagattagccaccataccatgtgtaggcccaaagtaacgaagatgtgtaaaagagttgtgtcccgaaatccatggatctatcccacttttaactgatctcctttcacatattttctagcgtaatcccatttttagcaactcacgatcccatattgttgggttttatgccctatataaaactcatttcaata

SEQ ID NO: 301602 - DNA, 2733 bp, Cannabis indica
  modified_base (483)..(483): a, c, t, g, unknown or other
acttattccgctatttaccctattatatataatgttagaaaaagtctacagtgcactctctttatatggatgttcggtagtacttcttaattatctagttcggtatttaaaaaaaaaaatatttaatttttttcatgatcgtatatatttgtatatttattgtcacctgtaaattttaaaaaattttcaataatttagagtgtcaaaaataatattcaaataatgtattgcacgcacgaaagtttatacatatatatgcatgataaataactatttaaactctgtttttagcatgataaactatttagaattttctaaaaatttagagataattctaaataaataactataacatacatgatcatacaaaataaatattggactaaaaagctttatactaaatgccgaaataaataaaaagtatatcaaaataactcttttaggatctactatcataattttttctatatatacaaaaaaaanaaaaaaaaaaaaaaaactatgataataataatagaaagaaggaaatgtattttaatctctaattaatatttctatcttgtaattaaatagaataagcaatgaaattaattaatgtaatattattaattattttgtaggtgtgatcgcataatttggttgggtaaaggattgaagcaaaatcattatggaagaagagaaatgcaattgtctgatcatagacctgtctgttctttttttacctatcacactaatttataataaatatttaatttaattaattaactttaattttaacttatatatgcttgattatatatattggtctataattactacaaatatattttgcaatattttcaacaaaattcataaaatgttgttgaagcttattagttattggttgtttgtaacttatagtagatgttttattgatttttaaaaattgcaaattaataatttataatatcaaaaataaaatttaaaccttaaagatgtattgcataagtagtattatatccaatttttgagaaattaaaagtcaaactttaatactttaatcaagatgtaagaagacaagataggtaaaaacgcaaagaagaaccatatatagcacatggcataggatatgtgctgtgcgagcactgacaccccgctccaaggtgtcagtacttgctcctgagctagggttacagacctagaattagcattttctgtaaatacgagataaggttattcatcctgaaaccctaatctaaaaagaaatccaacaagtagctaaaaatacttaaatttgtgggagtacaagagaacgaatgataagataataacatcacaaaatacaaatatactgacaccttccgagtgtcagtagtcacatattacaagatttttaagaagacttggcactttaacaagaatatcacatgcatgcacttaaacttgaattctaaagtcaaaattacacaaaaaataaagaagagtagtgctacatactcacataacacatgagtactgacactaatagttctttcccaggggtattaatgggttattaatggccaaaaagttcttttcgatatcaaagaccacataacaaataaaagaagtccccaaagagcataggattctctacactagtactgacactccctttaattagaatagtaatcgtgtagattaaggttacaagaggtgtcttggtgtttttaagctcaaaagtaccctagggaatgtctactaatcttaaacacttgtcatgagtactgacactaacataatatcaatactcaccaatgttagagagtgtcagtactcgcttatggtgcttctctccaaatatggagcctcacaagcatgctacatgagtactgacagcttcttgatgccaatactcgcccaaataaacccttacacgagtgctaatattatcggtgtgccagtactcgcctacaataagtattctccaagggagaagccccttcaacacattctcaacttgcctctcaaagataaagtttttagaagactttcaaagcgtatatatctctaagaataaaatagattttaatttttatgcaattgttcattattattaaatgctaaagtgcaagataaatgtaatatttccctaatttgtgggggattgaatagcaaaccctaaacttatataagcataatgtttacatagggaagggattcgatccacgatgacttcactatctcataaagacctagcagctctctatatgatcgctctctcactcatacacatttccaaaaacattcagccctagctcactcaaaaagaatacaggttggtcacttattcttctaaactcagtcacatagagacactaaacgagatcttactattgatattgctctttgtaatccactcaaacacactcatgagaatataactctagtgtgtttgagtcttgatttataaaacaaccaagtggactacctcgttaccaccaatcaaagggggcgaaacattataaaattgatttcttatttcttacagtttatttctaacaaccaatggtctcagtctagtcctctttctttttatgacctcctaaggttatattgacgaaaaattgctttaacaagtaattctcatcaatttatttaagcatttatcaactgtgtagtctcatacttacgcaatcatagaattttgacaccttccccatgtgcagggttgatcctgaggtgagacgaaggaggcggctgccttaggccccc

SEQ ID NO: 301603 - DNA, 802 bp, Cannabis indica
ctacattgcgatgactagatacccgagagggttttcataagagagggcctatgaaaaggtttaacagtgtgaagtttaagtagtaaactaataggagctggagaattatttgaggggttggcatcaaaggtaaaaacagtgttttcatcagtagaaagtgcaagagaactcaaaacattatttagaaattcatccatagcagagataaataagttaaacagtaaagaaaatgaggaagaagaatagataagaggtgagaagaaagtgaagtacctaaatctggctttatagatgtagaaccagtaacccctaaggatgactctccaataacccttaatcataccctaaatttagccggagtagcctcaatgatgaaatagatctgatgagcttcaatagatccttcatccgcctccatcttacggtttccaacaccaaaatagaagatgacaagatggtttttaatgcaagagtttagagagagtgaagagaaatgacaagttgggttaatatgaggaagaagatgaattaaagagcaacaaatgctcggagtaagacaaacaagattagagagagaataaacataatactcagagcaataagtgctctcattaattagatgaaagcttagattagacagaaaatcaagagaaaaaccaccacatagacaatatggatggaccaaaacccctatagcagggaccagacactcaccaagagaagaacgggttcacatacttaccagagagttccagagagaaaaaagtctttttatgtgaattagattttctttgttccccat

SEQ ID NO: 301604 - DNA, 2876 bp, Cannabis indica
gcttcaagcatcattgacagtatctgaggtgtttaactcaatatcactttcaagcaatgagataacattgtatttagtttgacttccgcactatattcatccgctcttgcttttaagtaaataaaaaattcgctagcagtaaaaagccatgtaatctataatatattttgatcctgttattacaaacattgatgaggaagataataatattaatgtatgttaatgaaatgaatgagtttaaatggtaaaaaaatttcatttgagatgtgaatgagctcttctgcgatacaatttagaaacttctctgcagtttcactgaagaatgttgctattagtgagcgtgtgtggtatgttagttgagcttgaaagcaacttctaaaaaattatgttcaaatacaaattaattaatttaattaacaaattataatcataagattttttactaaattgaattaatataaatcttggggttgtctcactaggtgatttgttgcattcgtagcatttaaaatatgcaggtgatgtttcattgtcaagatgtactttttgacgatattttgtacaaatcatgtaccagaagggttgtcttaattttttcatagagattgatgtattaatccaaaatatattttgctaatgaagcatggtatgattattgaaattaagtatataatgttatgtgaaattaaaattaattataaacactaagaaaatgaactaattaattagtcaaaagttaaataaatatatttaacatacctcattatgtttaagagttcttagagcagttttggttgagaaaagtttcttctcactgataatggtagataggtattctttaatgttaatgctcctattgatttatagaaaagaaatattaggtatgtaaaaattatttatacataggtctaattggaattaatttatgaaagataaatataaattagtttaccattaacgaagctcatttatttgtagaatgttcgtaaggttgatgatgaatgaactttgttgcttgaacaataaagatatacttattaaattatattatattataagatgactttcaataatagtaaaataattagttgaaaaaattaaaccattgtgagaaacaacttttagccgtgttgatattataatagaattttgaggaagaattttacatattacttttttgacggtcttagttagcttgccccacatagttaaagtttttaattgcaagctgtacaatatattttgttaaatctcaatataatatgtgcagtaattttaaaaaatatgaaggatgttagttttagacatttgatcaacaagaaaaaattcttgaatacttgcatgtccgaatcttgtgtggattttttttttattggatcagcactaaatgtaactgctataatttctgtaattcacattaaaacacatatcattatttatttggtaataattaagaagatcacataataaaaactatataaatattaccaacacaagtctttgtatcaatgtaggcgtcttgttgatcaagacaatacaagttgtagagatcttcaaagttgcattggttgtcttcaattgttccttaattgatgtagaagtgttgaggctccattcaaattgattgtcaacaattctaaactcttttttactggctttatataagcattggaaattaggtagacttttgaaacatttaaggtatcttcaaaatgattgattgcattaccatacagaatagcttgtagatgaattttctatttgtaataaataaaaaatacacaaaatgatataaaaaaaagtaacatctgtagagatttgatagttaattaatttacaatcttatatctttatagttgaaacaaaattttaacataatttatatagtttatataaatataagagttgtgataaatatacttctatgtcatcaagaattataccttggtacaattttttgttgtgagagtaacgtgggataagtttttcaataatagtaacttttgttatccattctctagtaataggtgtaattttttgtagtaacttatattcaggattcatctttatctataaaaagaaataataacaattagtaaaagtgaaatctttaataattaatggtgataaaaattgaaaagatatataagaagagaattaagaagttctatatttttatatagtattgcttaataataatatttcatcgtaaacgatgttgaaggtatgattataattagctttgttgactgatggtggtctaatgagaacttttaaagctaataaagttttttctttagatagagtaatatataattgtctatgggagaaaataggctttagtaagaatacaccaactgaaactaaagtttgtcccagaactttgttaatagtcatagcaaatcttaatctaatgggaaactgagtgttttttaaaatggaaatattgttttttttttttttcattttgcaatggagtaaaaagtattttgggtaaaaaaattcactttccacaataatcaccaataactattttagcatcaatattattagagccaaattgtcgacatattagacgtgttccattacataatctttcagaagtattaatattatgaagtaatataattggataatttagttttaatgttaattctagagcagggaatccacttagtgttaagctattcataaaatctacttgtaccccttattcaattttatccatggtttcgttaaaactataatattttatgcaattaccaagaaatcgatcaatgggaattttattaatatggctaatatacttatatttaggagttaatattacacgattgagtattgtattcatattttctatgtagttattaatattt

SEQ ID NO: 301605 - DNA, 915 bp, Cannabis indica
ttttttttttttaaaagaataaagacttgtatctttagttatttcatgatttcaagacctacgcctttgccttattagttttggttttgagttttttttttttaaccgaagacataaccacactaaaattcgaagataaaggcctattttttagttgtgccaacacctcataatgttattaatgaattttaatatttaatatcaaatctcgtaattttaattaataaatttaataaataatattgaaaatcaataaatcactatttatgtgatctgagacatcttaactaataatgttctacttctgattttgatatttgatctaacactcgtgtacacacaaaataatgtatatccctcctagtttgtgtgagacttacgtggatacaactgattgaacttgaactactaattattattagtttgctccattgttcatagaatctttccctataaataaatatatatattaaaccagaggccaaatcattttaaatgaaaatgaaagatgccttcacatgactctgtctaatattaactaactatatatgtcggttaattatgtaaaaattaaagaccatatatagtgctaaactcgtggtctgctgctacatctgatgaccactagtatataaatatatttactcaaactaatgtgcatgcttggattcaacaattaataatactgatttcattatagattgcaattctcatttttgttcaaaattctatacataaatattatgcaccgttgttagggcatgcgttacacattcttaataacatgttctttagtattattaattattagaatatttgtattggacactagtagtgtgtaacatattttataggtaccgttctatgattgattagtgatattctttaaaaattcttttcttaagttatatgaga

SEQ ID NO: 301606 - DNA, 1848 bp, Cannabis indica
gataactaatcagattataaagagttttatttagggcataaaacccaacaatagaatctttgtgttgggaagctccattcacgtctgaagaggtccgactaggtgataaggcctccagaccagatggcttcaatgacacttttttccaaaaaaactagactatgttagggaacaaggtcatcaaagctgctcttagttttttaaatgacagagcagatttaacacctataaataataccatcattgtccttatccctaaaaagaatcaccctcaatctgtcactaactatcacctgattagcctctgttcttctaccttgtataaaatcatctcccgtaccctggttaaccgccttaaaccaatactttgtcttattatttcaccatctcagagtgccttcttacctaatcgcttgatctctgataacatcatcattggacaagaagtcacccattctttgactcatcataaacacggcaaagtaggttggatggctctcaaacttgacatagcgaaggcttttgaccgtgtggagtgggatttcctccagaaggtcgtggacaaatttaatttcccatccaagttcatcaatctcattatggcttgcctctcaactgcctccttcattttttccatcaatcaacaactcctaggtttagtcatcccttccaaaggcatctgttagggcaacccgctctccccatatcttgtcctcttatgttctgaagaactttcttcactcatctcatagaaagtccatcaacgcattccaaggaagcacgctattggcctaaaaatttatatgactgcaccaatcatatcccacttgttttttactgacgataacattctttttagtgttgcaacccccgttgctcctaaccacatcaaggaactgcttcgtgactacaatttggcttcaggccaacttatcaactacgagaaatccttgctctatttttctcctaatgccactaatgagatcaaaatccaaatcacctccctgctccaggttcctgttcgggactctattcataaatacttgagactccctcaatcctttggtcgctctaaaaaggaagctttcctctactttcaggatcatgtgtggtcacatcttaacaagtggaactccacttttttctcaaaaaggggcaaagaaatacttctcaaataagtggtccaagctataacgtcttacgttatggcctgtttcttgttacccaactattttcacaaaaaaaaaaaaaaatagagtccatgatggcacatttttggtgggttggaactgaacacaataggaaagttcattggaagagttggtctcatctttgtaagtctaaattccatggaggcctaggtttctgctccatgaaagtctttaatcaagcaatgttggccaagcaggcttggcgtattcttcaggctacttcctcacttgtagctaccttcctcaaagcccgatactatccccatttcacatttcttgattctggtaaagggcaccactcttctctagtctagaacaacatttcttggggtaaagaactcctcttgtagggtttacacaaaaaaagtgggcggtggtacctctatatatatctttaaggatgcctggatcacgggatacaaaaaaaattacctatctcaatacaccaaacacccttgataggaatgtgtccattctcatatcatctagcgaagaatgggatgcttgtcagattcaatcccttcttccaaatgatattggccaagctattcagtttattccactcctaaatccacccggccaagatcgaatctattggtcattcaccccacatggaacttattgttgggttttatgc

SEQ ID NO: 301607 - DNA, 4481 bp, Cannabis indica
gcacttaacagtgatttttggacggaagtgtacagagcaaaacgaaactaggatttagatagttatgccgtcaaaatttcaattttggtggttaagtgttacaaaccgtaaaattcaggtagtttagccgccaatatcgtttttgtaaaacaaaagtttctttttttagtaaaaagttggtgggtgatttttgaaatcacgtgagttatgcattttaattccaagaatccttactcaaacttctgaataattgaaaatgaatcaaaatcgaaaataaaatatggccattaaaatgaaaaaaagaaatttaaaaaattaaataaaagaaaagaaaacactttatccgcaactcttcatcaacccttatacaattcagatgagatgatcagggaagttcatgttagtataattaattttgtatcaccaatagaaaattataccataaaagagtgaggcctctcacaatttaaagaaggccaaaaaaaaaaagttgatttaagtatttgtttgctgactctctaggtctactcatgatgccttgccgatgaactctacatcaaacatgagaactgagtctggaggaataatacatgaacctgtcatatacaatgttgcaaaaataaatagccttacctaagaagaagtaaaattaatgaaattaaaagaaaccaataccaaatattgattttcagtttttatgaagataaattgaagtacctcctctacaaccggcacccctcacgccatacccaagttctggaggaagctttaagacccttttgcctcctacaatcaaagttggccaaacagattaacattaattcatataaatggtggtacaaaaggaacagcaattcatgagtcgttgtcataccagcaagcatgggaggaactccatctccacctagaataccttggtcccagcctttgatgatctatattaaaatgataattatgaaacacttcttgtcattagggtcttcaactgatacatgaagtggtatttatacaaagaaagagaagctaagcaagcttccaaagctaacagaaaactgttagttttacaaactaactaactacagaagcggttctaacaacgacaaccaacacactaacttaacttctattctaactgtcactatgaacagtagccttgacaaggaggaggtattgtccctctgaagccaattattatctttgttttttttttaaaaaaaaaaaaattcttatactgtttgatacttgtgtaagtaatcaaatacaaaggcactaaattatacttatattcgtatttagtaggcaattagctgagaacagtgagaagcatttgagttttataaacaagcaaagaatggtcatcaaccagaattcaattattcaaccctgtcttgcaaaatactcttatcatttctgaatcttcaaattaagtttggagttccaactaaaaaagtgtatcttcatctctttactcagcattcaaactcacatgaaaactctcatttaaatacatacctcaccaacaccgatacgaaaagtaaggggcttcccacggttatagctgctgtcaaataccttcccattctccaattttccaacatagtgtgcctgtgaagaaaagcataaaaattataataattctaacacatccccagaaagagactagattacaaactaacataatttggtcaattatgctcgatgcagatgaataaaccaatttatttgcctctctcctgttcaatggtttcgaaatgggaagataagaattttaattttaccttaatgagttgcccttttgaagcctcgggcccatagcccacaactttgtcacagaaagcaaggccagagggagcaacagtgaaatcacaggaacttacttcagcagcgtttgcagaaggatgaagttcagtaagtgcactcaaaaggcctgagcataacccaaaaccaagtatttctcttctagcaaacaaacttggctttggtttctcatctactagaagtcgcagagaagagtcttcatggcagtggcttgagattttgagttttgttacagattgtgatgtgggcagtcttctacttggtcctgaacaatgtctaagccttttggggctgcatgtaccaccaacagcaacagagatgctaatgacgtcatctttagtctccaccgaaccggggtcagtgatgagaaaagataaaatacaattttctttaggataaaatttaatttaatttgggtgcattctctcttgcagaaatatcaaatagaaagtggggtttcatttgggcttactttaccagtaattgggccttcaggtgaccaactaaactcttcggccatatgcccatcaataccttaggaaaataacatgggccttacaatttttttttggaataattacataaggcaacattcttttttgtaaaatatttacatttttacgttcaaagaatattttttttacatttttacggttctccaaaaaataacacgaaaacaacataaaatcaacaaagaaacaacataaaagtaacataaaaataacaacaaaaaacagcaaaaaataacatacatataacaaaaaataaacaacaaatgaacaaaatttcaacataaaaagaccgtattttatgtaaataaaatcaaaaaaatcgtaaaaatatttaaaattctgtaaaaccgtatatttgttatttctttgttgtttttgtgcatttgtgaaattaaccattttttttttggtccagattagctgaactaatggttctgacttctgatgtcatcagtcagttgatatattaattcacaggaaatttaaaatttagaggacttgaattgaatagacagacaatcaagtgcaattgtaataactttgagcaaattgtgctcaagtaacaacatggatggtaaaaaaataatttagttgctattagcatctcaagcaactgtcatgctagtgaaaaaaatgtaacaaaatttctaatgaaaaccttcaagagaatgcatttctaacataactagagcccctaaactttcttacatttaggttaaccattaatttcctcaccctttctgcatcatcccatttcccacccaaagcatacaaatcacaaatgagagtatacaccccgccatcgttctctggttttacaatccgcaaaaccttctcagtcactctctcagccatctcaaactttttatgttccttacaagctgacaagaaagaagaccaaacgacaacgttaggttgtagtttcattgtcataatgacttcataggcttcctctacaagcccagccttcccaaacaaatcaaccatgcatccatagtgctgaattttcagctccaatccacattcttcaatcatcttgaaaaatctctgcccttcttcaactagacctgcatgtacacaggcactaagaatcccagtaaaagtcaattcattggcttttatcccttctttttgcatcaactcaaacatggataaggcatctttacagtaaccgtgttgtgcagcgccgcagatcaacgccgtccaagacatgacattcctttcgcgcattaactcaaacacttgacatgcgctcgtaataaccccgcacttagcatacatgtccactaaaactgttcccagttcaacattcagttcccatgcattctttgctataaagccgtgaactgatttccctagtaaagatccaagagtacccatatgggcacaacctgaaagaacagatcctacagtcacttgatcaggtattaaaccttctttgttcatcagcatatctcgaaagagatgtaaaccttgctcattgccacccctatttatgtgagctgcaatcacagcagaccacgatacaagatctctctctggcatttcctcgaacacagaactcgccttctttacatcaccaagccttgagtacccagtaatcatagtgttccaagttgtagtgtttctcacaggcatttcattgaacagtttacaagcatcatcaaacgatgtaactatatacgcatatagaagagaagtggccacgtagacatgagaactgaagccaagtttaataatgtgggcatggaggtgtttgttgagtactaaattatgcaatctggtacatgattttagtgtgaaaagtattgagaaactatcaaaaggaacagacttctggtgcatatctgaataaagggacaaagctttgtgaggggaagaggcatttcttattgccaaagcaaaggatgtaaaggttttgacaaactgaaaaaatgagtggcttgtgggttttgttagacgcatttctaatagatggattagacattggcgatcaaatttaattgacgaattgagctttcccgttatagaggaaccactttacttttaggaggcgtttggtcgggaggaatgaaaatataggaataggaataggaataggaataggaataggaatgggaatgggaataggaatagaatagaataaaattt

SEQ ID NO: 301608 - DNA, 2194 bp, Cannabis indica
atggctggtaaatggagtgttacttaacattaaaccctggcctttggagggagaagtcgagcgggggagttttccgttgttcatttttgggttcaagattggcgagcttgctgaaacggacggatgcagtaagtcggaagtggttcggagagggtttctgagattatggatcgatgtttgggtagctcacccaatcccgacgggttttttcttgaaagtagatgggatgccggagtcttgggtgcagttcaagtacgaaaaactccccatgctctgttttaattgtggtaggctggcacattgggataaagtttgtcatgctccgatgacgatggtaacaccacgaacaggggaggctgtgccgttgtatgggctgtggattaaaagtgatacgggaaataccaactgttttaattcaaagggtaagggagttctcaaaatggagttcgtccctgaggaaaccccggagtgggatttgaatgcgaagaatcgtcgaggtttttggactcgaagggagtcacggaggttgacggagagacctctttcatcggagaagggggtggctggaggaagaggcccgacgacatccatgcaccagtctctggccaggggtatcgatggaaaggaaggacggtcgtacgttggtggtacaagtagtgggagggtggcaattgataccagtacgatgagtcatgctacagcaccacacgtggcagatgaaggggaccaggaggaattggcggctcctactaattatttgaatttacccaatccggactttgccaacaatcataatagagaggatttgatccctgatttgggccctaccctggcccaatgcattgaggttccacatgaatggttatgtctctcccagaaacctcactcttttcctgaagctacacctataacttggcccaataatgatgtagaagcccaaaaacttttcttgcagttatatgagccagattatttgaatttatacaaagcccaacaatctcttttatccattccccccaatttttctgagatgataaaccaccttttgggtaatagcagaaagaggaaggcccatacctggcttcatcccatcccagccatctcggagtttagccctccctcgactccttctaatctggtcatctctaacaatgaagaagctgcaccaaaggagactttttgtatcggagtgagtgaagaagggtcttgctctaaatataatgctcgaggaaggaaaactagaggaagaaacaagtcatactcggttcgaagatcgtccggagtcaagactcggagtggaaggaaaaagtgcaatgtggtggaaggtcaagatatggttacaaccggaaatttggaggaaattttgaataattgtatagaagtggcaatcaccttcgaacggaattttggaagaggcgaggaggcggccgaaagcatgcccccaccgtctcaatgaggtgtttatcgtggaattgccgcggacttcgtagacccgcggcggaaagaacccttcgggggttaatcagggatagtaatgctgacatggtttttctttcggagacaaaggtggatccttattaaatggtggaagtgttgaataggcttggcttggataattcttgttgtatcccagcagtcgggctagcttgtggtttttgtgtggcttggagaacgggtgctggctgtgtgattaatgaagtttttgatacgggtttctgcgtaggaattcaaccgcctgagagttctactccttggtctctttttttgtgtttacggcacaccatacttacctttgaaaggtgcttactaggcgtggctaacttcaaaagttctggattgcaagtcaagttgggttgtgattggcgatcttaatgtgatcatgaatgcttctgaaaaggaagggggtaaacggttcaatgacaaagaaggggagctccttcgtgactttctttttgatacagggggagttgatctgggttgtgagggtggtcttgcgacttggtagaattcaaggaactctcatgggcgtattcggaagcggttggacagggcaatcgcagatgcagattggtgtattgactttccaaaagcgaaggtggttaaattccatattttgggttcggaccatgctccaatctgtcttcatactacaggggtgtaatgaccgctctagtaatttggattagtaaaggca

SEQ ID NO: 301609 - DNA, 1498 bp, Cannabis indica
tcaaaattacaaaaatactcctaactcataaatgggaacttaaatgcgataattctcaaataaatttcatataaataattatataataatataattactcaaatatagttaattcattttgattaggactgctaatccatttactaatctcaggatattgcagtatggtatcttgagtctttgctatcaatgaaagtaccaaaatttcgactcgaatttgggtcaactgacgtggagtcacaaaaagtaagtaaaagtatataggaaagagaagatagtaaaggtggcaccaggtttgttatagaggtttgactccaatttccgtggcaatatcctactccccttttggctgtattttttttacatactgaactcaagatcataaggtagcctaggtgagtttctcaagaatagataaaattacaaatgtattttagcagagtttctacgaaaaaaagttatgaacctttttttagttgacggaagtctaatatttatagcgaaaaagaaatcaatcaacattacttacataaaatctacaccacaattaacattaaatgcacaaatttacaccccaatcagcttccttggttggtgggaattgggtgagcttagatcttgagtgtttgatgtggtgattctagcttgttgttcacctctaagagggtagcataggtgtttgtcaccaaggagggacatatactctctattcgattttgagctgtattgtgtttctttcttgtgaggcatgctttggctcatgattgaaccctaagcgttagggttgtggtgtggagttattagagtatcttgatgaaccttattccttcatactttaaatttatgcatcccaggtctaatcctggagagatgatgcatactaccctgagccatacctaggagggggaatcttcatattatttattgacttggttgaaaatgagttactaagcgtgatttggtagtttttagatcatggggtgcgagatatgagttgatatcaggaaaccgcaccccaaagtcacatgggagcatcaccatatcacacaagctgtgaggtatgtacctcggcgacatagtgtatgtcacccaggtgtgtgctccacattagggaacttctagccttagttctttttcccatttgatgtttttgaattaccctttctttgaaaaatgacttataattgatgaaatgtaccccaggaagaacttaggatactactatgctacccaggttgggaggcatatacctaaacggcatggtgcatgctgcctaggtgtatactgttgggttttgtgccctaaataaaactcatttcaatataatcaaatttacttaataataaagatcaaaaataacattttttatgttgcatggttcacatgatttatttcatgattatatgcatataatgtatgaattctatttaagtccaaaacatatgaatttgttaatgattatagtgttgtcagcacagtagaatataatcttaattat

SEQ ID NO: 301610 - DNA, 1670 bp, Cannabis indica
taataatatattacttgggcggcatcaggcgtgagtgtcaataatttaagagtttgaaacttcctttaaaatatttatatatattattttaatttttggaattatgatgatgttacatgcagctaataatgttttcttttcttcaaacggatggggttttcctacatttatgtcgctggcaaagttcaaacgattagacaatggatttctgttgaatgatacttgcatcatcgaggctcagtttgaagtgctcggattaattaaacaacattgattatcttccattatttaattgtatatctatatatattagggcctttcctatagtacattttcaaaatcagtatctcatgcatgcattacccaaaaagttaccagatatatgtacagggaaaattattgaatagtgattattttacccaaccctacatattctatttaataatttatctaaaaacagtatatgctttcatattgaaacaatataatgtatacattacaaaataataaagttactttcgaattaggagtttttagatatgttagcacatatactactatactagcacaaaaagctcgatcaaaataatgttaatcctagttttcgtcattggctggactgtaatcagggctaatctatgattttacattcgaaatttcctagtttggttcttctacctcaaagaatatcaagcttcaacaatgcagacagaacctgtgtgcgtgtgattatatctaaaaaaaaaaaaaaaaaacttatttgtttgtctaacatatgagtaacgtatatggtaatggaccataaaggaatagaatggaatatataatgggtttgattcttttgtttggttagaaataataattttggaaaaaaaaaaattattgtaatgcttatttccctaaactcactacaaaaaatgttacttttgccagcacatttttgtgctggcaaaaattgatattgcgttggtaaaatagaatttacttgtaatgtgttggtaaaagggggttggcaaatcaatgttggtattagaacttttgtcagcataaaattaaaagcgctggcgaaaatgacttttctcagcgcgtaaatgcactggtaaaagttagattttagccactgcaaatgtacgctggtaaaactttgacctctttgccagcgcagtttgcgaaatgcactggtaaaagtgacatttcttgtagtgacttttttttaatgaataaggaaatcttgtattgctcaaactatcaattacatctcaagttttgtacataaatcggctatttactgctataaatctagaatttttacaattacaaattcatcacccaattcttgtccacctcctttgttttgcttggccatacccctacaattcttctcttactctcctgctgaactcggtcaacaattatcctgatttgccattgtttttggttccacaacacatcatttcttacaccccaaatctggtataccaaggtagccagcatagttaacatcatgcttctccttgttgctgaaatccctttaagcttgctgataagttgcagcagtttttgcaactctgttgctttcgtcccacattgcagcctcttcttctattctgcaagacacttgctgctatattcacactgaaaaaataggtgttgaaccgattcattaccct

SEQ ID NO: 301611 - DNA, 2670 bp, Cannabis indica
ctctctctctctctctgctgttttgaacttgttatcactaacatatttgcaactgcaaccactcccaagtgatctctgagtaagagttaaagcaaaatgttttcccatctgtattagaaattgtaatatgagatatttggcattattttgcagttcttgaaataacgtttaaagcaaaatgagtttacacgttaaaataaataaaagatgctggtgaaaatcctcatgatggttatgcatgcactaagtaagtttggtatttccttgcaggcttagcttgggttcaggatgttgatgattgatgccaattactaatcagatgggaactaccaaaattattttgatgcttcttctagtttctgaagaattttatgttaataaaattaaggagaacaaaagaaaaaaaaaaactaggtgtcgtcgtccatgcgaaagagatggtctcacgaagtatttctgcaacctcgaatgacaactgtgcagtctcattcttattaattttggcttgattttttggccttgtaattttgtcaaatgctacagacaaaatgtctcacgaatatgctaatagttttgtaactgacagtacaatttttaatgaaaatgatagatgaaatataaaatttcattttttgtgcaaaggttcaactgtccaaaacccaaaagattacagcaataacacgcccaacaaagtcattgattcaagcaaccatttcaatctcttatttcctattaccataaaaacacttgagataggattgaaaagatcagcacacaaaagtagcatcaacatgatggtcactgcaatagagaccaggctgctgagtaaagccttgactcttaagctttttcctagccttcataacaagctcctggtacgaaacatcaccatctgtctcagcaaggattatctggattgcattgctgagagctccataagcttcagcagcattcccgcccggagcagcatcagcagaagtttggtgtgtttggcatccactaatcaagatcccgccatcaggaagtgccctcttgcttgatcctgcataaacctcttctttgctgccaacctttgtctccattgcaggctttgcataatcttcatcgtcctcgagtttatgcttgaggaactcctgtgccaaacttcccaccatcccaagcaaaccgctaccgccttctccaccctcctcgccctgaccactgtggttgagtttgttcagaatgaccttcatgaacttcttaaccttggggctggcatcttcaccaaagacatcaaaaagggttggcctcactttcccaacatcaatgtcttctttaccagtctgctgcttaagcatttcgatgtaagtggagacagaaagagacctactcttcaccttgattccatctatctcaaactctctctcttgaacatcttcatcttcatcatcattgtcacgaccatggtggcgcagtttcgacgggacatggaatcccctagactcgattgcgtcctcaacttttcgatgaaagaagctcttgaatcccccgaacgaggaagatgattctgaatcatcgtcatctttctttgtgctctccccaatttgctccttagcttcgtcaatgaggccaccactatggcaagaatcagacacaattgtcaaccgacaaccatccggaatttggtcaacgaaatctctgaagtcgtcatctgttgttaaaattcacaatcaaacaatcaacaaagccaatcaaaccatgtaaattatctaaaaagatcagaatctattcgattcgatattcttcttccatccaaaaagatccgatcaacttctctatcacatcaaaatccaatacagtaaaaataccgaaagaaaaagcaaataaatgaaataccagtaatgagattcatgtcacaaggaactatgcactcatcatagcctgtatcatcgtcctcgccagtctcggcagggagacgagtaccgtggccactgtagtgaacgaagaggaaatccccagggcttccggatcggatgagacgagagagagcggcgcggatgttcttgcctgtggttgagtgtaagagtcatcggtatcgatgagtacagtaatgtcatcctcactaaatccataccgatcaatcaagcatgtgtacatccttttcacatcgtttatgcatcctctcaattctgccttcgttcctgggtaattgcaaccgatcaacaatgccttcttcgccatttttgatcttttcttttgtgatctctgttcctgaaaagctaagcttaaaatggctcttggtccctttctttatatttatatctatatagttattatttttagtttatattattacaattatttttgtttctagttgtaccgtatgtgtggacaacgtgttgtgttactatcgaaacgagtcattagtattgaaaaaaatcacttgtctttggtttggatattcttttcgagttcttttgcaataatatggatacatatttacatatgactttgtcccaagaaattataatttatttttctcgtattttaaggaaaactaataattgtgcaatgacttttctttattcttgtagtagccacctctataatcctcattcattcctacaaaaaataatacctagttatctattgaagaaagtatctcaaaaaaaaaaaaggaaaaaaaggaaa

SEQ ID NO: 301612 - DNA, 1908 bp, Cannabis indica
aaaagtaaaagccctccccctaaacctcttctaaggaccataaaagcattattaaaaacaaactattcttgagattaacacccagaccatgttaaagtttagactccataatgaaacaaaaaataggcaaatattgtttcaccaatagggagaggttgtggaatgctcgaggactccctaaatctcgagcattccaacttaagaaactcacttttccaggcaagtttcactttgaggagttagaataggaatcaccgcgaaatcatcctgagcagctctagctcgtttgagcatgcttttaacagagccacccacattaatgtttaatctcaaaaatgaccgtttgacacagtcaccataaccgggacatatttggtaggaccaaggatagacaaacctctcggaaggcctataatagtagatggatttagccatggaagcttgctaaaagccaagccctttcccttgtcacgttgaccacgaccctttcccttagtagtatggattataatagaggtgttcacagcaaggggtagaggtatagtggagagagcattgtaggtatcaacatagacagatcgtgatctaggtggttcaaattgagcgctttgagtgacaggttagggaactaggtcaacagaaaagctgcccaagtcagagccaatgttaaggaattgatcaacgacttgctgcaagccttgattagattcatatccctgtccgaaaaattcttctaagggcacataattggacacttcaaaaggattcttttttaaaacaacacgagagtgagcatggagagaatcttcatatctaaacatatctaaacagtggaggaataacatactcatcacaacattgcaggtacttaccacatttatagtaagtatgttccaataagccacagaaatagcaaaaatattgcaagccttcgtactctaaatataaccacttggtaaccgcaatattcctaaagtggacattcattcctcttttcagtggtttggttatgtccagcaggattcttatcctttgataaggaccaaaactatcaagcaaagatatagggtgaatttcaatgaggtccccaacctcattggagatgaaatgggccaactaggggaatttttttgccaaaggaaatgttatgagcttggagacaaaaaggaacataacgcagttgctcaagggtgagggtatcaaaaccctccggattggcaaatatcatgaggcacttgttaaaatgcaaatgccagggctattctttgaggacacggcggtggtctacttcgtagccaaaagtagctaagaataattcaaagtggtattctataaaacttataggaaagcgaagggtccaagcatccttcatttctttttcaatccacggtggtagaaaagattttaaccaccaaggtagaaagactcatgttagttacacgaattcaagaaaacatggtcgaagaatcagatttttctcgtcaataaggcttaggatgtggggggctatttggcttgaagaagacatcttgaggaacacatttttagagtaaaaatggaaaaaaatcaggtgttgtactaaatccataaaaagttctaactattaaatagactaacaaaatggagagagcgatacctggagatgaaagggcttgttggagagtgggaagatcgcatgtaggggtgtttattggactacatctaatatttttaggcatatccagatccgatctaattatatattggatgttagattttatcatccgatccaatccaaataatttcagtcatccaatcgatccaacatctattgaatgtttaattgaatctattctatccaacggatatattttatatatatttattggtttaatgtaggtttatcaaatatttagacctagtattttt

SEQ ID NO: 301613 - DNA, 1763 bp, Cannabis indica
catattcaagataataataaggattcatagctgtaccttcgaaagtgaaccaagcccacacgggtaatagccaaattgatgcagagacaaagggtcttgacaatactaatgtatattagagaggccaaagagaagagagcaaaagtgttcaacttcaattatagcttcttctgggaataatctcggcagtgaacaagaatccatgtcacttgagagtcaaattgatgccgaaaaccgtcagcgcctgcaagaaatgtcacctgatgagattgctcaggcccaagctgagataatggagaagatggaccctgcattactgagactactgaaaaagaggggtgattcgaaatcgaagaagcagaggtctccaggtctggatagtgccatcaaagttgaatcagttaatgaacagaagaatcaggatgaaaacgacatgaaagcttcttctgtccctgtgaattctattgttcatgaaatgacgaaaacaacatcaaatgaaatacatagtggggtggacaatggggaggtacaaaatccaaacccaaccagtggcggtttgtggaatgcttggagccagcgagttgagaatgttagagaaataaaattttccttggaggggactgttgttgaaagtgataatttccatacagcagaaactggttagtctaatgtctttttttttgttttggttatggtgtcacaaatataattctatcatcagttgtctctgtttttgtgataatgaagtaagattaggcgacctctttcaaatttttgtttattgcattgaatttttggacttgcctagatattctaccgtcgttcatgctcaaattatatgctgcttaaaaatgtaggccaattatatttgttttaaattttgggggatcacctagttagggcccaaggtttggtaattaagagttgcttagtaagaaacttaaattgattactctcaattatcttgttcttaatggtaaattagtaagattgctgttaaccatctgtaacagttttcaaagtaatgttttaaaattcaaaagaagatatttgtttatgtgcagttctgattatttatttatttatatacttttctggatatttcattttacagattgtgttactgagcgtgacttcctgcggactgagggggatcctgggggagctggttatacaattaaagaagcagtggcactcactcgaagtgtggtcagttaatttattgtattcctttattagtttattgtactaacaacatacttattggtttgatttttcaagattttttggagctagaataaacataaactaattagagatgtttgtagatcatatggttcattcttttttggctactgtttttatttttatttttaaatccttttcttttttgaaaagagtcaaaacttgtattaatgaaaataatacaaggatagtgtaaacaatcatgccagactgctgtaaaaaaaaaaaatcactccagtctgacaataacaacacaaaaactccaagccttgacttttgatactgatttaagtaatattctcttatttattttgtttaatttctgctttgtggtttcagattcctgggcaacgggctcttgcattgcatttgcttttagctgttcttgataatgcaatacacaatattaaccgagttcacattggatgtcccgtgagaaaggaggataaagatgaaagagtttctgactggaagctatttgggcttatgcacttggcccggagcctgagctgtctatc

SEQ ID NO: 301614 - DNA, 1888 bp, Cannabis indica
ccaactgtccaaggaattgtgcgaagaggtcttaaagttgaagcattgattcagttcattcttgagcaggtaagccatattcctatataatgatattattattgagccttatatatattatgttgttggatttctcatatttgactagtgtagtattattatatgtggattaaggtgactcgagttagaatcatttactgaatctgaatgttgatatatttacagggagcttcaaaaaatcttaatctcatggagtgggacaagctttggtccataaataagaagataattgatcccgtgtgtcctaggcatacagctattattgaagagaggcgtgtgttgttgaccctgactaatggacccgaggaaccatttgtccgaattattcctaggcataagaaatacgaaggtgctggagacaaggctacaacatttacgaagagtatatggttagattatgccgatgctgagttaattgcagcagatgaggaagttacgttaatggattgggggaatgccattattaagggaattgaaaaggaccaagaaggaaaggtaacacagttaacgggagttttgcatctcgaaggatctgtgaagactaccaagttgaagcttacatggttacctgaaacagatgagctggttaaactctcattgatggagtttgattatttaattacaaagaagaaggtatgtatgtgttaatcaatttcaaatatacttacttggtgcatatttggactttgatgattaagtgattgggtacttttgacttatcattgcagcttgaagaaggcgaggatttccttgatgttcttaatccgtgcactaaaaaggagaccgcagctgttggggactcgaacatgcgaaatctgaagaggggagatgtattgcagctggaaaggaaaggatatttcagatgtgatgctccctacgttaggccctcaaaacctgtagtcctactttcgattccagatggcagacaacaaaccggtttcaagtaaagagcggtggtaagcacgacggtcagtggctcttttcatttcccagtataagttatcattgaggattgttttatctattgtatcaaacaaggttgtgttagccagaatttgagtcatcagacaaagaggtccattgatatgcataaaatacaatttgcacagctgccacttttgatgtcaaacatcatttgaaaagttttgttagtttatttatttattttttttctgaatctgcaagcatgaaacagtacctattgcattacctttgcttaatttaaaattcatcattacatgttctcaagactaaagccaataatgttcttaattaaattcctcaacttaatatcaatacgcatttgagctgtcattctcagcttatcattttttttactcaatatttttttattattaaggaatattagtttaaattatttatgagtcattttttattaaagtttctcatttatttgcaaatacccttctaaattataaaattaattaattagttaatattggcttaaaagattaggttgtgggatgggtggggaagtaagaatattttaagagctaacaacatgattgtttgcatctgaaattcaactcttaaattttagattgtaattgaaatgcaaatatatattattaggatagcaataaataaaaaaaaacaccagtaaataatgtatgtatgtagtcatccaaatctgttaattgttgaaatattttcaataaatgaggcaaagacgccttatatatagctaatgcttcccctaaaatcaatcccaggtactatttgatgagacacattgatgattttatgagggtaaatactattttggaccctctgttttacaaaaattatcaattggaccctgtgtttt

SEQ ID NO: 301615 - DNA, 2829 bp, Cannabis indica
atattgttaacggctatatatttgatcgtcgcgaatgggtaccacatagctttctttggtttttttggttaatgtatcttaaagaagagagaatagaactagttcgcatctcatttgcataaatatcgtttatgacataaacatttaaacaaagtttctagctcttaaaatggccaaaatcgttaacactgaatcatgatgcgtttactgcagtcaagttgaatgccaatcgcatggttgttgggactcttcgggggttcgatcagttcatgaatctagttgttgacaacactgtggaagtaaatggaaatgagaacaatgatataggcatggtggtgagtccctaatttcttccttttatgccttttctgttgtcattttatagcttttttttttggggtgataataaacttgaccttacgggactgatataacatttaccattacaggttattaggggaaatagtgtggtcactgttgaagctcttgaacctgttgccagagcacagtgaggtgtgtttttgtagttggtactagtaactatatgaattcttggctggtattagtttggacatataactgttgttatgggaagaaaaatgttttgtaattttggatttgatgttaattagttaggttcgttatacaactactcctttcccatttccagcatttatcctggtattgtactttgaatcagatgaactagctgtgaattcttacttggcttgtctccaatcacaatctctaaatgtaattgatgttttcttaaacgagctttgtttcaaagcactcttaagtttacttctccaatttaatatttattctgagtcaaattattctagattgggcaacaggtttcacgattttgcattataatccattataactaataagttttatagggtggaagaagaattatgaagataaataatataaatgagggagaggagagtagtaatccctctaaactgtttggtagaaaagtggaatgatagatcactattcattcatgaaattactaaattaccttagtaagtatttcttaataaaataagaatggaattgagagtacttctattaatgtaaggatttaaaattgtacacatgagcaagaggaattgacctatcctcctacttaattcccccatttcctttcgatccttacacttttaccaatctgtgtaaattaagtgctgcatatatagtatcgattatgaaattaataggcgtgcaatcttatcgagtctgtctgacatttcccatgttggaacaaaagagattttggaatttttgggctctggtgagacattgaatttccattttattttattttattttttgtcatccaaattgaaagattggataagatacaagaatggaaatctctcttttcttaaacacaagacataagataaggggttcatttctcctttatttttctttagcattgcaacttttaatttgaatttgttacaaactttctactttctatctcccaacggttgtcttctattgaacttaagctatataaagtttcttttgcagtgttttttttcttttgcagtttgataccaacagatcagctggctcgatctttcttattttttttaattatttccttagaagagataaagattgatgataataacgattgtcacaagtgcaatagtagtactggaccagttagtacaggaagattctttgctttattagctgtggtttgaggctttgagcttgtactaaacattgtttcttttgcagtttgaggtaacggtacatgttatgtatgtatatatgattcaaagctcagcttggtcattgttctgtggacccagcattagttcctttcctctttcgttttaaagtttatgccaaagattggaaaacaaattaaagttgtaaattgcttgttaacgttgttcacatgcttcaataaaataaaataaataaaaattaaaaaaaaaaaaaagaaaccaaccgttgaagaaattctttaaggaaaattattctagtgttgaattgagtgagtaatgagtagtactttaattttgccctaatggctctaattaagtgcaaaattagtggtataatatatactttttctcaaaaaaaaaaaaaattgtttctctaatgtagtattaaaatgtaaagctaatgaccattttttttttttatggaaaattaacatttattttttcttcttgaataaggaaaattaacaaatttaatacatgctaagatatttaagcttaagacaagtatagcatgtgttaaatttaatagagagagtcaattggtcaagattatgaataataggtttggcagatcgattacaaaatttaaacataaaatacgacaaatattttgaatgttttaaaataccgtccaaaattatgataaacaaagaccattcctactaagaaataaagccactctttaacaatcaatctcaacttcttcacggtagcgaagacaaagatacaaaaggagcccatggaggatgcagagagcttcaactacgagccgtgtgatggtcctaaaagttggagtagctgccgaggccaaacaaacacccacgtgatcatggaggacagccccatatcaagctagtatcgacattgtcacattaagcttattatggctatcaaaataattattttagcttattatttggtattaattatagattttttaattattttaatatcaaaattaattagaaagcttcgttgtttttatatatttttcaattaaatatttatctataatttttaccatcctttttggttaatttgaatatatacacaaatagagctaaataaaata

SEQ ID NO: 301616 - DNA, 4649 bp, Cannabis indica
gcatagaaattcaaatttttcttttattattcgccatcggactaaaatctaatagtttaataattacacttgggcaccgaagtgttaacttgtccttgaagcggttgtattgcgtgataggcaaaggttttgtcaggatgtcagctatttggtagtgagtgtccacatatcgaacttcaagctgattggcaaggactctgtctcgcacaaaatgaaggtctatttctatgtgtttaatgcgagcatgatagaccgaattcgaggccagagatcctgcaccaagattgtcacactatagtatgggactttgagggagattgattgaaatctcagtgagaagagattggatccaaactaattcagcagtggcaagagctaaggcttgatattcagactccgtgctggaacgagcaacaacattctgtttcttggagcaccaactgatgaggttttggtcaagaaagacacggtatccaaatgtcaattttctgtcatcatagctgctaacccagtcagcattagtataaccttgaagatcaaggtttgtggcaggggaaaaagaaaggccaaggtgaattattcctgccatgtatctcagaacccgtttgcaagcaccccaatgagtagttgtaggagatttgaggaactgactcaatttgtttacaacaaaagagatgtcaggcctggtcgtggtgagatactgtaatgctccaatgatgcttctgtattatttagcatattcaagtggttgccctgagttgagtgacagctttgatgttgcacacatggggggtggactgaggttttgagtccatcatgtttgttctgtgtaaaaggtccctaatgtacttttgttgtgtaagatagtaggtgctgccatttttgaaagcttcgaagccaagaaaatagtttattgtccccaactgtttaagatcgaatttggcatggagattttgtatcaatttttgtatctgctatgtgtttgctcctataatgagtgtgtcatcgacatacataagaaagagcacaagttggccaataattttgctgtaaaatagacttgtgttagcctttgagttgtgaaatccaagctacaacaaatgagaattgagctgatcaaaccaggccctaggggcctgttttaaaccataaatcaccttgtttaacttgcagacatagtgaggataatctttttcaacaaaaccctggggttgtgtcatgtacacatcttcagtaagttggccatttaagaacacattgttgatatcgacttgttgtatgtcccatctatttgtggttgcaagtgtaaacatgattcgaattgtgcatggcttaataacaagattgtatgtctcaaagaaatctaccccatgtgtttgctgaaaaccactaacaattaacctggccttgagtttgttgacagacccatctgagttgtacttgatcctgaacagccacttattgtgacaattgtcatgtctggtgtgggggaaccaatttcatgttttcttattctttaaagctgtgaattcatgattcacagctttgttccatttgggatttgccatagcttgtttgactgtggttggttcttattctgtcttgacatcagccaagtatatttttggcttatagatacccaccttggatctagtaaccataggatggttgttttgatttggttctgggacaggtgctggtgtgggcagagatgtatttgagttagggttgtgggagacagaaggggtgtgcatctggttgatagtgggtgtatgtgatgaatgagatgactcagaggctgggtttggagtagacaaaaattcattggactagacatggttaggggaatttggagcttctatgtgagggttatgagtgactggtgtgggagaagggggaagcagcgatagaggaagttggtaatcatttgggtttaggatagtacactgtggaacagatgtgggcttgttgttggaaaataaagctttgtaagggaactcattttcattaaattgtacactcctagcaacatagattctaccacttgggtgtaaacacctataccctttttgagtcatactgtaccctataaacaggcatttggaggatcgaaatgacaccttgtgattttggtaaggtctttgtaaggggaagcaagagcatccaaatattttgactaaatcgtaatcaggtacaattttatatagtttttcatagggtggcaaatagttattaatgggggtaggcagacgattaattaagtaagaggcagagacatatgcctcccaccagaattttaagggcatatcagctttagctaggagagttaagccaatatcaaccacatgtctatgcttcctctctattctcccttgttgttgatgtgtatggggacatgagtttctaatcacaattcctttggcaagaaaatgatctttgagaggggagaattcttttcctaagtttgatttaatgcttttaattttaacttgaaattgcttttttacaaaggcattaaactgattgaacaatgtagtagcttcagactagttttcataggaaatatccacacaaatttactataatcatcaacaaagctaagataatatttgttaccatttatggaagtgtaaaatgagggtccccaaacatcagtgtggataatttgaagaggggaagtagttttatttatagtcgatttgaaactaaattgatgcatttttcctatttgacaagcatcacagaaagtgacattcttacatttgatattgggacagacatgagataaaactttggataaaattggcttggatggtgaccaagcctacaatgccaagtggaaactatattggacttatctaatacatgattactagtagtagtacaattgaaaattgagggaaacctgctggtgtgagcaggagtagttttgtttgttctagtttgttggacagggacacttgagggctgcacttggagtttgtatagaccatcattaaaggaaccctttagaataacttgcctcattgtcttgtccttaataagacaacaaatatcattaaactcaagaatgacattattgtctttagtgaactgagatatactcaaaagatttttggtgacattagggaccatgtaaaatatttttaagaatgagaaattgattttgatgtgtggtggggacaagattagatccaatttgaaaggtgggcatagaattaccattacattcaagaacttttgctttgcttttgtagtccacatggttttgtaggttttgagcatcaactttcatgtgatttgtggcacctgtgtcaagaaaccatgcaccagatatatcacttgtggtaggggtttagccaggtttgcttgagggttgtttcactggtgttgctggattaaccagatgatgagggacctgtaaaagtgatatcaaatctatggtaacaattcggtgctgtgtgacataccctgccatagagttggcacacatgtttattgccacgtccacctcaatttgtcgattaaccacgacctcctctgtaatttcctcttaaaccacgtccattgtatcctcctctgtgattgttgcctatagatagatttgccatgttagcttggacattggccagggcttcagtggtgtgttggttaatcctgagttcatgactgtgaagcatgaattgtatttcttgtaaactgagaggagtttctcgacaggtgaggttgactatgatagcttcatattcttggcctaaccctccaagaatgtataaagcaagatcgtcatcagagatatgttgatcagcagctgccagagcatcagcataacttttcatctttaggaaagtcttcaattgatgaggatcctttcttggtggcatggagtaatctatagattttcaagactcgagctctgaatcttgaagcaaaaagtcttgagaaaatgctccagatctcagaggaggatcgacaattgatgatgtggccaagcattggttcagatacagaattcattaaccaatgcattagaaattgatcgaatcttaaccattgaagataagtagggttggatgcattaccttcaagattttgaggcgatgggggaatcgatccaagaatgtagccatccaagttgtaagctctggctgctgcaagaactagtgatctccagaaagtgtagttgttcctgtcaagtcaaagattgaacggaagtagattgttatgtgggagtcctgcttggggagcctcaggtgcaggagggatcggttgagctgcgatcggaggagcatcatctccatcgaattgtccaccattgttggttgagtttgctcctatcgacgccatgaaagctttgataccatgtatgagagtgagagagagaaatagagagatgaaacgaaatgaaatgaaagaggcctactcaagaatgaggagcaaaccactatatatattggatccaatgtacatgagattgatgcaagagctggaaaagaaagcagctgaagaaaagttagttataactaactaactagtaaaaataaaaaatagaaattataactaactctatcctaacaatatgtataaagaaatgtttaattttattttacattgtatgtagaaaaaaaaaattatatataagaatggaa

SEQ ID NO: 301617 - DNA, 1887 bp, Cannabis indica
acataaacaatcactgaaatagtaaaattaaatgaaattagacaaaagtccttaaatcaaacgatctcaatagtttagggggcattttttacaaccttaaaagtttatggggcatgatttagtacatgtcaaagttcagggagcaaaaattctaattagccttcttcaattatgaaatattcatgtcgaggtagtggtgcctcgagcatgtttatcacattcattgactttttctctacgatcttcaccgtagtactgtaacactctcttgagtctggttggactcttttatttgatcctacacctacgggtgaaggaaatttcatcgtgagatggtagatttatgttggtatctttatctccttctagatggggcgacctatgactgcgttacatgaagactgtaggtcgattattatgaaatctatcatagacttagcggtaacaggtgttgtaccaagagttatcggtagtttgatcattcctttctgtttgattgtatcttcggtaaatccgtagatactcgaagtcaccaatttcaaatccttttcatgttgtaacccaatttgtttgaaagtatgtaaatttaagaggttaacagaactactattatcaacgagtatgtagtggacattgtcgccttcaatgtttaagactaaaactaaagcattagcattgggatgatgtacccatcttgcgtcactttccatgaagtgatgttgttgcactctttcttgaaaagctttgttggcctttcactcaaattgttcacatttgtgagtagtttctccttagctttttttgtgtactaccctttgctttctttgaatccccaccaatgtgcggtccatcgatgatggttagaatattttgaggagctctagagccactcacatctttagtttctctgccctatctatctgggtagtggcttctccattcttctaatattggccaaaatgtccttgtcgaattagttcttcaatttcatcttgtaaaaaccaacattcgagcgttgtatgactaatatcattatgatacttacaatattttttttgggtacctcttattgaaatttcctctaattgggggtagcttcctaaaaatgccttttttttctcttttatagcatagatgtgaccacgtgagagacaaagctccatatagttgacaaattgcggacctcctttatgctttaggaaggtttctttcctagttagggacttagtaaggtttaggctttgttgccttttgggactgcatatttttgggatgcgccgaggattgcatcccttagaacttctagattgggacttcgagaccgtgttcttggtactggagacttctgtttttctttacttttctctagttctgctagcgatttctcaatcctcttgtgaggttttgctatggcaaagaactcaactagggttcctggtcgtcgtgcctgcaattctttccaaaagtgagttatcaacaacacacctgtaataagcatataaacaagcaaaggctctggggccttctccattttggttacttcggtgttaaaatgcttaaagtaattttgtagtgactcacctacatcctgcttaatattttcaagggttgtgtatggcagtttgtatgtcatggttgcatgaaaattgattagaaatatatccacgaatgtctcccacgttgaaatgaatgctttaggtaattggctaaaccaatcatgtgcgttgtcttccaaagttgcagcgagtatatgacacttagcaagttggggtacctgatcaacttccataattgtattaaacttatcaagataattgacaggattagtggtacctttatgttgggttttgtgccctaaataaaaccctttacaatctgattagttat

SEQ ID NO: 301618 - DNA, 3571 bp, Cannabis indica
ccataaatttggactctttaactcatatctccgacttttctttactatactaggcttttataaagatggaaggagatggtcttctatttgaccatatcgcaaagagttcaaatcttcgtaaaacggaaaagaaataccaaccagacatcgcatgtgtcttagctcaagtagtttgatcgaggtaaatggtttcccatcttctgtataaacaatatgttgagaaatttcttttgcatcatgtttgataatctgcctttcttcatctggtaatattttttgatcattttctatgtactgtcaatcaaaattataatactaaacctagtgatacaaattgtcatgttaaaccatgaattacagattagagaaatgtcgtttgtgtttgagatgaatcacaaatctgtgaagcggtatctggagaatatcaacagaaataacaaacagaagtttacaaagtttgaatggtcatgagccaagggaaatcaccaaaaccaaacacagaaatgtcgttcaggtttcttttgtgaattttgtattaatttttgtgttaacctattatattagcatattcctcaactccctgattgttgaatgtatataggcctttctaacgtaattaattcatagtatgtacagtacagataggtattgctgttgttgttgttgttgttgttgttttttacaccctttaattttatctaaagaatatagtatctttatcaaattgaacttcacaataaagtaaaatatatttacctagttccataatgattgaatcttttgggaataaataaatttctattttatttagtgctaactcgtttataaaattaacatgactcagaggctacatctctgaattaattgagagccaaacagagtatcctaagctaaaaaaacttggctttttagcattaatttctactaacggcagaaaaaaatggaccaaacttcgatccatattaatggcatgaattatgaatatgagagggattcaggcttttatttaaataaacttcattactacaaagcatagcttacaagatgaaatggtagtaaaatagtgtaaatacaacaagttgtggttgtgggccattctctattaataattaggttgcatgtgggtttacctcttatcactatgttctatatagtacatgtctctaaaaaatgtaaaggacacaaaaaatgtacgaaaaagaaatggtttaagcaaggccattcattcactttagcttgtagcttatgtttcattggcagatataatagggattcttttcagctacatattaaaatattacacataaatagcttaaatgtaagaaaaaagaattagagatttacagtgaaaagtttgtactcttcttgtccttaactgatgagtgctctgtttagtaatatgtaataaataaaaaagtaactatgggtaggggtgaagatggtgaactgaccaaaaacttaatcaacctgcaaagtatggtagttaattttattttccttaactgcaccacggataatgtgagttttgtagttaaatggatattctattcacccctaattatagggttgataaggagaaaatatgtaaaagaatatgagcttaatttagtaatttacttatattgtgaagcacttgagaggtggttagacttagaacatatgagattgagaagcacctaacaagaatctgtgctgttgattgaaatggagtgtggcttttggaaaggttgggtataattcaaagttggctatcaagtataaccaatcaacaaagagtattatttagtgttttttcttcacacaaataatttttattgttcaaagttgattacttacattttcatttttgttactacgtcaagggttggtatttatcctcatgtctataaatcattatactcttcttttactttcatgcatcatatcaattttactgttcaaagatgattacttatcttttcatctttttactatgtggaagtttggagaagaaactcccatgcttataaattatcacactattcttttactttcatgcatcttcttctttcttcccatgctatctctttttttctttgaatatcaatcattggacatatcttttggaggtcacagtttatctcctcacttttcacacaacatgagtcctattagcgaactaaaagaactccctcctaacgctcttttgtaccttaacgatttgcgaaataaattacgttgtttatagagcactctttttccaactcagaggatgttaatcgaggaatgatcatcgagtgtcatgatcatttatatcaattggacagcctaactgatcgtgttgaggagctatctttgagaacattctttcttagaaacgaactactgcaagtgtcgattgtcatttccagaaggataatgagatgaggcgtgtccttatcgagcatgatagaaacatgcatcttctttgcaaccaattcaatagggatgtagaaaagttaaaaattgagattcaaatatacttagatgctagacatcttgtctcattaacatctcctagccttaatattttgtactttgatgcattatattaactattacatacattttttgttatacataagtaaatgtttagctagaactcctacctaattgtcacttttttcagtgaaaggaaaaaagaaagaaacagcgaaatccccaccaaaattttcttttttatttttccaactagtgcataatatatgtgggttttaattgttttcttcatcaccactctacactactcattatgattttcagtactcattatgattttcagttcatcaaataattatgttttgagttttcaactcataaccttttttcaataaaagtagtgtttattgaattgtgaagttactggtaaaagaaaaggaggtgtcttcattcacaaatgaaaataaaaaataagaaaaggaaaagaatctgagtttagagagcaaataaaaaacaaaaggacaaaagacaaagtgtactctcttcccaactaaaccctgctctgcttcacaattacattactctctttctctttcctcacattggatgaatcagtactatcttcaatcccaaaggactcagatcttctcacaatcaaaacaattaattaaattaaaccaataatcaattcatttcatttcatttaatggtttaacatggctcacaattaaaaataaagaatcaacaacactcaacgggagtcaagttactacatcaaacacacctcactatatatcataatccaaatcaagttctgttttttttttttaagtaatgctgttttcttttttctttttttgtatcaattattttttttcttttggtattgagtaatgacaaaacacgtactaaaatactataatatggttaattagaattcccacctttaaattttagtatatactaaattatatttttttaaaatttttaggttattgaaaattttcattaaactattgaaattgtttaattcaatgaaaagtatataaaaaatttttaaaaaataaataatttaatacatattaaatttaaataatataatttaaaataataa

SEQ ID NO: 301619 - DNA, 2700 bp, Cannabis indica
tttatttgttggaatgtttgttccaatactttttttttccatttttttttacttggagtgctgttaataacatagttcctcttttggcacttccgtaagagcttttgcagttaggagctgctccaatttgcccagatgatcctgtgccttctgctgatgatttagcagatcagatcattgaagttcttaaccattttaggtaattatttttgtttcttttacttttccatgttcttctttgaatataaggaatttttcgtacttgtattttcaagtcttttaaagctaggaaagctcatgttatatttttgtgcatcaacaagttgttgcgaatgcaagtgtaacttattctctggttatattcttcaggcttggtgctgttatgtgtatgggagtaactgccggtgcttatatccttaccttatttgcggtaggttccctcctctagtggtttagttcttttgttacttcaatgccagttgactaattaacttttctataccgcagatgaaatatagagaacgtgttattggtttgatacttgtatctccactttgcaaagcaccctcttggtctgaatggatctataataaggttttacctcaaaccttagctgctgcaatttttgcattgtatttgttatttttaatttaaatgagattttacacaagttaatcatatcaaacctcttatttgtaggtcatgtcaaatttgctttatttttatggcatgtgtgggttacttaaagattgtttgctgcaacggtatttcagtaaggtactttcattctgtccatcattttctttaacttgttttcctcttcttttgtcggctgagcggtgactaatcttttatgcaaatattataacaggaagttcgtggtagtaccgaagtccctgagtcggatatagttcaagcatgcagaaaagttagtgttcgagattttccttagtaaataaaatataaagaaagatcaagcactttccatatgcattcttggaatttgattcactcttttttacatgcataacacacaattatcattccagtggatggtttttgaaggaataattcttgtctaattcccattatatctttgtttgttcagctgctggaagagaggcagagcataaatgttttccggtttctgcaagcaattaacgggtaatatacttttttttcaagagttgttatctttttcttgggctggcaattggtatatcaaattaacattatctttctttcaggagatctgacattacggaaggcttaaagaggttaagatgtcgcacactcattttcgttggggatagttctccttttcattccgaggcactccatatgactgcaaagttagataggagatttagcgccttagtagaggtatgtcattctgaccgtattgtcctgctttagcttctttgaaatttcactgcctcactggaaatgcatgaattgtggaatagcatgtttttgacaaaggatgggaatataatgtttgtgcaggtccaggcttgcgggtcaatggtaacagaggagcaaccacatgcaatgctgatacctatggagtatttcttcatgggctatgggttgtatagaccttgccagttcagtgacagcccgaggagcccgctcagtccctcctgtatctccccagagcttctttctccagaaagcatggggttgaagttgaaaccaataaaaactcgtgtttcgcttgaggtttaatgtggaacagaagacaggtagatttggatacagtaaaccttttgtgattcagaggtgaaaaaaaaggaaaaaaaaagacttcattcttttttttctttttttgtttgtctcaattttttgtattatttaagaagggtagaaagtgttggttggaggggttgtagataaagaaaaagagaatttgaagggataattatatgtatacacacacgcttagggagcagtaaaatttacattcattcatttgtagtcagtcataaaaggaatcattgagctgtttgtaaattataaaatggactgagaatatactgtttatgtttatggtgacgagcaaccaataatagagagatgaacttcccccattattatttcaagttttgttttccatatccattcaactctcttttctctatgcaactttaatttgcattccagaggattactctatgccacattatgcctttacttgactgctgcctttctttccaaagaagaatatttaaagtcaaatatagagaacatatcagaatggaactcatagaaatcagtactgctataatttttctgctatggttactgttttttttttcctcgtttgtttattgcaaggaaatttatgctccttccactataattaatttctaggagtttcatgtcatttaaaagtgaaaatacaaaagcattgaaatttaaaacaaagaattatataaagaaaacataattaacttggacataacaacagtttttttttttataaagaaatatcaactgcagctcctgataactacaaccatttttaactgtaaaaatgaaatcaacatatagtagcagtgtacataaataataaatgtactcaaaacatagaaagagagataagttatcaaattaagcgtctgaacatctgcaacagcttctattaaaaaacagaaaagaaaaaaagaaaacaatctgcaacagcttcttctaactaca

SEQ ID NO: 301620 - DNA, 1158 bp, Cannabis indica
caccaaggttactattatgtctataaatatcatcttttaatacaaatatatgttgtaactatttaaaatacatatacatttttttctcgatttttttttcagggggggcgactgccccccctcgctacaatgtgggtccgcccctgattgttaccacattctttctcaccaaaacaatactattattagggttttcaaagtaattgcttacatttattgtaaattaatgaagtaatcttcatcttccttttttttttttttttttttttgatgattcaaagttagtttttgttaacattatttgtaacaaattagagaatttaatgttgttaaatttttatacgcaaatatgtatatcgttttagagaattgtcccacataaatcgctacttattaccaactcaattaatttcttaatactatttgaaaagcaatattttgattagtaaattaagtagtaaaataataactaaaagtaaaactaaaatttaagagaattattaaaaatgattatctagagcagtactgctagggctcgatcttaatcatcatcacaactagtgcaatggcgagtcaaggtcgttcccacgaaaaagctactcagggtggaggaatctcagggaaagggtctattaggcaagggaagaggaatggtgtgatttctaagaagaatgggccaacttctctcatttctgttctaaagaccgaattaatggcggaggtccaaggaatcaagctttgtcagtgtctgaagaggattccaaggacaatacggtggaacaaacggaatgacattgatggttttctaatatatcaaacattcgaagatgttggtggttcgagagctcaaatattcaataatgctagtagttttctgagaggtccatcactcgacggtggttgtggtttttcaagagctcaaacacttgaagatgttgcaaaggtgctttctcctcgtgcgacatttagagaaattgctttggagcaggaagtgcaggctgactttgtatcattcttgaaggccattattcttggctataaacagacattgaccgcttgggatacatccactcactacaagaaaatcatcttttgccggcgcattgttgcgccggcaaaagtaacctaactgcaccggcaaagctttgccggcgcagt

SEQ ID NO: 301621 - DNA, 4511 bp, Cannabis indica
aattatatttttcactaatactcttctacccaaaaaaaaagtttttccattcaaaaaaaaaaaaaagtttttttttacaccccactataaaattgtagttgcctcggccagccaatgtaaatactcacttgttgtaagatacaaaatttatattaaaaaagtacttgactagaaatcacacatgtttaataatagaaaaaataaatttttagacacatactttgaacttcattatttaagttggtgatccccactagtcttgattttggttgttagagtttttttttaatttttttttcgtattcttttttacttataatcttatttctttgagtttgttatttacatcatctctcattattgtactgagttacacttcttaaagagatgtgtagtgtagtagtagtagtaccattatatgcatcatcatcaagcatgtaaatttagttaaatgtttttttccttttcgaaagtaaactcattagttaaatatgttatatgcatgtaaatttagttaaaatgaggcaatgttaaaatatcatcaattattggttggcgaataataaatattaattaaataatattgaaaagaagaagaagaagatggaagaaaagtcaaagcatcgacaaggattgaccttaaccaaaaccaaaagcaaaaggaaagagatcagagtgtgaacactgaaattcacttgctccacttagcttaccattaccaccaccaccacttcttctccttgtgagaaaaagtccagagagagagcgcgtaaaaatggggaacttgtacggccagatcagagcgtcgtcgtctctggtgaatcgccttaagcagaaactgagagctggtacctgtgtcgtcgggaatccatggctctcgaagtccagatcttttactacaaccgagggtcaccgtcccaccatggtccacaagcgcagtctcgacattctccacgatccttggttcaataaagtaatattttgttttctcatctctttggttgaatctgtagatattgatgtttgtgtctgaatgaatctgtcaagttttacagatcaagtttgcttgtggatcattattgcgtttcattgttttagttgaatgagttgagttattatcgatatggatttatagatgatagctattgtcgatttaccttcagaaagcttgaatgtgtgtgtgtttgtttgtttggtaatttttggtttctttgtctttgtttgccatgccaatggaaaattagggaacggcttttacaatgactgagcgagaccgtctggatctcagaggacttcttcctccaaatgttatgtctacagagcagcaaattgaacgtttcagtaagtcttctccaaattgttggtataattttgagctatcacgatccaaatgctaagcaatttagtctaaatatgtgcttttaagtaatttttcatggactacttctagtgtttgttgttgtggtgaactactgatgtatattcagaggtataaacgattaatatgctgaacgaacttatgtatgtatgctagtttttaaacccatcgaatttctaccatttatcaactttcgaattttccacaattttgtgaacaaagcttacttgtagaaatctcactgtttacattggtgaaatcacagtggctgatttgaaaaggcttgaagtgcaagcacgagatggaccttctgatccatacgcactggcaaagtggcgcatacttaatcgtctacatgacagaaatgagactatgtactataacgtaagttaaaaggagttcacttcatctattcgaagcttcattagtagccataccaccactgacaagtcattaccgttcacataacactgtcccctgtgtttcttagagaagacactttctactttaaattttcattctccgcctcatgcttaccaggcccatttattgcttttgttgtgattacttctcacttgcttctaaattgtggaaaccatgaattattactatgttcagatatcatattggacattctatatcatagaacatcattaagtttaagtgcacactggtacgggtagttatgaataatcttttttgtaatcgtattttaatcctaatgtttagataatgttatgctttttaatttgacaggttttgattgctaatatcgaggaatatgctcctatagtttatactccaactgtaggtcttgtttgtcaaaactacagtggtttgtttagaaggccaaggggaatgtatttcagtgctgaagatcgtggtgaaatgatgtctatggtttataattggccagctgatcaggtagatctgtgataatatgcattcatgtatgcaatgttccataattacatgtttacatgtttgtacatcttgaatgagtttctatctgaattttaagatttggcatcttgccatttgtatcttcctgtgtttgaagtattttcttacttgtgatatcaccatgcctattgaggcaagctagacaataaaaatgaaagacttctagatatagctgttaaatgggtttggaatatagattaaacgttgtgggtggtctaaattcataagcgagctgttctttcaagtgcagttatgtaaaccggatgcagaggcttgcaaattaatttgtggggtgtcaataactactagggaataataaagttatgctttatggaattctagaatagataaccttatattgggttctagacaatctcgaagctgagggtgcaatattgaaacacacacacatacgtgcaagctcaaaactaagttaccttctcctgcaataccttcatattgtgatctgataatttctattatatcctacttcagttgaatgagtggttagaaaataaatcatttctttggtctaatggaaaattctgatttgcaggtcgatatgattgttgttacagatggaagcagaatattgggacttggagaccttggtgttcaggggattggtattgcaattgggaagcttgacttgtatgtagctgctgctgggataaatcctcaaagggtattttttctaataccatgataattgcaatatgtttctaatgatataatagatcactggctttaaatatgcattatttgaatcccaactacattttttctaaaggatattattcgttattttcttgcaaaatatattttgacatggaaacctttgcgtgatttgaacgtaggtttggattatattataaataattgaacttgttaaaagctacaaggaaaatgtaaaggttaactgagaagtggtcttcccacaaccaaaacgtaaataaatagatggtggagttgtgtaaggattcaagtccaaaactaaataaggattaagactttttgttttaactgtcacatcaccagagaggagagtgaactatttgtaaaattgtttcttattcactctacatcttgtactggatgaaactgtaggtacttcctgttatgattgatgttggaaccaacaacgagaaattgctcaaagaccctttgtgtacgtattacctcttgcattaatgatcaagatattgtgggattttttgtaccctatctaaactatattacaaatgctgtttgtgaggggcttaaaacattttgttttgttatagatctgggattgcagagacatcgtctagatggtgacgagtatcttgctgttattgatgaatttatggaggcagtttttactcgatggccccatgttattgtgcaggtacaataaatctgatagatgtttctttaatcattagcaagaaaaacgctgttgtgtttgatctcttcttgagaaatactaatacattatgcttttaaagtttgaagacttccaaagcaagtgggcctttaagttgttacagcgttatagagccacctacagaatgttcaatgatgatgtccaggttagctacttgctctgcgcaacatcgtaacatcttgtgatacatttgtaaatcaattctatttataccccacacttttatagtttttatttattaattaattaatttataagatactaatctatattaaagaaaaaggagattacaaaagatggtaagttatcatctcatggtacaactagagatgacaatctctaataagctcagaaaagtgaaagaaaattgaaatcttttgtttttaagttaaggatcaaaagtgccatccaaaataattgacagaacttcctctaccccttctacagttttgttattcctttcaagccatatttcccatatttttgtgattgtatttgctctatctcaattcttgttgccaaataggatttccaaaaccttggaactaaggtgggtaacaaaagggatcctgtgtatgatagtaacaacgtttgggtagacacacatgctaaggatgtaatagatgtttttgtactatttacaacagtagtttccatgcagatggttgacctacttttagtcagccatcatttgttattattttttctttcttttgtctgtcttcttttttttttttatttttt

SEQ ID NO: 301622 - DNA, 3349 bp, Cannabis indica
gaaaattttgggttcagatatgtgtcttgcatgccttgattttattgatgggatagattcaattttatcaattaacgagacaatcattacattaattcctgaggtaaaattgcttactctaactagtgaattaatcaagccattagtttgtgtaatgtgctttatgagattattggtaagatgattactaatagtactagagaagtgttgaatgacattatttgtgatgagcaaagtgcctttatctcagggtgtcttatttttgacagcactatgattggttttgagtgccttaatgctattaaaagacataacaaggaccgaaaagagtttcttacgtacaaaacatatatggttaaggcctatgatcatagagttgattgggcttttcttcatggtatggtggaaaatttagggatcatcatgggtggattagtttgattatgcagtgtgttttgaccatgacttatgcgaacaatgtaaatggtgatgtgattggcaatattatttcatctcggaggctcgagcaaggagatctcctatctctttttttgttccttgcttgtgttgaggggctgacttccattatcatacaaaaaattaggttaaataaaatttctagtttaacttgtgggaggtgtggccctatgatatccaacttattttttgttgatgatagcttgtgtgttctagaagccaatttggaaagttgtactcgattcaagaatattctattgttgcatgacgttgagttgggtcaactagtgaatcttaccaagtttgcagtttgcttttctccctgcatgcctgatgatcttgtgcgtcgttggctctaatcttaggagtccttttggttccctaccatgacaaatatttaggtttatcttgtttcgcggggaagagtaaaagtgatttgtttaagtcaaccaaagataggatcttgaataaacattttgagtgtaagtccaagcctttttcttcttggggtagagagattttgttgaaatttattatccaagctataccctagtatgctatgagtttgtttcgaattcttatggaaattattaatgaaatccatagtatgtgtgcctatttttggtggggtggtaatattgaaatgcattgctacacttgggatcatttgtattggcacaaattggatggcggtatgagttttcgtgacatgttcttatttaatcaatctcttttggctagcaagttgctcgtctcaacaatttccatgattccttggtgacgcgagtaatgaaaagaatttattttcacaacagctcaataactgatgtaaggaaactaaaaggtcatcgtttctttggaaaagtatcttttagggtgtgatctttggaagaatggttgtcgttggttggtagggagaggtgattctattcgtattttgatatggtacaaatgcctccaaggtatgtcctatttgttttcaaaattatgaaattacattagatttcttgtagttatggccttcccttaaattaattcgtcaaggatggggtttgtaaggtttaaatagtttgaagatggcttccaatttttaagagcttctgattggtgttaaggatttctttccaaagaagaagttgaagaaatttctagctctttgttagaggatttggtatcgttataatacatttgtgcatgccaataagctgatttctgatgatatggtaagcagttagactcttagctacttatggtgttacaaggaagcccaatgcttcggtctgccagtccccgtgagtttgtctctagataactctagtaacagagggagggtgggttttgagttgaatttgggagaatataatatgtttgttgatggtagtacttgttttgagcaatagaggattggcatggaggcgatggtatctcgtcaaaataatggtcttatgtttagctactactccagcaacagcctttcttgaacctcacgtggcggaggcttctgcccttctccatagtcttctcctctgtttgcggttgggttatactcatatcattatattttttgattgcatgtgcctggtgaagtttctctccaacaagataaatgtctgcaatgagtatggtattgttattaatgatatttttttatgaatgaaaaaatcattttctcatatatctatttctcattgtaactgagctagtagtgttatttctcattctctagctaaatggtctctttctttagaaattcttagagtttggtagctgaattttctacttagcttactttaaaaagactatctttgtattgatctcaccatccatttggctttggacctttttaatggaattattcctttaagaaaataaaaactaataataataaaaataaaaaattaataaataatcctctctctaatctcccttatatagtacaaaaaaaaaatatctttatatgttttttttaaggataaatactattttgaatcctctattttataaaaattacctattagactctctatttaattaaataataatttaaaccatgcattttttgaaatagtacaaattaccctgaactcaatttcttttcttttttaatataaccaatctaaagtgagtttctaccacgaagagatgtaagattaaaaatataatcaatctagtcataatactttcatttcaagttattactgaattttaatttaacgaaaattaaatttaaaatttaaactatcatttaacaaaatataatataatttttataaaatataaaatttaaaataatatttatatttcttcttacaatatgatatgtttcaaccagctcatatttttaataaaataaagtatggcatgcaatcaacattttaacaccattttgtttttaaagatctttaaatagcagaaaaatatttttactatttactaggttcatactgaattgcacataagtatatttggtcaagtcaaagaactgagattccacagagacaggagatatatcatagatattatatggggactttggtacaactcaaacccaagtttggacccaaagaaaatatattaatacttgtgtaggataaattcacacctactcacattgaccaaataaaatagtccatcatagtacaataattaattagagaagttgcctagtactactgtctgcatgttgccacgtcattcattaccaatacagtttaaacatggtagcattagaattatattttctgatccaaacaccaacctaatattacttagccaaaaagaataaaacataaaacaccaacctactacattgacttataatcttttttttatatacatataagtgctgtttggtaatacttttattttttaa

SEQ ID NO: 301623 - DNA, 1568 bp, Cannabis indica
ctctctttcttatccaacttaactaaggactctccagatgacaaactggacttcaaacaacaggtataagtctctaacatttggcttctcatattccaaaactatttaaaatctgatttgcaattctctttttgttgcagattaccatttggtggtcaggtcttatgcgtggtgctgtttctatggcactagcctataatacaggtagatttgttatttttttttggttatttactctgtcttaacagattttggtgtgagtacttctgttgtcaacctaagacaaaacaaaataattctaaacttttattcgtgcagtttaccagatcaggccacactcatttgcgtgagaatgcattcatgatcaccagtaccataatagtagttcttttcagcacagtggtaagacacattttcttatggtaacaagaaatcaatagaagaattagagttataacaattgaagttttatgtatgcaggtgtttggtttgatgacaaaaccaattgtgaagatttttctccagtgttcaatacatgaaccctcctctcctagctcaaaatctttaggagtaccattgctgggctatgctgttgatgatctagaagccgactatcaaacttccagttttaacatacctcgtcccaccagtttaaggatgcttctaagcataccatctcacactgtccaccgttactggagaaaatttgacaattcttatatgcgtccgattttcggtggccgtggttttgttcctttattcccaggttcgcctactgatcctcattaagtgtgttcagtgcatttcatcagtacagttttactcaccaactcacaagtcaaagaaattttcaagaacaaaacaactctgaatagaagaaaagcactaatttttggtttgtgtatagatgttaatatagggtggagtgggtataattctatacgaaaaagagagaaagaaaaagtttttgtttgaagtgatgatttgtttgagttttttattgttatttttggtgtgtgatatatagttttgtgaggagttagtagtctttcatgtattttttttttagttttgtgttattggttttgcaaaaggttgattgacatatattctaatatgagagaatggagaatttgacatttgtttgagaggattagcttttaggaatttgacatgttagtgtcagtaaagaaaagaagatgactacaaagagtaatcattcatgtcttccaaaaaggaagtgtaggaagaaaattattactaattaaaagtacatagttatgaattgctaccagttcatgcttaagcatttctctctctttgttgttcattatgatttagtaagttcagcatgagagaaagagattttgaagtgtcaactctatgtgaccactcaaataagtttcctcagcatttctcttaattttaacttcaatcaatcaccgactaacaagaattaaaatactagcacttccaatccttaaggactcatttggtacgccggataagagtcatattgtattaaataataaataacaacatgtttggattaagcaatctattgtatt

SEQ ID NO: 301624 - DNA, 2385 bp, Cannabis indica
aagatatccaccttttcaaattacatacaaagtttatactataaaagtcacattagtgtgtcatggaatgaaagaaatccagtttacaacaataattacattattctatcatccaaaatttgacagcagaatatgagcaaggactttcattaaaattaagttttaagtataccaggaaaatttaggagactgctgctctctctgtcccaatcatgttgttatgataaatttcctgcataaacaaaaatcaacaagtattttctgtacaaaatgctctttgcagtcaagtttcaatgagttcaaaaaccatggctaacacaatcaatagaaatgtctgactcctaaagaccgttctttgattggaatccatagctaccatcttgttccaaactcatatcataaacctcagacttcgactcattcactttgctcctattgtacctataatcattccttcctgaattaggattatgcaatctttgcttcctgccaaggctctgttcagagccattcaatttgtcagacccaaaccttgttcttctattccctttcttcttcctcaatccaccattgttttgctttccaactttcccattaacctcagctcgttctaaagtacccttgttcgaatttgaactattctcacagttttcactcaatttcttcactgaaaaaccgtcttccaaatcatccaagctcttagccccatcatccaattcatcgattcttcgataaggtttcaaactatgaacaaccccttttgggaaaaacctcgcggaaggtaactcatcgggggttttgaacaattgaggcccgtctttctcactccacatatcaaacccacctggcttttgaaaccgatcggccaacaccttgacctgttcgtcggcactgacggagaacaagtttggagcagccctctcaacgatctcccatggccgttctagctccgatacggcggctttgagctcggctcgcttgcgcatctcgtaaatttggcgctcgcgacagagccttgctttgaggagctgcttggctttcttcgcctgcatgcgcttccactgccacttcgatacaccaccgggatatgttcttgggcctccccccattcggataatggaggggtttggggtttggagagagaggttagagagcttgggtttgagaaagagagtgttgggacatgttaaagacgtggaaaaggagaggttttggagatgggtttggattgaaagagacatgttaagctctagagaaccaactatggcgatatagttagggttttgcagataaacttgcgaagaaggagaagaagagtacctcttgtctggtctgtggtgttagaattcttcggttttcggattaatccattttgatttttgaaaagtgattttggaccccaagttgtgtttttcttctccttttggtccggccttttaattttaaatattaatttctttttaagttaagatgagaactctacaaaaaattaaggataagtatcacttcaaacatgattttctatcgaactagtaatagacttagttagttagtgtaaatggtatagctcacgcactaaatctgttactagtttgatagaagctcgtatttaggctgatgcttatcctaaattcgtgttcttataatagttgatttgatttaatatattttcatactttttttataaaataaaaaactgtaccaactgtttagaacaaattcgtgatgtttctgttaattttgttaaacggtctgcaaataaagttgctcactatttggttcgagcatccgattttgttgctaatcgtacccttaggagcaataatatttctactgagttgcttcatataatcgttaatgattgcagttaaataaaattgatgaaatttcttaaaaaaaaaaaaaaaactatactgactaaataacattgattcaccttactcatataattatttttgtgataaatttaatcacattgattcatctcacataattttaagggtaatttataaatatatggggaaaaaatattattttacattttttataagtataaaacttattgcacaaaatataatagctttacataaaaataaaaattaaaagaatgcaaactctaacaaaattctataaataaagttaacatgatttctaagaataaatatggctagaaaaagttatcgaaaaagttatcgagaaatttttttaaaaatattgctactactgaaaagttatcggattaatcgaaaatgtgatatgtatttgtcacaatagcctgaaaatctgattagattaatccaaaatgtaatattttaaagtagtacttttttaaacaactttttcgcatagaaaaaaaacttttctctcctcgtacggtaaccttac

SEQ ID NO: 301625 - DNA, 3204 bp, Cannabis indica
cgtggtcggtattcgttctcttcacgattgtggttcctggcatttcccattttgtcctcgcttgttccacctgcgatagcaagcacgataggccatacgacagcgtcgttcagctctcgttgagcagcgtcgccactctgtcgtttgtgtgtctctctaatttttataggaagtatggacttcgaaggttcttgttctttgataagctttggaatgatagtgagaccgtttcgcagaggatacacatcacaactcgatgtgagttattctttttatcttcatctttatctttttcttttctttaatcaaattgatttatatttatttatttatttgtttgtttttaaaactacaattgttctaccgaatcgccttctgtttttctttattagtactcttttggttatggtaactaagaatatttacaattatatcattctttacttttgtcaaatgggagtgttggtcctactttcaatcaaaatatattaacttatttgatttaggccaattgcattgcatcatcaaccattaagagtttgactttatttcattataaggctataccaaaattaagtattcgtttttgaaatagtgcaatccttcacaagaataatggtgttatataaaagtcccaaatttatgagttttatagtacaggacttcatttcctaccacaaaaagaaaaaaaaaatctcttttattaatgttgatctgtggttcataataaatagcaataataataataataataataacgtgaccgtgacaaaatataatacgaaatctgtctactgctcttttatttttattttttactcctttgtatttttatatcttgtcatatgttaccgacttatgtctgaataactttcccctgttagaagaaagctttgacattatgaagtttgaacagttgtcaccactcactgtgtggaggaggcatccattatgattgttctgtataatccacatttaatttgctaattaatcatatatgagcatatgacaggtcattcttagtgttagcttatctctaaataactcttagaatctaagtcattgcaatgtagaatatttctttgattttccttactttagtttatatcattcactagaaggttgcaaagaaagactgcctaccactataaaaaaaagtgggaaaaattattaaagtagacaaatgtaaaacgtaggaagaacatagataatgatgaattaattgtctgtttcgatccataaaacgacaaagaaataaaaaaaatattgttttaatatttcagtaatgatagtcagatagtgcacattttgtcgaaaaatatcacataatctcatttaacttttaccatcatattagctaagaaaaaaatataaactgtaattttcatatattttaacttgaaatttgatctgttttagaagttaaaaagttagcttaccccaattttcacttgttgatcatggcagagatcactaacgattcttggcatatttgtattaccgtgcttggtagcagagactggatacaagatatggtggtacacctcaggatcttcacaaatcccattcctcggtgatgttgtggtgagtgataccgtggcatgcataatggaggtcttctcctggttctatagaaccacggtcatcttcctcgtctgcgttctcttccgcctcatatgccatctccaaatcctacgtattcaagactttgctactcttttccatgttgattctgatgtgggctctgttctctctgagcatctccgaatccgaaagcatctcaggatcataagccaccgtttccgagtcttcattttgatggccttgatcttggttaccggtagccaattcgcgtcacttctaatcaccaccaaagccaaatccgagcttaatattttcagagctggtgaacttgctgtaagcctcttaacataacaatttgataagagaatccaaatgttgtcataattaatcatcatttttttgttggatgtagttgtgctccatgactctggttacagcagtcctcatactactgcgtagtgcaaccaagatcacacacaaggcacaggcagttacatgccttgctgccaagtggcatgtctgcgccacattggataactttgaagctgacactcctatttctcaggcagctgccgctgctgcccgtgatgtgtttaatgctgctgcagcagcagctgcagcagatgatcaatccgatggtactgaggatgaagctgaaggcgaagaagatgagttggacaatagcaaattgataccagcatatgcttatagtacaatttcatttcaaaagagacaagctcttggtaagttaacaccaacattaattgtcaattacactattttcatgattagcttagcttaatatactcttcttgttttttgttttttaaattttgcagtcacatactttgagaacaatagagcaggtgttacagtatttggattcacattggacagaacaactttacatagcatatttggagttgaacttgctttggttctatggttacttggaaagaccattaatgcattgtagaaaactgaataaaaagtcttacacgcatatcctcaccaatatatttgtattctccaattatggtgccgtgaaaggaacaaaaggggttttgaggttagccactttcgattatgattgctagcacgattggacatagaagaaagatccattttggttaagtgttcgaagagcttttcgatctattggtgcagcacagcttaaataaatgtcgttttctgagtccccttatgctctatcacttataaagtcgttttttctttcttttcgtctttatgtctatcctcccttgtattagttataactctttcctgcatactgtaatattttttaattggtaaataccaatttctccccaacgtttcgcctcaattcatgattttgccccgtgtttattaaataataaaatagacttgttctggtcaaatttttgtttaaaaccaaactgaccacaatttttataagaagaaaataccaaactggccattaagagaaatgctaaagggcactagtggtgcctagtattcttggtctaactaagcatcgagtctcatatagtttaatataataatttttagggaatatcgctagtcaatcgcaacgcaacatgtcgagaaggtgctaactggtgcctaataacaatgctc

SEQ ID NO: 301626 - DNA, 3637 bp, Cannabis indica
ttacttgaaaagatacaacggtaagtattataatatcttaactagcgcgagtgttgttgttccacaatttgggagtactttaaaccacccctttactcttaaattggataggaacaattctccctttggaaaacaatggtgtctgccattgttaagggacacaagtttgatggctttctaacaggaacaaaggtgaagtcgcaggagtttgtaacagtcatgaatcttaatggtcaatctggttttggtgcagaaatgaaccctgactaagaaaaatgggttgttcatgaccagttgcttatggggatggctgtatgtttctatgacagaaatcatagctacaaaagtgatgggtttctctatttcagcagatctatggagagctttggaagctctttatggagcacactcgaaagctataaatggacgagtacaagacaaaaatacaaacattcggcaaagactctcaatccatggtggaatatatctcaagaaaaaataacaataggcagataatcgtgcccctgtaggtgctcctcaccctgaacaatagctcgtttccattgtcgtatctagcctagatataacctatttgcctattattcctcgaattgaggcacgaccatccataacatggcaagatcttgtatctctgcttctagctctttcattctcttgttcatcctttttagagagttggtgagcgaaacctaggtttttcttgcagttcgcatggagcctgtgagtattactcctctcatctcttcgtcatgcgaccttccactatggttgaggggtgacacctttttcctgccttgctcttgaaaaggggttgtaggcgcggtgcctcctaccacaagattcattggttgaagtctcttcataatattacacgatgtttccctcattgcagtcttatgccagtggatagattcacattgctttgaacaacctcttgtattcttgtctcgtgataggccctctccactctcatcctttggggtgctattcgttgatgacatagagttctctacatcaccatgtacgcttgggatcccgtgctcttgctggtggcttttgtacagaatgtgtgaagcttgagttttgcttttaagaatggcgcttagtaccttttgcatgtcggccaccttagtttctagcctttggtttttccagcaaatatcattgcgctcgtcttcatagcggcgagtttgggattttgggctcacagagttgactcgcttctcctttttaaggtgatgtcgtgaggtacctgaatctcgcagtgtttatggtggagggtgccttggtaatgatgggaccctcttcctttttgccccaccttaacctttggtcgtgatgggggtggtaactccgtcgcgttgctcgtccattgggatcatttcatggtgattgtctccttgccttgcttgagatctcgcctactcgcgccctctcctcctacttgaggcgggacaacattcatattttctcctattacttgaggtatgtgaccattgacgccttcttctctaatgacaaatggaggttgcccaaaccgatcaactggttgtcatcaaggaaaatctccatgtcttgaagacagcaagaacatctaggcattatgtatcaattgtgtgtaaagaaatgacttggcttaagctttttgttcccataagtggtagaaaactgttgacggtgagaactcgtcaactaacttattggctgaaaaatcaaactatacttcaagctcagatttaagacgaaaagaaagatgagatatggcttataattgctatctcaaaatagagagaaaatgacaaaactttctattactctcaaggtcaagttacaagaataattttccaatcccttctcatatatgagaaaggggtatttataggctctaatggcctcaagtataaggtggtcccaaggagacaatgtgtcgctttcaggctacacgttgcaggtgaaagaggtggcattgcacttcgtacctttgtctggtgtcaggtggtccccaattgtaggtgtgtggttcctagttgtagaagtgtggtccccagttggaggagtgtggtcctttattgcaagtgtgttatcctcggttgcaggtgtgcggtccccaattgcaagtgtgtggtcctcgattgtaggactgtgaatgcaatataccctcagtcggtcctcacaccgtacaggagtgttgcctccgctatccatacctccttgattttagagtttgttgaaggtgtagttgtacgtttttccattacacgccttgttcgttgattccccctctaacgatatcctctttgatatgcattcaaattttacattcacttctcgtcacacatacaatatacttggtactttgcaacgcttccatgctaaggggcttgcatgcagaaacgtacacgcatgcatgctcacagacattttcacacacacatgcttgcatgcacgctcacagaccttttcacacatgaatgcttaccaaatacaacgaactaaaaaattgaaacaaaaatataatagcagttaaaacaattaaaagataattgaagcataaaaactagttagaaaaaaaaaaagacatattacatatgagttcttgacggcttacaaaattgttaaggcagtctgttagagtgtctgttagagaagtggttgttagttattaactgtcttagtttgttagctggtttttgcttatcctagctgtcatgttagttgttagttcgattgtgttggttgtatataagttgtactcttctctttcataatgaattgagatactctttcttctccatttctttcctctgttttctttctctttctttccctttcttctctttctttggttctcaatttctttcattaatggctagacggttcaatatgttatcagagcactttcctctgcttagtgctaacatggctactcttggcaataacacaacagcaagcttaggccctgcgataatggttctcaagccaatcacaccaaagatattcagatgcaagaaccggtctacttcaatcacaacatctcaattcgtttgaatgaccataatttccttctatggaagcagcaagtcctagctgaaattaaaggaaatcggctgctcaagttcatcaaagaaccacctccaaccgagttcttgacaaataaagatcgtgaccagaatagagtgaatcaggctttcattgactgaaagattaaggatcagcttcttatttcatggttgctatcctctatgacagaaagcctcctcacaagaatggttggatatgacacttctcgacagatttggaccacattggaaaaacactttacactacaagttttatcaaagattctcgaattttgcacgaagttgcagaatttgaagagagggaccttaaatctcaatgattatctgctgaaggtgaaatagattgtggatctccttgcatctgtaggagaaaagcttagtgaccgtgatcatgttgctacaatttataaagggctgccaagcgaatatgacacttttgtcatatcatcgaacactctgatagaaaattacacagtaggggagattgaagctttattgctggcttcaaaatcaagaattgagaaatccagaaagga

SEQ ID NO: 301627 - DNA, 3562 bp, Cannabis indica
aaactgtataaacgcttgaaaaaaaatggatattagaagaagataaataggaaacatgggagagtaagattttagtaatgattatttaacatttaaaaatatttaaaaataattttaaaataaattaaaaccccaaaaagaagcatactgtcagaaatagtgacaccccatgtcaaatctaagctttttgaaatatttaaaaataaattaaaaccccaaaaagaaacacactgtcacaaatagtgacaccccacgttaaatcaaagcttttctagaaaaaaaaatcaaaaaatgaagtggcaaaactcggtgaagacacgtgtaagccacaaagtgttaatgaattttgtaccaatggcagtatactattgtataaaacaataaattaatacacaatataaaagtaaaatatgcgtgtagcagtatttttgaaataaaatgaaaaaagttaataaaccatgtaaatttttcaaaggattcgatatagtgtagcaaaaactctacgcaaataatctaagaaaaacaccatttgaccaatacactgacttgtagactatgactcattaatatccaagaaaaaagtctaatatttagttacattcaatcttttctttagcttaaatcttttttgaatctccgtttttttaaaatcttggtaaacaaaagcatacaacagaacaaaactacagaggataaagagttgtgtaaatacactatggtagtcaattttatgatattgacactatatactttggaatatccaactactgttaagatttatacaaggccaaagaatctctaacctacaaaatttgcaaaatttttggacatgctttctatgctttctataagaaaatgaaatggcaccgtgctattactaatatgtaacaatagtgtaaagccttcccattacaacaatcgattcctcaccttctagttagagtggtcatctctcctgtctttggtcaaccttggtcagataatcactactcaaagattagtttaccaagatttctcagtggtggagcttcctcaaaaaagctccagttaaaagtgaaatgtattaatatcctatctttcaccgcagcatctggctccttttccttcttgaagtttttgccagaggcaaagcatttctcttgggccctggtaatgggcaaccacataatcatctttgcatccttcgttatagattctatcatcattttcataacgaacctttagaccatctttcttcatctccgcaatccagatgcccattgctacatcctctagcttaaacatctgagaaaacattaaaaaacaaaatgttttctttcagattcagaaactactattgtaacttttaaccacaataggacattagaatagaccttgtttttactacaaaattccatgtatgcaaagaatgaagttgctataaattatgcctgctaaaagcttccatattaccttcaaacggccttttttgttcaatttgacgacagcatttgctatgtctcttgagaccacataaccaggaccatgtgcccaaggtgggtaagtatcttcccgccattcctacattaagatagacactaaagtaagacactgcagcattagatttttcatatcaaggcatttagcttggttgccctacatctgaaatgatcaacgtataagccaaaaagttcatctggtcaaccttggaatgaaagcagtgcacagaagcctaactacgaattgaagaaagaactaggaattaaacaaaaataactgaactaatggacactaaggtcatttaccaacattcttttgggctattctaaaaatttgatatgaaaaaaactggtttcttgcacattaaagtatgtacataacaaaatataaatgtatcgtgcatatatgtcaacgttgtcactaacatggtagcatactagaaagaacaaaaagactagtttgttatttgcagtagctcaatcaagaatggagagtctgagtgtagattcatgatcaattccaacttcaattagataaagtatggataattacctcaggactgataaaccatttactatcagtatttcgatgaggccgagaatctgaatttatgagtccataaagcaacccacgactagcgctaattctttttaatgatgatagaacttcatccacgcgaacaaatgcatcatcatcagtcttcatgacaaattttgcagaaacaacctctgtctgtttaaaaatagaaggttaataagaaagagtatggaacatcttaagagaaaggatgaacaaggaagaaaattttaccccaaagatgcaaattcctaaagttttccatgtgatgaggctatagtaatcgacaaagggcatcagttgaatgtctccatatgtttgcgcctcattccacagttcctcatttactattttgtttttatgctgcaatataatgaacttgtagttaacttgacagaagaattatgctcatccaatccaacgataggctacttatgttctttgaacagaacaatttgcataaacaagaaactcataaaatacaaataaaaatcatgttatcatcatcatctaatttttcctttgttcgctctcattttccttttgtgaatttctttatacaattgtaaaaaattcatccaatgtccttgaactatgttgtatgtgctgcaaaagtttccatagagcttactagtttgtcattttttatccaatcaaaagcatgttgagaagaagagaagaaatatggataaatataaaaaacgtgaagctcaccagaccaacaagaaaacgaactgcaactgccccagaccgtactgctggatactgcatccacgttcttcggacagccattctgcgtttaaaattgtttgcagtagaaaacacgccaatgaaaagatcgagtgcagtttttttggagagagaaggtgatttgagtgtttccaaatccattatatgctctgaatcttctgatgtaggtagaccactggctaggacagaaaccaatttcaagtctccagaaattcttacttcactgacgagccatggttctaatgcctgagagatgagaactcagtgagctaataataaattaaggagtgagtctatttcactttaaaagccaaaataaacatgagatgaaagtgattagtaattacttcacgctgagcaaaagatgttatgtgcttcccatcaacggtcatttggattccttccgatcccactctaagtgtggcaacaaatggataaccttgcttaaaagggaagtatttccttgatttagatccatcttgaacaattgatgaccgccttgaactattggtagattttccagtcatgacaagcttctcatcacccttacccactatcttgttacacttggccaagtcatccactgaaaaatagccataataatgccatgtatcacaaatctgtagtacataattttaaaatgctgtgtgctggagttactatgcagtatcatataaaataagtacttgttggaggattgagcttacaaggagagagagagagagagagagagagagagagagaggagggagggagg

SEQ ID NO: 301628 - DNA, 2977 bp, Cannabis indica
attgttatgatgttatttttctagtttttttatagttaatttatagttgtcgcgagattaaattctcgttatttttttagcaaaatgaattttaataattttaaaaccttacaaatatatttttataattaaaaactttagacggtaaaattataaataaaatatgcaaaaaagaaaaatatatttttaaaaattttgctaatattaattaagtactaatgtggtcatccatggcatatttaattataatatatatatataaaaaataccaaataagaattttaaatttttttatgaaggaataatataaagttaaaataaggctagctcaagtggccatagggagtgtgtgtgtgttggaggtcctgggttcgagttccaagttatgcatgatgtaatatataaacgcttaaaatcaaaaaaaaaaaaaaatttccttctttatttaaaagcaaataattttggattttggtgccaaattatgatattaataagtaactgaaatgtaaactaaccgtacaagacatatgaaataatagtacttcttcttattattattatgagtataagagtattttcatttctttttgaaaaagtatcaaactttagtcaactcatttcttggatctttacaaacaaaaaataacagataatatttttataattaattaaattgtttaaagtaaagaaacttgttctcttcacaccctccaattatcataataataataataaaaaaatcatcacattaattaaataatttaataaaaataaaagaagcatcttcttctcttttgttaagcttctctagttcttttttctaaggacagattccaatggctctgtctctctgtctttaatatatattagtttgtgtatatcaatggagtatacataatgtttatctatgtaatatcataattattcatatgtattttatttatttattttgcttctatttttattaatgtacaattctacactatattatatttctttccttaaataacttcttatgtcattttcttcaaattcttaattatatatatatatatatatatatttgctgtcagaatgagaagaacaagaaagagaagctctttgtgttatgacccatatcataaataaacctttcccattttagcttgagaaaatatttgtttctcttccaaaaatatttattgggtattttccagattttatttcagatgtgaaaaatcagtacaataagagatataaagatcaaaggaagaaactttggtgtttttggctcaataaagattggatttttatgttctgttttttactagagaaatatgctttgtaagtcctctctttgttattagtgattttcttcttcacttgtagaaaagaaacaagtcaaatattcaaagtcatataattttcttaatatatgtggttcaattttctctactaatgactactttaattttttttttattttttctgtgttttagtttgaatggtctgagtcctgggttttaacatgtttgaatgattcaatataatatacaaaaaaaagtcaactaattttgccccaaaatgatatctttttaacaaatttataaaagggtattgatataaggcaagagatctttctcacagcttcaaatcaaatataaaaatgaaaaatctcacatgttttgcttctattacttctgacccaaaattaggttcaaagacttaatcctacttgctcttctttacttaagaaatattcacatgactcctaagctttaaaagtttatgcttaatctcacatgttctaacaaagattgcccatttctggttttagagcaattcagtcaatcattgaagaaaaaacaagttttctcaaatggggtatgctaattcaagatctgtaaggtacttacttctttacccatattactattttgctttaaatttcattattgtgcttagtattgtcaattagtttctgattttttacttaaacatattaatgtagatttcaagatgatcttgaattaacaaaactacctatagttaatggagatgataaagatgttaaggctcaatacaagattgatgggactcaaatacaagaacaaagttctaagaagagtgatcatggaaggagagtagtaacatcattaaaatccaaagttttgtctagagttttctctgaggattatgaaagagttcagaagaagatactcgatcctcggggtcctataattcgtcgttggaacaagattttcttagtaacttgtttgatttcattgtttgttgaccctttattcttttacttgccaatggtgagaaaagaacaatgcattgacattggaactcaccttgaagtagctctcacaatcattagatcatttgcagatgccttttacatgattcaaattttcatcagatttcgtacagcttacatagcgccttcctctcgagtgttcgggagaggagagcttgttattgacactaagaagattgcaaggagttacttgcgccaaaacttttggattgacctcttagctgctttgcctcttcctcaggtaccgaaagttcttgaattcaacaatctcaatagttctgggaaaatttttaatgactgtttcctttatttcaggtgttgatttggattgttattcctaatcttggtggctcaacgatgacaaacaccaagaactttcttcggttcatcttaatctttcagtatctcccgcgattgtttcttatatttcctttgtcatcacaaattgttaaggctactggtgttgtcactgaaacagcttgggctggtgctgcatacaatcttattctctacatgttagcaagccatgtaagcaacactatttttcggttttctctcaattcaattaagttgcgttgttttgacttaagacaaatcacactaaacaagaacatcaatcaaatatgaacccctttttggtagaagtaattcttttttataaagaacctgtgtcag

SEQ ID NO: 301629 - DNA, 2105 bp, Cannabis indica
aatagctcttatttcagtaattatattagtttactgaaatattatttatagtaagctaagtgttttaaggataaaatacattaagggtagaatagtaaatttttccttacttgatgtaaatcatctataaaggatctttgattataatagataattcatagtgtacctatatttggaacatatagagcattcaatgtaatcaaaagtgcaattacgaatctatagtggtgtcaggaggaataggggtgaacaacatactatcatcaacaaataagagatgggacatggaagaaactcctctgcaaattttaactccagagaaatcattagccatctcctttatcctaatagcagctgagagtccttaaactactaagaggaagagatatggggacaaagggtcaccctgccagattcctctagtcgaagaaaaggtgtctgagaggctgccattaagagatatgcgataagtaacaagggatagacaactcacgataagagaagtgaacctagagggaaaacccacatgagctaggaggtttttaaggaaaggccactcaaccctgtcaaaagctttttccatgtcaagcttgatagctacccaaccaattttcccctttttcctagagtggatagaatggataatctcattggcaataataatgttatcaaagatctgtcttccactcaagaaagcactttgattatgagcaatgatatagtggagaacatctttgagtctattggaaagaaccttagagatgcatttttaaatggtattacagaggctgatagggcgaaagtcacgcatagttgatgcatttttctttctcggaattaagactaggatggtttcattgatagtcgaaatatccctactgtgatttaagatatccaggaaagtagcacaaaggtcgagtcccagtgtatgccaattcttctggtaaaagagagaattgaggccatcaggtccaggggctttatccccagaaaggctgaacatggcttttttgacctcatccgtggtgaaaggctcatccaagaaagaaatatggacaggggagagatgatttggaactccttagagaatattggtgatggcattctgatcagctccttgagaatgaaaaaggttagagtaaaagcttaagaaatgggaaagaattttggggtgtcactagccttagactcatccggtagagtgatgcttctaataaggttggtttttttctagatggaagccttgtggtggaagaactttgtgttcttatcaccagccttaagccaatccacccgagctctttgcttccaataaatttcatccttgtgaagaagagcatccaatttggattgcacagagttggcatgtgacagagtatgtctattaggctgattcgtgttgagcaacaggtctaagtccttttgagtacgagcaatttgctcctttatcggatcttgagaccaactccagcgtttaattgcattaatgcaagtggattgtttggatagaaaagttttgagaggagaatgaggaatgaccgaattggtggatgtccaggaggaatggacagtagaggaaaaagagtcattcgtaagccagtgattctcgaaaacaaaacgggaacttctctgagaaattttcaacttatcctctaattggactttaagggctctgtgatcagacccataaaaacccaagtgagaaagacaagcagagggaaatagagagttccaagattgattagcagtgcatcagtcaatgcgttcaagaaggtgaccgtgcctctaactgtatttatttccagtgtgaatgagaggcaaaagattaaatttatgcaggaaagaacggaagttgtgcatagcatgagtggtaggattggaagtggagttttgtcactaattgaaagatagtcattaaaatcccccataagtaaccaaggcaagagagggcagtgtcatggagtctattaaggagagtccaagtaacatgtttagtagaaggataggaaaccataataaccagtaaaatgccatttcatatcattaaaaacatttacaaatacagtctatatgattgagggagtaagtaataacattaacatcaa

SEQ ID NO: 301630 - DNA, 824 bp, Cannabis indica
agatgaaatacatacatataatataacaatatatacttgtatgaattgaaatgaggttcctagaaggttacaaggtttgtgattcatgaatttatttgtggtgtgatgacacttggtgaggggaatatctccaagtgttagggatgcagaaagtcaggaaagtgcatatggcatatggtgaagaggacagaatcaaacaaaagaaatttacacaaaatataaagaaaaaaaaaaagaatcaaacaaattttttacacaaaatatataataaaaataaaagaatcaaaacaaaagtagtgacatgtgagatagaacgttaccccatgtggctagaagagtcaaaaggagcacaaagccccatttctttcttaagagtgaaaagtttgacttagaattagtggagagttatagtgtgttacttatactagaagaagattgcacgaaggtcccacgtgctggcaaatacatattaaatataactctaattcttagtataagaaattcattaaaagagtttctcaaaaaaaaacaaaaaatcattaaaaaataataagattgtcatctttgttttttagtaaataaaatctgcgaaaaagaaaagagaaaaaacttaaaattgcgagatctttttatattttattggtatttatgtttaggtgcactattttttgtttgaaaaaattatactaaacatctcaaattaaggaatatgttagtaaatattattattttaacatttgtagagaaataaacttaggctagttgagaacgtcatactaaaatattatatatttaggtgcctataaaaattaataccatatata

SEQ ID NO: 301631 - DNA, 1475 bp, Cannabis indica
taatgacaacttgtatctaaatgttacattttagtcataaataaatttttgttgtgactaaaaactatatatttagccacaaaaaaattatattgtcactaaaaataattttgtttagtataaaatagtatatatagctaactcatcaagccgaatgatgttcttcctctcatatcataagaaataaacattttttttaatcagaaaaagtattacatacctccttcttcattgactattagtgcaccggtttcctccttcatggactggtgcacttcgacttttagtcaggttattgcagataaaaaatatcttattgcagtcgtgtattgggccatttggagtgcaagaaataaagttgtttggaaaggtaagacggcccaagcagataacattgttgtgtttgctaaaaactaccttagtcaatggaataatgctcaaaaaactgtccttggctcatcatgttctgagacaaatgatggtgcagagcattagtccccaccacttgataacaacattaaagttaatgtagacgttgctttgttcgatggaggacgttcttttcgtacgggtgtggttgcacgagatgagaagggttggctcattgagggtcgaatcacttatacttcgagtacggttgaaccagttttggctgaagcaataagtgtcaaggaagttttaacttggatcaagtgcaaccagtggcaacatgtaactgtggagagtaactgtcttggggttgtgcaaattcccatgatatatttgtttggtcaagtcattcaaagctgtaaaactttgcttgctgaattatgtaacgttaaagttatttttattaaccgatctgctaatgtagtgactcataactttactagagtctctaatttgtatctagatcgtaccttcaatttgaagtctattcttactgatttgttaccgtgtttggtgactgaatttgttggttagtaaaattaacatttttcattaaaaaaatagaatcatatagtatttttcttgagtgaagaatcatgtagtattatctctcttataataattacttcatcaatctgaatttaagtaagagaagttattatttatacactaatttcccccctgaattttcattatatatttacgatcctaaagtatatgaaacgtaaaacaaattaaattttagaagtcctagtttaaccattatcaaaattataattttaacactctagtgtagtggtataaccttctaaagttcttaaaaattccaaacttcaatactccattggttgtactgaaaaaaattactacatagtcacattatatatttgggctatttacaaaaatatgggaaaataaagataagttttgatatatatggcataaaaacttaattacactaaatatgacattttttaaaaaaacttacaaatatgggaaaaagtcttgaggaatgccataaaaaactttaaatttgtgtttctttt

SEQ ID NO: 301632 - DNA, 1299 bp, Cannabis indica
ataaggattatgatacatcatactataatataatataaatacatagataaattactacatgcctttatataatttatattatatgaaataagcgtatcataattaatttatccttaatataataattaggttggtgctatagctagcctcagatggagatcaacgttgtgatgatgatgatgctgatcatactcatgtccttgaatattattatcattactcttgccattaatagcagtactactatcgccgtacgaagaagatctggccatgccctcatcattcaaagctcgagaaagcttaactactcttgccattggccatggccataatccataaacacgtgcaatcccatctccgactcgagctgccacagcacggccggcggggcatctgacaatacacattggcccgccgccaacacgaagtacagaaggtgctgcaggttgtttgatcataacaccgccgtgatgcggggcgcctaagatcactgccgggacacctactacagcaagttgaggtggccgaggtggaggaggaggacgaggagacgtcggctcatggcggcgcctcttcgagagaagactacttcttttgtccttgtgagcgttttggtgacctcccaatgcttgagaattgttaaactcccgcccacaatagtcacacacgaatattattgatgttctcttattattactattattattaacatttttgttatttttcaattctttattactattattagtagtattagttgtgattacagaaccaaacaatttcattactactgagggagcaatgtactttgttattatttgaaagagtattatagtagtagtaaaattcatatatattgtatacatagttaggttagggtttaggtattaggtatatatagtgattagagaagagataagtaaagcgactaaaagtaaaatgacggaaatagccttgagttgagggattgaattaatatgtagagaaaacaataccgaaattattaaaggaaggaggggacggagtagttgggaaatatatatccgcagctacatgagtgtcttgtgctcacaaatagacaaacattaatttagtgctacttactgtttttccttaagtactatgtacagtactgttatctcttatagtagatatatacaactttttcatgtagtttcactacaatttttatattatttttagtaatttttgttttaaaatatttcaataataaatagctctaattttttaaataatattatattattatttaatatatattaaataattaaatttttt

SEQ ID NO: 301633 - DNA, 2479 bp, Cannabis indica
ttttaataactaattattctattagcattaaactagtttataaaatcacacacgtggcgtccctatagattagggcgttacactgactcacagagatattacgtgtgtgcttttattaattaacttataattaatctatcaggttaagaaaagggtagttcaattgcaacttttggattaaactaaaacattacttttcattcaaaatactgttatatttggggatcccctgtttccaaacttttacaatttgtctcaaaattgatattaaaaaaatggggttacaatttaatacataattaacaggtggatcatatccactggaagccaaaacaccatggttgatatgtacatcgctggaagacctctgaatcatggttgatacactctcgctttcctttacatggaccacgaaacacccgtgagtcacaaaaactcaacaagaaagcaagtaaaacacaaacattatataacacgagatcaaacaatgcataacatacaaattcattattcataataaacgcttaacaacacatattcaagcaatacagaacaattatttgtctaataagacaaactgttcttgatgcctcataaagcatccttaccacttgtcacccacgagcttcatatgtcactatcgttgcccaacataacaatcgataagtaagaaacctatctgcagtttcaagcgagtaattactcattcacaataaacggtaatgaccgtatctttacctattttcaacaatagtaatgattgtatctttatctcgatcataattgagcctcacatgatagtaatcgttacctcgatcataatcaagtcacaaacgataataatcgttcctcacttaacatgcttaacagtgcaattaactttcttacctcagtcaagtaatcaggtgtgcgcaacgacctgagtggattaaagctcgacgatcccgggtcttatgtcatgaagacaaaacttaatcaaccacttatccatactccgaaaaaaaccttaattccataactagataaattctaactcctcactagttcaaaattagcttaacatcactaaaatatcctaatctaagctttgaaaaacaccccgatcaaaaccagtttcaaagccaaaaactagggtttcccctactggcaaaaccgattgactggtttcactatgcctgtgaaactgatttccctgctacagaaaagggaaactctggttttcgcaccaaaacccaaccaaatcgcctccaaacctattcaaactctccaaaacagttttataccataaaaataatgcattcaaacaaacaattcatcaaaataaacaaaacaccatagttgagtaaaactaagctcattaaaccttatttcctccaactcaaaccctagcagtcaaggagatgattaaacacacacaaataaatcctaaatcagacttagaaacataaaccaaacttagtttcacactacaactctaaaaacatataatcctccaatcaacttaacctaaaactcaaaatttaaagtgataaaggggaagaaccttatctcaaagcttgaacaacttttaatccttcttaattcagctaggagaagataaaaatgataaaacaggctcttggttgccgctggtttcttagggctcgaaggggttgaagaaaagagaggaacaggttattttattttcttaattttaagataatcttcatgtttttctaagttactaactaataataaaaataaatattaaaatctaatattgatttcagcctatgtggtcactaaaaacaaaatagcaatctacccttaaaatgataattttgcccctccaccaaacacttaagtaaattaaagcctagggttattttggtcattttctaactaccccgactaaactgagttctcaacattttgaccactacgttgagtttccacaatcaccgaacccgaaaatattttatttcaaaaataatatttacgatacccacataacctgatataatctccgtaattaataaattacgcttaattattcctttactagatttgcactaataaagtcataattagcttaagtaagattataatcttactccaatatcatcataatcacatatttaataaaatatgtccaattaaatattactatattttctgagatattaaacgcccttaatggggtggggattccctgtctaaatggggaacgggacggggacggggacggagattacttttttatcctcaaatattaaacggggcaggaacggggactccccgtcgcgatggagacccgtttagtattttatattatatttttagtaatattttataatttataatttatgtttgtattttattaatatattagtatcttttttatgaattttaagttgtgttttgaataatagttagtttattaaataataattaatgtgtaatattttaatttttatgtagtttaatatttttatatatt

SEQ ID NO: 301634 - DNA, 3923 bp, Cannabis indica
cagagtagttcgacataagaaaatcttcaaatatgctttctatgaataatccagcattcaggtctcgatcacatgatccctgatttttggggattgacttgcaccgacaagaaataataagaaacatttctagtttttctttttagttttatttgttttaggaaaacctaattatttttatttttctttatgaagtggagtcattctattgaacagggatccaaaaggtcactttctagaaagctcttacgttgtaaaagaattataagatttttcctgagaactcttaagaaactcacttggccaactctttgtgatctttttaattcctttaagcaatataaataggctattactattaccacacagtcaaacttttataattctttgtgttcttattgcttaattttatttaattataaattattattatcatcgcttaaattgactcaatgacgttggctaaaagtgaggtcaacattatggtactttcagagagcaaaaacaacattgtttatcgctttgatcctctccaaagattgatgaaactaccaaaatgtcctaaaccactaaaataaccaatctgatggctacagattctaatgtgcaaaactcatgttaataggagggatccaatggtggaaaatcccgattggagcacttgtctacctccacgagttccacaatcagtgggacatggggtaacaacgactctgcctagattcactccggacacgcatgaaactgaaaccactagtactcataaatggagagattgtgctgtgtactggagatcaatttgttggagaacctcttggggtgatcgacgatggtattgagttgcaaaacttgtgagatgccttagggaaaatgcaagaacataccaacactcttcaccatgatcacgaagatacccgagaagttgtgaattttgcattcgaacaacaaaaataccaattccaagaatggtcgaataaacagatcgaaatcaggagaacccaacaggtagcgattaataatcgttccaagcaggcgaccgtattgattcgacaagcttattagttaaccgaacaacaatcagtgggagatactccactcatacgtgatccgaacagaggaaaagaaacctatatcccaaatagaccgcaatatggtataggtgaatgtctaaccaatccaagataatggaccatccaattcgaagtcacaggatcaaactgtgggccacacggtagacgagcaagtttttccaactctttatcttttgggggaatgatcaatataatttccatccttagaaccaatcaattgctgataatagctcaacaagaaggccaccaagtgaattagtcttcaacaagttaatatttgtacacgatttaaggaacgatctgaaacacagtagaggacatgatggacacttaacacttcatcccccctaatattcgattattaatgtgtataactatgtgccctgtgaaattctagaaggtccaggtgacacaagtcatttaacagacaggttaagttgatttagtggtgcaagcccagttatatttttatttattcctatttgctatttgtgttgcgtgtagcagccacagccaaccaatcatcatcgacagacgacaaacaacacacctcatcaccatggtcaccaacccagaaaaccccaagtattagttaaggcaaatttagactttaagatataaacgcagtggcgcaaccagtggaacctcttttaaccatgtatggttgtgtccctaatttgtcatagaccatgattgatcatatatattgagaagggtgctttataaaaaaaatgaggtattattagagtctaacacctctataagtgtattaatagtgtaattaattatcggatctttaaaaaataatatttaaaaaatatcgttatctaatcataaaataccaatgttgggtacagtagtatccaatgatgctcttatcttatcaataaaaaaagtggtaatgatgtcacctttgagcaatgtgttaattatagtttgccaattgtaatgaactctgagtattaaaagagaaaatgaaaaatggttggatttaagggacagaattgggaggttgaacttgaaacagtccacactccacatggagaagtaaatgcaaggaaagttggaagctcgacaaaaatcgaagacacgccgcatgaacgccacgtgtccaaattcacctgcaattttacctttttgaaaacactttcacctaactctctctttcaaaacactaaagagtgcgtttttttacctttttctggaacagaatctcaactgtattgatttaaccccacagtaataaattatatttatataaaaacaactcactcaccccattttcggataaatttatagccaaatgtatttatatatatatatattatgcaaattacacatttgtcataataatgtctcttacaaataaaggcaaaaaaaaaaaaattaataaagaccaaaactattattaagcttgatcatatatcaattctgtgagccataccaaaactactatatattatattataataatagcctgcattggtttctaaacaattcaagcaaaaccgagactcaactccaatcgtagctcgccacgtggattcggttctggcttggctaacgaaggctcaacagtttcaacagaaaacatgctttcaacgtcttctcctacagcgctggtgggcccaccattacgcggccaccagtactcgtgactcgggttcaaataccgggtcaaatcacccaaattcgacccgttattaagcaagcttttctgcccggaagaagcggttttcttaaacctgtttcgtttcgggtcagaatcagaaacgacgtcgtctttgatgacgtggcgtatgtccacgacggatgacttcagcttagtaaactggttattagagtgatcgagcgcgtgttcctcagtttcgacctggatcggggctccagctaaaacggcttcgactgcggcttggcatttagcccagtcgccactccaaaaaagtcccactgagccgtttattgggttcacgattctcccacacgcttcgtacaacagcgatttaaacacagcttttatttaaaacaaaaaaaaagtaattaattaaatgaaataataataataataatgataattaagttaatttaattgaattattaccggggcggagatattgaggaccagcattaatgagattaagaagacccgtacggccgtagaatttggcgaggaaaagagtggcttgggcttgagaatcgggagatttgatccactgaaggcaaggcctaatggcacaatcatcgctgcacccttttcgtaaaaccctgcaaccattacagctcgttctcatgatgatgatgatgatgatgaatgattcagaattttagataatgatttctctctctctttctctgtctctgttcttattagagagagaaaatgaaaaaggggaaaagaaagagtattattataacatacggcggctgtacggagatttagaaaggagtgtgatttcaggggcttgtatttataaagccaatgcttccgaggttaaaattgtaattttataaccactgtgtttgtataaataatgcctttatgctacaactccaatacagatttttccttttttaaaaaaaaaaaaaatccttcagatataaatgcagattgactgaatttttttgtgggaattttatttccatctatatttaaaagaagtaaacttgaaataatttcaaaaaatccctcttcatatatttttttttaaaaaaatcacattattttgtattaattttactacttattttaattaaatatgtataatttatttaataggtatatttttaagaagaagaaaaaaaaattaaatatatattttatacaaataaaaa

SEQ ID NO: 301635 - DNA, 2989 bp, Cannabis indica
aaaaaattttaattttagatggcaatgataaagaccaaaaaattttccaccaatgaagagaattgtttgtactagctgtaggttgttgttcctcaaggcttgtggcaagggaatatccagatttaacagaatacattccatttgtttcaaaattccagattagatggtcatcttgatcacaaagagtaaggggaatactctgaatttttgcaacatcagattccaagaagcattgttggagaagagtgtgattccattgcctttgattggtgattagatctgagactttcatatatatgttggggcttttgaatatcaatggtttgaatgaagtgaagccaggaagccaaggatccgaaacacatgaaattagatgtccattccccactttccaacgcagaccttgtttaagaagttcttttccccaaacaatacttcgccatgtgagtgaaggataagtaccaacttcagcttcaagaaaagaattatatttgaagtatcttggtttgagaattttgtgcagcaatgaagaaggattgtccaaaattaaccaagcttgtttggctaacaaggcttgattgaaatgaacaaagcttttgaatcccatacctccttcaactttggacttacaaagagcattccaagttttccaattaattccggaagatgtggaattagaaccccaccaaaatttattcatcataacttcaatttggtgaattagagacttggataagcgaaaacaactcatcgcataagtggggatagcttgtgccacagctttgagaagaacttctttgcctccaacagaaaaaagttgctcttgccaagccgaaaggtgattccaaagcttttctttgatgtctccaaataaaattttcttatctctgcccgagtaagagggtaggccaaggtaacgctcatgacaaggcttgatgggcatttgaataatatgttggacagtattctgaatagccgcagtggtgttaggagagaaggatagaaccgacttctcagcattcaatcgttgtcctgaagctcgacaatagtaatccaaggaacgcttgacagcagtaatagatttcttgttagctttgcttagaactaggctatcatcggcaaaaaataggtgtgtgactgaaggggcaccacgagctacttgcagaccttgtaaattgccacaagattcttcatgttggaagagtcttgaaagaccctccgcacaaataaggaaaaggtatggtgatagtggatcaccttgacggatgcctcgggatggagtcacatttccttgaatagatccattaaccaaaaaagagtaggagacactactgaggcatctttgaataagctcaacaactggaaaggcaaaacccaacgcaatcatcatttgttggagaaaatgccactctactctgtcgaaggccttactcatgtcaagcttcatagcagcaaaaccttcttttcctcttttcaaatgcttgagagagtgtaataattcaaaagctactagcacattatcagtgatttgccttgattgtaaaaaagcactttgagagtccgaaatcactagagaaagaaaaggcttcagtcgaataacaatggctttggagacgagcttgtagagaacgttgcacagactaataggacgtaactgagaaactgtgcttggactctttactttgggaatcaaagtgattaaagtcttgttgaacatagttgggtctgcaccattattaagaatatccaggactgttgttgtaaccaaatctcccacaatatgccaatagtttgaatagaacataacagacaatccatcaaggccggggctactgtcttgtcccatagatttcagtgcagagtagacctcatccgccttatatggttgtgtcaagatttcattcatttctgcggtgataatgcagggagtacaagagatgactcgttgaagggcctcagaatctataccttcagtagcatagatatttccaaaatactgctccaccattctgctaatgccttgcagcgaggaatgaataataccatggtcatcagtcaaagatttaattgtgttaaacgatcgtcttccattagctttttggtgaaaaaacttggtgtttgagtcaccagattgtagccatgaaacacgggaacgctgcttccaatagtcttcttcttgctgcagaagttcatctaaaattgattcattcgacttgagcaaatcaaagtgtgaaggacttgtatctgaggaattattgagggcagcaaccttgtcttgagtgattttaattctttttggtaaatccccaaacttagcccgatgccatgaagaaagttgagtagcaactgaagcaaaatttattgaaagttggtcagcagaatttgcatttgaactagaccaaattttaccaataatatcttggcattgttcctcctgaagccacaatttttcaaatctaaatctagatttagatttctggacagcagagtgaagccgagttttgacagtggctttaatagctcgatgatctgactgaaaaaaatccaaatgttgcaaagaaatggcagcaaaattctcaaaccagcaggaattgacaaaagcataatctaatctttccttaacatttatgccattgacattattgttgtgccatgtgaacctttctccttcaaattgtgtttccagtaagccacagaaatcaatagtatttcgaaaatcatcaatctgtttctcattctttagaggaccaccaaacttgtcggagtgcgaaatgatttcgttgaagtcgcccataactagccaaggtaacagtggagctgtatctcttagctttttcaataattcccaagttagaggtctttgggacacaaccggagaaccatagaaaccagaaaagtgacacgtaggactatcatcgagagtcatgtagcagtcaataaagtttattccatagtgtaaaatagttacatttacattagacttccaaag

SEQ ID NO: 301636 - DNA, 1950 bp, Cannabis indica
aaaaaaaatcatacaaaaaaataaatttattaaaagttgagtgaagtcatgtgtgtaccatcgactctattaatactctaccccatacaccaaacgacccctaaatgtcttactcaatctcaatgaaaacgattaatgctacaagataccttaaagtgtccaacatcagtcgaacttaatgtcgggtgtaaaaaaatttacctttaaaagacctaaattattattaaaattcagggccgaccctacacataaagtaatattttatgtatccaacatgtagtgttggataccttagggtgtcttataacaacaatcgaaacaatatacaaccatatattggttaccttttatcttttccagaaaccaaagcagtgcttccacaaacttgaatccttgctccaagcttgaccagctcatttgctagcacaaatcaaagactttgtttaagacacttgaaagtacattcaagaatttttttttcataataaaaaaacttgttatgagtgaagaactttatagtactaataccatgactcattcgattttcgaaaacacattcctctacaagactaaatccatcacaagtagtgagcaatgccattgtttgaggttgaagatcagtaggaaatgcaggaaatggacctgtcttaatgtcaaaccctttcaagttggtaccatctgtagacaaagccgaaacctgaaccaagaagaaaaactggttaccggttaccaaaatgaaagcaaacattttcactaaaaaaaacttaaacatacttccaaactatcatgtgacaattgtctgattgtacagccagcaccccgtaatttttcgatcaaacatgacagatcggaaggaatgacaggggaaatagagattcgcgagcgagttatagcagcagcgagcataaacgagcctgtttcaatacgatcaggggagattttgtattcagaaccatgtaagcaagattttcctttgataacaatcttgttagttccagctccttcgatacaagccccggcattgcttagaaaacgagcaagagcaaccacttcgggttcctgtggtgaaactcgggttacttttgtgttttcatagtttagtttaaacatgttttgaatcagaaccagaatcagaatcagaacaagttatgtaagtagtctactacctttgcagcatttgaaagtacggtgactccatcggctaaacacgccgccattaaaagagtttcggttgctccaacacttggataatcaagatggaaccttcccccaactagtcctttcccatttgcagcatttgcatgaaatttcccatccctaaaataacatgaaaaaatcataaagataagaatgacacactcctttactttgtttgttcttctcttcttttctgttgatagaccatttccttttctttttaggaaacacaacacaagagtacaaatagattaaataaatgaataaatacaattgcaaactctgtgttttgccaaaattattgattagaccttttattttgttaaataacaattcagaacctgtatttttttaaatggtacaaaatagattctcagcttaatacgaaaattaaaacttaataataacctgacttgaaagtattatgacaagaattgttacattttttacatatgcttgtactaaaaactaatttcaggttagttatattaaaaaaaattaacaaaaaattgagttcaaagtttattttgtattatttttttaaaaaaaaggtttgaattgtcatttaacaaaagagaagatccagtctttcttttgtaaaatacaattgaatataatatttactctaaataaatttaatatccaaatacaaaagaccaaaagtacagtagaacctctatccaagaatacacttgggactaagaaaataatattctaattgagaggttataactaaatagagttacacttgaa

SEQ ID NO: 301637 - DNA, 1606 bp, Cannabis indica
aatattaaatatgagagtgacacgtaataaaaaaaaaagtctgtatgtagagatgttttttgtgactctacttaaacattttccaatatttaatttgtaaattactattgaattaaaatctaattttttaaaaattaaggtttctaaaattgatatttaattgtagattttattttaataaccatcaatgagtaatacacattaaaaaatatttcatgtatatattttgtaaggatatatagacatatttggtcaaacgaaaattcctaaaaaagattaagataattggagaagtgcatgttggaattttatatcttaaataaggtctaatttcaacgtaattttattatcaataaaaattagaaattatatattgaacttattatatgctttgttcacatatttatttcataattatatggctattatataagttgtattaaatcttgaacaaataattatttataattatagtgatgtcatcaaagtgaaaaataattatgattatatgcttaaaatatttcgtcccgtaatttatcagtgcaacgaatttacactgacgtgataatcaacgatgtagtttacttacacttaggtaagtgaaatattttttccaaggcattagcaaagtaagacttatatcgaatgtgttagctatacatatgactggaccgatattgacagtggaaaaaatagtataaatttatcattatatcttttataagtcaatgtcacttagttaatcatagatcacattacaagaaatcagagttttgccgacgaagttaatgaatttcgtcgacaaaagtagagttttcctagcgaaataacccaatttcgctggcataagtaagccaaaaaattgtcttaaagatcaagttttgtcggtgcttaaaatcgcgggcaaaggttatttatgttggtaatataacctagttttgccgaaaaaaaataaatcaatccaaccgctaaagggcagtaaatttttggcaggctaaatgtttttgtcggtgagcctattggttttgccggcaagcctatgcgccaacaaaacttgcaaaaaaaaagtcgcaaatttcttgcactaggaattagtggctttttttggggggaaatgttttgccagtgagattcttcgccggcgaaacccttctagtattaattgaaactatatgtttcaattaatgatttttataaaggttttgccggcaaagtgaattgcacttacaaattttttttgtataaataatttttctagagccccttcttcccctttcttcttcttcttccttccctctagtttctctcctcccactttgtcctcgacctctgttgggtcgtctgcccccacttcccgtttctttatcccctttgtcgttgtccatcggtctctctctcatatctaaaaaaatctccaaaataaggaaactcattcttaagaaattagaaactaaagattgatagtgcaatctctaatctccggtaacactattttttctttaatttttttttttgtaaatatatttgtgggtatatatatttatatgtatgtggatgtatgtgttggaaattattttaccaggatcttagatctacaaacaagtat

SEQ ID NO: 301638 - DNA, 2386 bp, Cannabis indica
acctaaccaattataactcaatactcccctcaagatgggctagatatatcccttaagcccatcttgtctttaaactgattgaactggttagcaaacaatggcttggttaaaatatcagctagctggtcctttgttgaaacatgcactgtcttgatgatcccttgctgcactttctcccttaccaaatgacaatcaatttcaatatgctttgttctctcatggaacactggatttgcagcaatgtactgagctgatttattgtcacaataaagcaatgcagggctttgctgttcaatctttaactcttgtaagatggacagtaaccaaaccacttcacaagtagtattggccattgccctatattcggcctcagcagaagatctagaaacagtatgctgtttctcgcttttccaagagatgattgaagaaccaacaaaaatacaaaaccctgtagttgatctcctagtgttaggacaagcagcccagtcagagtctgtataagcatgtatcttcacttctgtttctgctgcaaaaaacagcccttgtcctggactgtgtttaacatatttaagtactctttgggcagcatttaagtgagaaacacgaggtgcagataggaattgacttagcttattgacagattaggagatatcgggtctagtaatggtcaaatactgcaatttacctactatccttctgtacaaagtaggatcagccagattctctttctcatcttgtccaagtttcaaattgccatccattggggtattcataggtttgctacctaagaatccaaggtcttcaaggagctgcaaagcatagggtctttgagacacaaatatttccttatttgatcgtgcaatctcaagacccaagaaatatttgagtttccccaaatctttcagcttgaatctatcattcaacctgatctttaaggcttcaagttgttgcaggtcgttgctagctaggattacatcatctacatacaccaagagaaaaatgaatctatcatcaaagtgtttgatgaatagagagtggtctgttgcagagtgatgaaatccttcatcggttaaggcactaaaaaatttagcaaaccattgccttgaagcttgctttaggccataaagtgactttcgtaacttgcaaactgggtttggtggcaactcccccttaggtctatacccttgaggtagagacatatacacttcttcattcaaatcaccatgtaagaaggcattatttacatcaagttgatgtaagtgccatcctttcatggcagcaagagccaaaaccagtttaacagtaacaagttttgtcactggtgcaaatgtatctgtgtaatccacaccctccagttgattgtaacctttagcaaccaaccgtgctttaaatcgctcaatgctaccatcagcattgaatttaatcttgtacacccatttgcactcaataacatgctgatcatcaggtaatgtaaccacgatccaggtatgactcttctctagagcatcaatttcattgtccatagcattgtcccattctggaatgccatgagcctgactgaaaaattcaggttcaaagtggctggaaacagtgaggatagttgctcggaaagttagagataacctgtgataatcaataacttgggacagggggtgagaagtaacaatagaattctgtgaagaaaacacattagaatgagtggcaagataacaatggtagtcattcaaataggatggtttaacaacttgtcgacctgtcctactttgaacaatatgagaatcagtaggactactggacacagacttgtgagacacaggtgaagtggtcgaaacagtggtgttatgcacaggtaaagtagagaaaaaattctcgtattcagctgaaaacacaccagattgcacaaaagggaatatgtgttcatagaagtaaacatccctggaacaaaaaattttattgctattcagatcaagcaatttgtaagctttcattcctgtaggatacccaataaaaatgcatggtgctgacctaggagaaaattttgatctgttttgactaagtgtagaagcataggctaagcacccaaaggcttttaaatgctcatatgaaggtggtttattgtgaagaatgtcaaatggagacttgtttttcaggttgggagttggtgttctattgattaagtaggctgcagtagagacacactctccccaataagccaaaggcacataagattgaaataaaagagctctagcaacattcagcaaatgctgatgttttctctcaacattagagttttgttgaggtccttgcacacaagagtgatagtgtatgattcctagttcagcaaaaaggtcattaaattgcaattcttttgcattatcagatctaa

SEQ ID NO: 301639 - DNA, 4518 bp, Cannabis indica
tgtacaccattcgcataaaatttatgtataatgaatatacatatattattgctaataatataaaaaataactacagttaaaaaaaagccgatctcacaaactaaatatatacaataatattttatttataataaatgataatattattggtatttaaatttatttattaattcaaaaattctatttaaattaatataatagaaggtaatgattcaatcctatcctttttgaaagtatcaacattaccctcctcaagggttgttataatactaagggaataacattccaacgactcaataaacaaacaaggtaatatttcacattaccattcccttgttagcattaacccattccaaacactccttagagccacacccaaacctaattaaaagggagtccgcgagtcttagttggaaacaaagaaaaaccccacacgatggctgggctaggttaatgtaagtctttgggtgagaaaacctatttcatatatgtacagttacttcaacccaaaataacaaactctttcttattaatttttgttttagttaaaaatatatttcttaattaattaatcaatatatattttataggatgacttatattgttgatgttattaatgtagaaaaaaaaaacaactattattaattactagaataaagttgaagtgagaacagctagttatttagtatatacttcatcaatatcattcaattgaattactcttaatttgtttagatcttattgattaatagggaaatagagtcgtttgtgggtagtttgggggaaaaagaacctagacattgcctaattccagcaacccattcataattagtcaattagatcaactctaaaccaacaaaatatattaatggtccttataatatatatatatatatatatttatatatatataaacaatcaacaattattgtactttattgaggtggttcatatatgtatatgataatggtaccacttatatatgttatagcggtttcaagatcatagagctgaggagtcaagaacccaataagagtaacatatactaacatctttatttcatgcctagctagctttagagaaaactttaacccattatattgacttttccatgcgcaaaaagtcctacccatatgccaaagtcttctttcaaagtcataactactactatttgatgcatttacttcagcaaatatatatgtatatatatattaaataaagaaaaaaaagaagaggaactacatggatgcatttacagcaaaaggacactagagttgcaagcaagcaattaataaaagcacactcttcctcccctacataaatgatattctcaactctctctataagtaaatatatataattaaatatcaccaaaaaacctatctttttcttctttgttttaatgcaaaagcgttacgattcaccttgtaaaaatatgtacccgccgctagcagcaggtaaaactgcattcactctattattctccaaaaaagtaactgcacatttatttattcttatttttataaattaaccaaaaataaaatctacaattgaccaccaatatcttaaacataatttgtctctctccctataacaaaacttacatgttacaacatgaaatgacctaatagtatttgattatcaataaaaataatataaattacaattataattaaagatacttaacacgttataattaaattattattaatattaagtttacatattttaatttaataagtatatgaaaaaaatcaacaaatatttgataatgctggtatatgtttaaaatgttgaggatgaatttggatacatagtggaattgcttaattataggttaatatattccaatgatttcagaagctgacctttagaaccgacaagctgagtactgggagaccccgtcccacttaattagcttagtttcggttaaataggaagacttgcttgccggctattctcctacactcactttaccatcgccccctacacgtgtcaaccatcaggtgggtcataccctttgacttgacgacatcagtcaaatagctatagcccctatcttaactccaaaaccaaaaccaaaaccatttcatttctttattaaattctttcacacccttttccttttttccttttttcttattcctacattcgttaattttcccctctgtagtactctctctctctccaactcccactactatttatttgaccttttacattctcaccttttctttctttttttcccctccgtttcatcataagagcttggtgtatgtttttctatctctctctctctctctccatcgccctattttatttttactttacctttatttgtctctctctctctctcaacaaaaatctgcttctttttcctcttcttcttcttcctcctttccctcatatatatacatatatataatatagtctccttttcccctctgcaaataagtactgtatacttctatggcgatattacctaccaccccttcgaacctggagttgacaataggcttctcttcttctccttctctctcttcttctggtaatatttatatatatagttatgtttcttgttttcttattattattttttatcttctgattattattaatataggatgtggatcagtttggtgacatgtatatatataataaaattaaggctaatttttgtttgatttaaatgtatatatgtatgaaataattttgttattttcgggtgggtgggtagtgatgagagatttggacataaaccaagtaccatcagttggaagagatcatcatcatcatcttgattatgatcataataatattaatcaagaagaatggatggaagaggaagatgaaataatgatgagtagtggtaatactactcattcaggccctcctaggaaaaaacttcgtctctcaaaggaacagtctcgtcttcttgaagaaagcttcagacaacaccataccttaaaccctgtaagcctatatatacatatattaattaatatatgcactagttaataataataattaataaaccgccaccgccaccaccaccaccttcttcttcttttgaaatagcccttgaatttactttttttttttgttattatttatactaattaattacttatataattttaattgcagaaacagaaagaggctttggcgttgcagttgaagctaaggccacgtcaagttgaggtttggttccagaaccgtagggccaggtaccgtaccatataataacctaatatatatctatacatatatatacacacacatttgtacatatatgtataataataacatatatggtgagataaggtcacgaaaaatataaatatacataatacttttttatatatgaatttgttggtggttgggatttaagtaaggtccagatatttagcgttgacagaatatatatatataactgttgaatttatatatatatatatatcacaaagtatgtacataccatctgaatctgattctactactcccgtatctttcgtaatctcctataacataaaactctaggcccagctttgatgtttacagtttcgcttttagactcatttatccatatatgtatatatagccctatctgctctccattttatccacttgcatatatcaatatattattattattattattattgttattattggagaaacttctgtagtgacatacttttaaaatattaaaataaaatattgtagtatcaacatattcgattttctgaattttatcttttttcaaagggaaaaaaaccattcaaggattttattttttcttgtttgaagaatatatatggcctttgtacgtggagtataaaatctgctcacaaatctttactgagaagagacattcataaaattgagaagaataataatattttgatttaatgagtgtaaatacagttaaaggtgagtcgttgtttaagtttgactgtaataatgcacatatatatatgttattagcaaacatgtcattcatgagattatatatgctccttaaacgaagttgctactgtttaaagaattaataattaaggttctaactgtaagtggagaaatggccacgatcaaattaataataaataaatttaagaaagtcacaaaacatataacagaaaaatggagaccaatatatatatttttaatatgattaaatttgtaaaatacactttatgttttagatggcacttatattagttattttataattataaaagtattatatgtgtttgcggcaatatatacatacatatagtgagaaagcttaattaaggtggtccaggagcggcatatatatgcaattatgaagaacaaccatgcatatatatgaatgatgatgaggttatatatatatatatatgtgtatgtatgtgaatgtgatgaagtgaggtgagctttataatgatagttgtccaaagtatgaagaacaataaaagatagaagagcatcgatgataatatatatatgtatatatttatagagagagagagagag

SEQ ID NO: 301640 - DNA, 6423 bp, Cannabis indica
aaattgataaaaatattttataaatgtattattattttcggctaagttttttattttgttttctttgtatttatattgattgaattatataaggtaagaaatatgactaatttttttatatatggaaagttagtcaaaaatggtaagtttaataattcaatcaatatctatctatccatgtatatctaattctttgtaagtttcctaaaatatttaattagaagaaaaatttatgggctgatttaatatctattttagggaagtatctagtgagtttgtagtctagtttagagtgtgtatgagttgttaataaggtgtatattgattataaatatgcattatagtagttaggtcttgtatctcttttacatctctgtatttcattcatatcttgtaagaaagagtgtctttcttgtgtagaggagagggtgttcatctcttccactgtatttatgtattttgtattatcttgagtctgtaatcaagtttacaaaagaagagcaacaatagtgctaccttcaggagaaagttctacaagctttcaggagatagttttttaagtcttttctcgggaggaagcaagcactcttaaaggagatcgaaagagttcgagcacttggagttttagcaagattcagctagaaagtggaatacaacaagctttcagcatacaataagagggagtctatttatacataagtcaattactttatatgtttgagatctatgtaacgaatcttatccctgagcgtggccccgtgcactagtaaaaatctgtaaagattattgataacacgtacaaaaaccttatgtatttttatttttttacactgtttgttttctaaatttattctacaattacagagttgtgttttgtatctatagaataactatttcagtaccatatttattattctgcatttaattatttattaattaattaataaattagtaatactaaaatacaaaattttagttttgtattttttttctctaatagataatatgtgttatctcaaatttttggttgggtgacacctatccttacctcgaggcctgagcggataaaagagtctcatggattggctgcccaagatgtattcaaggtcgatagaagtaatagacggattaagtgtaactagccgcacatcattagcacaaaaacacctaatcagagagaagtggaccgacccgcgtacgatctgaccaaggggaaaacacatgacataattatttttaatgaagtttcctattttatgtgtaatcaagacccaattaaaggggaatcccatttatacttctagtattttaagaagatcagtttattccctgaattggtggattgacagcttgagaaaactaaattttattttgaatattccctataaatagtggatcaattctactgtaaagggatcccaaaatcatttgtttgagagaggccatactgctcattttaactgtaaagctttgtaaagctttcgagagagatcaatctatttttgcttctctactcctaagtttatatgttttgcaaagattacatgctttgcacacaccgtagaatttcttatttgaaacaggtatactacatttggatagagccattgtgacaattctagcagcagggtggccaagcctgctatgccacaaagaaaacaaagagttatttacatttgtttcatgagtattacattgagaaatgagggatggagaagacacagatgagatagaatttggctaagacttgggtacagaattgagttgagtgccttgttcaaggttcccagccaacaagatcttctaggttgcaatgtctttaacacaacaagaaaatgggtaaaacttaaagaaaactacattatcttgagtaaactgagaaacattaagtaaattcttggtgatagaaggaacatgcaacatattatgaatgctcaattgtttagatgtaaagggagataggatggaggaattaccaattgtttttgatgctcaagccagtgccattaccaacatagacttgttcattacctgagtacaggttgctggtgttcaaatttgcaggatctggtgtgagatggtatgttgctccagtatctgggtactagctttcatcattgacaaattttggagtggaatacaattcttgcttgtcagctaaattggccatgggagagaagtttatgaaagactcaggtcctgtaaatgatttgtcaaagcggtaaaaacactgcttgatagtgtgacctattttatggaaaatctagcattgtatctcttgtccccaattgttggtctgaccacgaccatacgaagcaggaccacctcaagttggtgtgttgtgtgtgggaccactgctattggatggaccacctcgtgccactgaggtatagtatgaaccactattgttgttgaaggagggaccactagagccacgtcctggcccagaagtaaagcctggtggtacagcgggagcagaataaagagtatgactttaggtgttagggctaggggttctggtttgagacaagttaacctcagctttggagatatcaagatttttggcatttttctttattcaaactgactgagccattaaccaggattccagttttgcaacagtataggcctcttttcttgtggtgatcaaggtgacaaatacatcatattcagatgttaatccattgattatagcctctatatgatcttgaggagtttgaggaggtccaatagtagctagcagatccacaatgcctttgatcttgagaaggcaatcattaagagaccctgttagctttgtgtttcgaagataagttttgtagagacctatgttagctgcatttttagtgttgtgtaatactcagtgagattctccaagatttgtgaagtaggatcacatccaatcgttcgattggtagtctttttggacatggaggagagaaatcaggaaataagaagattgtcttgttgttcccagtcttcaaactctggattgacagtgtttaatctttcatcagctattgtcaagaactttgctctagcacgagtagattaaagaaatttttgaagtcggctacctttgattgaggctagaacttggtgtttccagggaataaaattgtgctcattgagttttatcgacagagaatggttgaaggagatagggtatgatctaggtagagtaacttgttgattaataagtggtgagcattgttcaattttgatgctctccaccagtcgcggaactaggaatcttcattgatgaacgattggagctctaataccatgtgagtgtttaatctttgagagagaaaaaaggaagaaaatagagttgttcattattgatcaagaaatagtgtacataggattatatacaagagctacaacaactactctaaccaatacactgcataactaactaataacagaattagttaaaacaattaactaacaactagctaggtgacatcatccttgacaatgtttaatctatatattgggaacaaaactattataattggatccagaataaaacaaaaccaatacgtgcatatatttgaagtgaatataccaattgcaagaaaatagtctcatgaaagatgaatactaccatagattcttaaaaattaatttagagatattcttgatactacatgttagaacactttaaatttagccctaattaattcttgagaaatttaacaatagatttaaagattagcggaagcataccggagtttatagaatcaactttaaatagtatgatcttttaattttgcaccaaaactttctctagaaccttaatctcttgataatggagattcaagagtgaaaatatacgatgcaaattggggattattacctgttattaacaattgacaaaacagtaactaatctttatttactatttctagtttagcctttcatcaaattagaaattatctttatggtatttacatgttaaaatcatgacaatgatgcccataagtcgtaaactttattttaaaatagaccacataaatttaactcatttatatgaaaacccaacacatattttatatatacaattgtaactctaattaaataaatttctaaggttttgatcgctacaagaaggctaataataaaagtcacagtttatctaaggtgggtaatggttgtactgatgtggttaaataaagaaagcctcgcctcgtggtaatttggtaaaagtcaattgtgatgttgctcttaattaatattgataagcaaagatatgggattggtgttgtagtgagaaatagccttggtgaggttcatgcttctgctaccttaggtgttggtgtttcggtccagccagttattgctgaagctttagctattactctagtctgacaatgtgttctcaactgggatatacttgtgttcttcttgagtctgactgctttaatgttatcaatgctatcaataatcgctcgattggtcattcttaccttgggtgtgtattattattatgcaactagtttgttgatctctcttttgtctattgtcctaggattgtcaatagtattgctcaggctttagaaaaacttttctcaactgattccacaataatagcctcttaatatctctattttcattggatttgatttaatgtaacagaattgtttcaaaaaaaaatgtaacagaatgagaaaattatgggattcacatttaaacctttcccaatttatctcttattttttgggtaactaatgtattctatcttgatgccaattcactgtttagggacctttttacacactaaagaacataaagaacgcgaaaaatatttgtaatttttttgagagatattgaaaaactcacatgatcggaccttgtaatcttaatattctttatgaagcaaggccaaccctcaatgcagacataatgtcaacgttgaaataaaaaaaaaaaagagtaaattttaacaccaaatatggtattcgttggagattacctttaactaacaagtaacaactaagagaaaacaaaaatatgctatttcgtaaaagaaaaaagtgcatgcttcaagttacacttaaatatctaaatttttattttttctataataaaaagatcttcagttacacttttgaaatttccgtacttattattaagtgttaagttactctctttctctactctatcgatggtattcaacctatcagtcttaaaatgaatggaaattgttgagtggggcttggcaatgttattccctccaaaatgagaagaaaagagaaggaaaaaagtttcataattatataggaatatcaaactcccagattaccttttcctctaaattttgtattattaacataacgtttagtaattttataataatttctttccttcttacatatcaaacaactatgaataaaatagtaatacttccattccataggtgaaatgtgttgtttgaattatgatttcaaaaacctaaataatgctaaattttcatgtgttatctcctatatttatattatacgttgtcatataaaaaaaaatagatgatctataaattctctaaagcagaaccattttaatataatttatttttattttcaaaattttaattttaaaaaataaaataaaataattttactgaatatatatcttaaaaatattttcacttttctaatttttttttaaaaatatatatttaaaaattattaccaaaccatcattatttctttaatatttaataaatagatttatgtaattttaataaaacaatgtatatagtaataataattaaatagaaccggatgagaaagaaagaaaaatatgaacgccacccataattttatatattgagaaatattaagcatcaagcaccataagatcttattgttggtgtattttaatatcgagtcctacacattttaattaaataaatgatacaattacagagtgttacatcggtatagtgttgggcaccttaaaataccaaatatcaatactctaatttatttgacgcaagagaaacgtcaaagagggagtcactagcaatagttgacgatgggaatcaataatttagatgcattgttttattaaacgtgttgaccttgacctccttattctgtcacccgagatcaaagtcaacaccgacaaacatctcttgattcctcgcgattgagtcgacatggaatcaaactaccgtaccgaaagcttaccataaagccactccaaaccctttctattctctatatgaatgatcaattgaacaaggaaccctaataataggaaggatgccaacttagagcaagtagggtaagaaaatttcatgcattaggaatctaaggtttggtacgtcgtattatatcgtattatactctattgtattgcattgtattatattggattatatatcatatttttatataatattatgttaaattttaa

SEQ ID NO: 301641 - DNA, 2729 bp, Cannabis indica
aaatattaagtcaaaactaataaaaataatgataaatgtatctttcaaattttcatcttcaacaaaataaaataatactgttgacaaaaataaaataaaatattgtcaatggtattattttattttttaataaagtattattttttttattatttgtattggactacttttaaaatgggcttgattagaataagagtaggctcatgaatcatgattaagatattgagtgagggcttttgtgaattggactttaataaattgaacaaagtgaattaatatatgtatatatctacatataaaaaatttgatgtatatatttgagtgagggctttagcccacacatacgctaaagtccctccgtccctgaagccaagccccactgtcacataatgagctacaccaacaaacaacaccaatttattgtttcttttttcctataattttacaaattcttaggactattttcactcctatttttagtttatttgcccacaaattaattaattactctaaatttacattacctatttttgtagggtcggtcgatcgtgtgcatgcatgaaattttctaatacaataactctctttttattattgagaaatgttaaaaggtggtgtctagcacatttttatgtgttaatattattaatttatagctaactaatcgcaaaatgaaatgtctagtactaagcaccaggtgcccaatagtaatattcattgttattatttaaaattttattacattttgtataacaaatcacaaattcatttttttaaaaataaaaccatagaaagatacaataaattggtttcatattttattttttaaaattctaattaatttattatacaatataatataggaaccgactacatcaacttattagattttatgatttggtagttggttgtaatgtagttaaaagaaagatgtgacaaacaaaaactaactcactttaattactattctatttataaaaatatttgtatgctttctgatttgatgtactgattttaaaggacttaagaatttgcgtcaataataaaagtaataaactaatgacaccaagacattgtctcttctaccccatgtggtagatagtaagtccatctatacttattagcattagccaaagaaccatttttattattgttagatgtaaaaatattactatatttaacataaaaataattttataacatatttacattaatttttaatattctgctatataattgtaaaacttatcattatttagaacattaaaaataatataaattatctatcatttaatattacaattaaatatactaataaaataataaataaaaatataatatatatatatggtgatacaaaatttatatcataataaataattcaaatgtgatatattaaaaaaaaaaaattaatttggtacaatatttactatggtccaaatttagtataatattttgttatgctccaaatttacaccaccttttgacacactattaaaatacatcttttgctaattaaatgaattatattttaactttgcatgatttatttacatttttattaaattaagatgctctaataatacatgtacttcaaataactcaaaaattatttatattatatcaattattatcattattatcatgttttataaagaactacaattaattattatatatgcattcgaaatatgtacttatttaccaaattttttagaaactaatttaaagaaatgattagaaactaaacaaagattaaaaaaaacaaacaaaaggtttttacatggttgagtggttagggtgttaatgaactaatccacaaattcatattattgaacttacaacaatagagcttttacaatatttattagagtattctctattgtaaaacttaatgtctgaaactcatggtgagggtgatgtcttatttataggtagccatgcatcttgagcgagactaatctagacccaattaagggttttagatgcaaaatagctcatcgatagggtaaatacatgaactcatattgataaatatcaacttgggagcattggcctagtaagtgaggtccaatctctcacaagcaacaagtcgatattgttcattatattattaatgttgataggtcatgtttgagccgtcgtttgcatcttaggaaaaatgtgtgtcaagtgtaatggctactacaatcccaatagagattgtaccttttaccagcacgtttctacagtaggatgacaaactccaaaaatttgtgagatcgtgtcagagatgtggcacgtagataattttggatgaccccttgtatttcaagggatcgtgggtagcttatatccaagaggttgagatctttttggatcattaagacctttcgggagggaggtcgcttcagcgacacatagtttgtatgttctttgttgttgcactcattcagagggataaatgtcttagttatccgaacgcagagtctaaataaggtataaacttgggactaaattaaaaaatacctcttttatttatcaattaattaaatttacttctaatttatatttaattgaaatatacttctttttatatgtaatgtatccaaaataccttaacataaatgagttacatggagagtatcttaaaatgacaaggacaaagttggtacatcgtttaaaaaaaagaagtaaaaataatagactttaaaaaaaaaaagtaaaagtaaaagaggacaatataaaaa

SEQ ID NO: 301642 - DNA, 2926 bp, Cannabis indica
ggatcttgattacataaataaatacaaatttgcaccttatccacaatttgttcgatttcatcatcggaaagtattagatctgattcgtgcaaaagggcctaaaaccatctccttcaactgtcaataaaatgcacatttagtaactcagataaagcaaaaactttagagaaaacaatgagaaggtaaggaaaaaaaaaaaattgctgtactcacctcctcgcgctcgatatatcctgtgtgtctcagatcatacaatctaaaagcaactgcaaaaagataaatcccatccaccaacttagtcaattagaagaaagtaatgtatggttttctttgactaactagttctggcttctgttttgttattctaatggtggcaacagttagaacataaaagtactagaaatctttaacttacatgcaattttgtcttcaacatctgcatttgggtgaaagacaccgagtgatcgaacaaattctccaaactcaataaccccattacgcttaacatcaaacaaatcgaaaatctacaagaacactcaaaataactcagtttagaatgatagataatcaaaccatttgtttccaagagacatgaccattgatattggaacatttcacagagccatgaactactagatgccatattatattgaagaggagccaacattactcaccctatctgcaaaaagattccttctatttctgtttctgaaaagtgcaagctggaattcttcctggtaaacaaggacaagatggaaaattttatttcagagcagtaatatagcatagctgatataatatgaagctaatttattagtcactttacaaaatgtgaccttaggaaatgcaccttatggataagaccgtcgtcaattatagagctgctcaactttttaaaaagctcatacaaagcttctacttcacttattgtgactgcgaaaaattggaaaatagtcaattgtttattcccatatctagttcttgacaatggagtcatgatgttgtttcaaaacattaacaatcacacaatctcttctgaatcgaaaactcttgcaaattacaatgacatctcttgaaatttttccaaaatggtgctgataataagttaaacaaacaagagtttttattaattcagatatgagattatgacagtggtttttatgcaactcacatggtgtttcggctgcaagaacagtaggctcttcatagccaggcgttttcacttgcttggatggataacagcccattattgaagcataactcaagatcaaaactattaagggctgcagaaacagtaaacaaaaccagtgatgatcagtgatatgtaaatatttccttacacacacacaccatattatcactccctatggaccatatgatataggaatggctagacatacagtcacccataaccaaaatcttctaagggctactacattactataattattaagtattcagatacagattctagtgggaccaagcaagcagaatatggctcccagtgcctaaaaatcagtggatttatgtggtggaaactccagctgcacagtatctagttctttagtattaaaggttcagatctggtcttcccttgaataatctaaatataaaatacatatttcaaggaactcatgttgtaaatcaagtaacagaaaaaacacaaaaactgaccttttactcattactttggctcttgttcctaacttttctcacatgaaataaattattacatacatgtctttagattctctttgcatcaaagttagatctcatttcaggaaatttgaactgaaagatcaagctggctaagctataaacagtaattgtttttgaaaatcaaattaatcattttcaatatacagtacttgattaaataatgcagaatatccaaccatttataaaccaacaagtcatctttaataaatcatgctcaaattctgagagatgtcaaaatcaagtttgccccttttggtagctgggaaaatgcatgaaaatcattggattgttcatcttttaaactagatgcaaaggacttgggagataatggaaagcatagaaaacaccaagaaagacaaacacggctcctaaagatcatcgctttctctctattttttttttcccatgttttctcatcaaccaaacaagtataagaaaaagctcaacaaaaatgcataaatttcaaaacctagttcacagctgcattacagtttgaaaaataaagtcccaaaaagacaaaaaaaaacaatgattcaataattgaaaaggagacaaaaatgtaccaaactgaaaacccagttcgcaaatgccacacagcattaaaaaaagcaaaaaacataattcaagaatcccaaagatgattaaccagaaagaaagaagaaatatatacctgtaagagtgattatgaagaaaaagttatgtaatgcaattgaatttgtattatgtatatagaaagaagagagaaactatataataataataataataattaatattaataatagcctttttagtttgtcaagttgaaaagatcacagctttcttagctattccctccaaatggggtcgagaaaattacaacactgtctccctttcgaggccaaacaaccttttttttttaaagcctccacgatcgctttcgcctctcactttcatccttttaatttattatttataataaataacaattattattttatttatttttaaaatataataatttttttttaatatttataattattacacatataattttaataataaatgacactaaaaatatattattttacaatttcatattaaataaaataaaaaaaatatatatgtgttttttaactgacacttaaagaacttaattaacacttaactattaaaaaaatataacggctgttataaaataatataaaataatataaagtagatg

SEQ ID NO: 301643 - DNA, 1014 bp, Cannabis indica
acattgtaaaaacattattcatcaatgtgcaacttactttttcattttttacccattagtaattctctagacacctcaaacgatgacagcatattcctcctttatcgttatctttatcttgtgcatggtctagttattcaaccactcaatttatattcacttattgtaaggttataacttataatatataatatgtagtatgtgtacaaataaatatgcagtcaaatatcataacaattaattaataagcaactatcaaaactatgaacttaatatctgtagttattttatattagacttcctcgtagagaaataaagctcttaaaaagtgcgattaattatgaaataacgacttcttcaaatatcaataataacttttattttgactattatttatgtataatacatttccctttcatttctgtttaactaaatgagtagcaatatattatatatatatataaatatatggtaaaaagtgaagtgaagttggcttagtttttatctcaattacaggatggtcatagttagttttaatgggaattgccaatatttcacctaaaaaaaagctttgaatttaaggagtaggccactacgtacgtgttgaagttaggtggctgaaggcagtcgctggtgcacaccgcacgaaattaattgaaaccttcaactttgatttttacgaaccacatatttcctaactacttcaatccacttttctatatatcccttttcatctctctctttctctcataataattaaactccacaaaaaaatgataatttttattatcttattatgacattactaagattagtgacactaacggccgcgacaatgttaaaattttaatttttgttgcaaaaagttacggtgacgacaattttgtcgttgaataaaaattctaacgataaaacactgtattttatcgttagaaattttagaaacgatacttgtagttattggagatcttgcattttgtcactaaaaaaatctaaaattttgaatatttatgc

SEQ ID NO: 301644 - DNA, 1168 bp, Cannabis indica
ccactcttggaattggcatttttggtattcgaatgctagatttgcagttgctcgggtatcttcctaatcatggtgaatagtgttggtatgttcttgcattttccctaaggcatctcgtaggttttgaaactcagtatcatcaccgatcaccacttgaggttctccaatagatggatcttcaatacccagcccagtctttctgttatgagtattggtggttccaatttcatgtgtgcctagattaaacctagccaaaggggttttcattccctatcctgctgatgatggaactcatggatgcagacggatgatcgggtcaggatctgccaccattgggacgctctaattaataggagtttgcacattaggattcgtagccattgaatcatgttgtttcaatggtttgggaccttctagtagttacaaccatctttggtaaagatcaaagcaatgatcaatgttctttttgctctcaataaatgcaccaaaattttgacattgcttttagccaacgacgctaagtcaattaaagcggtgagaataatagataataatgaataataattatacatcgttaagcaaataagagcacagagatttatagaggtttaacctcgtaattatggtaatagcctactcctttttttacttatattacttatgagaaaagaagcaagtgagatctagatctctctcaaaagcatacaaataatttgacagcataagatctctcttagaatttgaattctgatccctgaatagtgagatggcttcactatatatagggaaacattagattaatttagttccccaaaataattatgaaataaaagaggaaacttgattactttcctattttacaacaacaatgtgtggaaatcccactaaaatagagatttaatttataaatgataaagaaaagtatctccaaagttttgcttcaggtgcatttacgtggtcaatgcatgtaggctcgatgtaagatcgaagctagtcggacagttgtattcaccttgttcagatgtttctttttaatcttaaatggattgtttctggataataagccactctcgatggcatgctgaggaccgtactacccatccatgtaaagaccgcttagtttaatttggaaattagcaattaattatgtttaattatggaaaattat

SEQ ID NO: 301645 - DNA, 2980 bp, Cannabis indica
atttcataaaaactgggataaaagtcccccttttatcccggttttatgaaataaccgggataaaaagtcccccttttatcccagttttttaaaaactttttatcccactcgcatatatcccggttttcattttagcgaaaaccgggataaaaggccttaaaaactgggattaaaagcctttgtttgtagtagtggtattatattatttatttcagagttgttatcttctaactattgagattttttttttattaggttttaatatcatcagtagggaattaattcatcttttatcttattttattttgtagatattttggaaataatttttaatatgttaatgagcaggggtgtagtattcagtgatataagttaaaattctagttctttgggtgtgcggtttgaattagaggtggcaattcgtgttcgcgggtcgtgttcgtgtcgtgtcgagatccatgtataacaggtaaattcttgacccgaacatgacccatttaataatcgtgtcaaaaaataaaacccgaacacgactcgtttataaacgggttgacacgacacgacccgtgtaacccgtttataagcatattttgttcaaacatatcaaccaataacacgtttatgaagtatttaacacgtttataatccatttatgacacgttaaagtactaaaataactttaaatacgtcattaacgggtcaatatcgtgttagccgtgtcaacccgaacacgatccgaacccatttaaggcaaacccaaacccgctaactgtcgtgcgggtttcgagtcgtgtcatcgtgtctgacttgttttgccggtcctagtttgaataagttatatcattgttgtttaaatttctgaggacagttttgtctcatgctgctgactttagcagttcatggtttgataaaacatgctctttagttagacgatgagctttctaagttcaaagaagttcttacactgtttacaaatatcagcatcgtaaattcacgagtgattttaatcactacgtaaaaaattactaattaaatataagatatgctcacttttttcattacagtgatatgcttaaatgtgtatagttaataaatgtagtgactaaagttactcataattatatggaagactaaagtaaatcgaaattcaaataaaaatataaattatattacaaaaatcagtataatataagagtgggtgtgtctaaattgtaaactacactgcacccattacaagaaagatgacttttggaggattatctgaaactcgctaggtgaaacctgaatgcatttagactatatcaacacacaagttgccccatatttgtttcacaaaccctttgaaaactcgaaaagggggttgtcacccagaacaatacaaaatatagaggaacgccaaatcgaggcttcaaactctacctcatcaatatccaatttagcaacacatcaacccccacctttatggtttagtatattcaagtagggtgttcataaaaaccgataaaccgaaactgaccatcaaaccgaccagaccataaccaaattttcggttccacgtcatcaccaaatttaacggtcggtttcatttcgatttttttgacatagtggtcggtttcggttttttaaataaaaaaaatagttaaactaaaaaactgcccaaagccgccaaaaatggtccaaaaccgtaaaaaaccgtacagttggttttatatggttataatttctaaacggtcagttacagtcggttataaaattgtaaaagccgaccataagtgaccgattttcacccctgttcaagacgagtaaagggagttctcacctgattagttttgaacttgctccacgcatccttaactgaagattgacaatccacctttcccacctcctccaccaactagaagatttggacaaattgatcttagcactcgcaacagcaatccaccaacgtcataggctgcaattcagtctccaaatcgttacaaggatcgtgaaagacctcattccaattcgcttccaccatcacatcttcctggatcgaagggatttcaatcttcgtctgaaacgtttcgacatcagtgaccaccaccaccaccaccaccaccagcttcaaaacttccgatccatggagagaaaaagctaaaaccacacgcaattttagaattttaaaagacgatgtaaatgaatttacaatgtgtaaccataaaataaacattataataatcgtttgcgacgataaatttacactgcggccattatgaatttaatatgattattttacaaattttataatttagtatctatttacttaagcagtattgatctactacctctcttcagaaatcatatataaccatacacaaaattgtatttaattattatcacattaatatatactatactacattaatcaaaccaaaatgaaaaggtaaaaaatcagaaaggaatagaatcttggaatttttaatagaagtgcatgcatgtcctagaatgaagtgtgtgaatgagactttttatttgtgttacaatttaattattagtaccaaagatatatgcataacctttttttttcttaattaattaatttttattttggtaatggtaaaatgtgataatctataattaacagctgtaatattcagttggtttctatataattataaatgatattttaataatacataatgtaaagacttaatataattaaaaatattattattattattactattattattattatatataatgaaaaatttaaataactattagaaaaaaaaaaacaaaaaaattaggctagattttgcagggaagagaattaattaacagaaacgaaaaaaatgaaaaaaaacaagaaattatgaactttggattaattaaagaaatagaagaagatataaatacatacattaataagaaaagcataattagcttatgttaatttgtacaataaataaaattaatcatctctataaaaaaacaa

SEQ ID NO: 301646 - DNA, 3189 bp, Cannabis indica
tctaatgtcttttgtattgtttaataatattttctactttttctctgcaataaacccgtatttttattgattattagttgtttggttttgatgaaatcacagagacattcacgaggctgctcagaatcttgttccgcctaataaattttttgcagatgcagtggatgctcggcaagtcagtagctttcctcaccaagccaaagacatttcgactcacattcatctttgtagttgctgacttgttttcgattgcaggaaatagatcttcgtattggggcttcttttacgaggtttcagactatgttgttgagagatgcatttgttattgatgctggtaatgatgagagaaaccttgttctaagttatggtccttgtcaggtatgtacttcatgctaacttgaaataccaatgacatagctgatttcaattttggattattagttgctttgcattttcaatttttactcctttttctctatacagtttcctacacttggattcgtcgttgaacggtattgggaagtacaatcacatgagccagaagaattctgggtcatcaactgttcacacaaatctgatgaaggcatttcaactttcaattggatgtaagccatccaaacatctatgcagaattttcattctttctgagttttactcgtcattatatttacaggactaatacacttttaaacacgcaggcgtggtcatttgtttgattacacttgtactgtggtaatttatgagatgtgtgtccaggagccgactgcaactgtaagtgaaattgagatttgcatatcgaggtctttgaggtatctatttaaacagattcccctcccccttttggttgttggttcactgtaggtcacaaacgttagaaagcaggagaagcttaagtatcctccacatcctttgaacactattgagcttgaaaagcgtgcttcacgatactttcgcatgagttctgaacataccatgaaggtgagcatttcacatctcacattttctcatctttgttttaattgataatgtcattacctattgaagaagaaatctagcagtttatgtgaatcggtagataatgttatcttttttatctcttggaggtgaccagacttgatgcaatgaattgcacgtttcagatttttcagtatgcaagctaagacatctcattttcattaatttgaaaaggaactctatttattaggatggttaatctgaaattctgtataaactagaattaacacagggaaattgtaatcctgggtactatagaatttcagattagaaagttaacatagggaaattgtattcatgggtattacaagaacaataagttgaatattttggcttatagttgtgccatctgtgggtgaaggacctcagatgtatcttgtccttcttttggatcactttagatgtaaagaacattttccgtcttattttgtttttgttttctttcttttttttttttttttggaaaagtccctcttttttctcttctttttctgtatgctgtagctgacaaaggttaactggttggatattttcatgacctttgtagcttgggctcaccattttttttgtaggtggcagaagatctttaccaagcaggttttattagttatcctcgcacagagactgattctttttctcagaggactaatttgcatgtaggtaactgtttacaacttaaaagaagtaaaattttggttgttgaagttacctgcattgataattgaaaattgatttgacattagcaagaataaaacattagtaatattatatgatgcatgggagaagttaaaagaaagtaaacctagagatgaggaaacaaattaaaattgaaatttcatatgaaagagtgatcaaataaaattgaatggcagtaaaatacatttgaatatatttcaaaatttgggtttttagctacgttgacgttagcacaaaaatggatgtatgaaaatatttgagattgcttaagcttcttgtcttaggatatattgcttaaccttctacattttgatcttgtattgatggaagaaattttagctatcgatattgatcttctaggtgctgtagcaaaatcttaataatgaacatcctcacatgtaaatgtactggttgaaagagtatctaagttatactcttgtattttcctaacctccacaattgatttgctaaaatatttgaattttaagttctgatccctatatgtgacttctaaatttgtaggacactaatagcgtatttatgttcttttaacttgtttaatttttcagtagtatttttgattttgttgattttctttttcttttgtccaatgttaaaatgtttggaggttatgttgaactacattaactttacactttccagatgataatggccagctttgattggatattatgtttggttatccttttgcattatcatcttctttagtaaacctactaacgtatcgagctcttaataggctatagtagaagaacaacaagggcatcctgtttggggatcatatgcacaaagattattagaccctggtgctggaatttggagaaaccctagtaatggtggacatgatgacaaggctcatccaccaatccatccaacaaagttctctgctggagaacgatcatggagtcaagatcaccttgtaagacaccatttatataatatattccaagcaaaacattagtatattttccctgataagttaatatttttcagaggttgtacgaactagttgttcgccatttcctggcatgtgtctcacagccagctgtaggggctgaaactactgttgacattgatatcgctggagaattgttctctgcatcagggagggtcatactagcagtgagttttcttttttctgctgcttgcagttctattttgccttttgaagaaaatttgcctcatttttatttatgggttgatgaataataataatcattattaacattacctcttttaagtcttgtacatctttaatgaagttttggtaaaccttaatcatcacaatttgaattggtttttcatgatttacgggctgatgtaatttaaatatctgagatactattgaccgtgaccaccataatttgggggtgttcataaaatatttgatccaataaaattcgcaaagtgtggatgtctgcacttgtacgaattggattgaaaaatctaaaatttgca

SEQ ID NO: 301647 - DNA, 2019 bp, Cannabis indica
atattaaaaaaaaaactttaaatgtaaaaatataaaaattattattttatataattatttactaataaaaataacacgaaagttattacaagcctcaataatatccacaatttttacaagaaatacattgaccactctaaagatgtgcaaagctgttaattagctattgggacaataatgaaaaaaatgtgattcttatgtacacaattttgtagattacacgtactctcatcaaagtatatatagtcatgctagcgatcccttttcaaacaaaatactagcaatcctttaagaatatattaaatttgtcggtgaaactagggattttttaaaaaagaataatgataaagaaattaaattgtcggttgtgcattccacaacttctattccatgattctaattaaatagtaatcaagataacaactttgacttctcattgtaattaataacatgtgaaattatatttgctttaataatagattacaccccacctctctactcaaatatttctggtacattttcaaatatgttcggtaaaataaatactaaccatgatcattaaacttcctaaagtatataaattatctacacctttcactcatttaaggctttagcaactatacatagcatgtaattgcgaagcataaattaaaaccattgacagatgattgattgcaagtaaaaaaaggacaagtttcaaaatgacagaataggacgtatatgtaggacaacttttacttagttatcagagttagttaagagatagtttgagttagttgtaggttgttaattttgttaaaattacagttgtatcgatcttgagctagctaaccaactctcttgaattttatatattctattgttgattcattagtgaataattagaagaaaaatctatattcactaagtctttctctatctttctcattgtctttcttctctttcatttcgtttctaccatgcttaaaaaatttaacatagtatcagagctccttccatcattgacgatgaacaggaccacaaatttcgatccaaacactactcatgcaactatgaatgcctttgcaactacgaagaacaaaaacagagttggtgagaataacattgtgtatttcaacaacaatcttttagcgaaattgcactatcacaacttcttgttatggaaacaacaacttctagcacaatcagaggtaataaactccaaaacttcatttgcgagaatccttcactataatttctatcaaatttcgaccgtgcttcaatgacgtacaaccttgccttcgtggagtggaaaagtcgaggaccagatccttgtattctggcttctctcatcaatgtctgaaagcttgctaacaaggatggttggttgtgattcttctcgccagatttggagcacattggagcagtatttcatgttgtgagtatctacgaagatctttgagtttcaaaccaaactttaaagtctcaagaaaggttctcttcctctcactaatcctctcactaattatctgtcaaacatcatttgacttacttgcatttgttggagagagacttagtattcgtgatcatgtgtcagccattttcaagggatcgcttagtgagtatgacacatttgtcatatccaccaacactggaacaaagggatattcaattgctgattgaggcattgttattagcttttgaatctcaaattgagaaaacaaataaagaagttgattcaagaacacgttgctaaatcagagttagacttagctgaagctaatcttattgcttttgctgctttcaatcgaaataggtcatgcttccctcgttccctgtccttctttggtcgtggcaacaaaggttttacttgaggaggtcgaaatccttatcacaataatagaccacagtgtcatttttgtctaaagtttggtcacactatggtagattgcttcaatatatttaacaaaagttttacaagtgatacaccacgtagatcaacctcaaacagtccatgtaacaccctaactatcttaggcg

SEQ ID NO: 301648 - DNA, 1025 bp, Cannabis indica
aaaaaaaaacaaaacaaaacccttctaaaatataaaatataaagcttattaaataaattttaaaaggatttataccaaaccataaaaggacatagatcttaatagattattacctttggtttggaagatagttcaaaaactatacagttactattttttttccttttaacaatcattgttgacaggtacattacatgaaataatttaggattcgtgtattaaaggtagtttttttattcgaattgataaattagtcacaaaaaaaaaaatgtaacgcatgaattagtcaaatttaattaatttttctgcaattacctccttgaatttgattgaattagtattatatcatattcttttttcaataaaatgttatttatatcatttaatcttataaatgcataggtttatttctaaatatatataggcatatattttttcagcatatgttttaatggttaataaactgtatttttgaggctaagtttgccttttagttcagcaagcaatttgaaggagcctaacaaaatggtttggaataagaaaatcctaaatgtggaaggtgtagtaatgttggctaatttgactttggacagtggttagttgctcaaacaaaagttgtcatagcaaacttcactatcaaaagtagagaagatgtgttgcagtggtacaagccttagttgaatacagccaaagttaatgttgatgttgctacatttgacaagctaggaggagtgatttggatttggtttcttagcccgtgatcatcaaggtgggttgattcaagcagttcagcaatgtaagagtgctgatgtagttgagcattgagctgaaggaggtattgagttggataaagggtagggaagggtcattcttgaaaccgattatttcgttgtggttcaagctcttaatagtcctaaatgatttggaaagggaaatttcaatttttgaccctaataatacaacctatatcaaaatttatacccctttataatttgtacaaatttagtccattaattacatgaact

SEQ ID NO: 301649 - DNA, 2078 bp, Cannabis indica
ttactttacagcaactagttatcactgacgattttttagtgacaacacatcgccattgatagccataattgacgaaaaagacacccttcactgatgaaatttgtcctcattgaaacttatttttcttgtagtgtgcctgttgagatggatcagaggatgactatgccatgaacgaaggtcagttactctgatacgataaagaattttattatgtcaaagatttttagaaaaacaataatgagaaatgcagtaaaaacttgatctcttcagctaataaatgttttatttataaagaaaaattatacaagtattctattacaacttaaagtttgttacacaactggacaaacagttacaaccagctgttacaaaacaattaatttctaattgtatttaactaacaactatatttacagtattaattattatcattatatgtcaaaattgatagggaatttaccgaaatatcttttagatagtgtatcataaacttacctaatgttttagaatattttaaaagatattcatttgtagacaattgttttttgttaaaaaaaggcttgataattttttagctggcaaatgtagaattcttttacatggttttgaaaaatcactcaaatttatcacgttaattagttagaaaagtaataggtgaagaccatatgtttcattattatttaattaaaaccccaaaactacaaaagtagtaactagtaagtttacattaatttttagttcctttatttttttttttttgttcagaagttatttaattaattaagagacgtagatgttaaataatttctatagacttgaagcttaattataagtgggaaatgacattcatacaataaattacacaataataacaataatttggtcattgttttcaatgatgatcaataatatagtagtagtttatgatgtcacatcacatcaactatatcataatgggaattaatatgggatcgttttcctcaccgtgtatcgttataagtaggaaatcacattaatacaaattatttatatatatatatatattttatgagtaatgatatatacacataaattgtacataattataacacacgtagcaattcactttttataaatgaaactcctcttaaataaaactaattagttaaattaatttatgtacacatgttttaccttaagttcggatcaaacccatcataaccccatattatcacataggcttctaccatttgatttttaatttaggccttatataattagtttaattattattaaataatagcatgtagaaattgagaattgatcatttaagctaaaaataacaatctctaccactatattaaacatcatttgttacatgtaattattatttaacaactcttttattacactaataatgtgtgatcaacacaagagttacaagtgaatttctcatcttaggatcaatcttatatatatgaatagtaataatttattcgtattttgtacactcatcaactcagtataaattatgtacgtgttttatctcatattactcatgtgagtaattttgaaggttttataatacttctaagcctcatattagagttttgatactttgacaaaaggtaagtttggtaacctagttatataaaaataaataaataaataaaatcaacagaaaattccatataatgttagttgaaaatgtaggtttggtgggttgttcattatgtctacagataatctagtagacccaaaacaatataaaacaataataaaaaaatatataatacacatataaaatatatttatttatgaaaccacaatatattatatatagaaatactaaagatatttatggtgcctaacacctttgtgaatgtaatatgtaatatcgctattagtgtaattcaatattgggctccacatattttacttaaagattataagacgtcatctaatagtgttaatagaccttagtacctcataagaatgctttattatatatctttatcttgtgataagttgataaatatctcttttttgatatttattaataacaatattttatattatattttattaaaatatatcca

SEQ ID NO: 301650 - DNA, 2334 bp, Cannabis indica
agaaaactttccaagaggtcacctatcccgaatttactcagcttaagcacacttaactttagagttctttcataataggccaccgaaaagaagatgcatcttgttaatataggtagtaccaatcaatccatttaagaccccttcaactgtgtagtcccatacctacacagtctaagaattatcacacttcacctatcccaggaaatattggattgcacggctcccatctttctccttgtgaatcacgggactttgactgtcacaatcacctctctttaggaattcgatattctcgtcgaccacacttctagttaggtcaagactctaataccatttgtaacctccccgctttaagcctctattaggccttcccccacggactaatgactcttatacacgggaacgtcactcttggctattttatagaatgacgactgaccctgcaaactaatacgagtctttccaatgtgatttgtccttactcgcctgcttcctagaaaaaagttttcaagaggtcacccattttgaaattattctaggtcaagcacgcttaacttcggagttctttcatgatgggctaccaaaaagaagatacattttattgatataggtagtaccaatcaatcaatttaaaccctcttcaattgtgtagtcccacgcctacacggtctaagaatcattacacttcaccttcccaagcgatgtaggattgtacagctctcgatctttctctttgcggattgtgggactctgactgtcacaccctcctatgtgtgatatcgtcattgatgcaattaagtatcgggacccatataatttaatataataacttttaggaaaaattactaacaaattgtatagcgccacctctagaaggtgctgggataataatattgtaattcaatttataaactcatatttatctatacattttaggaatttgaggaggggcatcggtgtagacatgtgactacacagttgaagagggcttaaatagatttattggtactacatatatcaacaaggtgcatcttattttctggtagtccatcataaaagaactctacaattaagtgtgcttacttggagtaattttaaaatgggttttcctagggtgtgtctaagtgaggacaaagcacactactaaaaataccagtgttggtttgtagggttagtcttcattctagtaagtagctagaatgacgcacccgtgtataaaagtcattagtttatgggggaaggcctaatagaagcatgaagggggaacattacaataatctaggcacttagtcctaccattgttatagaaaaatatatctctaccttcaacaccaacatcgttgtacgatccatacatattgggctaaaattatgattttgcctagagatctacttaagaaggtcaatgttatttgtagttatctctataagagtgaggtagattcaactaggtctgagtttattacttgaaatttcttttgtcagttaaaaaaagatggtgcgcttggttttcgaaacatatatcactggaatattggagcccttagtaaatatgtttggaatgttgctacgaggaaggataacttttgggtaaaataggtacattcggtatatatcaaagatcaaaattgatagaactatgaggttccatgaaactttagttggtattagaagaaacttataatgacaaaaaataacattagaggtaaaacagagctgctacttttactagcatgaaatttagtatttatgccatttataatctaatatggtctagagataaggggaacagaaagtgattttcccttatatggaataggcaaagctaccctaggcacaaatctatcacttggcttgcttgttggaaccatttatacactaaagatcatcttgtcaacttaactgaggtgaattgcttattttgtaacatattattagaaatagagcagcatattttctttaattgcaagtatagtaagcatattcaaatgaagctttgtaattggtgtgggatgaatactcataatcatgatctttcgaacaatctgaaatgggtggcactacaaaaacagctactttttagtgacaactttttagtcacaacataaattttttgtgattaaatgtgacttttggtcacaacaaaaaactatcaattgtgtctaaagcattgtcactaatttatttttagtcacaacaagtattgtgactaaaaccacatttagtcacataaattgtaatttttgtgactaatacttttagttcacagaccttttagtcacaacataggaatgataattaataattagtcacaactttttacttttagttcac

SEQ ID NO: 301651 - DNA, 5169 bp, Cannabis indica
atcattaactaataaaaaatattaggtactatgattcccaataacaatgatcttagaaaaattagcccaccaaatagtagtagaagtaattgataaagtgagtatttttatttggtacactgatacctagaagcataagtaatatcttacaaatagttagagatattttataggatttttcttttatttttacactttaaagtacttttttatatatttttacgaaaatttacataataatcaacggagcaatttaaatcgcaaccaaaattcacatagcaacttacgtaaaaattaccaaagcaactaaaaaaaattaaaaaatagcatatacaataattttcctattctataataataaataccatatgtgatcaagttgattaggtaatataggtgtgatttaacattctcatattaaagtatgggacacatcattatttgaattttatatgacaaaaacaaatcatagtaccttttgtgttgtttgttaccaataagttacactctacaacaaaaaaagcaagtttaccaaaaaccatattatattcatatataatttatcttataattatcatagattgactaattagatagaattaacgaatttgattacaattttcaacagcacatagaatgtatatcacatgtcatactatttatttatttatcatttaaaaaaaaaaatattggcattacaatcatggatggtagtaagaggactaacaataacatacctctttcattgtgatatcgttttcatacaataattgtcgtttcttagtaaaacagaaaaaaacggattaatttcattttcaagaattattgtcgtttaatggcaatctagtaatgtcgttttccaaaatcaatgtgtgatttggttttgattgggtgacgtggctatcttcataactacaaacaaaacaacacttattagtgtcgttttcatacgataattgtcgtttgttagtaaaacagaaaaaacggattcatttcaagaactagtgtcgtttaatgcaatccagtgatgtcgtttccaacatcaatgtcgtttttcaaaatcaatgtcgtttttcaaaatcaatgtcgtctatatatatgaataaaaagaaaagatgactggtttggtttggttgggtgacgtggctatcttcataactacaaacaaaacaacacttatcattagttggttaccagttaccaccataactgaacttaaccgaaaaaagcttcaatccatattcatggcgaccacctctcttcttctcaatctcacccctaaagtttacaactttcgtcatcctcgtccaaaaagaacaaaccccatattagctcgaacctcatcttcaccatcttcatcaactttttcaagtggggcagtgacagtgaaagagaaaagctcattcccaggaaagccagaggcagatgttgtagtaatcggaagtggcattgctggactctgctgcggtggactcttggcaaggtacgaagaagatgttattgttcttgaaagccatgatttgccaggtggggcagctcactcttttgatatcaaagggtttaagttcgattctggtccttctttgttttctgggtttcagtctagaggtcctcaggccaatcctcttgcacaagtaagtaatgaaatgaatcacttttaatttcaatttcaattcaggtaattgttttgattttgagtgagcttttgtttttgggtgtttaattaaattaggttcttgatgctttggatgagagaattccttgtgtttcttatgattcttggatggtttatgttcctgaaggtgaattcttgtcacgtattggccccactgagttttttaaggtggaatctctgatacttaattatctcatgttgtttgtatggatcatataattacatcctattatatagtataatattatattgaatggtaagatttaatatgacttaccaaacgaagccttaattttatgatgattatattagtgaatctataaccccacatgcaatattcagattcaatctttttggaaatgaattgtgatgcaagctataaagatcattacttttcaatgtgttccaagtttcaatacttgtccaaatatcaacaagaacaacaagatattgctcctttcctccataattccaaagctttgttctttccattttccagttttttctttccttggagattaaaagccaactaggatgatagatcatgagtcagaagatttctcataccataattcatgtgttgggatatgaaaaacccaataagcacaactctcaaaatatgcttcttcacatcaatgttctgttctaactagtttttttttttcaatttttacctgatctgagtgtttcttcatatcacttatgcagacctatgtgaaatgttatctcactctttcaggaccttgaaaaacatgcaagtccaaatgctgttagagaatggcaaatactcctggtaagcataactataagtttggctctttcatctttcttgtcaatgttaattctttcaatttagtatagaataaatagaattttaactccctaaactatgatgcttgtagggtttttccccgaaattaattttattgaaaaaaaatcccctgaaactataattgcaaatattctccttcagttgcattttgctcattttttgagataatttattgatgtgaccacaagccacgacgtgtataatcaagtataatgaccttaaacactcatacagtaaactagccttggatcagtctaacatcaaaaaacaacttggaaaaatgaaacaaacgcaaccaaaggtgcgaatttgctattatttccaaagttcgagggaaagagcaaaattatataagtgttatagtttgggggtaaaaatcttatttattgtttagtatatatggtgtaatatgattagctaactatgcatgacatacttcaataatgtaaaacaggggaattaagctatcattagcttggaaatcatgataaggaaattggtttaagcttgtgttgtgttctaattttgcataagtcttacttgttgctttgttattgttctcatatggaagatgaaactcttcaacaggatgcagttcttccactatctgcagctgcaatggcactgcctcctctatccataagaggggatttcggtgttctttcaaccgctgcagccagatacactccctcactcctcaaatctttcatcgaaatgggaccaaagggagctcttggtgctacaaagctactaaggcctttctcggaaattgttgactcattaggacttaaagacccctttataagaaactggattgacttgctggcattcttgcttgctggggtcaaatctaatggcattctctcagcagagatggtaatgattttaacttaagtcctaaagatatgtatgaaccatttatagcaacacagtttacattgttgttgtctttagatttacatgtttgcagaatggtacaagccgggttgttgtctagaataccctctacatggaagtgcggctattgttgaagctcttgtacgaggattacagaagtttggcggacgcctttctctagggagtcacgtagaacaaattgttgttgaaaatggccgagccactggagtcaagctaagaagtggtcaagtaagtactgaatcactaaacttcggttgaaaaaaaaaaggctaattagaacttttgcctctgaactttaacatgttcaggccgttaaaaattctccttagactattgagattgttagatttaaagacttttgtgcaattctatttaattttactgatgcattttttgtgtactaaatcgtgtcccctgaatttttatccatgttacacttccgttagtaaaattactattaaatccaacaatctcaatagttcaaaaaaaaattttaacggaaatcaactttttctaacatttggactatgctgcagtttattcgcgctaagaaggcggttgttagcaatgcctctatgtgggacactgtaaaactattgccaagggatgttgttccgaaatcatatgcagaccgagtcaacacaacaccacagtgtgaatcgttcatgcatctccatttgggatttgatgcagaggtgaaatgtgatacataaatgattgcatatcagattatttggttttgtgttgtttttctaaacataatgaattgtgattcagggcataagagaagacttaggaatacatcatattgttgtaaatgattgggatagaggagttgatgctgatcaaaatgtagttttgatatctataccaagtgtactaagtcctgatcttgcaccacctgggaaacatgttctacatgcttatcttccagggaccgaaccttatgacctatggaaaggacttgatcgacgaagcaccgaatacaagaacctaaaatcgcaaagatcagaggtacatgaattcaccttttaacattcattgaagatttgagtttttgttagctaacaatgcaatgctttcaggtgatgtggaaagcagtggaacgagcagttggttcgggttttagcagggaaaagtgtgaggttaagttggttggatctccattgacacatgaaagatttcttaggagaaatagaggaacatatggaccagccattgaagctgggaaaggaagctttcccgggcattcgagtcctatcccgcagctttattgttgtggggattcaacttttcctggtataggagtccctgcagttgctgctagtggtgccattgttgctaattctttagtttctgtgtctcaacactcccaactacttgatgccattggaatctgaatatgaagtgaacacctttttattgttgttattatatgttcatgtgtgaaatttacacttgtatattttttacacttctaataacctttatagcattatatgatttaatttaggcatgaatgcatgcctttgcctttgataataatgtgctttattccactatatgaccaaaaatttatgagttaaattcctatttttaccttttgttgtttgttacctataactataagttaaactctacaaacaaaaaggcaattggtaccaaacaccattttatattttcatacttccaagttatcttataattatagggctcgtttggaacgccgtattaggtcgtattg

SEQ ID NO: 301652 - DNA, 1143 bp, Cannabis indica
ttacttataatcgttttagaagttcatattgaagatgttaataaaaatacttgtgagtagatctaagatcctggtaaaataattccaacaaaacagcgttgggaaaaatatcacaccaagaagccgaactaacagcccaatcaatatgctcacgaacagagttattacgccaagtaaatttatttccctcaaaaggcaagggtgaaagctaaaacttatgaagaaatttcgaaaaattgtccatatccctagcatcataataagtactacccactttatcatcataggataatagactgttaaaatcacccattattaaccaaggaagagtaggagcattgtaaaaaactttatcaagaagaatccaagtaaaatgtctttgagaggaaataggggaaccatagaagcaagtgaaatgaaacagtttattatcattaaaacttatattaaaatctatatgatcaaaagagaataataataataataaaaagatagtccttccataaaagtaaaagtcccccccccccccaaaaaaaaaaaacttcctagggacctcaaaaccatggtcaaagcgtagaccacttctaaccctatctacagaacccacagccaaacgggtttcaatcaaaaaaagacatcaggacagtgacttttcacaagtagggagagtctacggaatgcacgtgtactccccaaaccacgtgcattccaacaaagaagactcatttttttgggcggccctgttccatatccgtagatgtagatgaagaatcctcctccctttccccagcacgtgctctcttcagctgtgactagacagagccaccaataaccacctgttgaggaatgaaagatgggtgtttgaccccagaagccgaggtcaaccctttcccacgaaccaaaggatcaggctgaccaacatcagcaataacttccacaacagtagcaggaccaccagaggtattacccacaacattagaaaccaaagtgcccatagcaccagaagccatatcaacagtacaagtggtagtagctgttggaaattattttaccaggatctagatttactaacaagtatgttgattaacaacctaatatgaattctaaaacaatgaaaataagcacatataaagttagaaaacc

SEQ ID NO: 301653 - DNA, 3141 bp, Cannabis indica
tgctgttgcaggttctcaaattgacgatcaacaataatcaacatagtttttccttcatcccagctgtcgttggtctttatgagaacttgtatagaattcatgacctataacaatttaacaatacaacataatctcaacaaaacaatggcagaataattataagacaattgatgtagtgctgttttgaaaaatctctatccatacctattattttttataggataaacatcgatataagtactcaaagttttatgttcgtaagcgcataaattcaatatttatttttaacggcataagcacttaatgtttataaaattgtaatttttctctaattttgtctgtacagactctattattgtcttaaacagggcacataaaaagctcgaatgctagatcattgagtctagataaaaatatgtagtatcagttactttcaaatgttcttttaataaattcaaaatagagcctgtactgacgacgaaactggaagaaaattacagttttacaaacattgagtacttatgccactaaaaataaacattgagtttattccgcttacaaacttaaaatattggatacttatgccgctatataccttttttatattaattaatggagattttttgtttattatttccgaacaacctcaaaacaatgtcaattaataaataatgcatatagaagaagaatagctattttagagaatgacaagtttaaaacatttatttgaagtgctcaaacaatatattgatcgattagggttagcaaaatgggtcagacatgataacacaacttgaaacccaaatgagaattgacgagtttgggtttaacttaaatgggttcagattgactcgtttaacccatttaataaacaggccgtgttcggattgacacggttaacaagaaactggcccgttaataacctatttaatattattttaattctttaacttgtcataaatgtgttaaatatgtcatagacatattattagttgacatgtttaaccaaactatgcttataaacgggttacatgcatcgtgtcgtgtaaactcgtttataaatggttcgtgttcgtgttaagtatatacttattatgtatgggtctcaacgcgacacgaatactacctgcaaacacaaattaccacccggtcgatcgagaagataaattaaaaagattatttaaatgataaaaaaaaaaacaataaaaatagtttgatgcaggtaaacagactgaatatggataagaagaaaacaggactcctaaaaagagaaaagaaagaaagaaatatttaaccacatttttactagctttatcacaacagtattcagtaggcagcacatcaattcaacccaaaaaaagcttggatttggtaccaaagaggtgatgatgcattgatgcagagaacttgccctgcaattgctcggaatttgttcaaaccaggaatcattacaggtaatacgtcttcttcttgttctagtttttcagtcattgtagcacaaactcattcttagactataaccattgagcaagtctgtaatgttgaagatgctctcaacatgtttgatacaatgctccacttgcgacctctgccttctgttgtacgtttcagtcaattgtttcgtaaaattgtgaaattgaaatactattctcttgtgattactttctacaaccaaatattttcacatggaatcgtgccagatgagtatacactacgctttttgattaattgcttctctcatctaaagcgtatctgttttggtgtatctgttttgactcttcgcaaatttaatcaaatttgggtttaaattcaacacaatcactctgactactttaattaaggggacaattgatatgttagcagaagaaggttttaagcccgatataattatttacaccacactactaaatggtttttccaaagtgggaaaaatgaacgaggctaaagaatactttcatggtatgaatgcagaaggttttaggccagagagaattaaaataatatgtaatggtgaaattgattcttatttccaaccagtgatttaaaagaatttatgagctatttttatggctttcatatgtatgttcttttcttacatttgtgactaagtttgaatggattaatgtcatttttttgagttcatctttcagaggcttgttgttgtgtggttgtatttatgtttggagttcttaatgttgctagctgttaagcttttttattttcacactattatacttattatgaccttctgatctgttgactaaagaaggcatctctacaacatccataaattgttcgagactgaagttagtgaactgatgctgtgagaggtatttttgtcattttgtgttgattggtagtgatttgcactgtttcacttgctattgaattttgttttgaaaaaaggggaagaatttgaattgtttgagccatcagagtcattctctacatcatcggtatgttaaggttttgcccttaattatgttctcatattgattatatgtgtgtgataaaatgattcttagagaatgttactacttttattcatttctattttaatcggatttgtaagtgtcattgtttttgtatggcaaattatgtgaaaactttgtgttcattattactgtcttagtatttgtcatttgtcatctaagttgtttttagttgcatttgatgtcttaagatctgtgattgttgccatgtcagctatctgttactttgtcagtttgtgccagttgtccttagctgggttgttagttagtcgaattatttctctatcttcaggatatatatattctgttgttttaattttttaactaactctcttctgttagaatcgtcttcttgattcttgttttgttagggcaaaatattcttttgtatcttttctggtttatgtgcagatggaaattctgagacttcaagaggttgaagaaggagattgaatctgcttgatctgaggagagttcagagtaaactgctggaggtgcttcagctgtgtggatgcaaggtgttcttgtgttcttagatctaaatgagtttagatctcaaaacttgagtgtgttcaagtgttaggtaacattgtgtaaaagtcatttcagattactttatttgatttgtaaaatcagaactggtgtttgt

SEQ ID NO: 301654 - DNA, 3522 bp, Cannabis indica
taataaaaaaaattatttaattatttctcatcttacatttgaatagtctttccttctattttaaaatagaatagccattccattaaaataatagaaaaatccctctattgaaatgacatttcaatactttgaaattcaactaaacaaaggaatggaataaaatttatttcctttccattttattccatttcatttcattacctccaaccaaacacaacttgtctcggtagcgttctatcgagcacatagtgtgtttgagtaaatttgataagagtgtaaagactgaatcagaaaatactttctagtaaagaatctaagctcacatctttgactgcatatacatatactatttaggatatctttaactgcaataaaatctctctaaatatataaaactaagtttagtttaggcattttatcgagcacataggttctgtttagctgtatttctgcttttattcacaaagctaaaaactaaaatttactagttaccaaacatagcagacatagtgtaattcagtaaatttgataagagtgtaaagaatctaagctcacctgtttgaatcacgagcaggaatatggccagaatctgaaacgttcagcgataaaggcttgggacccatcccatccagatggaaaggagtatgcaaatcaggagaaaacttcaacggaaccaaacactgcaacaaaaagctaatcggagcacgttacttcatcaaagcactcgaagccgaattcggaaagccattcaattccaccgaatcaggggaatttctctctcctagggattcaagtggccacggtactcacacatcgacgatcgcagctggatcttccatggccaacacgagttacaacggattaggtaccggaaccctaagaggcggcgccacccaagctcgaatcgccatgtacaaggtctgttggagccttctcagcggcggaatatgcgccggagccgatatactcaaagcgttcgacgaagcgattcgagatggagtggatgtgatttcggtgtcgatcgccgctgatattccgtcgtttccggaggtggatgaccggaatgcgatcgccattggggcgtttcatgcggtggcgaaaggtgttgttgtggtttgctcggcgggaaatgcggggcctagtcctcagactgtgcaaaatgcttcgccatggatattgaccgttggagctagtagcgttgaccggtcttttccaactgtcgttactctgggaaataactggtcaacaacggtaataactaactttctattctctctaaacaagaagatgaagaatagtattttaaattcaattatttcttatttatttaatttttaaaaaaaaattgaaaaaaaaaaatatttttattcgagaattttatttgcaatcaataaaattataagtacgtacgtactaacattaaattaaattataaggaatttgttgccaataaacaaaatattttatattaatttatcttaattttaataattatttaaaattttttctatatactttttaactcatgtataatatttttaattttttctatcaaaatttcatatactttcttatttatcttttttatcttaatatataaaataagaaaatagaatttatttgcacctccaaatttaataatttaaacaattaatgatgtatatttttttaaatatgtttgtaaaacaattacttgttaaaattattttttcaacacatatcaaaactcattattattattattattattattattattatattaatgaaagaaattaataataaaattgcaggggcaagccatgtttacaggaaataaaacagggtttatcagattagcttatccagaggtctctgatctccaatatcctcggtaactatataccttattattaaacatcatcttctatatattatttagctaattaaatacatattatatagatttttatatgttttttaaatttcataaagacccacaaagatatattttattcatctttattttttaataatattttatttcatcttaaattttctcaaagtattcgaatataataattagtagaataataatattaaatctttatatctgtatacagtgactgtaaaagtctaagaagaaatgatacatgggttagaggaaaagtagtgctatgctttacttcatcattcaaagaaggttatatagaagacagtgcatattgggtcaagaaagctggtgggctgggcctaatcgtggcccaaaacccgacccgatctctctattcatgcgatgatgacttcccttgtgttcaacttagctatgacgtagccatgaagattctctactacattcgtactaccaagtaagtatatatcaacaacaacaatatatattatatacatgtaaatgtacatgtatgcattatatatgatatatatactaaagtattgtgtatattaataggtctcctaaggtgagaataagtcctacaaaaactcatgatggaagaccagtttccactaaactggcttacttttcttctcgagggcctagctctgttgccccagctatattgaaggtatatatatatttatatatatatatatatatgtatatattattaccattgggtattgattatctaataatcttgttttttaatggttatttacaatttttagtctcgaacaagaactttttaaccagttaaaaatgattataaattgatcattctatcaaattttactacacgagataaataaaatgataatttgattgtttagttaattaccacctcagtattatgtcaatgctaagtgtgtaattaatttaaaaaaataattttaaatttttttatttagttttaagtaattttcttaattatcaattgatttttaaaaatatataatttttatttttctattattaaattatacacgagatattggtgtagcaattgattaaacaacaatattattatttggtttgctacgtgtgataaaacttgatagaatgactaatttacaatactgtgaaagttcagggataattgtagttgaaaagtttaaaggccacaataatacatatgtcatattttggggacaaaaatctatcctttttaattggttggcccaatctgtaaaagcttatcttgttagtttgtttttacagactcctcataactattaggcaccttaacgtatctaatattttactaacatggcatgttataagcaccacaagatatgacatattattattagtgcaattcaatatatcgtctcacacattttaatttaaaaataatataaaaaactactaactattcacaacgcgctacatcacatgtggtgttggatctcttaatattaggaggcgtttggttgggaggaataaaaatataggaataggaattggaatgggaataggaataggaatgaaaggaaataaaatttaaaatgcaataaaaaaaattgaataaaaaaatacatttaaattttttttcctggttatattggaatggtcattcttttctt

SEQ ID NO: 301655 - DNA, 3930 bp, Cannabis indica
tattgtaaaaagatgtattttttaatttttttaattaagtagctaaattaaattaagcatggaaatttaaatttctcttttattattcgttatcagactaaaatttaatggtttaatacttttaaaatttatatatatagttaaatttatttattatacattaaaaactaatactgattaagaagtagttacaagtataacaatagtatatgatgacaaatctaagaaaaaataatagtgtcggatgatgtttgcagtacataaacaataataaaaactcaacatatatgatagggatcactcaatgaaaataacttaatttaatgaatttaatcattataagtaaccaaggaataattctgtgtttaagaagtcctttcttaactttgtggatgtggaaaattttgtgttgaatatgtgcaggattataagaaggctcaagtccattatctgaaccacacttctttgaatcaagcctcttctagtactggtaatgatcggggatgcaatgctggttgcagtttcccctctcttgggacttttaagttgtgtgtggatgcttcctttgatgcaagggcaagaagaacttgtatggaagtggcagtttttggtagcaatgggaacgttgttgtaggattatgctcttccatgacaggtatctctatctctatctatgctgaggtcaaggctttttatacagatctttcctggtttgtgaacttcccaattgaagtggtggaaattgcaaaactttagtcaacaagatcaaccataaatgaaaagatagatattctttttctgatatgattcaattggtgtataaatctttatctttattttctaatgtttttagaaataacaatgatatagcccacaaccttgcaagcaagaaattattaggcttagataaagagaccttttggaattgtatccttgcaaattgactaatgtaattgtaacttggatagtcatgcttcagcaaatggaagttactttacatttttcagaaaaaaaaaaaaaaggtaaatgacaacgtcaatgcatattttttaggaagaaaaaagggaacaaagtgaatacttaatgaatatacacatatcttagttatatcaatcgaagaaacatgacaaaaatatttcaaactaaacaaataagtttatgtacaaaaagatctcttcgagctgccaatgaaagcaatgctttatatttttctgtttatcaattaaatcgattttctttgctttttcttttttcgattgaaatttttatttataaataattaataaataaaaacttatgaacttttggatgatctaataatcctctgtatctctttattcaattcttctagtcccccaacattctctaattcctacagacaaaattaaacaattttctcaaaaatacaatttcaaattgaaaaataataataatgataataaaccaaaaagacgtaaaagttattaatttgggtagactcacatgtggtcctaaaaacaacccgtatgggactcctccaaatttgccggaatgatgaaactaaataaaaatgtatggaattagatgtagaagaaaaaatatattattcaagaaaaattatcatatatatataaaatgaatgggttactgtttagttttgaggtagaatctccttatcttatctcaaattctaacaatatcaaaatcaaaagagagtgaacattgaattcattacttgatgggctgcagcaacttttctcaaataaggaacatttgcaatgggaccaaccgggaaacgacggtggactagaccatcgtgcacaaacatgtaagccatcccaaacagagtaattcctaatccctgtaatgccaaacacatacttatttcaccctaatactacagtaactacactactaattatttttctcatttagaagaaactttcatagtaattaaattaattgtaactaaactaataattaaaactcacagcaccaaaagagagtccaggaagaagaccagtgttgaagaaaccgtaatacaaaagagcaatggcagggaccgcgttgattatggcaaacacatcgttgtgctcaaaaggtccatctctagctctgtggtgcgactgaagaaaagagaatcgatttaagcacaaccccaaaaaatttgaacaacttttaagtcttaaccaatcactatactacactactcaagaggacaacctcgtgcatatgccacaatgaagcgtgccacagtgctctatgggcccaccttgcccagaattccatgccaagctgaaataaaaaacaattgcgtgttgttgtaaaatatttttattgattgatgaaataattattgaatatgaaagataatcaaaagagcttacagcagaaccaatagctaggaaaatggtaaccaacatttcagcaactgggaattcgccaccctgaaatcgaaaatataaacaaaatcccattttcgaaaacggaaaaacagatattcgaattttgaaaataaacatgaaaatataatattcacctgcatttgccatgaaaatctaaaataaacggctgtaatggcagccgaagaaactcctaggctggacagaactgcagcaacaagataagtatatctctcaattttctttcttgccaatctatcatttgatattcttggaactataatttcagcttcggacttggattcgtctaattttatcgtatttaaatcatgggaaacctgcatggcgtgatgatcctctgttttcttgttcaaaacaacgataattattcccttgccctgttttctcgaataagtataacttgttcgattgagattggatttttgagctaagaacgagaaggagtttgatttcgagatgggtttcggagatggaatgaactttcttccgaaactgtatgttaaaggtccagaaccggtcaaaacgccggcagccatggacttaactcgaagctcaagtcaactcgattactataaagtgtcagagatttttctgaataatagaaaatttcgatggaaacaaaaatctaccggagaaaaagatatttggggcttcgaaatcaaattattgtgaatattttatttatacagatcctgaggtgttttttcagaccatcattgttgtccaaaattttctcttagtgaagtaatgttttcttcaccgagcttttagccaaatcacttaaatatcaaattctataattttctcaatcatataaatcaaatcccacacgcataagaactctgaacaagctatataatggtggagatatttaaggaaagtaatgtttgaaattcttatgcttctgtccattgacttgtacttgttcggcgtgctcgatctactcgaagttggataatagacgttaaaggttcaaccttaacacgtttaactcttacgcaatctgaacggaacttataatattggaattaattagatttactaattaataaatcttatcgcaaattttcgttaactatatttgagcctaaattgtaatagatttgcacatataacaaaaacatgtaaagaaaaaataagaacacaaagagtctgtttggttgtgtattcagttttcagtttttaaaattctgttttcaaaagtaagaatagaaaataattttttgtcattttaaaaatttaagggtaaataacattttggaccctgtgttttgcaaaagttaatgattggactatctgttttgttaaatgacaaaatggaccttgttttttccaaaatggtaaaaatagaaccctgaactgtttttttgtcaaaataaaatttaataattatccgttctaaaggtgttatgacaaaaatgtttacattttctatatctgtttgtattttcaagttggttatattaaaaaaaaagttgttaattcaaaaaaaaaaaaaagtaggtcaaaaattaagctcagggttcta

SEQ ID NO: 301656 - DNA, 1492 bp, Cannabis indica
catgtaaaaatttctttttttttgcattcattaattaaaaatagccttatattatatgttttattaaaatatacttcataagtgaattgcttaatacactattaccctctccttaaatctagcatataatttacattaacctaaggaatataatgaggatattatctataaaaatgagtatatcttaaagaaaataaaaatatataagataaagtaggtatataatgtaatatttttagaataattccaaaaataaaagaaaccctagctaatgtcctataaaaaagaatatacatccctaattgaaacacgtcctgtatatatttatagaagtatatacaacaaattaattagtatatacttatatatatacttgattactatatacttgttgggatatactatatacacaataccaatcaatagagtacacaaaataataacaaagaagaaacaagtaatcatacataaagtaaaaccaactatatatataaaacataaaagaaagaacaccaaacatacttataggctgcaaaggaagaattacactaatttttgctctctcaaactcaatctctacaaattgaataataacagttatagattggaatgaaggcacaaaatatttgtgaggagggccaaagtgtaaaaaatataatttgaaggggctctattaaattaatttttaatgaaaaataaaaatattatgaaatcaaaactaaaaattttgaaagaaaaataagtatttgggggccatggaccctatagtattagtatctatatagctctgtctctgcctaaaacaatatagagtcagattacaagagcctaagtgttaaaaacaggaatataacagaatgtaactaatttttgttattctaaatagtgtcactctttatgtcggtatcgagctgtcggctctcttctgcctaggctcggccttgggcatagacagactaggcttgtatctaggtcaacccccaaaaaaatttctcttttaaaaatatataaattttttaattgattttaaaactaccatattttattctaaataagagcttaaaaatagtttttttttaatggtccactaaattttagggccaattctgcttctgtcactaatgctttgatgtataaatatataaagataagttgagtaatacatatttttagtatctattaattaaaaatattctcatatttaattttagtaaaatgtacccacttttatgagtggattgttcaatatacattaacctttcacttaactctaccatataatttatattaatctaaagggtataatgagaacatcatctataaaagtgggtattttttgataaatacctactttttgtatctattaatcaaaaataccttcacatttaattttagtaaattataccaacttttatgagtgaattgcccaatataatctcactctccacttaactctagcacataatttacattaatctaagaagtataatag

SEQ ID NO: 301657 - DNA, 892 bp, Cannabis indica
tagttgattttatatatttcaatttttcatcattagaagcagactagggtttgcttgttgagcagttgtcttaacaaggctggtcatcttttataaaccatctcaccatatcagtatatgggtgtttctatttctagacaagtttcgcggtctccacatatcaagcattctcaacgcaggcattctccctactcttctcttgattccaaaaggtaataatgctatgaaaacttcaagctgtcttacgtttttgagacatgctactactaatgagcaattcaggtgaaagtgcagggcttttgcatcttcaattatcattgtcatctggcttattgactttgctaaactttttgtagggaaaagaaatcaaggtccaaatcacctagtcgacgacggagatgattggataaaggaatgttctttaggtcctactgtatggggtgccccggtcaacagcaatagataaagagaaagtgatgcttcaggtcatatcgaatgtgatagcgagtttatattgcatcacacagaagctgtggctaccaagtaatgtagtaaattttggtttatctcgtctttaagggtttaacaatttatagttgtgacaagtaatgtatgatgtacaatccgaaaaaaagaatcaaaaggggctgttgtttttcttctcttgtatttttaactcccttttttatgtgaacatttgctgttgaaagtggtcctaaaacagagatgtatgcattcattgtcaagttacaatatgattcaggcaaccattggccttttcctgaaattgaagtcaatatttggcagctcagctcagctcaatcatccccaaatttcttgctcctggtgatgaccctttggactaaaatgattcaatgttagtcatcctaag

SEQ ID NO: 301658 - DNA, 1840 bp, Cannabis indica
ataactcctatagcattaagaatttcaaataaatgtgtgtaacatcttttacactcttaatgttagtgataatggtggaggttactcatagtaacaactccccaaatgttacaaaaagatgacaactaatatagtcatatgttacatattattagtttattacacatatttaatctatatatattatattattataaataatataacagttcattcttatcccaagtattgaagattgatctgaaagacactgtgtaaagtcaataatgtgttcatattacttttggatcgaatgatcggaaaaaacatacaaaaagattcaatgatctcgtggtaggcatcaagagataaatcttctaatctcgtagtatagatttaatttatgtaactatgttgagactttggagataatggtttagattagtttcatctaaattttttttataaagttgtttccgccttttactctgatttggactataaaaactaacacgggtgttgtaattcacggtcaacgattgagcgccatccctactcacaatcaatgacccttgggtctcctcgttcgctgcgaggtgacatttccttcaacttcacaaagtagcgaagaccccaacataaaaagaaccccatgcaaatgcatcaacaaatgcgaagaagacaacaataagcccatctatgatggagccccaaatagaacatcaaagccaacaaacacaattatacccataagcaaaagtctaccattactaatgttagaagaagaaaatattcacctaaaaacacctcccaatcctaggttttttacgactccagtgctgtcccagtgccttgttaacgactgagtctgagtgtcatcccaattcacagacaatagttgagtgccatccctattcacagtcaatgacccctgagtcttctcgttcattgtcgggtgacactctcttcaccctcacaaagtagccaataccccaacaccaatagagccccatgcatatgtattaacaaaacccaagaagacaataacagtccatgtatgatggagcctgcaatagaacatcaaagccaacaaatccctcacaattataccaattagcaaaagttgaccattactaatgttagaagagcaaaatcttcaccttaaaacacaatgccaatcattatcactacgttgaatgtcaatttactaagtaaagatacaattcttaacaagagttcgcttgtagagcctttcagccagagctccaccaacgtgttagtagtactcattgctaaaatcaattgttgaaattaattgtcgtgaaatctaaaaaatagagttgtcattacaatcattatggcgaattccatctagggtgagtcaacacactatccttcccaagagcccacttacgaagcctctcgtccatagcactaccatcgcaccaataacaccctcgaccgaccaatctaaagaaaccctagctccaagttacttaaaatacaaggaggagagagagagtgtgtgtttcctagaagagagaaagaacacgttttctaagttcaattattgacattattactttgttattaagttataataaatgtttgaaactaaatcccaaaaaaaaacaacatcaaagtgttcatattaaccttatagcttgcacacaaaatcagaccaaattaaagtcatataaaaaggaaaaaggaaaaccattccaaaaagaaaagccatctaaataaatcctttattaaaaatcattcattataaaagtaaaacaaagacaccaataccaattccctttcttcttctcttttttcaaacccaaaacggcaaaacctctctctctctctctct

SEQ ID NO: 301659 - DNA, 5192 bp, Cannabis indica
aaaataattccaacatttcatacgagagagagaaagagagagctacgtaccgagacaaagagaaagcaagggtttcaatagtggacgacacaacagagcagaggatggcggtggacgatgcaatagtgagtgacagtgggtgggcagcggtctttcaaaatggggaagaaggtgagagcttttggcgcaattatctgctatagggtttcgaaatgggggctctgcttgggtttcaaaatggcttggggaagagcgacaacatgaaatcctattttttgaaaattgggtttttataaaacttaaaccgttttgcttcagtggataaccgtggcaaatgtattaacctctgtttttaatcgaagcgaaaataattggccccacttttccaccgaagcaaaatgtaaaagataatttttaaaattttcacatttttcctcggttatacttttagcatcgaagtactaattgacgctaattggtatttttttgcttcagttatactctgaagcataatatctcaatttttttttgcctcgatcaactattttggcgagacgcgttgaccgacgcaaattaggcattttgtagtagtgcaagggagaaaatttcaatagttaggggaaattatgtaaactagcaaaattccttcattcgattagatcaatctagtgtaaagaattcaaagtcataatacaaatttattgttgatcaattttttagaatcagcaccgagccttatatgtgtcctgtttaagacactaatggagtccgtattgacaaaaattacaattttacgtattatattactaaagaaaagtattaaatttgtagcatttacaaacttaaaattttaggtatttacgccactattaatcaccctaaaattatatatccaacattagagcaaacctatagggtatatattgttagagttttcctatgtactatatgcaaatagtaaatctttcaaaagaagaatacatgattttccttataaactactaataatcatttaaggttgttacattagatattctccgttcacatgattaccttaccttattttccttatacacatcatcatgctgaaagatatatataaacgacaagtttgggttctccatattccccttcctcacctaacaattcttcttacatatccctttgaaccaggaacatatatgacctactcccctctttccatcaaaattagctctatataatttattctcatcctccttaagctttttattaactcctagaaagtctccgttataataaggatggagagtagtgtcatgcatcatcaagatgctaataaaagcttctctttcaactccaattttaagtattcttcctcctcgttagaacttttcacagatgatgatgatgaaaatgacgatctaagccacaacaaagacagcgacacagaagaaaattctttcatagaaatatcattcgatcaaccaaagattaatcaaacggaagatcaatcaaacggcgatcgagtgcttcatgaggataatgttgaccacctccgaatatcgttctcgtctagtttcccttcatcaattcacgatcatggaatttataatactatcaattatctgtcgcttgactctactcacacagaatcagctgaagcaacagttaaggccttatcggcattttcttcatcacaatcatctttgtcttcaataagattatcatcttcgacttttagatcttcttatactggccccagtctccctcaagcggttgtggggtctgagtccttcaatccacttgttcacaccctactgttcagtctcgatggccctccgaacatggccgacgaaattaacggccttcatgatgatcaaaaggagaataataggcagttggcaatcatcaatgccaacaacagaaggtatattttacgtacttattactctaatgtgttcatattatgtgcaaccgttcattttatatatattaaattaacaatccatatcaccaatgcaattacttctaccgatacaataaatctacaataaacatgtaaaatcaaaacaactcaacaaccgaacgagactattttgtgttttatttttcactattcttggctgagattgagttatgcatttcgtgtgtgaagttattattttgattatttcgtatctaatgaatttttttggatgttctcctataattgaaatacaattaattaatagagatattctttttagtggatcagtagttttaatatattttaattagcagtcagtaccaaatccttttactataaaataatcaaacgtattagtcttgactatacacttcattgaaatttaaagattataagttacaatcaataattggtttattaacttatatacacgtatatatattcgtttattatagaaataaatgtaaacatttattattaggtgattagaggtttttgtgttgatgttacttgaaattcacttataattagttttttttaataggttccattaagtaatttaagtgcaatatatatatgtaattttttttaattaggtaatgtattcttttttttattatttttaaataaggtttgagataaaattttagctattgctacattggtatgtcatttggatgattatatataaacctatttttaaaatttttaaaaatttcttaattaaataacatatctgataatgcatatattgaaatttactatattcttaactaaaactcatataatcaaatttgagtgtagtatgtctatatataggttggattctaaacttgatataaagattttttattctcaaattttacaaaaaaaatataatgttgaatcagttacataaccacactttatatagaatatatataatatatacattatcattccaactacacttgcgtctatattgttagactaatcaactaatattgacttaatatgttaccatattcatttattcgattttaatatttaaaccgcaaaaatagcagaataaattgtcaaagaaataatgttgctttggttggaggtaatgtacgttggattgtatttttgtttggttggatatttttatacagcatgatttttccgcggtaaatgactgaaagaaaatactatttccagtgtaagatgattttatcaacgtttttttttataaattttaaattttattctattgtattactactttcattctcactctcctcaaccaaaaacaaaaatatatatgttagattaatgtatttccatttccatttaatttcaatatccctaacataaaatcgttaagtcaacagtatgtttacagctacaattattggttgcttctattactttaattttacattgttctttttgttttcttttctaatatcttccaaaaaaaatggacttcttactatgcatttattctttccctacatgatctatgctgattaaattattaatgaaggagagaatcgagcattacacaagtaaagaataatagtacaaaaagcagtactagtggcatcatgaagttgttgatgatcaagtttcgaggtaccaaagttcgaaagctatgggcttcattatttgccaaatctcgtggccatgatcaccttcacttctattcaaacaaagccaatgccaatgataggtcacacaaacctaagagattaataagatcatccacagaagcacaaacaatagagtgctaccatcatgaagcaatgtacattagtaacgacctcgtaagcgacaacaaatacacttctcataatcaatacaagtgttctagagcgatggatgtaaacatgggtgccctgaaaggggttttaggagctgtgaacatgacaagaagtgctcacaataacagtcgaagtagcaatagaaaaaccagcagctgtcctagctctttaaagtcctctccaatgcaccaggggttcgcaagtagtgatgataacaggaagtttttcccagctgaaaactcagttcaggctgccattgctcactgtaagagctcacttggccagtcatcagattttcacttctgaattacttctctagctcaatttgtatcctcccacaatagcaagagctagatatatatatttatatatatatatataatataaactatatttatctaattttcacgatcatgattttatttatttgtaccgttaaatttatgtatgtcttttataaaccactacgtattctacaatgatgttaattagatctgctttcttgagttcattccctctaaatttataataacttcatacacctagttgaatgccaattatatttctctcagatcattctagttttaaacatcatatataaaaatgttgaacacactcacactacaaaaaataaaatttttagtcacaaccatttatttacaacaaaaataacttgtgactaaatgtgtgtttttaattatcacaacttattagctacaaataatattttagttacaataaattatttgtgacaatttttaaaatttaaaattttacaatttataacaaatgatactaaaatgttgtgattgaaaatatatttagtcacaattataaaattttgttcttaaaatctgactaattattatttaattactactttcgtaagttgtccctattaacatgatttttagtcacaactatttaatttacagcctcatttagtcacaaaattacttattttctttatctctaaaataaaaattaaaatatataggtaatgtttccgattttatacacttaaatacctaatgtttatttttggtggcaaaaatacccaatgttacaattctcttacaccgttactaccaaatctgttattaactcataaatatagacacgtggagggcccaaatacactacatttatttattttattttaaaatttaatattcttaatataaaaactaaatattatttgtttttttaaaaaaataagagagatgcaatactaaattaccatagctgagtgaactagtatagtatatgaaacatgattatcgaattgaagtgtcaatatcatgtgaaaattgttaatgagaacacgttctttttttgaaacaagtaacatttagtttttgatattaagaatattaagttttaaaataaaataagaataaatgtaatgcatctaaactcttcacgtgtccatatttattatgagttaacggaagtggtag

SEQ ID NO: 301660 - DNA, 1158 bp, Cannabis indica
tttttttttttttggatatttgtataagtaaagctgtttgtagcttttctcatactttgaattgaactggctaagcttatttatatgtgcaagtggaagtttgaacaaattaagtggctgttgtcctttgttttgttttgtttcacaatttatggtagttggatggctatgttatgggtattgaatttagcatatactctgatataagaattgggattttattgcttgattgacgtgagctttctatacataccaattattggttgtctagtagctaatgatgttgataagtaaatggtttttgagattttttgaatgaattcttgatcatagaaggaggtggttcttggatttgaacatgtgggttagtgattatatcagttgtgatctaactgaagtgcttgtctaatgaaattagggaggtaataatttgttggtacatactaaccattgtctaatcaattctccccttgccttgttaaaatgtagtaaattgatttaagagccttagagtggttggagctgttgtgaagattagtaggaacttgtctctctactagtttagtttagtgaaccatggaataatttgtgttactttcttatgatttatgtgttaatgaactgtttctatgtatgtatatgtaagcaaatgttaaaaagactaaggggtggagaataatgggaggtgggttgttctcataaaaaatgttgtgtttaaataaatagctagtttcttagccatgtatacaagtttacgtgtctttaatatgttgtaatatagtatatgttttcccacaatttctttaatatgctgtaatatagcatattaaaaaacctttatgtttttccacgtttctttaatatgctggaaccttatagccagaagcagtcattttgttccacaatttctctgtttccagcatggctgtaatatagtatatggctgtaatataataacaatatcttcccaggtttgagtgtccaggacctttgaagagtttggtgttattgagatcttaattaatgtggaatttttacattaatgcttgtttaagcccatatatctacttcttgagtttgcaaaccatgtgttcttcgccagacttctcaaaacctacaggttgagtcatgtatgcatcctcagatagatcaccattc

SEQ ID NO: 301661 - DNA, 2618 bp, Cannabis indica
ggattatgccgcttacaaacttaaaactttaggtacttatgccgctatttacccccaccattattatcaccgccaaaccaaccctaacatcaatccttaatattaaagaaagaagcaaaagactgacaaagtgtattgaatctggaatatttgccattatataggctatattacaaagtagactatgtgactaacttgtcactatcctaactaaccaactaattatattactaattctaataggctctttcaccgtggagtgtaaaagttttttacaaccatcttgaatacaatattatgaaaatgattaggaaagagtagaatttagtcaagatatccactaagtttgtcttggaggagatatggttcattttgagagttccattttttatcttctctcgaactatgtggtaatctatttccacatgctagattctttcatgataaatgagattttcaacaatgtggattgcggcactattttcacagtaaagtttggactagagagtgatggaaacattgaagtctctcaggatggagattagccaagtgacttcacaagttgcattattggtcgtagaccgatactctgctttagcggatgaccttgaaacaattggctatttctttgattttcataataagagagactgtcctaagaatatacagtattccaagatggatctttgactgtcaaggcaagctgtaccccaatgcaacatcatcaaaagcttggagctgcaggggttatggagttgctgcataaaaaaacaatccttgttcatgggagcctttgaaatagtttagaattctaattccagcttgttaatgtggttgtaaaggagcctgaagatactgattgagctttttaacaacatagctaatgtcaagtctagttattgtgagataggtcaactttccaatgagactcccgtagaaagtgcgattagacatcaagtcacctgagtcattattgagcttgaagtttggctccattgttgtggacacatgtttggaaccaagacatcctgcatcttgtagtaactggattgtgaaaggtcgttgtgtgacggatatgcctttgtcacgacgagaaatttcaagtccttaaaagacatgcaaactaccaagatcattaagtttaaactgagcatcaagagtttgtatgaaattgatgagtgcagtagtgttgttagttgtaattattatgtcatcaacataaatgacgagagctaggaagatacctcgtgtatgatgagtgaatgataattttgagattggtggaaaccttgtttgagaagagtggagctaagcttagcataccactatcttgatgcttgtttttaactatacaagcttttatttaatttgcataaatcattttgtggcatgactccttttggagtgtaatcttgaggtagtttgatgtaaacattctcattgcgagatcaccatggtggaatgcatactttatgtgcatgtggtgtaaatgccaatttttaatggcagcaagagcaaacaattaatgtgatgaatgtagcaactagagcataagtatcaaagaaattgataccttatttttgaaaaacttgagtcaaataccattaaatttttaaaatggcaaaaaattgttatctattctcaattttgaaaacacacaattcagccaaacaacctctaaggatttatattaattttgctcctaggaatttgataaatatgctagtagcgtgggaatttcaaggcataatattgttagaaaattcctcaaattggggttactaagagaatgaatatagctcttttagaaagtgtgaaatgcattttaaagggtgtcgacctaaggagcatgttttggggagaagttctcacaataaccaaatacttgataaatagatgtccctcagtatcattgaatttcaaaactcctcaagaagtttggaatggtaagaaacctatttattaacacttaaaagtgtttggatgcacaacatatgcacacataagaccagatattctcgggcctaaagctatgaaaaacatgttcattggatacaccaatggagttaaatggtacaagttgtggttcttggaagaaggtttcaagaagtgcatcattaacttatatgtgcttttcagagaagaagaaattccaattaaaataagcaaaggtgctgccaacagtgtgaatgaaaccagaacacagctagaagttcacaaaggtgcaaatgttcaacgacaaattaatacaactggtcaaattgaacacattcaacaagatgagacaacgagtgggttgagtgattaccagttagcaagggacaaaaacagaagggagatcaaggcctaaaaaagtctaggctatgcaaatttattacatatgccctatgtgttgcaaaataagaaatcagttcagatcccattactgtccaagaggctctcagcaaatttgaagagaaagcctggaaataggctaaggatgatgaaatggagtcattaaagaaaagcaaagcatggattttagttaaccgacctagaaaaagacaagacttgtaggatacaaatagatcttaaaattgaaggaaggaatgtaagaagttgatgttggaaatatttta

SEQ ID NO: 301662 - DNA, 1246 bp, Cannabis indica
aaaaaatagtaacgtacctcatctaatataccctgagatctatctaatataccaccgaatacattccgtaaaagtacgggacacgtccctataaatatattcatgaccatcttcaatttttttaatatcgtgttttgtacataattatatggttttattttttatgaatccgaaattttaaattttacaggtggagaatatactggtgattggacatagtcgttgtggtggcatagaaagacttatgtcttatcctgaagatggttctgctcgcttgttaagtttttttttttatcctaaaaaaacaacaatttggacacattttagttttagaactatatatgatataatgtagtttttaccggatcactttaccctcaaaaaaaaaaatataatataatttttttattaattttgactcatagtctaacatgttgataaaatttgcagggacttcattgatgattgggtcagcatcgctcaagctgcaaaggataaagtcaaagctgaacacagccatttgtcttttgaggaacaatgggacatatgtgctgaggtaataaatctaaatacttagtccatactaacaaattttttattatttgttaatattgacacattttattataacaactacatacataaaatttctaaaacaaactaatacacatatatgaaaaaataaagatatgttctaatacacatatatacatacatatatatatatatactgattttgatataataaactaatacacatatatacatacatatatacatatatacacattttgtttgttaatttttacaaactaatacacacacatgaaaaatcataaatctgttactagccgtagtttcaaacatgtatcattgatgtgaatgtgtttaatattttatgaatgaggattattgttattgaacactagtaatatctaacattttttagatatgttatttttcgattggttaacgatactctaaaaaattattacattaaattatataggacccgacttaattaacaatattgacacgagagtgctattttaacaattctgtatactattaagttgcacgtgctactgcacgtgtttagtatataaattatatgttatattaattaataaatttactctttcatattttactattttatgagaatatttttcacaaaatttaaagacctaattaattaagttaatttttttttttttgaaaatataatgtatatgtatttattttt

SEQ ID NO: 301663 - DNA, 2546 bp, Cannabis indica
caaggcttattaaacacagatatcacgaagctcgtgtcaccatccgactgtgcccagcaaaacctctcccaagtacaccaatgcattttcctgttatcatcatcagcaccccaccaaagtctggcgcaaagtctatataattcctcattcaatttcacagggagacaaaagattcatcgcataagtcagaatatcttaaatgactgatttaagaaacacctcacgacctccagtagaaaaaaatttagccttaccaacaaaaaaaaaattgttccacaccctatccagtatagactgaaaaaggttggatctattgtgtgccgcaaaaacaaaggagccccaaatacttctcataatacttaagttttacataataatttaagtattttcaatgcaaatatatatatattatattcatatttcattgtctatcagaattgtctttcaaaaaaaaatatgaaaaaagttgttcaacaaaataagaatacaaaaatagcattgttatataggcacggcgtatgtaacaccataagatactatagcaattctaaaaaaacaaatgataccaattagggaaaaaaacaaaagtagttgaaactaaaattattcatctacaaggtggaacatcatttgagttacaattatgtacaatgaaattggactaagaaaggccaatacttctacatcattgattgagaatatttgtcacaacaacaaagcctatcttttatcagtcactaacaaattcagatttttgggaaggaaaaaaaatggatgattttcttactccagttcagaaggttgattttctgcaatatgctcctgggagaaggagcaataagggtgtcaaaataagatatcttaatgaacaatatgaagtgattcacagaaaatggaaacaataagaagggaaaaaaaacagttataacctctcgaggacgatgcacttgggagagggaactaagctgactgctttccatgtttgaaagtaattggattacagtttgtagatgaggagcactgcaaatgttgtaaatcaagtaaaaacaattagaaatagagatataagcactccaagtctatgttacagttcttggtttaccatattctttactgaaaaaactagtgtaaacataaaatgataagcataaataaagcaaagcatcatcacaacctttgcattgcattttccatatgtacatccagggacgaaatcacccgaggcatatgctctaacaacttcataaacccagaggaaaagttgaaattagagacttaaaatcttcttgattagtttagtcaagctaaaatcattataattctgctgccctacttacttgtccagtattcttaattgtaggtgtttttgacaagagattctttggaagcttcaccagttgggtctgcacaaaacattagagttttgaggattagcaattcaaaagacttttagaagtagtcaaactcaaaatacagtatcaaagcttgccctgaattgtataatgagctctttcagtctaattcaaatatgctaaaaacttttagtcctaatatttttaacaagaagattttttttcactttttccttttttgtcagatatatgaagccaataattcaagtatctaccatatctaactgtgaggttccattatgtagcaagccttacagaaatatatatgtaaattttgataaacaaaaagattatttcttcaggtcataataagagtttaatacatgtacccagatacatagaaaagctagctaacataatattgtactaatacaatttcagtgaatcctcctaataatggtctcagcaaatttttcatgtcctctgtcacaatatagaaatctcaatacactaaaacctaagtttacactttctgtatccaattccaggatcttttcatgtaaaaaaggtcaattcaatgaaattacgaaattttcaattatcaagccataattactttaattcatctttgaaattattgctttgaatatctcaactaatcaatctatctattctattttgttttctggaaattagattaaatcaatctattctagaccactacaacgagggtccctccaacacttataaatatatacataaataagtggacaagcaaataagaaatgtaatttgcagtaaaaatgaggaatttgattttgagagttgtatgaactataaatgaaaatggtgatgggtttggacctgggaaggagaagatgtttgcatgagatggaggagattggaggtggagagtatggcttgagagatctgatcagtgaccattgatttggccgtattacttcctgtaatgcttccactcccacctctactgctcgccattttcctgaaactatttctctctcgattctctataagctgattcctaatttatatacgttttagaagatatgaatgatacctcttcttgtggtttttatgatagtatatttctttattataaacaaaaagtgtaaataataacatttttattttttaattttttaatcagaaaataaaagtaaaatttttatt

SEQ ID NO: 301664 - DNA, 2990 bp, Cannabis indica
tcaaccaggcactactagatcttgagagatcaccaccaccccatagcacacaagaccaaaaaatgcacaatgattacaagaaaacagagagagattaggagaataaagagagaaccgagattgatgtgaaccatccagtcaccccaatgtgaaaaataagaaatctgactagattcacacctaagcctagagagggacgatgagccttcccataagaggttaaaatacaggcagctagattatttggaaaaacccacaccgagagagaaggttgaacataaaagagtcttttatttgatttgtcaaaacattatcgcttatttttttttccttcattaagttttttttgtctccaataaaaaccatagagttatatgccattcgagttggagttcttttcgtactaagtttttagtttatatttctccatcaaagtaggctaacaataatttagcgaaaataaaaataattataataaaaaatagtaagaaaataatataacgtgttcacttctagaaaatacaattgacttacattcaagtccatcttcataataggaaaagttcccagcaaagtgattacatagagtttgtttgtgataataataaaaactagtgttagtgctagctaaacatgctcatatattggcatatactcttatcgagcttccaatagagtaattgtaacctcatttgttgaagtggattctttgttatgctttgaagaagaatcttcatgattagtcttagatatttccatgaaaaagccagggtatttaggtataggcaatgcattatgacttcccaacattactgccacagttgacatggttggcctatcctcaggtcgttgttggacacataaaagagcaatatgcatgcaccgtagcacttctgattgagtacatgtctccgccacagatttatctactagttctaaaggatttccctcctcccataatgtccacgcctgaaaaacacatcaaacatcaattttatgccactaatttatgatttgagtaaagtatgtgataatatctttattttcattgttattatacttacatgtcctgaaagattaagggtattgtccttatggaagaatcccctattttttgttccacttataatttctaacaccattatcccaaaactaaagacatccgattttatagaaaaaagcccatcactagcatattctggtgccatgtaaccactgcaagtacgggttattatcataagaaaatatgagaaaaacttatagttgatcttatagaatatatggttaaaaatttatgcgaagaaatcttactatgttcccatcactctgtttgtattcccttcagtttgatttcctccaaatgttttagccatgccaaagtctgaaattttgggtaccaaatcactatcaagcaacacattgctcaacttcaagtctctatggattattctcaatctagaatcttggtgaagatagagaattcccctagcaattccacatataatttcaaagcgcttgtgccactccaataattctcttcttatttcatctagcaatgttaatccttattacttattgataagatgttctaaaaaaaggtaataaattgacaaacatttatactaattaacatagtttagagttttaaaaatccaaaccaaatatgaagaagtccaagcttttgtttggcatgtattcatatattaacaatttttcttctccttgaatgcaacaaccaagaagcttcacaagatttctgtgttggagttttgcaattaatataacttcattcttgaactcattcaccccttgactagaacattttgaaagcctttttactgcaatttcttgaccatctgctaaagttccctacaaattacatcatcatcattttagtaactaattataattgtttgtgtaaatcatattcaatacttttaattctcccatcactaaaacacaagttccaagttttatagaataatcctagagaataaatatactatcagctatttcctaaaataaacatcacaaattaattttgttgatctcagatttggtcaactgacagtggagtcgtatttattattggtgataccacgtgtacacaataaaaataggaaagtaaaagagacaatatttttaatgaggttcgacccctttagttagcgggtaatgacctactccccttttagttgtattaataccagagataataccactcaaatctcaagggttgtggattctgaagtgatcgactctcttaagattacaatatgagaatcaagttggcaaatcttaagtaagagagaagccttaggcatgtagaggagatagagaggtagagctagggtttcagacttaaagcttaagaactttagggagcttagagacttagaagaattatggttaggttcaggctctttatatgagagatctaacaagatattaacaaccaattatccctaaaaaataggaaatatgaagcatttgtaacataattaaataataaatatgaaatatgttaattatcccccaataataagggaatagctgatattcctcccctattttggtgggttgttgaaacccaaatcttagcttggcttattatcctgaatgaagactgcacaccaaatgcctactaggtgcggttgcacgccaagttcgtaatagcgtgcaagctacacgctaagttcctgctagcctgcaagctacaggccaagtgcctaccagcctgtaggttgcacattaagtgcatgctagcctataggatacacattgagtgcctcctagcttgcaggcttcacatcaagtgtatgccagtcagtaggctacacacaaagtgcctgctagggtctggccaaccaagtgcttgctagggtctggctattgtgttttatgccctaaataaaactcatttcaacataatcagatttacttattaatatagatcagaaataacatataatgttgcatggttcacatga

SEQ ID NO: 301665 - DNA, 1189 bp, Cannabis indica
aatcaggaaaaaaaaaaaaagaaaaataaaaggaaagaaaagaaaaatgtgagatatatatacataataaaaaagaaaaatcgatttttttaaaaagtaaatgattaaaaaacgaacaaaacacgtcgttttccatttatatacatatatggtaagataaatattaattgtacacatgaattaagtgtggtttgtacttttgtggctagaaaaggaatgatcactgatttttgcatgcaactagttgagtgttgggacctctaaataaacattaagaacatgtgcttgtatatatatgttaccctttcaattatctcaatcactcataatatatatctaaaaaatctatctttcttagctgtattatatatataatatatatatatatctaaaatgtaaacatgtttttccctttgaattatctagctcaatcactcataattattatatctctcaaaatatatctttcttagctgagtgttggctctgacatttttcatttataataatgtttcgaataatatatatacagtttttctgtgatgattaatatatatttttatttttttcaacttgaattaatttgtataggaaggaaaatgatgatgatgataattatgtttagaaaaacccatcagagacacttgaatttaatgattttattcaaagattgggagtactgtcttatactattttttaaaaaaaggattcacgtgcgggtttgggtcaaacctgaaacccgattacctaaaaaatctaacctaaatccgtttgaaagttttatcgagttaaactcgacctgcccacattaatgaacatgttttttaaaaattttgggttaaccgggtcgagcccgggcgggttgaccggagttcgggtcaaactggtaaaaatgtgatcagtacttgaagcttattttttcaagtctcactcattatttttactataaagtgtatttgagagaaaggttataaatgctcaaaatactctttaaaagagaattttctatctttattctatttttatttattaacctaaacccatagaatacgtgtaaaacagtgtgagatgatgcctttatgtaagcactacaaaaaaaaatgctatttttagtgataattttttagtcacaacataatttctttttttttttttttgtgaataaatgtgacttttagtcacaagaaaa

SEQ ID NO: 301666 - DNA, 1215 bp, Cannabis indica
tttttaatggcaaaaaaaattcaaaagacatgatttagtacatgtcaaagtttaggaggaaaaattgttaattagcctaaaaaaaattatgatgagttcttatagcaagatacatgtcttttgtcaccattggcagtgaggccaaatttttttatatttatttttttaaaatatgcattcgtaaaaaaaaatatatttttattggagaaacaaaaacttgtagggataaaagtaaaaatatgtaagggtagaaatttaaaatatatatatatttatatatattatatatatatagagattttatagagataaaaatgaaaaaaaaaaattatgaaagtaaatataaaaatatgtttttgaaaaaaaaaaaaaaaaaagccacttgatctcatgtagcttcatctctcttcattagtaagaaaggttaacttatgtttttgtatttgagaaattataatttaaagtatattttaaactaaatttttgaacaatgaaaaaaatactaattattcaatattttttagacaataattaaattttattaaacttaaaactctactaccaaacaaaaaaataaatcaattgggatattctccatattaaaattacgattagagtataaactaaaaactcttcaaagaaattagctactaaatttgttgaatacttagtaaacgaaatgcatacatgttttaaagtgacaagtaaagttttacgttctttaataacttgaccaaataaaaaaatcattttaacgggacttcgaattgcttgtactacaactaagcagtcagtttcaagaaccatggattgccattgtttttgcttgatccaatttatcgtctctctaacaccaatcgtctctgcgagttctagtctaaccgctccaaaaaacgcccttgtcgcaccctccaccagaaagccactatcattctactaattattcaatactaatacttgataacacaagtactataatgaaaataacataagagtttgttactaagaaatcaacaaaacaataccatcccatttttagaacttacataacctacttgttttagtagttatgtgaataaattaatttgggacaattatagtagggctgtcagttttgtttttactggtagagacatttatgtctttgacatttaaagaaattataacttttttttgaaggaaaatggtaactttattaataagaagattcaacca

SEQ ID NO: 301667 - DNA, 2063 bp, Cannabis indica
taattataatttttaattaaataattactcccgaaacaaccgctagtgaatcgtgattaatcctagttattatatattcatgttattaggttactcaaaatcacaaaactatagatctcaaaagaaaaaaaaaatagcaaagcctgaaaaaacaattaccaaccatgttttatcgaaagaacaacaacaacaaaaagaagaacgaaaagaaggagaagaaaggcggtagatttacaagttagttcatcaagttcctttgtttattatttatttattctttttttgttggaaggtcatattctttttaattttgtatataagtactatgtacatatttttctaattattttttctcatcattatttgtagaagttgtttgtccatatctaccaaacgaaatagtagcagaaattctaatgagattgccccatgagtgtgtcataaaattcaaggttgtgtgtaagtcatggtacaatatcataaaagacaagtcatttgtaagtgaccactttcatcatcactccaaatttgatactaatacatctctccttttcgtacggcgccgcttcaagtattatttaactgatcgcgatcgaaatcatcttatgattccttctgatgaccaatctcgtccaacaatgaagctattcaatttcaaaaattttaatagataccatgtaagaggccttcattgtaatggcatcatcgccttccctacgtatactaaaattgcttttatcaatccaacactaaaacaatccaaatttttacccaccaaacttctacccaaatttaaatgtgtcgcaaatggatttggttacgatgaaagaacacatttttataagtatgtcaagatatttgcatcagtaacttctccaataaaattcagagctcaagtttgtacactgtttagtagtggttgtggggttagtagcctttggagagagataaatatgataaagctcaatccaaacgctttctttgaccgtgatgtagtttatttgaaatcagtttgttactgggtccatgagtcgagtaccgagcttcaaattgtttcattcgatatgagtgatgagaaatttggcattatacaagttcccttttatcagcccgacttttttttattgacatacaaactgaaagtatggaaagataaattggttttgttacttaaagattgcagataccaagaccaaaaatcaattgaaatttgggttatggtagtagaaagtgataatgcttatcattggacgaagcatctaataatcactaatcccattcctatacattgctgtacaactacatgtttggattttttgaatgacgaagaacttttgattagatgggatgagtttcttatttcctataatattcgaaccaaaaagatgaggagactgcaattttcttcccgtgccccgtaacgagttggagttttcgacattatactcaaaaactctagtttcgttactagacaattagttactgttatcttttttgattgttttgaatttaggttggatttagtttgttcctttattttcttttttagattttgaaatatatatatattttttattaatatttctatttttcatgtttgattttgcaattttataatttcactccttaattaaaacaactaaatgaatataaaagagaattcgaaattctttaaagaaaaatatcttgatgtttaaaagatcattggttttttttttttttattattaaagaaaaaaatgatgaaaaagtaaaaatatctgagtaatttaaataaacatttatttttaatataagtgatattttgggttttttaaaatgaaatatttgagaaatacctaaaataaataaaaaagttcatgtttctacgtaatattatttttttttccacttttttagaaacttctttagtaattcataaatatttatatatttgaggaattacttcatatgctatattttttaatttttttgttaaatttatggtttgagtttctaaagtggttgcagagctagttttctatgtaaaattttataaaaatacaaaaaaaaaattattttgaa

SEQ ID NO: 301668 - DNA, 2932 bp, Cannabis indica
ggggggggtgaatttcaagctcttgaaccttatcttctcactaatggaatcactcatcgtgtgtcttgtcctactactcaccaacaaaatggtgtagctgaacggaaacatagacaccttgttgagagtgctctcactttacttgcccaagcctcaatgcctctttcttattgggatgaggctgttcgagcatcctgttatatcattaacagactacccactcatgtccttaataatgacactcctctcaacaaacttttcaacaaacagcctgattatagcactttaaaagtctttggttgcacttgttttccaaacactcggccttataataaaaataagcttgaattcaggtctgttaaatgcacatttcttggttactgtttgaagcacaaagggtataaatgtcttgctagctctggaagaatctatattttgagagatgttttatttgatgaatttcaatttccctttgctactgtttccactaaccaatttgtgccttcctcttctcattctgttgtcccttcatccattattcgcaccactggcaatgtcactaatcaccccactactgctgctgcaacttctgaggcatcgaacacttccaccagcatatctgttcctgctgctgctgcctctaatgttgcacctgtcactgcttccatttctccatctcaaagcacttctgctattgaccctggcccaacagattctacacaacaacagcccttggttcctgatatcccagcacccacgactgccattccttcatcagctccagttaataatcacccaatggtaactcgcgctaaggttggtacttataaaccaaaggtactcatggtttccaaggagcctctaagtatggcagctgctcttaagtctcctcattggaatggtgcaatgcatgatgagatcagtgcacttaaaaagaatggcacttatgtacttgtgccactacctgctgacagaaaacccataaggtgcaaatgggtttatagagagaaagaggacaaggatggatctgtcattaagtacaaagcaaggcttgttgctaaaggtttcctacaagaatatggttatgactacactgaaacctttagccctgtcatcaagccaactaccataagagtaatcttgacaattgctttgacaaacaagtggccaattcgacaattggatgttaacaatgcctttctaaatggagacctaacagaagaagtctacatgattcaacctcctggttttgtggacaaagagcatcctacctatgtttgtaagttacaaaaggcattgtatgggctcaaacaggctccaagagcctggtttgacaaattaagggctgctcttaccaagtttgggtttctttctgccaaatttgatcagtctctcttcctaagacttacatcatctcatacaaccttcatcttggtttatgtagatgacattattattactagcagttctccctctgaggtttcccttcttatttcaaacttgaatgccctatttgcacttaaagatctcaggccattggattattttcttggcatccaagtgcaatacttagatgatggacttcatctttgccaaaggaaatacatcatggatcttttgtgtagagctaaaatggatttagctaacccacttccgaaccctatgattggaggagaacaattatcacgtattgggagtgatccagtggctgatccacaccagtaccgaagcattgtaggtgctctccaatatgctgtcattacaagacccgaggttgcttatgctgttaacaaggtctcccaattcatgcacaatcttcttgagtctcatcttaaggttgtcaagaaaattctcaaatatcttaaagaaacacttgatcatggtcttcacttacagccctactcttcattgacattgactggcttctgtgatgctgattgggcttccgatcccaatgatcgaaggtctacatctggtttttgtgtgttccttggttccaacttggtttcctggagttcgaagaaacagaaaactgtttccagatcaagcactgaggctgaataccggagccttgccagtgccactgctgaaatcatctggcttcagtccttgcttaatgaagttggtgtttctcatcaaccagttcctactatatggtgtgacaatttaagcactgtgctgatgtctgcaaatccaattcttcacaaccgaacgaagcatatagaactggatttatattttgtgcgagaaagaattcttcgacaccaacttcttgtcaaacacactccagctcaagatcaagttgctgatatcctaactaaagccctgtccacaccacgatttcaacttcttcgatccaaactgagtttggcttcactatcccaactcagtttgcggggagggggtgttagttaggagttagtttaggaatctgttatttctgttacaagtttgttttactgtacagctgtatttatcaacagattctatcttttctctcgtaaatatactctgtatatatactgagctttggctccttttcagtgtaatgagaatacacttcaattcattctgctctctcaatctcaacacatcaacgtctttagccggcgaagaccttgaggcggtggtttagacgacagaggtttcgacgatgatcttgtcagaggtggtttattaggctctgtatatagcgactgcaagaactccaccggttcgtttaaaagaataaattttttgattgtgattacataagaattcaataaaggcaacaacaaaataaaagaaaaatcaactcaaacccaatcgaaaataaaatagataaagcaaagtagaagaaaaatgttgatatcacactagtaacaagtgtagtagcctcaaggaagaaaatgaacaaatgaaagaataagtgtatgtttggcatcataactaa

SEQ ID NO: 301669 - DNA, 2275 bp, Cannabis indica
tgaactctttatgatcttcctccactccaagcacttatgctgcatttattgcttaaaccccatcatggataatcgactttggcgcatttgaccacatgattggtcaatctcaactgttcattacttatagttcttgtccaagttctagtaaaacaaaaattgttgatggctctctatcaattgtggttggtaaaggttcaatgtacctttctactttccttactcttaaaaatgtcctccatgtgccaaatctatcttgtaatcacctctcaattagtgaacttacccttgatcaaggttgtattgcgaaattctcacaattatgtttttcttttttgatctaaaaaaaaaaaagaggatcatgtggtgcagatcccttcccaccccttcccttctgtcatttagacaatcccagggaccacgtgtcagctataagggtcttatacctcagtatgccttaattgagtcattggtagtcacctcgagagggttcccatcatagatgacaccacccacagcaagctagccttcagaaggccaagcctttaatccttttcaagaggagttgtggtgggtttcgaactcttgactcacgcaaggaaagatgccagtaaaggcatctctaccactacaccacagaacacgtggttctcagaattatgttgtgatttgaaggaaatgtccttggggaagatgattggaagtacgacagaatgtagcgggctgtattactttgatgttgatccatcatctactccgggtaataaaaggttctattctagttatactgcttatgatattgatattatgagatggcattaccgattaggacatcctagttttccctatctaaaacatttgttttctagtctgtttcaaaatgaacacttgagcatgtttatttaaatttgaagtgtgtcaatttccaaaacatactcgaagtgtttttcatctcgttcgtatagggcatctcatcatttcactctcattcttatagacatgtgggggccatcccacagtaaaaatatctctaatacttattagtttatcatttatagatgatcattctcatttaacttgggtatttcttttaaaagacaaatctgatactgctctcacattcgaaaaatttcattccatgataaaaaatgaatttcaagctgatcttcaagatctgcacattgataatgttacagaatatcttaattcaatcttaggtgattatcttgtctctaatggcattgcccatcagagttcctatgttagcactcctgacaaaatgggattgttgaaagaaaaaattgacatttgttagaagttgctagggctcttatgattactacttctgttcgtaagattttttggggaaaagctgtttcgattgcaacttctttaatcaatggaatgccttgtgttttactatatcaaactccaatatcttctcttctcaagatttattcttgtactcacatactcttcgatattccactaaaacgtttggttgcacaacctatgttcatgggccttggagaaaaatacactctggaaaatagttactcagctgaaagacaaccatgtggtaggatgcaagtgagtatttacagtgaagtacaaagttgatggtacttagaaagatacaagagaagaatggttgcaaaggggttcactcaaacttacaaggtggactacacatagacatttgcactagtggcaaaacttaacacaataggaattctcttatcaatagttgctaatcttgattggccattggaacaatttgatattaagaatgtctttctaaactgaattttagaagaaaaggtctatatgaagattcctcctggcctcgaaggaaaatatggaatagagacaagatgtacttaaataaatctttctatggcttgaaacagtcatcacgagcatggttttgaggagtttaatcaagtgattaagaagcatgggtacaaataaagtcagtcaaatcataattcttcaaacactcacaagatagtaagattgtgttttttattatctttgttaatgatatgattctaactagaaatgaccttaataaggagcttaaaagactgctagaccaagaatttgatgtgaaagatctttgtcagataagatactttctgggcatggagattataagaaccaagtagggaatattaggggctgtttagcttcataactttaaaactgttttcagtttttaaaattataaacaacttttaaaaaccaataggggtcgtttggccaaattttttaa

SEQ ID NO: 301670 - DNA, 1508 bp, Cannabis indica
ggtgtagcagaacgtaaaaacaaacaccttgaaaatgcacttgccctcttgtttcaaatgaaagttcctaaacatttttgggccaatgcagtttccacaccatgctttcttattaatcgcatgccatcctctataattaatggtgagaatctatttaaaattctttatcccagtaagtcattgtttccagttgctactctagtttttagcagagtttgttttgctcgcgatgtccgtccacatgtcaccgattgaagagatcacatttacataaacactctcctcattcttagtctcagtttttgttgacttctttaaagtcgtgatcgacatccttgtttttggcattgtcaacttctcctacattgtgtttggcttcgtcattggcagcggtagcatctcaaaggtggtgcaactcctcaacagaatcagtttctgactttttgataattacttgttcggacatgtcaggaatctataatttgaaagctcaattgagcttaaagtttgacatgaagaatttgagagttggaaagaaaatcctagggatggaaaaaggcaatcacttaattcttgtctcaagaaatgtatattgaaaacatgcttgaatggtttaatagtctaatatgcaagtaattgtttccgctacaccaaatatttcacaaaccatgagcattgggagtaggtacaatgcaaggagattccataaaaattcattgagaaccaatgaaatagactttaggctagtaaaaggtactagtgatatcgatttggtttacaaaatgtaccaaggataataagcacatttagatatgtccactcaaattatgttaaaaatcttgatatgcaaaggttgcaaattgcataagttttcacaatatggatgtactctaaattcggagtaactttttaatgaattgttgcttaccactgttggcacaaatgtggtgaaaaatgttacctacaagtaggaatagcagtatatacatgtagaaagtaacaatagattaatgtgataatttgggtcttatacatttgataagagaccctttaaatgagcatattgataaggcaaaagaaccatcttgctgtttcttcaacaatttctatctctagtagatccctcaacaagtttcaaccacgccaattctagaaagaaagataaggcgataataatcaacaagtcgaatgccatgtaacttcaacctaactttttaatgattattatccatttagattaaattcgaatgcctactcaacaaatgatggaaaatataattgaatgccatgtaataggagattgattaagtcctgaacaaggtagaaaaaccttgaagatatattgctgaggagataaaagtaaactgtccaaacagaacaaaaataacttacggttctttctgttctgttctatgctgtatataccactgaaatatttcactaacatttggatgccgaggaagtctaggaagctgcaaaataaataaatagataaaattaaaaaaaaa

SEQ ID NO: 301671 - DNA, 1541 bp, Cannabis indica
aggatcattcttctcttcaatttcagcttgatcaccctttggttcgccttttgtctttcttaaagattgtgttaccttcatcaaagcagattctatttcctgctttgaaacatagccagtttctgacaagaaagatgggatatcgccttcctgcacttgttcaagctgtctcaggagaaattctaggccattaagttcattctctagctcatttatcctagaagacctttttgcctcagccatttctcgcaatcgttgactttgtttttcctttatggctgcctttctagcaagctcttcttctgaaggaggctcctcagttggaggaggagtccagggaagctgccagcacctggttctctcttcggcttccttaacccctttctgtacaaccacataggaggtaccacaattagacataaaaaaagtggtaaaaagattttgtaaaagcagttgcattacctgaaatagttgagcttcagaaccataatcttgtgcaatataacagtgctccatcttcaggtcctcaactttctcccaagtaaatcgagccctatcaaatttatagagaaaataataaaaaaaatttgacttggtactttaagttccataatgtgtacccaattgtacttacatgtgatgggggtatttaagggaaaggagctgcttcatatagtcagtgatgtggaagccaccaatattagtcctacagcatcctttataaaccggctcaccattgataaactgcagtcacagaaacacattatcgtcagctccctcaagacattataatttaggtctgatataataactcattaatttatacatgagtacaagttccctgaaagagccataagaccctacacccatgaaacaccaaaacagagtaacaatggccaaaataatgatttctattactgactgaaacaaaatcagaaagaaaagataacaaagttctttgagggtgttggacctcccaagagctaagctccaacccaactatactaacaatattctccccctgcctgtctactctccccctccccagcccacaaacaatctctaggctgacaaactatattgtcatctgtcttgtaaaaatatattgccatcgccatcctcaatctctaggctgacaaactatattgtcatctgtcttttaaaaagccagctgcccaaccaatcctaagaagagagacagaagcgaagacaaccactcaatttaatatcaatgtctatcacagtgaacaagaactccatccaatcacgttaaagaacatgaaaatgatagaagtacattagtggaggataattctatatcaggcaagtatatttcaattcatacagaaagatgtaatactaatataataatttaatctgtgagaatcatactgggatgacatgcgtagttgtaaatccagggcagatagcaagaccgtctttagcacaaaccccatgttgttgattatacttgtagctgaatgcggcatcaacaccatatgctgtgatgatgggaagaatataaatgattcaatagagca

SEQ ID NO: 301672 - DNA, 2753 bp, Cannabis indica
ttattcatttctctttctctttcatttgtttccctgctcaaataactctgttaactcagagtttttacatggtattagagccatgtctaattaaagacccattccacctgaacaagaaagatcataatagcaacagaatgatccagctcgagtggctcttccaacaacaatcttcttcccctgaatcttcaacttaattgtatgaactttacaatctagagatctttaatcctggttattgtttgagcgtatgatttgacattttgaatcaactatctgagtggagttcaagagatctcttgtgtatttttgttatgttagagacaaagtgtcgccttctctaattactacaaaactaagaaaagtagctgacgggtccaaggacttttagagcgaaatatgtttgaagatcagagataacagtattgatttgagtgacatccttaccagtaattaggatattgtcaacatacaccaaaagtagcagttgtaaagaatagactagaatcaaccttgctattgttgaatccccacagtaatagagatgacttgagtgtgtcaaaccatgccgaggagcttattttaaatcataaattgccttattcaatttgcagacatatataattgggaaattgaggatctacaaatccttgttgctgatgcatatatacttcttcctgtaactcaccattaaggaagacaatattgatgtcaatctgttgaatgtcccgcccatgtgttacagtcaaggtgaagatgatccgaattatacacgacttgacaatagggctataggtttcaaagaaatcaaactcttgggaatttgttgaaacctttggaagctaaccaagctttgaacctttccacagaacaactttattctatatacacccacttgttgtgtattatagtcatttctgataaaggaggcactaatgtttaggttctgtttttcttgagagcaacaaattcagtgttcatggctctattccagcttgggttagccaaagcttcttttatcgacctaggttcaaagtcagtagtcttgatggcaaggtacattttgggtttaaaaatacaaagtttttattgagtgatcattgtatggttgttatgagtgaaaggcaaactgtgagtacttgaattggaattaacagattcacttgatgaagttaagtgtggttgaagttctggactgtgatgtgattgagaactaaacacaggtgacaactgagaatcagacacttgaggtgagtgtatggagcttagagactcatcagagtgataggtagaattggtagctgagataattggatgtagaggattagatgtggggatttgaaaagcaaggctgattctagtctattctttacaagaaaaaatgggaaattgctactacttttggtgtatgttgatgatatcctaattgctagtgaggatgtcactcaaatcaacattatgatctctgatcttcaaacatattttgctctaaaagtctttggacttgtcagctattttcttggttttgatgtaattagacaaggcaatactttatctttaacacaatgaaaatacacaagagatctcttgaactccactcagtttgttgattcaaaatgtcaaactactccaatgtgctccaccacaaagatgtctcagcatattagcacaccaatgtagaactccacaatgtactaatacgtacttggtgctctttagtacctcaccatgacttgtccgaacattgcttttgctgtaactcgtttgagtcaatttcaacaagctcctacctcagaacactggagtgcctgtaagagaattcttaggtatctttctggcactcaagttactggtttacagtttaaagctttctcgagacttgacttacaagggttcactaatgtcgattgggcaggttgttatgatgatagaaaatctacatctagttattgcatatactttggaggcaatttagtcagttggtgttcaaggaaataaactgtggtggctagatctagcactgagtttgaatattgtgctctaactttagccacaattgagattacatgtcttcaatctctgttaacacaaataggagtttaacttctacaaattctaattttatggtgtgacaacttaggagcgggatctttggcatctaatccagtatttcacactcgcaggaaacacattgaagttgatcttcattttgtaaagaacaaagtcctagctcaacaattagatgttagatatgttgattcctcacatcaacaatatgtgaggaatacaagttaacacatagacatgtataacttgaggggacatcagaatacaagaagaagaaagtttgttaggcagttaggcttttagttattaacctttaattatgtttaataatttcatgtttaaattagttagttagctacattttttgtttacagctgtattttcctcttttcttgtattcagtcatcaatgtcttctataaataaagttcagtgccaattaaaactgaatattttgagcgggttcaactcgaactcgaacaacccacccgaacccaaactagtgaacctgcaaattttttttaaaaaaaatgttcagtcgggttgggttcaacctggtatccttcggacgggtttgcgggttgagtttttaggagtaccgggtttcgagttgaacccgaacccgcccgccaacccgcatatttaatatattatacatatttttttattatattttatatatattaa

SEQ ID NO: 301673 - DNA, 4385 bp, Cannabis indica
aaaaataattaataaatgatctggaccaatgagatgttgccacgtagatactcatttggcacctaacggtcgggcacctacggaagttccacaagtgtgacggaaggtatttttatcgctaaaaatacgacttagatacttatctgttactcggtataaaacttcagtatttatgctgtaaattactcttttgtttttaataaatcaataattgttgcttttcgaatttaattgtagttctgtttttcaaataattatggacgtatcaatttgtttggagtatcacctaaagaaaatgttgtttgttcttaaaagaaaaaaaaaatattgttttgtaatttaaccgttatttaagttaatagaaaaatgtaaataaaaagatataatttaagttatcactaaaaaaaacaattctatagacactactttttttcactttcaacacacatatagccacactcattctattttaatcaccaataaagattacatcccttttacaagtaattataggccaaacaatatggtgtagaagggctgttcaagtgagaaatgaaaaaagttccaattcgaatacaaaaattctctcaagtgagagtgttgggaaatccaacttgactccatgtcaaacctaagcagttctcaaacatcatctcgtttccgatcgtccagaacttcgcctttctatgtttctttcctttacaacttttaaagtgctgtcttgtcctctttccatttttcaaaggtagttgttccactttcttctattccattacaaaggtattttttgtctctttatcagtgcgtgttatgggggataatggtggtatcccaagtgatcctaatggcatcccacgtgatcccattagtgaggaagtagttcctattgttggggcctctgaagttatggcatcagatgaattttctcagctacctcagccgtctgaaattattatggatggctctaataaggaggtagcagaggagttggcggtttctcctaccaacggtaacgtcagcaagtcaaatgtagacattgaagtcctgcacaacaattttttagagtctatgacccttgaactggaaccagactttgaacttacagctgatgtagtcaatactggtgtgctagttagctttctaggtggcaatggaatctccaggtctagactaagagagatactcaatcagatatggaagctaaaggggcactggaaatttaagactatgaaaccgggtgtttggggtattttctttgataaacctgaggattgtgtggcgattcatagaaacagaccctggatcatcaatgggaggcttctaatcattagagaatggcttgaggatggggactggtataacatggatacggggaaggcaaatttttgggtcatggcttccggcttgcccactccgtaccttaatggtgttaatactcgtacgattacatccaaagcaggacgttttattggaagcgacctagcagatcactgaaccatcacaagaaggggatttctaaagtttcaagtggagttagatacctcttatcaactcatatctggttttttttctggatattaagaggggtgggaaagaatggatacaattccggtacttcaagctaccaaagttgtgctataactgtggctatctcggacatgacaagaaagcttacttccgttcaaccgcctatgcatatcctcctcaaggtgatgcggtccctgcttatggaccttagatgaaggctgaatcagtgattttcagttgttttaatacacgaaactagcttgatttcttcagagaagatgtaggccggactgtatctctagtgagaacacctgcggtggttgactcgcactccaaagcaatgggaaaacgacctgtcaatgagagtggtgggaaacaaaacttgcatcaaacaacaagcaagaaaccatcaaggaaagtcgtcagggtcaacaataatggcccaggtgctgtattgggaaaaaatttgaaagtggtaaagaatacaagggtgaatccatcgggtaaaggcaaagaactcaagacctatggtgttcaaggttctgggcatcttggaaaggaaagaaaaacaagatcagtttcccctagggtaatgcgaagacactatcaaagtaaaaacagtactttatctgatgatgatattttaaaaaagttttcatctaggcccccaccaaactcagctgataatagtatccttacaactatcatggccaacattgggcctacttatgatcaaatggtggacaaggcccatgttgagttatgtcaatctagacaacctcataaacatcctgagcccccccattttccttggcccatttatgctgaagaaattggattggctgaggagctaatgggccctgcaccagttgacaagtttgagccaattcccactcttttccatgacccagtagatgtttcagatttagtccaccattgccctcaacctaaaaaaagaaggccagcctcactttgatcccctatgtccaacatacagaagaaaacactatagaattctccacagttattcctgatctcccaaagttttcttcggcccccaacactctttttaagatgggctctggagcttcttcttcatccttgaaaaataataaacgtagaagaaagggctatcgttcaaagaaggcagtggcaactgatgttagtcttcgtggtaaagctcctattgctgaagatggaccagctcaaattgttcatgatggtactccgaaaaatctcattgatacccttaatttggtcgaagttcacgttaaaagctctcaaaattttctcatgggcgaggaggcggcccttaccaagccccccaaagccccatgaagtgcctctcttggaattgtcggggcctcgcgagagacccgacaccccaagctatctcggcttgggttagtaggtataaggtggactgtgtttttttatggagcaaaagttagtaagagtaatatggaggatttatctagaaagttggggttctctagagttgtgtgtgtgggtgcttatggtctggcaggtggttcttgtctgatgtggaacaataatatcagcccggttgttaattacttctctaaaggctttttcgaagctactgtgtgggacttccaaaaccaattccactgaaactttatacggtttatggcaccccatatatgagtgcaaaagaggctttttggaagagtatggaagaggaattttctaattgtcaactcccatgggtgttgataggtgatttgaattgtatttatagccaagaggagaaggtaggaggccgaaaagtttcctatgtcgacgctaaatggttaaggagctttatggacaatactggaggcgttgatctacagttcataggcaataaatttacctggcaaaataacagattcttgggaggccttattagagagagacttgacagagctttatgttccccggaatggttgctggagtatgcctcagcaggggtcaggaatttgcctattgcaatatcagatcacgctcccattatctttgattctcatttgtttgctgctagggggttcattcctttccaattctttgaagcttgttcttgggagaactcgtgtaagaaggaaattgttaaagcttggtctttctcaggtgacaatgccactgcttcttttattcgtaatattcataattcgaagaaagctttacaagcttggaagaagaatcatacaggagcaaatgaaggtgacattaaaaacatggagagaagattggaatagatttagaaccagccttgcccagatgctttcagagatgaagaatcgagaattcatgcaaatctggcagtttcttggtccaagctcgagagtatgtggagacaaaagtctagggagacttggctgtccttgggagaccgaaacaccagattttttcatgccgtaatagtcataaggaaacgaagaaataatgtatgggcaatcaaggataaagatggtaaagtttggaaggataggaagcatattgcagaagtaattaatcaacacttcctggagcttttcacttcggcaaggccatttattgatgggaatcttgaagatcttttcgtcaaaaagatcgataccaatgcaaatgcaaattttgttaagattccttcggatatagaaatcaaggaagctgtctttaaattacatcctctcaaggccccgggactagacgggttttcacgctgctttttcaggaaatattgggatgtagtgggagcaaatctggttgccacggtaaaggagtgggattatgaatcctaaactcaataataccttcatttgcctcatccccaaagtggaatttcctatgagtatggatcaatttagaccgataag

SEQ ID NO: 301674 - DNA, 951 bp, Cannabis indica
atttattaatacctccgcccctgtgtggcaactacgtctcaaatttaatgataacaataattttgaaatatatgaatatttttatagaattattaattgttatattgtatatagatttttttaattttaatttaatttattcaaacaaaatatatttttaaaaactaactaatacagtaataataaattaattaattaaaaattaaaatttactaagtttaaaataattattaaaatattaattttttattattattaagattgaaaaataaaagtttactaaatgataacttatatgattaaaatatatataaaaaaatattaaattttaaaatttgttatactttcactatttaattatcattaaacaatataagagtgacatttggtatcacaattgtcttttaccatttctctttttgtttggaggagtgtactgagactaaaaagaaagatatcatgagaaatcgacgcgtaaatgaacaaaaaatataaggccatatgtctttatataataaggtaaagaaagtgggtcccaaataattaattcacattagaaaatacaaaatgcaaaagtgtgaccgaaaataagagtaataataaatatatatatatatattaaaaattaaaaaaaacaatagaataaaatagtttgacgaggtggaggactgggaagcgaggttttccgggatacttccgctactcgctttcctgtgttttgattcaaacttttacttctacaactactaataatactgtgttgtctcttactacgtactactgctactacccagtactactatggtgtaccccacctagcttcctctctataaatatacctcaaattcattcattccaaattaacgatctcttatatatcttcttattatcaatagtactctctctctctctctctctctctcactcctactacttaatatatatatattg

SEQ ID NO: 301675 - DNA, 8681 bp, Cannabis indica
taaaataatttccaacattaaactcacttaatctgtcaaaagtcagtagttccatcttatcactcatcagatgaattttaaaaaatccgctgttagctagttatataacagttggcttcgacgccaacttaaagacaaccccacaccaacatctataagtaggagtgtctctactctctcaagacaatctccaatgctcatactttagattttagagttaagtttagaaagtccaagatagtatagagagaaagtccaagatcacagtaagtggtgtgaatggatgtaatgggagtatcactcttaaagtaatttttttttcttattgtgagacatttatttgtaattcttcattgtgttgagttgtattcttggacatatctcattatgtactagtgactattcaatcaataaagattcatgattcaattattctcgagctaattaaatttattcttatctattttcatttaagttctagtttttattttgtaattaattctaatttgaattatgttttcttgaacattattaccgctgtgtaacaagaaggaaagcatataattaagttttgatgtattctatcaaaattttgaatatatgcatgtgcttcatttcatgatgcatgccgatataaaaaccctatggtccccgagacaaaaacaagacctgaaaaaacagtaaaaaaatgttaattggtaattattggtttggagcccactgaggctgtgaaccctctttccaaggtggattttttaaccaatagctataagctgtagcccaaaaccaaccaataggttgaggataaggtgccacataggataaacaagaccaagaaaacttgaaaacagaagagataatatccattatcgttacactacctacaaaatgctgagcactagtaccatgcatatatatacaaaaaattataatgaaaaataagagagacacataacaaaagtagtgaagatgggttgcaacgctttattagtcttaagaagcccaaaaaaagaagaacaacaagtcccaattgctactaccactgacttgtccgagggcaaagatagtaatttgaagagtgaagatgttgatataatggaagatttggagagaattttgggcattaatgaagaagctgaagaagttcataataagttgactaattataagggtaattatgttagtcaacttaactgggaattcatggaatggaataagtttcccaataatattggagatcaagaagtagctgaagaagatgatgaagaagaagaagtgttattatcagagcagaagaatatgtcattattaattgacaaggattattatgaaaaaaattacaagtgcttttttgaagaagatgatgatgaagaagaagaatatttagaagaagagaataatgatgatcaagaaagacactatagaaagggtgataataatctaaataccattaagaaagaggaagttgggttttcatgggatgatcatgattattataataagaataataataagggttcgctgaatcttaatctgagtttgaattatcaagaggttttggaagcttggtcagatcgtggctctctttgggctgatgagtactctctttcaatggcatcatcaaatggctctaataactatgttagtattcattaattatttaaagctcttgtcttttcttaatactttcttatatcatgcatgcatgcataaatatttagattattattaagtcattaattagtttaatacatattttcatcttataaatatattagtcatgagtaaaacttgtgtgtgtatatatatatgtgtgtgtgtgtaaatggattagatgggagaagtaccagttttaatggaagaagaaaaaagaagaagggaagctagtgttcttaggtacaaggagaagcgccagactagactcttctccaaaaagataagatatcaagttcgcaaactcaatgcagataaaagaccaaggctcaaggtaattaattttcttttttctcctcttcacttcttttatttgataaaatatatatatatttaaaattattttaactatattataattgcatttgcatgcagggtcgttttgtgaaaagagtttaattaaagtgaattgtgctgatacaagggtatgaatgaaatatctatttagtatccaaaaatatctcactccaccagtatatggactttttctcttacataatcaaaatatctttttagttacatatgtatatagatatttatatatgtagctacttgtggaattatgttttcagtcgctttattaaatttgtttatttgttcagggcactatatgatttttcccttgaaaggtccatatcttgaattatttatgttgtttcacaatctatatataataattttagggcacatgacctttatacgtatgcacttgcacatgtaatatttaatccagcggttaacttttaaggataattataaattccacggttaattatttaatttcttaagtggaaattaagtggtcctcccctgtcatatgtatctatctatatattgatattgtttaggtaaatatatatgaatattttggtttattatgggcctctttatagtgtagtgtaattatgtgtactcagctgaaagtggtagaagtttgtatcaggactcaggaggaggctgtccataatgtgatggggtgagaagtggtccacagccctctccatcttagtcaaccaatattcttcctcattatatatatttataaaataaaaccacatccaatgaataaagatatagatacacatattgtcttagtccaaattgcaggtgattaacataatttttttttcaattttaagtattaataaatatatcttacactctctctctctctctctctttgagataaaaccgtttataaataaattaaactagacctcacagtcgttacaaataatgttcgatggaatggttgacaggtcaaccatgcaagtaatcttgttggcgtaagcccacttaaccacattatgagctacaaagttacaagatttggaaatgaatgaaaaattacaactaaaaataaactagagagcttattacaatgctgaacatagttataacaataccccaattagaacaagtcataatctgccttctccatggccaactgataagccgaagcttcgccaattagaggatcagtgaaatttagcatgttagtggccacccacaaaatagaacccgtgtgatccctagccaaggccactccgcacatagaacaacaaccaactttcacatcacaattgattttaatccactcttccagaggaggggtccaaccatgaggaataacatcatcaggcaaggaaaacaaaccagacccgtaatctgtgtaaccgaaagtgatagagtcaacacaatggttaatgttactcaaaaaattgttgtgcaccttatcgttacgagccttccagatcgtgtccaccacaatggaagcatagagaaataatttgtccacttcaacccctctagacttcagactccaaagaaatttgacccagtcccataatctcgcaccagagtcaacaaccagcatgatcccctaaggggaggaacaccacaggtgggacgcaaagttacagtaaagaaaaaggtgctccattgattcctcaccctccccacaaagagggcaagagacatcttcaatatacattcttttggcaaggagagcatggacagggagagcattagaaagaattctccaccaaagaactttatggcactccaacactttagatttccaaaagtctattccacaaggctggagaaatagtgcactgaggcgcgcagtccaaggcttgaaccaggtaggcagacttagttgagaataagccattcgaattcttggtccagacccatctatccctaccattgccacaaggtttacctccttttaaaacgttgctaattgtttcttgctcaaatagaagatgaagtttagggacatcccaatctccattgtccaagagaaggtatgcaaccttatccagccccatatgttggggaataataggtttaggatagaaacccgcaccatgaatacccaagggtcggtccatatgttcgtctccttcccatcaaatattagcttacaagtaccctttataaggatatctttagatctcaccacgttcttccaaaaccacgaatctgggtttttataggagcaactcatgagctaactgcctctcaagtacttagcacttaagaccttacaacacagggactgatgctcattaagaagggaccaaccccatttaggcaataaggcctgatccatttctagtgtaatatcccagaaaataaaatgatatttaattgagcatattttattaaatatgtaattatcttgataatgaagtaagattatgatcttacttaagctaattagtgtgaatttaataaatagttaactaaaacataatttattaattacggagattttattagattatgcgcgtattgtagatattatttttgaaataaaatattttctggttcagcaatcgtgggaactcggcggagtggtcggaaatgtcacgataataaattatggatcagaatgggaattatactggataagtttagagtgttaggttgtcagtttggcggattagttggcattaccaaaatacccctaggttttaaatagtttaagttttgttaaggagggtaaaatggtcattttgggtgatagttattaatgtttgtttcgtttaagttagtggctgattgacgttaatatagattaaggaatattcatttaattaggaaaataaaacgaattaagttattaaaacaaaaaaaaaacaaaattggataagttagaaaacacttaactttgcttttctcttcttcttggcctaaccctaggggagttgcaacctaaggttttcttttgtaattcatcagattttggctggattggttgggtgttggagttaactaagcatcaaggtaagtattcaatacttttctcttgatttttttgagttttaagttagtttgggttagggttttaggaatttttcgggctgtgatgttaattcgaggttaaagtatgtttttaggttgtatgagagtttgtttgagtttgtaatggttagagataggggttgtttagcttgatatgagctagatgaggtttaataagtttttatttcacttgagtatgcaattttgagtaaatgaatgaattgtgattaaatgatgcttgagataagttgtatttgtgatattatactgttttggagctgttgggaaggtttggggaagaaaatccaacagtttctagtctgccagaatcggtcgaccggttggttctggtgcaacagaaccagtcgaccggttgccctgcagggaaatttctggggttttctttgtgttctgttttggctcgtggtggtaccttgtatatgatttagattatttatgtgttttatggcctatcttggggttgttagaggttaggttttgtctagttttggaattagggtttgttcctgaagttttggtttaaggcatttattgaattgttgttgtagtgacataggaccgggattgtccaactccgtttccactcaggtcagcccgcacgcctgatttttggaatgaggtaagaaaagtgttatgcaccatttatggtaaaacgattatgattgttatagtctcgattataatcgagatcccgatatgtgtttgttgagcatcgattatgatcgagggttggaaatggtcattactgttatgagtaattactcatgaaatcgcagataggttttttacttatcgttctctgtatcgggcaacgatggtgacatatgcagttcgtgggtaacgagtggtaagagtgctttatgaagcactgagtttgtgtagttataatgtgtgaaattgcatgcagatatttggacatagtgtgaatacttggattttatattgcttttggatttagtcacttttcttgctgagtctctgtgactgcttaatggtctaggtaaagggaagggcaaagttgagcaaccatgagtttgaggtctctgcagcagtgtacatatcagcaacattaaatacgacttcgctatcagttggccaaatctgaggtcaacaatttaataaatagatttgaatttaaataattaatttaataaaactattattgggtatatttaaatataatgcataagaaagttctgaacaagttttcggaatagaatttttcacataacttttttgaaagcctaaaaatatttatgctagtaaacctttttctctctattacaaaagaaatagttcttgctcatgtgttgagatttaatcaagaacttcatatacactattatcctactggtagtctttgtgtgtggtggaagatttggaggatcaaggtgtgagttttgtcattaccatacaacttgcagaaagaatcaaggataccctaataggcattaagaggtaaatattcttttcatctttttactttcaatttaatatatatacatatgtctgccatggttcttcgaaagagagcttctggatttagtttaggagagagataagaaagtggatgagagaaagagagagataacatttatattatttttaataattgttttatgttatttaaaatattttttatttttttttattttaaaatcatttcaaaagattttctttaatacaaataatgacatggaccaataatttattgacacatgtcattatggttagcctaatcagcacttaacagtgttagtagtaacaaaaatgttatagtgtgaattttttgcctaaaaacttgagatcaatcttctataaaattgacatgtggatccaatcctcaagggatggatgagctattaattaatgactctcaaagagttaaccttgcttgatccaaactcgcgagatgatgtgaccttgatagggtctagtcgtatactatgccttgcgtagtgtaagataagtaggaccgagaagaatttatataagttgcgcatatatagacataatgcgatgaataagtattcttctcatgcgactatgtaaagatcgtttccttacataatgattagtttgaatgacaaaacgtgttcgatgactcaataaggactcgcatgtcccatgtcgtcaacatgcaagatgtccgacaatgcgattgagataaaacacagacatcccagtgataggctcattagccgtttagtgaatatagaacgcacctaaagcctgcgagatcgtgtgagaatatgaacatgcaactcgcacccgattggtcacatacgttgctccaattattattagaatggattaaactgttctttatttattcttttatgtttattctgatttaacattgttatttattgtaaaacggttctataactgatcagttatgtaaaactaaaaggacacttgctttttatatatatagtgatccaaatcaaataaactaagaagaaatcatttgtaacagtggactaaacagaccgtgatctgattgaactactatattcccttgtgttctttttatttttcagttgttttgttgtcttggtagcttcttgttgaatactcactactctaagtgagtgttcgcaatttcttgttcctttcatatattgattgcaagtattttagtgttgcttaaattcctccgacaacatttgatgccgcatgtgaaaaatattatcaacgattttgaaagaaaatcatcatggctaccaaccaaacaaatgaaaacaacacaggatctttcaacgttggaaccatgcaggtttctttttctggtgatagaaccaacccaaccgaagccattataggaggtgtgggacagaccactgtcactccctcaatctgttcccaaaaactgctagtcatgcaggagagacttccacacctgcggcaatagtgggacactttccgccgatcacacctgcggtggcctctgaaggcattattcaacttacgacagcacagtacacgaccatgcaggagcaggtcagatattcatcgatatatcatacactacaccctaatccttttctgatatagcttcagaaaatgttaatttgattattcagaaaacgaagttcatataatttttcatatgaatatatgatataaagtgagaatgatataggaaagttgctgttgtaatttgtatttaattatatttttctttcggtttttggagaggggcattcatgcatgtatttaatttggttgatgttataaagttatgggctgatagagtagagtagtgagtaattgatgataagtgttaatttggtttggaaattgttgaaaggaacgaagcagaggttgtaagccaaatagttgaagcagggtcaaccaaaatgatgagtagcactagtattaccataaccattgtggcatcttcagatgaaataatgatgttcattgtagtaagattcatctcttatctgcaatgccttagcaaaatattgatagctttcctttttaagaccaatgtggaacttttaaaaaggtccgatatttgaaaaattaatatgaggcttgtagtaatatctgctctcattttttaagggtaaatactattttggaccctctgttttacaaaagttactaattggaccctgtgtttt

SEQ ID NO: 301676 - DNA, 3735 bp, Cannabis indica
aatcacgtaatacgcctatgctagttagggtgttacattttctaaaactagcaggatgctatagaatatttgttgagggttgtctacgcccttagtagaattaaatcgaaggaaattgaaacggaggttaaccattacactaatgttaacattgccagtcagtgaggagaaattatgattcgatgtgacacttctaaacaaggattaaattgtattttgatacagtccaggagagttattgcatgtgcttcttaacgattgaagaaatgtgaataatagtattccaatttgatattaaattgatagcagtggcttctgccttgggaatttggcgcttttacctgtttggcaaaaatacgaagtttatacgaatcataagagcctcaatattttatcatttggaaagatttaattaggaggcattgactatggttaaagctgattgaagattataatagtgtgatttcctaccttttcgggaagaaaattagttgtggatactttaaaccaaagcggtctaggataagtttggaaacgaaaagatctcaccaaaggttgctagaaatgtaaccagaatagggattgagttcataataagagaacttgttaatattacattgtagtttaatatgttggaaagaaataaagtggcccagcagtgtgactctgaactttagaagtacaaggaaaagcttggaaccggattggcaaatgactttttagtttcgtttaaaggaattttatgatataaagacaaggttggtgtatcagtcagataaggatattaaataggaggttttaaatgaattttatactacaccatactctttatactcgggagtaactaagatatataagatcagtacagtatctttatcagagtggaatatatttatggcagattagtgtgctaatctttttgtcaaagaaatagttcaaccctgtgatgctctgaaagtaattatctcagattgagatttaaagtttatatccaaatgctgatagtctgtaacgagtatgtataatagatttgaaggttcttgaaataagcatctccctctgatgaagttttcatacaataatagttatcagagtactgttgatgtggcaccgtacaaaatgttttaggaaaaagaaatatcgttcacttattcattggaataaagttagtggaactattatggtcgaccattttggaataaagtaagcccagtttctataatatgacgatgtttcctttcagctcgaccattttgttcatggtcatgggggcaaggatgttgaaaatggactccatgttgagttagaaaggaggttagagacctttattcacctccccaatctgattgaacatgcttaatagggagatcatcaaattgtttttcagcaagaactttaaactgtagaaaggttctataggcttgagattttccagacaacgaaaaggtccatgtatatttgtaaaaatcgtctatgaaatgaatgtagtacctatgcctttctttagatgctatatgagatggttcccccaagtctgtgtggaccaattcaaaaggttgagaggccctggactcagagatagaagatggtagtttatggcttttgtcttttttgcatacagaactttagatttcttaggtttctcggaatatgtaaggtagctagaatcttagctaagatttcaggagcaggatggccaagttttgagtgccataaatttatatcaaatttttgagcaagaaataatgcagaattatgagcaatagacaatgtacaaacattatttttataattggtaaaccagtacaagaggaagagactgtattaacagtactcttattatattaagatgaactaaaaatagaaggttgtacaatgtcttgattatttgcagatgaaacagtacaacttgacttagagtttgattgcttggtgactagatgacactcaagctgaaccttagaagggaaagaactgtgagacaacatgtagagaccatttttaagcctctccttgagtagcactctccctgtgattttggccttaacaaactaatatttggagtgaaattctaagaaaacattattatctgctgttaacttaaagacactaataagatttttggttatagtgggaactttaaggacattatttaaatgtaaagatgaattagaaaatgggattgaatagttaccaatatgactaatagcgagtcttttgccatttccaacagtaagagtatcagaacctaaatatggaatttcagattcaagatattccatgccctgtgctatatgattggttgcacccgtgttagcataccaatcataatcttccacaaactctagtaatgttgaactagagtaaacctattaatcatcttgctcatcaatttcagcaagaaaaaccttaaagtcattaatcttgagtgtgacaaaggctttgtcgaatctgtaatgatagacagcatccgtgtgtccatctttgtgacaaacttgacagagtaatcatgcaattgatggattgcctttaccatagggatgaccctgagcacgattgttggaaggatagccacgaccctgatttgcatatgtgcgatagccatttcttatgttggatcttgtattgtggatactaagatttgttgagatgttggaattagagtctctaatagagtaatatcttccaagcttgcttacatgggtttacaataaagattttatagattctaatgaaagattatccacaaacttgtaacatgaacaaccacaatatcatactcaggtcccaatgtgttaagcatgtgcattatgagatcactgttatcaagaggatgaccagccgtggacaaagaatcagtaagaagtttcactttgtcacagtaatcagagattgaaagattacctttcctaatttttgagatctgagatttgatttgaagcaatctagccttgggctgactgacaaatttttgcttcagggcacgctaagcgtcgaaggaggagttatactgagccagagatccaagaatcgtctttgacattgaagatcgaagacagctcagtaagaattgatcttttcgttgctaggtggtgacttctggattgacaactccattgacggagttcgaacagggacaacaccactgagaagaatgtcatcaaggccatgcccaatgacagtgggaattacttgcgatttccatgcaagaaagttggttcgatctaatcgaacaataagagatgaattcagagaattctgaaatggattccattgctgaattggcagagcagccggagttgcaacagtagaggtttgagcaataggttcagggtgacgaggatccatgatcgacgttggtcaaagcgcttcctgatatcatgtaaaaccagagaacttatctatgcaaatctacaaggacacaattagagattgaatcacaagactttgcaaaagttagcaagtcttgaatggagctttactatttatagagagatgcttacagagttagttacaaggctttgatcaagaaaagaaataacagaaaaagatgacacctaatacaagtggcacaactaactaacaactaactgtttcaactaactcagtacactctttatcagtcctcaattattaattattttagtatatataaataaatatagcgtacctttttagaatattctattattttaaaaagaaaggtaataccattccaatgtaagaagaaaaaaa

SEQ ID NO: 301677 - DNA, 3918 bp, Cannabis indica
tatactaagtgccagtttgtacattgattcttcgcctaagaccttacagtcagcgggttataaatatactctgatacttacgtaattaatgagttattccataaaaagtaattgcatcgattcacattccttttattttgacacgtgtattctagccaaatttcggatataacaccactattggtacaatttaatattggatgacacatattttgatttactaaattatataaaaaaccgataaccacttacaacgtatcacaaaaatatagtattaggcaccttataatagctaatagtaattctctcaaaaaataacacaccttaccataatagcacaatttggatccacctaaaaatctacaatttactatattaatttaaaatattattttaatagatgatatggtacaattatagaacccatataccggttaccaattttattaaaatctcgtacccttacttttaggtagagaaatatcaaccttaggatacccaaaatacgcactttttattaatctaatggttcaaaagatattgaggtttgacatccttcaatattaatggaggttttacataatttgccaaaaaattatattaaaaataaaaaccacacaaaagatgacttccattcttattatacagtagatagattatatttgatgcaataccagtaacaaaagaagacaaacccacaaaattaaacaaaccgatgcaaataaataaataaataaataataaatgaaacaattcaaattcctaaagtaacaaaaccagttatgtcatgaaaaaatccaaaactatttccaaagtatatatagaagagaaatcaatggtaaaaatgaaaaataaccgaccaaaaatgcaagctaaataacctatccatcttttcaagtaagccaagacactgctaatactattattaacaacaaaagattgatcttgatcctatcaaaaagtatctaattgtaacggaaggaccttacaaagctgattccaaaattcctttcagccctgcaaagtttcaacagtattcacatccttcaataaaataggcgtggttatttacaccatgaggttaataattaggaatcatcatagaattcctcccagaactcttctcagatcagttttctgttcggcagtaagtcttgaaggatattgaacatcaaatttgattctcaagttgcctttctttcccggttcttttgagatcggcattccctcattttggacaaccatttcagcacctggcttgatgatttcggtcaatgggatcataagatttcttccgtccagggtggtgaggtcaaggacttttcctgttagagcctctaaaagagttatttcctgattgagcacaagatcattaccatcccttttgtatacagcatgcggtttttcatccaccacaaaaattaaatcagcaggaatgactccgggctcctggttacccttatcagggaaagttatctttgtgcctttcttccatccaggctttatttcaattgtcagtatctcctccaccgtgcgagacttactgcaagatcgagccagagtaaataaattttgaaaggaagaatcattcagcaattcaatacaagtgaaactaaggagatttaccaaatattgaaaatgaataaataaaaataaaagaaagctacaaaaaagccctcttctatgttcttgccttcttttacataggctgcatgctaaaaaactagcaagtttgagtaaaatacattgtcttttcaatgacaagaggaggcctaatttagcttaaaactttgaatataagaaaaatgtcatatatgttgatggacagttacttcttttttaaaataatagcaaatgctgtgaccctaatcatggaatagcagatctaaaacaaaagaaaattactttaaacaatcctgtcaatgtttaaataagaatattcagacagatatcttattcagcttctgatcttacaaactagacaaataacactagcaataagtaataaaactggacattgacctaacgaggaaacatttaatatctctggacattgaatgactaaataatccacacacagatgaacagaaaaatcctagaggccttagtatcgaatatcaaacacttcgtgttagagaataatagtcaaatcaactcaaggaggggaaaagggtgtataggatgatagtcaatactattaaacttacactatttaaaaaaaagaatataactttaccctgtattataaggttaaaaaataccaccttccttgatttggcaccttcaaacggtagctgcttacctatagccattttaattcaatctatctaatatttataaatacttaggggagccttggcaatgcaaatttcagaatctttgggacacaagctaagcatttggtgaaagcatttcacatgtggtcgctgggttcagccaaaattaactcagcattcagaaaatatggaaaatttggttcaccaacctaaactacacccagtaggatgtaaaacccatataaaataatccagtcaacagaggatagataactgaacagattctccaatatagtgacatagccacaactaatctaactaaactctcatgatttactaattctaatcatacttttcaaaattggtcaaggcgaggtggttcaaaacaaatctcaggctacgcctctagtgtcaccattgaggcatatatctcacactgatgaggcacacgcctctgatgtgaagcgtactgaggcacatgcctcagcttaattgtgtgctagggctgttttattttgggttcactagattctttaagctgtttttcagggtagtttttaggcttttaaattaattaagtggccttcagtttgcacctttttttagcagatttttaataaataaagtaggcaagataatgagaccctattttcaaattcaagtcagctcttaggcaagtgatgtttctttttgagaggtaaatcatttcacttcttcactaatttttactcttcaaaaagggttcaaggtattcttagaatgcggaagttgtattgttagaattggaatgtgtagtggattaagcagaataggatgagtgtatcataaaatgcatggtgttccatcgtaaaacaacaatgagaggagtagctagcccatgggtcttatatataacattatctatccacacattagcaaagtgggactctcaaacaggtattaagcgaaagaaaacactcatgaaccttgattcaaattcagcttctcatgaaacttttacatataaatgaacgaagaaagacaattcaggaaatttcagtaaccctccaaaggatctctaaaagaatacccaatcttctcacgttttccttgaaatagtagaagctgggctaaaaagtcctgactgaagtcaagaacttggcagagacagctttaaaccttttataaataactacgagtaccaacacagcccaacaacggcagcaacaacaatagcaaaaagcggcaccaacaaagaagactactacccttcagacttcaggagtgatatatattggtacagaaaacatctaagttgtaacaacatagaaagaaaatccaaaaggctagatagtaaaagaggttcaaggagagctacacctacaattatctaataaacactaataataatgcacatagaaatgacataaaaagaaagtatacttacgtatgcaaattgaacttggaaccaagtaaaaatgcctcacaaaatagaaaaacgttatgatttgaagtagtgcaataccaatattatgtatttatatatatatatactagcaaaaagtacgtgcgaggcacgtatactaaattttatgttagtttttttttctatattatttaaaagtaatacaattaaaattaaagaaaaatattattagttatt

SEQ ID NO: 301678 - DNA, 2054 bp, Cannabis indica
atggggtaatttccctttaatttatttgtttggcaaaaatattctctcaatttttattttttttcaaaagacactattgaaaatgtgtcattattctacattttgataaaattcaatatttttctggagtgatttagacgaattcaaagtacagagacacatgttacatttcaattggtttagttattattattttttttgaaaaaaaatagaatttaaacgtgtcaaacgtgtattcgttcaggaaggtacatctgaaccctccagaaaactaggtaacgatacctaaaattggactcattactaatcaacaaggcatccaaaagatagccttccaaacattactgctcttgggagatagtcttttgggcacatccacactgcagaagtaacctatccacgtagtcttatgggcttaccaaggtcaagtccttccagagcttatcacagattcgaagctcaaatcttctatccaatatgggtctgtccgaagggacccaagtatataggtctgcatactgatctccattagattataacatgtacttcatcttgctaaaatttgagcaaacttataatggcgagtcagtattgagtgtgcagggtatcgcattgtacctcatagcaccatagcctagatagattttttctctgacaattctattatgtgtgtaattgtgcaatcattaggatatttgttaatatttcctttgatatttctaatggacaactgtaagaaagttgttggctccttactctcctttcatagatgaacatgtaaccctttgctataaatgaatatctctgtctcatagttgaaataagttgaggattaccaaaaattatttttcttaaattttaacttggtattagagtttttgaaggcctatgccaatggtgactcatagtgatgaaaacacatctcatgttgtaagcatagatagtgcctctacagtccatggaactcacgccaacaaaaatggcgcttcctcctcttaaaacataaacctatactcgaaccaactcaccctcttaatcaatatttttcactcaaactcgatcaaaataacaataccttccgtaagaccatggtccctacaatcgttcaaggtcacaaattgcacgactatctaacttgcagtaaagaatgtctagtggagttccttcctcccagtgagctagatgaatatgaaaaaactcaagttatagttaacccaaatttgagcattggatcatcaatgataaactcctcatggtggtggctctacaactcaatggcagatagtattgcaactgaagttatggggctacttctggtgcagaactatgacgtgcattagaaagtttgtatggtgcctactctaagtgcaagatggatgatactcgcatgctaatccaaacagtgagcaaatgctcaacaccaatgactgaatgccttagacaaacaaagaattgggcaaacatgcttgctcttattagagacccttatcctaaagcacatcttattattaatgtgctctcgggacttgatgttgagtacctatccatcatggtttagattgaagaaagactaaaaactacttggctagagctacaagatattatccttagctttgatagtaagattgagagtttacaaactctcaatataggggaaaacaactagatctacaccacaagctaatttggctacaaaataattttttgaacaactggttgaggttgtggctactttcctcagaatcaaaatttcaacagtggaggacgatcttggtggtactggtaggtctcaaggaagaggtcgcactaatggacaagttgttccttcacctacctcagtcataactcccacaatgcctacacctccaccacctcaaccactccctcgacctccaatagtgtacaccaggcgtccccctcctccacctcctatttcatgtcctgcacttgcatctttgtcatcagattcaaaactcaaagatgatctttccattgcactacataaaggtaaacgccaatgtactttttctatttcttcttttatttcttataat

SEQ ID NO: 301679 - DNA, 889 bp, Cannabis indica
atatatatatatatttataagagaatgatattaagtaaagttgcaattaattgtataacaaaatgtacaaataacttgtagaaatggagaagaaaagtatgttagaacacaaagtaataacataaatagtgaaaagatatataaagaataaagaacaaaattacaatcttagggtgtaggttagtgagattataaaaacttgaacaaagttgttgcccaagatggcacaagttcaataatagaatcaatcacaaacacttagcaaacgcatcggagatcaaatcaaacaataaaaatataaagcaaaaagaacacaagaaatgaagtttaactttggttcagagacaagttcagtgtgaacttgctcctactccaaccgagcaattcatcattgtaatcttcattaaagtagagaaaactatttataggagcgaataattaacttaaccaattagatgttaagttagttatggtcaattagttgtagaagtaattgcttcttcaactgactagtcatgaaataagacttaacttcatactaccaatgatgattgctcttagtttagaacctactttaattgctaaggttcagtaagttcaaacaatgtgagaaccttaatatcaacatccccaggattgtcttttgtgttaattttgtccaaatcaattatttttgcataaggtgtattgagaactactttctgaatatatagttgttgactaagaaattttgccaactcgctcgtatatgtagacgagatgaaagttataactaagcaaaatagagagtacacacaagaatttatagtagtcaactccctctgtcatggcagtaatagagttgtgtctactttaagtttttattctcacaagaatgattacaagaaaa

SEQ ID NO: 301680 - DNA, 3120 bp, Cannabis indica
accatttctcttctctcctcttggttttatcaaacaaaaaaaaatcatcatttggttctctcttcaccttttctaaccttttttttaaaaaaaaattattttttttcctttttttttttcacaccaaataatggggtattgtttatataacacgcgcttaaataatatatagaccaaaaagtaaaatatataagaaggtgttgtttaccaccaaatgagcttatgattatctctgataacacttgtcacctacataataatttggaagcttcatattattcctttttacacaaagttaaacttattgtgttctttttacttttttttttttctcttctcttcttctcttatataagcttcacatggttatgatttaaggatgatgaaagtgaagaagtacttctttgttcatgagtattaaattttggtgttgaatttgatgcagcatagtaaaaaaaaaaaaacaacaacaacaacaaaggaataactttaatggagtccatggagtcaagtagtgtcccacctggattcagattccatcccacagatgaagaactcgttggatattatctcaggaaaaaaatagcttctcaaaagatcgatcttgatgttattagagatatcgatctttacagaatcgaaccatgggatcttcaaggtaagtactaattaatatatatatatagtactctagctagggtataatgagatcatttctccgaatattaatattatttttttgatgatttgtatattaatatgagttagttagggtttcttatatatattgttgtgatgatgtatacagagagatgtcggatcggatatgaagagcagaatgagtggtatttctttagccataaagataagaagtatccaacaggaacaagaactaatagagcaacaatggctgggttttggaaagcaacaggaagagataaggcagtttatgataaggcaagactcattggaatgaggaaaactcttgttttttataaaggtagagcccctaatggacagaaaactgattggattatgcatgaatacagacttgaatccgatgagaatggtcctccacaggcaagttctctctattatagatctcatctatattaattatttccatatatatatcatcatcgatctatctatacaattttcttatagtactatagtaaatattgtgtttatttcttacgtagactagttgttaaccattaaaattgatccgcgttagaatgtttgaagaagacttccaccaactctctcttaagtcaaaaagtaaataatatatgcttttccatccatattatttcccttttcagtattaggtcttctttcttttcttcactcattttttttgtcaaaaagaatagaaaaaaaaaaattaaattaaaatcgacattcctatcttaattcatgcgtcactttttgacatctacttcttcttattctttaccaaaccctatacaaacattgttgactactttgacatataagtttaataataaataaataaaaaaagttactcatcaccttatttttctcaaaaactacatttaaaaaaattatatcaaattattaaattaaaatatatgagattttaattgtgctaataacatgtattcgattattttctcatttcaggaagaaggatgggtggtatgcagagcattcaagaagagaacaacaagcaatggccaaactaaaaccatagaaggttgggaatcagcaggctacttctacgacgaatcgagcaatggagtgagctcagtggtcgccgatcatcatcgtcatcatcatcatcatcatcatcaaatcgataattacatctcaaggcacaacaacaatcctcaacctcatcatcctcatcatcatcataaccaaagcttcatcatgtgtaaacaagaattagaaggagatagcttattaagcttcaacaatcttctgcaacaaaatcatcaatttgttcagcaacttcctcaacttgagagcccttctcttcccttaaagaggcctgcaagttcggtttctttggtaacagaaatagtcaacgaagaagatcaacataataatcaagaccacagtgatgatcatattattattaacaataataacaataatattaacaagaagaagaaagttgttacaactgattggagagcgttggacaagtttgttgcttcacagttgagtcaagatgatcacgaagatcataacaataataataataataatagtaataataataatgagtcaatatttggagttagtagtcatgatcatcatcatcatcatgaagagacagatacgacgtcgtttatgttgttggctcagagtagtatagatgaagggaacagattgaatgccttcttgaactccagctcccttgattgtgactttgggatttgcatatttgagaaatgaattattagattaatattgctatatattattggtacgtatatatatacgtataatgtacgtatatatatagtattgtgtagtaaattatatatcatgaggaggagttggtgatatatattgtgaatgagtgaaaaaattaacttgaagctctctctctcttccctctcgaataatatgcataattttctctctctatatatatactctcagcttggtgagggtgagactatatatgtacctatgaatatataggtgtaatgtatatgtggcaatattgtaaaattgacacatgaccaaaaaagaaagaagaagaaggtggttcttattattttattaataatatatataagtgattatttcgtatcacaaaaatagtgtgtttatatttttaatatttatttataacattttttgttttaggaaacaaattatttaagatatcaatttcattgaaatgatgtggggtgaaacttaagaagttaaatttaatttactagtaatttaaattataatgtgtatatatataaatcaaaataaaattatatatagaaccataaaaatgtagcctaattattaagaaatatataccttaactgtgttaatatttattttaattcgaataagtataaattaaattagaacttaattggcccttatttttaaggggaattaattaccctatatactattttt

SEQ ID NO: 301681 - DNA, 1809 bp, Cannabis indica
ttttaatttatttttaaaaataatcttacagtttagtcttcaaataaaaatttatcaaaaaaataataattattgatttaattaaaatactaacattttggaaaatataaaatagcaataacaaagatattaatattaattaaaataaaacaacataacactaagttacaaaactaaaaagaacaacataaatgaaaataaacattatgtaaaaaaaataatttaatatgatcgcttaaggatcttagccttgaagaatatcaaaatattggctatatggacttaatgtattttgagaaatttaatattcttgagatgcctgatattgttggtgagctcttttttgtataattcttgtttgctcattttgaaaatgatcgcgtatattaggatcaactatagaatttaaatctttcaataagattttgttctcttcttgttattcgtttaaatccaatctttgcttttgaattttataattttgttctctagtggagttgctccaaccaaatattttaatgagttgttgatttcttctttaatagttttgacaatagtagattattgttcattatttttcctttttaattttactttcttcaccccaatggatcgtttagatgaactacctccatcatcatcattatcatttattatgtctactgaatacgataaatatctatgagatgcagtttgggccttggggagacttggactccactaggtcaatatttttttgtaacattgatgttatctgtaaatttttctatatccttaggtatatctcaaacatgatcaaatttaaaacctttcttgtaatttttatcttgctagtagaattttggttcgattcaacaataaaaatcataaaatataacgttaaaaataacaacattaataataattaaaatgttacaaatgcttacgatattctattgagatacactatttgaatttaatccttcaatttgtcttatgcatctcctgaatttagaaataactttaaagatcaataatattcgagcatgcaacgattttttgtttctatcttgagtgacatacaaaggtttggaattattgaaatcattcgcaattcgagaccaaaattagtcactatattggtttttacttattataggatttttagaaatatcaacataaatataacagatgcatatcatcttcgtttgtgtatgaagaatttctttaagtacaatgagtagctattgttttgtgagagaacataaaagaaatgaattatagcttgaattgacaatatgtagaagaaaaatgatgtgacaaggatgtagtgacactgagatgcaacatataatttatagattttattacatgttcacataatgactttgtcagtacatacaaaacaaaataatcctgatcgcttgctataatattgtaataaatatattcaaataaacaaattaagttataacaaatagtgatttgttattgattacgttattcaagtgattggataagataaatccttaattattagaatattaaactaatgaattaaaaataagataatcgttaattaaccatgataatttactatcatttttataatataaacatcacacgtgcgagcagttcaaagaagaaattgtctgaagcacatgcgcgcgcggatcaccttgtctgagtgttatacgtgcatggtgctcgacctgcgacactcaatggaccctggttttcaaacttcaataacttattcgtttttcattggaatcgagttccttacaaaacgaaaattacttatttttcacaaggaatctaaataaatta

SEQ ID NO: 301682 - DNA, 2271 bp, Cannabis indica
tttatgtgtttatttattattgttttagaagttcatatttaggttgttaatcagcatacttgtgagtagatctaagatcctggtaaaataattctaacaggccaatggtatgaaataatagattgaaaataagaacttacttggagagaaaagggcaaacaggatacctctggaaggagtaactcaagagtagtggagtgatacattccttgatggagcaaagattaagaacatgtacgtaacgaagttattaattttagaaatactttacgttatagtcaataataaataattaattgcaacacaaatattatgttaattttaggcaaagtcagcaaaaaacaaacaaagtttaggtatgacgaaaattcaaggtggatggggatcaaagactattgtagcacatgttgttgataaggtaagtttttatatttatttgtggttaagtattattttcttggaaaacataaatatctcacttatttctacataaatataggataatcctgaagtccaactgctgcggacatttttcgaaattccaccataaaaacaacacttggggcaatgaatatgcgcaataagcttatgtaaggttacaatgatagttatttatttctgaatatttctttcaatttattttttattcaaattgattgtttcatttatttattttttctataggagaaaatagttgaactcgctaaaaatcaaccagcgcccactcctgatcttcctcctcaggatgatttagaccccacctagtacctagtagaccttcctattatgacacaaatactgggtgagcaatctcaaattttgagaggctttggcaatctcttaagattgaaggcagttggggctaaaagtgtaatgatcgtatacttagattatgggattagtaagacagttgcactgactaattatattataacattatatgtgattagcttataatgtgggccttattttcaaaaaataggcattagagttataatttcctaattctggagtttttattaaattctaggtgtgttatatgtgatatataaggaaattgttatttttatgctttttgctcgataatgatagaaatgcgatagtttgaccattagagtcagatgagtttggcttagaatcttttagttagcggggcaagtatattttatatttggaatattatgattaggcggagttgtagtatttgaccattttactcctaagacttaagataacttaaactggatggaaggagcaaaatggaaattttgtcttaaactaggttttttcttctagtgggattagtagtaaatccaaagagtttatagctgagtaattatcttaaaaaaaaataagataatactaagcttttattcattttcatcaattaagaaaaaatcaaagtttatcctttgctctctcttccctatttgagcctaagagacaagaagaactaagagttttttcttcatttctcattgaattcattaaattttggaggggaaattgatagcaaaacttgaggtaagccctagaatcagttttccttgagtttcaaaagttttaaattggtttgagcatgtaatctatgaaattaggtttttctccaaaccctataagtttatgggttattttatgaggttatatagagtggttgatgccttttagaaaggttttgttggttgttttgaggtgttgagcaagtttgagtttaagaacttaaacttggctcaacaatggtgattttaatatttctgagttatagctgttgttgtttcttaatttatgttttttggactcaaattaggtgttttggagagtttcatgaaatttaggttagtttagagttgaaatgagatgtttggaaattctacagcagaaaatggcagaccgttttctcaaaaatagtctactgtttttgctggcaatgacctagaaaaatggtctgccattttttagggagtttctcttaagtcttatttttggtgttttctcaatatttagggttttaccatgctattatcgatagagaaacttctatttttgaatttaagttttgatagtatttagagtaacacttacctattttacataaatgtgacatagggcctccgttcaacaagcaaaatttccattcaggttgactgacacacttaaatttgaaaacgaggtaagattattataagatatatatatgtatgtatgtgtatgtatgtattatacatgctgttagaatttgaggaataagatgaatgaggttccatcccaaaa

SEQ ID NO: 301683 - DNA, 3050 bp, Cannabis indica
taaaaaagagaaaagaagagagagggggtgatgtaaaaggggggagtattttagggatattataaaatgtgtcatattccacaaatatcaaatattacgagtttagggaaaaaaattaagtatatgtaagcatgaaaaattaaatttccctttcaatatcaccttataagacacattgcaaagagaaatcggtctaaagtgatgcacccgctccgggtttcaaatctttggaataagcactatattcatagcattcacccccttttgcatattactagtggtaaaaaaaatttgagatggcctcgcaaaaatccttctccatagaatcccagtaatacttaaagaacataactgacatcccatccggtccagtagccttatggttgcccatggcaaacaaagttttctgaatctcatcaaagttggggattctaaccagatcctcctgcttctttggggacaatctattctgaattagatcagagcagcttaggtccgtcctagatcttgaattagaaaaaatatccctcaagaattcggcgaatgctttcccaatgtcgctacatctggaaatacatatgtcatttttatccaggagactctcaattgtgttgcgccttcctctaatagtagctgataaaaagaaaaacttgtagcaattatccccttcctttagccaagaaactcgagcacgttgtttccaaaaaatttctttcctgtctaaggcctcactttctgcttttcagtctcttgagccagtagggagcatttgtaagttattcaacttactttcaagctctttaatcctaacatcaatatttccatattgagtcctatgccaacgtaataaggcaaccctagtggcaccaatctttttgaaaacccgagccggggcccaaggatgcacaatagtgccccaatgggaaaccaccaatttactccaatcatcacgggtctacccttcttcaaatttaaaattcttttaaacttttccctgacacctctgaagaggaggcagaggggcctatgatctgaattgcaagtttgagacgaactcaaagtagctattggaaaaagtcggagctaactcccattgattaaccccttatccagagcaaatttaacatggtcctttctcgaccagtgattatcccaagtcaattagtcccttttgattggcaagttaatgagatcacgagaattcaccaaaccagagatgaaagggataaaaagatcttcccttttcgaacctactctttccaaagcgttaagcacaaaatttgtgtcaccaataatcaaccacggtcctccaaacctatccccctccaacataagctcagaccaaaatacttttttgcatgggaatacggcgagccatacacacaagatagaagccagggatgagttggggggtccaaaaacaccaaccccaaaatatggttacgagagcaagagagcatttcaaactcaaacccaaatttctatgcaagaataatacttcatgcattaccaatagccagcccaaaaatatgaaagtaacagtgaagtttgttcaaaaaacgtaccagtggcgaatcatcaacttttagttcggacaaaagtatgaaatcgggagcagtcaaccgaatcagggacttcaattcactaattgtagaggtatgtcccaaccctgtgttgttccaagcaacgaccctcataactcgtgtggaggaggtgcactaacctcctccacagaggttcccggacgatcagacacacgagatccagtatcttcaatcacaggtctacaacctgctttaccctctttaaacgacttcatgttgtcccaagaaaaatcgcgcaccacaccggggtgttgccgaagaactttggatggtctagtgcacacagatgtagagccttccatgagcattcttttcttaattggggtagtcatttcattttgttctgatgttggttggacactaatattccctctaatattttagaattaaaagttaaatttattagttacccaaatcaacaatagaagtgttttggaagtttcaaaaactcaaaaatattttcatagaaatccatccaaccaaaactttaaggttctcaaatatgatttattttttattttaagtgtgtcattgttttcatataaaaaaattcctaattttcacaaaaataccattatatctataaatattatgaaaatatcaaaatttgtcttggtccccaatactcacgcccaaatattgctgaaagacagttttagatttaacatttaatttctccattataaggaaaaaaaaaagtagaagaaaaatattttcttctgttaagatgagtacaaaatattatgttttatgaagggggatcttacttgcagtactagttactattgtactaccaaatttttaaagcacattgcccagcttggtttattccttgttttctaggcaaaagtagtggcaggaaactgagttgttattggtgaagatggtgcctagtgtatatagataaataaaacatgtataatttctacatgacatatatgaatatggtataaaatatgtacagataaaagtcatgttttttagtttatgttatttttgattctggacttgactcagctcaagtataggagaaaaaggttagatttcatgacatgcatgtgatgtgtgtgcctagtctatctacaacttacaattagcactaaatccttgtcacactggcttatcaaaacactttattatatatacatctgagtcgttcatgtatgaggataaaatatgtggctgaaatatttacatgaaaagaaaaacagaaaatgttagctttattagaaagcataagtcccacaccgaccacgcatgaacatttttatatttttttaaagtaaatagtgggataagtacgtaacgttttaagtttgtaaacggaataaattcaatgtttatttttagcggcatataaaacttttatttttttacagtttcatcagtacagactttgttttgaatttattaaaagaatatctagaagtaactgatactacatat

SEQ ID NO: 301684 - DNA, 2793 bp, Cannabis indica
gaaggagtcatttagttctactgcaaccaatgtaagatttctcttatgttttatttcattgttttagaaattcatatttaggatattttttttaatgaatctgatgaattttattgatgtatatcacctttgtacaaacaaaatggccttatttcaaggccagtattatatgcatttacaacttacaaattactaaaccattgtacaactttaagactaactttctttggacatatcattctatttctcaactttacagcttccttaatcctcccaaaaagttgatcaacagaaagctattttccattccatatctattcatttcgatccctccaaatatggtaaaccaggcttgctaatgcagcaaccattaccatcttttgaaacctggtgcctttgaatttttgcaaccacttgatgatccgagacaaagttgtgtcacttggtctccaatgtaaccaacttgcgatcccctgtaggcattccattgatctgtagcagcaaaagaataaatgctaaattgtttctacctgattattgcagcttagacattaggcattttcaatgatatgaaatctgtaaagcctctctcttgtctttaatctcccctggacagcaagccataagacaaaactgtgtttgggagtatttaacctaccccaaacgagcttactccactgctttctctcttgagtaggacataaaatcttataccctgcaacaatttgataaggcattcccctgaactgctgcatatctgttgaggagcaaacttggtttttcaaagccaccagctgcctccaatactagctcccttggcttggactagtatagctccaccattctttgttcttgaggtagacactatggatccattgtacccataagttctcctctttctttgcaatggcccatacatacttgatcatggctgcttaattccattccttcattcttttgaagcctaatcccccctctgtttttggtttacacacatgatcccatgctattgctccaactccttggaacatatgttttcccttccacaaaaaagctctgcaaatagcttcaatatcatagattactttcttaggcagtatcattacctgactcctatatggatggattgtgagtaatactgaatttatcagcactacccaagcaacaaaggacagatgccttgaactccaaactctgatgcaatttgtcatcttctctaccagtaaagagcactccttgcttgatatcttccttgcatatacaggcaccccaagataagtgaaagggatcttttggagagaaaatcctgaagcagccaagatcctattgacttcattcataggaacattactgcaatatattgcagatttagatgcattaggaaagagtcgagatatgtgataaaatagctttagcccttgtagcatataaatgacacttctgaaatatccattggaaaataacaatacatcatcaggaaagctgagatgaattgagcttcaaatccttgcatctctcatggaaatgaaattcaattttttttccccaattttcttcattattctagtgagatattccatccctagaacagaaaccagcagggacatggggtccccttgcctgaatcccctctgtgaggcaaagaagcaatgcatttctccattgaacatcaaggagaatttgggagtttcgatacaaatcataatcaggtcaataatcttccttgggaaattcaaagcctccaacacctcttctatgaattcccactctattgtatcataagctttctgtagatcaagcttgatcatacagttatctctttttgatttcctcccataatgtctaatcaagtcctggcatatcataatattatgtccaatataccttcccatcacaaaccctccctggttttgagcaacaatggtaggaagaatatgctttagtctagagcaaataagttttgttgctactttgtagatcacatggcagcaggcaatggctctaaaatccttgactatattgggacaattggttttgggaatccaggttatgacagtggagtttatttccttcaacaacttccctgtgttcaaaaataaaactacagcttcataaacctcattcccaacaacatcccaattgtcatgatagaagtagcttgaaaacccatctgcaccaggaactttaatgccaggtatctcaaagattgcatctttgacatcctcaatggtctaggaaagtagcagagaatcaacttgttagggagttaaagtagggcccatctgcatcaccttggcctgcacatgccttcgatcttgcattttggatcccagcaggtcattatagtatgccagaaaagcttcagttatttttgttggatcatttactcttgtgccatctgctcgttcaatggagaatatactgttttgtctcctccttcctttgatacttgcatggaaaatagcagaatttttatcccccttctatatccatgcaagcttttctttttgttggagcattgagttataatcttactacttctgtatcaaaatctgtctgacttcagctttttttttatgtagggttgcattgagagactcctgccttatattgttctgcaagttttccaattctgcttttcctctaagtgtgtctgcttgcaaattagaataaccttccttatttattactttaaacacttttttcaactccttgagctttgaaaccagctgaaatattttggtgttgggttttatgctgtaaataaaactctttacaatctgattagttatc

SEQ ID NO: 301685 - DNA, 6723 bp, Cannabis indica
ccctcccggtccgattgaacagcaccacgggatttctcagtctcaaaatactcttctcttctcttctttctttgctagttcaatcgctacaccacatcttatcaggttctctctgttcatttgcaaatgtaaatgctagtttcttgcgtgggacttgtataagtttgcagattacttttgtttgatttggattaccatgattgtgtgatgggaaatatgatgtaaacgttgaattcgttttagtagagtggatattagtttgaattgtttaatgtttaattgaatgctgcttaattatttgaacttgttccggtttgcttgtttggtttggggactccaaagatttggaatgatctgtttaagttataaaacttggccaactgcaaaagattttatacaagtggaaattgtggttgaaaaaaactcacagaagatcatcctcattagaaaggtaattcttgattgtagaaagttgtgacatttttcaacatgagtttcttgtattctgcatgattaataaacagagtaaggtttgaggacttaaaatatttttgtcatgtaaagcttcagttataatcaacgtttgaaatgtttcagagaaattttactttcattttcaagagcaacaaaatgatgaatgaagttcatgtttgttttttggtttttgtatttgagagatgatgttttagtttgatgcaactatcatgggagtacaaaactgttcttttatgctaaactggtttatcttatggttatgattaaatacaaattttcacaaccatatatggctactatagtgtcatgtgataattttttttggtcttaaatcactatataggatggtaaggcgttacaaatattagcaacagctgtgcggcttgacatggagaatttcttacagaagaaagtttatcttaaggtaccactttgtccatgttacataagcctttataagattttactcggagatatcacttatatatgccatcaaaatgattttgattaaacaggttgaagttaaagtgaaagaaaattggaggcaagatgaagggctattgaagtactatgactatggagggcaaattaaaccattatgatgatgagaagagttgatcaacagagacgacaacaacaacaaaagctacctcatcctttttgagattgtaatttgtaagttaaattggtattattattattattatgagaagagttgatgtcttgtaatactatactagctagctttagatttttttatttgttcattttcattgttggagagtttcgaagaattttgtagttttcacttctttcacatcccatttttgctaaaaccgaaacggttcttgtagttagtagagtcttgagttcctttctttcttaaactctaaggcccatcagaactctaaggctatgttggtaggaaggagggagagtaggagagatggagaggatagttgttatcttttgtgttgtttggtattaggagtaaaagtggatggatggatagtaaaataaaaaaataaaattaccattctactatttttgatacaattatattattatatattatttattgaagggtagcagaggcatttcatatatatattttttgtctttttcttggattcctccaattttggagggattaaaatttgtttacctggagggggactttctccctttatctctcctctctacctcttgccaaacaaaggaatacatctctccctctatccctctacccccctccctccctccttccttctcccttctaccaaacatagtgtaaaagaggaagacccatgacacattcacattttagcaagtgtactggattggagaccctggtccacaacataggatgctaactaactaaataattgttaatattaatatataaagaaaaattctatggcagggttaccatttttgttcctatcggtataaatgtttttatttttagtacttagagaaattataattcaaattttttatatgactgtttacattatagttacatttcacctatttttggaaaaatttaaaatgattaataataccgaaaacaatgttcagacattagttgtaggcatatatttttttaacacgtgtaattgactattttaaactttgttttcagtatcataaattatttaaaaaatttcgaaaacaggtgggatgcctgctcaaactataatgtagactgtcatataaaaacaattaagttataatttcttcaaatgctgaaaacatagttgtactactctattggtagggacaaaagtgatactcctactatagttgcatcttatataattaataatgtagttcctgtctgaattcccctcttgtctcttctatcatatctacatctacaatttttaactgttaattatttttttaagtatacataactctgttgttataattattataaatagtagatttaacatcaacaatctcttggcttgtgttagacgtatttataatacaggagttagaagcaaaggaaaggtggcaatgcttaaattcaattcaaaaattctgaatttccgttatagtgtcaatcgtcaactcaagcatatagaaatcaagtattacagtagctatatcattgatggtgtaagttctactcattctgcatttgattcgaataggcttttaaatgagctgtccaaatctggtcgagttgatgaagctcaccaactgttcaacaaaatgctcattcgagatgaatttacttggaatacaatgatagctgcttattccaattcaggaagattttctgatgcaagacaactttttgaggacaccccgatgaaaagtcccatcacttggtcatccttgttgtccgggtattgtcgcaatgaatgtgaaattgaagcttttgaactattttggcacatgcagctagagggccagatgcctagccagttcacgttgggcagtgtcctacggttgtgttcaacattgggtttacttcaaagaggtgaacagattcatggatatacaattaagacacgatttgacttgaatgcttttgttctcactggtctcgttgacatgtatgcaaagtgtaagtgcatatcagaagctgaatatcttttcaggatgtcccctagtagtaaaaatcatgtaatgtggactgctatggttactgggtactcccaaaatggcgaaagtttaaaagcaatcaagtgttttcaagaaatgcgaattgaaggggtagagtcgaaccattttacattccctggcattttgactgcatgtgctgcggttaatgcaggtttgtttggggctcaggtgcatggatgcataatcaggattggatatgggacaaatgtgtttgttcaaagtgcattggttgatatgtatgcaaaatgtggagatttaaatagtgcaaagagagcgttggagaacatggggactgatgatgtagtttcatggaactccatgataggtggatgcgtgagacaaggatacttaaaggatgctttgatcttgtttaaagaaatgcatgctagagatatgaagactgatcattttacttacccatccattctaaactcattcgctgtcttgaaggaaattgaacctgcaaagtctgtccatggtttgatcatcaagactggatttgaggcttatgtgcttgttggtaattctcttattgacatgtatgccaaacaaggaaatttggtttcagcttatcaaacatttaatcttattttagataaggatgtgatatcatggacgtctctagtgtcagggtatgcacacaatggctcttatgaaaaagcatttgaattgtttcacgagatgagagtagcaggggtttatccagaccaatttgtaattgccagtgttttaagtgcctgtgcagaactaacagttttggaatttgggcaacaaattcattctaactgtactaaatctggtcttcggccatcattatcagtagataactccttagtaacaatgtatgcaaagtgtgggtgtatagaagaagctaacaaagtttttgactctatgcgagtaagaaatgtgatcagctggacagctctaattgtaggttatgcacaaaatggtaggggaaaggactctttaaagttctacgatcagatgattgcaactggtacaaatccggacttcattacttttatcggtttgttgtttgcttgtagccatgctggtcttctggaaaatggtagaacatattttgaatcaatggataaggtttatggaatcaaaccaggccctgaacattatgcatgtatgattgacctgttggggcgatctggaaaacttaaagaggctaagcgattagtgaatcaaatgactgtggaaccagatgcaactgtttggaaggcacttcttgctgcatgtagagtacatggcaatgtggaacttggagagaaagcagcagataaccttcttaaattggaaccatttaactctgtggcttatgttctcttatctaacttgtactctgcagccggtagatgggatgacgctgcaaaaatccggagattgatgaaatcaatggggatcagtaaggaacctggttgtagttggattgagatgaacagccaagtgcataggtttatgtctgaagatagaagccatccaagaacaactgagatatattcaaagcttgatgagataatgatgttgatcaaagaagctgggtatgtgccagacatgaattttgcgcttcatgacatggatgaagagggtaaggagcttggtttaacttatcatagtgaaaagttggcaattgcttttggacttcttacggtgccaccaggggcaccagttcggatttataagaaccttcgggtttgtggagattgccatactgcaatgaaatatatatcaagcgtggttattcgacatatcatattgagagatccaaactgttttcatcatttcaaagacgggaaatgttcttgtggagactactggtagagcacttgaaggtcatccttagaccttgttcgaggggcataaattagttgaatttggtggtctagggatactttactgcccttgcaacattagcatcattattaggtttgcttatttcttaaattgcaacaaggccttttatggtttaacttttgctgatacactaaaaagttagcgagtaaatattgaagtgctctagcatggaaaacaaaaaggccttgagaacaagtctagagttattgaatgaagactttaaccggtaagtgattccttctgaactaccaacttagatcaacaaaatacacacaattttatagtggtgtgccctgttatctaataagcattctatgacaaccttctttcttttctcccttcaatatagataggacattgtatgttcaaatcctcctgttatgtatagttgaaagatagacgtatcaaataatttctcatgtggcttaattttgtggaatcttgtaattcacagcttgttgtaacattgaaaatctttacttattatatggttatttttacttggatgatagatcccggagttggtagaataggtacatgagtatagaatagatgggtactggtttagtggatgagctggtataatttttttacttgggtgggagtttgctgagtaattcatcttttttttttggttctttattctaaggcaaattccagatcttcctacttctttccattgtcttctactttcatattctatggcattgttttgaggaccctagtcgtggttataagattggagcattatttcaacttcaagaattgtttataaacatattttattggttctatttgggactttgagaatccattaacatattagatactagtttttttcttatctttgtgcaggttaaattgttaatcttaaaattgacttggtgtagtgaatattaaaaagttgaattttcttgggagatagagacagtaagggctcgtttggtaagccatattagattgtattgtattgtattgtattatattaaattgggtatagtactatattaaattttaatttatactaaaatattatatatttatatatccatacaaatcaataccacatatagtcttatataaaaatattgtataaaatataatttaatataatattatataatataatacgatgtagtacggtgtaccaaacgaacttttaaagtatacagataagattatgtgaattcaacaagtatctatcgagaaggagaagcaactatttgttaattgggtttatgaagcttaattcaaatgatgctgcagttgtaagagagcttggcttcttttggattttagttttctaaatttttttaacatggttttggatgcaaaagttccagctatcaacctactttgctctcttatcaagaaaaaaaaaaacactacccctaccctatagcttgacgagccagttgtacatgagcattgctacgaggtactaaggtgtctaacacttttatgacatagtgtcttataattggttaacaattttttataatctttattaagtaagactaaatattaaattgcatcaataatgatatttcacctcataagagttagacaccaaaaatgctttttaacatttctctatactatactatgatatcattaatgaataagcataacatcaactaagaaatatgatatattttgctattataaaagtatcataatgaagtgatagctacaggataaccaggaacggagagctttcccccc

SEQ ID NO: 301686 - DNA, 686 bp, Cannabis indica
atactccactaaactcataaatattcaaaatgataaattatttccattagtaaacaaaataaactaagtataaaaaaaataattacccttcaagaaaagcggatattacacagggtccacctcaaccatagtgatggcaggaggatgaggatactggaaaggtatagatttatttgaaatcttctattttcctctaagaagaatggtaaagggacaagtaggagcagtatgattctcatcacattttgcaagtaagcacggtaataacgtttagtgtgatctaactttccacagaagaaacaaaagtcaggaagcctctcatatttaaaatctaaccacttgacaaactctcttcccctcttaatgaatctgatattcatacctttgcgtataggcaaattaacatctaagagaatccttattctcaggtacggcctagtaccctccttgaccgtatccttatcaacctctataagatcactaatttcagaagcaatgaacctaaccaactcatatgacttacacataaaagggataccataaacttggatccaaaaggggacataatgaaggttttcaggagtaatgggaaaggaactctcaggggcagcaaagatagtaatactttgagcaaagtgccaagattggccttttaaaactctacccttatccccctcacacccaaa

SEQ ID NO: 301687 - DNA, 2605 bp, Cannabis indica
gatctctttttctcctcctcgaattcctcataggctcgggtttaccaaaggctatcttttgctcatgtgcgaggtaaatattttcccgagtttcattaagctcggtataaatagtatacactgacacatatttgtcatgcttcttttgtttctttctatccttcgacggttccctaatttcgtcctttcttttcagaccagaaaccaccgagttatcaattcttgtggaaacagtccttattgaaacattgcagggtttacctcccgagcttattttcaacaagttcatttcctttcgggcttcttcctttcgaacaaacacctgagctctctcgttgaacgcagtgatgttccttaccgggcgtccttgtagatcatcccacaactcacctccgatagttaatggatctgtggagatccccgcctgaagggctgtaagttgcgtgctgtcatccaagtttctaaccctagcggcagccgtgctaaaatgacttaagtaggccttaagtgtttcgtcaagttgctgcttaatattggttagtgaggccgcttcgggtcgcctatccctagcggcttgaaatagcttctttaaaccctggacacctgctcccaggaaattattgaatgatgaatgaacttgttgatgttttctttctacgacaacattttactgtgggcaacctacacaatatttgttatggagaaccctatttgttgcataaaaagtggcaagagtaagttgtttagcattatcaactcgtattgatttgatattggttttgtgttgagtaagtatgtattgaaagaagttttgtatggccaaaggggcatctgatttggcttttagaaggtacaaccatacgtaccttgaatggtcatcaactatggttaagaagtacctatcgccttcaacagagggaatagaatatggcctccatatgtccatgtgaacaaggtcaaatagtgtaggagatacattatgatttgactgaaatggtaactttttttgctttgcaatatgacatgttggacaattgaaagaaatgaaagcttgactatcgtgtgtgagtgcactgacagatgatagattgtattggaaattaggtacaaataagacattaatgagagttatatgtgagttaagtatgatagtaccaattttttttatgctaacgttagttccattaggtaaatggataaaaagagctatgggatttgattgtattgatgaaaaacattgaaggtgacatcaaacatggtgggtggcaccattttcaatgatccaagaaagagaattaaaaatacctaaaaaattgttcacaacaacattatcattagatgttgaagcatctgtaagaggttgtaattgctgagtcaacatagagatgagttattgacattgagctggtttgagttgtggattggaagcatcaggggtggtgctggaaacttgtgatgcttgaggatttctggtttgagtaccagtgtcttattttcttgcattggtggtgggattgtcattgggtttttgagtaccatagcttggaggaaacctaattcggaagtaacatttatccatgttatgacaatgtttttgacaattggtgcaatgtggtcgttttgtttcttgaggctgcattggctgcatgtgcagaatctgtcataggggcagaactagaaacagtaagaggaggaatcagtcgatgacccaaggttctttatctttcttggttgatcaccattgaaaaaactttgtttaatggaaggcaaggatgcaagaaataagatctggtcacgatatcatgataggaatcgtttaatcttttgaggaattgaagaacttggttatggttttggtgatccaagtgttgagcagcagcagcacaagtgcaaggaatgcgagtcctcaattgatttatctcatcccacatggcagtaagcttagtgaaataggcactaactaaatcatctccttggttaagataggtaagggtttcatttaagtcaaagatgtgtagaccattaacttgattaaattgattgtgtaacacatttcacatctcgaatgtagtgtctaaatacatgatatttctcttgatttcatgagaaaccgactgcaatatctatgacattaccatttgattacatcgaatccaagaatcaagaagaggatcattaacaggtgcttgtgggagtctacctttaagaaagggggttttgtttcttgctccaatggaaagcttgaagtctcgtttccatggttgaacatttttgttggtgaggacaggggtaactaatgctaaaccaggatggtcaactatactgaggtagtagagggatcgaacatcctcgtaggctagtctgtcgactggattgggacgatgaacaataggtggaggaacgacatttgttcgagaaggattttcaatggatgttgttgatggtggatgagccatgggagcttcaacacgggaaggatctgttgggttttatgccctaaataaaactccatttcaatgtaatccattttatacaacatcaacaaagaaacagaagtatttttcattcatttgtgtatgttttggttcaccttatcaattgcttg

SEQ ID NO: 301688 - DNA, 2170 bp, Cannabis indica
gctcaatttttaataattttttttaaatataaataacttgaagataatttctaatacgaatagatgcagaaaatataatcaattttgtcataacacctctaaatcaaattattatttagaaaatacaagtctattttgtcatttaacaaaacaaaagttcaattaataacttttacaaaactaaaatagtatttactctatttattagcaattctcaaatttaaatctaaactttatataaatataaattcgaaagaaaaataactaacataacggttttgctcaaaattggcgccaaaatcatatcatcaaaacattcaatcttaattttcaagaacaatggagagtaacaattcattactgtttggaaatgtagtgaagaacatcaacaacttcattctcccaaatccaatggcaaattccattgaatcaatcccaatcatcatcagcgacagattgttaggagacaacaacattcgcagtcttaccccggttttcacacccctaccaccggaccaaggcggccgcggttttctcaagatcgaaggacccgaatggaactccttcgtccgagatcgcggaatcagagccggtgacgttctgctcatgaaacttgttcatcaaatttccccaatcatcaacatgattatcaatgtcacagtgatccgattagatcgccgtagtaatcgaactctgattcctcctctgcctcctcctcctcaaattgatcaacagcgatcgtcatcttcatttctgtgtgtgaagaaattggacgaagcagagatcggtatcgatcgaatccagatgccgagagagatcggagaaggaataaggagtcatggagatttgatcgatttgaaagaggatcgattcgaggttgttgtgaaagatcagacggttgagaatatcgagattttgacgaagctgaaattgagatcagaatcagatgatgatggtgagatttttttgggagatgattggttgaagattgttgatgatcgtggtcttagagctggagatttgatcgtgttctgtttcgatgttgatcggagaattattactatgaatgtttatcgttctcatcaacaacatgatttctttattccatttcaacctcaagctatactcaactctgaacttgtttatgtttaattacttaattaattaaatcttcatcataattaattaagttttgattagataattagtagtacatatatgtataggattaattctttagtgaaaatttaggatttgcatgaaatgtacatattattttgggattatttcacaaaaacataaaaacaacaacaaaaaaaaaattacaaaaatgcggtttcacggaattttaaatatttttacgattttttttattttatttactaaaaataagtttttttatgttgtaatcttattaatttgttgttgattttttgttgttattttcatgttacttttatgtagtatttttgttgattttatgttgttttcgtattattttttggaaaactgtaaaaatgtaaaaaatcattatttaaatgtaaaaatgtaattaatttatagaaaatagtgccttatgaaattattcatattatttattgtgttttaatttacatcattaaatctttagaatcatataatatttcttgtgataaactaggtttcaagctttgagtttgatcttaaaggttttgtctaaacaacatgtcgtagctttgagtatgatcttaaggtttgtctaaacgactagtcgtggttagattaactagcttgtagattggcaaaatgaaaacatattattaatttgattaatttgttgcaatatatatattaccaaatcttaagaatcatatgttatttttcaatatatatatttatatatatattaaagtctttacaagcaaaataggaatataggtgttacctagctatgaatagaaaaaacgacttgtcgttagatcaactatagcttgtacatgatacaaattacaatattggcagaatattatgttactcttaattattatgtcgttttttgggattaattagtagtaatgaattaatgacctatttctaaatgttattcaaatattttttttatacaaaacagtaacacccctgaattttgaaaaatacagttcgtgtattatattaaaaattaaaattaaaa

SEQ ID NO: 301689 - DNA, 1966 bp, Cannabis indica
ctcaatcatagtgagtaagacggtggtaaccaaacccaaaggagagaaagagatctagattcagatcttgataatgctctgcgacagaaagaaatcaagggctagagatcttgaacggaaggagtcaattttgttgcaatcaatgtaaggttttcttaaacccttatgtgtttatttcattgttttagagatattcatatttaggatgttaaacaacatacttgttagtaaatctagatcttggtaaaatatttctaacaaactgtactatggtccttgcgctcctcgttagtttgcatggacgaggttgcccctgccatagcagctggctgcaccgtcgatgaagcctcgccaaaagccacaacgatcgaggaggtagccgcctctgcaatggcctccttgtgaatctccatgcccatgagggcaggctcaaacactttgccatcttgcatgatgtggcgacgtaattcttcctggcttgtcacctctgccacttcatgctccaaccgttctctttcataaggagcgtagtccgaaaagcaatccttgattgtagaccccacccgaacccatgggccatacatttgcacagtccttccaaaatcatcagtaatcattttttgttcctacaaaccctcttcatggccaatgattccgcatttatagcaaacttgtgggagattttcatattaaaaataacaccatagattcactccctccagcataggaagaaagagcccaaccaataagggtttacgtagttgcatattgaccctgaaccgaacatattattgagtggggaagctatttttccacatttgatcgatgcttgcctctgaacctatacgttccacaatcgccgtcgcattttttgtagtccaaaatcgagggggtaactcataaaccttcacccacacctgggagatactaaagtccacagaccgccactgtccatcctcaggaatgggtttaacaatcataaacccatcacacactctccacggagcattagtcacatttaactctgcctcatgtctcttggagaaacagatgatgaaggtgttagccgctacttcctcaagtttccaccccttcgccaatctccatttacgagccagaactgcacggagaagccccagaaaaatagccttcttagtaatcagccgaaccaccaccgacctttctataacatccttgcccagctcatcattatcttccagagaaatagataagttgttgatgctgctaatgatcgcttcctctccatcacctcttttcctttacttgccatgatcccaaaagggcccgaaaatacacactccccaaggcagtcacactcgaaaaatcgcactcaacagctccaatggaacagtgtatacaaatgatacagggaatagacctgaaaaccctagaccacaagagggtcaaaaacttaagaacgaagtttgtacgaaattcttactgtacagagagaaaaattcaccatattcacaaattatacattttccactattcttagtttttgtaattttcggagttacgtagttgtcacaattttcaatgtatgttaaagtatattttaataattttgcttatattaaaaataaaattaaatttaaaaggtatttatatgggtggtaaatgtaaaatgatatttttgttgagatgtatctttttactgttgagatgtatatttagtaaactgcattgtacttcattttagtgagtttgcattttctttaatgtaagcatttgatatgttccaaatgtttatagattaaataaagaggtttttacaaaaatattagattttgagtaaaaatttataattttactattacatagatttttttacaaaaatattatctttttataaaataaccgtaaacaacaaaacagaataattaaaaataacagtggaacaactaaaaaaacaacagtataacaacagtgaaaaacttaacac

SEQ ID NO: 301690 - DNA, 2347 bp, Cannabis indica
tatatcattatttttatataatactatgttaaattttaatttatactagcaaaaatattatatatttaggtgtccataaaagtcaatactatacatagtttaatataaaaatattatataaaatataatttaatataatactatacaatataatacaatacgatgtgatacgaggtaccaaagaacccaattataacactattaatggttagtaatttttcatattgctatataagagaaatgttactaagggataccattaaaggcacaaaaagtgacatattgtcacatgtgtaatttattttgtgttcgatgcatatatatattaattaaataaataataaccagttacagcgcaccacaccccgcagtgtggtgttggaggccgttgcgtaagtggcaatgctcaaaagctacagggctttaaacacttatttaattaaggtcgttgcaactatatacattctgatcaaaatttaagttaaattaagaccttaattagatctctccctttatttgcttttatttgcgggcgcacacacactgacacacatatatatttatgtatatatacagacattgtactccttctcaaagaaaaaagaaaagaaatatattgttgtcctcaacagaagaaagttcataataattaataacataggtcgcaagatgggtctgtgttcttttggagcgtttcttgctggaataattctcttttttttcacttcacattgttattcagagaaaggtacgatcataactattattttctttatcttagctcaaaaatatatattcactgcatttagttatgtaagcacaatttgaataaacaagtaacttttacatatatacctatgatcttgtcttgtgatgatcaatgtgaacacgaaatgaatatgaatatatttttaattaataaattacatgcatgcacacgcagatccctcatttttgaaagaagcaacatcaagcccagaagtagtacactacgactacataatcattggaggagggacagccagctgtccactagcagcgactctctcacaaaacgccaccgttttagtccttgagagaggcggctcaccctacggcaacccctccataaccaacctaggcaacttcttgaccaatcttttggatatctcccccaactcaccagcacaactgttcctctccgaggacggagtgttcagccaccgcgcccgcatccttggcggaggctcggctttaaacgccggcttttacagccgcggcagcgccgcttttgtggaaaaagcgggttggaataagacgttggtggaagaatcgtatgagtgggtggaaaagaaggtggcgtttgagccggtggtggggccgtggcagtcggcggtgagagatggcttatttgaagctggagtgttcccaaataatggatttacgtatgagcatttgtatgggactaagattggtggaaccattttcgatgaacaaggacatagacatactgctgcggatttgcttcaatatgctgatccatccaacattgttgtttatttgcacgcaactgtccaaaaaattctcttcagatataaaccaggtgaaatttcattaatatattatttatttattttttgcataaaataatatacaatattggaaagaatttattaataatgttgcgtcatccaacaataataattttcttaaattgtaaattattacgcataatatgacatagcaatatctatataatatgtatatattatatctttatacgtggtgctattaaccactaccacgtgcgtagttaacttaacatagcaagagaattggacataagacatatgatgttccctggctgggtcgtagtagttggaattctataatagagatataataaacaaaagccaaaaattgcgtcccaaaagtttataatatattttgatgtaaataagtttggaatctccaaaaataattactacttacagctttaagtttgaaattcttataaatctattagtcctctgtttttaatgaatctgttaattctatcttaaaatatcacatatttgatattaaattaccatataaatctctacaaaatttacttaatatatataagtcacataaaagtttattaataagttctaatttcaaaaaattatagtcataacccttaagttctgacatttttgttagtctgtaggtacctaatttaaaaactttgtttgtagttctaaaaatttccacgttaaaaatttattggtgaacaacataaaaataacataaaaattattaacgttaataattatttttttcaatttttttttataaaaaattaaacaattttatatatatatat

SEQ ID NO: 301691 - DNA, 2998 bp, Cannabis indica
cagaatacactaccaaccttctatggaactcttcctattataaggactatacttgtaagagaaaagatatcattggtacatggccatcaagcattctcaactctctgtcatgaagctttgatgcacgcacgcacaatggggtataaggccgtgtttactgatcactcactctatggtttttctgatgttggtagcatccacatgaataaggttttacagtttactttagcggatgtaactcaggcaatttgtgtatctcatacaagcaaggaaaatacagtgctacgctcgggtttgctgccagagaaggtttttgtgatacctaatgctgttgacacagctatgttcaagcctgctgcaaaaagacttagtcgtgatgaaattgttattgttgttattagtaggctggtgtacaggaaaggtgctgatctgcttgttgaagttattccagaagtctgccgattatatccctttgtgagttttttgagaacgatatcatatttcgtctgctgttgtctgactctcgatttggttttcatctttttcaatttgaaatcatatcagcatagtatactttcacttcttcactgtgcaatataataattattactgctgctgcaaaatttttcaaaacaagaaaaaaaaaaatagctgttagagttggtacaaggagatataaagattagaaaataagttctttcgtggaaaaccaaaaatgacctatctagttggtgcaaacacccctgtcttttttgcttttttctcttttttgtccattttgaaacataaaattgttaagtttgtttattgctctggttatctcattcagaaatctgtaataaggttcgtttcattgtcggaggagatggacctaaacgtgtgcggttagaagagatgagggagaaacattcccttcaagatcgtgttgaaatgttgggtgcagtcccacatgctcaagtgcgttctgtccttgtttctggccatatattcttaaacaggtacttgataatgcaaggtaggggtaccttataattcagcttaagttgtcaattcatttttttttctgctataatattttaactcatcaattacatacacgagtaaagctatttcacaccaatgggttttgcatttaatgtgctctccggaacctctatctaaacatggtttcatccctataacagttccttaacagaagccttttgcatagccatactagaggctgccagttgtggattattgactgtcagtacacgtgtaggaggtgttcccgaggtccgtataatgggcctaactatttatcatgcatgttcaatgtttgatcacaaagtaacacacttcagtaattttgagtacattttagcttaactactccatttctggctgtaggttctaccagatgacatgattgtactagctgaaccagatcctggtgatatggttcatgcaatcaagaaggcaatatctattcttcccatgattgatccccaagtgatgcacaatcgagtatggatatttgatattaaataaattgtctgtgaaagttgactacttgaacagtggttaaatgtgttttttctcattttcatgactgctgctagatgaaggggctttatgattggcatgatgttgccaaaaggacagagatcgtgtatgatcgcgcactaaaatgcacaaatcaaagtcttctagaaagactctctcggtaagcttctgaacatatcattaaacaaagatatgtgttattgattacagcaatgttttttctcagaacaatgtatttgtgcatggatagcatttagctcagcttttttgtcacccttgtctttgcctttatttgggatagaattgataaaagtagtatgctgatgggattgattttgttgtttaaagaataaagattgacccttatccctcctaaataaaacaaattaaaaccttctgacttaacttttgaatatgattgcaagatgtgaattttagtcatgtcacaaaattctttgtaatggagcaacacatgttttggtttttaggttttggtcatctgatttgggttgcttattcaacttttttccaccttaaatccaattacttttagccagataatttccttagctaattacattaattaacattagataaattagtaatattgaaggctcaagagttaatttcatattcttgtcaggtatctctcgtgtggatcatgggcaggcaagctattttgcttggtaatgatcatcgattttttgctatggcgactgttgcaattgtggcaggtttagagtttctccatgtcacttttagccttcttcattatcacatcaaaattttcttttcaataatctctttttttattctggcagcccgcagagcgtatcgaggaggtgcctgattttaccatgttccatgatgaagactgcagtagaccttgagatatagttttgtatttcatgtccacaacaaggggaaatgttaaatgttaagagccaagtttgtgtttcagattgagtactagagctaaatagttagtgacagtatatttttgttcagatttattgaagattggacttttattaaagtacaaaaattgatgagttatgaagattgcttgactggcaaacataaacatgatttttttagttatacaggttgtgttaggtcaattttatttaatgttagatttgagtttgatatttgtttgtaatacataagtctcgacatgatatgaacatgattgacgaacacaaattgctaaatgtttgcattgctgaatcttggttggtcagttggtgtatgattgaatagatcatgagtgtgtgttggtttagtaccatcctttttatctaaatacatgtttggtacactaaaatactcatttggtatccttaactcaaatatgatcaactggctagtctgtctttaactacacaagtttcataatcctaataaaaattgagaaaatttcactacatacttcttttaaattaatgcctat

SEQ ID NO: 301692 - DNA, 2463 bp, Cannabis indica
tttagttataagttgtcagtaataatttttattgtaattaaaaatacatttagtcacaataaattataattttttgtaactaatatctttagttacggattttttacccacaaaatttgaatgattttattaatgttttgtttttgaaattgtgaagatagttgactttgaagttgtgaagagagtttctcttcagtagcattttcttgagagtaatgagcatatatatttatccattttcccttgagtcatttttattttagttttgcagatcatggagtgtcttatgatttattcgaacttgtactcatgtactgtaatccaaattcatatatttatagtagtactcttgtttgtaatccaaaaattcatatgatgtggtgaaactaaaattggatttatatatgtaataatatttaagacacaagtggtatgggacttaatttattttttgaaatgtgctttattttcctgtttattatcaatttatttttcattatgtgtataaagatataggagagaagaaaaagaacaaggttcaaatctaaatctcaatatgaatatttttgttttgattgattagcattttttattttaaggttttaatctttaacctagaaaaggtgaaccagtgtctatcttattaatcttattatttaataaaattaaatagtgttatgtaatgctcacgttactatacaattttctcacttacaagttttataggtataatttggtagtataaaaagtgtaaaaatactaattattctttgtttttaatattttaagtctgttatagtatttacttcttgaaaccaacttttttattattagtttttactctaaattatatttaatacgtacaaatcttttatattatccaaaatctttaaactttaatatatactaaatcataccctatgaaattgtaaggtcgttaaaaatatttccgatctattgtccaattttagtaaaaaaatctaatttggataaaaattcaagagcataatttattacatgtcaaagtctaggagattaatttggtaaatattaaaatttggggagtatgatttagtatataaacaattacttaaataataaaattgaatgaaattagaccaaaaattttcttgcttttcctttttctcttaagataatgcataatcttaaaagaagccaaaatgttgtctgaaataagtctacccggcaaaaaagtactttgagtatctaagatagcagacgggagaaccaccttaagcctgttagccaaaactttcgacataatcttataaatcccgttgcataaagaaatagagtcctcatcatgaccccatttttaatattacatatctcatccttgtagctccgagccttaaaattgcttgtgaaatccttatcccaagaatgcaatacttccccacaataatgaatcttatcctgaatattttgataatgacaaagctcccaacaatccctaatagtttgaagacacgatggctctctcaatcatgaattttcaaacttaaacttcattttcaccaaagaagcacaatcaaccaataaatcaagaaaattgtgcagtgatctgaaatagagaaatcaaaatttaccagcttagccaaaggaaataaattcagctagctttgcgaaacaagggccctatccaacctaacctttacccaattcgaagtacctctccctcgttcctaagtaaaagagtacctactgagctccaaatcttgtaagccactgccactaatagcccgttgaaatccacaaatcaaccaatcgggatacctattgcctcctttcctataatatgagaaagggtattattcatgtcccccttgacacaccaaggcagaggcgaatcgacagagagtttacgcaacatatcccaagtaaatcgacagcgacttctatcaggttagaaactggtgagcctccaagaatccttcccctcaacatcaatttgtacatcgatgtatgacttagaaaaacccagcacctgagcttcatcctccttacgccaaaagaaagtcaaaccaccactattgccttgaacatccaccacaaactaacctttaaaactgatagataccctcaatcactccaccttatcctttctgctaagtgtctcacacaaaaaaataaactcgggcctcttttggataattaaatccttaaggaattgtatagtctatggattcccaagtccataacaatttcaactgataaaacttataatgggaggtgggactggacaccaaaactcacctttaaaatattttttggcccaacaccaacattacagcccaactcttcactccccacaccatccacgcacgtgacaacctgactgttggcgccaattgtttttgccactttttaccggcgcactattgcgccggaaaaagtattaaattttatttttaaaaaaatttaattaattatatttaatta

SEQ ID NO: 301693 - DNA, 3362 bp, Cannabis indica
agaggtgattagtgacgttttctttttaaatgagtgtgattgtagaatgtttaatatcagttcaaatattagtaggatttgttttattattattttattatatataaataatattttattattttattaaataaaaattaaaagttacccataaatttctcaaaaaccaaagaatttcagttatataagcacactttatatagaatagatatatttttttcaaagttcctctaaaaatttaataaataaccctttaaaatatttacttttacactttcgcccctcataataattttctacctccgtgatgtatctattattgaagaaccaattttcttcagtactcttgttacggacttcccggctagtttttcttgcaaaatttcttttccttttcctttattttttattaaaaaaaagttaaataaatagaagagagagaaggccatttgcaccgtgtaagacaacattataactgttaatgtatatattagcttggccttgttccaggttgctttgttcgcacccagtaatgtttatatatatccttaagtactattattttccatcaaaataaggcttaaaggtttcagctatataatctctttttggtgacagatattaaagtggaaaatgttgactgctgttcaattttctaatgcgcagtacttctatatagtactcctttaagctttatattatatgtaatataattgataatatatagctagactctgttttgcatgcgaaggagagaaagctttataaacttgaagcatacattgagtgatctcttcatttcttttctttgcggccaatcagccttgggagtattcctatagtacaccaataacaaatatataagatacaaatgaattatattgtaccatacaaaaatgtgtactatagtctcacttctcaccaaactgtgcgccttgcccatttttttttttttttttttttttttttgcttaaatgccttgcgctcgcattattaaccaaacctgatatagacataacccaacagccactaaaaagtttcatgaatgtttacattaccaatatatatatgtagtttgcttatcttggaatacttgtccgttagtccatttttacacaaaatattaaaggaatttctttctaaataattggcgtcaagtcatgacttgaacattagttggtagagcatgcctaaataaataaaaatattttaaaaaataataaaaaaaaaaagtgtgcgaaaacataggtctttaatttcctcccaacatatgttaattagttttaaagctcacactcacacaggtggaaatacttgatctcaaagcacagtagccagaaagcagggtcaaatttctaacagcttcttcatccattgagtaacttaaaagcatataccaaaagaaaatatgtgtataatcctgaaattaaagcattcgtcatactttatttataaatagctaaacttagaatgttaaaattcatcaactgatctcgaaaacttctgtttttctattgatcaaatggcaaacttttcaccaaaaactactatcttctatattacaactctacttttgattactacagttccacaatcaaaagcagctttaaacgccaattattacagccaaacatgtccacaagctgagaaaatcattctacagacagtctataacgcctccatattcgatcccaaagttccagctcgactccttaggatgttcttccacgactgtttcattagggtagctaatagtactatatttttcacttatacacaaatatttatatggtttcctttttgtattaatatggtgccttgtatgtagggatgtgacgcgtctgtattactagactcaacagcagagaaccaagcagagaaagatggacctcccaatctttctcttgcagcattttatgtcatcgatgatgctaaagctaaacttgaagttgcatgtcctcaaaccgtttcctgtgctgatgtagttgccattgctgccagagatgtagtaaccatagtacgtataatcctattttataacataacatgcatattaataacaagtgtatacatcataattcttattaataatatgtttaaatttttatagtctgggggcccttactggaatgtcctaaagggaagaaaagatggaagagtttcgaaagcttcagaaaccgtaaacttaccagctccaaccttcaacatgtctcagctagttcaaagcttttctaacagaggtttaggaattaaagatttggttgctctgtctgggggacacactctcggcttttcgcactgttcttccttcgaatcacggctacgtaactttagcgtgtcccatgatattgatcctagtttgagcgttgaattcgctcaacagctcaggcagaaatgtccaaagccaaacaatgacataaccgcaggacagtttttggactcaacttcgtccagcttcgacaacgattattacaagagattgatccaaggcaaagctgtgtttggttcggatcaagctttgggtggtgatctgaggactaagtcgattgttgaatcgtttgccagtgaccaaagtttgttctttagagagttcgcggcttccatggtcaaacttggaaatgttggggtcattgaaaacggagaagttagagtgaaatgccgtgtggccaattagagattgagtataagagaaggggactgctcttacgaaaaacaaggtttctttttgttgtgggagagactaataagagtggttttattaattaataatcggattattgtttgtttatatgattaattgatgttgatgtataagaagttcggaattgaataagaatgtgataataacatatgtttattatgaggaagagaatttgtataaactataactgataagaattaatacaaagaaaataacattgataaaataatattacaactttatagcataaatatacataaaatagagaatagtaaaaataaagagaagattacagtcagaaaataagaaaagacgcagaaggtatttctcagctcaattagagactgaggaggagagattcatttatagaagtgaaaattacatgaaatatgggatttcataacaaagttagaaaaatatggcatttttaagtttgccactcttctatggcattttttcacatttaagattttttatggtatttgatatgccatatttttataaacttattattcaatcccatattttatgtttttgtttttagcttaattagttttatttattttttaatttattttacacttacattttagggtttctttttatttaaaaaatttacaccaaatactacattttttttcaaacattacatttttaatt

SEQ ID NO: 301694 - DNA, 4493 bp, Cannabis indica
cctttttcttaatttcttaatatctcactcttgtatttgtataaataggggttcaccccattagaataaataactcagaaattctcattcactttctctttctctcttcatcttcttcttctttcctctcatctactttatattattttataacagatatatttgtttttctattatgtagttaggactgaacattttaacctgcctgaacccgaatcgatgaacccgcaaaattttcttttgaaaaagtttcaggcgggtcgggttcaatccggtatcctttagacggattcgcggattgaaattttaagggtatcgaattttgggttgaacacgagaacccgcccgccaacccggcatataaatataaatttattatatatattttgattacaatttttatatatataaatattttaaattattaattaaacaaataaaaaaccctaaatctgtaacatttcacagttagccctaaattcagactccatagtcgacgactccagacctcacctcacgaaggatcagccacaacccacgcgacggccgacgacgacccaggggagggattgattgccgaagtcctccattgaaaccatttcaaggtttgtgtctcataacttgcagaaaatggactcaatattaatatcagttttttactttcgcataaaccaaataaacaagacaacaaatgatataatttccagtactctcgtttcaccaattaaaaataaattgatggagtcgaactctaatgaataatctaataagaatttttttttgggatatggattactaatagtgaaaaggtattgtggaatagagaatcaatattagagttttgtttgctcttctgtagttcctgttgggcttactcagcttgtactcagtttttctagttgttatcttctggtttattagtctcttgttcagaatctaatagaaatggaacattaaaactggaaaatgaatgaattctcattaactccattgaagagcattacagtgcttatatatacgagaaaaacagagggaaagctagaacagagaaggttgttacaaaactacagtatcaaagctagctacagacagccatggcttcaaagctgcttccattgagaaggttatggcggctatcaaggcttccttcttctccatcatcttcgagttactactgttcatgttcccatcctctccctgtctatggaaactctctcaaaccatgttattccttcacttcgagatggttttgctctcgacctatgaatgcggatggtagttctcaaggccccgcccccattgactatcggtacggctttaatttcagattctgttactctgtttggtagctgagaaagatgaaatgaaaatttgttgatatgatgtaatttttgtggtaattatttgttaatctttagtttactaatgattaatatgaatacagttctgtgctgcaagaggatgagtttcacagactagctgattccacaatacatgatcttcaagaaaagcttgaggtactattcatgatcttgaaatctacttgctcacctttttcagtgggtctaaatggaaggttcctagtacttcttatagctacaagcattgcaaattttctagtcattttttcaattaattgtttatgatatgttatttgggctttaggttctattttgatttaagcagctagcctcaagtggtttattcgggctttgtttagtctacatatatttttttggcaatcacagtcatagctatcattgacttgtgtccttttcgggtgcctgacaggaatatggggatggtgttcaagttgagggctttgacatagactatggggtgaggataaatttcttgagaaatgagtaatgtgatctattattcttgctcttatgcaattgggttttgcatatggcagaatgatgtgttaaccttgaagcttggtgatttgggaacgtatgtgttgaacaaacaaactcctaatagacaaatttggttgtcctcaccaataaggtaatattttctagtgttgtttcttggactagaattttgctatgcttgttaacgtttgaagtgtttggttggaagtaatgataacttaggaataggaatgtgaatgagaataaaaataggaatgaaatggaatcaaatttaaaacgcataaaaaaattattaaatcttttctcgtcttgtattggaatggtctttctttccattttaaaatgatggaaaagtgattccattgtaatgtcgttctaatactttataatgcagctaaataaaagaatggaataaaaattattttctttccattctattccattttattacttccaaccaaatggcagtttaaatcttattgtccaatattaatttttataatttggtttctggtccaattgcatattatttttctggaaatccatatgtactctttttgtgcattaaggttcaaggatggaaataattcgaatagtgttaagcctcatggatcaggagaatgaaagtgaagctgcaaagcttacataaccttcttttcccaattagaggatgatctgtcttactgatgcacttcaaatgtctaggaaaagtgtcatttggagaaacttatatggatgaactatgatgctgtttcagcaccatgagaggaagactcctttttattattattttttaatttttatatttgtagaaacacttagccttccttgttggggttggaaatccagacccttgctcatactcacttacccaaccactagagtctagagccaatgggcatgatgtaaatacaatgtacacatttcccactcacatcccaaaatttgtttagattataatgttattgcctgttgaggcatttggatggtaaaatggatcctactcacaatagttgttttaatttatggaattcagtctggtccaatctttgattttcttttccttacatgcagtggtccttccagattcgactgggatcatgatgctcatgcttgggtttataggcggaacaaagcaaatttagtggatgttttggagcgtgagctggaacaactgtgtggcaaaaccataagcctttcttaaccagttagcaggcaggctagcagccgtggcattacaacagcatcttcctggaaaatatatttattccaaaatttactttgcttcaaaacactgtcgtgaacaggattcttcagagcatggatgcagctggtgttcgtttctccgttgcaccattttacttggaatacctatacctttaattttttagatttgcagtttccttggtatggctcgatatgtggaaattttttgttatttggtgaataataatagtggatccaagattcacgagtaatagaactgaaagtaaatagtttagcaattttatattgagttaattttgtggattgcttgcgataatgtattttaaggatttgaggcttaaatgtaaattctagttcatagcaaaaattttcgattttaatcaccaacgtctgcatgaccattttagaccaatatttaagagactattcttgtattttggtattgctttttatgcaaaaagaagatttgttcacataaaaaagaaaaacatttgcacttgtattccaagagacttaagaagctagcgtcactactcttcttgtagtcaaataacagatttgaatggtcgaatgctataagtttggtgaatccatagtcgtagtccctaaccagaactagactccattttggtatagctgaggagaatttcacaagactcaatccctcgccaccagcaaccacatgtattgtctcattcaagctacccttataataattcttctgttgcaggtacatatcatagcatagattagtgaaatttatctagtaagagattgaggaagtcaataatatgatgtaaatgttgtgagatgttgtttttgttacctggtatattggacatgttctttcatagttgtgcacatgaccatagatggcaatatcaactttatacttttgcctttgaagactgtccctgcacataagcaatttcctatattattacatgcaatgaaagctccctttggatacaatagtaggactgggacaaggaataaaccttatctcatgtttggtatgtagatagagcattgttattggatagtaatgatatttgatactttttagaggtgatgtcttatgattattaatgatatttcttaaaaattattatattaaatcatatgagatctgatatttagttgcacaattagtaacactactacaataataggcttgaaagacaattatttttgctgaaaaaaaagacgctaaatggtttaacaccttatagcgcttgttatttgaaaataaatgacgctatatgggttatttttaaaaattaaaaatagaaacaacataatttcaaaataaaaacaaagtaatctcaaaatggaaataacttttataaaatagaaacaacatataacgtcaacatgttttaaaaa

SEQ ID NO: 301695 - DNA, 1735 bp, Cannabis indica
agaacaaaaaatagtttttgaagtttttaaaacacaagtcacgtttggttagtgatttttaaaaacaatatggaccaaaagtgaattggtttttaaaacagaaaaaaacattttgttgttttcaaaattcttgttttttgtaactttgttttctgaaaactgtttttaaaaagcaatgccaaacaaaaagctgattttttgtaccaaaatttttgctctctcgtgtgagaagagcctttccattaggaatgcctaacacgcctgacataaccatggacgatctccttgatcgtgcgagcaatctgagaatgaaagatgatgaaggatgggaagtcaatgaagaccgggaatcagaggtgggaaactcgtgtctgatggggagattttgcactaccaagaacttgaacagagcccttattcgaaccatcttggggagagtttggggtctagcagaagtggattggggagttaaaatcaaaaaggttacaacggaggcttcattcttgatcttttcattcaagaacgacaatgatctgaaaagaatagagagcaaatctccttggctattgaacaatgggatcttgattctacagagactctccaagataccgtcgaaatgggaagaggagatgacacggttccctctctctgggagaattttgaacctccctatgaagtcaattaccaggaacaacatgttgcgattagcaaagatggcgggagaggtgattgctattcagaaggaagaggtggccaaaatagcgttgaatgggaatttttggttcaaagtgtggatttcaattgatgagcccatttgcccggggttcctatttcctagttctgagggcaagatatggctaccattcagatatgagcgactcccattcatgtgcttcaattgtggacgagtggggcatgatttcaaggcctgtggtgaacatcctgcgaaggtaattactggtgagggtcagagttcggtggcttatggcccttggttgaaattcgaagacactcctgtacgaagtggtgacagaaagccacaactcaagaagaatgaagcccaatcagaaaatcaaaggttcatgggagaaacggtacctgtgcaagggatcgatcttgtgcctactatcaccaacgaattctcagaaaatgcaggtaacgaactctaaccctctgttgtcttacgattttgtgaacctaacaaacaggattaatgagcaaagcacggaaggcaatggtgggggagaaggtggctctggttcaaagagaagggctgattgcggggtcttcttgaacatggaagagactatgaatccgagtttgggtaaaagagttcatcgagaagacggtggaacccaacaggggttgaatttgaatttgagctttactgaaatggggggagaatggattgaggtgcctatctccatagatacagaggatggaatggggattttggggtctaaaagtgataaaagaaggataactgtggcaagaaaaaacaggaagaggattaacaattcaaaatctccatctttgatcactacgccagacacgggaacagtcaaggagatgattaggaaaaggaaggaaccaggggacatttctagtttttctgatttgatctctggaatgaacttggaagtggcgaacacagcgtgcctgggtcgccgagagccatgaacatcttattttggaatgttcaagggcttgggaacccctggacattgaagaccct

SEQ ID NO: 301696 - DNA, 2396 bp, Cannabis indica
tatataatattgtatatatataataatatcagttcaatatctaaatatcagtttaaatgggtatttgttttattttattttattatttactatatataataatatttattatttattaaatataaataaaaagtcacactcatgaatttctcataaatcaagaattcagttatataggacccactttatataaatagatatatatatatatatatatatatatatatagtgatgataaattttctctgagatcgaaaacatgataacataaagtggtatatatgtgtcgtatcatcacatgaagtatatatgttgtcatttaattatataaagtaatcaatttgatcaacccacatggttcatggttcatggcccccacgcaatatcagcctcaataaatagatataagactaccttcaatgtatgtatataatgtgttaaatttggcacaaaaaaaattactataaatactatatttaacgtactttttgtaagagaaatgttaaaaggtatcagtggtgcctagcaccttcctacgtatcaatatcgctattggtctaactaagtatcgggtcccatataatttaatataataacttttaaagagtatcgatagccaatcgtaacgcaacatgtcgagaaggtactagacactactgatgcctaatagcaatgctttttttataagagaaatgctaaagggcattagtggtgcctagcaccttcctatgtgtcaatatcgctattggtccaactaagtatcgagtcacatataatttaatataatagtttttaaagagtatcgctagccaatcacaacgcgacatgtcgagaaggtgctagacacaactaatatctagtagcaatgctctttttgtaagagaaatgctttaatgcacaaaacaaatgctaaagagcacttattagatggtgtctttattcccatttttcaatctcataactacacaagtgcaagtatttacaatttaaatgtgtatgtaatattactcttatattaatacatgggagtgtcaaccatgtttattatttgtgatacttttacagcaaaagacaaaataataaatttcattttgactatatataaaaaaatcgatacataatttaaatgtatatcataaccattattcttataagaataattaaactttttatcctttgaacaatgattttttgtagattttgccccttgatcttttatctcttgtaaaagttttctttgaactatgtaaattgttgtaaatatttctctctaattatattttacttatttttttttaaataatttatttatgtagctatgagttccgagaagtatgagggcttgtttaataacttaatattaattacctacaatttactttattaactttaaacatgcaaacagtagctaactcaaagaatatacatttatcgttatttatataattattttttgtctagactcttgaattagagtagattaacgttattttatatatcaataaattattttaataaatgaccagaatacaactgcagaaagaaaaaaaatatttgtaatgatttttatagttcaattagattttttgcaacaaaaaaaaaaaattcaaggagcaaaaaactgtacaatagttatagttcaagaagataaatcctatttattatttttataatttacattatggttatcaattggtatttgtcatattattttaggtatgtttttgtcaaatttgaaaaatgttcactcattgatgttaatagattcccacataatctaataaaggaaaagtcacattgattaatcttttgggaacttttctgaaataattatgcaatataaccctcctcaaactttggctgtgggaattaatatttaatttatgtgagtggaaatcaataatatgttctcttacttgtctctatataaatatatatacaaatattttagagatatatataccaaagcaacccaacctataggtataaatttttctttaagcttttatgcaaatatataagggcaatgacttttcaagtgctttaaactcgagaatttgataaccactatctttctcttttctttttctctttaataaagattataggtctttctcttttgcataattattcttagagaaagaaaagaagtttgatagaaaaaaacaataacatcatatcttgtttggttcataaaagaaataaagttttttgctattgttttataaagtgaaaaagaaaaaagagaggtacgtaatataatatatacaaaccctagatagctatacttcgctttttatatggctaattttcccattttataaattattaattataagatcattatcatagagagtcactagtgatgagtttatatccatatatatttatatata

SEQ ID NO: 301697 - DNA, 2294 bp, Cannabis indica
taaaaatttgagtatttataaataaatattcaaattctaataatgttaataattttattatatgattattacctataaaattttgttcaaaagttatataaatataattaaattttaaaatatacatataatttaataactgtaaaaatatatataaaaagtaaggtaggaatttaagcctgtgtatgaaaacagattggcctgtttaagaaatacgagccagcaagagcaaaacacgatatgaattcgagcacgataaaaaaataccgggcctaccttttaaaaatattggcacacacggcacgatccatacttttccgtggcacgacacatcacgacccattttttaaaaagcatggataaatacgggtcagaccagcacgacatgcacgaacttataacactagttttaacgacacgtgaagaaaaaaaaatcttttgattttggttttaacaaattcatgtgaaatcctttcctctttttttttaatcaataaaagggaatcaagtggtgcacatcctatctctcctttgtcttaacagcagttctagagaccatcgactagtcaattgagacttatacactgtctctaagatggttgccagccgaggtcctcccacgcaaggataccatagcttacccaatagggcacacacacatgttactctttggaattcttgaggagcgtcacttagtataagtgctaccatgaggattcaaactccaaaagacaactaaatgagggacttagcgtaaaatcatccaaccaactacacaaaacactcagtgttttttttttctcattttttatattgtggtatttatacacttatattataagtagttttttactatttggtatatggtatcctaaatatagcattgatttttcggtccatttttttaattttctttgcattgatatgttgttagattgtatactttgtagtacttatttacatattttttttttaatgattctttgtctattaattagtatttaaaacatagtagtaatttttctgataaaaaaaagcataatattaatttttagtccattatatatattttatatttttcaaagtttaaatatgttttggtgttttaagttttctaatgtattttttttcctttctgcaaattaggattgtatttaaagcataacattgattttggtttacattctaccatcttattattttttaatattttattaaaataagtatccattctattaagtattttcgtatttttttagtattgttattctactaagtatctattctatattttttttcctactaattagtatctcaaaattgaaccaaaaaaaaaaaaaagagtaccataaacgccatcaactacacataccaaatggaaagcttcggattgtggagtgatcctggataagcttaataagaatctcaattactgagctagcaggaacttatcgtttgcaggccgaactcaattgattcactcaattttgttggggataaagaacttttggatgactatatttataattccctacaagaaaactgctaccatcgataagagttgtcgagacttcctttggggaactaaagggaacaagatcaagctgcatcttgcaacctggaaaaaagtttgtcttcccaaaaagctcggtggagttgggtttcgtgaaggtaaaaagtggaacaagactttaattgttaagtttctttgggctataactagcaaacaagattgcctatgggtcaaatggatcaactcgatctatttgaaagtccatgacatatggaatttccctataaaacaagatactagctggtattttaagaagattttgaatcttaggaagagtacggatgaagccagcttaagtcaggctgttaaaattgaaaaattcatagcaaaaaggttttataaccaactggtagaggagcaggcagtaatgtatgcaggttatgtttgggataaacttgttgtcccaaagcatagaattctttattgacagattgctaactcgggattctttgagcagatttatgcctatacaaaatgtcaactacccggtttgtgacgctgagaaagaatctcatgaccatgtgttatttacttgtgtttactctcagcgggtttttaaagacataagtaattggcttggaagaattcattggcccaattctgttgccgatatgctcacaagattcagggcaatgcctcatgactttcaaaatcgagttgtgaatgcgatgttagaaaattaataatatacccaagatctatttgtatataacatagaaca

SEQ ID NO: 301698 - DNA, 4352 bp, Cannabis indica
tttaaaattattttttaataattaatattacgtagactactaaaaatttgtcatatatattgtggcatatgtctatcgtggtacttaacatagttttttgaatataatggataaataacttacaaaaagggagtttgagtaattttgctaccaaaattttgatttttgtagttaagtgtttaaaaatataaaattcgggtgaatttgccaccaatatcacgttaattttttgttctttttgaaaaaatatttggacattgctactgtaagaaaagaacataatttgtttttacaattatacagtgttgtttttctattatttcacaataatattgtttagacattgttgctacaagaatgcaacatgaaaacaatgtttttctctagaaaaaataaaagtgaaaatctgtaaaagaaaaatcggtgaaaaaagaaatctaattttaggtgtagtgtgtaaattgcccttttttgtctaaggattgtgtaaattgcccttgttccaatcttctgatagttctgatttttgaccatgcatgtgaataaataatataaacaaaaacatagcttctcaattgattttacttttatctttgataagaaaaatagaatcaccatcataaaatcctttgctgaagagtaaagattaacaagaaaaacacaatttggtcgataacatgattaagtgaagattaaaaataagttataaacttctaatcaaggcgacggagaaggtattcaacttgaacaaatttagtgagaggcattatccattcatcgtaaagacgagaaaccaacaatggatcaatcttacattttcctttgctttcagtgctgttggtagtgtcaaggcttacttcctgcccaaatatcattgccttcttctcaactctcttcttcaccatctcttctacagcttcaaatgtcaacaacttcatcagagcatccctatcctgaagtttttgagaataaaatcatacatacatcacataacaaaatacaaccaaataataatcaataccatttattgttctcatatgaccaatgtccaaatatgatgcattgaattgaattatatttgtctagttgatctatagattcaaatcaaaaagaaaaaacagggttgaagaattttgaatcacagttaacataacatgaatttcagcacatagataccataaaaaaatcagtctttaagccacttaaactatctcagtggtgaggtaaggccgggggttcaaaccttcaaggaaccctctttgttatttacgctatgtttggtaagaaggacagaaagcaagagtttttctctcaagttttctttcctcccattttttcaccataccaaatataggattaaaaaaaaaaaccatacatacctgagcacgaattgctggttcatattcatgtggggcatccctgaatttcacctcagccacaaaatttccataatgaatccttctagagatggcctacagtcagtaaataataaccatttttcttcaataagtagaacattgaatacttaagacatagctatcaaaaagaaaaagaaaaaaaaaagcattatttacctgtaagcaattgaggtcactagaggcagttgatgcatagtttccatcatcacccggtacagtaaacaaaggaagcaattgcttgaaatatatatcccaaattttgctgtttacattgattgaagcagcagcaggatgcaacacctacaagtcaaagttttcaatataaccccaaaaaatatatgttgatatagactacagtaatcatgttattaaaggttggataaatttaccggtggaaaggtatgcggtggcgccaatgaaggcggtaaatgatcaggaaagaaggcatgttcttcaggattttgatacctaccagcctgtaaattaccatgtcaaaaattgtgtcttaactaacatacacgatgtatgttgtagtgtattgaattgaattcattagttaattagaaaactaaaagcgtgtcattctagaaagagtacttattaagaaaagaaaaaaaaaagtgcagtggggttggaataaccaatattcaatttcaacaaaggaagcttaatgtgactttttgtgagcctttaaagttaagtaagtggggaacaacacatggtggaggtggacaattagctatccataataatcatataaaattagtaaactaacaacatggaaaattaatgcaatttcattcaaacataaaaaagacaaatacacatgctttaagagaaaaaaatataattatactataagctctaaccttttgacaaatgcaaagggtcaacttaatataccaagcataaaaaaaaagtgatatattattatggtctattccttttaaaattaattggcttataagaacagtaactcatgcgtatgatattatatttttttacattttaataagactctaatcattatattttaatattgaggtagtgtcttacaaataattagcgatactttataatagttattaaattaaattgtgtaaaatacaatacttaattatactaataacaatataataattaatgtatttagaccatcttcaataaatagtgtatattttaaattaaatttggctaaaatatactataaaattatatttagcttaatttttgtataaaattatatttagcttaatttttgtatttatgctctaatgtaaattaactataaaagtcagtattatcattaatactcattgaaaatatataaaacaattaattttatttatattgttttaataacttataaatatagaattttttttttataaattatattaatgagtggtacatagataattgagaaaatggtatttattgttggttaaaatttaacataatttttaatttgagccaaatttaatacatattttacattattattagaattaacttttaataaaatattctaaaatggagatgctcttaagcatttctttaataaataatatgaaatgcaatgtaggtgtggtgttgggcaactttaagacgtcaattaaaaatgctcaaccaataaagcagaaacacttaaggctacctcaagtggtcattggaggagggtgagtgtgtattggaggttctgggttcgagtctggttataatatataaatgcttaaatcaaaaagcaaaaaaaaccaataaaagaaaaaaaaaaaaagaaaaaaaaaaagaaaaagaaacaaaactcaaattcaaattcaaattcaaacaaactattatatgtttacccaaaagagaaataataaataatataaaattgagttgaaattaccttagcctggagagattcggtttcactgacaaagaaacgaatcaaagaaccacaaaatccaacgcagggtttggattgttggtaagttggtgaattcatcggaaacttcgctctttcaatcaaactaaatacgattgtatcttcttgtctaatcaacgattctctcaccgcatcaaggctcatttcctcattattattattattattacccaaatcacaaccatttctgtccattttctccatacccaaacaccttcttctaccatttaaaacaataataaacacaacaacaacaaaaattagtgaactgaaactcctcatcgttgaagaaaaaccccaacaagtcttggagaaaatgaaaataagaattcacagttaaattaacaaacaatggagaaaagtcaaaacatgtacacccatgagtttgactatttaatttagctaatataataaataaagaagaagaagaagaagttgacttttcaaacaaagaaataaaggaaagtcaaaagaaaaatgaacctgtaaaaacgtcgtcgtttaaaaggaaagaagaggatgatgaagaagcagaggagccgaattgagtgatattgtttgttgttctcttcttctttggtttttataggaaaatttttgtggcttttatggaaagacaacacaaggagcacgtgaggccccacacgctctcttctattattattatttgttttttctttaccaatttgagaaatgctaaaaaataccagtaaatttatttttttacgtgttaatattattattggttcaacttaatatcgagcgtcttataatttaatgtaataatttttatagagtattgcgtaatgacacgtctaaaaaaaatattaaagactactgatactcaataataatactgtacggctaattggaccccaatttttttggtttttattcctatattctattgcttacttattaaggcttgcagttgcagggtcatttaacttaattagatagaatagaaaatgggagatttttatttgatttttgatttttttttt

SEQ ID NO: 301699 - DNA, 1426 bp, Cannabis indica
gatagttgcccaggaagcatggaatctgagttgaaggtgtgtgtatgtggtatttgtgtaatttttttttatttaggctgtatatttgtttatttagccagttgaaagtatttttgtaatattgttactttttttggttaaaattggaaaaagccctaaatttttttgagttgctcttttcttgtctttgaatctgataatttactgaagatagatcaggtttcaaatggagaaaactgatatgctaattactcgttactataaaaggaaacttacatctattactcgcgattctacaggtgtacaataggaaaatttagattgtttaaacttttatttagggaaggtttttttgttttgttttggatggtctaatccgtctatgaattgtctaatatgagtatcatatttataaatactcatattagcacctagggtttcttatctctttcttcactttgtattttcattcatatattttatagaaaaagggtcttaatttgttttgtggaggagagtgtgttcgactctacctctgcttttatgtcttttgtaagtgttttgagtcctcaaacaagtcaacaaagaagaagaacaaaagtgcaagccttagggagaaagttcttcaagcctttgggagaaagtggttcaagtcttcaggaggaagatagcacgcttcaagcagatcgaagggagtttgagttcttgaagattcatataggttcatttgtgaaggtggaatacaacaaacttgtggcatataataaaagggagtttattttttgcgtaaataaaaaattttgtataatttttgagatttttttttggatgaatcaggtttgtgtatttcattaacatgaccatgtacaattatgttgcaccttttcaattaacacttacttttgtattctattacaaacactcaaactaaggtaaatctatactagtaactttcttaggcataatagttctaattcttgttttatcatcaacatgtatttgctttacaattagtggaattctttgaactctttaattctaataggtttcattttgacacctccaaatatggtacaccaatgctgctatcgctattgcatatacttgacactctagctcttttaatcaccttcaaaattgatataaggctaaaatatcgaagtttgccaccccaaccacctttggatctcttgcactcaaacaacaaatgttttatttatagttcccacacaaaatgcatagttcatcttgacatatatgttatacttgaacaaccggcctgattttcaattgtaattcagtgcagcaatccaaagtataaatctatgtttagggattgaaagtttatattccatacctctccatgccaatggacctttgggcaagaagattatgttggattaaaattctcaatatgggctcatat

SEQ ID NO: 301700 - DNA, 2199 bp, Cannabis indica
gatttttaaagtcttttaatttttccactatcgatatacatacaaaaaatttattaccatatacaaatcatgctacttgtgattatatagagtaatagtatcaacattaatgcaaggcctacataaactcttgttattaattaataattaatttatattagctaggtagtgtgatagggttggtgaagtgaagtgtactggtgtaatatatatacatgaccgtgatatttaccacaaataataaaggaacaagaataagtttctaactgcattatttatatctacttattaatatatattaattaattaaataaaagtctgaattatctattctccatttattaattcttaattatgtaagatcacattttttaaatttaattaggtttattacattaaaaatgtaacgatataacctactataggttaaattttagtcacaattcaagtagggtacattaaaataaaaacctttcacttattggttaatgttagaactttcagcattgagaccatctctaactattacactatttttggtgtatattttacactaatttaacgcagaatctagtatttttagttgtaaaaacaaattttaattattaacaacaaatatcacactaaataaaaaaaaaattgtttaaaaaatctcatgcatatattatattatattcacattaataacccatgataattaatttatgttataatcataaatattgcctcaatatataattaagattatttgtaaaacaaattaaataaagaaactgtgaaaaattgatgcacacaatttaatgggtaatttagtgtattcttaaaatgaaactgtgaaaaattcagggaatatgcaccttgggatttctatggtaattgtacccagtaagtatcacaaagtgacctatacacacttcttaattacttgtaaataaaactaacttcgctatatatatatcgtgatcttattatatacttactaattgaaaaaattttcttgaccaaaaattttctgaggaaacaaacaaaaggaagaaaaagagtgtaaagtacccacctgtgcaatgcagccgccgagacccatgccttcaaaaatctgatgaaacgcaagtgcagcgaccaaaggtctaatggtgcactgattctgagacattcccatcgtcaccccaataatcacagagtgaaatataatcccaatctccaaaacttgagacaccaatctctgcttcatcctcaccaaattctcctcctcctcctccgtcgtcgccgcacccgattccactctctccgccacacctaactcacccaattccatcctagactctgcccttttcttcgtcgtctcctccttcgtgcccaccggtttgtactcagccgcctcacctccgccgtggaccccggcgtgtgcggtggcagtcacgtcaacgaggagagcgacgagtgcgccgatcaaggtcacgagaccggcgaaagggaagtctcgccaggggtggagtgaggccacgtggcaatcggatagagcggcgaaggcgtcgggaagcacgtggactaaggatgtagagagaatgactcctgccgcgaagcacttgattaatagcgtggccttatcgtaagccggtttgccttgaaaaaacctggccaatagaaccggagagagtatgccgattacgcttgtgaagaagatgacgaagatcgacgtcaccttgagccgcgccgccgccgcgccgtcacgacaagccaacgtcctagccgccgtatctaaggcgcacgccgccgttgccatggtttttttggagagagagaaagaagagataggattgtatatatgtaaaagtaaaataataagactttaataagtaacttgtaataaggtgcgtctgttttttggtggtttgtttgtgaattgtggattgtgagttgtaagtgagtgaagagaagagagtaataataataataataataataataatctgaaattgaagtcaggatcaagttttaaactgaggggacgtggtcgtggtgtgggtcccaattttatttatggatctgcctaatgacaccattcctataattcttccacttgtctatcctgtctctttatattaatttttcttttttttttttttttactttagtaaataatttaattatagaaatattataattgagaatatgattatagtgaaatgtgtaaattgt

SEQ ID NO: 301701 - DNA, 2923 bp, Cannabis indica
actaaatttttattattttactttatcttaaatatgctaagcactaaatttttattattttacttacttgttttgatatgaataagagtaacaatgaattactcgaagttgtgcataatgagattgtatgatagaagcatttgtatctactataacatcaaaatgtgccatttctatttttagcttgcgtcaaacataatattacatcctaacacgatatagaacatgatcatccaagatttagaagctcaagcataagaaaaatgaacacttgttaattacctcttgaattccactctttttcagatcatctccattaacaagtgactgtaacagcaaaaataacacgttaaaacccaagcacgcatataaatacatcagaagaaaagctaaaatttctttgtatattgcgttcacactcctaatattaatgtcttctttaccttgacatctagtcgcaagtgaaatgatggagcttcttcccattgttgagacattttttgtatgtcatctagagtaaaaccatgcacatttctagctgcgcagccctgaaataaataatatcaatattactcttcagttgtggtaactttcattagctggttatattcaatgtcattgtactaaaatttagaagacatctgatttcaaaaattaaaagacatctcagacacttgaaaagctaatcctatattactccagcacaccttttacatattcatccccaccaccacccccgttcccccgacaaaaaaaaaagagccacaagtctttcatcattcaccagagcgcaaataacattgaaagaaaaaatccagcactattcatacttagtcatagagaataaactcaccgcaggatccttatatgaagcttctaatacatatacttcataacccgtactctgataaaaagcaagtcacaccaatcagcaaagcaactaaaagatagtaaaaccagatttaactagtctgatgaataaccatcattaaaagaaaagacacgtgtatccgcattaaaaaagaactgaacaatatacaattgtattaaagtaaagaaaacatttatcgaaatgcagattgtatctgcaatattaatttcccccgaagacagaaatctctgcatctccaacttcctccaccaatctcatgattaaaccaaacacctaccccagcaagatataaaaatctactttgtatatgagaatacttgaatgaaatagatctaaagagcaacagatagtaaactaagtattacaaagttaagatattgaaatgcagcaagtaagatatgtgtttgattagcgaaaggaaacacctataagcaatcagatttaaaaaactaataataatagtcttgtagaaatggtgaagcagagtaacaaataccacaatgtaaccagtgattatatacaatgtcttcactcattacttagcaataaaaacaatccatatcattctccataaaaaatcaaaatgattacaaagagaagctttaagtatgcaatgcaagaaaaacaaaattaaacaacattaagaaatatccagctcagtcatcaagttactcaatagctaccaaaaaaacagctaaataaggaagactttcatactgaaaaacataaaattaataagcaactctctcaaattttgacagcaattataatacaagacagctcatgagccatggcagctaattgaattataacctagcaccacattcagtctcataaccgattgaacttaaaccacactgtacattttgcctttgaagactgctctcataagggtttcttacagcatccatcagaaactctaaaaaaatgtttttaagctttgacaagcacaatcatattcatataacatatcgcatgtgagaagacatggtggctacattttacacaaaaaaagaaatgtgcatttcaaagagatttaagttggcactccagaacgcatggcagttgttggggagaaggaagaattgaatttatacctttgcagttgcccaaaactgagcaaaatcagctacccgcagattgcggtcatccactaagaagacgaagcacaaataccaggaagaaaaggatcaattgccgaacaaaactgcatctgtggttagataaaagtgcttgggcactgccctacttaatttataatcaaactagatcatttttctaactgagccctggcaagccaacatagccacaataacctttatttaccggatcttcttttattttaattagaaaagaaattgtttacatggacaactgattactttagtttcttagcctaagcaataacagaggtagatttaggattcaagtatgcaaccatctttccaaggacataaatatctccaagttagagccaccgccagcaaaacaatgagatattggacatcagaagtcacacactctctcaacatcattagaccaatcaaatcagcaaatcaaataccaaaaataaaaacaaacaaattgcaggtagtcccatcagggaaatttttcagcaatttacaaatggctacagtgaaaaaagaggtgagaaaaaaaaaagttcaaagagaacattttcatttttgaaatgataattaaaatatctaaatattcgtaccaataatgaaggtgaaatctccctcctccagagttttcttaaatgctttcagcatgctagaccgataagcctgcgaggaagacaaaatagtactgacttgacaaaaataaaatataaaatgaagtgtaacaaaaaaaatccacacctggttatccttcaaaatctcaaatcaaaaacgtaaaatcttacagacaaacagaacttaggagacgtttggttgggaggaatgaaaatataggaatacgaatggaataaaatttaaaatgcataaaaaattgataaaaaatagttaaatttttttcttgttacat

SEQ ID NO: 301702 - DNA, 2022 bp, Cannabis indica
agttcgacagtgatttttctgctgcgtcgactgatagtgattttcctcatttctagcatatttcacaattatgtcatagttaaatatactttagtagaattaatccaagtactctaaaaagttctgcctatacattcatcttttccttttttatgtccttctctaactacttatatcaaccttagccactgtattttttaatctcttttctatgttttatgtgaaagttaatagttctttcttcatttttttctcctagtgaaaaggaataaaagggtgtaattcaattttttgttttattatttaataagttataactaagattgaagagttcactcaaacacaaccataacattagttagataatcaaatatatagaaataaacaaaatggttggaaaaaaatcaatctcttttccatgttttatgtgaaggtctgaatttcgggtgcgagtccaagatcgaggtcgggatacgagtccgggtatgtgaacaaaaaagtaaaaaaataatatgttagacaaaaaaaaattatttttgaaaatagaaaataacattttgatgtatttttgttttctagtttcaattcagtttttttaaaaaaaaataaaaaataaaaatttgaccaacaaccctcattagtaattttctatttttaaaaactaaaaactatttttaagttatagagccacataacccctaacattctgttttcttagtccatctttgttctctccatctctcctacctttttaattcacaatgtaggggatttagagttgtaaaatcctccaagttgaaatttaaggaaatagtttaggaagtaagaaaataaactttcaaaacaatgatatttagcacaaatttttcagtaaagtaattgttttttcacttagtacaatactgaaaacagcttcttcctctttttttcattttaggtatccgtgaagatgaagttggtgaacccctgcatatgtgattgtacgtagagataaacgttacttatttatatgtgtttctttttctttcatcaaacaaagtgtatcacgttataatatacaccaggccctcaagttgtatggagaagaaatatgaccctcttgatttgttctcgtgggtaaatgacagaatacataaatatatcaaagatctaatctttcttctcagaacaattgtattcgtgtatttttagatggttctctaatatttgagaccttgattataggggatcatggtcttcataatcatacagggagttttatacaacttattgatgagacaatttctatacatccggagtaatgggtataggcttatagaactttaaaagcttgataatcttgacatagagggggcaattagttctatttctttctttagatgaaagtttgaagatatttagtaaagaactttttgatagctaggcacaacagcaaagacctgcagtttgatgatgagttttttaatatatgacagtgtgtacttgcaatcatgtcaaacttctgaatattataaggtagaatctctttttgtcgattttattcgtattgtaatctgttttaatattatagcttttaagtcatgtataatgtgaattatgaaatagttagatattactgttagggcctaggggtagtggtttcactcgaaaactaagaacacaaagaccagtgaaaatctaacaacaaatcaacaccaaggcttgcacaagttgagaaactgtctataaaatattttatttccaaaccactatagagttgctttgaggtttctataaataaaacaaggctaggaaattcttcaagtcaagcaattttgatgaatttcgtggagaaatttgggattcttgaaaagctagggaaagagagagagagagagacatcaggtctcaaaatccttaaaagccatttaaataggtatcattgttagcagggccggccctgaaacaaagtgggccatagggagaaaattttttttttggcccttatgttagaaaaaatgtataattttaaaagaaaaaaaa

SEQ ID NO: 301703 - DNA, 3268 bp, Cannabis indica
tgttctatgttatatacaaatagatcttgggttaattgttaatttatctaacattgcatgcataactatataaggactattttcttgaaaaatctacaaataatatatattatcttttaaattatatcattagttgagttgataaagattaattaaatagatgatttttttatgttgcacccacataaataataaagttctaaaccataattgataatattagctatgctaatgaaaaggacatagtaaacatatatttaaatatccccaaaaaatttataggaaaatacctcaaattaaatattggtttaggtctatacacttggccacactccctcaaattgttaggccaccaagctcattggttaattaaaataaaaataaaaacatgctttagtttggaaccgtcccccaaaaaaaagtttatatgtgtatgattatttttattaattaaaaaaaaggaatttaagaaataataatgatgagaatttttcttcttttcttatttttttaataagtaaagtaatagattaagcatagtttttgtaaaaattaaacaatttgcattgactttcactatcatgttggtcaccttatgtcacttttattatattaattataattattaataactaagtagtagattttacatattttaattttgagaattgttaaaaaatatcattggtatttagtatattttttggtgtcatattgttattattgtaattaagtatcagatcttatataacttaagaaaatagcttttaaagaatatcactaattaatcgtggagcgtcacttaaaaaagtgttgagcaccactaacatttaataacaatactctttaatctaataatttatgaaaaattatgaactatttagtacttatatgatagtaaggtacctttcataaatatgttaataatttttttcagtaaatataaaaaaattctaaaaaatactatttgtatctaacacaattatgaagtgatatatattgttttatttttttgttttttaaagcaaagtgatatgtatatatattcacactaaacataatatttatagtgatatattgttattaatataatttaatatttctaggactaatttattttcatttacccttaaaaaaattatatattttaatttgattattataatataaaattaccaacaataataaatattctattaagaaaaataataataaaaaccaataattcctaataataatactaatataaatattgtcaattatacatatctccatatcatgcggccattgttagggtcaaactgcatatgtttcattacgattagaagtttcaattataagagtattatatgattttttttttcaatgaataattatatattgtaacataaataattgactctttcaaaaagaattaaaaaaaattgaagatatttccaaaatattaataagtacaacccatgcaatgtatatttgttggtttagagatattgctaatttaattcaaggccagggtttattccaattcattttgtcattgatataaataacttagatttggtttaacaaaaaagaaaaaatatatattaattaatttaatgttgatagtatcgaaataataactaccacaaaatgtcgatatattaaataaattaatgaatttgctcttgaaaattttgacctttgttccttctttgaagtttggtcaaccttaaatgacttcttcaatattgtgtgtggtgtgacattatatatgggatattgctaattaataagtgtcatatatattcacattgaaataaagttaattacattaaatgaaattataaaaaaaaaaaaaataagctagtgtatatatggtaagatgcataaaattttattttaaaattatttgtaacaataaaattgtaaaactttctacatattaacaatataaaacttttaacccataatctctaatatatattgatactagtaggatgcaataatctagggttggcaattatgacacgatacgacacacttaaaaagacgtactatatcatatcacttgttaacaaattatgtcgttctacttaagatttcgaaacgaataataattagttaattattcatattttgtattaactataaacatacggaatttaaatatcaacatatgaatataacatgatgacaccaataaaactgaatctaaatatcaacatctaaaatatatgagtgatatgagatagacaccctatgcaatggggaagaaggtgtgaaaggaaaaaaaaaatgtggttgagaattataaaaatgagaggaaaagttttgtggctttccatgctttaattattgttattattaataatttatttgtaggcgtggatcatgaaatttcagctgtgcaactttctaaggtagtattatacttttcaattttcattatttttttttttagaaaaagaatatcacaaaaaatatacttattacaatgataatgatcattcaattgtatatataatcaaatgttttaaactctaatacatacatatatattaatagaaaacctaaaatattacagctaaagaagtagctttctagctaccataaaaggatggagtcaatatttaattattttttaaaaaatttaaaagcctaaaatattattattctaaatctttgagatttaatatttttttttttttaaaaaaatgaagtggagctatatttccaattttttttaagaaaaaacggctttattaaaactatgttattgtctagcaacataatttttggatgattataatttttttgtttgaaattaaagaaggaatgaatttttcatgtatatattagatatttaattttaggaactttacaacgaaaatgtatatatgtaaattaatgtatattaatactttgagatgttttaattgtctaaatatttttagatttttaaagtacttcattaaagtaataacaaatcagttattcgaactatattgctgttgaaaaatcctaatcttgtgcgtcgcaatagggcatggagtatgtatcgaataggggctgatattgaatttgaactagatatgataaacttaccgtaatatctattcaatttaatatcacctagttgatcctagaacaaatgatctcaatcctgaaatggttatgttctagttcagttgcattatttgtgttcttgaatctattagttaaagttgaccaaatggttcttctcgtgatgtataggttaagaacatggtagttcaattgagtagga

SEQ ID NO: 301704 - DNA, 1383 bp, Cannabis indica
aaaatatactttctttaaccgtgttaataatagcaataattagtttacaaggatacctataagaacttgtcataactgacttaaatcatgttgttgcagcctaaacaactttatacttgtccaataattaattaataataatgtattatatattattttaaactaccaatcaaatatatccacatagaaatatacatagacacgtagaggagacctagaatttaaaaagctcttattcaagagattcgcttaatatataatcctactttaaatttacgtggttaactgttatcatgaatatgttcgtgaattctaacttatatgtatgtcttttctgacttataccaacaaaaacctaacacttataattaaataattaaatacagattatgatcaatgcaagctattaaaattaagacgaactttcaaaaatataatttttttatattttatttacaatattacaacttaaagattttaattacaaaaatattttgtaaaattttaaatctaaaaaaaacaaaatacatttttctcagaaaaaaaaataacgagaaattaatgctgatggtcgtcttcaaacgaaggagaggattttcagatttggagtcacctagaatgactcttgtttgatttgcatggattggtcttggatctcatcagcttagacttgatggtattttaattaatggataaagagatacgcacaccagatttagaagacgtgtgtatgtagcagtggtaaaagttgttgtgtatcatatttgggctgccaggaataaagtcttatggaatcataatgtgtttatgatctctaaagttgttaatagcgttaaaaaggctgttgtagatagattgagaaaagaaaaaaaaaaatgatgttgtctagagtttggttctgccaagttttggcagatagagctttgtaattgcttttttgtaggctctgttttttatctagtttgttgtgcaataatatttatcttacttataaaagtaaacgtaaattaataaaaaaatataaataatatagtaattttgtatttgtttttagtggtatgcttacactatactaatataaacacaatattaagcaatataatgtataatatcatgacgacacacgtttttttagtattataagaagaaatatgatggtaatgacatgatttgatgttctatcaaagaaaaaaaaataccatatatatgtaattagaaaagaaaataaatataatttatgtcttaaaatttttaagactccacatatgattcatttagacatattaagagtaaaaaagtgattagaaaaagtaaaattgttataaatattaataattatgtggatgtccaaattttttatttattaccattaattgtaattaa

SEQ ID NO: 301705 - DNA, 2090 bp, Cannabis indica
cgactattcccgacatttctaatatctaaattattgtccagctatactaaaaatactaagatgtgattctaatagccaaacaccgcgttccaatgttgccagacacaaaatatgcgaaattatgaaatttctatatgtgacataaaaatacattttgaattcaaataaatcattataaataattaattcaatactaataaataattttcataattaaaccctaattatctgctaatttctaaattaaaactagacggtctttacattgaagatccaaaggtaagccttagccatagtttcctttatgttttgtaagttttagctaggttcaaacatgcataatagagaaatagttgttgtttatgttaattgagttttgctttagttttctgagttaaattgatgatgtattaagcttatttgaagttatttggctggttgtttgttgagttgagcaagtttgagttcaagagttcaaacttgactcaacaatggtgattttagaatttctacatattttgaggttttgttccttggaactagtctattgtgatgttattagttgatttggagcttgtgttgaagttcagggtcgaattggggttgatttgaggctttgttgttttctacaactgaaaatagccagcaatttttgtggaaatgatatatcctttttactggcagggaacctagaaaaatggcttgccattttactaaaatggcctaccgttaatctggcagttttcccgttatgttattttttcatgttttctcaatatttagggtattgccatgctaattaactatagagaaatttttagtttcaagtttaggtcctcgaaaaggtcttagaaagttacttacccgtttttcgtaattgtggcatagggcctctgttcagcgcgcaatttaccatttaggtcaatcgacacacttaaattcaaaaacgagataagattagcatagaatatatatatgtatatgtgtatgtgtattatatgcatgatgtttatatgattcctatgctaccaatactagtacggtagcggtttcgagtgcattggtacagtatatgaggttcaaagagtacgatatggtgttaccaacactagaacagttaaagtacgttgtgcatgtgcacaacactcaatagtattgagagtacaattcagccctacaaacactactatagtagcgatacttagtgcatatggtacaaaggtcgtacttctgttaagagtgttcttgatcatttgttaagccttgtggataggtgtatggacacctaaatacaagttggtgacatattatgtgatatgcttttctaattgatctgtcgactcatagttattatttgcatgtgtaggtaaaggaaaggctaaggctgagcagtagtgagttcagaactcggggatgactgtatatgtctacatggtttgacctgaagagtttggtcttaggacgagttgggtttcattttgtagtagctgtgcgatatttttgtaaagtgtattttaaatatatttatcaatttttaaagtgggatcccaactttttattttgatatatatgtatagttataaaagttaaaagtataaataaaagtttaatttgacacgttttttgagcaacactttgattagcaaaggtgaacaccgtaattaaaaagtcacttagtgttcctagacaatagggatttacttcaatggtggtgttttctaaactaatctttatgttatttgtgttaatctttatttttaattattcttttgaattaatcttgttgtttataaaaagaacatcgttaatgttcttattctattattgatttgactcctttattgttattcccattgttgttgatcattatatgtattcatactctattaattttgtgctagaatcacaagaatccttctaaattcccaaaagttacatattttatatttcaaacctatttacttagtatgccaggagcaaataagaaagggaaatttgacaatatatgcttaaaaataaatggtacactaaaaatatgctagcatattttacatcatgcaaaatatacttaaaccctaaaccctaaaccc

SEQ ID NO: 301706 - DNA, 2374 bp, Cannabis indica
ggatgaatcatcattgataaaaaagaatatcataaaaaaattaaaaactcgtatataaattttacttctacataattaaaatcaatttcatgatgaaaaaactagtttcttgatgaaaaagttaatttcctaatgtaaaaaccaatttgttaatgaaaaattcagtttcttaatgaaaaaaattagttttctaataaaggatttttggtgagtttcgttctgattgatcgccgccggatgggtgaaaagtttaaaaactcgtatataaattttacttatatataatcaaaaccattttccttatgaagcaactagtctcttaatgaaaaaattagattcttgatgaagaaaccagtttgttgatagaaaaactagcttcttgatgaaagatctttagcgagaaatttatctaacaattaaatatgggttttgaaattaaatttacaaaacataacatagtaaatattgtaaaatagtgtaaaaattaaaaattaataataaaaaaaagataaattgcggcataaatgcttaatgtttcacattttatacacttaaataccttatctttatttttggaggaaaaaatacccaatgttacaattctcttacacccgttactaccacttccgttaactcataaatatagacacgtggagggtctagatacattacatttatgaaatcaaattatataattataaggagagtcgctctttaaccttatgaaatcaatttcttttataatcaatgtgagacgctcacatgtgattgagacgctcacatgtgattttttattttattttattttttgaaaaaaaaaacgcaattcattaatgctcttacaaagagaactcaaaattcgtagacaagcatctgttcatacacattcttctaaactagtaacaaaagttgtcaatgtgtggtcaacaccattcgcagactacgggatagcactgcaaatgataggtagcaggtcttcttcgagacaggacaaatctctaaaatgcactattcgagacggtgtcaatctcctaattgaactaaagttctattttctcgatctatattgctaaatagttatttatacaattacatatttataggctttcacaccctttaaaatttactaataagcccttctagtattttcatagtctaacagtaagaactaccaccaataacaattaataaagaattaatatctaataaaatagattgaaaaatataatttgagtgaggattattaacccaaccaatagccatagtggaatcactattaataatagaaatacagaaactaaattaatgcgcaagagtcaaactcagtctaattgcaaatagcaccactacattaacagaaaaatcacctaacacaccaaatgactaagccagccaaaccacacccccagcatcccatatcactcaacccaatctgacaaagccactcccaggaaccactgaagcatcagccgcaagaacaaatgaattgacaggtggtggcatccaccgagtaggtcgctgaccaactttgaaaagcatagtccctgcggaagatctcgtcgaacatgctctttgaattctgacaggtgattatgggctaaatttggagctatatctaatcttgactgcttattactaaattatactgattttcaatcaggccaaagccaccataaagtaaccatcatcaattcgaaagccgaaaatgtattgttatttgagaatgttatgttttaaccagatatttcctttgagcaacggaatacccaaaagaatggagggaagggaggaaatagtttaatttattttgtcaaagtcttgatttggaagccaagtatctaaaaaaccataacttccttgacctagagattaaagccttagactcacttctttggaaggccatcatgcataccaaaactcatattctcaaaggcctttgccgaaagattgataatggacgatctacctcattttggttccatccctaggtcttgaatggaaaccttcaaccacagcctcagctcgacgcttcagtaggtattagtcttgtgagtaattttatacataacaacaattagagggaggatatggttagacattggttttgtcatgaggatgctaaaagaatacttaacataacatgctacctaaccaacccgctgaggacttctggatttggcttccaaaagccaatggcaagcatcaaattgttggaaatattttaccaggatctagatttactaacaagtatgtttcattaacatcctaatatgaattctaaaacaatcaaataaacacatataaagtttaaggaaaccttacattgggtgtagcggaacataatgactctttccgttcaaaatctctagccctt

SEQ ID NO: 301707 - DNA, 1775 bp, Cannabis indica
attattcatctcgtcaatctagcaagttggtgttaactacttttcagcgtcaacagtttctttaccaaaaaaaataataatatagtttactaaaataaatagataataaaaaatatgagtcaaataaagtactagcaaatgaagtaaaccatttaaactactatacaatcagatagaataatgatcttccataagcttatcggctttcagtgtaaatttaaggcattcttctagcgtgtcactgccaatatcaaactaaagcactatttattcaatcgattacctacacaataaataaatagatatagacactaaagggacaataaaaactaacaaaaatctaaagatgcagcacattaagcacaaagtgccaaaacaaagaaataaatgtgcttctcatagaatgaaaataatgacagtcaatgaatacacatacctggttagatgtcgttgaacatcaaagataacgatgactacatcatataattgaattgagctccaagcactttctacacggacctttaaatctttgtgtaattgtccgttgttcgttagcgtaagccctggggtatcaaagaagcactgtgcaagtgtataggagtcaataaatttttcttatcttgtatttagtccaattatctcaatgctgagaatcttcaaaatgctattaaagagagagaccaaatgaaatatcaacattacatgcagcatgttaagtttgtacactatttggaagcatttataggaaagaaatatcaacgataacataattagttttcagcagaaactgcaattccaattaatggatagactgtaaaactagcatttaaaagaaatgtaaaaagttcccatttattcagaaaatctcatcataaaactatatatttgccacattgacacagctaaatatttaattacaggcccaaaataaaacgaagctactgaaagtagaaacatgtaaatataaatatgcattttattagatgactcagctacaatagcttttgatcagatagagttagttttggggttgcaatttggctcatgtatatgaacttataatccttttaggcaatcctactttgattgaaaaacatgccacagatttcttagatttaattaatgttcgtataaaatctactgtagctcaactggaataagggatttggttaggctatactatgattataaatactttttcttaataaatgttatgaatcttatttttaagggcacacagtatactataatcacaaagtgacattatataagattttgataaaattagaaacaatacgtacaatttgggtatctcctttagttagaactcccaacacctcatgagtggtggtgtgtgtcttgcgggaaacagctgcaacctttgttccaacctgaaaataaatgtaataaattatgacaaatatgaagtagagatcatcattcaaaagctacttatcattttgcctaaattgttcccaagattcctaagatatttttaagataataaattgttcagagctaaaccattaacaatttaacatataaagctgtgaagcatagaattctatatctaaaataccatacaacaattggccacctcaggttcaaaagttgaaaatcatgattttttattttttgaaacaatacaacggacttgtgtcaatttagtggaaaaaataaatacaagcagactgaccagaaaacagttactagcagaagcagaacagctaacagaaaggaaaaatttacaagaacaaaccaaaaaaaaaaaaaac

SEQ ID NO: 301708 - DNA, 1220 bp, Cannabis indica
aaaaaaaaaaaaaagtaccaatcataccaactatctaatattcgtggtaaaatattttctttttagttacaataaaatttatggttaaaaataaaaataaaaaaaataaattataaattattattctcacgttgtgactaaaaagtttgtgattaaaagtatttatcacaaaaatcacaatttattatgactaaatatgtttttagtcataatattttttatgatttaaactaaattagtaataatttgtatgtaaatactatattttagtcacaaataatttttcttcgtgactgaaaatcacatttaatcataaaaaatttatctttctactaaaaaattgttactgtaattttttttagtgattttctgcccaatatatatgtatgtattatatatatcttaaaacttcactacacatatttactaaacttagctatatgtaacttgacagctaatacaaatatataattatttaatatgtgaaaatttaacatcatatataataagatgtataaattactctttttattgtcaactaatttagagatatacaaaacattgtacaccttaacacttccatattaatattttatgaattgaattttgttggaaattatgtatcaattttttttacaatcatgtttatcaaatcatgggcatgctcatggcaaataataaaaaccattatttgtattgatatttgctaattaattatatatatatatagctgtactatatataattacattctaaagacaatatcaactatatttctaaagtaacaaattatcaaaacttaagtaaataatatatagtgaaagaatatcatatttaggcacatatataattgatgatgtggaattttatttaccacttgttacgtacgtacagtatatacattatatacgtgcattacacggtatattaattatatacgtatacagaaaatatatatataaagaatcttcgaaatgccctttaaaaaatgagaaatatatatataagatatataacatcacatgcatatgcatatgccacaataaagaaagttccttttattttggttaattatacatatatatatatagggacaggatttggtcccgttatgccaaaacagggaatacaatccgtgattgtactgtagccgttggattaaattggggcatgatctaatggctggggttaaagtaggggtatttagggggggaaaaatg

SEQ ID NO: 301709 - DNA, 3842 bp, Cannabis indica
aactattaaatcgtgtcctctaaatttttttgctcattaaaaattttcccgaactacttgcaatgctgaaatataaggtttttgtaaaattttatctttgcattttgttagctatctgggataaaacttaacaaaagttcaatgcttcagtattatgaataatttaagagaaattttttaacaggcaataaatttttaggggtatgatttaatagttgttagttcgatgtgaaaattttaaatagccatatttatatataggagtactttttggatttgtttgttataagcttccattatctaaattttcagagtatcttctttctcatgtaggtctatgcatgttgtatagtaaacgttttttatatggcatatattcctcctaactttcatatttgttccaatctttatgtaatttaatcacttttaagaagaaaaaaaaataaaggactcaattgtaaaaacaaaaaatcagggtctggactatccaaagcagaaaacattaaagtatttaagctaacctggtctcactaataagtatgtaatgcagaatgtgtcaaaaaaaatataatgcagaaaagatgctcacgttctaattagtgacacacctaaaggcttaagttcctaatgtaataaaaatcctaattaataagcatccaagttccaaaaccaactcatataatcaaaaatagacgtcataattggttttactcctttaaatttacattgctccaaaagcataattgattctaaaatataaattataatacaactaataatcaagccagtccttgatactaatgcaattatgcatcagtagcccaaaaccattggcagaagctattacaaacaggtgtattctatgtatatatagtttgaatttgatactgaatccaagaggtcaggacaccatatgcaagtggccaaggtgctcccactgataggacagcccaacttccatgacttgttctttggagtcttgtcagtggacatggtggaataatgggccaattgaatacttgaggggttgtcttgtgatcttaaaaggacccccacaaaactaaacaagctcattataatttttcaacaaaaatacatccagaacaaacaacttcaggtcccaaccttcttttacacttgaccccccctcttaaacccctatctaaattgttactttcagaactcttttgttgtatagtactttatgtaaaaatagaatatagaaaagagatagcaaaaggtggctggtgagaacaacagtttttgagaaaataaacactaacatttctcagtctcaacaaaaggaaatcaactggttgagaaagtttattctcaacaaagctttcagctcaagcaagaatgaaaaggttgggaataggaatgtatatgaacatgatccagggagactcacttattctaattccatggaaatatggtaaacaagaggagtaatactaaacaacaaacataacaaaataaatgacagccgttttcagtttcacagaaattaagttgtctaactctaccccccttaaatgttgttaggacaagtaagataccgatgatgagacaaaatatgttcccggcagaggtttcacgcagtcccttggcgacataatcaggtgttatgacaaagagaatgaaacgggaaactgaaacatataaagatatgcgaaagaagaaaaaacaaatcttcagaacatagataaaaagaaaatgaaatatgcaaaatttaatacttctaccctagtgaaaaggttggggttttgttttataatgttgaggagatatatatgaacctggaatgtcttctgggaagaagaggtgagctgcaacagcaagaaaagaaacccagtaaccaaatcctcctctgctaaaattcagaatggttagtcttgaaatgtgcagatatatgaattagttaatgtaaataggaaaatgaattggggtatggaagaacctaacaaaattgaagagcccatttggcaaacttgtcaatagataaaacactataagagtagtttgcaaagatgatctgcacaccctagttcgatttaagatcaacaataatctgcaacataaatttgatacacacaaaacacattagtaagaacagataccatcttcccaaatctaaatctaacaatttgttgatcttgttcctaatgcttcactgaaaattgaatccagagaaaaagactaaatctttaatgagaaatctccatgtaaagtgatgacatgtaagctaaaccaaaaaacaagcactgtatatgcatgcagcagtgtaaaagatatttcatttcatctacattagtgaaacataaacctgaaattatgcagagtttttgagccaaaacaaacaaacaaactcgtaacaatcaaaatttcaaggcaagaccttaagaaatcaccaaaatgtatgtccacaataatttcatctctgttccatttacttttactataaaatcaagagaaaataaacagaataaacttcactaaacatcttccttattccataccttcttctatcatccccaggccaaaataaagataaattgaaattcatgatctgggtattgcttaaaacgccataaatgtacatatgaagaaaaaactgcagtaaaaaaagaaaaggtaggattaaagattgactcacaaggcgcaaagggttccaccccattgaaaagtggttcgactatggctaaagctgaatcctttttcagaatcagataaataagagaccaaatctgtgaaccccatttccatatttcccagtctcttctcccttttcaccaaattctgtacactcaatccatgaacaagtcttcttccactactagtactaactcacatcacgctagtacccatattattttagttaaataattccttccttgacttcatggacttccttttcttattttctttatttatttctatcggatattcgaaacaagaaacaataaaacctcgaagatttgtgaacgtcggattgtacacgtggctagatagaccatcgattcgccaaccagtttctgacgtggcgccgttttagtgcttcaagtccaacgtggattaatttaatatcgtactgaacaaatctatttattgggcttcattgtaaaatgttgtctgtggaccgtgtcgttgtctgcctcgctccacaaagtttgatgttatttttctttaacgattttttcttcttattatctcaaacacactttccattttgttatttttcaaaagtaaattttattttacgtatttaaaaaaaatgaataaaagacaattatgtatttaaaatagattaattagaaacgaaaatgtaagtttcgatttaaaattaaaattttattgtggtcatatcatgctcttgtattttcatatgtatgtcgttttgtttattgaatattagaataaaattatcatatatatttattaaattaataatattattttagtagaaagatgttttaaagctcaaaaaattatataatagtatattcttaagaaaaataaataaatacaaataggtaaaatgtattataaggaataattttgcattgatatatatatttatatatttggctaatttttttccctgaatttttgtgtactaaataatgttttttaaactttttttgtcgttaaaaatttttcttgaactattgagatgattagatttaaggatttttgtctaattttatttaattttactatttcagtgattgtttatatactaaatcatgcttcccagactttgatatctaccaaatcatacctatcgaactttgacatgtactaaatcatgtccccctgaactttcattcatgttagacctt

SEQ ID NO: 301710 - DNA, 3089 bp, Cannabis indica
aataaataaataaataaaatgtaactcaaatctataattattgaataagattattaagtgacgtaatttatgatatcttacggaaagtaaataataaataataatttcaatataaatggagctcttgtgtcctgctaatgttaacaatttgttagaaaaaataaactactacaaatagcgtagtatgcctttacttaaaaaaaaaaagaataaggctctgaaggaacgagccctcttaatatgctaagtctcaagattggagcacagagtgcatatggtccgattgccaaatcatcatagacttgtttaatttgttagcttaattactgaaatgtcaagagattttcaaaattgtttgttagtttactgctagatggagtaaagttctagctgactctattgcatgccaaatggtctagattgtctaacacctcgatctggctcttttgtgttaggagagctgccaaatggtctagaaatttcttaattccacttggcagaagaaaaagaagacaaaaaaaatgatctaattgcatgcatgagcaaagttttaacaactaagctatacccttctctcagctaaaaataaatgaacaaaaactaaattatattcctctaagctaagtatcagttgattaaaaaagcaatgtaataagttctttataaaaaaaaaaaaaaaaagaaatgacaatattttatgtaaaatacatagagcattttttttttattaaaaataaaacacccaagtaggttcctcaataattaaatataaaagatagatttttattttttagattattccttttattttattattaataaaagtattattagttgcaaattacatataaattcagatatttatactttaattaacacagacatatatgttcagtgggataaacttatgaattttgtttaatgttctaaaatgattgcaccaatcaatatttccaacgaaaaatgatcttggtttacttttttaacaagaaaacttatcgttacaagttggtatgagcattttgggggaactgaacatatcaagctcaaacagcataagtaattgtttcaattgaagagacttagcaaaaaatattgttactatatttttattgaaaagaagacgcattacattgttacactctacacttggtacaatatatataaatctcaaaactctcttaactacaatcactataatgatataatctaaagacaaacaaatatgtgtatatacatagatcgaaaaacttcatctggtttcccagaataatgacaattcaagttttcaagaaatgtcgatttttcaatctacttgtatatatatgtgatatattacatataatatttacaataattatatggataaagaatgtttgggttactatttctatctcatttggaaattgagtgtcttgatgcagtaagcaaacatgaaagcgaagaaggctgtgaagccaacaagaacagcagcaactggtcccataaaatctgggttgtacccaaaatggtcttctatgtaccacttgatggtgggtttagttgtcatttcaggcactatgatcgtgtcttcaacatcaccatactgagacacaatcaatccgtacacagtccatgccattgggcaaatccaataataccaaatccaccactttggaattctctgtaaacaaataaaaaatatataaataaataaccaagaacaagatcagtataaatatacagtctaaataaaatggtggtcttgtcttgattacttaccggtcttgggatgaagaaaccagagaagaggttgaagagagcatagaaagcagcagcgaagatggcggctacttggtgatttggagtgatggaaacggtcatcatgccgtagtaggtgaaatataggaaggagaagaaattgacgaagaagaaccagaagaatttagctgctgtccattcaaagctcaccatggcatacactatcagagtgtagtaagtcgtttgaataagtacatatggtatttcagctaacatctgcaacatcaatcaaagccattgtattgtttagagacaaatagataaatttatatgttttgatttgatcaatttgtgaaataacataacactatatggtaaactcacctgtgcaagagcataaggtaatgcagagtacattccagcagccctttcacgatagaatacagttctttcaacggctactataggttgtacagttgaacaattgttaattcccacaaacagaacggaagcatacatagcaccaataatcatcatcagatcagtcgagctctccctgatcatatcataaaaatgtataaaattaacatgtaagcaatttttttttttaattttggtatccaccacatatagaaattgagaaattttgggaagaggactaaccttttagttccaaccttccagaaaatggttccaagcatgagagcacaagccaaggtgaaaaagtatctaacaaggttataatcaggacttctccaatatgtccaccactgcttccaaaggcaggatttgaattgtccccatgatgattgagagtactcagtagcaaaatagagatctttggcacccggtggtggcgtgcttaattcctttaccaaggacttattacgtctgcacataagcttacatgtcagttcaaaacctttaaaaataaatttgatgcaattagtatttgtttaggaacttactggtgcaaggctgaagttttgtagtactctgcaaagtccatcttaaggcggacttcagctgcaattgagctcacttccaacatccatgttgccgggttgtacttgggtgtgatcttttgcactccgggaatttcctgcaaaaagaaaatttgtattagaaaacacataaaaaagaaaggggtggaagaaaattatatttggatgaaagtaagtagcaattacctcaaagtactcaatgatcttgtgagaattgcgacccaatggtccataatatatcacttgtcctcctctcttcatcaatagtaactagtacaggtgcacaatagaactcagtaagtcgagtaatatgagagagagagagagagagagaggagaggagag

SEQ ID NO: 301711 - DNA, 2602 bp, Cannabis indica
ccctgttggatagggcgttacaagacaaatatgaagacctgtaatcttctcataagcaatcaatctacgttcgactataagaatcaaaagtattctaagtggcagcaagtcccaattctaactaacgaggaagatagagactatgttgctcgcatccatttcttgaagaatgcaccccctcgagaagctgaagaggaagcatcccgaggtaatgattgcggatggtctcctcctgtactttgttttgagcgtacctcgctagttaagtttaaggatagccagtatacttctatatttgggatcgtttttgtgtagactgcataactcataggtttgacagttggtatcttcaatatcatgtccaattaaattgtaatagctcctactttggaattgccgaacaatatggtactaacttggatagagtgagccatccagactctgattgggatatgtctctaattaaccattatgacatatatatgattactagctctagggagtttagtacatattgtagttctttctcctcgtttgatgattatggtaaattctcttaagtgggagtttattccccagttttttattatttattttaaacaagtgttaactcatttctttttttgcttgcagatatggactttgagagtcttgttaatgcctcgggaaaaaagggaaagaaaagaattgctgcaactgaggcttcattgggagaaaatccagaacctgtgaagagatcgagaaaaaccacggcaaacagaaagcgtgccacacaacaaattattatcgagccaactgaggatcaagttcattccccgatcctagctactgaaggtactgaagaacatgtcttaggatctgttcaccaagtcaaattctcagatccaaagcccgagatggtcttttcggagccctcctgtcctttaccacgagatgcgagaattaccggctcgtaggtttgctcgcaatatgccacctcaagttggcgtcatttcaaatccttccaatcaggtgattgggatttgatcaataatggcaactttaaggagttatttgagagaagcttgaacctcaatctctcggttagatcctttcttactgtcgtattttattttatgttcctatctttcttttgactttaattttactgtaggcctctttgctatctcacatggcacaccagagaggccttcaaaagatcaaacagttggaatttgagcttcgcagatccatcgaacaacgtgaagttattgcgaagcaatagaatgatgcctaggctgagaacaccagattgatgaaagtggccgaggagcaaaagagaaaccataaggctgagcttgaaggtgctcaaaaggaagccaaggatcatcgcgaagcccaccaaaaaattcactcaatgaagccaataaaaagcttgagggtgtagaggccaacgccaaagataggtgcaatatagtcacaaaatgctctatctatagagcttggttaaccaatcccaatatggatttgagcttccgggagagtggtgatgcggagatgctggcttattgcgagcagaccaagaaagatgaagttgtggatagcgaggaggaagaagaagaagaggaactatcaaagtctccaaccatgtaggcttggtttttattttagatattttatttagaaatatggccatttggtcgagataatggttgcccctagtggcattttgtaaaaaccttttcattgttggatgaccaactttgcttatttatatatttactttttatgcctcgtatcttgccttttgagtttaaatatgtttgtttattgcattttatttcacaatccaaacatctatatctcaatttaagatactttgggttgaatgcatttccactgttattttcttagagatatacaagtagttattaatctaccatttttttttgcgagcaattctaatctacttaattcatctcaggaactattctgaatatcttttgattgctcttatgaattgttaatcctctattcatattttagcttaagtattatttttcaaggtttatttgtgcctcgtttataatacatgcctgatgtaaagaccgcttaatttaaatttagaaattagcagataattagggtttaattatgaaaattatttattgatatttaaataattattttcattgatttatttgaattcagaatgcatttttatgtcatatagtgaaatttcataattttgcattctcggtgcccggcaacatggaacgcggtgtatggctcattaaaatcacaatttagtatttctagtttagcggggcagtattgttagacattagaaatattgggattagtcgggaatttagagttttcccaaactacccttaagtgctttttaacccttttagtgtgggaggggcaaaatggtcattttgccccataagcttttgtcctttagtggacttagtattagatgattatttggtttattatatgttgtgttggctgaaataagtaaataaaaccatttttatctctcattttacaaaattagaaaatttggaaaataaggaaaagctttctctcttcacactctctctctctctctacgaaa

SEQ ID NO: 301712 - DNA, 3052 bp, Cannabis indica
cttcatcttcattcatgtaaggattactcatttctttcttttatatgaaaaattatttgatacatttctcttttcttaatttttactgttacagttcagttcacaacccaatttgggtcgatttcagctcattatggataatcagggtatgaataaaatggctaaaaccacatcatcatcatcatcaatggttgaagatgatgacagaatttcgaaacttcctgatccactcatcattcacatcctatcgtctctcccaactgaacaagtggttcgaacatgcattctttcaaagcgttggaatcacatctggtattcagttcccacactctttttctccaataatattactaatattagtacccatcgtactgctaaaaatgaagttgttaggaaacagggccgagataagttttacaattgtgttgaaaaatatttggaacaccgtaagaaaggtatgcattctatggttgattcagtcatattaactagttttacacttaaaatgaagggttactatcaaacaagtaaggctgatgttctagataaatggttagcttttgcggttgagaataaggttaaggaaatgtatctatggatagacagagatgaagcttgtgatggtgaggatatgtatgattatgtcttctactgcttacctaaaacaatagagagtgcaagatatttgactgatttggagttgagtggggttgagttggatacttctaattttgattttccatcactaaaagctttgtcattggtacatgttaggagttcatgtgctgtaaagaatggagaggcgttaagtttttgttgggttgtccttctcttgagaaattgcggttacataaatattatttcaagcgcgtttcctcatttactgaggatgaggttcgattggaaagtttaagcctcaagttcttggaactgagagatacacgatatcgtaaattagaagttgaagccatgaatctcgaatctttggtactaattggtgttaccgagtacgaaatagatatctctgcttgcaagaaaataagaaatctctcattagatgataatggtcgtaatttcaacctatcattacatgatcttatttctagtagtcctcttcttgagaatttgactttgaatttctgctataattataataatcattttaaaatctcgggtcagaacttaaaaggtttcattttcaagaattgttgcttaaacaagaagaggatgaagagcaagattaaggttacaattgaatcaactccgaaattggaatacttttattatgaaggtcatatcgatttaaacatgtcaatagagccatcgaattcgttgaatggaaaaattgtgctttttgagaaggatcatcatgtatatgagggctatgatgcagtttggtttacagatttgttaaattttcttttgaatctcaattgctcttggaatactgtaagcctacatgctaaaaatttcgaggtactcatattatgttaaattttattttattttatttgtacccttatttcaatgttgtacttgtattattaatctatttgctatctttgatgtgatatgtttgtatttttgtatgaagtctctcacttggccagaaaagttgaagaaggtatgtcgttctcctttgcttaaatggaagcatctcaaagttaatattgaatatggatatgccttcggtgttagtcgtaaaaaaatattagctttgaaggactccttgctgtggatttcaccatctttagagacattatctattgatggaaggaagatcaagatattgtaactgctgattgttagttttagaaaatggtactgtagtcctttatgagattgtgtttgttttattagtatcttcgtactaaaaattatatatttctttgttatatttgattgtgaacttagtactattgttaggacttaggagggtgatactgatacatatgaagtttagtaggtaattttctgaatggattcttcaagaatcaaaccccatgagaaacctatgaaatggtcttggaatattccaaggtgcattattttcatttttttccaagtgaacttttgagtataatttgatccttggaccttttcttgattaatgtttactgtctagtattgaggtaacagagtatatataaagcttataaatacatcatttgttttagtgaaagtgtttcttaaatatataagcattgaattcgtaataaaatatgaaaaatgtgatgggctagaataccatctttcaaatggaagtgttttttttgcatataatttgggattttacatcatttattttattttgatctaatgataagacatctgttgtgcttgttttcttatgttgaattatggtttgttatgtttcttgggatattgtattgatctataaagtgattagaaagtgttaaatctcgagtttgagtaagatcgattcgagatagtgattccaaaactagatgcagaccaagaatatgaaaggcaaatgagatatttaatgaatgatgaagatcatcattagacctcattgtttatttattagttttttttttttgagtaagatagcttgagaaaacaccatcaaaaagcaaagatttttaaagggctcagaactagaagatatcattgatagatggtctcattatttatcagattacaatactcgcaacattatattatattacatttttgttacaatttacaattttttccctacattttcacataatttttaagaaaataacttgctttcatgtagcaacaacattattttgataacaataaaaaaaacaaaccgtcagtatttttatacataaaaaaacattaaaattggtaatgatgttaaaaaaaaaagagtaagatcggtgtaaatacttaagtttaacttctaattacaaataaaaacgtaagtttaatttttgacggtaataatactaaggttatattttattattttggaatttttggaaggcgtttggttgggaggaatgaaaatataggaataggaatgggaatggggatagaaataggaatggaatggaat

SEQ ID NO: 301713 - DNA, 2737 bp, Cannabis indica
ggtccaatctgtaacttttgcaaaacacagggtccaaaatagtatttacccttttttttacaaaatgtaatagtttacgtaatttcccaataaaaaaacctaatgatattggcaaaaatgataatcctacctaaatattagcctatatattaatcataaaaaataaataaaatacaacatattggtttagttggtgcaattgttgttcttcaaattttccctttgaacattttgacttgtgtcaaggtcaaccaagtgctaggaaaaaaaaatatcatacacttgtggcacaatagacaaataagaacttggcttgaatctgcaactttgtcatgagcaaaatcaaattgaatcagcaaacaaattaatttgccattccattcttggccgtaccataattagcgccttttgttgttgagatattatttttctttcgggttttgaacaaaattagtgcaatttccatggaagctcaaaagatgaactatgtgcaagcaaactcaactaaaacttatcagttgactgtcttaaaattataagagccccaatgaaaggttcaagatttccatctaatacataatttagaccgggaagttggataccggtttttagatcctctactagcttatggggttgagacttgtacttcctagtctccctttgccagacatccacaatggcctctctatcgatgtcacttacatcagacactccttgttcccatgcaatcacaagaagctttgccatcaaccgattaagggctttgattcgattcgagaattggtttctctcccctgcaaatgaagaagtggattgaagcataatacagaaactaatggcactgaaaatgctgatatgatcgcccgcctaactttacaatatttggggaccaggaacctataacaagcgagactcgattattagaccttgtgggagaaaaccagtgtctttggtttgaactcttagttactcattacatagatgaaataggtatgaggaggattttgtttataggattggatcatattgtcatgtaaacatgagaaatgattagaatgagatgtatggatatgaatatatcacctgctgattggacacttatgccagttgggatgtggtgaatgcagactgaaggtctagttctactatgttcttcttcaagcatggaggaggatgtgatattcaaatcggtttcgtcaatttgaaggttgtaactgttttcaaggaacaggggaacaacgtctacgcttgctgagctactctgcatgatttccacaaacatgttaagcagtgaaattttcggtcaagatgaatagaatctaaacttagctgtaaatactttgagaatagattatagagctatgagacatgacagtatatggaaccactgtcttgtctcttacagttatattatttaaaatgttgaaggaataaccaaactgcactgctctaaaatagaacagtgaaattagtcttcacacagcacatcataataaaactcagtgcacccacattggctggactaagttcgggcgtattgtattgaactgcatagtattaatatctttaatacaatactatgtttggtattgacttgtcttaataggttgtgtaaaattatatctttacaataaactcgactccaaccctgacctcggcttggagtcggacacagaccacattctattaaaatttatcgctgtaataattaatacaatacaatattttatccaaacatagtgttatttgttatttaatacaatacgatctttatatggcctacaagctctaaatcagcaaacgacacaaagaatcatatcttagtcaacaggtaaataaacagaataaacaatacacaatcttaatggttcagaaatggacaaaaagtatatgcatatattgtattggatgaagaactgcactagataaggtctagcaaaacagaaatttgtatcaaaataagacatggaaagtagatagaattctgaaaacattagaattaagcaactgatttaagaatatttggccagagattaatagcaaaacagaagttgtacctcattaagacctctaatcatgaagtggacacccctttctcctgaaagatatccatatgcatacttaaattcaaattctatagttgctgacttaatcccaccattcatcgaacgacgcttgtcgaccactctcccttttcgtccttgttttttgccccatttcgtatacattcttaacagttgacttgcccatatctgaaagcacaggagaaacaataatcattttgttgaacttttacaaaaaaatcatgtcaagatcatacataaaagattatcaaacctcagagtgagcttcagatccagctttaataactacacatgctccctcaatgtcatatggcccctttagaagcttggacatctcatactgatccaaaatcttgcttacatctaaagaagcactatatgcttgcttaaaaagcccataattgatagcatctatctcagccaattgagttattaactttgcctcttcagcctgcacacataatatattaaataagaatcaataagcataatcattccatctaacagagtaaatttggtaattaacggcgaatttgaggcgttaaatgtcaattgggattgctagtgtacacctgtgcacatgtggcactaaaattttgaagccaataaaaacatgccacgtatacataggtgtacacagtgacaatccaatt

SEQ ID NO: 301714 - DNA, 1635 bp, Cannabis indica
ttatatatatatataactaaaattaacataaattttgataaaaattgagtaaaaggagagtttgattgatcaggtggatatggagtggccacaggtgggccattggcatggggactatgctacaacaaggagatgagtccaagcaaactctactgtgatgactactacaaactcacctacccttgcactcctggtgtttcttaccatggtcgtggtgccttgcctctatactggtacacctccacaaccatcataaatttctccgggtcggaccagggccgaccttgagttgaaatgggtcataagcaaaaaaattattttgggtctttactacaaagatgaatagtatttttaaaaggaaaacttataaaaatactgaaatttgggttaacttttacaaaaatactgtcacacggaatttttttaaaaaatactgtgtttttgtaaaacaccagtaaaacacaaagcagaacaactcaaaacaacagtagaacacctaaaatacaccagtgaaaacttaacatagtatactgcagtatgaaacttataaaaaaacacattaaaaaataccgcctgacagtatttttgtaaaaaaataacaaaagttagtatatcatgtaaatttctctttttaaaatgagtgagctctaaacgcgagtctaacctgcctatgaaaaagcgggctaataaactttttgattttgttattataggaactacaactatggaaaagcaggggaggcattgaaacaagacttgttgagccacccagagtacatagaacagaatgcaacattggcattccaggctgcgatttggaggtggatgacaccggtgaagaagcatcagccttcggctcatgatgtgtttgttggaaaatggaaaccaaccaagaacgacaccttatcgaaacgagtacccgggtttggagccaccatgaatgtcctctactctgatcaagtttgtggccaaggtgatgttgattcaatgaacaatatggtctctcattacttgtattatcttgatctaatgggtgttggtagagaagaggctggtcctcatgagactctcacttgtgctgaacagcaaccattcaatccctcttctgattctgcttctgattcttagatcaaaattaataccattataatataattacatgttccttttttgaatgagaaaaagtactatacttcatgttaataatcaactatatatatatatatttttgtgtgaaattttaaaccaatattggggcaatgtgtataatgtagagactatgcttgttattattgtttatatacatcttacatggggtcatgtgtttttgtaattgtttattgattgagttttgttctgttattctctcttttaagtatagtttgcatacaaatataatcaagttatggcatgtttactaataagtaatgagaattaatagtaaggtaatcattcccttatatttgtttacttgcattattaaaattaggaaagggagaagttgattaaataagggagaaaagaaagggagaacttctcccaccaattttgtaaggaatgccattaagggtaatggatttttattatttttattttattttttaatattaaatatataatgacaattttgtcctt

SEQ ID NO: 301715 - DNA, 1834 bp, Cannabis indica
  modified_base (1578)..(1578): a, c, t, g, unknown or other
ggtatgggtgggggagcaatccccgcacccgccctgcccgtttacatccctaattatgtgtttgtgtatatttgaaggtggtcacttattgctggaagaattccgggaagaacagcagaggaaattgagaagtattgggtatcaaagtactcaaaccactcaactaaaaccaacaacaacaatcaacaactcacagttaaattaaaccccacattgtaatttcactattctagctactactgtactattagcgtcttttcaataataatttcatgatctaaaaaactattgcaatgtctttataataaggatttcaatgtttcaataagatggttgtttgattttcatatcacttattcacatttttgttcttttatgagcatttgctattgattgattgatcaacgttagtgattattttttaccaagttttcttttttatttaaattatcctttattattatttgtcctctctcaatgataaaaaatggtttgtctgttttacttattaccagatgtttggtgcaaataaaatagcttgtcgaaatttggaagtgcattatgataagttagtatccagtggggtgagtgggggaccaatatcaatttattttcactatttcagataaaaaagaaaataatttactgaacaaaacaaaaatatcatttaattttaattgaataattctagacagaaaaatgcaataatgctacatattttttttttctttcttttgaatacacgatcaccacgtttagtaaaataataaaaatttaaaattaaatatacaaactaaaatacatagtttttaaaagaaaaaaaccaaaagtatataatgagaagttatcagcgagaatgattttaaaagaaaaatctgtagtttgaaatgaaaatagagaccacatattttttgtggttaaacaagacactgcaataaatattactacagaggttcccatcaaagtgagtaatatcttcaggaaattgaagtattatttttatattaacaataaaatatctttactttcaagaatttaataatatattatacacttaataatataaataaaacttaattaaacatacagtactcacttacaataatattacatttaacttatatttcatcacaaggatataattatcttatggcgagaaaagaaaaattaaaaagattatttcatttgaaaagtaatgttcataaaataattaatctaacccaacaccattcaattcaattcaatctttaaagtgcggatatctctacttgtgtaaattaaattgatttaagaaatctaaaattcgcacttgtgcagatctgatgttgatttacttgcatgcaaaagtaactaatacaattgatctaatccacactcgcaatgaaaaggtacacaataattgtcccgttgatgtatttaaatgtattgactctgttcactcctcttttgcagatcaccatgcttatttgctcccttacactatttcacgctcggaggatgtttggcgccccccccccccccccccactgatgggtaaagctgaattgtaatgttagagtggggttggataacatgtgntgcagctgtattcgcaaaggatcatgttagcaaggtgatctgggttactacctctaaactggagttctctgatgctctttgcgaagaagcggcggcttgctatctagctctagagtcagcgaaggatcgtgggttaaagtttattatgattgagagtgattcgagaataggattaatgctcttaatgggaaggattcccgttggaagcttgagaactatgtctcattttgtattagatcctctcctttttttgttg

SEQ ID NO: 301716 - DNA, 1693 bp, Cannabis indica
tatttttgtaaaagttaacctaaattccagtatttttgtaaatttctctatattatatattgtatagatttatatatatacataattgaatgatttcaggaagtgtacatgtataaaataaatctgtaggagagtaaaatgaataacataaattaagatagagagagagatggaaaagggaggtgtaccaccaatatatttagggcttaagttagggtgcagcaactacagggggatggggacagaacgtatctcatatgcattcaacacaatgggtcccatataaaaagagagaatttgggtcccactttggaaaatgagagattgtacatctaattaagcatcatttgcaagttgcaacccatgcaagaacttccgaacttctcgacctcattcaaggacactttgttacctaacttactatatattttcattaaaattcaaaaacaaatatacgtttcttttggagtaataatgtcttactcgtatatttcgtggggttctatttcaatttaatgatgtctctctctctctctttttgttttttcataattcattttcaattttttcatctggattctccatgtgaatgaagcttttatgaagaggacccccccaatttagggttctgtgtggactccactacctcttttttcctttatgcaattaaattacatcttcccaactttttaaatgtttgttttagaattttgtcctacatttgtgaattcctttcatttttattaatttgtagggaatatgtagtaaggctttaaatgatgagaactgtactgtttttctttctcatttgtggacaaaatgaaaaccttatttacgtacacgacatatatttcctactcttcttatataaatatatatatatatataaattacaaatcgattatttaagtatattattataagattacaatatatacagttaattaatcaaaataatgttatgattaattctatataaaaattaatgatctagtagaaagctagaaggactatatatatatagataggcacgttatatatatatatatatatatatatatatatataagagtagtagctactacagaaagagagggacacgtacgtaattactattcactgttcattatcactagctagccctgccatgtaattaaatggggaaatttattctaaaggaaagagcatatatatatatatgtatagtgtttggatgaatctatattatagggatagagagagggctttatttggatgatcagtactaagtacataggaatttatctatattcacaaatgcgacaataggaaaacaacaagaaactcacaaaattaatatggtagttgttttagtgtagttggaaataaatttttgactaatattatatattcatatatttgtgatatatatgacgtaaagtactagggcttaattattttgagagtacgtgacccaaactcgtgtatgatctatctttttgttgtatttttgttttaaacttgatatctaactaattattttatttgaagattaagttaaatattatcacttaaatatatattaatacggacgcatgaatgaggttccatcccaaaaccaattggcaataggaggagtagccctttcatcttatatatcacaatttttttccacacattagcaatgtggtactaactcttaatacaccctcct

SEQ ID NO: 301717 - DNA, 2662 bp, Cannabis indica
attgcattatatctgtgtaattagaggtaattactagctattttgtcaaataaaatattaggaattcataagtaattactaataccagatcatatccaaacagacattatattttaaaatatagtataattactactctagtaattagcaattacataattactacaaaacacaacttaagagaagtattaattacaacatcctattacaacctcttagtcaaccttcatgctcgaaatcatagcttattttttcataacgatatttattatagttacaatattattcatgtaaattctttaaattttttgaatactttacagtatcgaaaacagagttgctgatattctaatttataacgcgtgtttaaaaaatttcaaatctaatctcggtactataaaatatttaaaaaaatttcaaaaatttacaaagatgatgttgtaactataacgaacatcgtcgtaatttttatttttattttttgtgaaaaaaattatccttgcatatattttcgatcatgggaattgactaatgtagtactctttcatattctaaatacatattgtatgctgaaataaaaattgtgggcttttagtggattctattacaaaataagtataatcatgttttttattaaaatatatttatttaataatttatattaaagaacaaaaagctggaatagctcagctggttagagcgtgtggctgttaaccacaaggtcggaggttcgaaccctccttctagcgcttttgcattttattttgttatgtttttttaggttaatatttcttaagagaaaaaccattatatgtttggttaacattaataagcaatgtttgacacgtttgcacacaaagatagtgtattaaaactcttaatctctcatgaaataattaacaataattacatttaatatttaaattgacattatgtgctggcattttatttacttagtcaaactcaatcattcaaaaaaccatattttcactctttgattgttacaatttaattggaacacaccatccattaattgtgtatatgtttggtatgccgtattattgtataatattatattgaattatatttcatgtaatatttttatataaaattatatgtgatattgacttttatgaacacttaaatatacaatagtttaatataaattaaagtttaacatattataatataaaaatataatatataatacaatttaatataatataatacaatacaatacgacccaataaaacataccaaactaactttaattagaatgatttacttttaagtgatgaattatgaaactcaatagatcatattaattatctccaaacgagtagtaacaaaccaactaaaatccatttttttttaataattaaccaaccatatattatatataaggtcaaagcagtgtccaattaatatcaatttatcatagcccaacaactggccaaaaatgagcctagtaataaaactacataaatagtaaaaacactttctttagttaaagccaaccacttatactaatatataaacacatattaattacataatcccattcttaaatcgatcatatatggattttatgatgttcccaaaaatttcagctttgttgggtttttcttttgttgttgggtcttgttttttgattattggtatttcaggtagtgattttaacaaagattttgatgtagtttggggtgatggaagagctaagatactcaacaatggagaacttcttagtttgaatcttgataaggcttctggttcaggatttcaatccaagaatgaatttctttttggccaaatcgatatgcaactcaagcttgttcctggtaattctgcaggaactgttacagcttattatgtaagtatttttttaatagttaaagataatattcatttaatcaaaattcattagacactataaatttcaataattaacgtgaatttttttgacaatatataaatttcaacaaataatatatttgaaaaaccaaaagtaattgggtgcctattgagttcaatttaggattttattaccgtcaaatattaatttaaatatactaataaaaacatgacacacggctaataacttaatattacacggccaggtacagagttctataacttaagtactattaccgtcaaaaattaaacttaagtatatgcttctaaccgaaagttaaacttaagtacttatactaggggtgttcatccaatccaatctgcactattttgctcatagtgcatccgatccgcactaagtgcagatttcaatttttggatccaatccaatccgcacaatagttcaaatctaatccaatccaatccacaaaagtacggattggatcggttactttggattggttactttttaatattaaattatttaatatttatgaaaaatatatttttttttcacataactagcaacaaaataaaataaattatagtcattttatgtctccaacaatacattaaaataaataaaataataaataacaaatttaaaggaacaaaaaaaattatgtataaaaaatatttaattttattttaaattgtatgttaaaaaaaaatataaaaatagaatatacatttgatcatttaagttttgcaatataatggtattatatgcattagacttttaaattactat

SEQ ID NO: 301718 - DNA, 5842 bp, Cannabis indica
tatatatattatatatatatgtgcattaatattgtagcgtctctggtctatctatgtactttgccatgacatatcttatggcaaatagtgtatatgtttttctagattgctatgaacagaacaagaaaaattacttctttaaattagaattgctttattgtttagcttggttaagaatatatgaaatttataccattagcatgttcaaacttattacattttgaaattcaattcaatttgctttatcattttttagtctcagttagatttccaaagattgaattttgtttggtctgtctatatgttttcattttcaaattattggattgagtttggttgtttattgttggatagtttatgcttatggtttctgtctgtaaactttgcaatgttttgtttttcctatcaaatgcatcatttatgtcttaattgattttctctaggtgattcttgttatgatttttaacatttttcttaggtaattgtttgtggtctatatatgctaagatatgattatgtgatagtaattgaggttagacagttgagagtaaattagaagattactaatatctctatgtctataagtgaattctcaaatttcttttcaacattggctcttttatactctgattccagttatctaattatattctgctctgtgttttggttgaagagcaggtttatattctgtctttatagattgatggggcagaggaatatgctctgcattaatcagatgattgaaatggatcaacaagggcaaggcggctatttctatcctggtcccgccatcaatttagggcatacaccaaactttcaacagccaaacgttcacacaatggagacagcttcacggagtagctcaaatttcgataaccaatacgctcccgaacgatacgacaatggagttttttatgggatgacacagtacaatggcgtgcagcatcaccatcaccgtaatcttgatctgaatgttgctgctcccgccaatgtctactacacatttatgccaccatctagtggtggtggggtgataccggttcctctaaatcacggcacctctgatcaaatgcaggcttcttctagtaattatggagtaggcggcggcggtggtaatggcatttctacagatgagtatggaagaactaatcacttcattgatggtgctagaggaggtccgtgcaagagaaaacttcctgaagttgtccctggaaattaccaacattttaatgcctctgcaacctcgagttcttcagttcctcctttgaacgcaagatatcctggcggggttgctgtctctgatccatcaccatttcctcctcctcaatacataggaaatggggttcagccaataatggaagtaggacctcagaatggttcaaggaacagattggttgcagccgggatggagtgtgctgtgatgcatgatcataacaaccttaaccatcttgctcaaggaaactatgctggtcagcactttcagccaccatctggcatatggttggaacaacacttaagcaacaattccagtgatggaagtgctcaagcttggaaccaggccccgaatttatccttaatgcatggtaactcattgttccgttataatctcccattcaattttgattctaatttggtttatcaaagctaaccatcttcttttctctattgttttacagggagcaatctaggatatcatgaagcagcagctaacactagaaattcccagagtgtaagacagcctccatcagtaaaccaccaccatcacactcaccatgcattaccgccaccaatgatgggaccgagaaatagtaactcgactgcagcttcacacagattttccgcgaattcctctcgcagcaatacaactgctccaccaactggcatcaggatataccgaccacatcgaggagtcactcctgataacaacgctttgagacagcaacatcttcctcatttgagatttctacatgctgatgtaattttcttcaaacttggttatcatccatgaactatatatgtattcattgaactatgagtgatttctcattgttacttctttttatcaccgttacaggaggttgccatactcgagcttccagacttatacgaagtaggagaatttcccgatcaccacagtgacatgcgtttggatattgaagacatgtcctacgaggtaaagatgcatcggtgttcatattgttttttctttcctaatcatgaagatgaacacaactcaacccgttatactcaaaaatatgtgcaggaacttcttgcattaggggagaggattggtaatgttaataccgggctatcagaggacgccattacaagccaattaaagacaaagccatatttatcatctagaatgagattgaacttagaagaagctgattgtcagtataaggaagatgattgttgcattatatgccaggtaaaaactacacactagttatgattttttttttgtatatgctcttaactttctcaatctataaactaataatatgttttgttttgggatttttcataggatgagtataagaatcttgagaagattggaatcctcaattgtggacatgagtaccatgcagagtgtttgaagagatggttacttataaagaatgtgtgccctgtgtgcaaatctgaagctttgagcacttgaaggagagtttgtgatgatgatgattatgatgatgatgatgatgattatgtgtatagggggggttgactaaatgggggtgagctaaaaattgaaaagacttgtccttttttgtgtcctctttcataattttagttaatttgttaaatatataacagtgttgatacttttgtaatgcaacacttttgcatatacatataatgagtctattctatgaccaacaggaacatgtccagctcatttattttgttggttgccaaaaacatttgtacttgtatctatccaagttgtacagatttttttttctcattctttatttgtctttttatgctatttgttgatctatttgtgttttgttggaaaggaatgatattttttgtttgtgatattctagcttaagttgttctttcacaagaaaagcacatggtaggaaaagaagaaactttagtctattggggtgagacaaagtaactttagtcatatggggggccatgtgagatgttcaaggagagtacattgtgtttctctttgaaagggaaaataaatcaaatatgagtctttgttaggtgttttagattgaacaattctattccaggatgaatctctataagttcatcttcttcgagttgtaatactcgtttgtagggttttagagaggttgagaaagacgagtttagttgaatcgaggtattttataatgaattttgctaatgttattctcttttaggttatgtttgaaagttgaattttattgaaaaagaaaaaggtaaagacgagttaggttttcggagagatcgaggaagatgagtttagttgaattcaggtattctagctaaggttcacaagaaaagcacattggtaggaaaagaagaaactttagtctattggggtgagataaagaaactttagtcatatgggggccatgtgagatgtttaaggagggaacatattttttctctttaaaaggagaaataaatcaaatatgagtcttgcttgggagttttagagtgaaaaattctattccaagatgaatctctacaagttcatcttctttgagttataatactcgtgtgtagagtttcgaagagattaagaaagacgagtttagtaatcgaggtattttataatgaattttgctaattggtttttttttgttagattatatttgaaaattaaattttgatgataaagacaaaaagtaaaggcgagttaggtttttggagagcttgaggaagatgagtttagttgaattgaggtattatagcttaggttattctttcacaagaaaagcacattggtaggaaaataaaaaactttagtctattggggtgagacaaaggaactttagtcatatgcgggccacgtgagatgtttaaggagagctcatattgtttctctttgaaagggaaaataaatcaaatacaagtctttcttgggagttttagagtgaacaattctattccaagatgaatttgtacaagttcatcttcttcgagttttaatactcgtgtgtagggttttggagagattgagaaagatgaatttagttgaatcgaggtattttataatgaattttcctaatgtttttcttttttaggttatgtttgaaagttgaattttagtgaaaaagaaaaaaaaaaggtaaagacgagttagatttaaggggaacacacattgtttatctttaaaaggggaaataaatcaaatataagtctttgttgggagctttagagtaaaaaattctattccaagatgaatctctataagttcatcttcttcgagttctaatactcgtgtgtatgtagggttttagagaggttgaggaaggcgagttaagttgaatcgagtattttataatgaattttgctaatgcttgttttaggttatgtttgaaagttgaattttggtgaaatagaaaaaggcaaagatgagttaggtttttggatacaagtttagttgaattgaggtattttataatgaattttgttaatgtttttctctttaggttatgtttgaaggttgaattttggtaaaaaaaagttaagaaaattgtagaaaataaaataaatcaaatttttatgttcgatatgaaattttttgttgaatctttttattttcttttttttttcgtactttttcttgtgaattatttatttttttacacaaaaatccaatttccaaatttaggtttttagaaaattgggttagaggaaagatgtgttggtagattattcatagaaattttattttatgatactttcaaatatataagataatctcccacatagtttaacataatacaaaatttatgcttattattgcatagttatgttctactctgggtaaggctttttagcctataatttagttgtatcaatattttaaagaagtgttgttatttttaattttttaatatttatttttccaactaacaaattaatgagattagaatatttgatatcatcccaataaaaaaaggtctgtgcttgccttgaaggcaagattatatcttgatttagagaaaaagagcatgatgttgatttatcaaaaaattaaaataaataaataaatttaatattaaaatataattactaattaatatatttacacacaaccaaacatatttcctttttcagcataaatctctctctaagaataataataataaaacaaaagatgattatatgttaagaatggaatcattccaatctttatgccaaaaagaaagagagaaaaaggtatataattatttcaattagaccccctttggaattgtgaaaagatacttggattttattaccaattgatattagaaaaatcttccacaagaatattttgaagaaaaatttatataaggattcattaaaaaaaaaaaaaagaaagaaagaaagaaaggtgggattacatattttgttaaaattaatctactacttaagtttggaaaattttacaatgcaccctatacaaaagatgttcctcatgcacttctatctgttttagtatttgagaaacttttttagtttttttttatatataatcgtttacattatagttatgtgattctgcaaattttgagaactcaaaaaaatttaacataccgaaaacatggtttaaatagtctattacatgcgtgtgactcttttattttaggggctttttcatttttacacttcaaaccagttt

SEQ ID NO: 301719 - DNA, 1746 bp, Cannabis indica
taaataactaaaaaaaaaaaaaaaaaaaagatggcttctttttactagtgattttcattacaatttctcacccaagcaaagaaaaaacagagcatgaaaacgtaattagaaattataatcaccgttatctggccgaacggactcgaagggcaatgagaatccgatcaacggttctgatcaaagtaggaactacgactcgtctgaagaaaccgagacaagccgtgacggggttgtgaacggcggcgagcctgacccagatacggccgaggaagtgtgagccgttggagctgggagaggaagacatgggctgtaggtaagcccaagctgcctgcttcacgagccggttgcggatagagatctcgtagccggaggaaactgccgtcggcgagttgatcccgacggcggaaggggaaaagggtaagaggtcttttaatgaagtgtaaggttgggaagaagaagaagagttcttgaaagagatgagctcgaagtctagagatggcggcggatgagccgcgtaaccatttcggttttggattgggaagcttgagctgtggcgagacttggcggcggcggcggctggaagagagagagtggctgggatgactgaagaagtggaaatagagttacggcggcggagatttgaagttggtggtggtagctcggcggagttggccatggctgtgtgattagttattttaattatatttaaattttcgagaagagagaaagagacgataacaaaaagccaagaaattaaggaaaaaagaaactatgacataacaaagaatgcttttggttttcgtttggctttcttatttttggtttttgcttgtttttcaattattattatgccaatttgtttttggttgaatgttgtctttatctctatattttatttatttatatattgaaaaagaaaaaggaagaaggctataattcacgtggatttcaaatgtactacatttcaacgaaagctcctaattgttttatttatgtatcattattttctatttttaattgaccaattctgtatgtttattatatatgcatatacttttggatatgttttggtaaatgggaaagggagaggaagaaatggtacgaggcaatagtggagaaaataaattaatgtaactttattcgctttgtcttgttgttttagaagaaaaagaaatgaagtgactgaaattgctaaattaagttctttaaattcagtgctaacaaatgtttattataagagtgtgagaagtctacgtgttctgcatttgaatatttggtaaattaatgtttattgttatatatcttcaactccacaatgttatatactattattattttgaaagggatccacaaaaattagatttttatttcatttttatatttatattaatatagtactaaaatattcccatgagtaaatcataacaattgctactgggtaagttattttttaaattataggcaattacatatttattgtaacgagtttgtccatagtatgtaaaacattttgcctataatttaataaaatggtagttttggtgtaagcctaataaaataagttccaatatttgtttttccctttatcttggacttggagtataatgtggcctaacaaaatgacaatgttagacaatttatatgtataaactgaaatatatatgtttaagtataaagtgcggaattaatcaaacatatatacactatgaataaggatcgaaatacctccagccattgaatcttgag

SEQ ID NO: 301720 - DNA, 1704 bp, Cannabis indica
tggtatcagagcaggaaagataaactttcctgtccgatccaactcttccagccatagtcgtgttcttcttctccgacgaagctgtgcattcctccgctgcatcttcctcttctttcttacctaatctcaatcgtattcttctcgattgaagttctgcaatgtctttagattccagtcaatcgaaccaaggagctcaagatgagtctacacttggaaccaacatcggagataaccagaatccatctctgcaaatctctgcttcaagaaatcctctcgaagaccctgctaacccttacttccttcaccatggagacaatccaggacacactctcgtctctcagccactcactggacaggacaactatgtatcttggagcagggctatgcaactcgccatctcagtaaagaacaagattggattcttggatggttctatttctaaaccttctccctctgattcaattctttataatgcctggataagaaataacaatattgttatttcatggattctgaattccgtgtccaaagaaatatcatcaagcattttatacgatgaaaatgcctctgccatttggaatgacctcaaggtcagattccaccaaagaaatggcccccatatatacaatttaagaaaagatttgatgaatctcaagcaagataatcaatctgttgggatgtattttacaaaacttaaaactatatgggaagaactaaccaatttcaggccatcttgtacttgcaatgggtgcacttgtggtggagtcaaaagacttcaagatcattaccatatggaacacatcatgtcgtttttaatggggctctctgattctttttctcaagtcagaggcagcattctattaatggatccactacctgaagtgaaccgtgtgtttcacctcgtcacccaagaagaacatcagaaaggtactggttttaactccaataatcctaaccctgccatggctttttcttttcaagacaataagaacacagggcagaaaacagacaatcaaatcccaaagaatcaacctcctaaaagaaacagacccttctgtactcactgcaacatcttaggacacacaatcgagagatgttacaaaattcatggttatccacctggtttcaacaaaaataaatccaaagaagccagtgcaaatcaaattctaacaactgatgagaatagtggcagccaacaagaaaatcatgctttactccctcaactaaccacaactcaataccaacagttgctcaatcttcttgcatctcaacaatcggggataaacactacagaaccaagcacctcatcaggtaattcaggtatcgttctctctcatatttctgaaactcctttggacaattcatggattatggactctggagcaacaaggcacatttgctctaatataaaactctttcaaagcatttttaaggtacctgccaccaaattaattttgcctaacagtacatgtttttatgttaatcaaagtggaacagtggtgttaaatgataaaatcattctcactgatgttctatatgcccctaattttaaatacaatattatttctactagttatataactaaaaatgctcctatttctgtgaagttcaatgctgatgacttttacattcaggacaaaatcaaccagaggatgattggaaaaggtagcaatgtcaaagatctctacatccttgatactgcac

SEQ ID NO: 301721 - DNA, 2459 bp, Cannabis indica
atatggcatatcaaataccataacaaaaacctaaaaacaaaaaaataccaagcttctatactcaacttcaatgttggatatagagattgtatgctattttttttgattgccaggttataatttggaccaagaaagacagcaaaccctgaagtggatcttctgtcatcatgatcggttgcccaatttgcatcacaaaaagctttcaattcaatggaatcaggtcttttaaggtgcaatccatgtttcattgttccttaatgtatctcaaaattcttttgatagccagccaatgaacttgaagagaattgtgcatgaattgacacactttattcacactgaaagcaattttaggtatggtgttgctaaggtattgcaaagctcccataattgatctatacaagtgtacatcctccaccagatcactttcataggcaaataatctttgtccattttgtcattggagttgagttagggttggctccttgtatttttgctttgcacatcaagcctttcacttacttagcctgagttaagatcatcccttcatgtgtatctttcacttcaatctctagcaaataacttaagtttcctaaatttttaagtgacaattcttgattaagcctgataaagtgttgaaatgacttattgattgctgccaataattaatatgtcatcatcatacacaagaataatgactgaatgttgaggtgtatgttgagtgaacatttagtgatcaattttagaagagacaaaaccaaagctgagtagacattgttgtaacctttcaaactaggctctaggagcctgttttagaccataaaaggccttgtggagcttgcacactaaattgctgctatgattgatttcaaagctaaagggttgtcatctatacttcctcttggagtgaaccattaaaaaatgcattgtttacatctaatttcctaacacactatccttttgataaggcaagagtaagaacaactcgaattgtaacaagcttaacaacatgactgaaagtctttgtgaatcagagccagactattgatggaagcctttggcaactaatctagctttgtatttgttgattgtgccatcagagttctctttaaccctgtaaacccactttcatcctatagttttcctcctaggaggaagaggaacaactttccaggtggcatttctagcaagggcaagaacttcatttgccatagcttggttccattaaatactttgcaaagcttgagcaagtgcaagaggagtgttggagacaataaaggtcttgggtttgtagtgttagaacttattttacgaggatcttaatttattgacacgtatgtttgattatgacataataatctaacagtaaaattcataaaatgataaataacatatgaagtttaggattccttacattagttgcagcgaaaattagtgactccttctatttaatcactctaacccttaattccctttctgtagtagggtattgtcaagtgatgaacctaaaatgcttccttaaactcgaagagcgacaaatctacacgatcttccataaagatctgagtaccaccttgaatagtgtggtgttaggtttatttttatgcattttttagagtttattttagtatgtgttttagtatttttatcactttattgttcagatttatgcttagtttttgtttttatttgtttttcaagataaatgttgggagatctttgtttttggtattttggtattcttcaagcctttttgagacaaaaataggtaattttaacgacaaagtaaactccaataatacttagttggatttcttgttgcctcaaattggtcaaagtttgcatttttagctccaaaattcttggtctatagtcaagagtgggtactttctgaaaataaagtgaaaaatcaagaaaagaggaaactggccatcaaggccgtgacattccttcagttcttggaaaaaaaaaaggaaattgggaaaccaaaaatcagcgaagaatttgtaaagtggaaactcgcttggaaggctatggccttgctgattttggaaaacttgatttttgcattataaaaagagggttgatgtcaagctttgagaccattcaaaaatttaaaaaattctgagcatagaaggaaggataagagcagaaggtactattgaaggactccaaacagtgttctatctcctttatctctattttttatgtttttaattgaatttctattattttaaaatgacttctagtagctaaatttcttttaaggattattatgtgaaccatttgaatttattttatagattattataattgttcaatttcttcttcttcttcttctcttaattcaattccatacaatctgttttaattttataattatttactggtcattagggccggcccaagcattttgggggccttgtgcgaaattttaaaattgggccctttaaaaaaaaaaa

SEQ ID NO: 301722 - DNA, 3317 bp, Cannabis indica
ttcagcagctacggaacatgtttctttacaagacaaatagcaacaaagatcagaatcatcagaagaagttgctgccacagatttaaatccacactctctgcagacaaaaagaaacaaccaactctgccatttacattccttctaatagaacaccaaaatagatttttgtccggtaaaatgcttggctcggaacttctattaaactaggcatgttcccatgtcaaccaacttatttctaagtgcccatgtgcagccaaaaactattgttttttcatttttacccacaataaatatctctacacagaaatacaccaagcaaacataagactgttcttttcagcctcaggtgtcattatctaactggataatcaggggaatcacacgaggcacaaggtcttggtaacagttgagatttactattgtgctattataagtagcattattaaatgatataaagtaaaattccatttgaaatttaccttgctatgttcaatacactcatgagaggcaaagaaaggtaattagatgggaatgctggtataatagaatctgaggtgggtgctagaaaaggttcaagccagtggcgcccccacatcctagctacatcaacaggaagccacctgtagaaatcgagtgttcagatttagaatagtcattcatgtaaattatacaaattaaaatagtgaaccacaaagattctcacccattgcaattcaaagttctcctactagcacctcttgcaaggagaacctacagaatcaagaagacaatcagtttagattcagaatgacccaaactttactcagaatccaccataatttatataattcttgcctgacaactttttaaattccccccacaggcagcataatgcagcggggtgcttccagctcctacagtcattaactttaacatttaagtttgataggaaaatcatcaaatagttattcatcaattaatattccagctaactgatgaaaatcaaacctatcaaatccacggatgttccataatgaaatgttacagccgacacattggcatgaaggtcgagtaacagctgaacacagtcaaaatacccgttcaaagcagccatatgaagagcagtgacaccaccatctgctgccttattaacaaacttggacaacgcactgcactggaataaattaaataaatagcaggaataaaaagataaagacaaaataatttgtaaccaccaaacctacacaaagtagtattagtttatttctcaagaataaacataattattagaggattaagctgccttcatttatacagttaggcattagccaaaaagaagaatattctaacagattgttttattattattttatatggggtcctacaattgaacagtacaatctttgagaggcagagataggaaacagtaacaaattactaggtagatccacatgagtaatcgaaccccaaatttcatggaagctaccatttaattatgcagctctgaactcaaaccagcatgaagtaatacaagttatacaactaccatgttcaatacattaactactaacattccatttcaataacctattgaaactattataaaattatcaagcttaagacaataataaaacaagtcttatacctttgagaactcttgatccttacattggcatcatcaagctgttcgctgtctgactgagtacatatggattcatttggagcacttggaacaaaatcagccacaagaagccttatacatcttacatggccatttacggcagcaaaatgaagtgatgttctgccactaaggtagtctgctctggtaacctgtaggaaagacataaaagagaaaaagaaatcacacaataaaaagctaatagatataattttaggagatcagatcaagatagacatgttcttaagtctgtgaaagagcttgaaataatgaaaatcataataaaaactactctgcaactcacattgcatctgaagagcaaaagagtcagtacaacttcccagtgcccatatcgacacgcttgcattaacgctgtctttacacaacataaaataatacaatgaatacagaattagtctcaatgcagatccacgaaattattgtttactttttctttgaaaatataaaaaacagtgatgaacaacaaaagacataaaaacaacccagaatcctaaagatcaaaagcaccaaaatctcgtacctgcccacaataatttctggaattcacatcagctccattctcaagtaacagagaaacaatctaacaaaattcccaaaaaaagaaaacaaataaataacagcaaaattataactcggaggaaaaaggaaaactcgaatgaaacccaagaaaatataatacctcgttgtggcctttcgcagctgcaaaatggagaggggaattaagaccaccgaaagtggaatacttggcgagacaaggattacaatcgagaagcatcttcgcctccactacatcgccatctctggccgccgataccaacctctcgccggaggccgagcacccaaatgaatttcccattttatccttcccttcactcactctccgacaacgccttacggtgaaaatctcgtacggcagaagaatgttaggtcaaccgttccgaacaaacaaacacggggtaatataaacaagctaataaccgcgtgtgggtctgtgtatatatataatatataaatatatatatatataaatactgtagtggagtggagtagggctggggaaggaaatcaagaagtttgggtttggaatttagctatgaaaaagggaagtggggggcagaggtgacgtggcaacttggtttctgtttctgagtctccctggtcttgactttttaccagagaaatcggagatggcgtgatttgggtttcgattagctccaatttcagagaagagtgagaaatataattattaattaataaataaatatatgcaagtccaactttactttactttacctttctttgctttcttcttctccaatagccagactagtggcttggctttggctacctaattcataaaatagtaaaaaatataagaataaaataaaataaagacgtaaagaacagacttttcaatttcattgtgtaattatgaatatggtagatctataggaggactgtctgaatgataattaatgatcacatatatttcgtttcagtctcacatcaaaccattttaaaacacagttgtctcctctccctaaagaatgcggtatgtttgaatatttttgaaaatgaaagtcatcatttattaaaccaataattccgttaccaagctccgtaacagctcaaccggaac

SEQ ID NO: 301723 - DNA, 3361 bp, Cannabis indica
tcctaaaaaaaaaaaaaaccagttactcaatttttacatgatattggaactttaattcgataatcatgttccatatactgcactggttaactcagctatggtaatttagtattgtatgttcttttttttttaaacaagaagtatttagtttttgatattcagaatattaaattttaaaataaaataaataaatgtaatgcatttgagtcattcacgtgtttatatttatgataagtcaacggaagtggtagtaacggtgtaagataattgtaatattaggtatgtttgcctccaaaaataaacattaagtatttaagtgtataaaatctgaaacattaagtatttataccgtaatttaccctattatgtattatattaaatttgtcacaatttttcaatttgacataactttttaacatgtatattaaatttaagacaacttttaattactattgaagtagtattttttcatgctaaaatataatgatatataccatcttcttaacatcattggagatgctctaataatgtttgccattccagtcaactttagatctcagtccaaattaataatgtagagtatagaaagagatagtggactagtattgatataatgtagcttaaattaatttccattatttttttaagtattggcaaagaaaaaataataatagtcgcgtggtactcgaacgaccaacatacaactgattattttatcaatgccgttgctaaaatgtagagaataattttagtcaacgagatagttaattttaattttgaccaaatataatattaattttttattttaattatgtaatctattattttatttaagaaatttatcatattacgatattaatgagttttaattgtgaatttttttaatatttgtttaatttcgatttacttttttttaatggaaatagaacatattatgaaagaaaattgtctatcagatctaaacatagtaagaataatacttaaaaactcaacgtggaaacgaaccggaatagttattaaattattaataagtctataattttactttatactactaaaaaataactttttacttccgttgtaaaatgatacataaatattttgtgacggttgtcactataatattttttttcttttagtcacaaccagaaccggccttgaaattcagtgagctaaaattatttttgggcccttatttagaaaaaaaatggtatttttcaaaatcagcaaaaaaattgtgtaattttaaaaggagaatttattttttgggccctggactaagtgggccataggcacaggcctagccggcctatgcccagggtcggccctggtcacaacaaagcttatgactaaaagtaaaaaagttgtgactaattataaatcatcattcttatgttgtgactaaaaaatttataactaaaagtattaatcacaaaaattatagtttattgtgactaaatgtgtttttagtcacaatagttattgttactaatagtaaattagtaacaacttgtagctaaatactatgttttagtcacaaaaaatttatgttgtgactagaaaattattactaaaagtagctatttttcgtagtgtgtctaaatcgacgtaataacggcagacgcaaatagtcaagttatttgcttcatttctaaaccgacgcaaactgtttttacttcggttgagaactgaaacaaaagtatgatctattagcgccagtcttaaatgaagcaagaaacttagcttcgaattgtaaccgaagctaatttgattattgtaaactttttaaggtaaaatagaaggaatactcatgggcataatatgttgaatcaatatatgatgatcatgagacttcaacccgcctaaaataaattttttttgtatctaccaaagccaagacatttgaggaatacccttcaggtactttcacttgagatgaactacagaaagatcatttttcttccttagttagggcataccaggccagaggtataaaagttcgttcaccacccacttttggatgtaaattttctctaatccccaacttttttagatctagacaggatttaattccattcttactccgaccaagaatactgaacaatgtattaatcaagttatcagagtcatttctctcaatatgcatcacatctaagttatgacgctaaaccaaatgctcccaatactcaagctcaaaaaatattgacttattcttccacgtcccatgaggttcatttgttacatctttacttcctccttttcgttactttgagtttgttttttttttactttccaagcttgaactaaactttattcaatttttctaccaattgttccccacttagaggtgggggagacatttcaaattcttacttaccattaaatacctttttccaagtccaaaatatattttttggtggcaaaaactttcagtgcccatgtaaaaaaaacttctagagtgatttaaatactgagaacatgttttctatcttcacagataggacatgccttatatcctttcacactatattcataaatattcacgaaagtaggaaaattattaatagtccacaataatatggctctaagattgaatgaactattcctatgagcatgatatgcatcaacaccgtcataccatagtttacttagatcatcaataagaggatctaagtatagatcaatatcaataccaggctctgaagggcctgatatcaacagtgtcaacattgtgaacttcctcttcatcaccagccaaggcaacaaattatacatcacaagtaaaactagccagcaactatacttactgctaagggaagtatgtggattgataccgtctgccaaagaccaagatggatatttctaggttcattggcaaagtcgagccatctcgcatcaatagatttccatgcgggtgagtcagtaggatgtctcatcttgccatctttcactctatcgctggcatgccagattaaattttcggcatgatccgtatttcaaaagaaccgaaccaaacgaggtatgggcggtaggtaccacaatacttttgctggaatacccttctttacctcattagaaatttttcttcttttgccacatagactcaccgcatgttggacaagatcgaggtccacaaatttctttcgatataggatacaatcattaggacatgcatgcatattctcacactgcaagcctaacgaacacaatatcttttttgcctcatagaaagacaaaggcacctcattaccttcaggcaataattttcctaagaaagctagtaaatttgtcaaactcttatcactccatccgtgttttggttttaaattgtatagtctaatatgttaggttttatgcccta

SEQ ID NO: 301724 - DNA, 2364 bp, Cannabis indica
tttttttctaattataaataattcgtaaacatgacacgtgtcccacttcagaccgaatttatcagaatttcatgtgttatttcacagatctttttctgctctctttctttccttttttattttcattttatttcatttcattttgtagctattccccactgaaaatttcatcgatctctgaaacaaaatttccattctcattttctctgacttttcattcattcctttcccgtttatatctccaattacatccaccttcttcttcaaggaatcaaaatttacttttcgaagatctagggttttctctcccccattccacacctcaagaggtttggccattggagtgaacgctcttgttttcggatttgcaaatctagggttcgttgatctagtatatgtgtttcgtcatccatgagtatggaaatcgtcggggatgcggcgtcgttcgacgccgacctgttacagctctctgaggtctctcctttggccatgaaagcgaatccaggttttgtcgatactatttttgagcattggcttgcgcttcccgacactaatcgtctggtattttctatttcatattagtattgtgttgttttgaatctcgcaattcgaattaatttataggttatctgttttttgttatgttttttctttcctcgtttgattaattttttttatatgttttgtcaattctgtgggaagattattgtattgaaatcaaagaaggctttttggttgatttattttctttagcctgatgttgatatgctataaattgattcagactcgattctgttgattattgaaagtggtgattgttgttgaatgggtatatgtataaacaagacagaggagaaaaaaatatacttttggccgattactctgaatcgtgtttgtattaattctttagaattctcgtctttatctctcttaagtatttatcaatatattaattctactcaattctttatgaaagaaaacgaaattattagcaatcttggaaagaattattcttttttaaataaatattttggaaggcggattattcttgtccaatatctgtattttaacgagatttattttgcaaagccaataaagtggagagtgtgctaattgtctgttttcaacattttcgagtgtaggtgacgacattgctcaatgaagctaaatcaggtggtccgttgaatgtgcctggaaactcttctagtccacatgccacttctagcaattctttgccttccatgtttcctgcaggaagtgctcctcctctatcacctagaagtacatctggctctcctcgcataatgaaacagaggactggcccttctaatctgggttctccattgaaactaattagcgagccagttaaagaattgatacctcaggttcgagaagaattcttataattttctgtaataagggagccttttgctacgtgtttcattttttttttatttatttgttgagaattgggggagagggactcaactcactatcttttgacttgattactgaactgtgtttgattggttctaatatttgtgcttttgtggcttgcagttttactttcaaaatggtcgtccacctgcaaacgagttaaaagaacaatgcttgtttaggattaatcagttcttctatggtcacttggatggattacagattagtggtgagataaacttgtgatataaggataagtaatggtctgactccaatagcggattttttaatttctgttttcatttcagaatttaaatctgttacgaaggaaatttgcaagctgccatcgtttttctctacggctcttttcaaaaagattgatgttagcaatgctggttatgtaacaaggtatttgaacattttttggtttcggaacattgtgagagtccttttacattgtacttgcataagagtctttgtggtggatgttacactgttgctttctatttcattggtctatctttttgcttttctaccaagaagaaacaccaacattcattttttttttaatatgttagatggcctcaagtcatcttgcttcccacatccattcaaacagtaaatttcatgtatctcattcttataatgaataggaaatcatccttctttttcttttcaaaaatatttgttggggagcatcacttttatttacagtatacttaccaggggagagaattggtggacctcatcactctttagaaatttgtgttatggtgttgtgcctatataatttgcaaactttgagtttttgagatcaacttttttaggtcatatattggctgaatgatctcttttgtattacagttcttgcatattatggaagattttgttatgtggatcaaatatagctttagtaaattagagaaa

SEQ ID NO: 301725 - DNA, 2165 bp, Cannabis indica
tatttgtattttttaattttcatatatcgtttaaatgggtgaatatacacctcaagtacacatgtttatataatttgaattttctcaccaaataaatagttaagtgaatgattacaaaaagaaaaaaattgcagaaaaaattatttcaaattaccacaaaattttctataacaaaaaaatttgaagagcaaatataatttcgtgatcgtaatactcacttgtagaatattgtttaatcaacatgtgataatcgtgagattctaatttgaacaaatttaatttgacatatctacctaaggcttaagaatatccatcaggtacttacacacaaaacatacaaaacaaaaaattacacaaagaacatttttcttcttattcatatccatgcatggctttcatcaccttttcgtcagactgagctcggccccttcgtcttccttgagatcttcaatttcttaggtttcatcagtttccctcccatggtagtagcatctctatgagagatgaaaaaacttatctacaatttaaggaaatttgttgcaaatgggtgtatagaattgaagaaaatcctaatgaaactataaacaaatacaaagccaggttgattgtcataggcttttactaacaacctggttttaattacactgaaacctttagtccagttgttagcaaaccagttgcaataagggttgtttctcacagtagctctctccaaaggttggcatgtaaggcagttggatgtcaacaatacatttttgaaggaggtttgaaggaataattctatgtgacacaaccttcttgctttgaggttacaactaagcctaatttaatctgcaagtttcataaggctttctatggtttgaaacaggcacctaaggcctagtttgagatgtcatcaacatagactaatacaagagtattagaagtagaagtgtggtaaataaacagagagtgataaaattttgaggagtaaggtaattggatcaacagtgtctttttgaatgaggtgttgaataaagaagtctatttgacacaacttcttagctttgagattacaactgagcctaatttagtctggaagttgcataaggctctcaatggtttgaaacaggcacccatgtttgagatattacacaactgtcttgtctcatttggtttcctctcctcaaaatctgatcattctctatttatttaccacacttctacttgtattactcttgtattagtctattttggtcacagatagtgattctgaggtggtgaattcactcatttttgctctgcatcaaaaattttctctcaaagatcttggggagctcaaatacttctttggtattgaggttactccaaacaacaatggtcttttaatgctagaggccatatatgctcgtgatttactatgcagagcaaatatgcatgattttaactatcatcacccctatgataagtggtcaaagatatctgctaatggcaatgatgcattgaaaatccacagatgtacaaatagtacatcaccatcaccagacctaaactgtcatacattgtcaacaaatatgtaagtttatgcaaaaaccactccaaactcattggcttgtaatcaagcgcattctgagatatgtaatggtactgtcaactatgtcagcctttaacttaataagcctctgaattatgaagttaaggccttttgtgatgctaattgggctactgatataaatgataaaaggtctacctctagctttgcaataatttttggccccaatctcattgtgttatacccatccttcaagcagcaatacggtcatgacacgtgtacaaaagctagaaaatgaaccagctcggatattgaagaattaaatacgttatttaaatcacctcggaaaagactagtcacgattataaattgaagtctttccttaggtgactaaggataagtcaaaataatagctcactagtagaccaggaaaatcaataacaaccatcttggaaaaaacaaagtacacgaaaaacaagacaaggaactttgattggtcaaacaagatagtataaaggattttgacctaaggatggataaacaatacaatttgaagagcttacttaaaagcttatataagaattaccaaaaacttcatcatgaatgatcaatgcgagaagaatgttcaaacatg

SEQ ID NO: 301726 - DNA, 2138 bp, Cannabis indica
tgctacttttttttttcttcttttgtcccttcttattatttcgtagaaacacaccataaaagtctttaggaccattttatcatttttagtgatacacttgtgccatatttaacatgttttggtgtggtagaccctctattggtggccgagtaagattccttattctaattcaagtcattaaagcagggacaagtatgcaacaaggtcaacatttgattagaatttgtgaccaactaagctgagttgtgatgatgactattatatgtgtgtggtctattgcattatttcttttcatgagtgtgaaattgaaacaaaacatcctgaaattgaggtaatgatgtaacatacaatattgcagcaaagaacattccagaaccagaatggcctatttttcattcttctcttttttgggggaaattaaccatatgggcctgtgatttaaactaaatgggcccccaaaagcacttgtgttttagaattttgacatcgatgttgctatagttgatttatgttatagttttgggtttgaatgattaagagagaaataattgttaatattcaactaattgatatgtgtcggcataataaaaaatgaaagtaaaggaaataagtgtttctaaaatcaagtgttcaaaccgaatatctcacacaaaacagaaataataaaacaaatattgggttcatctcaacggtaacaccacaaatttttataaggggtccctaaccacaaaagaaattgggtatattaaccacattaagaattaactacattgaaaccagattggatcaaattcaatttggaaaaacattaaacaaggcagagcagatctgatccaaaattcaataaatcgaaaaaattaaacggggcggaacagatctaatctaaaattcaataaatattagaatattttagatcgaaagtgatccgttagatcggggcttcaacctgctccaactaaataatctttttgacatgcctaacctggagtaaaggttcataaatgaacaaggtggattataaacaatagctttgatgtagacaatttcagctattatattagtgaatttaaaaaaactttaaatctcactgaatgtaagtataatttactagttgaagcattgattggggtaaatttgttgtatgatagagtttgataaaggtttgatcatttaagtaattttagaaaacattttatttcttgatgtagatatattaaaaaaaaaccttaatgcaagacttggaccccggacttggagcccctaggacctgaattggacccgcccaagattcaaactcggacccggacccaggcccaggactcgggaccggaacaaggacccaaactaaggaccggactcggacacccggacttggacccagattcggacttgaacctaggacccaaacccagactcaaattttggaaaccagatccgaactcaggattggacctgaatgcaagactcgagacccaaacttgtggtcgggacctggacccaagacccgaactcgggaccaaacctagtcctgaacccgggacctggacccagacctaaacctaaatatggaccaggactcaaatccaaatccagacccgaacccggatccggacctagacccaaaccacggacctgaacccgaacccggatccggacctagacacaaaccacggacctgaacccgaacccgaactcatatccgaacccaggactcaggactcgagacgtggactcggacccaaactcaatctattaatacaagtcaatatcaaatataatattgtattaaataatactaatacaaaattaaaatagatataaagttataaatttagatataaaattaaaattctttttttaaaaataagtcgggtcaaatctgatccgatccaaatatgtgatctagcagagcgaggcggggcaaatccttacatgatctaattcaggtcagatcatagccgaatcagatccgaatggatttatttacactcctactccagctaaaatcactctttttagttcttctactaaacaaggttttatttttgcatatgcttcttcttcttctgtcttagtgtttgtccaacacacaagaaagttactcagtgttgcgatattttgcacacgcaagtgtacgt

SEQ ID NO: 301727 - DNA, 1299 bp, Cannabis indica
tgcccaaaaataaaaccgtgaggactaaggcccaaagcatacaatatcataccaagagtggagatggatggtgtctgacattccaaaaaatagtatcagagtcggatcccaaagttggccatgtgaatgaatcctcagaatatcaaataaaggtgatgagcctcgttgtactctcatgatggtctgtggatgtggttaggcagtgtgctcgcattgcagttggcctagtaatgagcacgaaactcttgaggtagtggtgggaatccatgtaagacatacgtctcaacgcattaaaggaaagtacactagtgggtagagagtggacgaatagaagatcattaattgaggggaggtaatatggtcctatgtttgaggtgaggatctctgggtgtgtaaccaaagtctcacattggcttgaaatgggaaagatcatgggtatataagaatgaacactatctccattggtatgggggcttttgggaaggtgccctagaacaaagtcgtgagggcttaggcccaaagcggacaatatcataccaagagtggagatggatggtaacgtcccaatacctcatacaaatgaccaccaccatgtttatcccaaaactcatgcaaatattcaaccacccaatccagtgcttgatccattgacagtaaaaaattaacacatagttccgcatataccaagtctgccaagcaaaaataataaataaatcaaacttgtcttttggcaccaacctatcaatgtggcataaaaagctataggtacctcaccagcacactttttactgaccttcccaaaactaacaactttccacaaacttgtaattcaatcacaaccccaaatagcatgggaccaatccacatcttcccattgtaacctacaacgacaacacatccccctcttcctagtcacattagaagtgggcagccactcgtgacaaagatgccaaagaaaatgttttctttgttggaactttcaaaccccaaactcgcctccaccatttctccaccctcgccatattcgacccttcctctatttctcttttcttaatcgccacttgatacccactttgcacggaatactcaccattcttattatagtgccaaataattcgatcttcagaatccaatgaactaggtaccataccaagaataagttatattctcatgacaaaaattagttcgcaagaactccgtgtcccactcccccagaaactgataactctatgaaaatagagttatttaactttttttgtgcattaatttaggtttgttctcaagcatttttagtttatt

SEQ ID NO: 301728 - DNA, 2938 bp, Cannabis indica
ccagccccaccccagtttcacctactggccactctatagaacataaaattgtttaaccataatgccttgaagaattttctcaaaaaatactggaagggcgttttcctgttagtgtcgaggaaagagcaccaattcaaacatttatttggctacgttccactttgatagagatagacacaaaggcatttttaatcaacattgggtttttgataaatgccctgtcttactcgaaatccctaaccctgatactgtccttacccctgattctatgaggaaaatttctttttgggtctaaatccacaacatacctttttcttgtaggtctgtctcccttgctagactagttggccaaatgattggcactcttttgaaaatccatctaccttccctgttggagacttggggggtcttaccttagagttcaaattatgttcaatgttaccaaacccctccctcgaggcattcctatccttttccctggcatggcctcacctacttggctagacttgaaatatgaagacattcctgaccactgttaccattgtggctgcctagggcactcctatattggttacaccgagtataggagagcctctaacgagtcaagcctaccaccacctctccttataaaatgtcttagaactgttcgccccaatgttaacccttttggccccctgttgataccaaaccaacctcgtaaccagtctatttcaccctctccatcccagatagttcatctaccaaatcttattgtcaacaatatggtcaatgttaaccacccctgtggccaagacctacaacaggacttctcctttcaacataatgtaggagattacactgacactgctggtctttttctatcatctcacacaacccaaacctcaacactgacctagaaactttccttattgctacatttcctactatctccttaaatcctcagattcaagtcccctagtcccacttttactgctcttatgtctgttgccaatgggggctccatttcatattctgtctccccccaataaccctcaaccccaagctcgcgtagttcaacttccccctcctccagccagctaaatgctcccttgatgatttcttctcctaaccacatagctaaaaaccagccatccattcacactgctggacttcctagtccccccagctttgttgttggtagtaatgatggcccaccctgtcgtgccccaacaaagaaaaattaacatgttggctcattagggtttaagagacacttggctactgctggaaatgagcagagagaaatgttgaagagacataggcctcaaccacgtcaagacattgtggaagtggcctctggtgatgaggcaggctctgtggacacacatgcctgcaaagactcatgaatctcatcagttggaatgctcgagggcttgggagtgatcgagcattcctaaatctcttccttttggttcaaatttatatgtcgtcgcttctttttgttatggagtccagactttataagggttctgatgatcgtattaagactaagttgggctttgtttttggttttgaagtccctagagtaggattaggtgggggacttttgattttttggaactcagatttgaatatacttggcactaatttctctgttaatcatattcactattatgtctcgtgtgttgatcatgctggttttaattttactgctttttatggtgctcccaatcttgttaatcgcctccatacctgtaaaattcttaccaggattggacattcttgcattttgttaccctggttaattatgggggattttaacgatttcttaacttggaatgataaaaataatggtaatggcagaaatggtccatctttccatttttgacagtttattgagaacttctagttaaaagtccttaacccttctagacctcgaatgacttgggataacaatcattaaggaattagaaacatcaaagaaaggttagattgggcagtaaggaacactctttggtatctaaatcacactagtagcagtttacattttcttgacttttttggttaaaatcatagggctcttcggattctacttaaaccctaacaccaccattctaatcttgcagttaaaaacaaaagattcatgcttgaaaatgtttagctcactgagccaaactgggatgatgtgctctcaaaagcgtggatgttcgactcccttcatgcttcacgaatccaaagccttacctctacccaaagcgcatgtgctgagtacctttcaaagtggaagcacaaagctttctttggctttcagctatgcattaaaaaagctcaaaaaaaggttgaacaggctagaaactcgatggatgactctcctgctgcctctcatcttaggagaactttacaggtgaatcttgacaacctcctttataaggaggaaacctattggaagcaaagatctattgggctttgtgtcctaaataaaactctatttcaatgtaatcttttctattcaattatcaataaagaaacagatttgatttcattacttgtttaatgtgttatttagttcatgtgatcatctatttgcttatctgattaataaattcatccaaacccttattcacactgatattcttgtttattgtgttgtcaacacagtggaaagtaaacaagattaagtgattaaatgtattcctacatttatcagtacacagggtttaactaatatgataatctacaacgtaatttacttgaaccttggataagtgctatgtcctttccaggacattggttaaagtaagcttgggttggatgtatggagtatgcatcggaagggaccgatattgaatttggattagatatgataaatttaccgtaatatctattcaattcaatataacctagttgatcctagatcaaatgatctcaatcctgagatggtaaggttcgatctcaagag

SEQ ID NO: 301729 - DNA, 3110 bp, Cannabis indica
catagagttacactagcaaatacaccttttactaaattttaagtatacataatacaaaaattacaaaaatacctaaaaaagaataaagaaaatagaaaaatagttataacaaaggtatactatcacaatcagccttggaaagaaaaattactcaaaaactgtcaaatgatatgtatataatatttccaactaaaaaacaagggacaataactacatatttaacatacaaaaaaggtataatataaaccttgttctctttctttttctggttagaactaataataataatactaaaataagaagagttaactccaaaaaataaagcaaaaactaataaacctataaacacattaaccaccattgaaggaacaataaacaccttagttgatgatgatgatgatgatgagcttccaattccaacaatggcaactgaataaggcctctctaatgttttcttcttaaacaacttaagctttggatttccacccaacttgagcttttggccaaatttttcaggaaagtaaacattaccactcaaattattgttctctagattaatttcattcaacaatggcaaaaccccaaattccattggtactataccttcaagcttgttgttatcaagaccaagataactcaaattcttcaaatgaatcgccattgtagatggaatggagccttctaaatccatacccgaaaacccgattcgaagaacaccctcaagattttcccaaatgtttggaatcttcccaccaaatttgttaccactcaaataaacctctttgagtttaaccatttcacctaaaaacaaaggaaccccaaaattaccaaaactgttaaaactcaagtccaaaaattccaacttctccaaacctttgcaactctctggaattctaccgttgaagccattagagctcaaatcaagcttgataagctcagagagattagacaatgtagttggaatttcaccatcaaatgagtttagactcaaatcaagaactttgagattcttcaactttcccaactcattaggcatttttccactcaatcgatttcttgaaagagttaattcttcaagattaatcaaatcaccaaccccagatgggatttctccataaactccattaccaatcagaacaactctcttcaagctcgaaagattagtaaccaagctgtttaaggagccgataaaacccgggttttcgatgaacacaagctcttcgaggttcgaaacggcaatggccgaaacgttgggtaccgaaacgggagttgagttgaagcatttgtagaagaagagtttccggagatacttgaaggaagtgaagagaagaggactgagtgttgagttttcagagcaaggtgggttcggagtaaaatccgaaacgtacccgaaactaagctcagtgatatgaaacgtttcggaagtagaagaatcgtttgtggtggtgttgaactcggtaaagtagtcacaaacgacgccgtgtggaggtgagttacagaggtcatcggagaacagagttcgccatggaatggccgagttgattgagtcaagaacttggtagaccgattcttgctcacccgagttgagaaacggttgctggtgtgaaacgccaatgaagaagaagaagaagaagaagaaaaacagaggcatagccatggaagaaaggttttggatttttttgaaaactacaagtaagaagatgaaggtgtgtatgtatatatgtgtatatgcatatatggtatgtatattaggattattcttaactaaaatggtgaaagagagagagaatgagacatttttttttgttttgctcagagcaaaaacaatggcgagagagtcatattattcataactcgtttgactcgactcatatggacagtgaagactgtgtgaaattccgatcatgcccctcacgcttaatcgtttctatttgaagtggacgaagggtattatggtgttttcgtgttggaccgtaaatgcattgtaaaacgccaataaagactctgtgtgaaataccgatcttatccttgtacttgatgttttatatttgaagtgggagaagggtattatggtcttttatggtagagtgagatagtggtggtggagcacaaaaatgtcggaggtagagtggtcagagcagaggtacaagccacattttactataaacctcgagcagttaagtccttctcaactgctaaaagtgtttcaattataaacccaatacaattaaatacttatttttattttaaattaaatagttactattattcaataacaatgctcatagataatagtttcataaagtcaagatattggtatttcaattaagtgagtagattggattcacatcaacaaactacctattttgattgttgaagccatggtgtaaaggaagcccttaattgggctaaacaaaataagtaaacttatgtagtgattaaaactcatagtatgctcagtgttcaagtaatttatagtaaccaatatatattctctatttttggtttgtaaatctttacttttattactattgaatttttatttacgtttcattaaacaatcaataaattgagttgtctattttattgccaagtattctcgtattctttctgatcgtatcatattagatcataattttctttttgatcttaaaactctattgcattcagaatcttagggtgcatttggaaagccaccatgtaattgaatttgtgtgtaattggaggtaattacacaatttgacatgtttgtctgaccatgtaattacactgtaactgtgtaattagaagtaattgaggggttccaatccaattctcatggcccccataagaattggatgtaattacactgtgtaattactaaaaactttccatattaaacattcgctactaaaaatattatttttccatgtaattactaactattttgccaaacaagatattaggaattcatatgtaattaccaccttatatccaaacacaccttgcattttaaaatatagtgtaattactaaactatgtaattaccaccctagtaattattagacctagtaattacacagttacttccaaacacacccttagattttaatgaacttgatatattattt

SEQ ID NO: 301730 - DNA, 3704 bp, Cannabis indica
catcgactagtgaagaaaaaaaaatatgtgacccctaaaataaataaataaactacaaataaaaattatagtactggattcctaacacttttcattgaccaatttcacagctttcttcgtagttagtgccaaatcaacagctactccaatatagctgtgtggggttagcttcaataactctgtctttgcttgattaggtaactccaaaccttcaataaactctcttatactttccttgttaactgatcgccctctagtaagttccttaagcttttcatagggttccagaacaccgtatcttatcttcgcattatctaataaaaaaaattgcatttcaagagtaaatcctgacatatttcattcgaataatagaaaaaacatcaatcaacaattcttttcatagttacttcacacaataaccttgtttacataatgttttgcaaaatggtcttcaagacacccaacatcctgttggagattctctgacacccaatagataattccagaccacctatcgaaaattctcaacaccccgtctagattccacaaagagaccattttgcaaaacactataacattatgaaatggtcaattttcactacttgttctacagaaagctcctaacatcaaaactagtatggtacccaggaacacccttgatgggtactttgtttagattccaaaaagaggccattttgcaaaaacattatcaaaagaaagtcattttacaaagtggcatcataaaatggtcaattttgactaattactcaaatcccaaaaggccacctaacatcaaaactagtacggttcccacagtaaccttaatggggctaatcattaataataaccctagaatatttaatagatggaagttaaaccattagagatgaagaaacaaaattattacaaataaacaaaagatgtacttatagtttggatgggttctgcaagcacctcccaacaattgtctaagttctcactcaagtgagcaccattcacctaaattgtaagaaaatttatcagatttatattccccgtgtagatgcaattttgtcggtttttctttggttgaaaaagcataaaaatggagccttcacagtttgttgattataatacagtatgcaaaagccaagtccctaaatttggtaacctcaagtgacagtgtattagagtatggtgaaaagatgagttcactttacttagttactccaaatcaatcatcacagaaatattattatagctaagcatttaaatcatttcgatgacgattaaatcaacactaacattgtagaagttagtacatacctgaagttttgtaattccttgcagcatgcttttataggcaagaagtgagtgtcccaatccaacacccatatttctcatagttgttgaatcagttaagtcacgctgcaaagtacgacaatatagtagagaaattagtacagccaaaattaaatcaagtctacctccaaccagtataagacccaaaataacagttccacataaattacaaattgctcctcccttccaccttgttgtacttagcaaatttttaatgaatttaaattcatacatccaccatcagtgtttcaaattaccaattgctattaaaaaaagtcattgctagtagtgaataataatgcactaaaactatcaaaagagcaagaagataaaccttgttttatgaacactaaaaggaaagaaagagtttaaaagagaaattggagtcactttacctgaaaccgagagatgggaaactttgtactcaagtgagacattgttccattagctacaccaagattgccttcactattttcaaaatcaattgggttcactttgtgaggcatagttatctgctcaagatttgaatatgaaaaataaattttcttgacagcgaaaaaacaatttgttggttgatgtacatgtacataaaaatactcacctgtttaaagtaaccccatgatatgtaaccccatatatctcggtcgtaatcaatcaatatatattgttcagtcggtaaattgcatgaaacaattttgccatgtaatcgtgtgacttaatctgcaaaggcaaaaaattaaatgaatatacatcagagcattctaaacatgcattataacaccaacacaacctttaatgcataaaacttaagtatttaacatttctactaatatccacaatctatgaacactacaaattgttaataaatttaaaattagctcaaaaagtgaaaagaaacaaacctgactaatatacgcattaaaactcaatccaagagacgttacaaactcctcatcaatctgaggccaatgaatagcatgatatgcaacaagatgggcattgtaattaccaacagcaccagcgaacttccccattatctcaacctgagaaatatcccttctttctctacttaacctaacagcaaatatggccatttctttctccaaagttgttggtgaagctggctatagtttgcaaaagaaaaggtgttaatattaaccatacaataagatcacataagtaagaaaaacgcatcgacaagtatttgtcatacttcacattcacagaaataaccctataaaactttcaaagtagcaagtgaataatcagtttaatacttcaaagaaatagcttttacctgcccgtgggtgcgagaaagcaaggaaatatgggcattgtccttggccatttgacctattgcctctattaaatcatcaataacaggtaatatggtattgtccaaagcttccttcaacatcaatgcatgagcaagatttttgatatcaaaagtgaaaaaattcaagcaccttcaaggcgaaaatcaatagttagataatatcaaaaacattcaaaatcatatttatataaatacaacaatagtttttttgataaaaaagctagttcagtgctagtagtagaatctactaaagaatcccaaacctttgcaatctcgggatgtgactggcatttctatttcaaaaaatattccactgctttgacatcatggtttgtcattctctcaatcttttttatctccaaagcatcatctacagtaaatccatcaataattccttgcaaaaaagacctagcatcattactaaagctagggacgtcttccactcctggaatttgtgaaagttttatcaaccattggacctgagataagagtgctaccataatttaaatgaatattccaatataaacccacataggaaagatgatcaagtatgaaattcactaatcaacagagcaattaaccagaactaaatatatttctacactataagcatcagagagcgtaaaactaagctaatattcaataaaagctaactgaacaaaccagtaaccaataaggcttatcaacaaacacttctatattttagcaacaatggtttctttcctaacttttcttgaatgaaattccatgaaacttataaaagagcaaagttgagaaactcaaacctcaaccagaatcctgtagtaaataagagcatattcgctcatataaggagccaagtccttgactttaccccaatactgaccatccaaaggcgatagagctgtcaaagtcgaatactccaagtctctggacatgttctttacagtctgaatcattaaaataaccaaaacccacaccagaaaaaaaattatatagaaaatacgaaaaattaatatacaaacacaaatgtaaataaaaaaaaaaa

SEQ ID NO: 301731 - DNA, 4009 bp, Cannabis indica
tcactaaaatagtaaaattgaatgaaattatacaaaaatccttaaatctaacaagctcaatagtttaggagaaatttttaacaaccaaagttcatgggcatgatttgttacatattaaagtttagtgagcaaaaattctaattagcctataaagaatattcaactaatttatttagggttattaatttatttttattattatttttaagtattttattttatgatattttaaaaaaataatagatatttttttttgctttaattgatttcaatgtattttttagaataatagaaagaagaaaacaacaaaaataaattaagtacaatttttaaaaatatattttctatcacctttttttttaaataaaaatatagtgctaatggatacaaatataagaatttaatgattttaagagcataataaatttctattcaatggaaaacgacaaagattttttttaatatcatatctctttgtataagtaatggctctacacacttcttcttgtattatatttttccttgtataatgaggataatgttgctcattttaaactataaattgtttgattaaattattttctcgataatcttatttattttaaaattcaataacaacaacttcaactattgcttttcttgtatttgtatataaaaaatataatatatctttattatgtactcagataactttcagctacttaatcgtagaactaaagaacaatgcataaaacatactttgtgataaagtgatatagcactatgttggattgaccgatcctcaaaataccaatcaaattaaaataacctttatgaagaagaaatcacatgggttgaaaaattgctatgtagcataattggggtcttgttcatgaatcaagaacaaaatagtctagaaaacaagtaggaatggcaaccctggacagtatcaagaagaggagcaatttggcatgagtcttcaaccgaacggttcatccatttaagcaccaaagcttcggcaaccttggccattcgatgttgtaacacagcagcagccaatggtccaaccaagttgagccttgttgctgcagatatcacatctctcgtcgttgtatacatgtaagctctctgagcagttgtgctgtccattccgagaaccccacaaacaaggccgaagatgggagcgtggtggaaacaaactagtactttcccagaagccgagcacaaagaggcatctctcatgattttaagacaaggttgagtctctgaatacacagatgcagccactctcataagtgcagagccctgtgcagtggacgcctttcggcccacttgattggttagtgtagcatccagcattttgtctagtttgtgccatgtctgcccatcaggtgatatggctgcagagtatacataaggaaggagtaagcttccggtgttgtccaaaaggtgacttataaaagtttcgaggtgttgaggagttgagactaagtgggcttggattgctgcctcaagaccaagagaatgagcaaatccaccagttgggagaatggaatctaatagctgccattgattccattgcaaagcagccgagtttgagtaatcaaaaccattattggggttttcgctctccgtgtctatttccattacttctgcaaatttggtatcgttctaaatttataccgaacaagaaaacttgattcgtttactgtagtacttgatgcgacataatttgtgcatgaagcctcaaacagacgaaaagagttaagagttttccactggtggatgttcaccagcaaggctggaatttactccactttgcagtctttcagcttcttcccacattgacatgtcaatcgaggatttcgcagttttatcttaaactaagggaaggataaatcagcccaatatgatttcatgaagatatatatctttaacaactatcagaagtagctagtgacatatttgacaagcatgtagtaaggagaactttggccaaattcttagttttcatatataaaaccataaatagacaaataaattctccatgcatctacagttattttcaataagtttgcatattcagctttgaaataattcttttgataataaaaacatcatggcgaaactcagtgaagttagacatattccatgaaattaaccaaagcaatttccccattaaaaaacatctttgcatcataaagtatctaccggccaaagagcatttataaaacagagggatcatacatgaaacatctattagcaaagtaagcttacaaggtgcaagaaaagaatccaatccaaagcttacctttgtggccgtcaccttgacttatccataagctcaataggaatggaaggccccataaaacaataaccaaagacagggactttatacaaatgactgttcccggtaatggtgtcctttgaagctctttttcttcccagatcaatccagtccactgctgatcactgaacaagtaaagaaagagcaacccaacacataaatacataaaaagtgtcaataaattcagtaatttacttccactactattcaaagtatcaacagacaataaatctagcaaaacaaaacacatctcctcatattgcttaaattgaatccaccaagtcaatcaaacaagaaattacagtagtgacaaatgagcaatgctgatgaaatcaaagagctaaatctaaaacaggaacaatgagctctgtacttgcacagtttgaaaatccatataaattaatgaagctgaatacattctttttcccaccagtaactgagttgatagttattacaataaactgaaaagagaatgattaactttaccttagcagtcaagcaaaataagttttttttccgataaaggaacagactattcccccaaagatgatggtgaagctataataccaatatcagaacttgatcaaaatatgagatgtggattagaataaatgttgagcttgtgtttcattttatcagtgtttttcttccattattaatgggaatttgacactattttggtacattaccagttaatttttaaagtgtgagctccttactgtaatgaatgctaattacaagaatccaatagtgcttgaagatgatcagttcattaattagttctgagaatataactcttgaaaagaacatgaaatatttgagaatagaatggcgatatacaaatatgtcaagttataaatatgacttttataaactaattattaattagtcatgtctgatattgtaacattcattctgtttcatgtataaacttctttataaatgaaagataataatagaaaatgatttatagatatttccattaaaaataatcttgattaaaagttatacaaacaaactcttaatcgccatgatgaggaaataactgtatgcacaataacatgtttattcaaattacatattctgtacagttggcaaattacacagaaaaaaattaagtttttacacaaaagcaaaatcaacagatacaatataatacaactctaaattaggggaaaatgaatctcaaaatcaaaattgaatacctgttggatcttggagtagtaccaaaatttctgaaacggaagcaaatgccaaatccttgctaatgctcctaaacccaaatcaaaactcttcaaactttaattagacagatcaatgctaaaactttctgaacgaattacatcaataaacccaaactcaaacaaaataataaactctacttactcaacattgattcaagcataaaaaaaatacctggtgacgattcatgagagggaggccggagcagcgtcactgccgagagaaacgaagaaacagagagaggagagagaaaggtggatgagagatgagattataattataatatttatttctttatttttaaaatgagattataattattttgaatttacatatagacaagatttgttattataataccgaagcaataataaatagactatatatatttttgttataaatattaataattatgtggatgtccaaattttttatttatta

SEQ ID NO: 301732 - DNA, 2385 bp, Cannabis indica
gctcttcaacgactcacggcggaggagcaattggaggcagcggttttatgcttggaggggccggcgctgcgatggttcagatgggagaatcgacgtcgagaaattcggagttggggcaaattgagggatcttcttctccggcgattcctcccagctcacgaaggtagtgtgtatgatcggttcttggcgctgcagcaaacgtcctccgtgcaagactatcgacagcagtttgaagcattggcaacgtcgctcgggaccgtggcggagccgctgcttgaatcagcgttcatgaagggattgaaggaggaaattcagggtactttacgtctccttgaacccattggtctggagaagacaatggagatggccgaagtggtggaagccaatccgaagttggcacgggccttttgtgctgggccgaaagttggtggaggcccaatgagaggagggggcactattgggtccaccgggtttggtggtaatttcacaccggggcctacttccaaagggccgaactcattaactggggcagcaagtgggaatcgcaacccacagaattttggccattataatcggccttcttctactaccacggccagggagcctcctacggcgtaccgacgtttgacagaaacagaaattcaggaaagaaatcgagaggggtgtgctatagatgtgatggtccttggtctcgaggtcatcgatgtaagtccccggagttgcaaatcatcttagttcaagatggagtgggggaagaggatgcgaatactgcttctgatgagtgcatggaaacagagttggaggaactaactgaagcacagatggtggaagtatcattgaactcggtagtggggttaacttctcctaaaaccatgaagttaaatggccaagtgtttgggcaggaagtgacagtgcttattgatagtggagctacccataatttcattgcctcttcgttggtgacaaagttcggactccccatctctgcaaccgatccctatggggtgcaaatgggcacaggacaagccgttaagggagaaggcatttgcttaggagttccgatttctctacatgcagttgagattgtggaggattttctgcctctagctttgggaagtacagatgttatattgggcatccaatggttggagacattgggggaaacttatcacaactggaaggaaggaatgatgcggttcaagttaggagggaagagtgtggaactgaagggtaatccagcccttcacaaaacccgggtgtcactaaagacgatgattaagtctctacaagaagaacacgaaggcatgtgggtggagcttggccacacggaggtgttagcgaatgaaaatgaaattccggaggctgttgtcgggttgctacagcagtatgctgaggtttttaacatgccaaacactttgccaccgccaagacatcgagaccacgcgatctgtcttcaccccggtgtagcccccatcagtattcgaccataccgttacccacatgtacaaaaagatgagattgagaagttggttcttgaaatgttgaagggaggaatttgccaaccgagtacaagcccattctcgagcccggttttgttggtaaagaagaaggatggaagttggcgcttttgtgtggactaccgggccctgaataaagaaaccatcgctgacaagtttccgattccggtcattgatgaacttttggatgagttacatggagccaaagtcttttcgaagttggatttgaagtcggggtatcaccagattcgggttcggccagaagacattccgaaaaccgcttttcgtactcacgaaggccactatgagttcctagtaatgccattcggcctcaccaatgctccggccacattccaagctaacatgaatgccatcttcaagccttatctccgtcggtttgtgctggttttcttcgatgacatcttggtgtacagcccctccttggaagctcatgttactcacctgcaggtagtcctggacactatggctaaataccaattttatgctaacagaaagaaatgttgttttgctcagcagagattggaatatttgggtcacattatctctggccaaggggtctcggtggactccaccaaggtccaagccatgttggattggccacggcccaccaatttgaggagccttcgaggattcttgggcctcacggggtactatcggaagtttgtcaaggggtatagttccattgcaagacctctcaccgagcaattgaagaaagaccgcttttgttggaatgtggaagctacagccgccttcgaggccctcaagcaagccatggtcactgttccggtgttatctctcccagatttttctaagcagtttgtgattgaggcggatgcctcgggttatg

SEQ ID NO: 301733 - DNA, 1678 bp, Cannabis indica
aactttattttgacaaaaaatcaattcagggtcctatactattttagaaaatacagggtccattttgtcatttaacaaaatatagggtccaattaataacttttgtaaaacagaggatccaaatagtatttaccctataattattgattaagaaactaattagaatttataagaaaagaatgatgaccttgaaatagttggcaactggagaagcatatacaaggaaagtgtaatcaggagctggggccacccctaacgcaccccccgttcccatcaacaaaggtctaatataaagggacccttttccacttggtggcacctgcaaattggtttcaaaccttttatttattctaacctaaacaactttgtacatattattctaaccaaaaaaaatatcgaattttacatattttaatttaataattattgttaaaaattttgtatgttattacccaactcctattagcgatagcggtttgcttgacggcgtcaacaaattgatcaaccgaaggagagggcatgcacatcctttcagctccaatcttcattcgaactccattttggtcaggacgaaaaagaagcaaacctccatcttcttttttatgtgcttttgtcccttcaaatactccctgttaatttaaattaattaattaatattttcacagcaaagttgtaaagaattaagtgttaagatataagaaaaataaaataaaaaaaaatacctgtgcataatttaaaattgctgcagcaggactcaactcaatattggcatgtaaacttaatcgtccttgttcaaaatttccttcttcggtgcatttcatggaatatatgtaatcagttgttattagcttaaatcccagattatcccaatccatttcgtttggctccttatcactgaataattgtccaattaattatgcagacatatcaagaacaaaaataattaatataaataaaattaatcccataacaaattattgataatagacctgtaaaacttacttcaaaataatttaaccggcataattgtaatagaatgactaaaatataaaatttatgtaaatcttactacaataaatgtaagagttaaatataaaaaatatgtaaatttacttagacacaatttatggatatgattgtaagttggtaagaaaagaataagggtgttcatccaatccaattcatactattttattcatagtgcatttcatttgtactaaagtagcgtttgattggaggtaataaaatgtattagaaaatattgttccacgtagattcaatgtaaaaatattgagtcatgcatatatatatataagaatatgggctactccactcatcaccaattagttttgcgatggaacctcatgattcttgtcatgatatcagagtcatatctctagcggactttcgatccacacctacccaaattggttaaccagccgcacaagatccagatggtgcaaagacgcttgagatccgaacaaaaaataagtgagcaaatagcatggcttgtgataaggtgattcaagattgatgagcaaaaatagccaccatcttgaaggggatattggagaacattataatcacatggattaaatataaaagtattaagccatatataagaatatgggttattccactcatcactaattggttttgagatggaacccatgattct

SEQ ID NO: 301734 - DNA, 947 bp, Cannabis indica
aaatcacgtaatacgcctaaggtagttagggtgttacaatggatgtgggcaacgtagtcgcggtcttcttcatcctcagacactggaacttgttgccatgtaggttacttgggatccttatagtccatggtgcattgatcgtttccgagaagaccacctgatttcaaatatttatcatgtaacaagaagtcacctactcgcagtccatatggaagattcaccgggatctcgtgcctcttttagatctcaagtgttgggattggtctctttgtagtggctaaaaatgtggaagaaagaacggaattagcataagtataaaatcattaaaaatctaaaaactcaaaatcaagattttgagaatgaattatacttacataaaattctgaatctggtagtattgattggatggaatcctgttgtctagaagaagtcttctttagactcttttttatttgaaagcctaacaatgatcatttgatcattggtttctaaataataaaagtctcttgaaccatgcttccttacagggtaggctttgatggagtaaaacataaaatctcgaggggtgttgcacactccaatcctaagatgtggtatagagacttcagataggcgaggatcctgtaagaatttagagcagattgaaagggaacaaccccaaggtgattgcagaagtccttaaaatattgcttaagtgatagaacgtctccttccctaatgtgttccacactctaagcccctatttttaaggattcactggcgctacagccctcgtctttcaaaacacattcttggggaaaacaactgaactcgccaggcacaactgaacgaacatggcatcccttttgtaataccctaactagacaaggcgtgttacgtgatttttaaacgtactgtgcagctcgttgctaatcaacgagatttatggaaatcgtgattaattaaaa

SEQ ID NO: 301735 - DNA, 2977 bp, Cannabis indica
tattgaaattattttacttgtttatcccatttttgttttaatttttctcataaaataacaatataagattttcttttttaacatttacttataacaaaaagttaattgtgattaaaaagtcataattaatcacaaattgtcactaattttgatgataattaattgtcactgatattattgataattccccgtgactgaaaatagatttagatacgataaattacgatttttatgtataatacatttagtgacaaacatttttacaaatgatctatgattttttcagtaagaatatttttcatttaaattgtgatatttaaataagatttgaaatagcagtgctcctcacttacatacactgagaaaaaaggaaaaagaacaagaacaacttaagactctaattaatgacaaaaatcatattttagttatatatggatgtgtttgtttttacagagacatggaaattgaactgtatgtactctcagtttcgagcatcaacagtcccaaactgttgtgtttctttatctgctttttacaatgacaccattgtcccttgcccaaaatgcagctgcaactgccaaggattgcctggagcaaaatgtctcacgtaataacaataatcataatgattattttattttctcttcaattttccaaccaaaatttatatatatacattttaggaaatcaatcacattattgatttataagaataactaacttctttggtgactattttgtaggcctgagaatgaaatattgcaacttccagtagagtactcatcacgtgagacgaaagaggataaaaggtcaagtttagtgaggtgctcagagcacatgtgccccattagggttcattggcacgtgaaacaaagttacagagaatattggcgtgtgaaaatcactattactaatatgaattttgctaagaactattctcactggaacttgttggttcttcacccaaatttgcaaagtctcactcaagtgttcagcttcaactatcgttcactcaatcagtatggaaacataagtaagtgatgaagtgacgtaacaggttttttaaccaatgattttttcactaatcacatttatcatatataatttttcactgttgacaaaccatatacacttatttttcagtgtattctgtacaggtactaattaaattattgtgatgattaactatttgaattaatgttgaaattattaactaatcattaagtgaagtatggtataaattttgatatatgtggatgtgtaattattgtagatgatagtggaatattttgggggattgagtactacaacgacatgttggtgaaatcaggcaagagtgggaatgtacaaagtgagatgttactacacaaagacactccaatttttagcttcaaacaaggatgggcttttcctagaatgatttcctttaatggtgatcactgtgtcatgccatctcctgatcactaccacactccaacattgccaacatcttcataacccaaacttcatcattattttctctatttctttctcaatctcaatactaatcaaatttatataactatatattcctactcttctccatcttcttgttaaataatcattttattatttgtttcacaacaaatgtttgtaaattttgtttaatttcaaatcatgatcattcatgctaactataattaggattatgtagggtgtgtgtttgtaatttatatgatcagtttaaagatggaaattagctgtctaggttatgactaatggagttaaagagctttgatcgagtatatgttttcttgttaaattaattaagttattaaagttgaaataacaattgataattgataagctcaaatgatgctgatatatgcctttcattatatagagaaattgatacaaagtaaaaatatctaaaagcattgtaacagggatataatacatggactgcctataacaaattctaactattagacactaaaaaatattatatatactcatataattttttagtcacaacagaaagttacttatgaccaaaataaagtatttatatacaagatatcactaatttaattttagtcacaacaaatttaatttttgtaactaatacttttagctttttttaatcacaacataggaattattatttataaatcacaattttttatacttttaatcacagattttattgtgactaaaagtaaaatatttgtagtgtgagggtattcgcatgatattagaatcaaggtaagatgattacaaaatgatgactatgacaatgtagcggcccgcaagaccacaaaatacaagacaaaataaaaactaatttgacccttaataacagaaaaaactaatcaattcttaacacctcttctcaaacttaatggggaggacaccataccaagctttgtcaactaacaattgaaaatgtgttgtggaaagactcttggtcaggcatttagctattgggtctgaagatggtacataatgaatgtcaagtttcttgactagcaccttattacgaacaaaatgaacatccaactcgatgtgtttggtatgagcatggtaaagtagattcgaagcaagcgcaccgactcccatattttcacaccgcataattagagtagctggtagactaaaaccaaattcattgagcatggcttgtatccaggagaatttagatgtcacctaagctagtgcacagtattttaattatgtgcttgaccgagagacaacaaattactttttcgaggaccatgaaacaagtgtatcaccaaaatatacacaatatccagcaacaggcacttatcatcatggaaacacgctcaattcatatcagagaaacctttcaaagtgagtctttcacatggtttaacatgtagccctagatggggtgtacttttcacataacaaaagtgttggaattattttaccaagatttagaattactaacaagtatgtttttaacatcctaaacatg

SEQ ID NO: 301736 - DNA, 4753 bp, Cannabis indica
tttatacatatacatatacatatgaaataaaatatagatttgcttaaattaggtactgaaattaattaacacgagatggcacttgctatagaaaggaaaaaaccatagtcagcataatctctaggaccgatatcatcattcctttcattattaaattaaaataataggagtaacttttgaaaattggttattgattatatgtttataaattgggtagttcaagcagtgatgcttgtggtttgcacttttctgagtactacatagcaagcgattgctataatttcttgatccttaaatattgtagggtttttagacaaggactccaatttaaaagtttaagagataacaataataaaattatatgtttatatgtcctggtgaccctactcatgataaagatttgaattaaaacagcatcttatgcaaggaatcgagatattgaaacatttgcataagcacattgtggtttgaaagttttaaaagaaaaaaattggaagagtgccaaactgttagaccttgtttggaccttggattttaccaatacaattttatgagagaaaataatagggaaaaattaatgaaaaatgtattaacttttttttcttttaatattttcattttttgaacatatttataattgttcttttttgataaatttcaatcaaactcatagcattgatccaattaccaaaactctatcatggggtttatttataattgttctaagtattaaattatactagattttgttcaaaaaaataaaaataaaaattatactagacttaagttttaatttttctagaaaaagaattcttaatttattgattcaatattaacatgtttggatcaatttatcaatattttgttaacatctatttaagctttaacaccaaatatcattagttgattgagaaaactagcattggggaagcaatatattagccaactagcatcaagtaactaaacaaaagataaaggtgcagaaaacaagaaatacataccggttgctccacgtggtcattaaaaaagctgactgtagaatcctttgcttcacgtatccaattgtttatgtcagaacttcccattagactactatgttttaggagccacatagaacaaacagagaggccaactgcaccacatgcataatgaatccagtatcgagttacttttcttggtttcttatgtttttggacctgattaaaatacaaaagtgtcaacgataaggcttctaacaatactgtctttaggttgaaagttcattgcctacaataaaacaaaccatccaaatccaagcgatggtagccatgaaaagtgcatacacaaattagcaaccagattccagatatataaatttatatatttctattttattaaagaaaacacacacaaatacacactcagtttcaatttttttttaaacatccaggatacagttgcagtaaataacaatccggccaccatcacactaatacattaacatacatccaactacgttatgttgcaatcttatttcagcatgataaattggcatgacagacacctaatacacatgatttaaaattaccaatagatgatttttataaggtaccgatttttaagttgatacacgaatcaaatccacaagctcttacagtgaaagatatgtaagactccaacttgtgtagattttgataaaccaagtcaatagcattcttgatttcaaaatctgtccatagtggtccttcttgatttacttctgctagcttctcaaacagtggtggaaatgagtaggtttcatcaatcaatgaatcaatctgcataatcatagcatgaaaacaaaactataaatgtgaaatggaaccaattcctgataaatttgattagagaaaggtgaactttctaccacaaagaccatagtgataaaccaagaccttatcttcttatagttacctggtgctttgtatgtatctggctaattgatgttctaacttggaaaataaagcattaattttaaccaataatgataccaaggccttgtctggatcatttatgagctgctcccccaactggtcagcttcaacataaaactacagaaaagcaacaatgaatgatatcatttttcaaaaaaaattattagagcttgtagaagaattatgcaaccatggagctgaatagcaacaaattttggattccacataaaagatcatgcctatatttgtgtacaggtgcatttgtgtctgtgccaatgcacgtacacttgaaaatggagattatgaaccagccaactatgttccagtggatgaaaagaaaactatgtatgaattgagtggtgtatgacaaggcaatgcctcaatttgttaatcgctgaagctaaggagggagaaagcaggctctgttctttggaaaactgcagtgatagaaactttctggactatttggttggagagaaatagcagaacctttgagggaaatagttttacaggtaaaactttatggggaaagattaaatactgcactgggtcgttttaggggcctacagtgttaaagacttgaaaaaatgtaatagtatctgacctatgtagagactagagactgggatagtctgccgtaaatcccaaccatgttgcctttgtttctgtggttttccaaccactttcctatccttgtactttccggtttttataaagttttgttaaaatatacataaaaaaatacaaaaggtcactcaaatcacacttataggatagaacctaattagggcattcttcggatgatactaaatgctctagatctatgtattcatacggacagctaaatgtgtaagacataccagtaacaaagtttctctcatacacacatctgaacattatatcaaaacattcttcctacaaaaatttcaaagagaattgtgaaattcagaaatgaaagcatgtcaaccccccaccagcattcttacttatacaattcaatcaagaataaggttaaccaaaccagctaacctgagccagaaatgtcgcaagacaacattgtaagctacttaagacagctatcctatcagatatatgagcagatgcagaatgacttatatgctgcatggaagaaccttcagtaacagattcacgtatcaatcgaatcgttccatcacataaagcccgcggccctcgctcaaacaacataaaatatgcctttcgagcatttgtttcctgaaattagacattatacacaatcgatgaatatattatcaaaatgcactttacacaaatcaagaaaaaatatatgtataaaaaatgaaattagacatacttttccaaacgcttcttttcttatatatgaaagaaaatttgcagtaaagctgattaactaacctcagccctagattgccaaaactgcaagttcttctgaatgctatgcaaatttgaatatatctgttccaaaatatcctccaaaacaatgataacactagatgcttctgttttcaccctgtatgttaaagcattatagaatcaacaaagtaatagagaataagataaaagaggaaagaccaccacgttcttacaatatattggaacaattgattcaatgcttaaacaatcgtaaatatgtctcattaactaacgatcttcacaaaataaatcaacacaaaaaaaaaaaaacattaagaaagaaaaactaaatgaatatttaggacaacattcatattagtatacatagccaatgaatgaacgtgtacttaacttcaggttactcacggacactcagaaaacaaaagtgtacattttctttgtaaaatcaagttcatacttcatatcactctaataaagctcataaagtcaatgccttcgttaacaaacttgcgcaggttaaccctcccctcccctcttgtaatcagtaatgaattaactcttgatttcgcattttatttctatagtctgtatgatttcatataatgacatatcacaaccacattattataagattatggcatttgagttttgattgtacaaaactggaataaaatggaaccaagagagcaaatgaaacaaattttcccatatcccagagtttttggttcaaacttgtaatgacacaatgaatcaacattactaagttttgtcacttagaatccatttgtggtatgcttaagcgacaatcaatatattaaattcatttagttctggtaagaatctgatacaactacaataatctaacattcttaacaccctcattgactaattttctccccaaccaaacaaagagagaagcagagatttataaggcaaagtgggagagtaagaagaaaagtgagcatacagagtcgaatcgaaagctttggtaggaaatggaagaggaagacgcgggcgacgtctcctcgatcgggcgcgagaagcttggcggtaaaggttggtaactttcccgagaaaattggaagcgggggaggtaaggaaagtgagagctcgactacggacgtaattagagtaaaatgaaaatagggttttgaaatcggcggagtgattttcggcggcggtgggaggtggaggtgagaggtcttccattttcaaacctttcaggcaaaggtgtcaaatatgaaatgcgcacgcgccctcccgttcttgctttgttgattttctttgtataaataggatttgttctcttacgagaactgaactagtaaaatggagtggttatgtaaaagaataaacacaaattttggtttattgtaatttttttttttttaaaaaaaaaaagtaatgagcaaaatgattgataatta

SEQ ID NO: 301737 - DNA, 1575 bp, Cannabis indica
cattgaaatagagttttagttggaaaacaccaatgccacatgggagtacagtttgccaataagaaggccaagccatctactcatcactttaatcaacaaggggtccgagtatttaagagggatgatgaaatgacaaaccaaccaccttggccggccctatggctagcataggtgagccaactttcagatactacatggcaagctaggtgtttggtgcacaactttcatctgtggacagcaaatcaatcaacgaattgggccttaacagcccacaaaaatagagggaaaatattagcaacttccctcttttgaggggcaatttagtcatttgacatttattaatttatgtaaataatagctttacttacatatttttaagggatattagggatgtaaactctactatataaagggcattagtcaaaccttaagtcttaagctccaagtctgatactcatcgcatctctctctcacacacgcataggccttctctatcacttgagattttctaactctcactctcacattataatcttaagagagccactttagatcctattactattgtgatctaagttgtattatctctagtatcaatacaaccaaaagaggaacaggtcattacccgctaacaaagggggctgaaccattataaaatcttgtgtttatttacttttttgttcttattgtgtaacacatggcaagcatcaaaattaaatctaacttcggtgtcggttggccaaatctaaggttaacattctcttttcgcttctcgaaaggctccttgtatacaggttctcactggagtctagtgttggcttagatcaatctatgttcatgtagttttgctaacgtgcaaagaagattgcttaagagcactccgatttccaaaaaatccctagtaatcttacatcgagctggcctccctacaaacacaaacaaaaaatcagccacctttgaatctagataaaaataatactaagtataaaagtctgcgacaaacaagggtgacaatcaaagtctattctaattccaagcagtgaaaatgcataaaaccattttgacttctaatctcccatattggaaaccgtgccttcaactctattaacctctaagttggcccacttactgaagtagtaaaatccattatcgtgaccaacattcttgatgtcataaaaatagtagaagtcctccttggtaggttctccttgcgagcactccatatacatctcatagaacccaaggaaaattctataattgttaggggtgagttggaagggagcaatgtcataatacatcaaaatgcatttgacaaaagaatgaaattgaaccacgactcaacaacgaagaatgggaattgaaacaactttaacattagtcaggataatcgttggactagtaaaaggaaggtgcaaatgttgtattgacactgattttgtacaactagtgttgatcaatttcaacctttagaatgttgtcaaattagacttccttactcgcaaaaccaaatcctagtaggaaaatggttattcaagggatgcatcctctctagaaactattgttggaattatttta

SEQ ID NO: 301738 - DNA, 2732 bp, Cannabis indica
tctgagaagtgagtgtcaattatgctatagtgaaatagaactgaattttgatataggacgagagtacctgtatagtttagatagcttataaagtttttgtgcttaatgtctgttgcatgtttaatttatcacgagtatagaaaatttccatgtaattgagatttatatatctgggaagactataaattaccttagtaaacttgctattgcatagaaattggtaataggaagataatcatattaggccataatcaatccatacaattgaaatcgaagccctaactttaatcatttttaatttctattctgaattatttgcttcactgtatttttagtgttcttaaatttacttttctctaaactttgaatccaccaaatagaagtaagaatttaattttaaagtacttaactacaatcctcgtgggatcgatctcactcttttgagtaatacttgttaaaacgatacgtatacttgcgtgttgaaaataccacaaaaatatcagacaaggagaagtgctataataattactaaaatccctagaaccagtgatcacataaaggtggaaagggttaagtggagacagatcccaatctgaactagcagccctatgaaagttagttccatactatacaatgttcccatagtaggagctattacaacttaattggacatggtgtttatgataccaactattgaacctatgtgcaattaagtcgacgtagttcctgataaagaaattatattggctatccttaaaaatgaactaaagcttttcaattagccctaaagacggtaggagaccatatataaatataagaattattacctcagagagccccatcttcagcttctagagtggttatgtttttagaataatggatgcgagcgacgtagtcacgatcctcttcattctcaagcacaaacacttgttgctaatttgaaaccttggggtatttaaaatcattggtacattggtcctttcaaagaagagcgcatgccttttaaattattattgtgcaataaaaagttaccaactcacaaaccataaggaaggttaagcaaaacctcatgcctctctttgatttctacagttgggatgggtctcctaatgattgttgaaagtataatagaagaccaaaataagttgagtataaaaggaagataataactcaaaactaagaatttgagagaaatttgtacttacgtatgattttgaatctggtaatattgattgggcataagctagtggttcaaaagaagttatctttgaatttattcttgttgggcagcctcacaatgaccctgcaatcatttgtatgggtccctagatagtaaaaatctcttactccatgcttcctcgcatgaaaggcattgaaaaaatagaaatataaaatttttaggggtgtaggagactcccattttaaaatgtggtaaagggattttaaactggtgagaatcctgtaagagtttggggcaagttgaagggagcgatcccagggtaattgtagaactctttgacataatccttgatagggaaatctgctccagcccttatgtgctcaacgctgaaagccctaatcttggaaggatcgctagtgttgttgccttcgtctttaaatacgcattcaggtgagaaatcgctaaattccctctgggcaactaagaggatgaacaatcccttctccttcattataccaaacgaccttaagacatccttgacgtaagggccaatggatctcaccttagattcaatcaattcggccttgaaagtggccaaaggattctatggagtcttagatttgtaagctttatgagccaaaagatcaaattctaagtcacttggtgaaaaagcaataatgactggtggtaaaaatattagctttgctaagggaatattaactaagcaagacgattcaagccaagttgctcttcacaagtaacgacgtttaccctcaatgacttctcatagaaattgcctatagtggttagaagtttcttcttggttagacctaatgaggtggttcctaattttgcatcattaagttgaagtaaagtttgaggcttttaggtttgaagtttatatattaaggcttgaaattgaggacattctgattccgacgattctgggagcatgaattttgggttaaattgggacatgatcatagagaataatgccccaattcctggaaacatagagcacaaataaaacccagaacctgcgaatcacgtaactttaagttttctaagccttagattacccaaaaattcatgtaaagcgtactcaaataaattacaaatgcaaaacaatgcacaaaatcaagattgaaaagttaaaaaattcagaaaaagagaaggtcacttacttgttttatgaaaaattcttgtttttgaagaaatttgcgatggaaactcaaagttcaaagagactaggtcttgatgattttgaagtcaaggggtgcaatcgaatgaaattctagaaagaaggtgagagacaatgagggtatctaagttcagagaagaaggtggtcaagaatttttcgagttttaaggatttgtgggaagtaatggaaaaagagaaggaatacttgaaattaatacccaaaagacgataaccgttcgatcacgaaaagagtagatcaaacatatgagaactaatgggaaaggaatggtcatagcattaaatggtgaaatgatttgcttcgaagttttgaactgccaaaataaaagcatg

SEQ ID NO: 301739 - DNA, 1880 bp, Cannabis indica
atgtttttgaaaaatattttcatttttctacttttaaaaacagaaaactgataaaaagagtgttaccaaacgccactataatttttttttccttaaaatacaatcacaatgagattggtttaatacattataaaatacaatcttctaatagaaaatcttgattcccggtagattttgccaaaaaagaatggtaatttaagttaattaattctatactaataggtcatttgaattcagggcaatcttttatttttgtgctaatgtttgatcgatcaagattggtttctgattgaccctacttttgttttgattaatcaacttaattattcataatttcagattaattgatcataacaaactaatcattttaagacgcatgcatgtttacaggcgagaaaactacaataaagaagcgtcacctatacttgaccgaagatcgcctaaatcagcatccaaacttactggaatacatggcaccatctctaaacacacgtcaagatatgttggtggttgagattcccaagctagggaaggaggcagcaatgaaagccatcaaagaatggggccagcctaaatcaagaatcacccatttaatcttttgtagcactaacggtgtagacatgcccggtgccgattacgaatgtgcaaagcttctgggtctcagctcatctgtgaagcgtgtgatgttgtaccaacaaggttgccatgccggcggttctgttctccgcatagccaaggatctagcggagaacaacaagggtgctcgtattctcactgtaaactcagaaatcacaatcggaatctttcatagcccggacgaaacttattttgatggcatggttggtcaagctttgtttggagatggagcttctgcgaccattgtgggtgctgatccagataaggaaatcggggaacgaccgatctttgaaatggtttcggctgcacaagaatttataccaaactcacatggagcagtggatgggcatttaacagaagcgggactcgtgtatcacatacacaaggacgtgcctgggttgatatctaaaaacattgagaagagcttggttgaagccttgaatccaattgggattagtgattggaactccttattctggattgtgcacccgggtggcccggccattctaaatgctgttgaggctaagctccatctgaagaaggagaaaatggcagacactcgctatgtgctgagtgagtatgggaacatgtcaagtgtaagcatctttttcataatggataagttaagaaagaggtcattagaggaagggaagtccaccacaggagatggatttgagtggggtgtgctttttgggtttggacctggtttgacagtggagacaattgtcttgcacgccttgcaaactagctaggctttaataacttatttatcctaagctatatttatacaatattttcataataattgttgttgtaacagttgcatggtacgttgtggcaaatggtgaatgatatcttttttatatattcaataacaaattacaagcttggattctcatggtcttgttctttgtgatattgtttttccatttgatattaaaaattataatactaatttgttaggattggtacccttaaaggttatttctaaaataattactaaatattgaaataaaaaaaattatatttactcataattatatttagagtaatttgcggcataacctccttaagtggtcaggtttttgcaactaacccccatttctaaaattttggcggtaaaacctcctaaactagtgttctgttagcacttagtcctttccatccatttttggcggttaactgccatggtggaataattatttaaaaaaaaaaataaaaaaataaaaaaataaaaaactaaa

SEQ ID NO: 301740 - DNA, 3415 bp, Cannabis indica
tttttttgtggagattcattaatgaagcgcttcccacggctattaatctcgcgcataggaagattagttcttccaatacttgctctctatgtcaatgcagttgggaaacatctggacatgctatctttcgatgtaaaagtgcaaaggctgtttggcaacaattccaataccaaaattatatgccaaacatgggtaatgttaggggttttgatatctttttttacatttcagctgcttacaatgatatggaacttgagcagatagtttgtttaatgtggagtatatggtctgaaaggaacaaagagatccatggtactaagcctaaactggttgctgttttgtgttcttcttctgcctcttatttggatcagtttcacaaagccactgctccaaaacaagcggctgctggtgtaacatcccagggtgatttttcgacaactccctctgttcctgttgctgctaggactcctcaaacatggcgatctccccctgctggcttgcataaattaaatgtggatgctgcgtgtgatcaggctgctggaaaattaggctacggtgctctaattagagatcatataggtgatgttgttgttggtttctctaggccttttcatggatttttctctccaaaagaaatggaagctgctgctctatttcacagtttaacatgggccattcatcaccagctatccatccactttattgaaactgattcacttttgctggcaaatgcaatcaactctatgtcttctattccttttgtaacttcttttcatgacttagtagaggacattatttattttttatcctacttttctggagtaaaggtttctcatgttaaaagagaagccaataaagctgctcatgctttatcaaaatttgatcttccattggatgaagatatttcatagttgggtgaaattccatctctaattcattctgttgttattgaagactctctcaattaataataacagtttttacttaaaaaaaaaagaaaaaaaatgaggagacactactggtccacatgtatacatgtcgaaagccgaaattaacaaacatataaaataggatatatatattttttttttcttgcatactctaattaataccaactaaaatttacatataaactgctgtataaaggtcttcttttttattcaaatacggtttggcctttcaacttcaagcttcccctttgctaatcttacctaaaagtaaactcacagctccatcatcaagctatcaactaaaaataaaaataaatgaatactattcagcaatattaggaaagtaaggatggggaaaggaatattctttcaataattagctacaataacaactattagggaaggtctccatgaaaactaatgcgagaagatgtactgatgcctctatgaaaccttccctaatccgccaccgcactccaaactcacacccacgctgatgccaatgccactccaggtaaacccacttctctctctatcatcgccctcttttggtaaatatgatattgggtagttgcattgcatatatactgtttgataaaatgattgtgtaaacaatttatttatatagttgaatagcaatcaaagatgctttatgggtaattaataattatgttctatgttgttaatgctttacattttgtaagtttgttttaaatttgtgtgactgttcatgaattttgctcataagtcaagtttttgagaataaatcaatttagctatagcactttctgattttgatcacattatcttataatctcactggaagtatgttcctttttggatattaagagtaaaaaaaaaatgcatgtcttttctgtaattataattgcagtatcctatactttggtaaaataaaaaaactaataagatagatagttttatattctaaattgaacaagagcatgattctcaaggagtgtgaggcggttatatataatattgatgtgaccttaattatccaatttttagaaagtatcttaggcaaagtggaagagatgtgcttgatttccatctggcttcccgccagttgtgtggtctccactactttttgatcaaagttcaaagggaccgaaggtggagttgattgtaactctcttaacagatataggtgcagtggaagggatcaaattttggtagctttaatggccaggaggctgtgtatgtatagctgcctttcccttgcacaagtttttggcagactgagaaacccttcaaggtcaaaatctttatctacagtattcttcagaatttgggtcccacttctctttgcagaagtctttcttcttcttctgtgtaaagttcgtgtcttatcgtttccaggttagaaactatgtttggttcaactgcaagtacttcaactagtcaactctctttatattttcaaggtgagctttcctccccttcctctctttatgttttttttttatgtgttataaaaattatcagggataatatatgtagttagctgtgttttatactaatatctgatgctcaccaactgtttgtatgtaatccttgaataataaaaagttgactgcttgaaactgattcattcttcgcttgaacctggctctaagtttagggatatagaaaggaaagagagtaggcaattaccggatgttcattgaattgttcattaggaccaaaggaacatgaaagaaaaagaatcaatacaagaattatgtgaatataatttaacctaacctcagttctagttaccaatttcccaataatatatgaagtaatggaatatttttggctagtcttcttttccatagtttcagcttgtaagagtttttctaagaatgtaaagggtttttgagctttagtgtggcataagttttttctttcttctccttttataaatatcgttcaacacttaaagcatacattgcctttgcagcatcacgatcatatgctcgtggtggacgtgaccattatgatctctttggcaagagcaaactaggggatgaggattttagaaaaacatggaagaaggagatggacgaggagacttctttatggacaggaagtgaagatgaaagtgatcaggaatgtggaaaagacaatctagaagaagagatcaggaaggtaaggcaacaggcaaaggagcactctcacttaattgatgctgatgatagtgatgagttaagaagcgtttggtctgggagtgatgaggagaagactctgtggacagggactgaaggagatgacgatgatgatattcccacagaagcatacccaaatgaagctagtgataaatatgttgataaaactgtttgagttttgaggaaacatcaaagtatcgaacaatatctgaactattgaaggctgagcaggaaccagagagctgtcacctgggaagcaagctagaaaacttgcagtagagaatgcattgaaaaaaa

SEQ ID NO: 301741 - DNA, 1318 bp, Cannabis indica
atacaagtttactatctagatttttatggtccgttaatttgtgttatatatttaacattttaactagatatgaaaactcatattttgttaaatgtataataatattttgataatcattatatatataataaatatttgatgaaaataataataactaacatgtataatcttattatatttttaataaaattactttattaaaaaaaacaactattttgaataaagtgttataaaaatgatctattaataaattttaatatacttttttaaaaaataatattgacataaaatatgtgttaaatctatatacagagtattattattagatattattaatgctattagcacgagttttaaaatagttagtaatattctataaatattatattaaaatatataagattcgatatttaattggttggtgctctaagatactacaagtatattttagcatttctctcacaacataaatcttgctgcccaaatctctcacttgatatttgcctatgatagactctttgtttgtcaagcaaatgagaactcttgccttgcaaataagagagttttagatgtctaccaccgcgctttaggtcaaattcttagcccatataagtctgtgatgtctttctctcccaacacaattcttgctgcccaaatttttttccacaaacagctctctcccatttgcaagtgtcataagaaatatctgaggttgccatcatattccagaagagataaaaaatagctatttggagactcacaaaaaaccaacctgcgaacccgtccgatggtgtaccgggttgaacccgacctgcccaaacagaacgggccattttttaaaatttttagttgagcaggtcggctccgagtgggttggtcgggtccaggtcaaactcggtcaaaatgttcagtcctaatctcagcgataactaccaattgctcagattgaatctaatgcactgctagttgctaatgcattgcaatctccttcttctataattttttcttatcaagacttaattgtagatatttctagtcttctttcattttttcttgatgtgaatatctctcatgtcaaggattcaattaatatgacttctcacggtttggttaaatttacattacgggtggatgaaatttgcttgtagttggagaatatctttccaccatttactcagttattgtaatgacttacttttttatttatgataacatgtatttattctaaaaaaacaaaaaaaaaaatcatatatttttggactatttacaaaaatataagaaaagaagataataacataaaacactattttttgtaaaa

SEQ ID NO: 301742 - DNA, 1403 bp, Cannabis indica
aaaaaaagtagtagtagaacactaaacaaaaaataaaaaaaaaaaaaaactaattttcaaatttgatattaaaatttgttgaattgaatatttcattacaagttttcttttcatactaatttttttttttcttccacaccaaaatctaacttacaaacataataattagtttttacaaaactattaatagaaatcccctagttatccctttttatagtaaccctaactatgtgactgtctaccgttctcttcaatcttcaatttgctctaaagcctactaattatgatattttaataattataaatttttcattatatataactccactccccggatatttcaaatttctaagaaagcttataaaaatatatatttttacaagttttacaagaaatcatggtcaaataattcggtttctcttaggttgtgttacttagtttaaatagtgaagcctttcaagcctcttcaaattaaaaaaaaaaatcactcatatataattatatctattatcttaaaagttcacactctactaaatttaattgtccgatttatattaattcatttgtttattataatatcaccacatgatatcatctaattgaccactaaatttgaaacaatattaaaaaaaaacaagacacttttaataattcaacagatattgtcttagaaattaaggagaagtcatatattaatgtgatgtgagtacaggttctttattgtctacctactatattaatttgattacaaatatgtgttattattatattatatatatatatatataaaaaaaaaattgcaagtgtgacataacaacgagctgaacatgttttttttttattctaacaactcaaaatataatatgcaataccttattaacttattttacacattacgtccctagtggcgataaataatttgaaataataattattctgtttttaattttatcccttcattcttgactcatgtgatgaaatctttattttgtttaaatcaatatgatgtaaattaatattcagcaatatatatatatatatatatattgtaaaatatataataactatggtaattaggtttttcgtagcattttcgatatatatatattttaattgtatagctaaaattaggatatatatattttcaattgtttaatcaatatttttaattattgatcacatatttttcgtatattaatcattattgttaatttaactatacaatcaatatgttgtaaaatatacaataactatgataattagtttttttgtagcatcttacggaaaagaataaatatacaattaaaaataatatatcgtcacttaaaattatttaaatttttatataaataaacattattatatctttatatattaaaagtgcctatctaacggcatttctt

SEQ ID NO: 301743 - DNA, 4133 bp, Cannabis indica
gaattgcctttttgtcagagaaatgattagcttgcagaaattttcattttataccttctgaatgcatatttcattgtatttacagggagagcttgatagttttttcacgggaagtaattagattttggagatctatgtaaagatccacagtggcacaaccttggtcgtttcttctccgggtaattctcttgatatgatttgctatatgatgataattgttgatctctacagacaatgtgaattgtacttgttttagtatttcagattagatttagaaaattcaattcacacacagaaaagagcagaggcagacatgacgatgcatgagttgactgttcttgctcaacatacttctgtaagtgtcatattgagtttattttattgattgattgaaacttagttttgatgatggtttcagcttctgtataattctgttggagtttcttcaattttataaattttagagttaatgtttgaagcttttttagtttttattatgtacattttatgacatttaatctataaatatattttcaatgcatgataaatgggtgcaatttatctctttgcaacatatacctactttgatggttgaagaagctaattcatgtttaatgtgtaggaactataccatgaatttaattcattggacagatttgaacaagattaccagcaaaaggttgaggaggtggaagccttgaatctcccacgaagaggtcggccataggaattatttttcaatttctcatgtccagttttccttgtgtcttcagttaaacagtcgttttgatgacatctatagcttgtttttttctagtatggtttatacacctttactggtgcttgaattggttttttggttctggttaattgcatttatacattgattgcgtttgcttgtcatgcttaaggtatttttttttttttttgaaaatatctgcatgtttgtttatgtaacagaacctaaaagatttctttataccaagtgtggcattctctattaatctttacatgaaatgattgactaagatcccctttttgtgcatgtgggtagttttttaaataataattttcaaaaaacacagttgtggtgttgcatacacttcatctgtgatctatttttggtttcatgtccaacagtccaattgtttttctcacaaatttgatttgtcagaatgtggtttgcagatgaattctgaacttgggtgtactgattttattgaattctttctaattgtaggagagagtctcaagattttacacagtgagttaaaacaacaaagaaagcttgtaaagaccttgaaaaagaaatctctttggtctagaaatttggaggaggtatacttgttttatctaccactagtaactttgctaaacattttactgtggtattactttacgccgctaccatggttgcgttgtattatttttaaactatattgtattcgcttaatatagatgatagttaaagtagaactacttgggatgcgtattccaaatccaaaaaagtgaaaaaaccacatctacctactttgatatataaaattaaaatacaaccattgtcaggaaaatttacctaaactgcagtattatttaccatcaaagtacatgcaattacttatttttttccttttttaaaaaataaataagttacttgatctaatatttattatcttctttgcagattgtggagaagcttgtagacattgttacttatacacatcaagcaatctctgaagcatttggcaataatggtacaaaataattctttaagttgattgataagtgggtttataatctaagcaatagtatggtgcatattagtttgaaaatttgctcgtagcatttcaatcggtttaattagttgtgctcaaagtttgttaacgactgacttaaaacactggcccataagtactcagtatcatgctaaagagtcgttagacaaattttaattcttttatttgtttggcaatgcatgcatcatcactaagtaatatacaaactttgatattttatactaacattcattactaattttcttcctggcatatgccaggcatgtctttgagtttgtggctttgataacttgtgctttaaatgatactcttgattattgaaattttatatgtatattaaacacatatatttgcttatattaaatttttggatggtagttttggttcttaaaagtttcttttatgtcaggtctggtgtatagtgccaatcaaaggaaagatcctccaaggctgggtgtagctggtcttgcattacactatgctaatgtcatcaatcagatagataatattgtaattttaactctgatctttccctccctttgttgcttgcattacacatttttccaatctttagtttactcaatacataaaaaaaattctgctgtaggcatcccgaccgacctcccttcctccaaatatgagggacacattatacaatgggttgccaaacagtgtcaagacagctttacgatcccgtttgcaggctcttgatgcaaaagaacaggtatgtgtctgtctgtgtaactgtggataatgttttttttttctctttagactgtaatgtgtgccatttcttgtgttatcaacacattcctaacctgttcattgtgtatgtcactatgcaatgtaatttaacgacttcttatttatatttcaatcccaattattgatgttatcaacacattttgtcttctgcagctttcagctcctcagattaaggctgaaatggaaaaaacacttcactggctggttccagtcgctgccaatactaacaagtgcgttagttgaaatattttcgaaattttgcaaatagtttcttgtcctttttcatatcgccataattgcacttaataattgttttttacgattggtggcagagcgcatcagggttttggatgggttggagaatgggcaaattctgggtatgtaggcaaccattatccatctgtttgtcttttattcaattgaaaagcataagaagtattcttgacttattatgtgaattctgacatttttacttaatataacagtccagaattcggcaagagcacaaatacgcagaacagcatgattcgtcttcagtcactatatcacgctgataagcagaaaacagatctatacatcctcgaattggtgacgttgcttcaccagttaattttcatagttagacataaagacaatggatcaaagcttccgtctacaaggtctccaactcgaaagggagtgaatttacctggcagaatgcaacggcttctatccttggatttcggtactaaatctcgcaaagtgcaactgtctcaggaagataagaatttattaaatgatgttacctgtggtaggaggaaaggggtgttaggaatgagcaaaagtcaggagtttattatagtgaagaaaagagataacaggttttgggctctgagtaggagcacaggtagttcacctaatagggatttggctgctagacgaaacccagagcattgcaacaatgtcttggatgttatggatggattagataagatatgacagacattttaagagcccttaattacaccacaccacacccaacccattgttcattttcatcataccaagtttctttagcaatgtttacatatcgttgtaaatatatctgagccagttctcattttgctgtatataacattttatatatacacatgaaagaaaattagactgatttaaaagtagggatcagatggttctaatgagtgcccaaagtcgtaacaggctttgggggcagacactcatcttgcatcattgcaagtattgaccactcatcacatcccgtttctgcctgaaggatcatgattcagtacgcagacttactctcttttttatattctcaactttcatattaacctctgtcagttgtcaatgtgggactaaaaagaaagaaatttgtcgccaaagttctagtttatgctttctcttgggcacacatgttaagaagaatataatacactgctaaataattaataattattgtcgtagtcttatacgtttgattttgtacgtcttgaaagttttataaagggattatttcacaaaaacataaaaacaacaaaaaaaaattatgaaaatatgattttacggaatttt

SEQ ID NO: 301744 - DNA, 2719 bp, Cannabis indica
ttcagagagcacgatttactacatgtcaaagttcaggggagaaaattattaaccttatttttaagcatagtaaaagagagaataatgtatttgctcataactatttgtatccgagtgttttggctctctgtgatggatagttgtccttaatggtaacttcatttcttaagaaaaagaaaactacaatgttcacaaaacattgagttttcactaatatagaattccctattatatttatgaggtttttacaaaaataatggttttggatggagatttacaattttactgttacacggatttttttacgaaaatattatctttttataaaataaccataaagtaacaaaacataacaattaaaataacaataaaaatttaacactgtacacggtattaaaaaaattttgctccataataaacaaaaataaaaaaattggaaatttgtaaaaaccccttaattaaatgattacaaaggatactaagtttatagtgaagtttgaaaatatgacccattttcaaaaacaaaagaacacaaaaacgtttcaatatgatcacgaacgaattcggtcagtctgtatggcccaaatgtttttgggcccaatattttttcattactaatccacaactgatgtctatagttttccttttgtgattttttcttccttttcaaaaatactttgaaatgttttttttaatgagttttttaagttacatactcaaatttttttttttttttactgtgggacagaatttttttaaaaaatatcatgttttttttttttcaaaatactatatattttttatactgtgtactgtgttaagttttatattttgtttcactgttggtttataaaaaaatatatttaaaaacatttccgtctgataatatttttataaaaattaatctcaaattcagtaagttcctctattttaatagcctcctacactaacattttttcctatttttaaattctaattttcaaacaacataccaaactaaattttgatgatattctttgtctaaatcgatatagagagttctcttcttcttgtctcctccacacaatcaaaggacctctaaatattatttcaaaatggaaaccattaatggagatgaaacaatacttacccttgagcctacctaaattcccaagctcacatattctcccctttccttatgatccaatagcctctcttttgaaatattcagctcagccattaaagatggccatgagcactaatcttatgtttagtaacactcttaaaccacttagtcatagtttaacactaatcaccaagtgacttctcccaaccgcccacgaatgatctcttttaaatgggtagaaatccaatcaaataatattacacatgtgttgagggatttttgacaactaagaataggttaatttctaccgcaagtccctaaaaagtattgggttttggtccttaaattttattttttggtaaattaatcctcaaactatgtaagttttgactaaatggtcctcaaactttaatttttggcaaattaatctccagacttttattttcttaaaaacataaagtcatcactctcttaaatgatggtgttttatttatttatttagttttgtattagttttaaatatttttatattgatatacattatcaaattaaaaaaatgcatattttttatttatatatttttttaaataggccaaaataagaaaaaaaaaatcaagacatatttttaaatataccgaaatatatattttttattatatgtattttttttaatcaaatcaagacatatttttattattacaaaattatatatacatatgaaccaataatttatctttttatgaacaacacttacacaaaatactttcgctatggaataattcatattcattctccttaaatagcatgatgggcatgtacaaaaaaaaaactatatatagtcaataaaagtttttggatgctctaattatttttcctaccattaaatgaggatcatttcttaaatatatgaaagaactatatatgtagtaaaatattattttgtgcacatggtattcctagaaattatgatattctcacctcgagttttctttgaatatcctcacttacaaaaattttacttttagtcacaacaaaaattgtggctaaaagtaaaatagttgtgactaattacaaatcaccattcttatgttgtgactaaaaatttcgtggcgaaaagtattaattagtcacaaaaatctcaaattgttgtgactaaatgtgtttttagtcacaatactagttgtgactaaaactaaattagtgaaaacttgtgtctaaatactatgttttagtcacaagtaactttttgttgtgactaaaagtcccatttagttataaaatcactaaaagtagttattttttgtagtgcctacaagcatacacactttaatcttgggaataagtttcccaattttcaatttatgaacatgagcaggacaaccccaaatacaaaaatgtttcaaactaaattttgttctattataaaataaccgagattgttacgtcaacataagttattggagaaatgcaaccaaggttaatgttgattaaattttggggagaggacatagtttgggtttggattcgttgcaagatactcatggggtgagctagtggaatgtaacgtccccgcttcaagcctccattggcccttacacccacggactaatgact

SEQ ID NO: 301745 - DNA, 3393 bp, Cannabis indica
gtgtgcatgtaacaaaaattattgtgtactaggaaaactacaacaactactgatacatagaaaagactttaatttagctgacaaattaaatcttacaaagatgaacgtcaatttttagtattatcagtaaaaggaataaatcttatttttctaattttagataatttaatatgatctctaacatattcttaatatacaatctttggttgttttacgtactatatatcctcattataattttattattttattagtgatgtattacatccacatgtatataggtatataatattgttgaccaaataagtttcttgtacttttttttttccataaaaagactctatttcttgtacaacaataactaaaataatattgtaaaaaaatgatagaaaaggaggaaaaatagtttatatataatttaatatttttattaaaaatataaaatattaacgtaaacattaattttgttattattgtattatgtaaacaataaaaaaaatatacatattttatattttaatgctagaataaaatatactaataaaaagtagtgcattatgtaaattttgcattataaatgttgaccctcaaaaaaattgctaagtataactttttgaagacctcaagattaaacgtgacaaaaatcttaaagcgcactttataagtattggtaaatcaaatatgagtttgtcccgcgcgagaacgacctgcaggaggagccccctacacgaggagtaaccagttatgggcaagctccttacactagccaactctccacaccatcgggagctccctgctcccctttttccacgcgccaagcaagagctctcccctccttcacgtgccaagcgggagctccctactctcccctctcctcacacgctccccactctgtcccctctcctcacacactccccactcttgttatggtttatgccctacaaagcctgtaaagtaatttctatttacatatattagttgaatattttcatatatgcttgaatgttaaattattaatatttaatatcaaataattaatacatatattgaaaaacagtcagcaacatattaaaattatggaatctttaatcaacgattgctagtgctgttcactaatacatgttattcgatgcaagcgatctcgattcagattgttaatgtagtatgatatctaagtgaatgtgttgtatatagtagagattatatatgtcaaggactgatatgtaattaagctttctttatcaaatatgtcatttactataaagaccggattcatatcataaaaatgatcaacaatagatcgtcttgaatccatcgtaatcatgaactcatgtttatgttattagtttttttgattcactcattaaagtttgtcaggaaagatcatgatttttataacttttattttgggaatctaataatgtggatggctgggaacatgatctacaattatagaatcctaactttcttaacggatcgaatgttggttctatttaagtgttaattccagaactaaaaagttgtgcacaaatttagatggaagctaaattatacttttactagtgaattaacgatactaaaggataaagaaataattaaaaaggtaaaaaaaatttgacaaaaactaattatgaaccgacataaggagggctaatcactagaattgaatatatcaatggacattgcagtaaaactccataaatataattctataattactaagagttcaattctatatttatagtggagtaatcgtggaattaataaacatgattatttggttgatgagatgcaataaataatctaatttattagagcttaaaattataggtccatggtccctggattgccaccttaaaacactgttaagggtagggataaatgttgtatatggaagtttaaaaaaatctattttgatttgttaaataagtaattatttattttttaataaataatttatttttcaaatttattaattaaataaattagagaaaagataaaagttatttgggcaaaagacaccaccaatatctcattaagacataggtagcgccactatcactaccacctgacatagtgatatgcacccacacttatatggttgtccccactggatttgtttttggttaattaattaattcaaaaaataaatatttatttaaatttaaatttaaaaagtaattatagatatttttcttggttgagatattctctcaaggtagttgagagatttccttaatcagttatagaaaatatatatctataactaatttagttatattatttatttatcaaataattatatatgatttaataaatgaatttaaatttaaataattaattaaataaaatctttattagtttttatttatatatacatgttgacgacaagaattcgtcaattaacttcttagtcagaaaattaaagtaaaaacttaaaactcagatacaagatgaagattaaagtagaatgcaaattaaaatgtcaatgaggtttatgagtagagagaaaaatctttcttctattgctttctagttggcgattacaagactgatttatctaaccccctctcacatttgagaatagggtatttatagtttttaattgcctaagatgcatttgtggtcatcaaagaacaagttggccatatgtgattgcgagttgcaggtgtaggaggtggtcatgcgccatgtattgttttcaggagtcaagtggtcctgagttggagggcaaatgattgtagaatacccattgtcaggatgtcaggggtttcaaacgccatctctccactactcgtaccgtcttgctactaggccatgtttaagacatggtcataccctacctcgtacctctatgtgtgcatgcattgtcccttgattcctttcttgacgagcttttattcaactttgaggtgagttttgttctcatactgcttccatatcttctcctcacatttttctctcacttattcccatcgcacacaactcaacacatccacccacaagcactcacatgtgcatgctctcgcgcacacacaaactcacaaacacacacacacacacaacacacacacacacacactcactcactcacatgcactcacacacacctgaacacacacatgcatgcacacactgacatgcactcgcacacacccgatcacagacatgcatgcatccgctcacacacacactcactcactgatatgcacttgcctacatgcacttacacacacctaaatacacacatacattcacccactctcatgcacacactcacatgcacttgcacacaccctaatacacataggcggacccacattgtactgagggggggcagtcgccccccctgaaaaaaaaaatcgagaaaaaaatgtatatgtattttaatta

SEQ ID NO: 301746 - DNA, 592 bp, Cannabis indica
aatagaaaagattacattaaaatagagttttatttagagcagaaagcccaacacatttgccatatttattttaatggagcccagcttagggatatatattatgtcatctttttcgcctctattccattgttgagttggtttaaaaaactgtaattcatggaattaaattaaaggtctcaattttacaattataattcaaatttgttttcttataatatcattagttatatataatgtagcttatactttcttcattgcctagtgcttaattattcggactaattaataattttttggctcatcaattagttagcgtgttttggaatatggttttattccattttcatcttatattttttattgtataacttcttatacttttaacgttttctttaagatgaaatcaactctgctcaccatctcaaaaaaaaaatcaactcggctcactcttgacttgatcagtgtcttatatcttaatatcatcagcaattttaaagcgataaactttatatatgttgggtgtacattcaaagtcccacattggctagaaatgggaagaatcttgagtatataaggatgaacactaactcca

SEQ ID NO: 301747 - DNA, 1819 bp, Cannabis indica
tttaataagtatagaaaatcaaattccccttagttaatctataagcttaaaacaacagctaacacaaaaaaaaaaattaaaatacgcatttcatttttagtcatatgattgtatattttatgagttaaaacaattatagtggttaattaaattctgcataaatatttagataaaaaaaataaataaaaaagaagaagagaagaagaagaagaaagagactaacagaaaagaaattcaaatgggattgttcccattttgtcactctttttcaatgaacaaatattgtacatatatatatatttatataaatttatataatatctgaactgttcttaattcaattcagtcattgtacatagctaagaaaacaccatacgtaataactcttctatatctaagtaactaattattacaacacatgatagagagattaattaatcaacacttcttacgtatacataatataatataaccatattaattaatttctaatttgatcatataactaactttttttttttcttacttacttatttattatatattattattttattattatttgcatgtttgagacaataaaatacttgcactttcactaagtacttgagctctttttctcttcttttccacctctccttcaacttccaatctaaccccaaacaacttaggcctttgatcatcatgatcattctcatatttagccaccaaatcaagtaattctctacacttgttcttcatgtttcttagctcaaagctcaaaaccccattttccttcttaagcctcttgttctcatcaactagagtggtgaataattcggaagatgaagaagttgatgaagacctttggtcttcatcagactccactactactacatgtcctcctcttcctcctacagctgcggccactgacccttcctcctcggttgttgctgtggccgcagctgttgttaattgttgcttgttgttattattggcccatgctttccttctacggatctcacataagtggtctttttcgccttttcgaaacttgtcattgcaaaactcccaacggtttgttgcaacttttcgaaaaccctagttgaataaagacaacaaatgtattaaaatttgcatgaaatattgctaaaagtttcaatcatataatgtttgtttgagagctttaattatttggaattagctaattatatatatataaatatatatataatggatatgtgagagtataaccaaagttttaagagagctgatgctctaccaaactctaattatgtgtgaaaataaaataaaatatgtatttattattaattccacctgatgaatataatcattgattgataatttatatatgaatatagttatctatagttgataatgaatcaattaagttgacattgtacatatattttccaattagttcatatttaatacttttcctaagttgacaaacaataataaattgatttgagcaattaatacatattattccactttgcatctataaaaatattagtagtgtctaacactttttaggaatatggttattgaattctataattgttattaaattaaaaatttatgtaaaactcaatacttaatttataacacttaaaaaattaagtgttgacaccactattaacattgctcctaattactatatatggcctataagtatatatatatgtagtatatttgttatatataccattatgtgtgtttaattgtgtcatattatgtgtgttgtaaaaagtacggtcacttcaaatttttttacttttagtcacaataaaatttgtgactaaaaataaaaaaagtt

SEQ ID NO: 301748 - DNA, 977 bp, Cannabis indica
gccaatagaaaccctgcacagctgccggaaaaagttcacaggcagccaaagcatagattatgagagcattcatccccatccattgcaataacaaagtaggttttctaatacatttgacatcgacctgtataagaaaaacatgcaccaaatatcttgcttagcaacctcaattttgtctaaactaacaaatgaagctcctcataatctcccatgtttttcctctcaattctacacaatactttgtatttaatgatctgttcttacaatgtaatagataacggttaaacacaagcccgatgctccagctgtcagacatgtgtagctcaaagtatataaaggttttgaaaaaggaatgcctgcaagaagtagtcattattttactgcaaaataaagaatgaaaaccaaaaaaatttaataaatctcgattttcagataatatacctataacctccagaatgaatcccatgattataaggggaaatgaaaacaaggaccatagaagtatcttctgtctttggccctacatgaaagaaggagaagaaatcaaatgagacaatacgtttacataagcatcatgaacacccaccccgtgaatataaatagcactatcaaccataatcaattcccaaatcatattgatattctgggttaattagtaccataccttaaaatgcacaactatgtgtccgtaatgcaatcccagaaaacatgtaatagcagccattagagagctagaattttataaagaaaacaaattagatattggatcacaaacaatacgaccttgctctcactattaacataaattcaagaacttttgtccaatttgactaatagaagtctgccgtgaatgaaaattcaagggatatgatttaatacatgtcaaagttcgcggagcacgatttggtatctatcaaagtttgggagacacaatttggtacaaagacaattatcacgttagtaaaattgaacgaaat

SEQ ID NO: 301749 - DNA, 1429 bp, Cannabis indica
agccaaacaccgagttccatgataccgggcaccggaaatgcaaaattatgaaaactactaaatgacataaaagtgcatctctgaattcaataataacagtataaataatttcataattaaacgtgattaactgctaatttccaaattaaactaagcggtctttacactagaggtcttgacttgagttgttttcttagttcaagccatgatgggtatatctggcgatgaagcaacagtggcaaccgtctcggcaagggcacactcccgagataactcaatgggcaccccctctagtatgatattctcactagagggagggatgtatgcccactctctgggtagataagagtgtatccctcatcttagcttccaaatgtgtctattgtaagcttcatcgcttatcatctcctgataaagatgagagggcgtcgtggtcttattgctataatctttgtacccatacaaggtaggcggagacgacttgagaaaatattcaaatgaaagttgaagaaggtcttcatttactcggtggtcacctccttaatagtctccataatgtatctgcaacaaggaaagtaatgctattaagttatccatgaaggactcacctactagtaaaaaaaaaagagaagagagaaagaagggatacattcatgaaattcatgctcacaagaaataaagtgtatcaaggcaacaatcgctcatatagctaaagtaaaatacaatgaagacaatcatacatggtcaacttttgggtgctattctcaatagagatcttaaaaattttaactaagtgtatatcaagcttgcaatacatgaaaagtgtatacaaatgcaaaatgacattaaaaaagcaatcacaatcaacccccacaaccatggattggggtagtctagctagcaataaccccactcggggtaaagcaaagtatcaccctcaaaatatatatatctttgggtatacccgaacgtacttaactcagagagggtttactttggggtgattcacccgacctccatgtggtggtctcgaggtggtgtacccagaccttcacatggtggtctcgagacagttcaccccaaccacaaaccatcatcctctcagcgtgcaaacaaatggtcaactcagggtgcttggtcaagtcgaggtagaccacaccccaactcccaacatggggtaccccgagaccacacctcaaaaccccactcagggtattatcaaaaccgcactcgggatattctcaaaccccatctcagagtactatttaacaccccatttcaaggtgtggctaaggcccccatctcagggagaatcacatccaaacttgaggtagagttcaaccctggtaccccatctcggggtgtaccccaatgttacgaattttatgtttattacgcaagtatacgcaatcaagtagtatctcacgca

SEQ ID NO: 301750 - DNA, 3138 bp, Cannabis indica
aattagacaaaaatctttaaatactaacaatctcaatagtttggggagtgttttaatgactttaaaaattacagagggtataatttagtacgtgtcaaagttctaatcatttttattttatataaatatatctcttaatttttaaaaatcacttttaatatttctttttattttttcttctaatctaaattcttaaaaaatatattgataccaaaaataattatattttaaatattataataaaaaataataaaaatgaaactaaaataagtattaaaattattacagtaaaaaaattaaaataaatattaaaaatgattttcagaaatgatttttaaattttatttttttttaaaatattaaagtatccttatcatagttttttttttttgagaaacttacaaaaatactggaatttaggttaatttttacaaaaatactatcacacggaacaaatttcaaaaatactgtgtttttataaaacactagtaaaacacaaaacagaacaactcaaaacaatattaaaacaactaaaaaacaccagtagaacaccagtgaaaacttaacacagtatactgcagtatgaaacttataaaaaaatactaaaaaaaaagttaaaaataccgcctgacaatatttttgtaaaaaaataacaaaaattagtataccatgtaaatttcctttttttttttccattaatatgatggaacaaaatcttccaaaacctagtacgtaccaattacaatttggttgttaaaaaaatttcacccatttttcaataattaatacatatacttacacggatcattctcttcgtaacaatatttacacaaaacttggcatgatggaagctacagatagtaatctctatttagacttgcttaatattattagttgtaataagaattctattcttaatttcctcaaaaataaggttaccaatcgcttaaatagttggcatggtaaattcctttttcgggcaggtaaagaaattctccttaaaactatagttcaatcgcttccaacttatgccatgagtgtctttttaatccctactggtacttgtcaagaaatagaaaagctaatagctcgattttggtggtgaacgagttcaagcaaaggaaatgacatcatatggatgtcttgagatcgtatggccactcataaacatccaggaggtggattcaggcatttgaatgagtttaatcttacgatgcttgctaagcaagtttggcgattgttatgtaatcctaatacccttgtaagtcgagtctacaaagcacaatatttttctcactctgattttctcatcgctgagttagatcgtattccaagcttcgtttggcgaagtatttggagtgctcaaaatttggtaaaactcggggctcgacattctttaggatgatgttcaaccactagcatcttgaaccactcttggctctcgaacaaagttaatccgtttgtaatttcttctaatcctgggttacaaaaccagcaggtggtttcattattttctaatggtttatgtagctgggactttgacttagttcgtgacatgtttaactctcgagatgctaaccttattcttggaattccattgagtttgaacgctaaaaatgactattggtcctggtttggagataactgtggtagtttctctgttcgaagtgcatatcggctgctgcatgcacaacctacagtgaaaaactttgagttctagaaaaacttgtggcagcttaagattccactaaaggttaagaattttctttggggaacagtgactaaatgcttgcctacttgtctcaatcttgtcacaaaacatgtgagtatctccaatctctattctacttgcctttcttgggctgaaaacacttcacatgctcttctcgaatgcccttttggcttttgctactgcgtgttggctgaaatttggtgtatttaacactaactctcctctcatgtttggctcttggtttgaaaagttgttttcaataacaaccaacgaaatggtttgcaaatcagttatggtgtgatgagccttgtggaaagctagaaataagaaagtatggaaacagatttcttcctttgttgacgaggttcttgtattggcaactaccactcttggtcactagagaaaaactcaagacaaaacgtccttatcatctatgtttcttggaaacatatatgatcaaattgagctttggactaagccagtcatggataatatcaagatcaatgtcgacgcagccttgttcaagaaggaaaactcacatggctttaaggttgtgattcgtgacaaccttgctagacctatacacattaaggctgagtaccatggaggtctttacccagctaaagttgttgaagccatgggtatcaaagaagctctaagttggatcaaaaacaagcagtgaaaaggtgtggagattgagactgatactatgctcgttattcaagctattcgttctagtcagttagtgtcttctgtctttggtttgattattattgtaaaattcttttgtcctctctaccaaatgttcatttacattttgttagacgatcaacaaattgagttgcccactatgttgctaggcacgctcgatatctatctggtcttagcattcttgggcataaaatctcttctaattttttcactcttttgtattcagaatgctaattcaatgaagatgttatttcatttaaaaacaaaaaatacatatacttgcattttaatttagatggcctttgttagaggcggaggcaagaaggcatgcggggtcatttacttttgctcatttttttacaaaataaattttatgtataaatttttaagtgttttatattttgatccataaaaataatttttttatatttatatctttacatatttttatttttaaccacataaatatatttctaatttgcatcccacataaaatttatattttttagcttttattctttttataattttttattttatttcctactaaaatttatattttttccaattaaatttaagtaatactctttataagaaagaaattttttttgtccccactagaatattcggctggttctgccagtatttgctagtacttttattttttaatttttttggttgactaaaataaaagt

SEQ ID NO: 301751 - DNA, 2473 bp, Cannabis indica
atcaaaaaaggttatagataagtggcaagttaatcggctcttggaggaaggcaaggacccaaagtctcagcaagcttggcatccaactttttgttcttctcccataaacgggtcaggatgactttaggattgggtaagaaatagagtatgggctcaaattttttggacctcctgcacatgaagacaccatgctcaaaatgcttcatgcactggtcgcaagtaaccggggttgcaagagccttcttggcagctttggcggcctcttgtttggtcttctcctagaaatcacgaagctccttgagctccatagacatgctataagccttctggatatctgcttggtggagttcttcaagttttttcaccttgtcttgaagcttcttgatctcctcctgggtagtatgaaggtctgtttgagctatctttaataaatctctcgccactcacgggtctcattcctcaaagccttctctgctaagactttatccttgagagcctcctctcgcgtgtttgcctccttgagcttctttaaggcctcatcgattctgccatactcagccatatcaaatccttgatcaatcaaggtattggacaaatggccaacttcagcagcaatcttgtcaaattcacacctcaggattagcgaagtaaagaagcaaataaatgaaacaaaaatgagtaaggaattatcgaggtcatagtggtgctcacatcttggatctataaattaggttggaggaggtacaaatgaaaaatctcttggttgggaactagaccatgtcataagcaaaatggcctactatctcagaagcgaataaagccaaagaagaccccaaaaaacttgagagccagctaatcatcgggtccagaataaggtcccagacctggctacaatactcccctcgaaatggaccatcctagttctcaatcaaccattttcgtaaagcctcttcctcaacatttcctttggtttgctcatcaacaacataattatgcttggaaatcctaagctattgatgagcctcatttggatggacaggattcagcgtgatagatgggacgcctaggaaggcatgagcttcggaagggactcccgagtcctcggtgctttgagaaggagttttggctgccttgagcttcttcgaagaggtggagtcatcaacttcattcttctgcttgcattccaatggagccgactcatcctcatcctccatgcacacgacctctagatctgaagcccctaccgcgcttagaccttcgggagtcattataacccttaaaaagttagtaggtggaatagtatcgccttctgcagggcttagtgcatcgaaggaggcgaagatagcatccattggcttagttgcagacaaaaatggaagaaacataaggaacacttacaaaaattcacaaatataaagacatgcaaaaagaactaatcctacctagacgacctaattcttccctagcaaactcataaataatattgttggtgtcatcatctcctaaaaaactatttgaagggagaaaccaactcgaagtaaggtagcaagaatggtccagaaagattaaaattggagaatcagaccccattcgggacctacataggaaatcaccaatattagaaaagtatcactctttgtccctataaccccactaggagtgaggcattcgtactctaaataatctcctatcaaagcctactggtggagaacgagcataattcctgacaaaggaacataatgaaaggatagattggacttacgggaactcgaggtaatagctccaaaagtaccagagttagggatcgggaaagaaaatgatggccttggaaccactgacatcttgtctgccttcttctgcatctttctatctagtgcacttcgggcacaggctaagagatcctcttgctccttcctcctctagtaggcttgatacttggtttttgcctcttggatgtattccactcaaagcttcctctcgacctccttgttccaagcattcggacacgtcagtttttacaaattagtgtccttaactgattggtggccttaaataagtccggtcctttggtagttggcggttgtgaccaagtctcctacattaagctcctccttggaaagagtcacaaaaacgacgacatggttcaagaagaacttggttggagctttccagagcagtggaggaattcaggtccacttgattaagagattaagacgttcgaaggccttgaagccataggcgaataaaaatcaatgatgacagtccttggcattattttgaaagttaaacaggacaggagtctcgttggtcagatgagcttggagggagtagaagctatccttccgtttgtctcattccttatcatctaacttagacgacttcttactacctttaataggtttgtacaatctttacaatagagcaattccatcaattgcttccaagtagaataatttgataagttcaatttcat

SEQ ID NO: 301752 - DNA, 1477 bp, Cannabis indica
aaagcataaccgtcacttggtgacatggcttgtatcaagggtagacatccacgacactcctgggcagtcaacatctgcattaggcccttcgagtactcgtccggatattagctggacatgctatcatatttggacccctccgggtccaagataggcaacacgccttcctcgtttaggaagctaaggcaaggccaagtgcttccgtatatccttcagtcttgacttgttcccagatccatgaggcttctccgtgataagattataatgggggattttaattagggaaactatgagacgaatccctttctttaaatgccacgtgtcgcatactcaaaaacacaaataacatcttatattaacttagtaagattataatcttactcaatttattctcttaatgcacatattacttcatatttcataaaatatatttaattaatcacaattaattttttttgggatatcacaggtgcatgcttgaattcttttatttcaatattgtagtgatatagtcttagataattggtacttaaattaaatttttaaaattaaattggcatatacatatggggtttaattaaaggattgaaaccataatgactttgacggaagcctataaaattaattggaattcttaactaagaaatgctctgttgctgcagcattaatacaacattactatcagtattttgcatattagggggataattattctagcttaacatctcatatttgatactttgtgctattattttccactttccagttggtttcttttatttttctacattcaattaattactcctagttttagttaccatcaatcttattcttgtattttgaatcatttttctagtgtttattttcacattggaaagcataagaaatagtctttgtgaagacaatatctggtatttattgctatactttttgttggcaatgtacacttgtaccaagtttaattttacgcaacaaactgccatggtgaaatgaccaccaacgaaaagacgaaaattagtgaaagtttcctatagctctcaatgaaagtatcaaaatgttgattgagattttcggcaaccaattaaatattcgtctaatgatgattaaagagtagacaagagtagagatttttatgtggttcgggtgttaataaaccctagtctacgagtcacttgtatttatgctgaaggttgtatagagaatttgacaacgttttggcttaatttaaaattctcggatccccttttaatgaaaatggctctcctatttatgaaaaaaaatggagatggccctctttacattattcccttggatgggattttacctaaaggtgacacctttaggacatacatcctttgttgaaaagggaatcttctcttaatgggccttcaattcaacccaagttgagaggtaggtgtggtagacaagatgataagtctatgaaaatagagttatttataggaaaatttacatggta

SEQ ID NO: 301753 - DNA, 1089 bp, Cannabis indica
tctatggaaaactatcgtctcagtaattgttcgtgggcatcgactcgacgactccataaaaggcactatacctcaacctcctgaatatcttccttgttccactgatgacgatggtagcatcagctccacaggtcaagtcattccagcctttgagcaatggataataaatgaccaacttcaattcgattggctatatggctatatcatagaagggatagcctctgaagtcatgggttgcgactcttggcttccctttggtgaactctcgaaacccttttacgtcactcactctcgagctaaaatagatgaatacagaacaaaaatccaaacaactaggaaaggctctcttacaatcatagactacttgcctaccatcttaatcattgaggcttactcatctacttcttggcaagagttgcaatatattctcctaattgggtggaccaactcagtgccctctcgtgacacaataaactcattaatgcatgcaatttatctacaaatctggctaataaaggaaattctcctactggtggacgaggttcaactagtaacactccaaatggaagtagaagaagtctaataaaaattgaggaggtggtcgttttcgtggctgaggtggcggtcgcagcaatggtcccaaacccaattgccaagtgtatgcgaaatatggtcattcgacagcctactgttacaatcggtacgatgtttccttcatggaaactccaccaggaggaaatacccatcagaacaaaggtccatcaaatccaatagaccttataacattaccaaaaacccttgatcatgttgtgttgtatgcagacaacggagccactagccatatcaaagttgagtccaacaagatgcaacagaaggaggaatacattggtaaggaaactctcatggtgggtgatggtaaccatcttaaaatccaacatgttggtactggttcttttcaaacttattctgcctcaaaactctctctaaaagagcttttacatgttcctaatattgcaaaaaacttaattagcatcttaaatttaacaactgataatgatgtttttgttgattttttctctcatttatgtt

SEQ ID NO: 301754 - DNA, 2125 bp, Cannabis indica
ggacatttgtctaatttcatctaattttactgtttcagtattatttacgtactaaatcatgcttcccaaactttgatatctaccaaatcatgcccctcaatttttttactaaaattagataaaagtgcttaaatctaacaatctcatttgacgaccttaaaaattcagagaacataatttagtacatatcaaaatttcggaaaaaaaattcctaattaaactacttttaagcatttcccatatatatacttcttcctttctccctgtcattacacgtgcgtgtgtctactgttaagtgcaacaataatccaatccaattaatttttttttctttttctttttctttgaatattcatttttttttgttttttgaaattaaatatccattatttaaagttaaaatagaataatttcacctttgccaactgattagctaatctattattacgggatacaacttttttagttgaaaagaattactatcctgtttggaatttattcatttgtttttctaataatacatataataatgacctggataatattaaggattatgtgatcttgtagatatatagtaatatagacttaagatatgtttcaaatgaaggctgatgtgatatccactagtatatatattttcatttatcatttaataaaaaattaaaaaaatatgctatgtttttaatttaaaatatagatatccacagtaagtagattaatggattaattaagtaagttggtaaagatatgcggcctcggccaattgtttagtatgtaaactatgtccaccttgtttattaccatatcgcaattaataattattatttttattttgaaaagaattataatagagatttgtctctatactcatttacagtaatttaagttgtacagttattaaaaaaacgagttggtaatgctaacaattacttaaaaaaagtgagaaagagagaaattacacttttcaaattattgtaactaatatgatgacatgttattttttaattagattttaagtaaataacggtataagtatttaaagttttaaatttataaacggcataaatttaatgatttttttaggaatataagtaaacaattttttttaaactataattttacttaagtgtcattctattttgaatttaataaaagaagatttgaaagtaactggtactacatgtttctgtttagacttaatgattttagaatctgacccttatatttgtgtgttatgtttaagacaataacaaaatctctattaacgaaattagaagaaaattactattttacaaatattgaatatttatactactaaaaaaaattattgaatttatgccgcttataaacttaaaatttaaagtaattatatcgctatttaatagatcaaccaactataattatataaatgtcctttatagtctttttcatccttaattttaattatataaaaactggattttctatcacaaatacaagtatataatgggaaaatgtgaaaaattaggaaaaatcaactaattcgaaagttgtggagaatttctcatctcccacacaattcatggaaagtgacatagttacatgtaagtgaaatccatatcttttggaaagtaacatatttacatttaagtgaaagtaacatctaacgttcatctgaaaaattttcaaaatcctatttttaaaatttttaaatgtcatatttactataaaattatctatattaaaaaaaaaaaaaacaattagaagttatagagattaaaatgggctttggagaaaggctagtgggcttggacctccggctagggccctactatttgtttagtgtgtactctagtttatgcccatttttttttcactcaatattgtattttgtcatgtataaatatgtgttaaacatctaactaggcatatttttactgtatcaaagtctttttaaattccctaaaatattatttttaattaaatctgttgcaatctatccaaaaattaaattaattaagaaaatctgttgtgtgatgcactcccatcaaataatataggttgcgtttggtaacacttttgctttttaattttaaaaacagaaaaataaaagtagatttttggtttttaaaattttgtttttgaa

SEQ ID NO: 301755 - DNA, 3153 bp, Cannabis indica
agagagaatatgttatcagacttagagcttcaatgaggcttagttatgacttaagggttttatggttgagttaaggttcattatataggaagattaaaccctaattaacaaataaaataaggcagagacatcagcctcacgctgcagccatggcgggtcgtggtcgtcctcgtaagggcatcactcaagagaaaggaatgaaggatgcgaagacaaagagaagcatgaactgaggacctacattctctgagaagatgaaaactagaaaaatggaggagattttaggggtgggtgaactggatgtcacggatgaagaatcagcggaagaagaaggagatagaacagaaatggaggagactctggtagcagcggcggaccgtttgcagccagaggaagtgccagatttttcgagctatcttgaagcaacaatgcgaatggagacgtatatcagatcaggtaatatttcaaaaccctcaattctgagatttgaaaaattgatttaaaaccttagtgggaagtttgagaatgctgataatagggggaaagttaatttaggagttaaactagagattgaagatattgaagacaatcgacagtggtagtttatgtgcttggggctaatcctccattgcaggtttttgaaggatttgctagaagagtttggaaggaaaagggctatgataggataggagtgttggctagggggatatatatcataagatttcatactctagctaccaaggatgaagttcttgaaggagggtacatgttttttataggaaaccagtggttatggagccatgggatcctaacacttattttaccaaggaaaatatagaatcagttcctacttggattcaaattccaaggttgaatctgaagtattggggaaaaaaattgctgtttaagatagcaggtcaattggggaagcctattataacaaacaaggttactaaaaacaaagagagacttaactacccgaggattttgatagaggtccaaataaatcaagaatttccagaaataatttcattcactaatgaattagaccaagaagtagaggtgtttgtgaaatatgaaaggataccaaacatttgtgggaattgtgaaggaataggacatactaccgaggtgtgtaggaagaaagaggaacagaagaaagcttgggtggtgaaggagaaatgaatagggaaggaagaaggaaaacatgaagatgaagaagggtttcagaaggtacaaaaagtgtggaaattgaagcaaaaagaagataaaaaggagatggtggctagattggaaacttcaaacaacttttagattctaggagaggaaggagaaggttcagggacaaatttggaaattaataacatatttggaggggggagcctccaatggaaaatggataaaattctaagttggaatgtcaggggggtcaataaacgccataagcaagaggaagtcaagagagtaatttttacaatgcaagtgggtttagttggtctccttgaaaccaaggtacagtctcacaatttgggagctatatatgtaaatatgtttttgggatggtttttctcgacaaataatgcatgtcataaagggggaagaataatggtgagttggagtccagggatgtttgcagtgaatattttacaatgcactagtcaattaatgcatttaaatgtcattgcaacagtgggaagagaggagtttatggtaacttttgtatatgctctaaatgaagaaatgggaagaaggcaattatgggaggatttgattagtatttccaagaatacaagtcttccatggattattttgggagatttcaatgaaatattaagtgtggaagaaaggattgggggaaacaaaaaaacaacatccctctacattgtttcgagaatgtgtcgagaaatgcttcatggaggatatcaaattttcgggtagtttttctacttggaacaacaaacaagatgtggatccaagaatttattctaagatagatagaattcatgctaatcaaaaatggctagacaagtatcctaatgttgaggtgcactttatggaggaaggaatgtttgaccattgtctgggaatccttacagtatatcaaaaattaagcaaaagcaagaaaccattcaggtatttcagaatgtggtaggggcatctgagttccagaaccgattaaaagaaatatggtagatgagaatagatggcactcttatgtttcaaatagttcaaaaatttaagcacttgaaggctgagctaaaaagtatcaatagaagcaagtatgaggatattcaagttgaagatgcttgggcgtaccaaaaccttgtgcaatgtcagcaggaattgcaacaaaatcccagcaacagagagttagtggagaatgaaaaagttgtcagaaaagactatgctgagactcatgctaattacatctcgttttggcaacaaaaagccaaattgaactagcttaaggaaggagatgacaactcaagtttcttccatgcaagtataagagctagaagatcaacttggaaaggtggtagacaaacctgatcaggtaactgaagctttcttagatttttatcaatccttacttggctagaaaatgaatgagaggaagaaggtaaagaggatggtagtgcaacttggtcctcttatttcaaaagatcaagctagttttttgcaggttgatttcactaaagaagaagtaaaagcagtggtgtttgagatacatggcaacaagtctccgggacaggatggttttggaagatttttctttcaagataattaggatattgtgggatatagtgtttgcaaagcagtgctatcttttttgtactcagggagttactcaaagaaatcaactaaacaacactaactctcattcccaaaagtaagtgcccagattcagtggtggactttagaccgatagcgtgttgtaatgttatctataaagttacaaccaatcttatttgcactaagctaaggaagattctaccagacatcatatctcagaattaaagtgggtttgttcaaggaaggtacatgttggaaattattttactaggatctagatttactaccatgtatgttgttggaaattatttggatcttcttctctgaatccttgatgctgtatctcctttgctgatgatc

SEQ ID NO: 301756 - DNA, 3354 bp, Cannabis indica
atatatatatttattatacaaagattttatgcggatggtgtacataaataacatatcgaaacaaaaaaaaataacatagtgataaaatatatagaaatgttcattttaattaaataaaaaatacaataaaatttaatgtttactaattaataaatatatttctttaataaataactattttatttttatatgtaattaacattaaatagatataataaaaaaatatttttattttaatttttcaaaataatatatataagattcctgtactcaaccaaacagtgtaatttaattaacagtaatatgattacatattaccctacacagccaaacacagtttacacatttccctataatcatattctccttcataatattccctataatcaaattattttgaacacctcataccaaacgccccctaagtagcccaatagttaaaatcactcgtggctcgaaagatatagttttgctccaatgtcctgctttggcgagtcaagtcggagtcttaccggctttgctccgccgattgatatataacacttgataagatttaagaggtattgttccctgatttgatcttttaataccatcttcttcatatattattttcaaaagataaaatagatgaatttgtgatcatgtgtatttatatatagaatatgtctatggtagaaattattgctttgtctctaccataggaatgcagccttagatgataaatctaatgattataaataagtttgtgtatactaattgttagcattataacacattagagaaggagaagaagaaaactggggttagtggaatggcaaatttttctttaaaactggtaaagaaaccctaattaagattgtggttcaggatgttccttcatatgccatgtcatgtttcaaactacttgtggccacttgtaaaagtcttgagagccttatggctagcttctggtgggggcagctaacaagaaaggaaaaattcattggaagggtggttaaagttttgtgattttaagttctttgggggtctggggtttagatttattcaccatcataatcaagccatgcttgcaaaataggcttaaagagttatgtccaatccctcttctcccttgtctatactttaaagactgaatacttgaaacgaaatgacttcctcgctgcttcaaaaggccgctactccttggccacttggaggagtcttctttggggaagggatctgcttctcaagggccttttttgaaaagtgggcaatggtaaatctgtttttgcagtcaattcaaattgatccctcatttgaaatccttcaattttctgaatggtcttccctctcatgcccttattgtgtctttttttttattaatgagagtggatgttgggatatcactaaacttaatcttttctttcctccagatgttgtggatgctatccttcaagtcttaattgatcttttttctgctgatagtctcatttgggggcatcattcctcaggtattttcacctggctaagtcctcttcctactcaccttctccctcttcttccactccctcatgctttaaaagttggtagaaaactgtctagatattaaagatccccccccccccccccaactaggcattttatttggaaaacttccaatcatgtcctgccttgtgctttaaatcactacaagaggaaagccttacataaccatacatgctctctttgctcttgtaaagtgaaaactatctctcatgacctcttagagtgttccaatgctagatctgtgtggagaaagtcttcttttaaaaaaatttatcttgcaaatgttaattgtgatattaaggagttttttcttcgagattttgagagtttgcagaaagagaagttaggtctattttttgaaattatgtggatgatttggattaaaaaatgcttatttgtttcaaaaaagaacgacatgctgcacagatatagaaaattgtgtttttggtttgctgcaagattacttggagcccaaatggagcccttttgcaacaataactactcagcagggagagtcataacattttgaacaagtcagtgagaaaagtgcttgtctgttcgagactaccttcctcagattgttacaagttaaacacaaatgttgccttggatgaaaagagaagaaaaattagtatgggagctgttattagagactgtaacaacattgtggttgtaggtttttcctctccaaaggtaggagcattctctcccatttatgcagaagctcatgccctttatcaagtgatgctttggtgctctatagcgtgtttgttgattactctgatagaggtagattatcttcagctagccacaaagatcaagcataaatagaaaaattgttcctcgctttcaaatttggtgttcaagattgttgagtccctgtctttattttctaatttgtctctgtattatgtacctagaagtgtgaatattttggggcataattttaactagaaattcattaggctagatgagaatctggtttggaggaaaattctttcaaactaacttttagtaaattgtaactctgataataacacatagaaagtgctaagcaccattagtgacttttagcatttctcttatttaatatgtgcttgtgtttatttgataaaaattataaatggcttttgaatatacaccttatttaatatgtgcttatgtttatttgataaaaattatattttaaagtattgacactttttttttaaaaaaaaaaacaataattcaaggaaatactaaattttttagtgacctgtcattgccacgtgggcaaaattaggacttaacgaggctggacagacgacaccttaaaaatataaacggaactgtactttagagggttttcccaccaaaatatgaggttggatggttttttgcaagtaaattgatagttgggggggttttgccgcaaattactcatattctaaatttctatttcctatattttctttttcggaacatgatatccacagtaagagaaactgtcttttttggcaagattttaaggagttagtactcgttatggtgagttataaaaaaggtaaaagtattttgaaccctatattttgtaaaagttattaattaaacattttattttgttaaataataaaatagaccttaatattttctaaaagagtaatttgcggcataaatacctaagtcgtatttttagctgtaaaaataccgtctgtcactagtgtggaacttccgtaggtacctgatcgttaagtgccatgttagaattcacgtgtcactcgttcattggtccatgtcattaatttttattattatctaaataattatttaaatgtttaaaaattataaaaa

SEQ ID NO: 301757 - DNA, 1089 bp, Cannabis indica
aagagaactagaaagtgcttgaactgacacaatagaatcagtttcaacaataacattagaccatcccttagacttgatccaactcaaggcctccttaattccaaaggcttcaacagcggctggttgaacaactccacatttcagagcagtgaatgcttcaatcaattgtccatcactatctcgagccactactccaataccatgattagtgtaatattatatccttgtgtttaggtatatattataataattcttaatattagtatgccaacaaagctatgtgtaataatgatttgctctctcccttcatatctagctaatgtttacatgattcatcatcatcatctgaaaattcaatttaaatccgaactctatctgctgtaatttgaaaaaaaaaataaaaattaaaagtattttaacgtgacttgttatattttcactcgaattgagtggtggtagatagctagctaggcatgtaagaaatgtgaactaagtaattttcaacgtatatataattaattaattaatctttacgtaaatatgactcatgaaaggtgtgacacagatccctccccacatagaaaatagaaaaagtagcttaaaacgtttattttgtttttgactaataaattgttacattaaaatagcaaaaattgttatacctaaattcccaaataaaatcgatggtttgtttgtgatccagctgtgatgggattgggactgttgttatgctatcaaatttcagatatgaagaatgaagggtccgcttcatgctccctacttatactatttttggtgggttggttgtaaaatttaaccatcaaataagataaggggagagagtagggcttatacactaaagatatttataaagaaataatagtaaatggtcttaaattagcaaaatcaaatttttttactttatttattatttatattatcttttaaaacatttttcatatttttttttaaaaattcaaagtaaattacttaaattatgctatatatattatatcgatttttttaatttttatgatttattgtgggttgttgggtatataaattttgttatacagtatatttttattt

SEQ ID NO: 301758 - DNA, 759 bp, Cannabis indica
ttctacaaaactattttgacttgtcaatatttaattaagaatcaatttttttttttaaaaaaaatcacttttaaaattttttaaacaacttatttttcttaaccaatattttagctccaaccccaacttggaccttatgatatggacccgaacctggacccaaaatcggatcccaactcagacccaaacctgtccctagacccgaacctcggacctgaaccccgtccccgtccccgcacccagcccaagacctggtctcggcctcggacccgaactcaaactccgaacccaaccccgacctcggtcccaaatctggaccccggactcgacccctgactcaaacccgggccccgaacctcgaccctcaacctcatccctagacccgtatctcggacctgtcctcttcgtcacacccgccctcatcctcagacctagacctggatgagaatcataaacctcggacgtggccctagacccggccccgacctcggcctcggcctcaaacacagacttggacttagatcccaaacccgaaccctggacctagacccaaacctcggaccctgactccaaactcaaacctggaccctggccctaacctcaaaagcaaatccaaccttgacctaggatgcaggcacgaacctcgaccccaacctcggacccaaaccttagccttgtatccgaccccaaaccctaacccagacccgaataaaataaattaaattggaaataaaaataaaatttacagaatacactttt

SEQ ID NO: 301759 - DNA, 1532 bp, Cannabis indica
ggagtgggaaggtatatatatggagaaagagaagagacgatttaaagatgactgattgagccggtggcactgaccggtcatagccgttacgttacgagtgaaaggattcttccaggcaaagggggcagttactactagcatacagctgtcaaactgacacgcgtttcttttgcttaacactcctttttataacatacacgtataataatacctcaacatataaattaattaattcaacttattaataaacatacaaataaaaaagctttgcctactgttccaactgtacgcatagtgatatccattgggcctaccctggacgatccaacgtactaaacttcatcacaggttaatgattggattattaaaaaatataaatatcaacgatgatcattaattgagctaatactccaaacaaacatttaaatgttattctattgtttccggtggaaattgctttttgagtgaaactttaacgaactttattatagcaaatattttaatggttaagaaaagccgttttagaagttaaaatcgatttgggtaaggtttgaaatttcaaaccaaacgtggtatttgttaggaaattggatgggggaggttataacttatataacttattgtacggttgagatggagggaaaatagaaatacattggatgagtggatgggagcggaggactttgaccaaaagccaggctggatagcatttgaaaggggaagaaggaaaaggatatttatttgtttttgcgtagtgggaaaaggacgcacggaagtgctgagctggtccactaaacgacaaaatagagtagcagaatcgggggacgaacggcactccaattctgtcagtacagcctgtaaaaaccgaaaaatgaaaacccaggcccacctcacacttgagtgccaatccttgacggcttactctccacctccacgtggcgctcacgctcccccatcctctcttgaactgccaaaaccgactccaccgtcttagacccacctatattaaccattttagtacctattccactgtcccatcctctactttttttttttaaaattagcttaaccttttcccattttatcttcctatgatttacgtaatagttttttttttacattaatttttgttattgtactgtgtgctaatatataattataaattttaatacgaaatttaataataataatataaattatttaatataaaaaatttgttaattaaaattaataataaattattaaaacagtataatagtaaatataaaaatatagtatttattgtggtaattttatatcatgctacatttaaattattttttattatgtaactgttgactgaagttttcgacaactaataaaatattataaagttatagagctctaagaaaattagagaaggatttttacgtggttggggcgttaatgagctttagtccacgagtctttattatttatggatgtatttaatacagagaatgtatttggtgaatgtttcactcttctaaatacagagaatatttttggtgagt

SEQ ID NO: 301760 - DNA, 2265 bp, Cannabis indica
aacatacttgtgagtagatctaagatcctggtaaaataaattccaacaaacagttaccccagtgatttgaaaaagtcacagaaggggcgtcccttaaggtcactttctaaaagagacatgcaaacttgtaatcgacctaaatgagatgctcttggacatcgtcaaacaagtttataagagacaaggttaccataataagttcattaggtgataaggacacaagctagccagtagccataaaaaaggattaccttgaactccttacatatgtcatatcacaagtctgagacattcgtaaagaggtcaggtccaccatgaaacgaagtctccttaaaaaacccaaatccaagcaacccaaaaaaaggaatctctcaagcacttcccatatatatatatttgaagttctcaggatatcaaatcagatcataaaataggagccctccaactgccttggtgaggtgtgtggaaaaaacacccaaaggcaggggtaattgatgtgttgggaaaatgtagtatatagtgggatattgggagactatctcatgtgttgaccttgtattattaagttcttagaaataataaaactaaatcaatttcatagaaacacgttcgaagtttttctatgtatgtaaaaaactatgagagatgtgataaaatgaattttccatatatttttcctacaaatttcgctattctattgaagtgaatgactttaagaacactcttgatcgggttaaaagcgagatcaaagaaactctgggaattggaaacctagttgcaaatattaagtacttggggcttcccttatttcggtccaaacagaaggatgcaaacttcaactttattttgaataacctgaccgctaagcttcatgggctggaaagcaaaatctctctcgaaagttgggcgggctactcttattaagtctgtgggtctatccatgccaagttatgccatgcaaactaccaaactcttgaattgtctcgtttataatattgatggcatggtttgggacttctggtaggcttttgtgaaaggtaaccatgggatgcattttaaggcttgggataaactgtgtcttccccaatcctgtggagggttgggtttttcagaaacctaaggaaatgaattaggcttatctggctaagtgggggtggaacctgttaactgggagtcaatctctttgctgcaggatattggaagcaaagtacctgaaaggaaaagattaccttatctgcaagtacaaagactttgattggttttgaaagaatgtgatgaaagccaaagatattttgagaaaagggcgtgtaaaataatcgcggatggaaatgataagagaatttgggagaatccctggatctcccatggcaaggagttctatcctaaggcgaatgatgctagagttacgggttataacagagtggttaatctccttacaaattatggggattgggatattcgaaaattgaattatccttttgataaagaatctgtttcagccatcctgaaaggaggtagaccatctggtcagggtatggataggtggatttggacgaaggagagtaatggacgtttcttgtgtaaatcagcttatctcatccaagctttagaaatggctcctcattatggcgtagctccattcctctggaacaaaccgtggaatagtaacatattggaatgccataagataatgtggtggtgtatactatctaaggccctccctattcgcgctattctttctaagagattccatttagaggatgtagcctgccccttatgtgggggttgtgaggaaactttggagcacttatttctgacttgtaattgggcatttcatttgtggtggtcgttcccgtggggtatttttcccatttctaattatggcattcgtttgtgggattgagtcaaactcatctggggactacgaaaataaggcattaatacagatgaagtctttttttatgcttcgattgttgtcgatacaatttggcagacgcggaatgacaaggtacataataaaagttgggccaatgttaatcagtgtattgactatatttattactcttatgcagatcactgtgcttctattttccccactccatccccgtgtctggtagcaggttggcttcctccctctcttgagtgagttaagctaaactgtgatgttaaagtggggatgggaagcatgtgcattgcagttgtggctagaaaccaccatggagtggtgtgtgggggtgcatacagctagattagagttctctgatg

SEQ ID NO: 301761 - DNA, 6945 bp, Cannabis indica
atcttcttgagaatttaaagagtgaatcaaagaaaataataacatgaacattagtttatgattactcagaatttaggccgatattgatcatctttatgatatgaattaggtcttttagtaaacgacatgtttgataaagacaacttaattacatatcgttccttgtcatatgtaatctccattatatacaacaccttcacttagatgtcatgctatatcagtaatatgaatcgtgattacttccaccgaataataggtatcagtaaacttcactagaaactattgattaaagattcttgaactatattatgttgctgactgttttattcatggctaagtgatgttaattcttcgtacaatacaagtcacaagcttatgtatggaagcttgcaatattgggtgttggaatgttaaaggtgtaaatagtaggaaaaaacaggatactcttgttgatttttgtaatgtcaagaaaattggtatttatgcttttttggaaactaaagtgagggggaaaaaattaaatgagttgatggaaaataagtttgtcaattggaaccattattcgagtgccaatacagagggcaggttacttgtagtttggagaaaaagctttgttcgggttattgttattgctgaatcttctcagctggtgcactgctatgtgaagatgacaagtgctgtttttgatttctgtataacatttgtgtatgggtttaacactgctgaggctaggaaaaatctttgggaggagatgaagaacttgagatttcctgtgaagtcgtggcttgtggtgggggattttaatgctgtatttgaactagatgataggattggggaaaaaacattactttaaatgacatagcagatcctaatagttggttggctcaagctaatgttgagagacttaaaaagataggttccaattatacttggaccaacaatcaggaggataagggcagaatatattcgaggattgatcatgcttttgttattgaagactgggtcgatctctttccagattcaaaagcacattttgactgggaattaacctctgaccactgctcttgtgttatttcagtagttgtgtctgagaggattggtattaagcctttcaaattttttaatttctagactgaacacccgaattttaaagaggtggttttggagaattggtgtaagcctataaactgctcgggtttgaaggctctctaattcaagcttatgagggttaaacataggctcaaagtctttaacaagtgcactataggtgatgttggaagaaattatcatgaagctaaagagggttacttaactgctagaagggaagctcaagctaacccgttggacatgaaaattcaaaaccaggaaaaggaagctgctcctagattcaacttgcaggaaaaaatgtaccacaacttcttgagacaaagaagtaaaattacttggctttgcaaaggggatgagaacaattcctagtggtggacaagttccctgaacttgttactcactttttatctcacttcaagagtatcatgggtagatgcagtcgtactacaagtcgaatagattctaattgcattgatcatggggctaagcttagtcttgaagatcaagtggggctgctgaaaccgtttacaaaaaaggagataaaaaaagctattttcagcattcctaactctaaatatcctggtccaggctggtttagttctgggtttttcaaagctttatgggctgatttggggaatgatatcagtaatgccataaaagacttcttccaaactggtagaatgcctcctgaatttcatgcaacaatgatcactcttgtcccaaaaattgagaacccttcaaaggcaatagattacagaccaatagcttgctgcacaacgatatacaagtgtgtttcaaagcttgtctgctctcgccttgctcaagtccttcctggtttaatcaatcaaaattagggagcctttgttcaagggggatctatagctcacaatgtgatgattgtgcaagacctgctgaagaattataagcagaaaaatgtttcccctagatgtgccattatagtggatattagtaaagcttatgatacggtgagttgggattttcttgaagatttccttaatgcttacaacttaccttccaggttcataatgtggatcatgacttgtattagagcaactagctactcaattgtcatgaatgggagaattcaaggaagcttcaaaggagagaagggtctaaggcaaggtgatcctttgtctcctctcttatttgtgcttgttatggaatatctaacccgttgtcttcaaaaagttgctagttgttcccattacaggtatcaccctatgtgtaaggagcttagaattgtgaatctttgctttgctgatgacttaatgctatttagtaaaggcactcaacattctgtcagagctctcaaagatactctagaggagtttagtgctatgagtggcctatccatcaatacttcaaagtctcaaatttacttcggtggggtggaatcagatataaagcagaatattctaagagattttgtgctgatggaaggaagctatcctcttagatacttaggagttcctttaaggccaactaaatggaaagcagaggactttggtattatcattaagaaaatgaggcaaagattacacacttgggctagtagacatttgtcttatgcaagaagggtgcaattgattcattcggtgctccttgggcttcgaaactactggatgagcatttttattttgcctcaaagtgtcagtaaggaagtagagaagatatgtagaggatttctttggggctggaatggcaatagaagtaagattcatttagcttcttgggagaaagtttgcctcccaaaagcttatggaggtcttggttttaaagatgggacaagttggaatcatgctattctagctaagtatatttgggctatacttctaaaagagatttgctttgggtcaagtgggtcaattgtatctatttgaagaatagtaacttttgggagtatgatcttaaacatgattcaagttggtattggcgtaagctttgccatttgagagataagttctcaagaggagatatccaaacagctgggggtggtaagaagtttaagactaattggctatacaacagccggttagtccaacatcagtttccctacaacaaagctatttggagctccctaaatttacccaaacacaggttcatcttatggcaagtggttaattctcatcttttaacgtgagataaattggccagttcaatattgttccagattctttggagtgacctgtgtgtgagatggaaatcgagactcatagccatttattttttgactgtgttctttcaaacagttgcagggaatttttgcttggcttgggtatcgggcttggccgactgctactatcggttggaaaagctggcttcaagttaggatcactaacttcagacacagaattcttgttgttgtgatggctgcaacgatctttggaacaatagaaacaattgtattttcaataaacattcttatactgtcaactccattgttagtgatgtaaaaagaatcatatactatagattgcaagtgcttaaaaataaatgtttgaggggcatgagagaaaatttgtagagagtttattttgattggggggctgccccttgcttgcttttgtacagatttgttcagattgttgataaacgaagttttccttcttgataaaaaaaaaacttaatattcatgcatacatcaaaatgttcaacttttattcttaatcagaaatagatttacaagattttgagggcataaaccctaatagtatgtagatcgccatcattcacttataattagggtgaagaaacacaatttgccactttaacttattttgtattttgagtttaaatttttcgagagagaaaaacccaaacttttcccttggtgaatgtccaatattttttatgactgccttagtcttcttcttcgaattcgagcacgagaaaaactaggagcattaccaccagacttgacgataaactgtccagatccattgaggtcgttgaagattcaagtaaagatcgacaaactacttggttgggcatacaaatttcaggctagactttgtcgccatgtcagagatcctgctacggtcgtgccaccacaaatcatgctacccccacgacctccttcttcctcaagtaagtactctttcccctttttaattgttgattttttttgcgatgaaatgcgtgttcatattctaggtaggataaatatattctctcttaagggtttaggtgattacttgcatgtgggttataagacatagtgtgcacgatttaggtgtcttaagggtcgttctagagctgtgggtttttcttggtatgaatgtcgccaatagttgagattaggatctatgaattttgctcataatttattttctgcacagattgagttgtaggcacctttgaataatctcaactttattttcttctatctagttagagctcttattttttggatgaaatctttgggaatcttcaatttactcttgagttcctaatctcatcgtcctggagcaaagtcacgcgaggacaccgaatgacgggttcgacggggacctctccaagtagttaaggggaggactctcccttacccttgccattcctttaatgtttgtatttaactggtttgttatattgttttgctttcttttcagttataccatcatgtcggacatattctatcttgaggtagtggagctgatggaggagctagtcaagaacgaagcccaaaaaacggttccaaatggggaggaacccaaagaggcgatcttggaagtaatatacaattcctccaagtgggagatggaccatatccctaacaagtttcaaaattacgaggtattgaaaatgcactcaaaggaacaagggcttctccacatcccaggtctctgttggaatagacttgcactccatggagagtcggccgtcaaatttatggatggattaggagcctagagttggcgcacatcatttattgagcgcactcattgttgtgatgctatttttcaaacttctgtgcaacagtggcatcacccctttccatcttatcctgtaatcatacaagctgctggccggatggtacatcctttgtgtggataaaaaatggagactcctaaaatagaggagatattatacttttatagcatgaggccacaacccatgcgaaagaataaatccaaaatagggttctacaagctggagaagtgctccaagatggtctgccccaccaacagtatcaaacatgttccaaacttctaggactactagttctttacctctggcttccccttaaaaagggtttcgacattgtccgttgacttctccattcgaagtaagtcttactacctttcttttcttccgaccctttttttctatagcgaaaatttttgctaatgagaaaggtttcaatcttgcagccaacattgggcctcttggtccttctatcttcttggtggagagggagaagttgtacatgagaatgcccgtcgcaatgctgaaggtggaagggtttgtcactatggccaatctttagagagttgggctactcgcttcgcaccaaagcatcgactggttcatgataaaaatggaggaattgtgtgcctccttgagacaagggttaaaactcacaatataggagttttataccttaagtttttcgagggtggtgttttacttctaattcttcttgtcatccaagtagaggaattgttctagcttggaatttgaatagttttgacattgagattaaagaaatgtcgagccagcatattcatacagtggtttatttaaaacatactgctagttttgaatccacattcatctatgctcataatgaaacgattgctagagaagatttatggaaaattatgaaggttattatagctgttcagaattccccttggattattatgagggatttcaacttgataatgatgcttgaagagagaataagtcttggtaagatgtccaaagattaccatgctttgaagaattgatttaagagttgtgagcttatggatatcaaattcacaggttgcttttatacttaaagcaacaaacaaaatgagtccacaaaattttatgctaagctcaatagaatgatggcaaaccaaatatgggttaaatgttttttgaatgttgaagtcaccttattcttggaaggttagtttgatcattgtctgttaatactcattgtataccctgctcaaagtaatggtttgaaaccatttagatactttgatatttggagtgaatttaaggagtttcaaagtagagttggcgaaagctagaatgaaccgattagtgaaacttttatgttctgcctttgtaagaagcttaaaagagttaaacaggttttaaaagatcttaataaatctggttttagtgaggcggatgccaaggaaaaagaagctaaatataagatgattcaaagttgggctttattacataaggaccctgtgaatggtgatttgattaaagctgacattgaagctacaaaagtttacatgcaggcctttaaagcttaccactctttttgtctcaaaaagcaaaaatgaattggtccaaggatggtgatagtaattctaaactttttcataaaagtataaaaataagaaggatgagaaatatggcgtaagctatccatgacagctccggtacttgggtagataaaccagaagcaatcaaaaaggccttcactactacaaaagtgacattttgcttcggttttaaagtgacaaataaactatttgtgtcagttagggtaatcgacataataaccacagacacaaatagtcatattttttacttcagtttagaaccgacaccaaatatttttttgcttcggttatgaaccgaagcaaa

SEQ ID NO: 301762 - DNA, 3423 bp, Cannabis indica
aaaggaagagactttatagtttgatgtttttggagagaaagagagaaagagagagagcaattgaaagaatatggttatatgtatgtgttttggaaggtgtagaagttatggtagggacagatagatacttcttagtacctacttaccttagagcatctctaatagtaatagggtagtgctaaaaaagttgtatatttctatattttagtatatttttttaaaatattattactctaataatattataaaaagtgtgttttgattagattacaggttagttgatcgtcattaataaaatttcattgtatattaaaaaaatatgttaaatttgacacatgctaaaagttgtgttaaatagtaatatggtaaataaagaagataaagttttgtaaaaattaataaatcataataattagtgacattgtagtaaataaaaaataatatttatcgtgagtcaaatagtagattgaatataacacaaatttatgtttttgtgtcaaatttaacacaattttacatcttgcattggagatagtcttactctctaattttgactcaaagatagtgacagacccaatgaaggacaaagtaggatttttgcctatgctcatatttttctattcatttttttaatgtatacaaaaaaaaattaaaatagaaattaactatattgaataaaataagtgtgtcccttctaaataaatacatatagttatattattcgtatattatattgttttcatgagtcagccagtacttaaagttttgaccttttttttttaactatgtatagatatagtcatataaataaatgtgatcatttaagagtgagtgataggaggttgagagttgagaagagtccataatattgtaaacaacaacaacaacaactataacaacatcataatcattaatgtggtcaacttttgagtttggggctttaagaaaacaaagccaaaaacagctatgttatcatttaatgccacacaccacaccacattcatgtacaacacggcaaaccctgtcatatttatgattattatcaatgcttcaaccttcaaaaagttttgttttttctaatatatatatatatatatttataaagaattttattattgagcagtaattgtacctaacacctctaaatatgtcgctttataattagttaacaatactccttaaaaattattatattacgctataaaagacttaatacttaattagactaataacgatattgacatgtaagaaggtgctaagcactactactaccttttagcatttttcatttataaattatagagtaaatattattttagatcaaaaattgctaaaatgcaaaattgatatctaagcacttttatcagtatcatactattattagtgtaattaagtatcatgtctcatataacttaagaaaataatttttaaagtcgttaaccaatcgtggaacactatccatagaaggtattaagtaatactggtacctaataacaatgctctttcagatcctgtgtttaacgattggactttcttttttattaactgataaaataaattatatattttttaaaatacaaatacgactctaagttcaattttcgataattttttttaatataaccaacttaaagataatttttaatacaaacaaatataaaaaacacaattttattataacaactccatatcaggttatcattaacttctatttaaaaaaaaaaatagtaaaatagtagttctcatctttatatatgtatatatttatacacacactatgaggttttgccagctgttttgttcaaacttaaaggaaaggaccacatcctcatgtgacatctgaattagtacattaggaaattacaataatattctaatagatagataagtcaactccttcatagttcataattaatggggtcctagaaagaaaggtcaaatttttcttgttcacttgaccctttggacatcaattggacctttttctttgctccaatttttaaaggattatttgttattagacaccagtaatacccgacactgccacgagcacgaggtggcatacccttttagcaattttttattttaaagaagagaccaaccaacctgtctcagccagcaaaatcacagctttatcaaataatattatattagagtactatataaatataaatacatacatatattattatgtattttcatacctgttcttaatgcttacaatgccaatgtagggtccttcctttaaaccttttttctttaaaagctgtaatggagcatttgaaggcaactccaatgggactctgtaaacttaaagacgagaaaagccaattacgagctattggagcccttaggctcctctgatgcaaagagttttactcgatatagtaattttcttactcaaaactaccctctcgaacaaagactcatttatcctagggcctgacattactggccacccgaatttcaccttgtccttaagcgagtccccattctcatatttcattggtaaaaacaaaactctacatcaaactaacaaaatcataatatgtcctttcattattgaactgaaaatatgaagcaatttcagctattagaaatatacaacaaatgatttttcctttctttcttcttgaggctgcattgtgcttagaatgatagttcatctggtagttgttgaaatttgtctgatagaaagtttttgtacttttgttgaagaagatcacttgctgaaatgaagtacccaacattcaacaatgacttgatttgaattataaattgttattataactcaaagaaaatggaggcccaaaatgtcatcacatgaaattggcttagtggcaaggtatttacttttttaccttcaggggttcgattcttgtttacttcttttaattttatagagaatatttttttaaaaaaatagcatagttcgaaccagggtgaacagcggccaagtattattaaatttttatattaaaattaaatgatttattttttcggggcctcagttgggtgggggccttaggagtgtgccaaccccgcctacccttaaaaccgaccctgctctaagagaaagtagtcattagaaaaataaggtcattttacctctggtttgtagtggtgggattgggatgttcttggatagacatgattccactaacttgatgaaatctttccctaaatatattaaaaaacaaaactttgtgtcaaattaatgataataggatagttaaaattcttgcagaaactttatcgaattgatggacaaaattacaaatcataagctttcgggagagttcgagagaattggggctctcaactctcggtgccctaaaacttaaacacatcatcttttaattaaaacgaagagagttaacaactaagactaaagtctagtttaatctagtggcttattagtac

SEQ ID NO: 301763 - DNA, 3072 bp, Cannabis indica
aacataatcatgaaataaattatgtgaaccatgcaggataaaatcgatttttgatcttttattaattagtaaatttgattatattgaaatgagttttatttagggtacaaaacccaacagagcccatgatggctaggacaaaatagatgtgtcttagggaacctcctcgggaccctcacattgttgagttgatgacgagagggagggtctgtcatgtagaagaggttgaacaacctcaagctaaccagctaggggctggccagattaaggaacttatggctgagcagcccatggccgaccaggatgaggagacctcgaccgatcatgatagtgaatttgatattgagcaggctaaacctactgctggaccaagtagtgctaggaggcagtacaagacttgtaccatagttttgggatatcccttcggctcttatgatgatgtcgggcggcctttgaattcccagggtcatctgtcagagttcaggatcaaccatgtttgtaacgccttgatacttagacgcgctagagtgagtttctaattaatgtgccacctttgctaattagagggtttttctcataaatcatgccaaattaaaattttgatttaaaattattaaactttgtaaacatatatataaaaaatgcaattagtaatttttataaaaaaaatgttatttaacttttcttatattaaaaatagtactataattctcactctaattaaaatcaaatttcaattcaagattttcattacgcacactaaacaacaattatacgaaagttgatggtaatatgcatatttggtaaattaataattaaaataataaaattataaaattacagatcaaaatagcaaaaaccagtaaagatagagtgtagtgcaaaattatatctatattttttattagctcaataaaaatcccataatatcttgtaattaaattagtacgaaaataattgagaaataatggaactccattggaaatggcggcattcttatacactccacaagcttctctatctccgcttccaaccatacaattcaggcttagccccagaccccgggtaatgtatacactattactgtacacaatcttctgctctctattttcatcatcaccttcttcttctttctaatctcgttggtaatggcagtcaattggtgtgattaagcacagcacccggtgtttctcaagtgacccagataacaatactggtaaatcctacaagactcagactgagacccctcaagttttgaaaattgtggtcagtggagtcacggagcttctcaggttcctctctttttcccaacagtcttctaggtacttttcctgtctttacctacacactttttctgattggttcttgagaaaatgcaaggaaaaagaacaaaactttggagatgggatccaagattagttccaaattatctttaattcatttttttattagttacaatacaaacactacgtttatctatgcctttttaactgcagagtgaccgagaaacaaacagatgagtatgagttttcagcttcaagtgttgatgatgtactcaacatactccaatatgattatcagaatgcttatttcgttacaggtacaatttttaattatatataaacatataaatttttctattattagttgtcttatatttttaagtttcatagggattttttcttctgcaatttatgctgaggactgtatctttgaagatccaactattagatttcgtggtaagaaaagttcattttgactttattagcattagcatcacataaatatgagtaataaaaacttgctaatcaattgattctgaattgtctttggtggctttctctccaggtaaggagttgtattcccgcaacttgaaattgcttgttcctttctttgactctccatctattggattggaaaacattgagaaggtagtcagtcactccttttaggttgcacttgattatcatattactaattggtatagttttgatattcttgccataatacaaccagaaagaaatcaagctagtgatcttaatttgttaaatcattttttttttttgaatagttaatttgttaaatcttagtgcatcagagattgaaacaatgtgctgcttcacatagaaaagacaagacaatcagactcttcccatgtttcaatttccttaatttgcaccattcccttaaatcaaatgtagagtttggcatagaaatactcttttaaggaaaaagtccatctgggtagttgatgctgtcaactcacctcctgctattgatgctcaagcactcattttgctcttttggcacttccaaactctgctcactctactgaccaattgagctatttatagtccatacggtatcaaagtagcaggccacttcaagtccttaggggacttaaccaaatctagtgcatgaccgagcaacaacatgatctcactgtggttgctcaaggcttctgcgccagcatggctgcgcgaccaaactaacaaatttcaagacattatagtagcagattgttgttaatttgttgtaatgctaatcactgcaggatctctcctccgaaacaacatttgtggtagcaaagtggaaattaaggtacttgttacttggtctattttcatttttacttctaacttacacataacaataagtttgaatgcagcatatgatttatatatcaccaggataaactgtcaaaaagataataacgacaatagttataataaattgaggataaagaaggcttttttgagtgtcctaatccatttctcccaatcaaatgaaaatgctattgagcctgccactgcagactctagtctctactatagaacattgtacttgtgccttcgatatagctacagcctacagtctaacttatctgctatgcaggacctacctgaagcttccatggaggcctcttattagcatcaacggaagtacggtctatgaattagacggcaaatttaaagtacattttcataaactgtttttctgtttaatatttaaataaattgcggcataaatatctaatgttttagattttatacacttaaatacctaatgttt

SEQ ID NO: 301764 - DNA, 2432 bp, Cannabis indica
catgattaacatctatgctccagcttgagggggagtgttagagaattagctgtatattaggtgtaaaagaattagggtaacttgtatttagtagtttcctattttgttggtagtttcctatttcctagtctcctagctttgtatataaatatgtactattctatgaaatatacaaataattcgattcactattttcttcaaaaactattaccaatctcagtttttttcagtttggatcgagatagaggtctctgtttccttctgctcttgcttctttttcctgtcccaaactaagccttggtctttggaacaattagcaactatgtgccagagtaagctacatgttgaacactttgaaggcaaccactcatattcaatggattgctccaccaattggttcctttcattgataaatgacagggacttcgggggattgtttgtaattttaatgtccacaagaactctagcaaatttaaccatggatctctccttcgtaacttaataaatcattatagatatccctatagtactaaccataacattaagactatttcttccccaatgttgaaggccaagcccattcaatctaatccaaatagggactgatataaccatttgaacaaagtccatgtccgaagaccaagggcgcatcatgataggcttcttatcaaaatgaataacacccatttctagcacaagatcccttgtaaattcatctcggaagcttactaaagtgaaactagaatgcattcttacaattcttcaacacctagaattcccatactcgtttaacaaaagcctaaaaaacttgaaatggaagattagctcccaagataatacagactataaaagatttccagccagaggcttcttcctcaatctcctctagatcaagtttagcaactagtcgatccccaaccttcattggttcattgaaatcaagatgagttgaaggggttctcacatgattagccttgaacttgctcaaagtttccttagctgaagattgaaaattaggctttccacctcttcaatttccatctcctccgcccagttggaaaccttggactgagatttgcattctagttccaccaaacacaaaatttccacttcaagctcattacagagatcaagaaaagcctctgtctggtgttcaactgattctgcttcttggatcgaaaggagttccaggtctaattgatcttctctatcgatcgatactgctgacttcagggctacctttttcttcctacccatgaagagaaaatgagagcaccacacgcctactggtatttcattttctactattttttttggaaaataattgtttgaatctttttttggacacaataatttattgatggtcctaaatagttataatgtacgtgatcataaaaataaaaaaattgaaaaaaaaaatttgaatgtcaaaacaaagagagattgtaccataacaccctttttgagatataattactcttgtgtttatagtttttgtatttttcttgcatgtgtcaatttttttatcatttgccgatatttttttttctcgttatgttaggtttagatattgtcatttcaataataatgtgattcgagcttattataaggaatttattctaaaaaattttaaagaattattaggtgacaaaatgggcctgagaaaatggatttatataggcttaattaataaaattttacaaacaacttttttctggtacatatgcgatattaccatacatgtttgagctttaaattgggttgggttttaagaacaagcctcacacatcttagcataaagaagataattacataagggtaccattttttgtaaaaaaaaaattacatttttacatttaaagaactttttttttacatttttacagttttccatagaaacaacacgaaaacaacaagaaaactacataaaagtaacatgataataacatctaaataacatcaaaacaacaataaaaaataacatacatagaacaaaaaattgacaataaattaacaagagtacaacataaaaagatcgtattttctgtaaataaaatcaaaaaaatcgtaaaaatatttaaaattccatgaaaccaaatttttgtaatttttttgttatttttgtgtacttgtgaaataatctctttaaaagtttaggtgcgaagcacatagcctcttcattaaatactgtctatttttaatagggattactttacaactactcaaaaataataaaaaattacaaaaataacggttgtacggaattttaaatattttgacgatttttataattttatttatagaaaatacggtcttttaatatattcttatgttgcactcttgttgattttttattattttttgttgttgttgttgttttgatatttgttgaccgaggttttcgacacaggatgctgagctttctcttcttc

SEQ ID NO: 301765 - DNA, 1962 bp, Cannabis indica
ttaaaattgtaatataagaatgataaaattaaaaaattattaaatttttccaaatcttgtattggaatgattttttggtattctaatagttttaaatacaattaaagaaattaaatgaatttcttttaattctattttattactttcaatcaaatgtcactttagttgcaaataaatattaagtaataatatttaagttatatttttggatgctattatatctgcatatcattttcctattggattgacttttttcttgattgggcatggcgctatcctctttttctagaggtctccattctcttagtaaatatttattttcaaatggactaaagaagatgatggaaatgaactaccaaataatttttacatagaattttataattggaggggatgttttaaagaatatttgatgacatatttttggcatatttaagggaggtttactatgagagtgaaaaagaatgaagaatgaataacatattttattttttctctttcttattttttgttattattaccaacatacatccacataaaatatggaccatggccaagtaatatggtttaagtttacatttttacaattttacaatctctggggttgtttattagagtggtattgctacatatgtaatatggtttaattttgaggtttttacaccacatatttattgaaattttcaatttttttttttttattgtggaacataattttttttaaaaaatactgtgtactgtgttaagttttcacggttgttctacggttattttttagttgttttattgttgttttaattattgtgttttgttgttttacggttattttataaaaaagacaatatttctgaaaaaaattccgtttgacagtaaaattgtaaagttttgtttaaaattttgtatttttgtaaaaattcctttaatttttaagatcaattaaagtgtttaaatatggactatgaccacatgatattttcattcaagatcaattttatagtgtttaaaattagtgttttatgtaattatatatatatattttttgaaaagaagttactttttaccaaaaaattattattttaatgtaatgtggaatcatagtggagcttttagagttgtattttttttataagaaaataagttaaattttatgtaaatgagagataaaataaaaaagtattgttttaagatgatgtatgttattgacttaattttttgttaacaaatttagaagttcgtgaacgagtaagatgaacataagtcgataaaaaacaactaattttttgaaataaatttggtaatgatgaacaagagaatttttatagtggtgttcacctcctttcaatggtaatgggttgctccacttatagtgctattgatctcaacatttaagaagagttctctagagttatattctctaagagttcaattgagaagtgggagttcaagtgttttacctttcttatatagatttcttaactcgaggtatctcttaccttaatcatagttaagttaaatttaaaatacaaaataataatagaataacatttcaaacaaatatctaaaaaatgataaattgctgaagatattctttaatcacaggtgctagcttgttttcatcatgaggagcacatgctggaatgttggtgaggagtacgtgctggtgtcgagatcatgaagttgatgagttatgaaaagcacatgctgaagtgagaagcatctcggtatgaactgagatggactttgtgaagaacatctcaggtagggccgaagtgatggtgtcggtgatgaggaggccaaagtgatgatggcgtggataagcttgtgccgaagtgaccgaagtgatgcttggccaagagttgcggagatgatgcttcgaccatgaggatctgaccatgggggagaagactagacatggagtcatcacctaggtgcttacgtgattggagatggtatcaccaccta

SEQ ID NO: 301766 - DNA, 817 bp, Cannabis indica
tgttaccaaacggcaccttagcaaatcaaaatttattaagggtgatcttacacctcacatatcacccttgaaaaataaaggctataacaaaaaaacttttcccatgggaacaattgtagctgatattaaacccatcaccagtgtgtcttatatgtatagattagctaatagagttgcacattcacttgttctttttgctttttcttctcctattgtattccaaactggttgactaggattgtattagccgatccttcttgattaatgcaatcctttattttctcaaaaagaaaaaaaagtaattaacacaaccaaatatgcataggttttgtttctattttggagagagcgaaatttcctagcattaattatcaagtcaaacacacaaagattgaaattataattgagacaaatgatccgaagactaccatgaagttacgcatgcgtgattggtcctgcattcttttagtttttttagtgagagattgagccaaatataatattttttatgtctaacttaatagtcatttttctttaaaataaaataagttatcctttcataaaaaaaaaataagaaagaaatagaggagtaagttgaaagaggcattttttttagtattttcaattattagtttatttgtacttaatcttccaaacttaaattttggtggttaaataaaagcctccaaacgtctaaactgttagtaaatttaaggtgtcatatattttttacagttaactgccaacatatactacttatatgtacactcttgtttgtacacgtagcacatttatatttgtacacctaatattatta

SEQ ID NO: 301767 - DNA, 2329 bp, Cannabis indica
acttgattcgtaatcaataagttttgttgtcatcccaatggccattgctctgtatcaaaatttgtaaaagttccatatcctgaaatttgtttatttattatgatttttttagtatcaatagttgcaaataactatttcaatctaaaaaaaacttataaacaactgtttttagtatcaatagttgtaaataacattttaatctaaacgactatttttatctgtcaaaacaactattttctggcatacaatcttgaataagatttaattcaacggttcttgttcatttatacccaaacaacaattataatactggaaaacaatatatatatacaactgtttctagataaaaatctgtagattctaattttatgcattagtattttttgagatttgatccattcttaattatttttctagatcaactaaatttctatatcattaattatttagttgatttcctcaatctaaaaaattattttaactatgaagaaaaaataattactaagaggataattagaaatttttgtactttcgatttcttctctgttttgtttatgggtaagattcgaagtttatctaatctccttctcttcaaattctctgccctgtacgatttcagtttttgtttgtaggttgtttttggattttttataacaatggaggttggaatctctcctttttttttttgtatttgctttctgtattttggattttttggaatttaattaattgctttttctttaagatttacatcttgatttgagctgatttccctagattttaaaagaagatgttggagatttggaggactagggtgtttcggctaggtcacgaagaaggaggagttttctctattttttgtggttaggccagtaattttgtaaattgaaactttagttttttatttatgtttatttttactttctagggcataaatgtaaaatactgtccatatttgtttattatagaaaaaatctcgaaaatttattatatgaattatgtattttatattttaaaataattttttttaaaacatcaaagattctcggattccctatccctaataggaaatatgcatgtatctatacgaatcaaaatggttaacatgaatatgaacaggatagaattctccgcccaaagcacatctctatttattaagtatagtaataaatctatatgaaacttataaaaaaacatagtctaaaagtaaaaaataccgtctgacaatatttttataaaaaaataacaaaagttaatatattatgtaaattttccttattttatcagtacaatttagtcttgggtccttaccattaatatatgtaacactatgtctaatgttacgtactaaaagaaaaagtatcactgtatgatcagaatgaaaataataacgtttctttagacatatctctcttaataaatgaatccctaattttatcaaatgtcataattatcttttttgataaataaatgttataattatcttgatgatatatattcaactctataatccatgtgtaaatagataacatttattcatcctcaataatgaatgcattatttcaaacctatagtgctctccatcataatgaaaaataggctaataatgttcaagtaaaagatgatgaacatacataccataaattaatagtaaacatgtatgattttagtttgaatccacacactactgttagtggaatattatatgattaagtttgagattaatattactaacaattaatactaagattcttcatgtaatcaacacaatcccttcttaccaaaaaaaaaaaaaaaaaattacaacacaatcccatatattaattctccaactcccatatcgattacctatataatatttgtatactaactaccatataaaataattaaccaaattctgataattatcaataaattaatcctaaaactatatggaataatagtagaaaactatatgaaataatagtagaagtttaatggtgttatattataatgctaaattaaacaattatgtgacaaataattattaaatggtaactacatacatatagtataaagttgcaaatgtatcttttaaattaatattgtaactctcatttccattaccagttttaattactaattgtatttaaatgtaaataaataataattattgttaaaaatataaggtacgtttggtaacacttttttataccgtttttttatttttaaaattaaaaaagtaaaaatattttccaaaaacatgttctatagaattgtttttactttttaattttttaattaagaatctaaattttaaaaacaaaaaaattacttttaaaattttttt

SEQ ID NO: 301768 - DNA, 1303 bp, Cannabis indica
ttctatttgtagacccaaataaatggcgaatatcacgtcccgtcccgtttcagacaatattgaagatatttacgaaaataccactgcatacaaactaagcatcaacatgctgccagcatgcaccacaacatgtgctaccatttgaccaccacttagccaacttgtggacaccacttaacttgtaatgtgccatcttaacatgcacgttacacttagcaatggattcgattgtacattgtactgagatgggatgaaaaatgctaagtggcactttttaacgtgtcaagcactataaggtatactattattagtgcaataatttgattaaaaaataaagataattagtggaaataatttattttatgttatgctttgttcttgataattatatacaaaatggaaaagaaaaataccattttgctgactgccccaaaacaaaaatggacggctacaaggagaacatgaacacgaatacacgattcatggtctaagcttaagcatagaacatgaatagggactactactactagtgatagtaccaatcaatcctaaagcctaaagccaataaaaaaaaaaaatacaatcctaaagccagtgggccacacaaatcaccatgcacaagccacctacctattaattttctttactcagcatcatgaataccaaggaacggaatgggatgggacccaacaaaaaaaaaacaaaattgtgtgatggaagctttcaacatggcataatatgagccccaaaaagcttttgtttcttacggaatattctacaaccgtcacgaaactcttgctgagaagataaggttttgtgtaatagagagaccaataaacccttctctatggtatggtttttctcaacatcaaaccccaaaattaagaatggcaacttcaacagtttcgtctctgctaccatctacagtttggaccaaaaataatcaaatcacaccgaaacccttcttgggtaatcttaatttcagttgcacaacattaaagagtccagtctccactaagttcagagtacaagctgcaaagcttcccgctggggtaagtttcaactctatccatcatattttttcttcttgggttttcttttttagtaagatttaacaaaagggtataaatattttcaggtggtagtgccgaaagtagagccaaaatttaagccaccatttcttgggttcacaaggatcgctgagacatggaattctagagcttgtatgattggtctcattggaactttcattgttgaactggttagtttctctctctctccctctctctctctctctatatat

SEQ ID NO: 301769 - DNA, 2467 bp, Cannabis indica
ttattattattatttacattttagtttgcttaatattttcgtacttttatcacaaataaataaataaatttttgttttttaactttgaatagaaagacacattctctgcttattactaatacaattttgcaatgtgatgtgttagaacattagggtacttattaaaaggaccaaacaaagttccattatggatctctgcagaatgaataaagttggtttggtagcattattagaaactaagttatctaacgagaagattaaggggatgttgtcaaatgagtttactggttggaaatggaatagctattctagtgcagtgatagaaggtaggattttgcttctcatgggggactttaatacatttttttgattttagggacagagtaggtggtagggaagctactgtggaagaaatggtggatgctcaaaattggttagctttacacctttctgatgagatgtgttcttctggttctttttttacttggtcagataagtaagataactcaattagaattttttttcaaagcttgatagaattttcaagaatgaggaatggttggattcttttccgaatattgaggctacaattcaatgggacacccttttggaccattgctcttgatggagaaattagttttttagtgatttttttgttgatttttccagcgacaataccaattccgatgacttttcgagtacctgaagtaactctggtgactttttcgacaccgacagctactctggtgacttttccggtattgacagcaaaatccgacaactttttggccctagtgataactccggcgatcactgtagtttcatttactttatttaaaaaaaaaaatataaaaggaattttaatattttttatggtaattcaaagtagcatatttcatatatcttaagtttttattttaaatgtcatattttttcttattcaatttctttatcatatttatgtaaactagttttatgtttttcatatttacgtaaatactccaatttttacttgggtttccttgttttttaaatcctgaagtaataaaaaacatgaattatatatatttaaaaaaaattattaattgactaaaaatttaaaatctattgaaatctattataattaaaataataataatctacataaaaattgaatagtaaaacttgtgtttgtcttcaaaatattaaataataaaaattacaactgaaatatctaaatttgtatttattttggctaaaatatatttactttatatgtagttatagataaatatcgagtaattggtggctaagctaccttaaccttataaaatgtaatacttcaccctaaagttgtacatttggcggctcgatccaatccaacccgtttttataaaagtttacttttttatgtgagtttgacctgactcattttatgaaacgggttgggttgggcttggcccatactttcaaagtaagtccaacccagccataagtacagactatttatgttgggccggatccataccggacctaaacgggccaacttattttttataaaatggcagacccatatttatcaaataagtataaacgggcttataaaaactaattctcaaacgatttattttacacgtgtataaaataaaagaaacgaacgtgcaaaaaactgtttaatttttttttccgcacgtttaatttttttaaatttcttaaaaatttacaagataacttaaataacctatattgtccatggtcatataaaaaaaaattaaaattatgtagatgtggaaaacgaaaaaggagtgcaccataaaatttcaccttattttatttgaatctacacaagagatgatcaaattcaccaccattgttattttagatacaaaataaggttgttgatgtaataggttaaaaatgtgattgaatgggttttggactggtttaagaggtaggccattgcgagagccactcaatactttctcaaattattattgttcacgagaatcaccacaacttaattcatttcattcctttaaaggaacaacaataccaatcttgataaattcagtttttcaactttctctactgtaaaattctaaactatatatatttatttacttattcacttcatggtgaaacattttctcaattctttaccaagcacactcagctcacttttcaccacatattttttacaagctacttctttccaatgataaacaacttatagtttatctaaaacaagaagtaaatgtggtaaaatccaaatttttttacacacaaagaattgaacaataattactaaatccatgaaattgtaagacttggtcacaaattaaacctttttagctaacacttaaatcatcaagatcagaaccaagaggggtactcaataatatgtactatgaatataatcacgggtttccctatctttgtaggaccaaagcctaaaaaaaaaaactaaacaatttacctataaaaaaaa

SEQ ID NO: 301770 - DNA, 1788 bp, Cannabis indica
atgctgtttattctcttgatgtgttggatgacctctctcaacgagtcctagatcttcataatgaaagatgtttaaaggttgcaataccagaatatttagtgttgaatgttggtgaagaattttctaatgagatggtggatgtaataaccacactaatagttatttaaataagatttataaaaggtgtcgttcttggagttgccaatttcaactgagaaagtacgaccttcccttctacaagctcctatacttaaactgaagttaagacactaccgaagcatcttaaatatgtttacttgggggagaatgagactttttcggtcatgattgctagagatctcaaccaagtgcaagaagaaaagtttataagggtgcttcaggcatacaaaattactattagatggtccattactgacataaagggaattatcccttccatgtgcatgcatagaattcacctaaaagaatgatctaagccgacacatgatgcacaatgaaggctaaaccctctattatggaagtagtgaaaatgagattttgaagcttcttggtgtagacatcatttacccaatttcaaacaatcaacgagtgagccctgttcaagtggtgccaaagaaatctcgtatcatagtggtgaagaatggagataatgagttagtgccaagaagaatgcaaagtgggtggcgagtttgtagagattaccgcaagctgaatgtgacaacacataaagatcacttccttttgccattcattgatcaggtgcttgagaggttagcatgtcatccttattactactttcttgatggatattcgggatataatcagattgctattgctcctaaagatcaagagaagacaacctttacatgctcttttggtacatttgctttctagcatatgtcatttgggttatgcaatgctcctgtaacttttcagcgatgtatgatgagaatattttctaaatacattaagatcatcattgaggtcttcatggatgattttagtgtatatggtgactaatttgataagtgtcttcacaatctcactttgatccatcagcggtgtattgaaactaaccttgtgctcaatttggaaaaatgccattttatggtaaatcaacgtatagttttgggccatgtgatttcatccaaggggatagaagtatataaggctaaaattgatttgatttgctctctaccccctctaattagtgtgaaagaagtaagatcattccttcgacatgtagaattttataggagatttatcaaagatttcttagaaatctctactccaatttgcaaccttcttaaaaaagatgtcaagtttgagcttaatgagaagttcttagtggctttgaattttttttaaaaaaatctttgactttagctcttataattcaaccaccaaattgggggcttccatttgagcttatgtgtgattcaagtgacttgggtaagagtgttcattggaccacatctaatacttttaggcctatccagattcgatccaattatgtattggatgttagattttaccattcgattcgatccaattaattcagtcatccaatcgatccaacatccattggatgttggattggattggctctatccattggaagtgttccatatatatttattggtttaatttggatttatccaatattttagacctattatttcttaaatcggatcgaatccatccaatattttaggtctagtatgtattggattgggctggatccattcaatccacgaaaaaaaagagtaaatttttaattttaatttt

SEQ ID NO: 301771 - DNA, 3432 bp, Cannabis indica
agatctagagagatactacgagtcatccgtcctagattccatcatcgctgtcctaactaacctactactataaatagaaattctacaactaacagaaaagagagagagagagatcaagttggggtgagggtgatacacaaagaagaatgagagcttaatagagatgaatctcttcaagattgaggtgttacaaggctattcatgttcgagattttgaatgcctttagtgagctcatttcagttactggtgtgaagcaccatttgtgtagtttgtgttcttgattctccattggtataagttgttataatgtttgccattcattaataaaatcaatacaaccaatggagttgtttctactcggggattaggtccaagttttatccaaaacttgtgactgaacctcgttatttcttgctgtcaatttactattctggtttatagtttttggtttaatattttaagcctatttctttcttgccttgtgttcttgtttgtgcttgagtacacaataagatttcttcttggcaaagcagtgtagatgttattgtttacttaacttgttcgctattttcttgttgtgttttttttttggtcagtttgacttgatctttacttgagggtgacaaaagtggtcagtttgcttagagtctagttttaagtttatttttaatattttttattttttattgttcgggtttacgcttgttttttcttttatattaatttcaggtttgagatgaagagagcttcattttttggtaaaaatatggtttttttttctagtttcttggtaataaaatgatccttttgcaaaaaggatcttcgggattgaatttcttgacttggtgcattctgaaagatttaaaaaatcaggttttcaaaagtcggcatcaaaggttgcaacctttcactgaagatcgcgactctccaaaaactacaaaaagtaatttttggaaaaatccaagagccacaaccttcggaaggtcgaggccctcggaaaagttgaaaaattacgtctctataaaaaaaatccaagagccaaaactctctatcaaaagttgtaactcttggctatttttggcaactttgttgattcgacctaaaaacgagtggaggctaggtttttatcatatattcaattattttgaacattggaggctagaggaggacgactataagcataggacaccgttgtaggattccaattagtgttctttctcatctatctttatttttttatataaatgtattttcaattgaatctttagatgcttaagatgatttttatgagctaatttacttttgggattattatgtgaaccacttgaatttcttttatggattaaagtagatatttatcttcttctattattttaattacatgcaatctgatttaattgtgcaattattaattgatcacctttaattgttatccatgatttcgaatcaaaattttaaaaagtgagatttgaatatgttttgactgttatggatgcaaattgatttagaagaaaagtacatactgtatgatttttatgagttgatttgtttaatgctttctctgtgattaaacttgtcataggaatataagaagtttttacatagattgaatttgtaagtcttcaccaaattataaactatttaattcaacttgtcaactgaatatgaagaaaataaattggataattactttaagaagtaaaagaaaagctagtagaggattataataattcatatttttctcattgatctgtctcttaattttaattgtttattttattttcttcacatatctctaatatttttatttaatcaaatagaaacattgattatttggtaaattgatgataatcaatccttgtagtaggacgatatttggtcttctaattaagattattacaaattgtgactgtatacacttgcatagcattatgttttgcaacaattcctattctcatttttatgtacattctaactaaacgctaataaaatttattattttacatctttgccgttaataaaattctttataaagcaaagcattaagttgagattgaactcttctaatattaaggaagttttattatgaatagcatgatcaagttcattctgaatactgttgagatttatgagttccatatcaaaattaattggtgatgagtttagtagtcgatgttcttatatatgactcaatacttttacaattattaatccatgtaggataatgttatccaataaatactatatctcaaatttataataaagagatagtgaattgttatattccattatttaaattattaattacagtatttttaagattaaaaaatttattaagtctatcctgaacattttcattagatgtatatatgttttctatttgtagagagagaaatattataaattattcttgcatgtcattccaaaagtgataataataaaaacagataagttgaacccatacataaatttgtttagtccttccaatcagattcttacacgcctatcaaactttaagaaattagaagaaaacaacatttttataaatagaattaataaaaaaatatatattatgtaaataggtaacacaaaataataaggcaagttatttcaatgttagtaagctggctttatcttattacttatgacacaattaatctcgtgtgcaaaagctggcataagctgcccattcaaatcaaatctacataattaaatattccttaaacttcccattttccacacctgaaaaacgtcacttttttaattattattattattattattattattttgaaaaggttttttaattattattagtacagaagaaaaaaaaaacgacagctggtataattactaattacacgtaaacacacgaaacttccttttctgaaacttttttttacgtaaggtccttttcttaacacgaaatttcctgatctgaaagtttgacaccaatgaatgaactgtactcttcttattagtttttccattatagctagtccactctctagagctcccttataatttttattaatcaccaccattaaaataaaacaactcattttaaatactagctactttatctcactcatcatccaaaacacgtatataaataaaaaatatttatacatacataaccaggggctgtaaagctttgttctttgcttggtttcaaggtacttttactgttatctttggggtctgtgttgttataaaatgtgtattgtgctactgctatactttctaaccgtttggttattagcagaggaattagattcaataatccagctattgattacttggcttattaactgtgttagctttaaggaaatttaaaagtgtagatacttctaaaaaaatattaaaagtattactattaaactaaaattataattaagaataaattttgaatattattatatatttttttt

SEQ ID NO: 301772 - DNA, 5258 bp, Cannabis indica
tgagagagttggggagataaactaacttatacggtcgttacattttatcctctttcactctcagttcccccgactagattctcccttccttagcttcaaaatcggttaatggaggttctcaaccactgcttaaccaccaaaccatattttcataaacccttttctcgtaagcctccatttttagactccaacctcaaaatcaccttctttctccctacttctcgttttcattgtaactccaagaagagacctttttccttcaccgttatctcttgcaggcatagaagttctcaagataacaagaagaaccagaaccctataaccaagaagattatactttccgaagtagcaccgccaccgctggcaaccgagaatgaggaagttccgggaaatcctggccccggtaataagaatggggtcttgagctttgccaagagaattcccaggaaggttttggctgttttgtctaatcttcctcttgctattggcgagatgttcactgtcgctattctcatggctattggtaatgcactgctgtctcaaaattctagtacattgttttgtcgctttacatttttgtgttcttgtttggaacttatgagctgatcaaatgatgttagtttgtttgatgtttatttgaaattttcatttacaattaagagaattctttagtacatgaaatttgtgtatataccattgtctgcaatacctttttattctgtttgtttatacaatggttttgcaggaactgtcattgatcaaggtgaggccccagatttctatttccagaaatacccagaagacaatcctgtgctgggattcttcacatggagatgggttcttactcttgggtttgatcacatgttctcctctcctgtttttcttggtacactaactctccttggggcatcactaatggcatgtacttacacaacgcagattccccttgtcaaagttgctagaaggtttgatattctttacatagtttcttcacaatttagttgggtaagttgagaactaaaccaggaatttaatggtaaaatagatggaaatttatggattctgcggaggctgttcgtaagcaggagttttctgacactcttccaagagcatcagttcaagatttaggtgtcattctgatgggagctggatatgaggttgtactttgcatactattgcttttctttttatttcatttcctcccaattaaacccttttgatttctgattggtttcttccgttagtggctgaatttttcattcctttgaagtttatgtttaattattatcataatacctatcttatgtattatcaaatctcgaacccttgttcaaatatgaataaactttaccagcacaaggaactccattcccatctagttagatttcatttagtcaacttggatggccaagagtgtgtatttgtatggagttagaagattatgcattaagtgtattgaacttaaatagctgactggttttcaatctatataatcaacatagaactctcactatcatgcggggatctctgatcactgcttatgatttatactctcagatgttttaatccattattgacttaaatgggtttttggatataggtattcttgaagggcccatccttgtatgcctttaggggcctggctggccggtttgctcctattggagttcatatagcaatgctactaataatggcaggtggaactctaagtgcagctgggagcttcaaaggaacagtcacagtgccgcaggggctgaattttgtggtcggagatgtactaggcccaactgggtttctctctactccaactgaagcttttaatacagaagttcatgtcaatagattctacatggatttctatgacagtggggaggtatatgttaatttcactcactgttagattttcttttatgaaatggaatgtaaactgttgatttataaatagtctacagtcttttcctttaatgtgtcacgttccttattatagtttatctttagcatatatcatttagaatctctgtggactgtgataccatctaccgttccatatgcttgtttgattgtttctgttatttagtgtatgtaatgttgtttcattttcctctggtttatgtaataggtatcacagtttcacactgacctttcactatatagtcttgatggaaaggaagtcctgaggaaaacgattagtgtaaatgaccctttaaggtacgaagggatcactatataccagaccgattggagtttttcagcactgcaaataattaaggatgatgaagggccctttaatttggctatggcacctcttcagataaatggagacaaaaaactatatggaaccttcttaccagtaggagatgctaattctcctaatgtcaagggaatgtatgcccttctctcactccaactttgatttcttgttgttttctattgctgatatcttttattaatgtctcctcttaattttttaagaggaggatgtaatgatgttattcctgcattgaaatgtttcttttaatctctattagagttagtcccacattgttaatgtatagaaataaattctcatataaaagataaatgggttacccttcccattttcaataaattttggaataaaacttcatgcatcttatgccaaattctaaacctctatactgcttggcatctttatctaaaatgggcctggattactttgtttaactcacataaaactaatgttcttttctcatattatttgtattttagatcaatgcttgctcgtgatctacaatccattgtcttgtatgatcaagaaggaaaatttgttggagttcgaagaccaaactcgaaacttccaatcgatattaatggaactaagattcttatagttgatgcaatagggagtagtggcctcaacttgaaggtaaaatgatacaaatttattttagtatgctatttgccacgattttaactcttatttcactattgattgaaacacggttctttgctagactgatcctggggtgccaattgtgtatgccggatttggtgctttgatgctcactacttgcattagttatttgtctcatgcacaggtaaaatctcaattttcatagtttaggtgagttgaatattggatatacttatcacttagtggacttcttctagggctgtcacaaagtattcgatccaattcaattcacaatatgcagatattatcctcacttatgtggattgaattagattgaattgaaaaatctaaaatctgcaattgtgtgaattagatattatttgatctcaaaaagtaattgatcaaacccaatctgcattttttatatagatatatatacatatatatatttaaaaattatattgatgaaaattacaaatctaacaaatctgagtatacaaattgttgacttagaaatctggacaaagactttcaacttccaagccacacccactcactagattggcgagaataaaatatttgttaagtaaaattaaagagagagacacaacaatttatagttcactccttatatagcaacagtaataaagctacgtctactttgagtttttatttctcacaagatggtattaaaaaaaatagactaagtgtcaaagctccaacttttagagagagattccagatagagaagttctgactttgtgggtagttttctagatctaaaaaataaactaagggagctctccttttataggtggaggcccttgaaaataggagaaaaatacaagttggctatttttgatcgtaaacgatgatctaatggtgaaaattaacttttgaggctgatcgtcaattttcggagcctaggtcgcaacaatgggacccgctctgggtaagctagagcttatcttcgtaactcccttggggtaaaatttggggtcgatagtttcagaattgtgtttaaagtgtgaaacctgacctgatagagcattaaaatagctttaaaacgcaagttggatcacgtaaatcgtatgaatattgaatgagttatgaccgttttactgaaggctattcatgacccaacgcccaagttgacatctagggctcaagttgacatcctagcgctcaggttgacatctcagtgcccaggttgatatatgacatcaacctggaggctaggtaagtgaaaaaacgtccaggggatgtactttatgatgcctaagttatattttaacatcactaagtcagtttctgtgctttggcgaagctggtcaccagttttcggagatgttgttctgcggaaatgagagactcaaaactcttcattttcgagtgagtttcccatgttggaaatgagaaatgcgaagttgtaaatttgacttctctgacttcatggatcttagttattttgacaaagtagatgaacggttgaaacgaaatcagaatcagataagtctcttgcgcctgatacattttctgatgagtctcttgtcccttcacctgcctcgatcatagctctcgcaatgcctacacctccaccatctcctaagcctcctatagtgtacttcaggcgtccattttctccacttcatgtttcatgtcctgtacttacatcttcatcattagatcttgaagtcagcgatgatcttcctattgcactacataaaggtaaatgccaatgtacatatcctatttcttcttttgtttcttttaatcatttgttctcttcttttgctcttttattgcttctcttgattctatcactattcctaaaattgttcgtgaagccacgtctcatcctggttggcttgctgcaatgataggagagatgaatgctttagttgcaaatggtacttgggacttagttaatttacctttaagaaaataagctatggggtgcaaatggttgtttatggttaaagtcaatccagatggaacaactgcttgctgaaaggtctgtcttgttgccaagggttattcttaaacctatggagtgaacaattatgatactttttaacctgttgctaaactcacatctgtttgattattcatttccatggcatctattcatcattgcctttgcatcaacttaatattataaatgtttttcttcatggagatcttgaggaagaagtgtatatagagcaaccttttaggtttgttgctcaaggagaagtagggcaagtttgtcgtcttcgcaaatctttgtatggattgaaacacagtccttgtgcttggtttggtaaatttagtcaggctgttgagaaatttggtttgttgaaaagtaagtcagatcattctgtgt

SEQ ID NO: 301773 - DNA, 5950 bp, Cannabis indica
aatttaaataaatataattagttaaaaaaatattatataaatttttaatctgtacacatattattattaattttatagatgacataaaaaaataaagttatatcataattattaagtcatataatagtaataattacacaatttaataattatttttaattacatctaaatctaattctaccataatttttcaaatgcaccttatttaatgtaacaagtattctaaaatataaatattttgatgttttacaaaagagttaataatatcttcttattttcaattacatggttacattcaattccaattacaagctaaattttcaaaggcaagcttaattaatttgggggacataagtgaaacaaaataacatttagagacctaaatgataatttaaagaaaggttgaggacttccacggacataaacccttatatggataaacgacaaacgacaattatctctaaaaacgacaatattatagtctctcgacacgtctcttcaacctctctgtctgtgttgtgttcagttctcattcggtggcatgctatgaattattctcaccttcttctgcttccccaggttgcgttttctcacaggccaattctgcaaattcaagcttccaattataaggttagtaacttagtattcatgtctccattttctctgtatatatactctgcatgcatatataaatacatatatatgtttgtgtataagcttgaaaactctttgagaagtagcaagaagagttcttttttgtaaacccagttatgatttaaccttgtattcactcatactataatgggtaattcagtatatccattactgaaaccaaactgttcgactttttgtccaagagagaatagtttgtttgtttagctaattaacttgcccaactttatttagtctctctggatattgatacagccatagaacttactctctggatgtcccgattttgggcttctggaattttttcaaatatcacgtttggccccatgtctcttatcattttactcacactttcacgaccaaatgttaggagagtgcattagagttaatctcgatatcatataaaagatgaatgagacaattaattttgagatgaaactacgtacattttactctctttcattcctaattctaacagttatagaccaccaaccaatcctatacttaggaggattctaacaatgcacctcttttaagaggggacgtccacaccacctactctagtggattaggtcgcccctttcggggtttaggttccatctgagggtgcatggctctgatactacttaggtagaacttagtataaaggaacagggtgtttgagtagttatatactatcaaccaatctcatacttaattaatataggatcaaaacagatatctatagcattgttgatcggtgtcagctcgagttgaatggagaattctgtccagtagataagatggtctaaatgcatttatgggttcctactactgctaaggcttgtgtggtgtggttgttagatactataacatttacttactgctctgtaaaggagatgggggcgaaatatttttattgttttttcatcaattgattgtgagtttatttattgttgaagaagtttctggtcttagttactactgtgctctgtttagtttctaaaaaagctatattagaatgtgagattactgagcaagaaagaaattaaggaataaagaaataaacggatctcaccagcaacttttggatttaaaatgaagatatccccatgtctctagatttgtctcttattgacaaaaaaaatattcagttgaagttgaaagttttgtctaccatgtctgtctgcaatgaggtttatttgatatattcagtagtaccggggacatgatttcttgcatcaagtaaatccttttctaaaaatatataagaagaaactatactgtgtgacattattgtgagtggtatacagatagtcagagacttttcctttcagttaggaaatgttaattttataatccttgcataacctgtggcagggtagcaacactgtcgagccaacaaagacgaaagacaagacaagtgatataagaaaccacaacaaagttaaaagagatgaagttttcttgtgtgacacagagaaaaccaagcagcagcagtatagtcctcctccacttgttactgcattgaagatttcagctcaacaaaatgctgccacttttcactttcccggtcacaacagagggcgtattgccccgtcttcattaactcacctcattggtatcaaaccattcattcacgatttgcctgagcttccagagcttgataatctgttttcaccacaaggaccgattctagatgcgcaaaaagaagcagcaaagctttttggggcattggagacatggtttctggttggaggaaccacctgtgggatccaagctgcaattatggctacatgttcgccgggagactatctaatacttccccggaattgtcatttatcagccatatctgctatggtcttgtctggtgccatacctaagtacatcgtacccgaatatgacgttgaatgggatattgctggtggggtgactccatcacaggtgaaagtcttagaaagataagatattgcatcgtcgttcccttttttttggctatgccatgatgttcataatcagatttctctttccaggtggagaaggcgattgaggaactcgaaatggaaggtcgaaagccagctgcagtctttgtgacttctcctacttatcatggaatatgcagcaacataagtgagatttctcgactgtgccattctcacagaattccaataattgttgatgaggcacacggggcacatctcgggtttcatcctcaattgcctaactcagcacttcagcaaggggccgatttagcagttcaatcaactcacaaagtactttgctccttgacacaatcatcaatgctgcacatgtcaggaaatcttgtagataaagaaaatatctcaaggtgccttcaagtgcttcaaagcactagtcctagttatcttcttttggcatctttagatgcagctcgacatcaacttaccgaaaacccaaaaaccttatttgacaaaccactgcaattagtgaccaaagctaataatgtgataagaagacttcccggaatatccatacttgactctctgactttcccaaagttcccagctatggatccattgaggcttacaattggtttcaggcagctgaatttgtctggttatgaggcagatgaaattttgtacaaggacaacgagattatttgcgaacttgttggaaccacgtctcttacttttgcgtttaaccttggaacttgtaaggagcatgttgagagactggtgtccagcctaaagcatttagtatcaactgcaacactaactcaaggtgatgtaaggaagatggaccttggtgttttagcacctttcgctgattttacgacgagcttaattccaagagatgccttttttagaagtaaaaggaaagtaagcattgaaagctgtcttggggaagtttgtggggagcttatatgtccatacccaccaggaattccagtgttgatccctggtgagattattacagaaagagctttggattatcttttagaggttagaagtaaaggtgctatcatcagtggggcttcagatcctcaactctcttccatagttgtctgcaacaagtagtgcacccacagtatggtccgaattcagctgtattgtctttgtattagtccaagagataattgcggcgtaagtactcaaatttttgatcttgtgagcagcataaatccaataaatttttcagtaacacaagtatccaaatattagaaaaattgtaattttcatcaaatttcgtcagtacttattccgttagtattttaatcaggcctaaattataaatcattggtttttttgaacaaaaacatgtaatatcaattacttcgacactaacagagtttgtaatgacaaaactagacaaaagttacaattttactaacattgggtacttatattactaaaaacaattattgaatctacgctgattacaaaatttaaaactttgagtacttatactgctatttattcttagtgtccaacttatcttcctagctagtgtgaatattcttcatgcagttctatcattcagagtctagaaattgacaagtataccttaacagatgcaactggtttgtaagatgaaataatatgctgtataattttcaatatattgttctgccacattagcttacagccattcctaatactatctttcttctggtataaaaatttacaagaacaaagatcatatttcctctggtgtagcaaaagaaattagatcagatacaaaatttgtaaacaaaaaaaagaacaagagggttctgctgagaagtaactctattttaagaactgtgactcagggcatgacttttggatcaatattgtgaatacccatcgatggaaattgcgttgcttgcctctttgcaggtcggtcgtcgtgatcagaattcgagggaggatttggtggcataccgaggtgcaagtcagtagagccatctggagcagcccatgccaagggtttcactgcagcaataccagtgattatcagtttacaaaaccgaaagggctaactaaacacgaaaagaacaaataacaaaaacaaaaacatggcctgcatactgtgatttatctgcaattcatggtagtatttggtttgtcattcagagaagaattcagtttagtttggacacaacatacctacaccaggtctaagctgtccaatgctatcatcacaagaagcagctaaacgagcagggcgcttcctcacataattatcctgcagcggtttcgggatttgaaaagaaaattgtgacaactttactccatctcttgtgtactctggatgttccaataagtacctacaaaagaaaaatcagcaagaaagatttagtacacttttcaaaccgagtaaatgcttcccggaacttcatgtcaacaagccaagggcgtacttttggacctccaccattgaacgaagtctctttcccgatggtgcagcatagtacctgaagttttttgtacaggcaaagcaaattgttagactgctaagtcgatggactgaagtaaatacaaacatcaaagaagaaaaggattcatacacatctgcaaacttggtgcttccttcacctctgatccgaagcagtcgttgccaaccaggaggaggctgagcaatattaggcttatcaattgcccaaagcctgctaccatcttggttaagatcagctggatcatcacacgaaatatcaggacgccattgacgagcagtttcacagaaaaacggttgctctagaatatgctcgcgaatttcttcatacttctcttttgttggaatgagcctccatttgaaacaacttgcacactgaactgtaaaagctccaacagatggcaaagcccttgatggttggtttgatgaaccgaaaaatcttttctcttttcggggctgatatggaggtggctcaggaacagttacaattgcacttgtattactattgttatcattagccacaggatcataaagcaccatttgcttagatgcatcctcactgaattggccattttcatcatcagatgaagctgaggatgaagatgaaacatctaaaatctcctgatgattgctgctgctgcttccctgccccaataaactcggttcaggtaattcattctctggtttcttaaatttaactcttattttttgagcttgtggccacatttagaacacctgcatagaacacataaccttaatgaaaattttgattagcaaaataaccttgtacggtcgcagaaacaatcatagatttacattgtaaggccatcatagttgaggttattttgcaagttttagtatttcacattgttagtttggcaaattt

SEQ ID NO: 301774 - DNA, 3718 bp, Cannabis indica
aagtcgattttctgtcatcatgaaaggcagcccaatcggcattagtacacccttgaatatccagtcgagttgaaagtcgaaaagtgagaccaatgtcttgagtaccagacagatatcgcaaaatgcgtttgcaggctacccaatatttagatgagggttgttgcatatattgacttaaccgatttactgaaaaggatatatcaggcctggtcattgttaagtattgtaaagcacctatgatgctgcgatattgagatgggttttgcataggtgtgccagtggtggcaatgatttttgttgaggagcacatgggtgtgggttgggacttggaatccagtagttgagtcttagcaagaagatcatagatatacttttgttggtttaatgaaatagtgttgcctgttctgtgaacctcaaaaccgagaaagtagtggataggaccaagtattttgagagcaaaagtatgatgcagctgatgaataacatgctgaacctgagaagcatttgcactagtaattagaatatcgtcgacatataccaatatgagaagtaaggagccagtggtattggtgaagaacaagctagtgtcggacttgctgttggtgtagccccaactgagtaaagtatttttcagagtgtcaaaccaggccataggggcttgttttaagccatagatgattttttgaagtttgcatacataatccgggtagttaggatccacaaaaccttgaggttgagccatatacacatcttcttgaagctctccattcaagaaggcatgattaatgtcaatttgttgaatttcacagccataagtagcagccaaagtgaacatgattctaatggtacatggcttaataacagggctgtaagtttcaaaatagtcaatacctaccgtttgttgaaacccctttgcaacaagacgggctttaagtctttcaacagtgccatcaggattgaatttaatccggtaaacccatttattttgaacaatgatcatatctgaagttcttggaataagaatccacgttttcttgttcttgagggcagtgatttcatgttgcatagcagcgttccatttggcacttgcaagagcatctttaatggttgtaggttcaacttcattatttatttgagcaacataaagctttggtttgtaaataccatgtttggatctggtcatcattggatgttggttctgaactaggggagaaacagtggtagttgtatgagaggaactggtaggagaagtaggagtggggatattggtaacattatgggaagaggtagtacttgtggttgggtttagaggtacaacagtatgttgctggtgtgagggtgaatgcgagggtactggtgtatgttgctggtgtgagggtaatggggcagggttgggattatgcatatgtgatggattgtttggaacaagaaaagcatttggatttaggacaggtgtagagctttgtgatgtgataactgtaggtgtaaacaaggactgatatgggaattctagctcgttaaatgtgacattccgagacacatatacacggccagaggggtgtagacatcgaaagcctttggaagtgatgctatatcctataaagacacattgagatgatcgaaaggcaactttgtgttgattatattgtttgagaagtgggaagcatgaacatccaaacactttgaacatattataatctggtggttgatgaaataaagtttcaaatggtgaaacatgattgagaattggggtagggagcctattgatgagataggcagctgaagcaaaagcttcccaccagaaatttaagggcatattggcttgtgcaagtaaagttaggccaatatcaacaacatgcctatgttttctctcaattttaccttgttgttgatgggtgtgagggcatgagtttctttggacaattcccaagtttttatacaatttatacaaaggttcaaactctttaccaagatcggattggacagatttgatttgagtatggaattgcctttcaacaagagtattaaattgagagaagatgctgcacacttcagatttgtttttcataggaaagatccaaacaaatttggtaaaatcatccataaaactgacatagtatctaaatccatcactagaaggataaaaagatggaccccatacatctgttaaaactaattgaaaaggctgaacagatttattcttggtagctttaaagctaaactgatgcaatttgccaatttggcaggcattacaaaaagcaagttgattacatttagcacggggaacaacttgagacaagactttattaagaatgaagggagaaggatgaccaagtcgacagtgccatatgttggcaatttgagacttgtcttgaatagggttgctggtagttgtatgattgtaagcttggggctgagaaacagtgagtttcttgatggtttcttgagttgtaggtggggagactttgagtttgtagagaccgtcactgagatggccctgcagaagaactcggctggttttcttgtccttaataagacatgaaagatcatcaaattcaatagttacattgttatctttagtaaatttagaaatgctaagcaaattctttgtgacatttggaacatggagaatgtcttgtaacaaaagggactgatttgggagaatggtagggacagaacttgtgcctaaatgatgaatagataaagaagaaccattacctacaaccaccttggctttacccttgtaatcagtagctgtggtgagattttcagcatcattggtcatatggtgagtagctccactgtccaaataccaagctgtggaaatgtcagtgttcgagttggattcaaagagaagagcttggggattttcactattattggaggaagtagatgctgcccctgtaaatgtgatgtcaaaacgatgatagcatttcgttgcaatatgaccagcacggccacaaagctgacacacaggtctgttgccacggtctcctctgttggaattgtaagatctgccaccacgataaccacctctggatcctcgatttgaatatgaaccccttgtgctgctggtgttggtattggctatatttgcttgaacattgtgaagagagtctgtagtatgttgttggatacgcatctcttgactttgcaacataaattggacttcggagagggaaagagattcagatcgagaggtaagattgactattactgcttcatattcagatcctaagccaccaagaatataaggaacaagatcatcatcattgagaggttgaccagctgctgctaacccatccgcatgttgtttcatttttagtatgtagtcctcgatagataaagatcctttcttagtggtttggaggagattttgaagctgcaacaatcttgcacgagatcgtgtggcaaagagttgagcaaatgttgtccagatctcggatgaagtgtggcagtgaataacatgtcgcaacatgtgttcagtaacagaattcatgagccaatgcatcaagaattgatcaaaacgaatccattgttgaatatcggattgggaatattacctgcaagaatggctggaggttggggaatggtgccaagaatatagccatcgagatcgtaagcacgaacagcagccaataccagagatcgccaaagagtgtaattggtacgatcgaatctgaggtttagggggaggagatgattgttggggagggga

SEQ ID NO: 301775 - DNA, 3830 bp, Cannabis indica
tgaaaattaacattaaagttttatttttttttcttggattggatgtatccagtccaattcaatacatactggatctaaaatattagatagattcgatccgatccaaaaaatactaggtctaaaatattagataaacctaaattaaacaaatagatatatatgaaatacatccaatggatagaaccgatccaatccaacatccaatggatattggatcgattggatgacgaaattaattagatcggatcggatggtttaatctaacatccaatatatgattggatcggatctgaataggcctaaaaacattagatgtgattcaataaacacccctaactaccatagtcaaaatataaagaaaaacaacgtgtgatatgggaaaggaaaatgaatatagataaaagaaaaaacatggaaatatccatatgaaattgtaatcttgaaagttgatagattcattttgctaaaaagacaaaagaattgactcaagtggtttggtcattccattccatgaatccaaattcattattacccaatttgtctctataaagaaaaagtgagaaagaagagtactattgcccacttgcaattggtccacatatcaactataggtttgatagaaagaaatattggtttatatacatttaatggctaatgaagaaatggtcataactcatgacccttattattattattattatataaatattatatacacagcatacacataaaaatgtgtcaaagttgaacataatcaaaccctttaaaggggtttatgcatgatttcaattttcaaaccgacaactatgaaattttggtcactacaaatttctacaccttaacttgaagttcttctaatctatattttcaatgccaacctcttaaaaaaaaaagccagtaatgaaatgaactacctaagccacatagatagagaagaataggatatcatataaaggagagtttggcaatatttatatctaaaggaaatttcttctttgaccttgaaaaatcaacatggaccatattaattggttctcttctcttaaggtcaaaagagtagttgaataaaacaaagttctaaaatgttgacatatataatatcttactcaaaaattatgcaaagagctttggtttctactatacctgtttttcatgaaggaatgacataacccaggtaaagttattcccatcttgtacttgtgaatgtttttttaaggttttgttcggttaaacttttactttttattttatttttacgattagtttttcgggtaattattgacgcttattttggcttaaagagttttttagagcgaaaagctgaaacttaaagcttactcaactagcaacagaagtgttttcggaaattcaaatgtccaaaaagatgcagtgtttttctaacttttcaagtttcaaatagatcatttccttgcaaactatgcagtttcatagaaaaaaaaacaacaacaataataattatacattagaaaaatgtactcataaaatacatacctgaaactgagaagcacacaaattcatgagaagttttgctgaacccacattggccataagatttaaggcaatcccaacaagttttttgcccataatcaaatttgtacttgaaatcaaaaccttttctcaaagcatcttttgtattcaacttattagtcaccaaatctgtgtaatacttttgcagaagtggaatgttaatcaaactcttacatgattggttttgatgatcagagggattctttaggtaataaccatcataaactctttcaacattacttgtacatctcaaaaatgatgttgtatttggaataatcccatttgagcaattgtacaaataagtcaatttagcattatttgaagcacattcaaaaggactttgctcaatagcttcaattgtgagactggtaactctgtcagggcaaccatcatccaccatatctgcaccaacaactgttatggtttcatcccattctctcatatccaatacataaaaacttttggaaacaatctcaatttcagggtaggtgtgattatggcaatttagcttgaaatctgggtgaccacaatcttgaattctttcacctccccaaaaagggtatgcaaaagatttgtttccacaagtgaatgggagcttacaagcttcaaactttgactcatctttgagaattttgaatggggttgagaatcctagtgatataattactatggtgatgaagattgaagaagaagaagaagaatggagtaaagggtacattttgcttaagaataaacaaaactaatagtattaatgatacataaagataagtataccaaaaatttagagaacaataatggagaaaagatagtgtagtttggaaaattaagtgttggattaatgatgtagatggaagcaggtaatatttttctttacttagaataatctttcatagtttactgaccaccttgttttagacagattcaacttttttttaacaatagacacattcaactttgacttgaggaaatttggtaaccctttcatatcatgatttggactaaatttgttacatattatcacaagaaatgttaaaagcactagagtgaataattgtgatccaatacataattgttaaacttaactctatgtttggtaaggaagaaaagtgagcggaaagaaaattttgaagagaaaagtgaaaaagaaaggaaaaagaaatgcaagtttggtaagattgtattggagaatattgtcgtaaatggattaaatgtaaaagtattgagccatatataagagtatgagctatttactcatcaccaattagttttaaaatgaaattatatttctcgataaattgaaaagagaaggggaaagataaaggagtcctacaaattagagagataaaatgtataattactaatagagtaattttagagatacacaaaaataatacatacattttatggttgtcacttaactgttggagttagttagaattaatttgtttttattatgccttcagctatattaattctactctaactaactctacacattgtataaatgttgatgttgtattctttctaatcaatgagaagaatttttcttgcaataacttttttctacctttcactatgctttcctctatttcttttgtctcttccatatggcaaaacgtttcaacatagtatagagcatacatgagaactacttctgatcctaatgctactcatgccaccttgaacgctaatgcaactgcaagaaacaaaaccagagttggtgatgacaatgtcgtgtatttcaaccacaatcttttgatgaaattaaacgatcaaaacttcttgttattgaagcaacaatttttagccgcaattaaggggaatcgactttagaattacatccgagggaatctgccaccacagtttctctcagatgcagatcaagcctcattaacgtacaatcttatttttccagagtgggaggttcaggacgagcttcttgtttcctgactcctttcatcaatgtcagagagcttattcacgaggatggttggatgccattcatctcatcagatctagaataccttggagcaacgcttcactctacaaacttcagctatgatcttggagtttcaaatcaaattacaaaatctcaagtaaggttcactttctttaactgattatcttctcaaagttaaacatcatgtaggtttactttcatctgctggtgaaagacttagggcccgtttggcacagcttttggaaaagctaaaagctgcttttcaaaaaagctgtgacaaaaaggtgtttggtaagcagttaaaaaacaacttattgaagaa

SEQ ID NO: 301776 - DNA, 1520 bp, Cannabis indica
acagttttacggctttttaaagtggttgcagcgttagttgtaataggatttttatacgattttttgttgcaattaaggttgcagcgctagttgcaatatgtgtttttatgtagaatttcataaaaatgcaaatatatatatatatataaatattttaaagggtaaaataaaaaagttcttttataatatttttcttttttaattataataaaaaaaccttaataattaccatttcaagaaaataagaaagaaaaataaaaaacaaaaaagtaaatagataataacaaagtcttgatataatggtttcgtgtcatgcgctggtccgtaagatcttggacctagttcggtttagggtacgggtctgggtcgagatttggatttgggtgcgaaattcaagtcttaatttggggtctacgtttgggtatgagtttcgcgtccgggcgtggatccagggttcaaatcttggtccgggtttaggatctggatcatggttcggagtttggatccgagtccggatttgggtccaagtttagaaattagatgtcatgatatggtgtagaatattgatttttatttttagtaaaacaaatgtgaataatagttttaaaaaatttgaacaaaacaccataagattttaaaatgacaaaaatttatattttattcattttatatattgtagcgtattagaacaattttactaatattatttcctataaaatttaacatttgacttcaattaatttcagtccactaataatatcaaaattaagtctacaaaaatacatattcacactacatttcatgtgattggaattggatgttaatattttttgtcaaacaaattaagtgggcaatatgcatgtagtcatgtgcatgtagtcatggtttaatttctattgttagtcggtcatggtatataagttaaggtgatcttacaatacacctttttaaaaaatatatactaaatatatactgatgcatgcacttacttattctggtaactaattttttttcatattcatttacgttataattatataagatatcttataaaattttgagaaattcaaaataatttacaatataaaaagtagtgttcaaaaaatctattttatacgcgtataaaataaaatattcatgcattaccacatttttgaatcttatttttagcatgttaaattttttcaaattttaattttgtaagttgtcttaaatagtttacatgactatgagaaaaaaattaactaattttttttttcagatgctaaaatagataggggtgcatcagtgcatccattttaaggaggtgcattgtagataaatttcccttattatacatcttactcctcatcctatcctttatactcaaccttacctctgacctttctaacagttatagattatagaaaaattttacatgcacccccttaaaatgaatgtactgatacaatgcatccccttaaaataaatgcaccctctacttgtttcgacatccagaagaattttttagtctagttttt

SEQ ID NO: 301777 - DNA, 1296 bp, Cannabis indica
gtccacgtattttgggcaaattttggagcaacagatatcaaagtttgtagagcatgatttagtacgatcactgaattagtaaaaatccaacaatctcaatagtttatgagaaatttttcacgaccagaaaagttcaaaagcatgatttggtacatgtcaaagtttaagggcggggcaaaaatttaatttaattagccaaaattttaatattaatatatttttattttactggtgttctattggtgggattaaagtcacaaactctcaagtttgagattttatgttttgatattaaaatattattgtttagttttcttagggtatttttgcatagacaataaacttttatagatggaaaaaaaatttctactttgtgtaaggttattacatttgttattttaactttcattttcccttaatatatgtaatagaaaatcctaaatcctagccaatattttccccactaaaaaccctattcaatttttcttatgtgtttgtgggtcttcattgaaatatttttttttgcttaataaattttattttatccaagtattagtaatggtgttttgaccatgccaaattctttataggatctttggctatttgtttcttgagatgatttttgggttcttacctttttattattacattttgacaaaattctcgtatttgtttcttgcacaatgtcggaaaactttattttttgtttagaagaaaataaatatttttgcacattgtttattgttaaaaaaaacatttttatactatatttggtgagaagccataggaatagtagaagtttgagtgataatatttgtttggtaagataaataaagtgatgtaatgataaacaattaaatattatgaaattattatattaaatttataattaatattttcctaaaaaaaaaccttataattttaacctaaatttttttgtaactttaaacaaatgataaagaattatcatcactcatctctcactcttccatcataccaaacataacaaataagtttttaacttcatttatgagtggaatattgatggctaaagcatctgaattttaaatttttaacataaccacaaaaaataattttttaggggtaaaattatctaaactctcattcttttttgctctgtactcctccgtccaaaaatccggttaagtgtcacagtagactgcccacgtgtacacacttgtacacgtggcaaatttttagggcccacgtaatattaattttaaaaaataattataaataataatttaaaattataaaaatacaaaaaattatttt

SEQ ID NO: 301778 - DNA, 4503 bp, Cannabis indica
gtgttctataaaagatcaactgtattattttgtcgcttgtgtatgtggatgacattattattattggaagtgatactaggggcatttcttcccttaaatctttcattcatacccagtttcacacgaaagatttggtggtgctcgagtatttattgggagtttgaaatcactctgtgtaaacaaggtatttttctatctcgaagaaagtatgtacttgatttgttatctcagatgagaaaattgggaacaaaacctactttacggtagcctactttgtggtggcccactctaggcttaatccacaagttgcccctttcatctgttgccccttccatatgtcgcttcttttgcaacgtcagtcccaagagaggcgacatatgattttgtttaaaaactcactcccaaaggctagcctaagagaggagggtgcccaaatagttctataccaacaacaatccaatacttgtacaacgtgggattctaacaatttcctacacatatcataatacctattctaaagcttgtattttctatttggattctttagtaaaatatttaggttgtgtttggttggagtaatgtaatggaaaagtattaattttcatttcattaatttcttttattgcattttaaagtatcaaagtatcattctaatggaataaattttccatcattttgtttgattaactattctatttaaaaataaaaagaaaggacattctagtgcaagacgaaaaaaaatttattagtgctttgttcgataacaattaaaaaattgttttctatttaattaatcaaaaactaagaagtaattataaaattttgttaagtggaattaagaaaaacaacaaacaaaaaggttactgtacatgccttaaatttttttagcaactttttgtttatattaaatttcattttattgcaattcgtttgtttttatttctcccaatcaaacatacccttagctcacagggaagacaccatgttaacaaaaaattaaggttagtaaaacagacgttcccaatcaaacaatagtgacaaatcagatcaatcacaaaagaaacatactttgtatggtgtttccattataaatctaccatctttcgaaacgcaaggtatggttccttgttgaaaaaaggtaacctgcaataaacataaagtaagacttaacagtaaggtgaaacaaaaaaagttaacagacattcttgatcgggaccaatggggagagtaaataaatagacttcatacttgatcaggttcaagaccaaaaaacttgtgactttcgaaaaatttgcgtgtggcctcatcagtgaatggacttgtcataatataccaatgtatttgcattgaaccagaggaacctgtcaaaaagcaaagtcatattagaataaatacatgaacctaaaagaatataatgcagcaggtctcaaatttgagctgaaccaagcaagtttttgtttccgtgtaatgaaaaagttcactttatgttgtccagaaagactttagaccaaaaataatggaagaaatgtaatacataaggaagaagataacacaaaaataccatcatttatggcttcagcagctaaactctgaacacacaagattcgttcagcttggagttgaaatagtgactttccagatggaagcccaatatctaaaacatacaaaacacgtcatgggtttgaaatagggcttattataaaggaacataatatttctatagtatttattaatgaaaattaaatggaaaatggacgccatgaattataattattttataatctgtaccagtatttctagtgcagcagccatttatatcagcaaaataaacttataactgggaaataaaaaatagtcatgattattactcactgaagcacccctttggatctgaactaccaagccgagttccctgcatcatattttaataaagaaaaaatgcatattacagaaagaacaaaattacagttaccaaaataggggaagaaaattgaaagtgcacaagtagctcctatcttagcagcataactattagcactgtcaaaaaaaagggaggaaaattttcattgttgctaagccaagtgcctgctgacatacttaaattataatgcacctccatctgcacgaaatctctgtatgccatcaactttaatcattaacaaacaaaaaagcttcaaacaagagattaaattcaccatgattggatatggaaactttgatattggagtctaaagaaaaaatataagaaaccaggtagaaaatagatatgaaaaagttaattactgagcatctctctctgtattatgagattgatacgtgacaattaggaaaatacacagttacacagtaccaaatatgttttatgtagaggtaatttatggtcattacttcaaatcatcaactcatgctatccactaatgtagtgtaattatgatgcaaagaatgctaactaaagaaaaatccttgggtctttagatgggaaatttgagaaaatgtgcctctaatgacaccatatttgtacaattcaatcaattcaggaaaatccaaaacaaaatcagttattaacaattacttaaaaatttaacaacttcctctaattatgattcagatgattagaactcccttaataattggtgttgtacacataggcggaacaatttcatttttaaagtagatgacttacccagaaagagaaaaaataaagtttagaatcatataaagcaactttgtcgcaattaatgaattcattagaaacaaaagataatcatgcaattttatcactatatgcaatcaaaagcaaataaggaatcaggaagaaaagaacatcataccaaccagagagagagattatttcaataatacgccccaaaagcaatatcatacaaaattcatggaaccacaaagtccacgtttgcattattaatctaaacatttcaataatcagatcatggtcaaatcattagtggaaataaaggcttcttttaattatatatatatatatatatatttattaaataaagtgtcattacaaatactttttccctgacatgctaaattgtatcactattatgaaagagagatgctccaaatgtgacaacccatcatctcctatataacattatttagttaatcactgaacttttcgagtgtagtgtaaagttgaacataaaactacaaaagcacaaacactaagctaatcaataaaaagagaaaaaaaaagtacgaaatcaataatttaatttagaacaaacaatatcaagatttacagtaaatcacctggccaccagacaaaagcaacacagccaattttccatctgagattgctttcaaacccatcttccaccatctctctctgtccccaagtgtccgctcctccaccgttgatacacagctctccggtaccggctcaatagcagctgccggaaggccttaatttcccaacaaaatcacaaatttgacgtcaatttcattgaaaaagtatactctcacactacatgaacaataacagagtcgtactaaccatgagaccgaaatgaacatcggataacccgatctattctcgaaagatctaaactctgaaaaagacaacaatcacaagttgcatgaaattttgatcatatataagttataaccatgcaaaatcatcataattattcaaataattactgttcggttggcgagaaaagagagagagatctggggaaaaggaaaatgacctcgatatcattgacaagaatgaggcgttcttcgggggaaagctcgtcccagagagcaaatgcatcttcttggccgaagtccttgagtctctccagcaaagcctgaggcggcgtttgaggttgttgtggcaatgaggaagcatcggccattagttccctcattttttctttctagaaaaatggaaggtttctctctctagaatcggtagatagatctctgtctgtgtttctctctctctcggaatcagcagtggcagtaaggctcatgtcttgactgagctcagctttcaactgtaattataatattattattgttattattaatattattattaatagtaaagatgaatcatgaatgtgagggagtgagtaagatagtgccaagagacgacagtagtagtggcgaggaagacaagaatcgatatcgatcagcatataactgccagctccattgattttactcaaattaccctttcctttttaccttcaattacttctattgtcctacttctgaacacaaacctccactgggaatttcgattatcgtaaaagaggaaaagagttcatcaacttatttagatttgcaagataaacatatacatgggcggagcagaagttaggggccaaactattttataaaaataggtgacaaatatttcaagaacactttattaatttcataattaaaatttcgttcaaaaaaaaacttaataattaaaattaaaatgcaaacaaaaaaaatacttgtattacgaaagttattgataagtgaatacatttttttttt

SEQ ID NO: 301779 - DNA, 3010 bp, Cannabis indica
aagtttgattactttaaaattgaacaagtcctaggagaatgaaactctaatgctaatgccttagcaaaactggcatcaaaatttgacttagacaaattgaatctagtttcagtggaggtattaagcgagccacgtatatacgagactgaaaagtaagatgtagaaatgatagatatgagcttcacgtggatgacccctatcatcaaatatttgcaaaatggagagcttccaatagaaaaaactgagttacacaaacacttatatgtaatcccacgatacacactagttgatggaaaactttgtagaagaggatattccatgcccttattgggatgtgtactccctacagaagataaagagattattagagaaattcacgaggacttttgcaaagatcatacaggatggtaaagtctttttaaaaagataattcaacaggattattaatgttttgaatgttatatttttttgctcatgagtaagctttatttacacaattttgacaaaatacttatctcaaatttagacttagggtaaacgacgaacataaatgttcttgtacaattgaatgtttctgaacactttttgatcgcttgcgtgcaagtaattaataataatttaagagcaaactttaaatactttgcacagtacttagaacttgtttaaatatttcttgatttctcgtgcaaacaatcgatcctttattcacactttagcttgcatactatttatcaagacacactatgttatctcgtttatagtatatttgatgttatgcaagccattattattcaaatcgcactgataccaactatcgaagctatgggcaattaaatcgatgcagttctagacgacaaagttatatggctatctttaaattgaactaagatgtatgcttgacctaaggacggtaggagaccatctgtagatgcagaattattacctcgaggagccccatctttaaccttggtggtttcttaagtggttacatttttaacatagtggatacaagtgacatagttgctacactcttcatcgtcaggcactggaacttgttgccaagtagggaacttaggggtcttgtagtcatttgtacattggtccttgccgagaagagcgcctgactttaaattattgtcgtgtaataaaaagccagtagctcgaaaaccatatggaaggtttattaggatcttgtgtctcctttggattttaggtgtagggattggtctccttataacagctaaaaatgtgaaagaaagatcaaatttagtataagtatgaaatcataaaaaagacttagctcaaaactaagattttgggaatgattaatatttacgtaaaattctaaatttggtggtgttgattaggtggaacccggttatccaaaaaaagtcttccttaaactcctatttgttaggaagccttactatgatcttgcgatcattggtatgagtccccaaatagtaaaagcctcctactctaagcttcctcacaggacaggctttgaagaaaataaagaatctctaggggtgttggacactcccatttcaagatgtggtagataaactttagacaggcaagaatcctataagtgtttggggtgagctgaaaggatgaaaccccaaggtagttgcaaaattctttgaaataatccctaagggcgagtactgctcctgccgtaatgtcttccacactccaagctccaatttttgaagacttcgtggtgctgcaaccctcgtcttataagacatttctggagggaaacaactaaattcacgaagtgcaactgagcgaatgtggcatcctttctcgttcttaatgccacaagatcttaaaacatccccaacataagagataattgacatgaccctagattcgatcagttctgctttaaatgtaataataggattctggggcgtcttggatttgtaatcttttgaagccatgagttcaaattccaagttaccgggtggaaaagcaacactgacttgtggtaaaaataatggcattgctaagggtatatttactaagttaggtgactcaggctaagctgcttctcgtagaaaacgacgcctacctgttatgacttcattgaagaatcacctatagtaggtggatacttcatcctaattggtcttaataaggtgcttactaattttttcatcattgatttccaaaatggactgaggtttgtgaatttaaggcttaagaactatgacctagaattgaggatagtctgattctaagaggtttgggagtaaaatttttggattaaatgggacatggtattgttaaagtataatacccaaaatatttcttgaaaaatggagcactgttaaacccaagacctgtgaatcacataaccttgttcctagccctagattgcttaaaaattcatataaaactcactccaacaacaaatgatgcaaaataaatggatcatatataaagaaattaaaatggaagaataaaatgatattgagagagaaaccacttactagtttgacaaaaaatctcagtctcgaaaggcttcttgaagaaaactcctggtgcgaggggcttggaccttggcgattctgggattgagaaatgaaatcgatcaaaatttgaagaaaataagtaagggacagtgagggcatgcaatgttagagaaaaaaattggttgggattcttttgagttctaagagcttcgtgggtgaaaatggcaaaattgaagggattttaggttttatacctaaaagatgaaaatcgttcgatcacaatgatggaagattgaacagatgggaactattggaaagagaaaggtaagaataataaatgttgaaatgatatacctcaaagtcttgaaccgccaaaagcaaagcatacaattttaaatggaaaaaatatgatcgtaccctcaaggcaattaaaaggcattttattcaaaaagactttatatgggcaattattatactcatattttgagcagcaatatgttgctgacgcgtgtaaatgtagctggaacatg

SEQ ID NO: 301780 - DNA, 3167 bp, Cannabis indica
aaggagaatcaataacacattttttatggagaaaggaatggcactagacagcaatctccaaacaaaagctttcacttctgaaggaattttttaggtccagatttttgactaaaatttcttagagttggtaagagatgaagaagaggggatatcctgatgagagaaggctaaatgataagcagatttgacactgaaaactccaaaactgtcatgcccccaaataatttcatcattatcatgcaaacctgaaacagggacattcagaatttcattaaccaaagtttcattaaagcaataggtaagttttgaaacatcccaatccccagaggtgttaatgaaatatgaaagaaaggaggaaggaggtgtattatctgagttaaaagttttaaccttattgtgaggaagccaatgatcctccaaaattcttatattacccccatcacctaccttccaaatcagacccgaagttaacaagtccttaccccataatatacttctccaagtgaaagagcgattatgaccaggtttagcttggaagtatgagggaaatacctagccttgagaattgaggctagaagagaggtggaatttttgaaaattctccaagcctacttggcaagcatggtttggttaaaatgaaccaaagaacgaaaacccatcccacccaaaaatttagactaatacaggtgtttccaagagttccaatgaattttcttagaattctccgcagaaccccaccaaaatctggccatcacagcttcaatacccttacacaatttaaccggcaaacgaaagcataccatagcataggtaggaatagcctggatgacaacctttaataaaacctccttaccagccctagaaaaacacttaacagaccaacctctaagcaccgaattaactttatcttttaagaaagcaaaagaatgatacttagatctagaaagacattgaggaagacttaaatatttacatataaaaggtctatcttcaagattgaaagtattgaaaaaaaagagtgtgaatatcttgttgggtgttaggagaaaagagaatagaagacttagaaaagttaataacctgactcgaggctctagagtaaatattaaagacttcctgaagggcagaacaggatgtacgattagccgcacaaaagacaagactatcatccgcaaaaaacaagtgggaaataggaggagcagacctagagatagcaattccattaaacaaacctgcatcctgtttggccctaagaagagaggataaatcttccgcacaaaggataaagagataaggagagagaggatccccttgcctaagacccctagaaggcttaagagacccaccaacagaaccattgattaaaaaagagagtgtagtagtagtaatgcacttcattacaagagaaacaaaccgaggtggaaaattgaagtggaacataacattcactaaataatgccaattggcacgatcaaaagctttggccatgtcaagtttaagagcagcccaaccagtcttaccactttttttagaattaatggcatgcacaatttcttgggcaataaggatattatcaaagatgactcgaccagacacaaaatcactttgaaaaggagaaataattttatccaaaacaatttttaaacaattagccaagactttagaaattaccttgtaaaaagttgaacaaaggcttataggcatctttcagagtgtgagcatgttgcttcttaggaatcagagaaatgagagtggtattaataggagaaaaatcagtacccggtatcgcatgcctggtaagggtggacgaaaactgccattgatgggaccaagagtgaacagggaatacggtatcgcatgcctactagaaaactctagagagagaaaagcgagctgataaatgcgagaactctaaatggctttttcctcttattgtttatgttttcttgcattgaattgaataattaatatatgtgaaaagtataatttaaaaataaattaaaaaaaaagaagtgaaaagtaaaattcagccaagtgaattgaatcaaattatctctattaatatgcaaaataggttccttccatttaaactaactaactatctcccttcctcccgtctctctctctctctcgaacccatccttttgagcacgaagacccattgtcacgtgtcccttgttgtcacaccacgaagacgaccagaccaactcgacccaacaacgtcgacccaccactacccaatgtcgaccaaggtaagatttcgtctttattgtatcaagcttatagtttccagcaacgtgttctcattaatagaaactcactagtcatataaaatgaatcttttaggtccctatttatagtgtttaggaaaacaaaactttaaaaattcaaatctcactgactaaaagatgttaacaattgtgtatgagagtattaaggatcagaagaacattggagtaaaaggtcaaaatgtttttcattgaatactttcggttacacaacttttatcgcaaaatatgcaaaaacatttgaactatcggaatacaatgaaatatgacaaaacgttctccatgcatccaataggcgacatgtcgcctagtaagaggcaacatgccgcttggactgttttttaagcttcaatttggagctttgaatcttctctctgaaataatctcaaaaccaacgttcacatatgaaattaatgatgattttgttcgtttctaacaagcaaaaactcttttcacatgctttcataacctccaaatataattatatacttttagttacatattatcaaaacttgattcatatgtacaattctattttaaaatataactcctctaatgttacagtttttgtgcatgattatactataatatatagtttaattaccacacatacactaatttaattttgaaatataactcctctaatgtcacatacactattttaatctatattatattttattaaaaaatataacattcgtacactaaattaaaatttattgttatacaccaatgtaacattacataatcaagaaatattggcggctaaactacctgaactttacggtttgtaacacttaaccacaaaaactgaatttttggcgactaaactacctaaaccctggtttcgttttgctctgcacacctccgtccaaaaat

SEQ ID NO: 301781 - DNA, 3051 bp, Cannabis indica
agattacacatgtttcgggatcttgtaaaaatctttgcaaaacattacaagttattttacgtgccgacctaagcgacaaaagatgagaatataaaatacaacaactggtagaattcgcgtggtctagtgtggcttaaacatgtacaatacaccaccaagccctcacactcatggctgatctgatttaccctttcttacatagtagagcacccgcgagtcaagcccagcaagaactgtaaataacaaaatatgcaatatattatcaatataaataaatacggatgccaccacatctgttgtttgtttatcatagacctacgtgttgcgctaacacgtctatttacaataagaccttagattagtttatctcggttctgattatcgagtctaacctaattatgccttacccacataattctttatctcacatatatagcatagtattgcattcaaaattattttaaacactagagtaataaccctagatcgtataatcgctcactttagggtaataaccttaatttcgatttctcacttaatcacaacataatatcaaacatgagcaccacaacgcttaactctacgtgctaattactgtcttacttggtatcccaagtatgtggagattctaaatcctcaagtgttcttgagcaagcgacggtagtcctagtcacacaattctaggatttaacaaataagattaatcccaaaattcaatttcataatttacattctaatcacagataagcgtatagagcgcaaaacgagctttccaacgatatcaagaacgtcccaaatagagtcccgagtcaaaagttatgccgaaaacaaaagcccaaaatttcttggggaaaacaaagtctcaccgcggcgagtaaggccatggccgcggcgagcagctacaggtttctctcgccgcgacgaacccaaaaattaccatttttcacaacttcaaatttttatcccaaaattttaccaaatcaaatccaaccatcccaatcatgcataaactcaagttcaaaactaaaataagttatccaatattaacatcaatttcaaacccaaaacaaaacttaaattcatcaatatacatacaccacaaagcatgaaacacaaattactctattacacctaattcaaaacttgaacttcaaagccttcactccttcaaacaaaccctagaaattcataatcaaatccatattttcaaccctaaaatcatacaaagcactcaagatgcaatccatatacctcaaaattacaacaacatgcatcattaattcaagaacatcatgaacaagttcttgaagctttaattaccagaaattaaacataacagaagaaaaattagaagcttaccacaattacttaagcttcaagcaatgattcacaccaaattcactccaattcaagaatcaattttcaaaattggttaaaattaaaaaagatgagaaagagagagggagaggatcggctagggctaagaacaaaccagaaaataggttttctaatttccaaattttgttttgttgaaaatgtaatagttggtcaaatgatcaaaatgcccctagggccaaatataaacataaccttataatcaagggtattatagtcattccaatcacatacacataacatgttaattcatatttttcccatttattatataataccaaaattaaatcccaaaaatgtatcttgggccctgaacccggttcagtccaaaatactcggttgtgactataccgcgctgacttgtcagattatacctacagatagatagaatgaacatactatataataatatagtctataagcacgatataacattaaattacgattttacccttctagggtcaaatttacgaaaatgtccctagtacaccaacaaggttttaaaatacaatttatcaatatagtttcatatattaaattatataataatatatttcctaattaatacatatttaatctagttataaatgctaattcagtctcataaaccttaaagtacaattatcccttcttataaaaatttcgtcctgaaatttacctgaacaactctgaatatttctgttgcatatccgtctcgagtttccaggttgcctcttcaactttactgttcctccataacactttgatcagtgcaattgtcttgttccacaagactttttctcttctgtctaacacttgcactggttttttttcgtataaaagatttggctgaagttccaatacttcataactcagaatatgagacggatttgagacatatttctgaagcattgaaacatgaaacaaattatgtccagctgccagcgctagaggcatagccaacctatatacgccacttgccctatcctcttaaggatttcaaaaggtccaatgaacatcgggctaagttttttttttttaccaaagcgcttaatacctttcataggtgatattcgaagaaataccatatctcccacttggaaatcaatatcccgtcactttggatttgcatagctcttctgtctactatgagcagttaacattcgcgctcttatcttatcaactgcctcgtttgtcctatgaacaatttcgggacccaagaactttctttcacctacttcatcccaatgaataggtgatctacattttctttcatagagtagtttataaggagtcatcccgattgtttcctgatagttgttgttgtacgagaactcgatcagggtaaggtactttacccatcatccttcaaagtctaacacacatgcccaaagcatgtcttctaagatttgaatactcccttcggattgtccatctgtctgaggatgaaataatgtgctgaatttcagttgagtacccatggctcgatgtaagctttcccagaatctcgacatgaacttcggatccctataagaaacaatggactttaggacaccttgaagacgaacaatttctctaacatacagttctgcatactgatcgatggagaaacttatactcagaaaaaaatcggcagacttataaatttagtaacgagaaacttaggtggcgtttggt

SEQ ID NO: 301782 - DNA, 529 bp, Cannabis indica
tatatatatatatataaatttacttaaaaaattctagtgaaaaatcaacatcaacaatcgaaagcccatagctaagacgaaaacatataattcaagattaattctctgtaatttattaggtcatatgcatgaatatgcacgttttatttattgtattatggttgacattaacatgaaaaatggtgatgcagtaataataaataaataatattttcagatccttttaaaaataaaatatattttcttaccctattattaaaaggacccactttattatatattcagctaattgggtcgaggtttattaattaattaatttattttgttattaaaaacgtgttgagagatagaatgtattatgagtaaataaaattaagcaattatttaggaagagaaaaatatgaaagtgttttttcacttttcatttttcttgcaatgataaagtgtttggtgactatataaataacttttgacaaatcaaaaatattaaaaacatatactaattttttttagaatttttttttttttt

SEQ ID NO: 301783 - DNA, 1453 bp, Cannabis indica
attagaatgtaatatatatttaaaaaaacattaaatttgctcgcataatatatatatatatttatagagttattgtcgtgaggtcatatataacttttgtcttcacccattgaaaagtctctgtttatatatggagaatgataatttttttataaatatatataaccatctacattataaataattaattatttagaatctcttacaaatttttcaaatatttagaacataataattattgctctttctttcgatactgttaaaatttgacgcgcggatcttttccctagccatcagtttttgaattttgtaatgatattttgatccgtgtttatggaaatgtttcgttgagaaaaaaaaatctctttatttatatacataaaagagctccaaatcaacttatttaggggcaaatgaaataggcttaaaaacaacactgcgatggaaaattttagagtagtagtgtagtagtagtatatattcatataccaaaaaaaaaaaaagttatatattgaagtttttttggacactattaattatttgctatttaataaatgaaatatctatcataactaccatatataaaaataaataaataaataatgttataatttattttaatatcagtgaatttatttcgtagcttaaggcaaaaaggcattcgaacgcggtttaataaattttgacgtctaccggaatggaccaaataaaaataatatagtttataaaaaaaaaggtcaaataatataatggaaagcaatggacgtacttttttttaatgaaaaataaaaagaaaaaagaaagtcaaatatagttattttacattattttataaataatatgtggttcatatttggtgcttaatttgttgatatcagtggtttcacattctaatagatatatttgattttcattatataatatctcaatcacatcatcagactttcctcttgtaaatatgcctacaacataataatgataatattaaaatttcaaacccattaattaactatgttaattaatccaattcataattaattaatattatgttaagagtctacatatatatagagtgctctatcgcattcttatcattcggtttttcaatggttgccaaatttggcaacatcaaaattttagggttgattttggttcataattatttttggggttatttaaagcaatccaatattatgcataacatattatccattccatttgaataaatactccacttctttaattactctacacttaaaacaacaacatatttttttaatcaagaaagaaaaaatttcattaatcacaagcaaagatacaaacaaatacaacacaaagggctcaacaaaacacactagccaccaacaacatattaaactagataacgtaaccgcgcgttgcgcggtcctttcaataattgacaaaaaaaaatatataattttattaatttata

SEQ ID NO: 301784 - DNA, 1560 bp, Cannabis indica
aaataacaccaatccctacgtgcttgcatgaaagccaatggagacaggacatacataccctccttaaacatgctaaatttatacatttatttattcttacaaactgatttgcaaaatgtaatcaatctatttcataaaataaacgattttcaaggatgaaaaatcggtacatgttaaaatttcattatttcttttagagaaagaagaatggagaaaaatcgtcccagcctctggctctttggtctctccttgtcatgagttggtttggctgtgagtttttgtatctgtaatttccttgaatacccttttgaattttaggcttatctgatttggccaagtttgaaaattcatggaaaataatgtctcacaacattcaacatcttcatctcattcttcttcttcttcttcttcttcttctttttgttcagggtaatgatattttcgcctccttttttaatggatgaatccttttcagctctttgcttctgcttttggcggatttcgctttcctgtgcagtaatctccaaacctttcactttttagcttctctgtaaattcatgcttaatataataaactaattttatcttggaaattatagccaagaacataagtactttttttcttttctttcaccacatttgaactaggggaatttacacaacgttgtctctttctttgtcttttatttacataatgccacatgttttttttattattattatatatgtagacaaagtgtcaattggttctattggtgttattgtgagatatttgttccgataacattttggccatttgctttgttataatttgtttctttaaagctctttcttctcttgtcacatatcatctcttattgacattgtggagattttcatgggcagcaatggctctcgtgacattgccaaagcgaagcaggaccaggttggagaagtttcttccaactacaggactctaaaatctgcctactctaattccttttcaagtcaaggtaataatctaagcaaatttcctttgatctcttcttctttgcaatggcattgactattgactattgttctggtttttgctatgcattttaagacttgagatcattagattttgaggaggctgcagagggagaggaagagtatgaggattcatgtgtggcaagaggtcccgaggattgtccgacgagcttggatttcgaggaagcttcttcgaaagcaagcacttcagactcagatgatagagcttccactcattggcgtggtttctttggaatacttaagaaaggaccacacattaggttccaaaccttccctcctctaaagggtgtctcaaaattcacaagaagaaagagcaaaagaattagagaggaaatggtcccaccattgaatcctccaaccaatgcttcttctttagatgctgaacttagctgcttcaagtcttcatggaagaacttttcgctatccgagctccaagttgcaaccaacaactttagccaaggtctctagatattttacatttttgttttttttttctaagtttggctttggctcatttgtgtgtttgtgaag

SEQ ID NO: 301785 - DNA, 5617 bp, Cannabis indica
gcaatccaactcaaaacttctttaatgcctattatccaagcaatttcgagttgaacacaaccaatctttcccttcttaaatgcttctaccatagcaccatgatgatttcgagctacacaacccatgccaaagcgccccacataaacaaaaaaactaacaaaaaccaacaagaatcgaaccagaaaaacgaaaagactaaagaaccatgtcaaaagacaagactaatggaaaacttaattagttccaacacataaatacgatcacaacatataaaatcaaataaagaaagtactctttataattctaaccccataaaaatactaaatagaattaaactaataaaaggggaattaataagtgaaacaaaaactaacagaaacgtttcaacacataagaggaggctcgtacggtcaagatgacggaaaggaaccaatctcagatggtggccgtcatttaaaatataagaaacttacttctctcgtaactatcactacaatatatataagaaactttgaatgaaatacttattgtttctttaaaggtcttattaaactcatattacgtaagtattagaaagttatggaaagacgtatagaaccataagtagagagttttttgtagttaaatctttttaattgttgtttcacttgcatttaatcttttaatttcaaattttggcagtaaaattttctaagctactgaattagtagcaaatttaaagtgttattcggttaattgtcactatagattgtttatgtatacactcttatacacatgatacgtttaaattagtacgaatattattatttaaaaattatttttaaattaaataaatttataaaaatagagaataaaatattaaaatattaaaattaaaaaatattataaattttaaaatatttttataatttttaaataatattaaatgtattaatataaatgtgacacttcacgtctatattaacaattaactatttaacatagatgacacgtagtttcattcaaatttgagctcaagttgataaaattttgcagtaataaaatttttggagaaagagtccccatcgctatttctttatgtaggaggataagaatgatacaaaataagggtttagtattacattaggaggaatggtcgtgatctcaaaaataaaaataaataaagttattttagaaattgtgatattcatgtaatgccgcaactgcctcttcctagaacttgctttatgcgattttttcttttcttcccaaattcgagactcttctacaactctcaaattgacaaattctcattcttcagaatctataaattcccttaaaaacccaaaggtaagttcaatctcatcttcgccgaaaacaaaaaattgtagaaagcttctgaaaagcttcgagagaaactatcaccaatttagtagcagcttcttcttcttcttctaattgatctttttgactaaagaagccatgttttttgtgtgcgtaagcgacgtggacgaaagggttgtgtcgagccaaacggcccctggtaattgcccattctgtggaggactgattcgggccttggatgttcattatcaatggaggctatgttttatccctgtttattggaaaaccaaacgcaaattcttatgtaccctctgcaaccaaccactcgtagctctccactgattctataattcttcttttctttttttgtatcatattatagatagattgtaattattatcatatattttttcattgcccatgtaattttcttttatttcaataaatatatgaaaaaaaacaaatttatttcaataataataccaagacaaaaagtacatcacttgcaaagttttagcctcttaaaatatgatgatacaacggacttgggatatggtttcgtagcaagacaggttgggaaattctcaggttgttcaatccacaacttgtgtgctataccaccagctgtgagtttttcagacaagttcaaaatttgggtttctcccttcacctcaagtgtaacctgaaaaaaagttaagtatggtgacaccattaatttatggcaatgttcccttgtttcaagtattacaaatactcagatcaccaaaagttagggctaaatattcagcaaatatttaaacacattcaacatcaccaaactaatgcacatgatataattattactcaggattgtcattttctctgttcagtctagattctcaaagccttaatatagaatctagtctagactgaaatgcataaaaaaagatatacatcaagaaatctcccaaaacagaaatatgtatctaaaaaaattgaattgaaaaacggatgaaagggaagattttctttggagggtttattattaccttatgcatggaatcgatgttatccgggttacagtactcaagtgtatgaggatcttctttgttggaccaaatggcggatacggaggcatggcaaccttgtgtcacaacgctaccgagcggccacgtgtcaatcagatctcgacggagcaccacatactgaaccagtacgtcgaagctttgggttttatcgacgtcttctggggaagcgaggggagtggagtccgaagccgaagccgaagccgagagaggttgactcatcgagctagggttgagtcgactcagtgaacgattcaaggcccaagtaggtgggttggagttgtgctttatcaatagtgattgggagatactgcaagggcagcgaaacgctgctgctgaaactgaaaggcagaaggagacccatgttgtgctttgtatacccatttttttctaaataaaaaaaattccatttccatttccatttcccataatacccttataaacacttctcaccagtgttgccttaaaatctatccctactctaccatttacttcccctcatcgccaatcttcattgctagcaccatcgttcgtctctgctctgaatacttctcctttaatataataagagaagatcatggatttttctgacttataatttggttggttttaaggtagtttagggtcgaacacgagtgcgagaagtcggaggctcctgaagattcgggaagagaagaggaaacaagagcacgatcgactccataattatccttcttaggcaaagtcagtttctgtctctctcagcttcaatatatgatttatttattatttttggcgttgagactaaatgaaatggttagtgacccattatacttgttttgggatttacagagttttggaagatgcttgcaaagatgacaccgagctccgagctgttcttggtgatagcataggcaatcctgagcttatgaggaagaaggtatgtactaccattctataatatgagcaatggtgaaaagggcttcctctaagcgcctttatcattttggacaatggcacaggttgaagaaagagttcggacaaagggtagagacttcagcaaatcaaaaaccggttctgttcttgctttcaaagtcagctttagagagtaattttccttttttttcgcttcgattaacaaatcttttggaaatgtaaaggggtgccgtgtctaatgtatgtatcttttctgttggttgacagcttcaaccctattgattcatacatatggtttgaactatatggttcaccgactgatcgagatgttgatattattggtagtgtaagtagagaacatcaaccgtgtttcttttagctatttaggatgtgctcaataatgactcaaattaccatgaacatcttctacagtaaaaaagatatttgtttttatttcttgattttcatctcctgtttccttaggattcaataaagcttaaaacgtttttttttatctaattataaggataatatgcaggttattcaatcatggtatgtcctcggtcgcttaggttcattcaactcttctaatcttcaggttggccataaattattgtgctatgctcttttgcttcaaattctacgtagttgtctgtattggtggtgtagggtcgtgtgagtttaatcctaatagcttgtctgtcttatgtgtttttttagtgtatttttgtagcaacttttgtcacaatcccaagatagcctatgtttcaataatgttaatgtattgtattcagaaagcttgctttcttcggtatagatttttagattttgtttaagaggaataggctattcattttatatatgatgaactaactctaatagaccaccacacggacatttgaaagaatcctaactttaatacgccatcctccgcgcttggtcctggaaagtaatgagaggagtaatttattcatcttatatatgatatttttatttctacacataaacgatgtgagactaactttaatatctaacaaagtaactatattgtatgataaaacactaacgtaacagaatttaaaatgttacttcataaagtttttgctagaaagtagggtttttctcttagggcaggatgctctttgtgtataagtttgatacatagttttaggatatgttgaagttcggtcttttcatatattctgctgaaagccttactaatatgtatcgatggacagttggccaattcatccgtagagtatgatcctctttatgatgcagagaagggtttcaaagttatgccctcatcatttcatgacatcagtgacgttgaatttcaggacaactggggtcgtgtctggtaagacaattagatgtgtctcatttccaaattcagataccaatatctttttgttatcttaacattttccctaaatgttttacagggttgaccttggtacagcagataattttgccattgatgtacttctcaactgcttgacagtcttgagttcagagtaagtaaaataacatttccattttatcagtacttagatctttgctcatggatttaggacaaaaaactaaaagatctttgcttatgtattgtttatgaagttactgttttacacatgcaaaacacttgattcgtaattgtcctgtttttaattctgactgacagatatataggaattcaacaaatagtttttgggggtcgtagcatgggtgattgggaagaggggatgacaagccctgagtatggatataagtacttcaagatctaagctttattgtgttttggatgcgacttaaataacccatttctctgttctagctcacaatttccgaactggtgtataacatacaatttccgaatttgtgtatatcatacgtgcttcatgtatctatccttttgattttatgccagttttgatcctttatttttcttagtgttgataattttgaacttaataaagtagaagcagttttgaaagacaatgtgctaatattgtttctgcaactatacacaaaaatgtctccaagtttgctccattttcaaggatagttatattacttttatgataggcctccggttcacttactctaggagaagaaacaggaggttgggttgacacaccacaaacacaaagtggctgagatggcaatttctgcccaaatcattagctgtgtgaccttagggggtgtttgttttaagagcattactattgggcaccagtggtgcctggtacccttaagactaggggtgggcatccgatccaatccaaccttttttttctcatccgatccaatccaat

SEQ ID NO: 301786 - DNA, 1980 bp, Cannabis indica
agagtacacaaggatgtcgtcgataaacactatgacacaattatctaagaaacccttgaatactctattcatgaaactcataaaggctactggagcatatgtcaatccggatgacattattattgttatttatttaaaagggggggcagctatcttctaaagggaaggacacctaacctttgagatttaaaagaccaaaccgcctttgtgttattacttaaattattgaatagcttaggggtaaaatggtctaataccataactctgcctaaactgaaacccaaacttaacatactataactttctatataataagttcaatgtttatccatacattgaccatccgttatattttctattgtcgccgagcaaaatcataaaaattacatttatcatatttagattaaataattctcttaggaccctttggtacgcagggtttgactagattggattgaaaatgattcgactggattggacaagattggattatactgaaagtaatcctgtgtttggtttaagagtaaactggactattttatttatttccatttagaaaaaaaaaacttaaattaaaataaaaatatataataataaataaataaaaatgaataatttgttgcaaaaaaaaattaaattaattaaattacataatttaataatataaaataatatatccaatataatcaagtatatatcataaatatataaaatattttatcatattttttatttaataaatataattgaataatataaaatggtttatgttaaatactaatttaatcactaatttgatataaatattaatttttgaaaatatttatataatttttctagtaattcaagaacaatatataattttattgtcatattgtttctcttagaatcaatataactaactattgtttaattaataatattttaaattttgaaaacttatgtataataatttaaaatgatacattttcattaatttaaatgaacaagtttttgacaaaaaaaaattataaaataaatgtgtgataattctttcattttaattcttattaaatttaaaatatataaataaaatcaaaaataaaaaaaataaataaaatcaaaattaaaaaaaaaatgataaaaaaaactcgcctgcgagggattatttatcccaccgtgttggatgggataaataatcccagacagatgagattagctggattagttatctagacttctaacttgcccaaacattgaattggacaaattagccgatttaatctaatccagtgctgcgtaccaaacgggccattagagtttaataaaatttcccaaattgagaaattataactctaatgcccgtttctaataataggacctacaacatagtaaaatcttgcataattataaaaaatcattaattaatgctaattgcctttattaatccatattctaacatgcaatcattacatattctgttgaaagattatcattggaatccccttcctccaggtccccaaacattcttcaaaggcggtccaatactttttccatttttgagagaatttctcctgacaggctagcttttactgagtttcaaacaaatcccaagaaactcttgttacttcagagtcgtgctcatagtggtactcatctttgtaaaatctatcattgacataaatgtctttgccatattcttcctcttcatagttctcagcattcttgtcacggccaacatggtcatgttggttgtctaggccttcctcttgatcgttcatgtttgatgtgcctccgtctctcacgtcgcttggttaggcgtgctccgatgatagggcgttcacttcctccataaccgtctcaaggccaccttcaagagcctttttgtgagttgtttttgtgtgaataccttgtggtaacaatggtttttatctttcttcagctctcaatgaaagcactacaatatttacaaagatttttggaaactaaaatatttaagag

SEQ ID NO: 301787 - DNA, 1085 bp, Cannabis indica
ttggaaactaaaatatttaagagttatggagtaaaagattgctaagatgaagagaggaagatttttatgtgatttaggtgttaaagaaccttatttcacgagtcagtctattagcctaaaatggtagtattgatgaatttatagtattttgtaagaaacgttaactcttaacctttactttctctttgaaggagaagaagactatgggcaattcttctagagttttagctataactttcttggtcctactccttcgcatggcaataaaggggtatatatatgctgagtggcagatatggatagatccatgacccgcctaagatttctacttaaatctttgggtaaactacacgtaatgtagagctgattggttgaacctgtgggtagcattatgcccgtgcttgtagcagtcgtataatggaaccactttgtactatttagaccatgtcacgcaaaggtttaacctttaaaagcaaaagacaagtgtcactcaaagtttgctcctttatgggtagaagtgtgtattcttcatctggtaaagaaagggtggtgatgtgcgcactaccatgatcgaatgtagggtatgagatttgattctgtcaagaaaactataactatcatttggtgacctagcatatggaaaaagtcgatatctgtgacacccaatgaaggtcaacatctactttggctcctttagatctacatctagaagttaaccaaaagagcctctctgctagaccctttcgaatccaggagagacatttctcatccaactcttgggaagcacatgttgataaaagtagcctcccacgtgtcttcttattggaaattattttaccatgatctagatttggtaacatgtacgttgactacaacctataatcgaacaccctaaataagaatattctgatataatgaaataaacacatataaagtttagaagaccttacatttatggaagcagaatgtctccttccgttcagatctctagcccttaattccttttatagcagagctttatcagttctaaacctggatctctctccttaagttggttaaccaccgtcttcacactatgattgagt

SEQ ID NO: 301788 - DNA, 1336 bp, Cannabis indica
gttattatttgtttagaaaattttttttaaccaaatgtaagcataaaaaattaaatttcccaatacaaatccatacatatcataaatataagtgatcattcaccttagaattttttttaatttttcaaataataaaagaatcctaaaaaatgtcatatactagaattatttcattttcaattctaaaatataatatctcctacaaatctacaaatagcataatcactcacaaagaaagaaagcacgaaggtaattattaagtgctcattaaaattacagattcagttgtaattccaagctcactttaattttctctaagtttatttcaattatttaatgttatacaaaagaattgaatgagtcgaactaaaattaataaattgttatgtaataaaattagtataagtacttgtgttgtggaatatcatgggaatggaatatcatgtatatatataaaataatattaacaaagtgatccttttaatttacatggggatttttaaaaaaaagatatatatattttaaaaaatactacaaaaaaaccgttacttttagtgataattttagtcacaacataaattttttgtgactttaagtcacaataaaaatttacttgtatctaaaatataatatctttaaatacaagttatcactaatttaattttgattacaataagtattatgattaaaaataaatttagtggcaacaaattataatttttgtgattaatactttaagccagaaaaattttataattagtcacaaatttgtgattaaaagtaagatattttttataatgaaagcatatatattcttacatatgcatgaataaatttcgttacaatacgtaccatcatcaccatatcaaataataatatggaaagtttgggattggaaattaattaataataataataataatagataattaacaaaaatattatatatatctaagagtatttatatattatttatatatttattaatcttggtcatcactccaattctgaattgcttgtaaaactgcttgtttcaccatttgagcatcaatgctatcgtcactctacaaaatcaagataaaatatataaacaagaaatcaacaaattaaaccacataattaattaacaacataaatatacgtacattattatatataatcaagatatattaataaatatatgtacattattatataatcagggctgacccgtctcaaatatttcagaagttctgttctaatattaaaaagtaggcccaacaaaaaaaaattataatttgtaaataacatttttaatattattatattataaaaatatattttacataattaaaca

SEQ ID NO: 301789 - DNA, 2035 bp, Cannabis indica
tctgtctgtgtatgtatataatataatctgttagttgttcttggccaaaatcttgtttgggaaaatgggtttgcttagtgaaggcctgactcaggttgtgatacctctttctgccttagttggaattgggtttgctctgcttcagtggtttttggtgtcaaaggtcaaagtctctactgcctttggtaatgaacataatggctataaagataggcttatggaagaagatcaagaaaagggtattgataatcatgaggtttccattaagtgtgctgaaattcagaatgctatttctgttggtacacactctctctctctctctctctctatatatatatatcagtttggcttcatattttgtttgatgactatagttttatgtatgtatataacttttgttcactaagtgtttgtgctaattttgacctcttcgctttaatttttgtgttgtttcctttgcaatgaacatatatagatttggtattaatctattttctgttgtgtttatgctctcatctggtcaaattttgttttacaattataaataattattaattttgttttaatacagtatctgaaatattactcttcagtaaaagtccttgtaaccaccatcttccatgtgtgaattttggggcttcaaatcccatttggttccagatagttcagactaaatccaagattttaatggtacccattaacatggtttatgtaaaatgattacacagaatgatcaatatgggaacactttttttctagtttgtttgttatttcattctaatatagtatctagttgcattagaacttgtttgattacatacaagatgttactgagaatcaaatgaaatgaacatgtacacaactcttattagttcaatatgatggtttttgttttcaggtgctacttctttccttttcactcagtatagatatctcggtgtattcatgggagtctttggtcttattatcttcctctttcttggttctgttaagggattcagtaccaaaaccgaaccttgcacctacaacacaggaaacacatgtaaaccagcgttggccaatgccttctttaccactgtcgcctttttacttggtgcgcttacatcagtcctttcgggtttccttggtatgaaaatagcaacttatgcaaatgctagaacaactcttgaagccaggaaaggtgttgggaaggccttcactacagctttcaggtctggtgctgtgatgggatttcttcttgctgcaaatgggcttttggtgctttttgtctcaatcaatttgtttaagttgtattatggagatgattgggagggactatatgagtccattactggttatggacttggaggctcttcaatggcactctttggaagagttggtggtggcatatatacaaaagcagctgatgttggagctgaccttgttggaaaagttgaaagaaacatccctgaagatgatccccgaaacccagctgtaattttctttcatgacatttttttatagcactttgaggctatttcataacactattgtttgtgatatcttttgtttcaggttattgcagacaatgtgggtgataatgttggagacatagcaggaatgggatctgatctgtttggatcatacgccgagtcatcttgtgctgcactatttgttgcatcaatatcatcctttggaatcaaccatgactatgtagccatgtcttaccctcttatcataagctcaatggggattgttgtttgtttgataacaacacttttcgcaacagacctgctcgaaatcaagagcgtgagcgagattgaaccttccttgaaacgacagcttcttatctctactattctgatgactgctgggattgctgctgttaccttcattgctttgccatcagaattcactctctttaattttggaaccactaaagctgtcaagaactggtaaggaaatttcccttcacccattggtttatgtaggaaatttagctctgatacgtacgaattaacctctgtaattccaagttcaagatcacacttaaaca

SEQ ID NO: 301790 - DNA, 2931 bp, Cannabis indica
aaaaaataaagagaaaaaaatgattgaacgagctcgttggttacatggtcatgctatcatcgttacaactaacacaaaactatattattaattaaaataatgatgagagaaaaatggtggcttcattgtaatgaacgacacctttaaatagtaaaatgtatcaaattaaaacccttactatatattaatcctactttgtggtattgaagtggtcaacttctacggtagagggtagtctaattcgatggaataagttccatgccactatccgactacatcattcctccaaatcccatgcttattatatttttggtgtcgatgaagtcatttattgcatttatagtaccgaatgcattgatacgtatttcatcacgctcctggccaaaatatgagtatttattaagtaatattctaatctcattacatcacattaaacgtttctatacatatgagcatatgagttgagcacctttcaaaactttttttatatataaaatatcacacacaactcacaaaacaaaagtgagtaactaatgtggtatgaatttgtattaattattgttatgatttttagataggtgacatgtacaattttaaagcccagtatcagctgagagaggccaaaacctcgacacaataattaagttgaatcaaagctccagtccaaaaatgagctacaatctgctaagaccgtcaatgtcagattgtcatgattcacaaggagatgtttgggtcaaaaacaaagagtctctcaagacgcatctagagccttcgaggaagtaatccgcaagcgagtaaccgaagagtcacactaatggattccgaaccttaccaactcggaacccagcagacacgggccccactatgttggagtttgtcccctgctttagcccagcggactgcgtgctctactaaaagaaggtcacatttttgtccaacaccgtattctctgacattctcggtatagacacaacatcacatgacacctggaaccttcaaatggtccttgcttgtactgacaatcttcacctttaattgggcctcactcaattggcccaaaagtcaataaataatggattttaccctatcagagggtctagttgatacccttaaatcctaccgagtccgggtatggccatactcggttcatccctattggttactgatattctttggaaaccaataatttaaatatatgagccaaagaaatataattaaaaggaaaataaaataagaacactcaaggattttacgtggttggggcattagtcttagtccacaaatcaatattattatcatagtataggaaagcctaagggactacaataaagtatgagcactctatctttgcatgagaaaatgggccaccaattttcaaccctttgcatatagggtttgttgaatatttatagtgtttagaggtcatattagttaccattttctctctaatggggagtttacaaataatacattgattttgggcttatttggtgaagcctgactcatgaggcactggcgtggagaccacatcacaatgctagatgtcaaaacagtgtcctatcttcgtggataattaatgacataataattacttgatttctaattactctatttccttatttagtaagatattatcctttgttcgagattttggggagacaatccctgatcttatgtgatttagtagaaaataggaatctatactggactttcatgtacacactgagagcttcttccggttatgtggttgtatgccttccagatattaaccatgctggatggaaccacgcttggacgagttatttgttatttacctagaaggaggtttggtttatgggtttggccaaatgatgtcaattggtcctaaagtatttgaactgtatttattactttgactccacgagtcccttgctagaaacacagataacatttttcctcaagcctctaaaacgttgtgagttgcgaaggcttacttcaatctgcatggatggacatgtggaggctaaaggtgaaatctttacaattttaaataatttttgtgtatggaatacaactttccattttttgagttaaagcgatacgtggcatcacttcattggtttgtggagcaaatgttttccaaggaggtacttggagcaaaatcattaatctggcagctatttacttaggtgtgaatctctaggggaatataatcatgctgatttcctcaattccaaatatggcatttaatgcttgactggtgtggcattctagatcattagatatgtattgtttttccttggataaagatctaaacccttgatctggatatcacgtggattgcttctttaacgtataagtatctcaaaagaccaccatttaccacttctattaaaatttccaaaattttcaagttaaaccagagttttagagaacaaaaccaagtgaagatttcttgagtgaatgaatgaactctttgacgaattcatccgactcatttttcaaattagaacgagataataccaagacactccacctcttgcgatcacttgtgtatccctgaggcagctgctaacactagatttaaattctaaaaccaattctttgattgaccacgcctatgctattcaagaaaggcttgatcattttgattgtccatctttgtcggttagtttgacatcgtcattcagcattagtgtttgctctctgaggtcaaacttctttgcaagtccagaatcttcatccagttcttcaacaattaatttttctctctctaacttcttgagttttgatcaatatttgaaattagtatcttattttgaatctgtatgtgctttatttgtcatttgatgagtagtaattaggtttgtgactaggttctggtagaggtagcatattcttggtactctattaaataggttttgcatctagtgaatgttggaaattatttta

SEQ ID NO: 301791 - DNA, 1460 bp, Cannabis indica
tttatgatatatagcacttaaaaatagtcatatagttataaaaataatagtataacactagaaaccaaaccttaaaattctttggactatatatatatactagtctttgtttttatttagtttttacattcagtatatattgttttgacttttaaagggtttacttcatttacttaatttatatggagcaaaatcaataagattgttccatgaagaaaaggaagatgccctataatattctagtaataacttatttaagcctttacattactcattgctaagtgtatgttgaaaaagaggaccattttgttcgcattatatagccacaaaaaaaactttggctttcttaattataataaatgagttctgatattggttgccttttcattaatgaaaagttggttactacttactatatcaccatcaccaccaattcaatcttacattaaagtaaaactaagtaaaaacagaatatcaatagacgagggtccatttttttgacccattgaagctaaaaaagaaaaacataaacaacaagaattgaatatctccatcaacctccattaaggttttataaaaaaaaagcagcttgaaatagctacgagttgaatacttggtatagaattcacacacatgtggttttggttttagagtgttggacccaacccaaaaaagaaaaaagctgataagagatccaaacgtggccaaattataagaagccaacaaggactataatttgattataggtgtcttgagctaaagattaaaaatgactaaaaagcaaaaaaaagtggggtcacactcattttctatacacaagtttctcaatgtttgtatacttgtaaaaataaggctcaccgacagttctaacaaaagacactgatttttgttaattttaataataataaaaatatactaagaacttaagaagaagaaaacaccaaccaagtagtattagcattaaacataagaataatattattttagtcaaagtgcatatataatctaaggttaaggtattatatgagattaagatgtattaccaaatttccaacgagcctgaaccagacccaattcagagttgtgaacaagaaaaggaatggttcgccataaaagtctggttcgggctgaaaatctgcatcgaaaatggctacgtagtcgcagtctttgacatagcttcgtttcatgccttcttttaaagcaccagctttgtaaccatttctattgtctcttatttcgtacttaatatttatacctttgctagcccatctttggcattctaactcaaccaaatcctgaatttcccattaaccataattacataaaaaaaattagatttttaatcaaatatgacaaatgtttttttttctgggtaccttgattgttgggtctgttgagtcatctagtacttgtacgatgattctatcagatggccatgaaagcccacatgcagctccaat

SEQ ID NO: 301792 - DNA, 5418 bp, Cannabis indica
gattctaattacagtttaataaatattatactgataaaataaatctttattagatagagtaaaatcaatcattattaaataagagatagagttaaataaaaccatgttgatgaaactttccatactatgtgcggtttccattttgaaccgaaaagaaaaaaaatcttattctttttcatgtataatttcccacaaagtaaagaaaaagtgggattttacatctacttcatccttaaaaaaataaaaataaataaataaataaataatgaatatttatgcataaatggaataaatgttttgaagttgtaatctttaagtaatgaattcacgagatattaataagagaaatcacaatcaaagtcataaaatgttgcttaaaatttaattattttggagaaaaaaaaaataaaaaagtggactttatagataataaaccataagcataattaaacaaagatgacgaccaaacgagaaaagtattttttaaaaaagttctgatttttttttcttttttaatatataatttgagccaaaaaaaaagaaaagaagaaatatatatatttattttgactagaaaataaaagtcaataagagtaagaattctattttttttttattgaaaggtgtaaaaaacctaagaacaaaaacagataggtgaataaagtaagaacgagagagaaagaaaatataggaagcaagggtggagaacgttgtttactatttttctgaacaaagaaaatacataagacgtgtcatttaccattgaaaacgcgcaaaccttcgtcttcttcctttcgtcttctttctttctttccttcttttctttcgttttccctcctttcctggccgacctgtttcgtcgtcttcttcttattaactcggccatgaaatctattcaaaatccaccttcttaaaccatccccaaagcttaaaagactaagctttatacatttgttttattcttttcgatactgggcataccttatattttaagattcttgcgtttaaatggatcctagaacgagattggctttgttgggtttattatcgtttttggctttgtttttgagtgttaatggtaactttgtgttctctgtgcacaataagtttaagggcaaagagcgttctatgagtgcattgaaagaccatgatgtccgccgccatcgtagaattctttcggctgtggatctggaattgggtggcaatggtctcccctctgaaaccgggttggttttcttcctactttctatttttaattaaaaaatttagtcttggttataatttctagtcatagtttttatgataaatgcaattgggttagaatcctgtctatttggctgttgctatcattataatttgcattatgatgttagatatttgtttgtatgtgcttggttgacttggttatataagatccaaatggtttcagttgtgtacgtaattttaggattatggtgtccatttcatgtagattacaggagaaactttccttttttgtgttttggatttttttgaagttgcaagttggagttcataataggaacgatatttctgctgagaaatagaaagtaaaaacataatgtacttgtttgagtcaacagattggatccattcactagctaacgattgtattttacatttcttcctcctgcttgggattttcggctttttagattggttgttaaaggtattaattaatggaaattttttaatttatgcctttaagtttaaattaattggtatttgattgagctccaccccccacccaccctttttgtttaatagttattcatatatgatagcatccgatccacttctgttcgattttattagagttttaaatttcatttatcggaaagaatagcttaaacaaattgcattttcccatttatcttcttgaacatagatagggaaagttgaagcgcatacagaattgtgaatcttatgtttttcttcttacccttgactagtgaaaactcaattatgtattggctgctacggtgtattacccttttttagagtctaatgcatagcagcgtataacatgggaaacaaataaacaagctaacttgataatgggatttcgttttagttggcttttggctggtgctaactttgttggttgattaggctatactttgctagaattgggatcgggtctccttcaaacgattattttgtgcaagttgatactggaagtgacattctatgggtgaattgcatcggctgtgaaaagtgtccgaagaaaagcaatcttggtgtaagtctccttatatttatattgattctcttagaccatacttgataatttgtctcaaaaagttggttgtagtttcggatcttacaaagttttttttgtaaaaacccgaggcttaccttgtttggccatcgtttttgatggttcataaaaactaagtttattatttgaatcttatacaacagatagatctcacattgtatgatccaaagggctcctcaacttctaaactggttaattgtgatcaagatttttgcactgctacatatgatggccaacttcctggttgcaagccaaatttgctatgccaatacaatgttgtttacggagatggaagctcaactgctggctactttgtgaaggatacattacactttaataaagtgactggaaaccgtcaaacagcaacaacaaatggcagtgtaatatttgggtgagttttcctctatagctttgctcattactgtgcttttgtttaatatgttatataaaaacctttggtggagtagtgtaatatttgggtgagttttcctctatagctttgctcattactgtgcttttgtttaatatgttatataaaaacctttggtggagtaggtgtggagctaaacaatccggagagctaggcacatcgtctgaagctcttgacggaatacttggttttggacaggcgaattcatcaatgctctcacagcttgcttcatctggaaaggtgaaaaaatcatttgcacactgcttagatactgcaaatggtggtggaatctttgccattggggaagtggtgcagccaaaagtaaagacaactccattggtaccaaatcagtaagtaatatcttcgaagactttttgctgtattgtttgtgctcttttttatattccttgcatcaatacttgtttgacttgaagaacctggcatccaccaatatcatgcaagaaaggatgctggtgactgcatatgattggattggaatagattatgttatttatgagttttgtgaaatgttgagacatgaaattttgacaagtaaagttttatgcttcttatgtttgtgtaaggagtttttgttttgtataatcaagttcggtatatgctttttgatgttgtcataattatacttccattaactatcttagggcgcattacaatgttgttatgaaggcaattgaggtgggtgatgatgttctccaacttcccacagatatatttgatgctggagatggaaaaggaactataattgatagtggtacaacattggcttatcttccagagctggtttatgagggagtgatgaataaggtacggtactttgatgtttttaaactccttgtcttaatcttattattactttttatatgcttacttacgcgttatttgtttgtttttttttctttttctcttttctaaataaatgctagatcatgtctcggcaacctgatttgaaattacatactgttgaagatcagttttcttgtttccagtttacttcgaagtaaggctttaagaactattctcttgcagtatctgtcattgggaaattatattatactcttaattcacctttatcattcagtttgtttgctgccaattatgaagttaaaggcttgtgttattataatggttttctcagtgttgtgatgtatatcatttttgagctaagaaggcttttaaaatccacactatttgatgttttgctctgttcttgcagtgtcgatgatggatttccaactgtaaccttcaactttgacaagtctcttactctgattgtttatcctcatgattatctattccagattcgtgtaagtaaagttaatgttagaaatctatagcattttagtataactttacttgattaaggtctgggtttgatcaagaagtcatacatggctactttacatgttatttctttatttctcgaatagaccattttcgtatacatctaaatcttcctaaaggggctaatttacatttttcacatgacatatctaattatttataggaggatgtttggtgcattggttggcagaacagtgggctgcaatccaaggatggaaaggaaatgactcttttaggaggtaaatatcgtctcaaacgtattgcaaacaaacaggagccttatacgaaagccgaaacattatatagcatattaaaaaatgaaatacgttttcttgagctcaacctatggatagcctggttgatgtgtgatgataattcagtcagtttaacttattgtttttcacaaatgcagatatggtactttcaaataaactggttttgtatgatcttgagaatcaagctattgggtggactgaatataattgtgagtcttaaattgttccatgagttcatatctctcttatttcagattgtttatggcttttcttaatctctttttcttattattactattttgatataataggctctacaagcattaaagtaaaagatgaaagtacaggagaagtctacactgttggagcacacaatatttcatctgcttccagccagatagtgggaaaattattgacgttcttattgataatgattgccatgctgcaaatttttacatgttagaaaaacatttgatttagtggcaaaagacatccacaatttttgctgtaccataatttattcaatagaaatttgtttctgatataattctaaaagttactattctttccatgctacttggtttgatgggtgattgtttttttcttcttgttttaggtttaggttgttgtttttttttttttgtacaacatatttgttaagtcctgtattttcatttcttgaaataatcaaggcttttatctgttcattcattccaataatatattagcattatattaacttcattttggctatactttttttttttggcatatcatttattttggactatacttgacttgcatattgcatatagttttctcatataattaaggccttgtttgaatttttacattagtcccattaaaaagaatgatacatttggagaaattatagaaaaaatattgatttttttattacgttaacaataaaattatacatatatattttaaaaaacaaaaataaaatttaattattattatttttttctctggataataatttctgtaaattccttttttttttttttttttttttgttattttgaactaat

SEQ ID NO: 301793 - DNA, 3035 bp, Cannabis indica
aattgatttgatatgtgtattattgcagaaaattagagagattagtggaggaggagtggactttagctttgaatgtgctggaaacttggatgttctccgggaggcttacttgtctactcatgaggtacctataattcattattattactctaattattatttcatctttttttcgagaaagaaatctgattcgaatttgaaactttttttttacgagaagatgttctaagatgttatcttaggatgcacataatacatatctaaaatataacatattgttatttgtgtaattcaataacgttgtaacatgtgtataaatagggatggggaatgactgtggttttggggattcatccaagtccaagaatgctaccaattcatccaatggaactatttgatggtagaggaatatgtgcttctatctttggaggcttcaaagccaagacccaactccctatttttgcccaacaatgcatccatggggttagtactttgtactcactcactctatatacattttatattgtcaatattaattaaatatttacaaagatgaaaataataatttggtggttgattttggttttgtttattattattattaattaggaggtgaatttggatgaatttataacacacgaacttcctttcgagaagataaacgaagcatttcagctactcattcaaggcaaatctctcagatgtcttttgcatttctgatcacattttttctctattcaaatcaaccttatatttatatatttataattcatgtcatgtgtatataattaggagctaaagtctccattaatatatgtataaatatctaattaaataatcatcctaagaggtggagtttaaaatttgtgtaattatgcatattggtgtataaaaatcactgaaaattattgttaaatacactgctatttcactctcctaattgacctataatatattttagagaaaactacttgtgaagttcaagtatgtacaattgtataattaataacactaaccaaaactgagacctagtcataactcataagtactaagcacaaagcacaatattctcttattattgtgtgaatttatttactacttaatactcattattggcaggagacaccatatgataaccactgcaaatttgtaatcttgcagtgttaaattttaaaattaaaatatgttagccccaatattattctcaagatattgcatcgaataatgttagacaccataaaacgcccccgttcgtttcaacggtggagtagcggtgaagtatatgaaaggcaagaaaagagaaagaaaccccatttttgttactttgagtaaccagagaaaagagagcagaacataaatctttgggggtaaaatcccaaaataattcgggtacaggtaggtaagtaaatcttccgaaagcctcgatgttccgttccaactctataatctaaaaataaacataataagccctattaataatagtagtaataataatatgaaaaggtccccagaggcagggaaaagagaagagacacaacattgtgtgttatcatcagactgaccaccacagacatcgaaaacatcctttctttacatgggtgtcatatgctaacattacttcatttcgaaccataaccaaaaaaatatatatgtctggactctggacagtggttgtgtgctcatctaaagatgatgatgatgatgatagtgatatagctcaatgcatggggagacgaggagctcggggtcgaacaggtgttttcgatgggcttaccctgattaattacaataccaaagcttagtttgattagaacattggtcaaaaagttcttttaacaaaaatgagattagattaaagacagtcccaccttataggcaacgaccccaaaaccacaccgctacaattgagagcagcaattgcactttcagcctgcaaatacaccattaaaactcccgtcatcgtaatgaaatgaaatgaaataacatgtattgaatacgatttggtcatgtatgattaaaaaagtagtagcagcgggaccaagcaaggcactaaaaatcaaaggtagggtcatggtttttcttttcaaggaaaaaagaaaagttgtgtttctacatgcagctttctccaaaggaattcatacaaagactttggactatataatctctgaaagtgttcaacacttcgacctgacagaaactcaggtcttcctcgagcagcccgatataggaaaacaagtctagtctagtctattctaaccgagccttttaatcccaaaagcaaagagacggacccaaacgttttttttcctctcatatcgtgtatcgaatccaataaacaagttataattatgcctaacatctctgctttaacaattgagctaaacaagaaagaagaaaataaaaaataaaagaatagtagaaacaccatgcaggtttaaaattttaaacttgcccattatgcactatatccaaccagtaagagcttgaaaaaaatgtaaagcaacaatcgaaatgccagcagcataaataggaagtaaagaatgcaacattttttaccatggacataaagtgttgcagatggagaacatgtatgaaataaatgaacaacaaaactagcataattataaattaaataccattattgtttctttttaaccagtacatgtagggaaaggttaataatgcaggacacattttacccactgaaagaatagcttatatggattgaatttgagcaaagtaaaacagtttattagacaaaatgaaaacaaggaaaaaaatacaatcgtatatagctagagacaatcgacagacaagacaacataacagtccaactaaaggatacacctgtaacctgttgctcttctcagtgcattgaatgaaaaccatttaaaagcactagagaaagactatgagatatactgcaaaaaccactgaagacaccaacaaccacagtatagatacatactatgacatatgctctaaaaaaactaacttaacagatatggtactaaattgtaatgtttttttttttt

SEQ ID NO: 301794 - DNA, 4426 bp, Cannabis indica
gcacgtgacaattaatctagtataagtaatatgtttgcattaatgagcgataaaaaaaaaataataataacgatgtgcaaacataaatttgacagacatttatatgacaaaaaatttaaattaattatttttatttaagataggtctcacctattaaaaaatattttgtcacaaacgtgtgtcaaatttgtgtatgtgtgcacatatcattactcacaataaaaatatgttatttattatggaacaaatttgactaatttaatatttttttggctacatttggcccacaataaattctattttttatttactatagtaccacttattattagagcatctctaatgatgtgttaaagtactttacaaaaaaattaatccaatagtgtatcaaaatgtgaaagatgttagttggttctacaagtggttaagttagttgacattgtaacggtcaactaacaatttgttactagtttttctgtttcgcttgttatttttgctttggtcttgtgtatataaacatctcttttggcaattaataaaattgagctattcataattttatttctccaattctggttttcttctttcctctttctctctctactttgtgttctattacatagtatcaatcgctcttgactaacatcttcaatggagtctacgtctaccaatcctgcaccagctccaatagctccaacgactttcccgatcctcactcaggccaccgatgctcaaacaaatcagctgaattccacctagaatctattttcacactctctttcttccacctgaacaatcaagcttgatcgtactaatttttagtcttggaaatctaaggttctccctactgttatagggcaagatcttgatgaaatcttgctcacatggattccccctccaaccaccttgatcacgggagcaccaaattatgcttacagtcaatggaatcgtcaagatcagttgcttctttcttggctacgatcctccatgatcaaaggtgttcttgcttccgtcgccaccttcacatcctcatactctatttggcgtgcactggaacagaggttttccagtcagtctaaggttaggctccttcagctcaaaagtcaattatccactctcaaaaaaggaggcctatccatgtctgactatgtcgataagatgcagtcgatcacagactccttggctgttgctaaatctccgatccacgatcaagatgtcatactttaattgttaaatggtcttggaccagaatttgactctattgtctcaggcatcatcgcgcgtagtgataatcttacccttaagtaagttcaggcgcttctcttgtctcatgagattcgccttgaacatcataacacagttacagacctcagtatgaagcttcaagccaatgtggcattctcaggattaagaaccaactcctacagaccaccccaggctctaagattggaagttgaggtggatttcgtgtggtcaatcagaacaataggcctcagtgccaattgtgccttcgatttgatcacatttcccatgtgtgctattattgatttgataagaattgggttcctcccaaattaggcacaaacagttagccatccaatacctcgaactcctccccccgtgctttcatcactgaacacgaatttgactatgatccacaggcttatgccacttcattcatccttgactttggtgatgactctggctggttcgtggacactggtgccataaatcacatcacctctggcactgaaaacttggatacaacagttgcttactctagctcagaaggtcttgcaataggagacggtaagaaattactcatttcttatattggctcaagcaccttaccttatgtcaattcattacctcttgaattgaacccagtgcttcatgtaccttcaattactaaaaacttagtgtatctcaactaactcgtgacaatcatgtatttcttgaatttcataaaacatgttgttttgtcaaggacaaacaaactgggaaggtgctgctcaagggaatacttaaagaaggactttatgtgcttgaagacagtgtcaaagatccagtggtgaacaattcgaaacagccaatggcttatgtgtgtaaccccactgatatggtttgtactagtcatttgacaatagctatgtaacaaatgacaatacttgtaatccaattcaaatgaataaaactacagcttctgaagtttccaatctttgtccacttgtttaccactctagcaaaactactaatgtaaatatttggcaccaaaagcttggacacccatccaaaccagtcttaagcaaggtctcacaacatgttcatcacactggttctttggaccagttagactttgcaaggcctgccaaatgggcaaaagccataaattaccatttcgacctcaagagcttctcaaccactagaactaatacacaaagatttatggggcccctcacacattaaatccactactatgttcattttttaaatgatcacagtagattcacttggatctgtactttagtacttaaatctcaagcttttgacatgttcatcaagttcaaaagcatggtagagaagcaatttaatcttcctataaagagagttcaggcagattggggagggaaatattgaccatttgcaaaatttctaaatgatcaagggattgtcttcacacatccatgtcccaaaagtagtgaaaaaaataggagggcaaaatgcaaacacagacacataactgaaatgggactctctattctaacacaatctggtttgaactttaaatattggtagcatgtctttcacacagttgctttcttgatcaataggctgccaactcatgtcttaaatcaataatctttatcagaatgtttacttggacaaacaccagactacaacattctaaagccatttgggtgtgtatgttaccctcatttaagaccttacaacaagcacaaattggagttcaggtcacaacaacgtatcttcttaggatattcatcagtgcacaagggctatttgtgtgaaaatccacaagggagattgttcattgcacgaaatgtgatcaatgatgaaaatacatttctagcaatctcaccatcaacaacacatcaggtacaacctgatcatgtatctaatctacctactgttgtgtttccaacttcttaaattcctaatgctagtccttcctcttgtagacaactctgactcctttgtcactgagaaaactgaacactcacccaaaaataaaactcttgtgacaatctctattcatgctccatccatttcttcaacaagctaaccttctccacttgtcacgaatcagaaccacacaccagaaaccactccacctcccataacccaaaacagcaaccttattactccacctgcaccacagtcctctccagttaccttacccaccaatgctccaacagctacatctcaaccacaccctcctacaccttctacgaatgaaccacatgtggctattataggaacaatgacacatagcatgcgcaccaggtcacaacatggcatttccaagccaaagtcttacatggcaacaatgcatccccttctagaaactatgctgccatctgaaccaaagaatcttaagaatgcttagaataattcacattggaacaatgcaatgaatacaaaaatgggagctcttcacaaagcaaagacatggacattagttccttatgatccatccatgaatgtcataggatgcaagtggattcatcatgtcaaaatgaacaaagatggttccattaacggatacaaatataggctggtagcaaagagatatctccaagaagcaagaattgattttaaggaaatttttacccctatagttaagcctacaacaatttgaattgtcttgtcactagctgtttcaaataattgggagctctctcaacttgatgtcacaaattctttcctcaatggacccttatctaaaactgtgtacatgagacaaccacctggttttgaagacaaagattgcccaacacatgtgtgtaaattacacaaagtaatctatggtcttaaacaagcatcacgtgcttggaatgatgagctgagacaaaccttagtctcatggggttttcaaggatcaagattagacagttcactattcattcatggttcaggacacaacttggtcatcttccttgtgtatgtcgataaaattcttataactggaccaaatgccaaactgatatccaggttaattgctgatctgaacaatcgcttctctctcaaaaatttaagacaagtttcttattttcttggggtagaaatatgtagagataatacaggaatgtacctatctcaaaccaagtacatcactgatttattgttgaaagttcacatggagagtgttaagtcttgtcctaatccattgttgggttttatgccc

SEQ ID NO: 301795 - DNA, 6906 bp, Cannabis indica
tttattgcaagttattatttaattaaattaaatttatttgaaatcacttagcctatggaccccggttagcgggattaatatactttagtcacgtcaagtggcattcctctaagtaggacatcaaaaacacttggttttgcaaatcgaatcacaattagtaagagcaaggaaatgatttttattggtagtttcccagccattacaacttctgcaccactttatccatctcatcacagatagttttggcaatctcaattgattggcctagccaagcacaatggggtatccagacaatctttcaccttagatacttcagccaactctacttcacaagaaaagaaaagtatcattgacatacatcagttgagaaatggtcgtgcaacggggattagcagaaaatccatggatgcccccattatcttccacccaaagaatgagtctagaaaggacctcactgccaatgataaataggttagaggagatcgaatctccctaaagaataccacgtgaggggcaaaattgtttaagcgagcagaccacccttaaggaggattgagaaactaatagaggagatacactttgagataatcttctaaaccaaatgcttgaagagcttttgtaaggaaatttcactcgagacgattatacactttagacaagtgaagcttaagtctcacaaattcattgcccctcctttctatttgagcaagtccattaattcatgggccaaaatgtcaattttagcaatctattgacctgagatgaaggcagattggaaaggagagatggtatcagggagagtcatgcggagcctatttgcaaggatcatagaaataacattgtaagcaaaattacataaggacatagggtgaaattcatcacactttgcagcaccaactcttttagggatgagcacaataaaggtgcgatttccccatttgaataaactcagtcatagtatctaccccattcaaacccatattattccagtgagcacaacagaaaaggccaggcatgcaattaggccccaatgccttcaattgacccatagacctaaccacacatatgatctcttcacttgacgagattctcatcgactcttcattcaccgaacttgagatagaaggagagatcaaatcagccagctcattatggatattaccctaggaagattgataaatatccttaaatttatctaagaaatatttacccacattggcgcatcctgatatccagtgtaccccgtcttatgaaataacaccaacaaagtttatctttcttccaataacagtagcaacatggaaaaacttagtattctgatctctatcccacaaccaggtttcacgagatttttggtgccaaatatcatcctgatgagccaaaacctcatccttttcaaggagaatattagcttctagctgggcaatttcgggagagtggggcgaagttgaatttcaagcaggaattatcaaggataatcaatttttccttgtaaataccaaaacaattttgctccaaatagccaactatttctctatattagaaagtctataaacaagctggaaacttttagcaccattaaccactagaagccaagcttttcgtaccacctccatgcatctcagatgtaaagaccgcctaagttgatatgttagattatcaaataattagggtttatttatgagatttaattattatttatgacttttgtatttgtggagacttatttatgtgaatttctcgttgtttttgtaattgtgttcgatagcggtggaacgcgctgttgggccattagagagtaacgttttgtatggtttaggatgttaatagcggggcatcattgttagacattggaagtatcagggaattgtatggaaatgaccgaattacacttggttatcactaaacttttgggttatgtataggggcaaaatagtcattttgctaaggtttctttttgtctttttgtgagtttattttgaggataacaatcaaattttaagttaattttattacattattagcttatatttaatttaaaaggaaaaacctaggaaataatacaattccctctcaacacacacacacacactctctctctctctctgtctctcgaagtctcgaagaaaccagtagggtttggatttctcagcttcttttaggagattctagcaggttttgaacatcctcaatcaaggtaaaatccctttagcttctccctctttgttttcttcaagctcaagttatgtttaaatgtttgaattttagttctaggttgctatgttgtggtttggtgcttgtgttggtgttctggagtttatttgggattgtttaagttaaattatgctagaattggtggttgtggtgatgtttgagcaaagtttgagtttaagaactcaaaccttgctctttaatggtgatttaggattctatgtaaattgttgggttctgttgcttgaaatgtgtctattgtggtatatacaggtgttcaggagattattagaaagtttggggtttatttgaagtgttagggacatttttagtggttcctgcattgaaccggtcgaccggtttaggggaacctgtagcaaccactcaagcggttggtccccaggaaaccccatcaaactagaatttcggttcgggaattggtctaccagttgggacaatttttgaacccttgttttacctgtttttgtgttgtttagggtatagccatgttattcagccatagggatatttctagttttgattttagattcccaaaaagtgtcttagcgtgtctctcatcgaaattttgaatattgtgattagggtcctgtaacacgtcgagctgctattctactcaggctgaccggcacacctaagcacgcaaatgaggtaagatagcataaagtatatatatgtgaatgaatgcacattatcatttgtttacactactaacactgacattgatgtagttttaagggtattagtacagtgttaccaacacgagtaccagggggtacggagtgcatgtggtacaacactcagtaactctcggaagtacaattatggccctaccaacacgagtacggagacagtactctagtgcatatgatgtagtggtcgtacttcctttgagaacgtttttaatcatttggtgagcttagcaattgagcacaagacaacttaaacataaagccagtatagcattgcttatatatatttatgcatatcttactgactcggttggctcatcagtttgctactttgtgtaggtaagggtaaagctaagttggaggagcagtgagatgggcttggcaaggattgtacatattgcggcagtgcagcctggagggtttcggtctttcagcattttgagctatattttgtagttgtcttgtagtttgtagaaaaatattatgtaactttatatatacaatacatgtattttcaacaagtggttttacactcgggataccaatttacgaggttatataaatataatataattagattattttcaaattagcaagttttaaaattcaggcattacatcagatctctagtctaggcatctaggaaacaaaagggcttatgaaaaactactctcgatcaaataacaaatccagcaccagaggggcaagatcaaaatctttgatggttagagctttgacacccattttcagatataacataatccatttggggtcaccaacaactctattgttgtgaaaattatgtacgcaagtatacgtagtcacacaagtaataaagtgataagtaagattgtctccacactatttgcaaacaaaatatgatgtaaaaccaactaattacaacttaaagtaagaggaaaaaatatgaaaatagttgagcaatgattcaaatttaaaatggcagtaattaaacttgctaaaattaatgctactaatgctagagaattacttgcaagaagtgtgatatggtaaaaaaatggcttgaatagctattcccctctagtcaggtttttctcccagttgttacagcatcggttcaacattactccagcattttttgcacagagataataaaaattcttctaggcttttgagaattttccaaaactcacaatttaagttctaccatctatattcacatattcctatatcaaaccagattgcaaaacactaattaagcatcaattcttatgttatgcaagataaatgaaatattcctattccacttacaaagaaaaacctacatctaggatttttcttgctccattcaagtttaactactagatctagcccttctggaacaagatctagcttagcaaattgttattcatggccaagaaataacaatcaaataaaatgaaaagctcacttgaatgaacaaaggaaaaaatactaaaataagctaaaaaattaatcatacccaacatagaagttcatagtcattcaagcctcaaaagtctagctcatattcaaacacaataacaacaattaaactaacataattatttcagtacacacaattacaataacatttaaactagattaattaaactaaggaaaaagagatactccctcaataattgggctctccaccaccggagtccctttctttgtcatcaccgggacaccaaggttcaaggatttcctccaggaaagctgggaatgcagctgttgctctatgctagttgtggtgaagagctcgcatcatccatgtatctcgctccctctcgtaggtccaatgagaatgcaggcgctcacacatttgcgactaccgctggagcatttgttgttgcaaggtctcttgcttggccaacctctcattcattgggtcactcaaagtggaggctgaaatagtggatgtggtggtacgtttcggggcacgagcaggcccaaaactaaccactccttttcttgggatagtttcctcttcagacatcatcggcacaccgacccatctacacatctatgtatttaggcatgggaagaacattgattttcttgcctttcacaatgtaatagagcatccatattctttcccgactcaccgtggagtcatgtgaagtaggtagcacagtggattgaacgaaattatgtggacattggatgtcgtgcttatgatcagtctgtttgaagcgaaacaccccatgttcatctatgtcccactccgcttctggctttgcaaactcgggcacaatatcatgcatcagctcatcagtgagcttgctactacctttggagaactcacaagtcacattttgaagtaggaagaaattattgatcgctttgtcagagaatttcaccttgaattctcgcactgtaatatctactggccattcattcgccagaaaatttgcattcaactccttgactacttgacaaaccgctgaagcaggatcttcacacaattccaacaattttctctttttttatattctctatcaaccatggaggcatgcttccaaagttatcgtctcccactatcattccccgctctatgtagtattccttgtagcgaaccgagtcacgatattttgcttcagctgcttctgaaataaattttctcgcttcccatgcatccttgcgtggaggtttatgagcacactgcctgattttaagcattttgtcctctgatttcagaaaaatttagcccatgattctttctcaacacagtcccaaatcacaccaatgcaactcatagattaagacacacccaatactaatccaccacaacaactattcagaactcagcagtcaaaaattaattatcaagtattcttttcacccaaataaattttaaacagtacttcaacaaactagaaaatggtctggcttggccaaaatttgtggagtctgattccttggctctccttaacttgctgctgagttatgaactttcctccgtgagtggcttcgggtggagctattgggctgagcttggtgcttgatatgaaaatggtgctgtacagtttctcgcagctggtgaggtagtgtaagatggcagaaatggggctgttgatggtggccaaaggttggaaacagacggtgatttgtggttgctagttattggtgtgcgaaggtggactgtggtgtttcgtggtgatggtgattcaggttagggactgatggcattgaagcttcgtgttgggttttaggagtggggtaaatggtgactctatgtgcaaaatggggtggattgatggtggttgatgtttcagactgtgatgaggaggatggtggttcgtggtgttgtgcgggtatggaagaagaaggtggttgatggcaacgatcggagatggttgggatggtggttcgactagggttgatttgctgagagtaatggttgatttggggttttttttaagtaaagaaaaaataaaatgcaaataaaataaaataaaaatagaacttataaaataaaaatgaaataaaatatgtatttatttataataatgtatattgatatatgctatatatatttatgtaagtactaataatatatatattgtttttcagacctctgcatcaatgagactgatcttcaaactccagtatttttattaaaatcccagtactcccagtagttacagctttactacaatattgctttagcaattcatttttttatccatcactgcttcaaaatgctgaagcgatgctgatgcaatacagtaacaagtgggacttacgactttagcacacaaatccgcttcacaccatattgcagcagcctagttttttttctgtcattccataccttgctcctgcaataaaaattatcacatcattgcaaaaattcattagtaactaaggaaattgaaatcatatatatgtaattatataggtatgtatatatttatatatatatttttttttctttttttttccttttttttttcaaggggtggcatactccaaacttgttaca

SEQ ID NO: 301796 - DNA, 1787 bp, Cannabis indica
ataggatcgagtaagtcaggcaaaagtttagttagagttttggtttcgaaattatcaattcaattgttggaaaatgataacggataatgttgagtgtggaactaaagtctcccattaattaagaatggacaatatttctattgataggaacgaacaatatcataccaaaatgaaaatacagtgttcgaggtcctaacatatagagttataaactcaaatctcattgtataactgaagagctatttaggagttaggaccatatccaatggttactgctgatagtttgatttaatattaagcactatatgattgagatatctggtttcattgttttactcatatacacgtacatggatgaacggagaactaaatgttattattttgtgttctcaataactaatcacatcacatgcttgcatgtgtatggtttgtgattattttcaattatttagagtacagtttcactattattggtttggggggtacgagtattgattacaaaggcgctttggccaaactgttatattatattttagtgattttttgttgagatcaaatatttatgaagtgtgagtacctacctacaagtccttcatgctttttcttttttaatcaggagtgcctatattagattccaaagtagccaagttgcactaagaacattttgaatgggaaagcttctcagattcctaggaaataaagataagaaaatcatctaatccagtcccatataaatgaagaatatgttgacttggtaaaaagcattaaacatatactagtagtatagtgcctcttcttcatcccaaaaaaccaagtatagctaattggaacccattacttccacgggtattatattctttcggcgtaacgatagccagaaaatatttgtatttaagaaaataaatacaattgaaaaaaatataatttcaccaatttcttgcttctcttctagcgtatagcatgggctaatgggccttagggtatgtatgtattttatggggataagttgaaaaatatctctttttttatctattaatcaaaaatacttttatattatatttttttaaaatatgcttacttttttgagtgagttgcccaatatactctcattctttacttaacatataatttgcattaacctaagatgtttaatgaggatatcatctataaagtgggtatatcttaaagaatatgaaaataaatgtaaaaattaaaacaaagtatagtgaatataccatataattttctctattttatgggggctgagctgagtttgagaatcagatacttttgcttaggtcaacaaatattttgttggtggaggctttaattcaacaaatgttttaggtggagattagagacctaagtcaaaacatcagctgaagtgttcaattagtgtgtaaaacgcgtacaaccaaaaccaaaattaggagattgtttggtaacttcttaaatttcattccaaaaagaagccacccactcacttcatattcatacttgcattgtaccatgtagttgtaaaattctagctgtatcatctatatatctatataatttccttactaatgaagatgacatggcaacttaaccatccaggattctaatttttctttttcctaacttttttgattttattttatttttgtactctaaaacattctatttacactatgaattaataatttaccattaatttcaaagatgaaaagtcacacattaatttaccaacttaatgacatgcattagtaaaaaaaattcattacgactaaaaatcactctttaattta

SEQ ID NO: 301797 - DNA, 1247 bp, Cannabis indica
ctaatttttttctttaaattcgttattttttattttatttattttaatttatgttagagacataaaacaacataatttattttatttattgttagttaatgtaaaaaaaaatattttttaataattatttaaataatttaatattgaaaaagcaatcaatctaaaaaatatcgatctaatatgcacttttgcaaatttgattggattaaaagtcttgtacggattagattgaattcaaaatataaaatatgtatttaattttaatcagatgcactataaataaaataatacatattgaattaaataaaaccatgtccaaaaaattaaaaagaaaaaaaatgttattggtgctctagtctctagacaatttgttttgcatattatcttaatataagagatctctaactaataaggcatgattaaaatattgtatatagttcaaaatttggcatcattacactctagaagttataatgggttacggcggctttgataaaagttttggtaattaagaatgtacaatataatatctttgtaaagaagagataaaacaaaaaaataaagaaatttttttagtagtataccatacaagatatataacaatacatgttacttatattacattagtatatataatcatataactcaattttaaaataattcttatgtaatcaataccattaataaagaaacattccttttctaattatatacatgaattgcaaagttttccttttagttttagtattaatattaagtgaagtgatattatttagtagctttcttctattttttctattttattattttttataattatatcaatttttgttattattttattatttaatcacttaattaatgataaatgaaattttcaccctccaaactaggttgcttgtagagatttttccccctaaattatattttgtaaaaaaaaagctctgaactatgaagaaaattacaaatttaccacttcatttgcatttcatttatttttgcaacaattttgtgatgtaagactaatttatgagtaatctactataattagagtgtccaagcaaaaataattacatagatgatgatactctagctataaaatttagaattgtgtatccgtatttttagagttaatttgaatgtttaaagctattatacttgatttcaattacagtagaacttctatccaagaatacacttatgaccaagtaaattatattctaattggaaagttataattaaataga

SEQ ID NO: 301798 - DNA, 5291 bp, Cannabis indica
ttattgatgttgaataaaatggattacattgaaatggagttttatttagggcataaaacccagcacgatctgacactagacaagtgtacggggggccaggccacctccagcacctgtagcatgcaacgagaaagtgacaacttatccctatggcaccactttgtagaccaggccagtagagcctataaataccccccatcctagatgtgagggggttgaaaaataatttggtgtaactcagatattgtattcaatatagagaggaacattcatacatctttttaccttcagccttatcttatctttatcacatatctgggtaaccttgcattttccaaccactaacttagttaacaagctctctccgtcaacaatttggcactgtctatgggaacgacaagctcaagccaagtcgctcctttaaacacaattaatacaaaatgaccagacgctctcatcgtcatttggatagggaaacaaaccttgatgaagaatgactagttgaaccaaagcaagacctatcaccatgcaccgttagaagggggaggcgaacattaacagggcacgaacagacaaaaaacacttacaaaaagtgccaaggagagtccctcgagcggtggaagatgtcacaacagtcataggaaggccttgtgaaggaggcaaaaccccaaggaggagagatagatacacccgtgaggtaaggcgagaacctcactctttgaattcggagcggaggcccctgaagaattattaatggaaaaacaccccaggcacttttatagaggaagacacaagaggaatacactttccacataacgacccgctggggcttacgatgcaaatggctaacacttgggtacaccaaacattagtcgatgatgtaagctcaatgaatatcctatattacaccgctttgaaggagatggggttgggccttgaggatctcaaatcttatacgtcaccaatatgcgggttcaccggagaaccaatccaactatagggagtgatagaactggcgctaacggtagggaggagacctagcattccacagtgatggccaccttattagtagtggattgtccgctagcttacaacattatgctaggaagaccatcgctcatccgattgtaagcgatcatctcaatgtaccacttgaccgtgaaatttccaacccctgggggtgttgccacattaaaagaggatcaggatgaagctagagaatgctataacatgtcgcttcggaccgccacgaagcctcaagaaccaacaatgatgatcacccatgggggggcccagccagagcgacgaggtcttgtcaaaactagacccccaagtttttgaggaagtgcgagtggagtcattagaagagttataagaaatagtaatcttagaaagcctgtcgaaggtcatcaaaattggaaaagggctcctcgaaacgttaaagagggagttgaaggattttctggaaagcaatctagacgtgttcgcttgggacatgaagttatggaaggaatagacccaacaataatgtgccaccatctcaacatagatccgaatgcgaagccggtaaggcagaagcggaggcccttgaattctgagaagtacaaagctctaaaggttgaagtcgactggcttgacaagattacattcatttgagaagcttattaacttgaatgggtatcgaaccccgtgttggttccaaaacctaatggaaaatggagagtgtgcatcgacttcacatattttaacaaggcttgcccaaaagatagcttcccgctgccgcggatagaccagctagtggatgcgatagtgggccatgaatttctctgctttatggatccatacttagggtataatcaaatatgcatgaaccctgccaatgaggaacacacctcattcattacggatcgaggcctatattgttcctaggtcatgccttttggactaatgaatgctgaggcgacgtatcagggacttgtcaacaagatgtttgtcaaccaaatttgttgcaacatggaggtatatgtcaacaacatgttagtaaagagcaagaaggccaatgttctaatacaggatctaggcaaaatgtttaccatctttcgcaaatatcgaatgaagttgaatccgttgaagtgcgtattctgtatgtcctctagaaaattcctgggattcatggtcaatgagagaggcatataagcaaaaattgaaaaaataaaggcattagtagacatggagtcacccaagaacaggaaggaggtgcagtgtctaaatgggagagttccagccctgaatagtttgatatgaaggtccaacgataaatatctcccattctttgataccctaaagggaaataaacattttgcttggggcgattgcgaaaaggcttttacaagcttgaacgaacatctaaaccagaaagggcaagaaggtgtagatatatctcgtagtttcttaacatgctttaagtaccgccctcgtaagagggtaagggaagcaacaacagcctctgtactttatcagtaagcatttcgtggatgccaaaacttgataccttgaaattgaaagttggcttacgctctaattatggcatcacgaaaattgaagccatactttcacgcacatgcaattgtggtgttgaccaaccaccctttgagacaagtactgcacaagcctaaaacctcaggatgcctgctcaaatggtcggtagagttaagtcaattcaacatatcttacacccaaaagtgtctatcaacgggcaagtgatagtagattttgcagtagaattcacctatcatctagatggggaagaccaagggcaagaggtcggtgaagagtcagaaagtgatgcaaaagaaaattccatttgggaattgcacgtggacggagcctggaatgatagtggaacaggggctggggttgtaatgacagcacctgggggaatccaaatgcattatgcaataaggtttaatttcttttaaggcctccaacaatgaggctgagtatgaagcgatgctagctagattaaggctcgccaaggaattgaaggtcacgtgactacaaatttttagcgactcccatctgatggttttctaagtgaggggagaataccaagctaaaggactgaagatagtggcttacttggccaaatttaggagttatctagaacaactgcaacatttcacgattgagaaaatcccaaaggaaagcaatgccaacgttgatgccctttcttagcttgcatcaacttgggaaattaatgttctagaatccatactagtggaattcttagcccaatcaactattgagtgtaacttggtgttgcaagtggaggatgaagcaccctcctggatgatgccatacattgagtacatccaagaggggaggttgcctgcggataaggaggctcaaagaatccaatataaagctgctagttatgtcttgatggatggagttctatacaagagaggatactccacgccactcctgcgctgcataaaagaaagtgaagcgcaacgagtgttgtcagatatacatgaagaagaatgcggtaaccacgaaggaggatatttaatgtcaaggaaagtatcaaaacaataatactggcctactttggagagggatgcgatggtgtttgtaaagaaatgcgataaatgccaaaggcatgctagctacagcaagcatccctcggccgaaatcacaagcatgactagcccgtggccttttaccatgtatggaatttccttgattaaggccttgccaacaggaagggtcagccccaagtacgcagtagtggcaatagactacaacaccaagtgggtagaggctgaggaactagttagcataatcgttaagcaactttatcaacaaattcctgatatgtagatttagagtgccttacaagatcatcactgacaatgggacccaatttgaaggagacttgttgagttcttactgtgtggagagtggcattgagaggggattctcaggggtagtataccctctggctaacgggcatgttgaagtagcaaacaagatactcaagaggaacctcaaaacaaagttggaaaaactcaagggctgatgggtagatgaactgtcaaatgtgtataggaccacgccccgctccaccacggctgagacgcccttctccttgtcatacgaatgcgaggctatgctcgacattgagattaagctcaactcgttttgtgtgaagaactgtaatgaggagtcaacgaaaaagccattgtaggaaatttggacctcttggaagaaagaagggacgcgacccaactcaggttggcagtgtatcaacaaagggtagtgtgatactataatttgagagtttgcatgcatgccttcaaggtcgaagacttggtactaagataggtccttcaaaatactagggatctaggagcaggagttttgggagaaaattgggaaggcccttatcaaatcgctaaagtcatcccgctcgtgacttacaagttggccagcatggatgacacggtggtactaagtgtgaatgttggaagcaatttattattattaatttataaagagcctttatataggcgtgtacatttacaagaaagaatactgatatacactacaataaatggaatactgatatatactacaaccaaggaaaatattgactaagttattaacaaactaataacaataaaagagagagaaaagaggaatatacaaaacaaatctaacgaatatagctggcagtattatccttctacacgcccccgcaagacggacaaccattcagcaagaccgatcttacaaatcatgaaagcatgttttggcaagtggtttcgtaagtgcatccgcaagtgtgccttttccaaaaatatgttgaactcaaagtgagccccgttgaacctcttctcgaacaaaatggaacgccaaagctaaatgtttcatacgtgaataaagcaccggatttgtacagtaatttgttgcccccaaattgtcacactatatgctaggaactggctgaatatcaacatccaactcttggagaagcgactttaaccaaagtatttcagatgtagcagatgctactgcacgaaattcagcttctgtcgatgaacgagccaagattttttgcttcttaaaactccatgatagagcattacgacctaagtaaacaatgtacccagtagtggacacatatgaatcacgatctccagcccaatccgcatcacaaaaagcatgaagttgaagtggagagttgcgatgtataactaagccataatgagaagtaccatttagatacc

SEQ ID NO: 301799 - DNA, 1366 bp, Cannabis indica
ataaaaacctaataatttttttttatttttttattttgggccctcagaaatagtgggccctaggcacggacctagcccgcctatgcctagggtcggccctgccggtccaagcggggcacgacaccacgtggttcccatagcatgccataaatggggctgacactaataattttgtgctcaccttctttttaatttcggagacaactaagccaacaaaatagaattgggcacagtattgtcgtgcccaaaaattttcgaaagaagaccgttcgtttaggcgagaactttctcgcatttccgcatgggcaggacatcccctatgctgacatggcgtgattgacacaacagggcacaacattgggcacgaccatgtcaagctaaagtatttaccccttttaaaaaaactagatccacaagatctctctctaccgtttaccattttcaagaaacaaaaaactctcttcaacccatttttttctctgccttctctctaatctctcttagccattactatcgacgactacttcttctcagcccctctaccagcgcaccagtttctccatagcatatcgataagtttcttcatttttagatatttttctttaatatttgtctcccacaatctctctcactcatcactctatgttttaggtttttcagttagcagcggagggcataggatacgatgggcaaggttggagaattcaaagctcgtatttgctgccgttcaactctgtggtgagcttgaatttttttttctatttatattaaagttaaatgaagtaatttccttaaatatttttcttataaggtttgatatcaatttgtttggtcaaagttttatgtaacatttattctagaagtttttttctaatccgaaaatatatttctctcctgtaataataaattgtaatgttattatgtttgtggaatgattatgatttttttgggtgataatatatggtaatattatttttaatgtctatagaaattaatttttgtaagttggtattgtataatatttgttcagaagagaaccatatttttttagagattttttataaataattttagggatttaagaaatatgtgtatcaattaatgagttgaaattttcgaacgcaatacaactttatatatttgaactgaaatattttgtattttgactttaaaataaagtattattgcttggtattttagattatgtattttgatttttattactttattttaggattgagctgttatttttttctaagatataaatgtgaatttgtacattattattgtgtgtaaatgtacatatatatatgtatataatgagtgatttatgaatataaatgtataaatatttgttggaaattat

SEQ ID NO: 301800 - DNA, 1540 bp, Cannabis indica
taaaaatggaaacatttttatcaaacatgtttttctgaaaatattttcaactttttaattaaaaaataacaaaccatttaaattattgttattaaatggccttagtgaatcaatgtttataattatattacatgtttcaggaaaggattgagccggattattaaaacaaatagtgaaacttcccttgatcatgtatcaaataggtcaaacaatgtatttgatttggcaaatttggtcttgaggattttaccatctaaagatggtgctgtgctgagaagactcctgatgactgctgtgagtatcattaatttataaaaatgttcccttcatttcgtaataatgccattttatttttcctttatggagcacattaagtttctggctgatgagttttgatacaagaagaaaatccaccaaaatcgagataagcacaaatatgcttgtacaccacattgtccttgtccttgtccttgtgcattgtgcctttatctttatacagctatgtttctgcatgggatttcttatcatatttacattaatcttccttgagtacacattgttacatgaggtgtcttaaatgaaaaagatgtaccacttccaatgagcagattctgtgatttcaatgagaagatcagatggagaattgatatactgaaacaatatggcttgttccttattctcaattagatttcattttcctgaactgactttttaaatgttctttttttcccaaaaaaaaataaaaaacagaacggagcttcattgattcaagctgtgatttccaaggaggcaaaagtcttccgacagcagtgttgcatggccattgcggacatattatacttgtggatttttaaagcattaggacaagacgtcacaacaactcactctggttctcgggtgatattagcgatcggtactaacaaaaaagtgctaagctcatcttccagattatcagaacgtgtatatgattatgaatctattttgagagatagacgactcaaagtgatcttctcacatattctaaagtctgctagaaaaaatccaatcttgatgctgaagttctactgggcttccttggtcatgtttgttactgcttcagctttagcttgtcatcgcattgtagtatccctatcggaagcctacttggggccattatcattttcctccaaacagtatgcaatgagcacgtgaatctgtagcggagctggtatgccggtccccctcttggaaggaacaagaaggttggttagtttgatagaaaatctttcctttttgagcagattattaaaacaatatcagttcaataagatgatgcataagctattgtcttaaactgagtcctagagcaatcctaatatttcagcaatggcggagtgtttgattttaaaggtgtgagagggtggcatgttattgttgttcatgtacataatgaactcccaacatgtatagtttaagcttctatgcagatacacaagttttcatgtttttaaggtatttgagggtgtcatagatttatatgtttttgagttttttttttttt

SEQ ID NO: 301801 - DNA, 4640 bp, Cannabis indica
tgaccactttcaggaattttttgctatttgaaaatttaaaaaattcttaagtggatgaccttttatgaaattttgagatttttttattttatacaatttttttgtattggcgattgcaatctttgtgatgctttgttaattaagaggtgaatgacctctttttggaataccattttttatggcctcgaaacacgatttattgtggctttttaatgtcaatgcacttttaaattttgaggtaatattacaaatttttgtgaggttaatgacctctttggaatttcggaatgatgtttcaacattaattttgttgagctcatttagaatttggtaccattttgtatgggtttaggattttatcactttttatgataaatttgagtcttgaaatccttttattattatttaaaaataaagagattatttgacaaatatttaaattatttattctaaaatttggggaataataattcatctttttatcggatgctatctcaaatttaaatttaagttgatcaattaaaatttaagatatatagtatctaggatatttattttatagttcaaacttagatttctatttgaattatatatttacaacgcaatatataatatatgacctaattttatacactgacatagtatatgtatacatatcatatattacatatcggtatatacattagattgtagttttttatatatgtatatataaataaaacttacaaagttctttaagatagaattttgatatttaagttgaaccttcgagacatcttttatcttctccagcgagcatactttctacacaaatctcttcctcttcctcttcaaacagtggagaccatcatcatgacccttagcaacttttccatcttcttaggcatattttcaaccctttgcattgtcatggtggcgccacatttatggtaattgacacccaactgcctccacccaaggtgatgagatcaactagctcaatgtcgagcacaaaagattttagagcaagcgtggattggtactaatgaacatctctcaagtttgatctatttttagagtaaatctaatcattattttctctcatatttaattttgactgtcctttcatatcttaatttagggtttcgcttttattgatgtgtctaccaacctgaattgtggatagatctggataatctcctgcctgaaccgaccatttatggctattatccctaccgtctatggtactttattgtacctaggataagtaatactccttgcaccccttcgattgccattttactcgtgtctgactatctatgttctatgtagcagaaatttttctttaccatatttgttcatgattacctatcttgcctcttagctattatattaccatatatggaagacttagtccgttctttttctacagctttgcacctcacagatacagaaaatatagtgcacctgctcgttgatcataccgatactcatgaatggcttccaccagctccacctctattctatctaatgggaaccttatacaccacgaaaagttttaaccataactccttgaagaatttcttagagaagtattggaatggcgaattctctatcagtgtcaaagaaaggtcccctaacttcaatttgtatctggttgctttccattatgaaggcaatatgagaaaggccataattaatcaaccttggatcttcaataaaagccctattcttctcgaaatcgctagccttgactctacccttcccccataatcaatgcgtaaaatccccttttgggttcaaattcataacataactttttcacgccgatccatttccttagccatacttgttggtcacattgttagaattctcctggatatccaccaaccctctcttcttgaaacatggtgctcttatttgagagtttgtattatgtttgacattaccaagcccctcccgagaggtgtaccaatcgtcttcccgagagtggcatcgcctacttggcttgaacataagtatgaagacctacctggtcattgctatttctgttgttgcatgggcccatacttataatggatgcactgagtacatgtgggcttttgatgagtccccacactccccacccctgccttatgaacatgtttagtgtgccattgcccgacccaaccatggcccctttggaatttttccctactacaatcaacaatgttttcttgacaccttgaccctccttcccaactcatgcaatttccaaaccaaaaccttatgaaccttgcaagctcctctacccttgggggatcaataaaccaacaagatttcttcttcaaacttcatgatgaggatcactctggcactgctggtctctacatttccacctagacccctccaaacaataatgctagcatctctatcatcccactgttaccatcccaccacataccagctaccccatattagaccaaacccctccttcactgccttgatgactgtgaattcaaggggatacatatcgtgctccgcgtcccctagacaaaactccacccctagctcaagaagttattcttcccccactgctagcccactaactgccctgttgatctccgatcccagccccgcccccttaccaaccaataacttcaccatagtaggagcttcaaaccccccaacttttgttgttggaagctctgaaggcccaactaaatgatcccagacaaaatgaggaacgtagactaccactactggcttcaagagacagttggctactgttggtaatgagcaaagagagaagctgaagagatcaaggcccctaccacagcagaacatagtggaagtggcttccagggaagaggctggtcttgtggaggagctggtctgcctataaaaatgagcatcttaagttggaatgctcgagtccttgggagtgattgagcattcctaaacctctcctcgttagttaagatgtataagccatcttttctttttcttatggagtctagattatgtaagggtgttgttgatagccttagagtgaagttggattttgcccatggttttaaggcccctcgtgatagtttaggagggggctcctattgttgtggactttgaatgtgtatgtacttattaatttctttgttaatcatgttcattgttatgttaccggtgtcaatttttctagctttaattttactagtttttatggggctccttgtcccacaaattatcactatacttggaaatttcttaatagaattggttaatcttgtatttcttttcccaagctctttataggtgatttcaatagttttttgacttcagatgataaaagcaaaggtaataatagaaatggagcatcagattcctttaggaactttatcgacaaattccatgttgaagctcttgattttcaagggcctaggatgacctataacaataaccgtcctggtcataggaatgtgcaggaaagattagattggctattcgccaacaaacctttgttggattcttatcctaaagccttcctaaatcatctcgatttctttggctctgaccatagagctattaatttgaagtttgataatcctcccccacaccttagcaaggctcaagaggataggctattccccttcaagaatgtcttgttgattgaaccaaacttggatgaggttatccttaaggcttggtctcctagttttagctatagttttcccatccaaaaccttgcttccatccaggaagcttgtgctgaccacctgccaaactagaagcataaatcttatttgggttcttaaagaaaattcccaatgcccaaaagagcctcgaaaatgctaagaactctcttgaaaactcagaggcttcctaactaaagatttaaaagttgcagacacatttaggtagtcttctttctaaggaagaatcttattggaatcaacattctagaattaattggcgtcatgctaggaacaaagaaaacccgcttcttcaataggttttcttcatataggaaaaccacttatagaattaaccatcctctccttgatgatggttcaaaagtggataatgttgatgacattctcaaggaaattgagaggtactacactgatctctctacatcttaaaaccgtcacgacaatgctaatgaagcagcaatccattgtattactacccacctcaatcctgaccagtacaagttcttagaacaatccttttccccagatgaagtgaaacaagttctgttccaaatgaaccctgacaaagcccctggaattgacggtttcaacaaaccaattttatcaaaagaattggaatgttgttggtaattatgtcactgatgcagtgcttattttcctaaatcattgagttgacattacccattttaacataactctcatcactcttattccaaagatgaaaaaccctctaccctcaagaattatagcccttttagcctttgcaccactatctataaaatcttggctaatagaatgaagaaggttcttaatcccttaattttaccaaaccatagtttaccaaattttgtctttaaaatttatttaaattattatttagatataacaattgtggtgattttagttaattaatataatattaatttttttattttattaaaaaattaatataataatacagaatagtttttt

SEQ ID NO: 301802 - DNA, 2457 bp, Cannabis indica
attataattgtaaacataaaaataaacatagccaataaatacatatataaaatgttttatattattagtatgtttattataattgtaaacataaaaataaacataaccaatattaccatatatatactaatcaataattattaccatatatatattataaaaaaaaattgaaaaaaagttttaattatatataaaagtgtatgagaaaatgataataagtttttttgcacatattttataattaattaaaataatgtatacaaaattgtaaaatgccctatttattatttaccacttcacgtattccaaaagaaaaaataaattacttgtactttgtagatgatgttttgatattttgcaatgagaacttcaaatctatttatctattatcacaagtattgaagattttttctcaaagtttctccttgcatctaattgaagtcaaatcgacagtgttcttttgtagaatggatcaatacgaagttcaaagagtccttgctgcttcttgatttgtccgatgctctatgccattaagaggttaactattgttaaatgtgaaggtcttatacagaaaatggtggtttgaatcggattgtggagttctcataacctttcttatgtaggtagagtgactttgattaattctgtcctagtgatctctattcattcataatgagcttaaatagtgttgctgctcaagagagtcttgaagcaagtaaatgcgatttgtcgttcctttatttcaaaaggtatggttgattatggagggtcgtgttatgtttcttgggctaatctatgtagggaggtttaggcttcaagaaattaattcaatagaatcaagcggctttgcgaaggtatgtgcgggcgaggctcaaaagaagactatctttgagtgaaattggtacataatatttatatacaaagcaaaaatgtggtcttaacatgctcgatgctccaagcgccaatccttgaagaatcaatagtgttgtaattttcatcattcgaaaggcgagttgggaaaaaaattgaacttgcctggtgcaactgagcgaatacggtatccttcctcattcttgatgtcgcaggaccttagaaatggacccacatacgggacaattgacctaaccctaggttcgatcaactgagccacaaattggactgtggggttctgggggtagtttggacttgcgctctttcgaagacatgatgtcaaagtttagtttacctagggaaaaagtaatggtaacctcatgtaaaaataaaggttttgccaaaggatatacttagttaaactaggagactcaggccaagttgcgtcttgcaaaaaaaataatgtttcccactaggaacctcgtttataaaatgtttaaagcgagcatagatttcttctcagtcaagtttctcattgagcaacctaattttctcatcgtttatttctaatattgtttttgaatgttctagacgcggtatgaagagtaaggcgggaagttttaggttttcatgttctagaaactccgaattccaaagttttaaaccaataataagtattcttttcacagaaaacaaaatagcttaggaattcagaaattttttagaagtaattcagagaaagggatcactaaaacaattactatcttatctgttctatgcgaaaataacgtaagaacgtataaaaaattaaaaaaattaacaaaaaaaaatataggatgaaaattgaagacttattggattttgggttcttctgaaggcgctgatggtttttcactgggaatctctggtgccaagggtccagaatgtaactaaaatgaggttggaaaaaatggtattgattacatgaaagaaataagtcaaagacaagctggacatgcaagaattttttgatgaaaaaatatctagttttgtatttcaaatgaggtaatgaggatgactatggtaaaaatctttcttatattaaaagaagggaaattatttattatgatttaaattggatgaaacagctgaagatattttcatgaaatacgaaaaagacgagtaaaaagcctatcaaatgaaaaaaatgcttaatcaatgattaattgacatttttttggggaaactaacactacaaaaaaaatgtaattattactagttggagaaagaccaaattatcccaacttgggtcatttaaaaaaactcttttaattcctaaaagagacatgacatatggataataatcacgaacattgaaagagattattgaatacaaacattatgcaatgaactctaataagcagacactcgtctcgtactatgttacaatgatgacgatgattatacacagtactgtgaggtagtgatattgtaagatcatcttaggagttgattaggataactaaaaaaaaatacaataaactgatattatattgctggaaagagtagataacgaattctttaagagcttacaactcattgacccac

SEQ ID NO: 301803 - DNA, 6755 bp, Cannabis indica
gaatagtactagtgtattaccaaccaaagaaaataaataaataaaagaaaacaaaaacaaataactcgctacctatatgtatatatgtgtataaattatatatctacactttaaaagtttgaaatgcttgaatttttggtggggtggggagcaaatactattattcaagctaatcttagtgcttcttatctccacaaagttcgttctcacccaaattgaattgtctcctactataatttggctgctcatacatttttagaatgtatgtctatggacaccttataatggatgaaattacaaattattagaagcaatttttttagcaatatgcaatatagtatttctaagatgaaactatgttatatcaaaaatttgtacatacatataaaatgagtgatatgatgtgtttaattaggtggatggatatgagcctaaataaggcactaaaactccatagcttagatttagtgacctaaaaacgtgtttcccatttttctcatggaagtgacttgtttttctataatactacttggcattatttacgttatctgacaacaaaataatgaaaacaagaacaagaaaatcacatagaaaagactagtattggtgagaaaccatttaccctaagtaataattctgaggtctatagaatcgatatttatagatcgataaagaaattggcactttaatagatctacccctaatatataagaacaaaattagtcacttgattacgtagagatagatcatcatgatcatgataaacacatatctatatatatatctttggaaccacaaagtacttttttggagcaaacatgaaagacatatcctactttaagtggcccttaaattctaaggttcatttcattgtgcgcatattaacgtacatacgtgtatacaaagatcattatacaattggtataccttctaggccttttcccaaaattcatcgtgggttcctggtggtgattcacagacctatatatataaaatatatatatatatataatgtaaccctttttcaatattttttaattatgtatttagtttgcgaatcaaaattaggataaactattattattaatattatataaaatcgcaattattaaattaaaatatataaaaatacttaattatacccggtatgagatctctgggtgtacaaaacaggtctatttgttgtctaagtcacctcaagagtccaggggatcaagcatacgtggagggtgaacctgctctatgactatcaaagtcttcaactttattaagtgtaacatttctattaatatatatatatagtcacttttttcttttacagtttaatattgtaattttatttttattttctcaacttttattattattattaaaaaaagtttagcaataagctaatatgcattaaggtctccgataggtatattcatggaattgactagtcagtgttgccaataatatttccaccgtctttttgactcttttcttttcaagaatagcagtaataagagttctgcttatcttttggccacatatatacaacatattgtatatatagagagagagagatatgagcattacttcgtatcactaaaaagaagcatatgtagcttcctaactcattcatcatattcttgttattctctatagactcactgaaaagtccctcatggaagccaaagggtatactcaagatggtactgttgatcttcgtggacgccctgttcttgcttctaaaactgggaaatggagagcttgtgctttccttgtcggtaagctagcatccctaatatacatattatatagataatagatatagacatagatatgtttatactcttttgtcatattggtagaaaaagcaaggaaaattaagctgacattctgtcttgtttggtccttttgaatattgctcataacatatctatgtctcccaaaccaataaggaagaccttaaacataacgacttaacaggcttaattggcagtaatccatctgagcttttatgcttgttgactggtatagtatagaaaatggaattagctgatgagactgatttttcttctattattcaggctatgaagcatttgagaggatggccttttatggcgtggcttcaaatttggtgaattacttaacaacacagcttcatgaagacacagtatcttcggtgaggaatgtgaataactggtcaggtgctgtgtggatgacaccaattcttggagcttacatagcagattcctacattggtcgtttttggacattcactgtttcatcactcttttatgtcatggtaaaattattattatatagaacatccactagctaattactttaatcatctttaattaatatattattttaatctcgagataaggcatgctgttttttatttatttttacttttatcatggtcattaacttaattatatgaacagaatattccaagtacttataattaagatcattacagccactacatttttatcttccaagttcactttcccacttcaccacctgtgtggacaaagttatattgttatgattgcttaaaaatctcaaccaccaatagacagtattaaaatttgcctgtgggaccaattagtgggttaatggtttgataaataaaaagaaaaaaagaatgtttaataatttgttttgttatctggccacctgcacgagtgaaaaacttatgcctttttagtgctatttaataactaggaccattatcttgcatatgtgttcacatacatatatatagtagttatgctgtccatattaccgtaaatatgaatgtgttccgttttagtgctcacattcatagaaaatgaacttcaactgattcgaaaatgacagaaaattttgtattcatccataaaaacattaattattgagaatcatgaagcaaaactctttgaaataaaacataaaggaaatcatcaaaatgtaatgactgattcttaaaccagatcaatagaactgtatggtttttgtctctgccacgtgatgtgtcccacatgcactatgcacaatggttggtagatatgtgtttcaatttttattttttttcattaatggtcaaaggttacaaccatctcttctctgtttttctctttcccaaattaatgtatacgaacatgtttacgaagaaaacttaaccaagtctacttctgaacagggaatgatgctattgactttagcagtttcactaaaaaccttaaaaccaacttgtacaaatgggatctgtaacaaggcctctggttcacaaatagcatttttctatgtggctctctacactgtagcaattggagcaggtggaactaaacccaacatatcgacctttggagcagaccagtttgatgactatgaccctgaagagaagaggctcaaggtttcatttttcaactggtggatgttcagctctttcttgggtgctctaattgccactctgggacttgtttacattcaagagaacttgggatggggtttaggatatgggattccaacagttggtatcctattgtctttatgtattttctacttggggaccccaatttacaggcacaaagttaggaaatctaaaagcccggctaaagacttaattcatgtcccagttactgccttcaaaaatagaaagcttcagctccctgaccacccctctgaacttcatgagtatgagatgcagcattacaccaatagcggaaaaagaaaaattcatcacaccctaatgttcaggtatatctctacgtatttaatacatggctgtttaaatgaagcttttgtattagaaaagctttacttaataaacattaagtgtaatagtactgctgaatcacatagttaataaaccatacaggtacggatgacactgctgaataacgagtataatagtagtaatgggtggtgttactgtaaattaaagtactttttgttgtagttaggattgtacgggtgttggtaagaaatgatggctttccatgtagcatggaatattccaaaagaatagtcaatatatagaaagattcgtctagtaagatgggggaattggtagcctttcactcatgtgcataactaggaaatctactatgcaaaaggaaaaggtggggggtgtctaaggaccacatcaggttcagtagttagccacttattacaattaaaaaaaaaaccatattcactgttcactgttcactgttcaaccctgtttgcatctttaatgagtgctgggaatctttatatagccaagtttctgatagaggaggtttcaccatagatgacctgacattcataccccaccactgtctcagatccaaacaaaattgcatatcaaacactacatatcgttagtgggcaacctccactatgtcactagtcattgaatgaaaacaagcttcagtattaaggaaagtgagttcccattctcagcagaagttagattattgtaaatagttctgtcatggaagaaggacttgatgattgactaattatatgaaggtgaatcaaaccgtgtcattaactgatttcaggttcttggacaaggctgcaataaaggagggcactgcagaaaactcaaggccaccatgtacagtaactcgagtagaaggagtcaaactcgttcttgggatgatcctaatatggcttgtgaccttagttccaaacaccatttgggcccaaatcaacactctctttgtcaaacaaggcaccactttagacagacgcataaactcaaggttcagcatcccagcagcctcacttgggagttttgtcacactctccatgctcatctcggtgccaatgtacgaccgctactttgtgccattcatgcgcaagaaaacaggcaatccgagaggaatcacactcctccaacgccttggaatcggatttgtgatccaagtggccgccattggcatagcttatgcagttgaagtccggagaatgcatgtcataagactacatcacattgcggggcctaaagaagttgtccccatgagcatattttggcttctccctcagtatgttcttctaggaatagctgatgtgttcaatgccattggattgttagagtttttctatgatcagtcccctgaagatatgcaaagccttggtacaacatttttcactagtgggattggagttgggaatttcttgaacagtatgctggtgacaatggttgataagatcacaggcagcaaagggtcaaccggttggattggaaataacttgaataactgtcacttggatttatactatggtttcctcttggtaatatcaatactcaacattggggcttttctttgggcttcaagtaagtatatttacaagaaagagttgactgaagatcagaattgtattcagattgatcagctcaagctcaaagctaagccctttgacacacctcctttgggtttacaagtatgaaaatcgttgttttaggtttaaactagaaaggtttagttgatgggccgggttacatatactgctgtataatataagctatttgtttctctctccttttctttagtaggtataattttactatgtcctctgctagaatatatttataataagttggtttgatttaattcctgttctttaacttgaaattcactaattaattagagagccttaataataataataaaaggaatcttataataccaaggaaattttagttattaaaaatggtttattttccccattctaaataatctttgtgagcatgagagttgtgaattctatcaacaatgctaaaacttaaaattgggaattccatccctgatatgcctaatgaatcttgattacaacacacagtaagagaacacgccacctcattgtacccgtggcaaatgacctcaccgcgtggtagcgtgtggagctgatggcttagtgggctgggcttcaatttgagcttttcgactttcaaaaatatcaacttttcatgtattaggatgtactcaattttttcattcgaatatcccacatactatttttcctacaaaattaatttactactacaatatttttaaatatatattacattgttggcgatgagaactcgacaactaaaacttacttaaaaaatcaaatgtaaagagtacaatactcttgtattgaatatgagaactctattacaagtaatgattatccaaatcctttacaagtgttcaaatgcggctttatacttgagttctaatttctctgaaatacaagtggtcccaaaaataagggaacaaagttgtgattgtaccatgagggtcagagtgtcagatgggtagtggaggagtgttggtggaatgttagcttgcatctaaagtgagacaaatagtgtctctactacttgtacttattgtatcttttgtacaaccacttcctctcttcacgcattgttggagacatactagctttgatggacttgcccttagtcgtacatcctttcggtatcctttccattacaacctacacttataatgagggagccacactaggaaatttggctaggtgttgggagagagagcaacacttggtattttgactaagtgtcgagagagggagcaacacttggtaattttgctaagaatgggaaaagagagcaacacatggtatttttactaagtgttgggagagtgaaggggatggggagcgaaggagttgaggagagattacgagataaagagagcggggagaggaaagtggagcaggcagtgttggaattttatgccctaaataaaatccaatttcattgtaatcttatttactttcaa

SEQ ID NO: 301804 - DNA, 3513 bp, Cannabis indica
ccattacttatagcggtgtttatgtatatatatgttatatcaaaaagtgtttacggctgagtaattctcatcctaattaattattaaaaaaaatcaattaccaaattgttttattataattgctagaagctttaagtaggattcgttaatctttaaagctcactaatgtagagaaaataagttgtaataataataaaaagaaaaatgtacaacacatattctaattaatgtgctcaaataacattattgttattaaatttacagctattgaatgataattgcatgaaaaggaaaggggctcctgatcaacaggtttgtaaaaatatttcataatatatgatcacatgataataattaattattttcttttctattttctagggcttgtatatatataggttaattgtacaattacaacttttttttaaaaaaataaaaattatacctttatgtgtgtcaccctttgcaggattgtgttgaggagccaaagaaagatctgaagagtagggggctgtgtttggtgcctgtttcatgcacattgcaagttgggagtgacaacggagcagattattgggctccggctctcggtggaggaggcggctgcggtttccggtaaacaataaagaagttggtctgaaaatggtggcagcacacaaagagagttttgttggagaacgatataacatcatgagcagtcactctgctaaaaaatctaaggctgattgctcatgatgctatacaatcttcaaccctgtttgtgttgtttgcattaagctacttattaattaattagctagttttcaatttggggggatttgcaagtatccttaaagaaaaaaaaaaaaaaaaaactaccctcagctcatatctaagtctttttaattaaatttgtgtatctttcttgatatttctttaattagctgctatgtactatatatgtacgtacgtacgtacaatattgctgttattgtacatgcatgcatgcagtttttagaaatgtgctaattatcatttcataatgtgatcgatcatcatcatcaaccgctagctatatttttaactacaaatttatccaatattgataattctctctcaacattctgagatttattaatttccaatacgatttaactactcagttatttttaaagtcaatggttaaaggtgcttagaggaaaattataacattgactacttatatcgtaaaaaattattatatttatactgtttgtaaactcaaaattttaactacttattctactaataaatttctttcatttataatattattgtgaatgaataataaagtgactttattattattattattattgtagtaattgtagtattgtattaaggaatttaaaagaaacagataataaagttgtgataagtcatctgggaagttatatatactaattctttgtcgtcacgaaattgtcacctccactaatacatgactccatatcaaaaataggaaggaaaaaagaaaaaagagaaaaagaagtgtacattaatgtgagtacgtgtacggcctaagaatactaatggtacaattcgaacgacactactttgtacggtccattaatttgatcgatcgatttcttttttctactaattaattagtgctatatatgtgtgtagtatatattcctaggtagctagctctctagatttacgtggtttcgacatcaaattaacctttcttttggggttaggctatgtgtccaatcagaagctataactttttacgcatgaggaacataggactttaacaattatttaaaaattgaaatttagttatttaaagaagaataaatataattaatgactaggtttttattttgcaacttgcaataatataagttgggctttacctagcttatatattggctgctgccttttataacctactgccgaatttgacccactaattaaataataaaattattaacctaccaatacaaaatttgcttggccatctttaatttatgctcctctctctctactctccattatataactatccttaagttcaggccaagagtttcgcatattaattataatttcaaaaaaaatatatattatatataatgttttttaatttatgtgtgtatattgcagatatataatatctgaactccaataatgcacttattagtgttacatcaaaatcaaatatatatggtcaattagctagcttaaataaaacacgacaacacaaaatgatagatatatatataatgtcgaattgaaacaatatatgtacaaagtactatttaagtagtattggacaaagaaataaaaagaaaaaaggtttagcttgaccactaaggtgtcgtattgatgaagaagcaaaggtgattgcacgctttggctcaaaaaagattactgttttctgagatttatcttcccgtaacttcttttttcatgtgttcctttttctttttctttttcttcacaaaaagttgtatactgtagaatatatattgattggaccatgagtttattgcatttcatggtaagattctcgaaagaaagtttgataagaactaccattattattttatttatatattttcatgtttttgagtaggcatttcaatatagatacaatataattaatcacccaaagtacattttgtatatatattgtaacaaccaagcttaaatatcttatcgatctcacaattattctataaattaaacctttgcatcttcattgatgtgacacgtgtctaggttgggggtaccatggaataccacactaattgacatgatgatatgaagttttgtacactggtcgtgtgcatgtaattggtccatatatatgattaacaacatactaatatacacagttatattcatttctttctataaataattccttttaagaaaattattgaaattttaattgcaccaagaaaaatatataataaaaaagaaaacaactactccatatattcctctttaaaaaaactcagaatatataaataataaaattatatattattttaatcaaactttaaataatttctaatattatatattgttatctagacatattacataattaatttagataatctatgaatgtgaagaatgcactttactcaaaatcatggatgaaataaccaaaatatgtattgttattcatcactttattattattataataaaaacagttgattgttcaaaaaagaaattgtagaaaaggagaaaatagaaagtggtatttttcatagacgtgcatatgttttatattcctttaaaaaaaatactcacaagagtaatttctgataagattacaggcctatctaccctttcatttcactttgggcctttaaaataggtctcagttgttagatatgttcctttacactggactgatcgagttgggcccattcgtttatagatatcttctttgtttgagaaggttttatggacttttgaaatggacaagttacataagtaaaagaggggtaagttgaaaaatgcctcttttattcatca

SEQ ID NO: 301805 - DNA, 3911 bp, Cannabis indica
agaaacggtctatgtatgtatgagtaccaaaagagccactgagtaatattacaaaagcaatcatacacagaagaagaataattcgaacttgcagtctctatgctgcacgaccctcctatttgtgctcctccctctcttcctatttctacttaacttctctctctatatatatatatctctacatattattatatctataaatgtatatatatagggatatatattctgtttagaaatattaacctgtcaactattattgtacccattttgatttattaatagtgtgtaaaacaaaccaattataagaattaattaatgtttatacgataatccactttttaaagtgtcaaatatcaataattagtgttgcccttacaaatatttgatattataaatatcaataaacactttgagtgtctttccctagtccctatgtagtgtccccaaagaaccgaaaaagaaaaattaaccttatagtttttttaagcacatagcttcccaccactaacaccacatccagtggctaacggtcgtttctacggggatgaggagaggaggagagttttgccattctgctaggtcaggggggccacttctctaatatctctacttacccattcatagtttaattttatcaactgttttaagagcattgtttttaagcaacgtggtgccatgagtgttcaatatatggttaatgtttttttcttatattatattgttcaaataataatataacataatagatagtataactataaactttgtgctaaatttagactcaaataaataagttaatgatatacttttgtctaaattttacaattatatattctaatatattaagtataaaaaatttaacttttattaaaagtaaataataattctttaaaatttggggcacattttttttttaaaaaatactattatattaaacatgaaagtgcaaatacaataggcattagtagcagaagcatttcttcccactaagaacatttagtatccaccgaaagtacaaattttgctaacaaatgagcagcattattagcagatctataaacatgagagatatgagcactagggaaattggacactaaaagtgaaatattgtctaacaaacaatcaaaatcagaaactggcatttgtgtagattgtaatcttttaactaccaaaagagaatcaatctccataaagtgtaatggtagatgaagttcttgcagccatttcaaattgtgcattagagccatagcctccattatttctggtttaaaacatcctcgaaaggggactttcatggcagcagcaatatcacttgaacaattccttaggactgcaccacaactagtaatttctttcattgtgtcgactgcaacatatgttttaagcttcagacggcctgacggaggattcaaccatggagcatcccgagatgcagattttgcaagcagattgtcattaggattgatgctggttgaagcttttctagcatcatggtattcctccaggtaagaaagagcaaagtaaaggataacatcagcttgctttggttttgtgctatgcatctctttattcctttcgctccatatacaccaaagaatggttgcaaattgttccagctgcaaagaagaccaagttgcagcaaaatgcaggattaattcattcaacttcatatggttcgatatcaggacatcgagaccaaaagaggatagctgccacacttgtcgagcgcgtttacagaagaaaatgcatgaataatggtctctttgtctcggttataaatagtgcaggtggtcgagccttttatatgtatggtatgtaaaatatctgctactggaagacagtcatggattgcacgccagaggaaaatgcagatcttcgatggtaatgacagcccccagaattttttttaccaaagttctacttggatgccactagctgaaggagtctgatcttctaaatgcattgccaaattatagccatatttaaccgtataattaccatgtgattcatgatgccacataagactatcttgttgctcatctaaagttagaggaatgcttagaattttgttgacatctgaatccaagtataaattacttaaaagtgtatgcttccattgatgagaattcaaaattaaagctgacactttcattgtagtatcctgtcctcgaaaaaccaaaggcttaaaggaggtgaaacctggcagccaaggttctgaagcacaaagaatgttagaaccattatcaaccttcaaacgaagacctttgataagtaactccttgcccccacataatgcccctccatgttaatgaaggataagaacccaaaccagcatacaagaatgaacaatctttgaaataccttgccttcaagactcggctaagtaaagatgaagggttagaaaagatcctccatgcttgtttagctaataaagcttgattaaaatggacaaagctcttgaatcccattccaccttcaacctttgataaagaaagtactttccatgtcttccgattgattccattatatgaagagttagagcccctacaaaaatttattcatcatggtctcaatttgtttgactaaagatttagagaaatggaaacagctcatagcatatgttggaatagattgagcaacaacctttagaaggatttttttgccaccaatggaaaataattttgcttgccatgcggataaaaggttccataacttttctttaatttccctaaaaagaattttcttgtctctacctgagtaagaaggaagacccaaatatctttcgtggcatggcttaatcggcatttgtaaaatttgatatatgcgtgtttgaactgctagaagtgcatttggagagaaatacaatacagatttcttagtgtttattctttgaccggaggcactgcagtaacgatcaagggagcgcttgatagcagtagctaatttatggtttgcacgacaaagcacaatgttatcgtctacgaagaataaatgcgagacagttagggcaccacgtgaaacctgtaaaccttgcaagttacctctggcttcttcctgctgcaatagtcaaaaaagacctttagcgcaaataataaaaaggtatggggacagtgggtcgccttggcaaattcttcgagtaggaaagacatgatcctgaaccttgccattaacagagaaggagtaggagacactgcttatgcaacggataattaaactaacaacatccataaaaaaacccataactacaatcatactttgcaagaaatgccactctaccctttcaaaagccttactcatattaagtttgatggtttcatagccctgttttcctcttttcaaatgtttcaaagaatgtaataattcaaaggctaccagcacattatccgtaataagtcgagattgaaggaaagcactttgtgattctgagatgaccaatgaaaggaagggcttcaaacggagcacaatagatttggaaaccagcttgtacagcacattgcaaaggctaatgggtctcaattgtgacatagtattaggctttttgaccttcggtatcagattagagtttggttgaaacaagttgggctgctactatcattaagaacttttgacattgctgtagtaacaagatcccccaccaaatgccaaaaattggtgtaaaacattactgacataccatctaatccagggctactatcatcactcatagaagaaaatgcattgtatacatatgttgttggaatatgttttaccaggatctagatttactaccatgtatgtactttaacatcctaaatatgaatttctaaaacaatgtaaataaacatatataaagtttaggaaatcttacagtgggtgcagctgaatattaatggctccttccactcagatctctaacccttatatcctgtctg

SEQ ID NO: 301806 - DNA, 3283 bp, Cannabis indica
tgcaagagcacaaagatcgttgaatttggatgaaaacaaaaaacgaagaagacccacttgggttcaagttgcgtttagtccaatccaagagaaaattcaagctaataaatcaactgaaactgagcttcagtccttaaaacaccggaaagaaactccattagagaaccctctacgctctattgtcttctaaagccgcctcctctgtcactcgactcactctcttgggcttctttaaaggattttggattgtcccgtccaaaaaaaaaaaagaaaaaaatagagaagttaagaggaaaggatttgattggggatgattataatgaacggaataaaaggtaagaaaacgaacaaaggaaaaagcgaaaattagatcaaggatggaaggccaacggggcaatgtccccgcatgcattctttctctattttgaaattaacggctactaaaatatagccgttcgatcttcgtttttggctcttgattaaactgtagccgttagatgttcatacaaaaacaaaaggtcgcaatggtttgtctctaacggctatctacccctcgcgcttgatgacgtggtcgttgcccaattttattttatttttttatctgagtccgttgcccaattttattttatataaataccagaaattttaaatactctccatcaaccaaaaatataataattaattaaataaataaatagatagataagattattattattgtattttgtcatgggtggtgtatatgtttattggagacattaattgaatatctaatttttctgtcttaaaagattttgacagatcaaaaaataggttctaaatttagccagcattaattaaagatctaatatttgaagactgaaaaaaaaaaaaaggaaatttatatatgggaactttgttgatttggctatctttattttttttattttttttttaaataaaaataaggactttgttgatttggtgaagagatggagccaagtttcaacctctaaatacgctcttcaccactgagaaaaaaaaaggaagaagattcttggaggctctcaagtcccaacgactttttttttttttttcatattaatctcataacctttttcttttcttttttctatattatcacataatcataaccttttttcttttcactcaactttggacattatttatcacatttagcttatggttttatttataaaaactttacaaaataaaatagtggattctaaataagggtctctatatatagagatatgaatgatgtaggtgtatgtgcttaatttcttaccttgatgaggttgaagtggtactcgaagttgtcatacttggtaaaaaaaaaggaagaaaatctgagctgtagtaatattggccgataattttggttttaatttgtcttcacatatagacaaattaataaataagtacaacagaatctttgatgtacatgtatgtacacaaaatattaaaacactaataaggtaaattaaaatgtaatgaatttatatgtaaataatacataaaattaacgaatacacctttatatatatttataataatataatatagtaatatttaaaaaattaatgaaaattttaattgaggtaatattatgattaatatttatcacaatttgaatacatatgtaaatatctaaatgcacaaaattcaccattgtattgtcaccatattgtccaaattgatggctaatcccttcttccttatattttttttttgctgaaagagaaatgatttattcataatggtctaagatcttggtttagcatacagggcatcacctcccagcaactaagaaatcgcttataattgttaaacaattcccatttagccaaagcatcggcagaagagttcttagatctaagaatccaaaggatctcagcctgcaaactagaaagcagattacaaacttttgagaaaagaacagaatcactccaagaaagggactcattcgaagaaagagcctcgactacaacttggttgtccgagaggatatcagcctctatgatccccaatctgtggagaacctccgctcctttcccgactgcctccaactccccatgagtaaccgactgcagggagaccttcagggcaaagagagccttgatgcctccacctagcatcccaggtgacgaaccccaatccgccccgtactcccgtctccacgtagcgaaatcgacattaactcgaattctcccaggtctcggcagcttccatctccccaactaagctagactccctatcattgctgtcattgactctccacctgactttactatgataatttgtattccttatagcccataaagagtgaactcctcccggtcacaagcctgaaaaatatcaggaaaggaagaggggtcaagaatcagtttaaccacctccttcccggaccctgggctcagctgatcagtccaattaccccacttgctttcccaccacaaatcacaagtgatcacacaagaggtaaagaaatgttcgtcagtgtcaccatatgctactccacataaggcacaatcacccacatagctaccaaagatacgattataaatggacccaaaagggacacaccccctatagactttccacaggaataacttcaatcgctcctgaaacttcagcttccacagcttcgtgcaataaacatcaacagtagaagatgctgaatataaactcctaaagacggtcttaattgaaaactcacctttaaggttatctctccacaccagcctatccaccgtgttcaattcttctatcttgcaactgattatggcctctgcagcagagggtctgaacttcctgactatagcagacacgtcccattcagtaccatcatttgagaaaaaccctttcagagaacccttgtccaccataagaaggttaattacacccgcctccaagataatctcatcaccacaggaccaagcctttttccaaatattgacatgtttcccatcacctaccagccacaaactattatcattaatgaattctctagttctccaaatccccctagcaaccagagaagcattactgggagattgatgctcaagaagtctgtatcattgtaatatttgctcgagagaatcctaacccaaagggcattagaattgcttgccatcatccaccctagcttcgcaaggaagcagaaattgatgtccctaaagcactgaatgccaagcccaccacacggttttggcttacacatcgaattccagttcaacagagccagatatcgacccccctccaaatttcctttccaccaaaa

SEQ ID NO: 301807 - DNA, 2931 bp, Cannabis indica
ctaattttttatttttattatggttatagtaaatagttttaatttttttttaaataaataatttactgtattaaaaatgtaatttaacacaaaaaatttattttagaaaaaaaacttgtgatatctattattatttataatatacaatatcatattaaaaaaattgagatattaaaaatgatgccctactttttaagaggctggtgtagtctattttttttttgtcatttatgggtaacatgtatatttttatgatagtattgtagctagctaggcaaatgacattattattttcatgtatgtttaaaaaatggtgtcagtttagttggtacgaataattactgtacaaaaattaatttggtgtatggcatataaagtcatcaaccattaatttattgcggttgtttattaattaccactatataacattaaagacagtgttcgttgtaaaacatgcaaatggtgacttggatttaataaattcctcttcataaattaagagaaatgataaaaaaaaaattgatgtcatattattatttatataattaagtatggtgtctcagaaaaataatttttttaaactcttattacaagagtaattattatttttaaatttttttcaaaaaaaatgtatatttattaaaagatatatttttgggataatttcacaaatatacaaaaataacaaaaaattataaaaatacggtttcacggaattttaaatatttttacgattttttttgattttatttacagaaactacggtctttttatgttgtactcttgttaatttgttgttgattttttgttacctgtatgttattttttgttgttattttgatgttatgtaaatgttattttcaaattaattttatgtagttttcttgttgattttatattgtttttaagaaaaaccgtaaaaatgtaaaaaaaattccttatacataaaaaaataattttttttacaaaaaagggcatcttatgtaattatccttatattttttttatttgagcctataaaatgagtgaaccttaggtgcgagcctagcccgttttagtctaacttaacataatattttttaggaaatatctctaaccaatcataagacgccatggccggtcatcactaaagcgggcaattagggcccactcctatcaggggccaaatataaaaacgaacttttaataaatatacttagtttttaataatttttaaaaatgctatttatcttataaaaaaaagtccagaaaaattatttttcttacaacccaaattaatttaaagccggccctagcaccactcataaattaattacacataatgataattaaatgttattttataaagcattaattttaatcttacctaatttttgtgatgattattatgatgattaggtaataggaaatgtgagaacggtgcaagcatttgcaggggaagaaaaggcagtgaaaatgtacacgtcagcacttgcccacacatacatgtacggacgaaaagcagggttggctaagggtttgggtttggggttcatgcattgcacccttttcctctcttggtctttgcttgtgtggtacgttagcattgttgtccataagagcatagccaatggcggcgagtctttcactaccatgcttaacgtcgtcatcgctggcctgtaagtttcttatccaccctgaatgaatgcactgctaataatcataaagtaagccggactcatctaaacattttaagtgacttgagtaaaaaattaaaattgaacatttaaaaaaaaagtaatttacgacataaatacttaagtttaactcttagttgtaaataagtacctaactttaatttttagtggtaattataattttgatacttctgtaagtatctgagtgtgaagtgtgagttccagtaatataactattattactgccaaaaattaaacttataataccgcaaattactctaaaaaaaattgtatttattatcagatactttataaattggttcacaacttataatttcattttcattttcattttgagccaaaaataacattgagtaattatgtacttatattaaaatgtagttattgattaatgtcatgtttgcttatgaatttgatcaggtcattaggacaggcagctctagacatttctgcatttgttcgagctaaggcagcagcatatcccatattcgcgatgatagagaggaacactgcaagcaagtctagtgccatgagtggccgaaagttaggaaaactcgagggacacatccaattcaacaatgtgacatttagttatccatcaaggcctgatgtaacaatcttcaacaagttgtctcttgacattccttcggggaagattgttgctcttgtcgggggaagtggttcgggcaaaagcacagtcatttccctaatcgaacgcttctatgaacctgtttcgggtgagatactattggatgggaacaacatcaaagagcttgatctcaagtggatgaggcaacaaattggacttgttaatcaagagcctgcactctttgcaactagcattagggagaatattctttatgggaaagatgaggcttcacttgatgagatcactcgtgctgctaaactttctgaggctatttctttcattaacaacctccctgaaagatttgaaactcaggtatgtattcttgtcttgtgttgtgttttgtgtgtcatcttcttaagaaaatgcatatttcaaaagtaagatcatctacattcacgtactaaaataatggtacagtgctatattttaacactttttaaaaaatttagttctttaatggtgtacacattttactcatattatctctaatacactttttttttcattagtgtgattaactatttttttaggtatttttttttttactactttaaaataattttttttttctacatttttacggaa

SEQ ID NO: 301808 - DNA, 2054 bp, Cannabis indica
ctagtacatatatacatatatatacataaattttgaacaatagagatttgaacattaaactttctctttataaaaaaaaaggtaaatattattaagttatctccctaagaataagatacacaatcaatacacaaagataaattatagtgtttttgcaaactaatcgtgtgtcaatgactaattggtaaaaataaaaagtcagagtccaataaagactcggtccaacccaataagcaagaaaagcaaaaccctaaaaactgagtaatcaactcagattgttcgagattcaatcacgaaactcttctctctcatagagataactctagggtttgagaaccaaagatcccaaaaacacacacgaaattaagaaaaaattacacacacacacacacacacacacacaaaaaacaaataaaaaagatttagggttagataatcaaataaagatagatcggtggcacatgggtttgatctcgagttcacctcataatagggttatgtctccattaagctcgcctcagagtaacttgatctccactataatcaacaggttattacaagtgttcttcatatttgaagccgcaaaagtcttggttgataatcgcagtgtttcaacctttgaatatctctatatttttctctcaatctcgcgagggaagtaatttctttagataaatttctctagtctgaactgggtttttataagttgatgtagttgttagggtagttaggatcttgtagttgttgagctgtatttttcgggttgttcttgttatcgttatttcttttccctgaaaaacaattgagagttggttttagcctctagacacactttataatttgctgtgctataaccttttgtaattgacttatgcttataagagaatttattctgacaaattctacctaaattcccttatgagtgatgatagattagtataatctaaggatcttatagcttaatgacaattagggtcagttttctttgtcaatctctagcaagttcatgcaatgtttgaacataggtagggttaccactttagttcccatatcagcagggttatgttcagtacgtgggagccttttccattatgacctctcactgtgtcactttgtctctgataaagtggtgcttaattttaacatgattggttctgtcatggaagacaagattcttgcaaagatgaatgcaaccttagttgtctgagtagatggtagggacactcttaagtaggcttaattttttcaggacaactttattccacatgacctctttaatggcttatgttgcagagatatactctgcctctgtagtagatagggcaaccacatgttgcaattgggccttctaactaatgtagtttcctcctattggaaaataataggcagttgtagatcttttagtgtctctatcaccaacatagtttgagccgcaaaatccttctaccaaggttaggctttgtgactgtttaaacacagggccaatatttgtagttcctattaggtacctgaatattcacttcatagcaagccagtgtagttttcaagggttaaacatatacttactgagcacacttatagcataggctatctcagggctagtacttaccattaagtacattatagacccaacagcattagaatagggtcccttgctcatctcctctttctcttttgaaaaacctaacagtgtctatttcttcttagttgattttaaagaacgattcttatctaagattgcatgaaacaaaatcagaaaacacacagatttacaagcttcatctgaccctagaaactcattccaggcgactattgcttgggttcccttgaaccagggtaataaccttcactatgaattaatcagaatacaatatccagtcttgattacaatttctcaaaagtaatttaacatcagctcatacaaggattaccctactgatttgatcacgatcaaatccaaacagtctaagatccttaagacttcagaagccaagatcccctttcttccttgtagctgaaatcccttcaacatgatctgaactcccttcagacaa

SEQ ID NO: 301809 - DNA, 4285 bp, Cannabis indica
agtgatgctgctattgataaaatacgtgcatgtagtggccatggtatggtggtgcatgatcacttgggtaccgttcttgcttctgctgtttggcgcttgaaagggtgtcttgatcctaaagtggcggataatgtcatggtccaatgtcttttctttggctatgacaatattatttttaaaatgaatttgcttgaatgtttttcaaaaaatggtgaacaaagtgtcttcaattttctctttaggtcttgtcttgaatataattggtaatctttgtaatagctttaaagatgtttgtgttttacgttgtcttagatattttaattttgttgtccacgccttagttaaagtctctcttacaacgtcctctagcactgttttgtgatcaggttctctaatttgtattcagaacttattagtaacagatgctattcagtaatgcattctcgcccctcctttgatgagtttcataattcttggtggtggttgagacatttttctcataaaaaaaaaaatacatacagcaattacggaattaacttaaacagtacaaataaaaatatatataatatatgaagtgattttttcatatcattattgttgatattacttattgctattgttattattattctgaacaagcaaatcattattatatgcacatgatatgtttcttcaattccaaaactaatatgtgattgttatattaatggtttttttttcttcaccgattgggtcttaaattaatattgatgaataaataattaaatatgaatcagaaaatacgtagcataagataattgaatcatttacttgaaatctacctttgtttccacacactgcaataaaatgtacattgtaaccataagactttcaaaatactaacaaaatctttttgatgagtaacttttaccttaagattatgtcatcatacaacaaaaatctttactagctaacaaccatatactaactttttttttataagatatgatttaacatttctttgcatagcataacttctaattattttttttatttgattattataaaaaaaaatgacgaatatgattaaatcatgttggcacatatacattaacactcaaataaaagcaaactgttttaataataaataaagttctttggatggaaagcttcaaaacactagaaaaatattttaagaaaatctcccaactaaactaagaggatattctcaatgaaaggaaataataaaataaataaataagagacatcatttatgtataactattgcccctttcgttttgtttattttattaaatttatcatatattttcaaccatgaaaaaaggctcattaatatatatctctaaactatttttctttttttcatttcggtcctttactatcagctggtcctttgttttgtaggtggaacgtgacactattgacttgtttatattatatttatttgttaaatttttgtttgcatgataaattaagtatgattaatttattataagtttcccaatcaaaaaatttaattaaatgattacattaaccatttcaatatattctgtaattacataaacaaaacatctgagaaaaattgtgcattctattccaattctttatcattatctccaattgaattaattagtcattttagctaatatttaatttaactgtcaaatataaaataatttatgtgagatgcaggtgttctttcagttcattgttccaacaaaaattcatattttggagatgtaaactgtagttactttaagttttaactactttattttaatgtttaattaactctccatacaatattggcttacactacatttatgcatatgaattaacacataagaacagatcagcatgtaattaacgtgtgtctcatctgattccttctctatagatcaaatgaaatctgtatatgtggctacttataactatttaatgttttaatcaccaaaatagtaaaatgtaaaattttgttcccaattaatactttttttcttttttgcttctatagtttgagaccaataagcccttataataattataataattattaattggtatggcacaaaaggtggcatgcatttcatttcagaaccagataatataaagttgaaattgtcctaatttttacaaggcttagacgttttattaaaaaaacaattatataacattccctaataatatttagggtgccaataacaagccgaccacccaactgtcatctaacttcatttcatacatttttctttaaaaaaaaaaaaaacaagaaaaataaaaaggaaaagaagaagaagaaaaacacagctgtgatggctattatacagatcatgtgagcacatgcaagcttaagggagagtatttatgatatatttcaatactttttttattttatattgttctgaaaattggtaagcaatcaatgaagagaaagatcacaactgatgagggaaaaaaggtaagagggggaacttgttttgtactttttcttgatgttacataataatttcatgaatttatttaattataataatgattaagaaaaagagattaatggtgaatcgtactattaatattataataatttggcgcgtgattcgtgctatagatttaatcgtgattaattacattacattgttagtaaagttaatgtttatgttggaatgtttttcattaaaaaaggattaatgctagaatgtttttcttttttcccccttgaaaggaatgctagaatagtagaatgtttaataaaatataactttgtattttaatttcctaaaagctaatgtaattgtaaaatgtggggtatgaagaatgaaagatacatgagttggattttgaaagtgctttacatatttgagctgtaatgtgtgtaagcctttatgtcatactaattttattgatgcgatcaaaagtattacttttaggactaataaaaggacacactccatatcggatcatctttttacaaccaactttactctcaattggatggatatttaatggaaattggaaaattactcttttagtagacatcgaacacaaacttaatttgagtttaaaatctttttttttaatcaatctgaaaacctttaatagaagcaaaactaaaaagcaaagttcacagtggacacaagaagctccacctccttaaccgcaataaaaccaaaagttccctcagagactgccttagcagcgatagtgtgagccatagagttataaacacttgaaatccaatgaaaattaacatcaacaaactgattattgtctatgcagctaggttcccatctctcctacaaacctacaacaaacacaaatagtcagagaagactctaggatttttccatcctctttacacaaagaaagcaaatggacacaagccaaggcttccgccagcgaagaatgagctcgaaacttgatagtgaatgtttcaataacagagccacacatatacagcaccacacaatccccacaacctccaaactacagatggctgcatccataaaacaatcgaagttgtcccacttatagtgtaataccctactagttaggcacgctacagtgttttcttaattgatgcacacctttgttaagtatctgaaaaatataatctaccacatccttctgcatgttgcactattactaataaaatttcaagttttggtacatcttggtagaactaggatgtaatgattagggagtggtatgagcttcatttagggtttctcttctgaattcaatactacttggaatacaaactcaagttttaataaagtaacatctggacttcttctcaagttttctaataagtcttaatccacaaattgagttattttgattttgtctaataaatctgattgaaatgtcaacttattgtgtttacccaacacaaacctaatacttgtgtaataccctaatactaaggcatgctacagtaatttttcaatcgaagtgctatctttgccaatcaaaaaattttcttaaaaatcgtgtcaaattaaaacttttagaattaactatgaaactttataaactttatataaatatttacaagtgtcgggatcccgttgtttaaactttgtacaaaatattccaaacacaaaaagttaggtcgcactgcgactacaaaataaaaaccccagatgccccgagactgaacactccaggtcccgccaccatgacatgtacaacctcaccctagctcaaggctcactcttgttcagtcttcgcctttcccttacctacacatgaaagcaaaaatgtgagtcgacaaactgagtaagaa

SEQ ID NO: 301810 - DNA, 2813 bp, Cannabis indica
tacacaagttcctcatgatgctggatggaacaataggcaattcatttttcaacagattcccagaaactagaggccaatattttcgaaataaaagaagtagaagaaaatcaatggcctcggaaagttttatcagattgaatgaagttaatttcaacaaatttattatatcttattggcctcacttcaatatggacttaaccaatggatttgaaccatctcaagtgttcatagaaataatgtcacatttgaaaggagggttgaaatctgggaatctttctgatggtaatctcagtcagaaagattacattttgaaaagtaacagcagagtttcaaatttcagcaacgatgaaagaaagaaaatatatgacatttttctacaatatgaaaagttgaagactgttaatggtgaatatgatgtggctgatctggtttgcgatcttcattatcgattcaatggcgaaacatatgagggtgacaaattggattttgtgtatattgatgaagtgcaggatctaactatgggacagattgcactttttaagtacatatgcaaaaatgtggatgatggttatgttttttgtggtgatacagcacagaccattgcaaagggagttgactttagattcgaggatatacggtgtcttttctatagggaatttttatatgggaaaggagaaaaaggccttatcacagacatatttcaattgagtcagaactttagaagtcatgctggtgtattgaacttggctcagagtgtcactaatcttctatatcatttcttcccactctcgattgatgtaatgcgccccgagacaagtctgattaatggggaaactccactgttggttgaagtgcacggcgaaaatgagtttgcttctatgttcaatgatggagaaggtgggaagcttgttggttttggagctgagcaagccatcttagttagagatgacaacacaaagaatgaggttttaaagtatgttggaaaacatgctcttgttctaacaatatcagaatgtaaaggccttgagtttcaggtgtttgttaagtctatttaactttgagtaatttgattttattcctctaaactgaaacatagttttgctataacaaaatttaccaacttagctttttgtttttgtaggatgtgttgctttataactttctttcttcatcaccaatcaaaaatcaatggagagtcatatatgagtttatgaaggagcacaatataatttcccatgaagttccaacatctttacatagtgtcaatgaggccaagcacagtcttctgtgttctgagttaaagcaaatatatgttgctgttacgcgaactaggcaaaggttgtggattttcgagaatgagctctcacatcccatgtgtgactattggaaggaacagaacattgttaaagttagagggcttgatcattgtctcatgaaggagatccaagttgcaagcagcttcgaagaatggaggtcccgaggcatgaaggttgttagaacatcatcatcaattatgctctactttcaactgttatttactttctttactattgcttttaggcttgaaattctacctttaatgttatttgtgttctcaatgcagttttttcatggacaaaattatgggtcagccagaatgtgctttggtagagcaggagatgaattatgggaaaaaagggctgaagcagccgagcttcgcacggttgctttgtgtatgagtggttcaaatagtaaactggttgatacatatctcagaagggctgctgaaatatttgaatccattagtctatatgaacaagctgcccaatcttattatgatgcaaaagaatacataaaagcaggtatgtttatttactataatacacaaaaagatattgctaatctatttccttttaaatttcatttgggtactttctttgtgccttttgttgtggactagtagaaccaacatataggatatcattttataaattgttgtgaagttgtgatgataattggaatcaccctttcgttttgatggaaagctttccgatcgttttgccttgtgggctacacaagaaagctcttcaactgagattctatattagttttgaatgaattttattagcaatctttaaagtggtgttcttatttgttatacaaagatatccttcattactacttctgtgactgttttgtgtcttgtgacatttcatctctaattacaagtttagatccttaaaggctttatcatagaaatgtattctctaccttaaaatgttgacttaatcatatcatatgcaggtgaaatttatttaagaaaatgtgttaagtacgaagaagctggagaaagcttttttcgagcaggatggtataagcacgctgcttcagtatatgcaaaaggaaacttatttggtaactgtttggattgctgcattgaaggaaagatatttgagattggattgagctacatcatatcttggaaagaagatgcaactgtgaataattatgcaatagaagaaacttctcaggagtttttggagcatgctgcttgttattacatcaaactcaatgaccgaacctcaatgatgaaatttgtcaatgcttttcattctaaggatttgattcgttctttcttaagaaatgagcattttcttgaagagctttttcaattagaaattgactggggttgctctatgaatgcttcgaatatagcaaagcagctaggaatgacactatttggggctgaacaattagaaaaagctaaacattatgaagaagcatcattacttcttctgttccatgtacatgaaaaatctctctggggtcccatg

SEQ ID NO: 301811 - DNA, 2689 bp, Cannabis indica
aaaaatctctctggggtcccatgagttctggctggcctttgaagaattttcgggaaaaggataagcttctagaaaaagctaagcaattagccaagaaagtttcacacaacttctttgagttggtctgcatagaggagaacattctttcagatcaaaaagtgtcattgtctatgctgaagaaattgtttaaagactcctgtagactttccagctttagaggtcagatattctgtgctcgaaagattctcgatgttcatgtgacatatgattgctggacaaatataaggcaagagaattatgttacatatccaacagaaaatgcagagaaaattttgtcattagatcaagtttctgttggatctttgttctacttttggaatgtgtggaagcagaatattgaaagaatattggattatcttgagattggatgcaaaaatgacaacatatatggcaagttttgcttggactacttaggtgtgattataagtgaggaaaacatcttccatttggttattccagatgcctctgcctatttggtgaaatttgacaaaaatttgaataaaagtgaaaagactctgagcttaaaggccgaccaattcgttcatgctgctaaatgttattggaattcacaaatggttaatgttggaaatatggtattacgaaagctcaaagatgtttctcggaccttggaacgaaaatcgttctacccctatcgccagttgatgccactcttttatatgtttaaactggcaaagtttctgttgaagtatccacataaagagttctttgagcaccttgatttctccaggaaaaatattgttttgactatttgttccatggaccggagaaagctctccacattgggaatgattcgcctgagggagacggaagatgtaaagaatttgcttgaagatgtaatttttcgaagtactagtatgaatatgaataccgagctcacttataaacaagttggaaatgtggctatgatggttactagctgctatggaaaacttcatgatgaaacatataggcagatatctcttagctttgtcaactatccattctggaaatcatggattgaaagttttcagaaaataggatttgaatcctcacaagtctcattggttcaaaagttctatgaagcattgcagcaaacttactatgctgactctttcggggaaagtcaatatgtaccaccgagttgtttcatgtacatcgtggagcgccttctgattctgatattccaattcaaagggtgttttttctcagtcaaatcttctctacttgaatgtctcataaaccaggaatggaatatgaatgcctcacacatctctgaagatgactggcaaaacaaatttggtggtactcttgataccattgcagccattgttgctgagcttctttataacaaaggcgatctcatgagatggtttaaaggttctaataaactcagaaaggcatgtaatcgagaactagtgctgagattgtttgttgctctatgcctactctgtgtgaactgtggaaagtactatgaatcactctttgaattgcttggcatgagtgacattacttctctactaccaaatcagttctatgctgttcaaaatctgaaaccaggaaactttgatgaaaatatttgtgttcttgcacaagctttcgaaagaattgggaaccctttagtggtagtgagctcaggaacacatttcattgagtctaaactccctgcaagcaccatctttgtggacctggaacttcataaaggaagagatgatttgattaggataatgtttaaatgatgtaattgtatggtttatgtgcttgaactcaatcattttgctgttaaaggccatgttttcatcaattttgaaaattgcaacattgttctattctgctccattttctcttcttaaatcatttcagatcagtattatattacaataattgtttttttaaattatatttatgcttatgtatatattttaaatcattgatttgcatatatctcttggtatattaaatcatttttttttcctctctacactaatagatggtataagctaagcaatgcaatttttttttttatcatgagcttatacatatacattacaaaattttaatgtcatcttcttgtattataaattcttcacttaaaataaataaatgtaatttttgtaagagcctttttaagattatgatagtgaagattgaatagtttgattaaagcatttgtctaattttggatggccagtatggtctgtttttgttttgtttggccaagatggtcagttttatttaccttcaattttagttttgtaggacagtatgattagtttttgtttttctaaggcctgttataatgccaatgcctttgctgatcttgatcacacacacacactcactcacttgttcattcaaacaacactcaatagaaaccagtgacaagcttttgctttaatctgaattgaattactctgtgtttgagctattacaagactttcattaaagaatgattacgaggccgactataggttctaataaccgagcataagacttattggtcatgacatgaaatgaccaataaggacaaacatactaactatactaataaggacactaagggcccgtttggcacagcttttggaaaagctaaaagctgcttttcaaaaaaactgtgacaaaaaggtgtttg

SEQ ID NO: 301812 - DNA, 2131 bp, Cannabis indica
tgtgtcaagttatttatttttctgcaaatattttatattctgcttgttctgttttgtcactgcaaaactggtttctgcagtaacagaattactttctgtttttgcagacacatacagttttatattttcttatatataattgacatttgcaaaaacacggtttttcagactaaaattagaaaataatcattttctcatatattcgtaatttgtgtactgtattgtacgattttaaaaaagaaagatgaaatagtaagtatgatacgaaggatatatacattttaaatattttattgaaattttcttttaaaaaattgaaagttgtaatttatatatttttaaagagtagtgtgtaatataccttgaaactcaaaatccaacctccaaataatgttcccctattccacataggagagtcattcctccaaaaatattgtctgcattattctacagcaaaaattaataaaatattatttgtatatctttcaaatttatgcattcataaaataaaataagaaagaaaatagtttataccatttcataaagtacataacctgctttaggtccccaaaatgaataggcacctaatacaaaagtataaaatataagtcctgaaaaaaaatatatttaactatattagattgagtaattaatttaataatttaatactaaataatttcaaaataaaatacttacccaaattatttaatagaaagttcttattaaatatcaatttcatatcttgaaaaattctaacaactttcaatctctcaaaaaatgatatagtaaattaatgatagagttataatgcataaattaaataatatatagttaaaataataataatatattgaatcaaaaaatatatcttagaaagtaatcatacataatttgagcaatgaaatttttattttctttcttgtgtgtcgtcctcgtaatagcaaatattcatatctcttggaccttataagtctataagcaaattaggttagtcaaaaaatacaatacatgataaaagacactaagtagtgttcaaacactatgtcgtgttattattaatataattaagttaagttcacgttatttcatttaataattattgtatacattataattaaattatatgacactaaaaaaagtttataaacaaattattataatgatacattaaagattatataatgaaaaccattagaaccaaacatatatatagtgaaacattataatttacaaacataaattaataataagaaataaaaaaaaatacatttatcagtagacttaaaatgaatagaggaaatataaaaagttataatattagaaatgcatatccccacttcaaatactttccaacctaaatatattacacacagaatatgaaatattacatttataataataatatgagaaaacaaaatcaatttttatataccaaaaataattaaattatccaaaataatagaaataatgttactcacaagtcctccgtaaatataaccaaatgtaaagcctggtgttgtacaacaataatatattaaaatccatattgctttctgatatatttaaacattaaaaattaatatgtaaatatatataaatgaaatatgagagatttaaaaaaaattgagataagaaaccttcaaatgttgtgcgatatcggtaattatgggagctccaagaattatgagtggaccttgtccaacaccagtcaatctatttcgtagaaagctatttagtgaaacttaatttaaaattaaatatgcatacaaaattattacaattacaaatatttatatatttgtatgtatacatatgaaatttctttaataatatcattttcactctttgtaagagagttttctattatggctataatagacaacttagttactttcagtacgttctatcaaaaaaagctttaattatttttagaaaattatgaataattcgtgttattaataaaatttaaaatatatagtcatttgctcacatatataaaaatatatagaaaaaaaatatatataaatatttaaattttactttggatattttatatctttattctaaatattggaacatcaatttttagtttatttttggattaacttaagaacatatttaaatcaccaag

SEQ ID NO: 301813 - DNA, 9404 bp, Cannabis indica
gctttgggctagacattcacatattggacctaaataaatataaaaattgatattttataatatgcggtgcaatttgaactaattcaaaaccgcaaaccgcaccgcacaacaaagaatttcaaactgcatttttttgcgatgtggtgcggtgcggtgcgaacagtttgagcgatttgatgagcacccctagtgcttacgtattgtgcctttcgtgccgtgtcgtgcttaagaatatatttttcgtattgtattatactaatttgtaacatcgtaccgtgtcatgcccaaatattttttgtgtgcctagtcatgtttgtgccttctaagctcgtgcaactttcatatcatgtcaaaagctcgactcgtatttccaacactagatacgtttagcatttttttagcttattatgttttccactttccactagatctcacacgtgtaataaaaagggattgcttacctcggaagcagagcaagccagagggcactataaaatgagtaaagaaatagggacataataggaatatcaaaacatttccattttcccggttttctctcttcactcaaaaaaaaatacagttctggcgcttctttacattcccactattattctttcctagggtttctactctaatttcttcttcgttcgtacttcaaaggccatactttcatccatctctggttacgcgcgagagcggcaatggcggtcacgctgacggaaggtgcgattacgaggatttgtactgaggaattccgcaaggaagataactggaagccggtggttcaaatcctggacttgaggatggttaacacgcaaggaggtcaacctgtgcctcccgagaaggaaaggttcagagttcgactctctgatggttcgcattttcaacaagggatgttagggacacaggtcaatgatcttgtcagacaagggaggttgcagaagggctctcttattcgattaaatgaatttgtctgcactccggtccaaggccgattgtaagcacaaatactcttctctattttgtctctataaatttgcacgtgttcgtatatgtagtttcattggtttacattgtttttcagtgtgttgagatatggttataacttttcgtggttacattgcgggtttgggttaaattgagtgaactacgcagagggcattttgcaattatttgtttcttatatttgtgtttttatttacttttcaacagtaattcttggattttgggattttagggtttaattgattgacgcggatgaaatattgagtctttatatacatattatcatttttatgtttgatttgttagttttaagggcattcatgcttttatgttcgccttggaaattgtttattaaatcttgttctctaatttctttgtttttgacaatattttattgctctgttatggtttgtgtcaatcatttgctcaatgttctgtatgaaatcttaaagtcattgctttgaattgcataacaaacgatattgttttttaggaagatgcttcgcttagctaagtttcattgtagaacttttgtgtatactgataaggagctgatgaatttgtacttttttggggtattcgttgggtctatttctcgaattctttagtatcacatcttaatttttctcttttctcatcttcttgtgataaagtagtcaacctaatgaattgaggaaatcggctttaaagaaatgcaaagatgtgaaaactattgctagttaagtaatgggttattggacaattttgttagttttgttattttcctggatagctctccagtgaatatagcttttgcatgtatatgttttcgtttctttattatgttgtcatagttgtctgtctttcaaattttagctgttttgattgatctctatttaccattgctctgcttaaaaggaaattcttatgctattcaaattgtcaattatgatgatgatggttctattatcattatttattcgggttttataactcatttactgctgacaggatcatcatcatagttgatctggagctggtacttgaaacatgtgatctaattggtgaacctgaactggtaacaagacctggaatttcaccaacctcgggattggttactagaaatgctcaatcgaccggtgttagtagtttttctgctggggcagtgaatgaaactgtggtcgggatgtctatggataacactaggatgaatcaatcatttggcactccttattctagtaattttgattctggaaggtatgggacgaataatatgccttccatgtatgctaagtcagagcttggtgataggccatatagttatcagaacacaggagttggggagccagcaccaataagtgggtcatatggtaatcagaacctcggtttccgcagtcctagacctgaggtttcacggcctcctctaaattcttatggtcgtacaccgccagcttcatatcaacagccaccaccaaattcttatgggcgcactgcacagccagcttatcaatcgccacctgcaatgtatagtaatagaggaccagtagccaaaaatgaagcacctgcaaggataataccgatttctgcactcaatccttaccaaggaagatggacaattaaggctagagtgacagcaaagggagagctcaggcactacaacaatgctcgtggtgatgggaaggtattttcttttgatcttttggattcagagggtggagaaatacgggcaacctgctttaatgctgtggctgatcagttttacaaccagattgaagttggtagaatatatatgatatccaagggtagtttaaaacctgcacagaagaatttcaaccatctccgcaatgatcaagagatttttctggagagcacatcaacaatccagccatgttttgaggatgataataaaattccacaacagcaatttcatttttgttctataagtgatgtagagggcatggagaacaacaatatagtggatttaattggtgttgtgtcctctattagtcctgccaccacattaatgagaaaaaatggtacagagactcaaaagagggcacttcatttgaaagacatgtctggccgaagtgttgaattaacattgtggggaggtttttgcaatgcagaaggacaaagactgcagaatatgtgtgactctggagttttccccgttctggctgtgaaatctggtagaatcagtgatttcaatggcaaagttgtggggacaatttcttcaagtcagctatttatagagcctgattttccggaggcccacagtctgaaggaatggtttgacaaggaagggaagaatgccccatctgtctctatttccagagaattagcaggttctggtagaacggatgtccgaaaaactatatctcagataaaagacgagaagttagggacatctgagaagccggattggataactgtaagtgccactgtttctttcataaaggttgataatttctgctatacagcatgtcctcttatgattggtgatcgacaatgcaacaaaaaagtcacaaataatggagacgggaaatggcggtgtgagagatgtgaccagtgtattgaagcatgtgactaccggtacatactccagttacaaatacaagatcatactggcttgacatgggctactgcgtttcaggagggtggtgatgaaataatgggtgtctctgctaaagatttatatttcttgaaatttgaagatcaagatgaggacaaatttgctgaaataattcgaaaggttttatttaccaagtttacttttaaattgaaaatcaaagaggaaacatacagtgacgaacaacgtgttaaatcaactgtgatgaaagcagaaaaggtgtgttattcttctgaggccagagttcttctggatatgttggagaagttgaaaagagaggattttggctctgctccgaaggtagaaacattcacttctaaccctggattaaccacaccagttgacttaggtaatatcgggagtgctggtcgagaatttgttgcgtcagcaaatcaagtggggcagtacggtaatcaatatagtggtggttctaggctttctgcgcctacatcttctggttcatacttgagctgtaatagttgtggggctactggtcatagttctatgaactgcccgagtatagtaaatggtccaggacagccccttggagggggctattctaatagaccatcttctggccaagtgggtaatgtctcaggtgaatgttttaaatgccatcaaactgggcattgggctagagactgtccggggtccagagagcctcctccatcttatggaagcagtgtttctggaagatacggaggaggattccccaaacaacatgttggtggcttttgaggtcaacgtttttgtaaatccttgcatgttttcttctacatcgtcgttatatattttcttgctcttttgaacagtaacattttgctttgctttttctttctgttgcaatttatgttagaggggaagttttgccatgcaacacgattgtgtgttttcacaatgaatcatgttttcggtgggttaatcgaaaacataaaagtattgtgactcgttttcctaatcctgtaaaatatgttctgtttttatttgtacttaggggttttatttaagttaatggaacagttcagttttgtttacagttgactctgtccttcattctagttgtacttttttttttcaagaaaaagctcatattcatcacttgtaaatgcaaatggtcttctctagctaatttgagactcgtacattttatgctgtgttgctaacgactgcggtttatggtatttgttgatatgataagattaagtaatcttttatattctttttaaaaaggaaaaaaaaagtaatgttatatttatatatatttttgagtgcttttacaatgcacatcttttaaaaaaaaaatgaattgatgtactctatcagtttattttgtagtatggtagttatttaagataggagtgttcatataatctgtaatttgtgattttaaactctaattaatttagactaaactatttgagattggactaaatgaacctggtgtaaataatttaatcaattcgggttgttttaaattctttggttaggtcacggttttaaaaatttcagagcagttcaaactaaactaattcgtattattattattattatatatatatatacttaatatattctttttgggacaaaatattgatatttgggaacaattttaagtataatattgatattgagtttatattgttacgataataattttgtattgttactcatgtattatgaatttattaaaagtagaaaaaatgttggaaaaaatgaataattattgtaaaaaaaattagaactacaaaatacaaaatatggttcgaatcaaatcaattcgtttttgagtggttcggtttgtttggtttgataatctcattggttggttttgaatttttaaaaatcgtaatagtggtttaatttgaaaaaattaaaaattcagaccaaataaatttgtgaagacccataatttaagatatcttaatttttttttgagaaatttaaaataatttaaaatatagattgcagtattcaaataatttattttacacgtatttaaaaaaaatagtcatgtgtgcaataaaatacacaaaatatttgaattttgttttcggtgtgttaattttttttgaatttattaaaattttgtaattttttttgaatttattaaaattttgtaagatgttttaaataaatataacttatataactataagtaaaaatttgattagaagattattttgaataccaaaataaatagggatacatcaatacattctttttgagagggtgcgttgtaaattttttttatattttttataaaataaaataatattaatggtagtgacacctccattttgcacacatacgtatgtcatgccatgtcacctatattttaaataatttcattaatattaattactatcatttatatttttataaaatatttatgttagatatgatttgccctattttactacttaagtacaaaatgttatattttaaatataatgtaatctgtataataactcaaatcaaattcacaccaaattaaatcgattattttgaattgattactttttaatattcaattatttaagtgagctttcctccctttattatctattctcttttgttatctttggccaaactaatatgatagaaatataacgttttcttttccacttacattttcttttcttagaaaccttaatcccaattccagttctaattataccaacattaaaaatacgttcaatgttgttttcctaattagaataggattaggatttatcattcttataacgtataaataaacataatttattaggtcttttctattgttgacatgttttttttgtaaattctcttggtcattttattggttttctttattttgtgattggtctttgtgggttatggcttagcaatgcagtaacatttgattggatgatgaagaggaattggtttacaattatgatacagcggcagcctcaagtgattatgattgtcgatgagaggtgatgtcttgttggtcgatttttgacaacgagaacaattgattttgatgctatgcaatatctaatggcttctctctggcagcctgtaaaaatttgtacgtgaaaaaacttgatattaattagtatttattttaattctaccatgagatagatattcaaagggtgatggagaagagcccttggacgtttaataaatttttttgctcgtctatcgttgacttaaaaaggatgaggatcctaagacaatggttctggatgaagtggacatgtaagttcaataatatggacttcaaacgagtttaaaactgctcgtgtggtgcaaaatattgggaattatatcaaaaagtttgttgaatcgaattcaaagaatttaaatggttattggcgagactatctctatgttcgaatgacgttgacaatctattgtcctttgaagatatgtatacgattgtgacaaattggagaagaagagttctgggcaatgtttaaatacaaatatcgtcatagattttgctttatatgcgatattatgggctatgctgaacagtttcgtccttgtctttttaatgctctgagaggtaaaccttatggctcttggatgaaagccttgccacgacgtcgtaaaatcaaatcgacacttgttggttgtggcagtacatggacgtagccgaggaggagagtggtaatgggattgggtcaataatgtgaatcctaattgattaaaataaatcaattactgagattttgtacttgatatctattttggatactacggggactaggggccatacaatctaggctcccaatataatagatctaaaatttaacaaataaattttctaacttattatttccttatgatatcactatagacatttgtgtttagtattttaaatagtagtaaagatattctaacatatttttctatgttgtgatatgaaactttacatgttagtatacataatatatgtctatgtgtgtattatattatgatgatgttatataatatggtatttgagattataacatgttatattataagtatatatgtataagtgaggtacggagcataaaacatgtgacataatatatatgagatatatatattcagaaattagcactgacaatgtggacatcatttttgacacgaggtaagaagaaaaacaatcccgaagccccgcatcccatgatagggccatcgacctagttctaatggccttgcctagtgtccaggctgacagaagggggcttcctggtaggtatttggatcatgcaaagttgtttcaaagacactatccttcaatagactaagctaacaagtcaagaagactccaactcatggacctcgaagttaaggatgtcctttagatatattagaaatcaacttggtgcatgggccttgcctagtgtcgacagtgacattgtgtaacctagaatgcatcattttcgatcctcgaagccattatctcagtgcaaactgcttagccttgcactcagatacatgagagacatgccacaagcaagatacatgcctcagaaccaacattggaacacttccaatttggagtgactgagcactcgacgtctacgttgatattctcagtcaacatgagcgtacgagagctagggtttagcttcttgggaacttctttatttcccaatttctcaaatccaacacaaaatgatgctaggacttgagattttgaaaactatggccaggggatcaaacactaggcccagcccctaggttaacaaatgaggtcacctaagcgccaatttaccatctcaagtttcctacgtaatgcccatgcaaattcgatgaaacttaattcccgtgagtacttttaacaagaaagaagattgagcatcaaaaagacaaaattcaagtacttttaacttggaccaagtgctcaggctgacatattggcaacctaggtgcttttgagacttttccaaagatgtttctcaggcattttctccattttcattaataacgaagatacaagagcttttagacaataatctagatgatttaatggccaaaatcctagccatcgcccatgttgacccacacattggctaggggcgcccattgacattcagcgtagcgtgtgttgtttagttattcaaaccctaattctgttttgggaattctttgtatttttgtcccaaatggggatggagccctcatgtttagactaaaatataatcgaagtaccaaaacaacgctcggagggcctagaagtagctcccaacgcctaggttgacactcaacctggagtacatggatttgcttgtccaatttcagccctgtctcgggcatcaggctgttttccatcacaaataagatgtagcacttgtggaaagttaaattcatacttttatattttacctttttagaaaggaggaatatcagcaagttattcacaaattgggtagtcacaaatcactcgatttcaccaacgagaaaaacctctgagaactagtgaacaacttcatcataattaagataattaagtgatgcaatcatatcacttagacatcacaatatattattttggcccgattttccacgttttgatgcctaggttaacatcgggccacttctcaatcgcatcgcaggattgtcaacctggtcgtacattgctaaattgtgacagttagagccccatgatttgaaggggaaatatcgggagctgtacaatcctacatcacttagagaatgtcatgtgtgatgattttgagactgtgtaggtatgtgactacacagttgaagatggcttaaatggattgattagtactacctatatcaacaaggtgcatcttgtttt

SEQ ID NO: 301814 - DNA, 1742 bp, Cannabis indica
tggctcatgttttagccagggattcttgtttctctccaagtcgtatgcttcaattggagaattgttccaacgaagtgcgttctattgttattaacgattgttggttaataaagttgctaagtttattaaaaaaaatgaattctacctgcctattccaaaagtaatacaataaaatcagaagtggttggctaagtcgcaagcttatgggttatagttattgggagaattcgtatacgatatattgaatcctccgcgcgcatcctatcgagaattgggaaagaaaaagagaagacacgacaagaaacaacttagcgataaagggtccttgcgggtagacccctcggctaaatccctacacccctgcggttagggtccctgcaaactgattcctacaaatcacttcttacacaatcgccctattgatgctcggtagaaagctaatcaggcaagaatcgagttactaccccttggattgttttgacccattatttgtaaacaacaagagacgaagaccattcccttttaaaaagattagactcgaatgcctgatccatagcaagaaattaatagaaataactaaagacttactatggaggagaggtacgtggaccaccgcgccagtaccaccaagccttggtcactatgtggggaccatatcgtgcatgctcaaccatgacaatgaacgaggagtggagacaagatttaagcaagtagtggactcacccacctgaagcacctagtacacccgaccaagactacattgcaggcaccaccttgcagccactaccctgacctctgccaactgaccaatgtaccgtgtagtgagttgtcattataaggaccacatgtaaccttagccataaaagctcccttatgaatagattctcaccccttcttcaaaggggctagaatttatttctagcaaaagttcttaagctgataatacaagatactcattttcaccattgttggtctgtgaattttcttaagttttactttggtttcatctacttttttattctccaataaacatatacattgagtttccaaacactaatagcgttgacgagttctcaccatacgtcaacagtttagaaccatctgtggaaacgacaagctataactatattgcttcataaactatgcactatcaccataaaatgcaaaggcgatcatgttgcctccaaccgcagttgtctaaaaatctttaaaaaaatgtcgcctaaactctcacaactattgttatatcctaaaataacttagtttttatagtgtatatgtgttttgggtgggaaaacatcaagatttttaaaagaaaaatgaggaaaaataatggtgtatgaagaaaatagagctttaagagcgatggtggtagcattaaacaattaatgagagttttagatctaaaattagggtcttatatagacctatatcttcgacataggtctccacgtgtatttgatatggggttagggtagtggagacttatgttctttatttattttgaaataacagaagacatgtttttggttatttcaacataaccgaagataaaagtctccatgatatatgtctctcggttattaaataaccgaacacttaagtctatgatatttttctttctaatttctctcatttcttttgtcttcaggttttattttctctctcgtaaaaaactggagatatatgttagaattaattggggtcacagttgtatatataaaatatgtgttgggtcatca

SEQ ID NO: 301815 - DNA, 1781 bp, Cannabis indica
aaaattatgttataattaaaaaacaattttggaacttatatacagtctctaaaatagttgtcagctaagattcctcccatgcagggaaccatagccggtaacttgggtacactgtcacctgttgctcccaaacaagtcccatttttaaggcccgaattaaagtctcatcctacggattccaacactaataaaaagagggaccctatatgcaaaacaatccaaaccactacaccaccacgtgtgttaattttgatattggttttcaggattaatctttttaatattaatattaatattcccttttttttccaaaaaaaaaaaatatacattgaatgaaatatttgtgacatgatataaatattcttattttactacaagacgttttttttttcttttattatatccagatattattattttatgagattacaatattatacccattaattattaaacaaaagtgagattcacatgccgacaatttttatgttccttcggcattgtcgccaataataatttatataagcttcagtaaaataattataataattaacaattaaagacagttaaaaaaataaaaaattatttaattagtacataaataatggagataatttgataagtataaggttagttgataattacctgaaagaattaagggtagggtgatgatcttgaggtggaattttagagagttgggagagagggatattgataccttcaacccaactactattttgatgagaacctttcatggataaagctaccccagatggggatagaacaggagtaccccagaaataagacaaaggggtagtcattatatcctgtttggtttcaaaagggagagaaaatatctgtttggcttggtcatgaagttggctcaaaagagtaggaggaaccccatggttgaccaaacgaaatagaccccaatctctacaaatctcatcaacaacaaaaccactatcatcatcatcagtaccataataattaatatccttgtcatagtcaaggacaggtactgaattatactcccagtcaactacttctgagttgagttgctccgactcggccgagtcaccatcctctgtttgttgttggcgaaacggtggagggtatgaagaagagttactaacccttatgttatcttcttcagccatcgaatacaatggattagtgtttttattattattattattatttattttgtgaacgagaaaagaaataaaaaccaaaataaaacaagaacaaagaacaagttctcaatcgaaattgaagacactgttttgtttataatgtgtgtgtacatatatagggagttgggaccacgtatttagtgtagaattttgacacgtgtaaaaaggtcccctactcactgttttggctggtatttccgagatgaccctacaaatcttattctattatcaatctcatcaaatgaaatgaaaaagttagaacatttacgctatgtttggttgaatggaaagaaaaataacgaaggatagaaaatagaggaaaaaaaataagcttctcttaagctgtttggtaagaaaggaggaaggaaaaaaaaagtacaattacaatttaatataaattatttagtaaagataaataagtaattttaattcattataaaaaatcttacttttagttgcaataaaatttgtgactaaaagtaaaaaaaattgtgactaattacaaattattatttctatgttgtgactaaaaggtcagtgacaaaaagtataatttgttgggactaaatgtatttttagtcacaa

SEQ ID NO: 301816 - DNA, 984 bp, Cannabis indica
ttttttcatgtgactgagatttatgtcatcaaaaaataattttttgtaccgatccatgaaaaatctctggtctaggagtatgtatatatgtcagaacatggggttttaaccatgcagacttaaagaactatgtcagtcataataaaaaaaatataaattaaaattaaaatatcctccttttcggtgaaaactttctcttaaacaattcttattataaaattaagaaccattgatctgaattatcttgtacttgagaaaatgcacaatataacaatatatatatgctatatacattgtacttttttgttgttgatcatgatgttttcatggactttatttgtatatctttagtttagattcttgtctctgttttttttggcattttagtttttttcttcttaccatatattttagcatgctttcacaaaaaatgttgacagatattccatgcacaggccttgtatatctgttttgttttttcttttcttgtgtgtgaatcaaatatatatatatccatatatttatgtatgcgatctgtaaataatttgtcggttcataaagtattatacacatacacacatacatatatatgcacacacacaatccaacccctcagattctattataaggctttcaatatatataatctttaagtgagtcgataattgattgcacataatcgatagtttggcatcttcaaggctgtttatttttagatagttaatgctatacacacactgtcatatacttaatttaaagtaaatgtatagctaggtaggttttcattgtaataagtagtttattaggtttacattttacttagttgggaattatttgaagagaaaaaacaaagacttttatttagatagatgtattaatattgcgactaactgattaattaatgacatgaaacaaatttcagtagctaaatgttcttctggaccacaaggtactgtacatatatatatacatacatgtatatat

SEQ ID NO: 301817 - DNA, 2617 bp, Cannabis indica
acgaactactctctctctctctctctctctctctctctctctctctcatgtacaactgccaattacttactattatgtagatttctaaggtgtttactttgttacatgatgttactctgccatttcttaatcttcacaagctactgtttggtaaaactttgaagccccactgtcccattgtattgctgtcatttttgtttttaaatcgaagcttactattgcattgctttctgttgtgaaatattttgggtatacttttagaagcttactattaatgcagcttcctaatggaacttctgttgtttacattactgagacaatacttatgatagtaaagaaaaattaatcttcctagtgccttgcaaagctgtgagtagatgtcattagtataaacacgcttgtttacatgactgtctgtacactttatgaaaatgtcatcatctttatcaagtacttttgcccatgggctattggtaggtgtaaccttctgattacctggtacagtttttggtattatctagagtctagacaaattgatgaacatgtgtgaccaatgcaggacggataacgcttctatctgagggttgtcgagggtcattatcggaggttggttgggaaagaaaaggctgcatagcttcttaaagttccgacttccaatctttttcaatcacctattataatatcatactttctctttatcagaaaattattaaaaagtacaacttgagagagaaggagcagtctcaacatcagacttatgctttgggaattaaagaggtgaactactatcgatatttgttaacttgaattacagagaaatccaacaaaaattaaataaatagaaaatagtttcaagtgtcagcattaaatacattatgtcctcacttactctatattaatggtatgtatgctgaggtagaaccggaactagcttgacacataacctttccaactgagaacagtcaaataaatatgaaaaaatctttaaaactccttaaagttgaagcccagagaaaggatataaatttcatgctttttaaccacactccattttctttgatttccaaccaaattacattaagtgctgctattgtatacgtagaattgtgtctaaaaccattgaaatatatagctattgataccgtaaggtttatacattttttttcctttcataaactgtgctacttttccctgtcaggtctgggaaattgacgagggcaaacataaacctggttttgtgcttcatacaatgggttggcctttggatcgaaagacatatggagggtcgtttatgtaccacatgaatgatagacaggttagaaagtttttatttttttgctttgtctaattcattcttgactattcccaaaaaaataaaaataaagtaaacatcatcgactttataggaataaaagaatagaacatttatttctactatattttatgttttttgtccgtgccacaagtctgactgtttttctttatgtgtgtgttttcttttttgatgtaaactcatgaacaagtctttttatttatctttcaggtttctattggtctagtagttgctttgaattatcacaacccatttttgaacccttatgaggagttccaggtaatctagattcctatattcatgaagtaaatgaggtgattttttacttactattgctaatattatacgtctcatgggtcttttacataattttatgagaaattattgggaaatgaaaggctaatttttaaattttgcctggaagaagttattggtgaatttcaaatattaattttggactaccacataagttattttcattgtttatttccgggccacagaaacttaagcatcatcctgcaatcaaaccaatgttggaaggtgggacagttctccaatatggagctcgcactttgaatgaaggtggttttcaggtatgttatctttatgcagaactttttaatttagatgcacaacaaggatttaccaccctagatttttctgcaagtggctgcatagtgtggtttacatagcatgcagattttaaacggaatgtaagattatgtcgtagtaactagtaagtagttttaaatggtagaagttcaaaggatataagaatatcattactaattgcctgaagtcagtcatgataacttatggcaatacagctacatgttgcttttttatctctctcttccttcttttttcctttttccgaatatgtactacataatcttttctggctgttttttctgtacaaatacaaatatgatgctagttaaatttcagtctatcccatatccagttttccctggaggagcaattattggatgttcagctggcttcttaaatgttcctaaaattaagggaacacatacagcaatgaaatcaggtaccatcacctaatgcgaaattcttaaggacttaatatatgtgtcaactggtttgaatcttttaagtggctgtaagttctttgtcttgcccatttggatatgatggcctgttgaatattttaagaaagatgctcgtaatctactgtcatagctcacttaggtggcgtttggttgggaggaatagaaacataggaatgggaatgggaataagaatggaatggaataaaattta

SEQ ID NO: 301818 - DNA, 2543 bp, Cannabis indica
gggtagaagccatttgaagtttgaacgttaaattattaaattaatcgatagatagtggcttggtgaggacatatgcaacttgatcaatggatggaacataacaaacaaacaaattcttcttaactatttaatctctgacaaattacaagtctattttgacatgcttcaatctagcatagaagaaatgtttagccgcaagaccagtagcactttaattatcaattatagcaggatagtgagctaatttaactcgaagttcactaagaagtgaagtaatccatttgagttcagtagttgtattagccaaagctcggaactcactttcagtgctagacctagccataacatgctatttcttacctgaccaggaaatgagattgccactcaaaaacacaacatagccacgtgtagaatacctatcactcacacaacttgctcaatctgcattagagtggcttttgaggatcatggcaacaactgtaataatgagtaatccatctaaaattatgcctttaatatctcaacaaccttataagcttcctaatgtatagtggttggagagttaataaattgatttagcttgttgataataaaggctacatctagtcgagctagggtgagatattgtagggctcccaaggtgaatctgtaaagtgttagatcatcaaaaggttcaccttcctgtagagaaaagttagtagaagcacttgattgattaggacagcaattggctccttccatgtgcagtttgaccaataaatctgcaatatacttagtttgagacaagtacataccagatgagtctctaaaaactttatactcccaaaaattaatgaacatcacccaagtttttgagagaaaaatgcttgtttagatcactaactagtttggagatgagtgtctcattggatcctattactaaaataccatcaacatagacaagaagaatggtcaatgttgatccgagcccatatacaaatagagaggagtctaattttgaagcttgaaaccccccactgaagcaagttggtcttaagcttctcattccaagtcctacgagcatgtttaagatcgtagatagcattttttaaacaacatgcatgattaggcttactgttaatcgcaaaaatagaagaagtaaaatgtttctataaatagcaaacagagtggtgaatagcacaagatattctatacaaacaagaaaggacaaaaagcggccccacctgctttatttttgaatcttctttagtcaaatcaaatgatctcttcatagcatccacacccgtagaccccgtacactcaccctacccacacccgctcgaacacgcccgcgcctgcttgccccgctcacgcgcgcccatgcccgtgcccgctcgcctgcacaatacacttacataacgggaacaaacttcagttcgtctgaggtacaaaatggaaggggtatttttagtgtaatttaggattccaggtatgtgaggtcacttaggactctcaagtccattgtaaaagggaggatttttgaatttcttgagagcaatgaaattataacacttggaaaaatttatgagatccttattccaactactctaaatattctgaactttgttttcttttattgtggagtcaagctatcttttaagtttattgtcaagcgttagttaaaaaagtctacttatatggttaacgagttcagactgttaataatttggcaccgtctgtgggaggtgacactcaaaagtgacgtcatttccttaccacaagttattgagaaaatgctgaggcattctcgtcgccatcaagaggtggaagtacagctcgatgaccatcaattgatcacttcgctgcctcccgcgcctatgtcagccgccgaaagaagaggtgctggagataagatgccaaagaatagggggacaccaatggtcaaagaccctcaacggcggaggagaatgggcgactcgatgacaacccgatgaacaacccacaagatggggtgactccctccctcacgcttgaggaggacaatggagcttgacggtcgaaggctccatctctaataaggaacccactgcactggagctgaaagatccaggaacctctcaccattgattggaaaaagagaagcaggcctactccgtgagttgcagctcacgaacctgactacacaatgaggaaatgaatgaactgaggcaaatacacctagtcgggtgaagagagctagaggctaggaaaagaagagcgaacaagctggaggacgaaggggtattgaggtattcgacaaataagaccctcaagtcctcgccgcatgaagctttaactcagagaaatcctaagcttcctcgcgacccaagaaacagagtccaaggcgatccatggagacttgagggagcagctttgccagaaggccatagccgagaagagctcgctaatagtagactctctttgaaatgagaagaaggcgaagccagccaccactgatctacgggagaagttaacttagaggagaaaagagttagacaaagtaatggaagaccttcgacggagaa

SEQ ID NO: 301819 - DNA, 1185 bp, Cannabis indica
tgtaaaaagttgaataaattgaatgatatacgaaatatttttttggaaataaataaataaatgtgtgtacagctgcgcgaagcgcggcattgttacctagtttactataaagaaaatagtattaacgtatatgttaagaattaagttataatatatatagctcactaatagtattttcagtggatagttagttaattgtagttttcataattaattataaactataaattatataacgtataataaaatcaagaaaagaaaaagagataataaatatatatttcaaaaacattacatcaaataaatacgttattatgtaccaaataaatacggtattagacaattattgcaacatgaaaatgttgctgggtgaattttgtgtatagggaaactaattaagttgctcatgtctaccaatgaagctattaacaaagctagtaccatgtggattgaggttatactctcttgtgctaatcatgcgatgttgcatgattggcctaatctttgtaatccttgtttgtattaatgaattacttttcaaaaaaaaagtaccaaataaataatacttaacaaacctctttcttataagtttttcaaaaaaaaaaaatcaaaatcaaaataaatacaaaaaacttaacaacaaaataaacacttattatttattagttagagtatcagaaaaaatgttaagattgagagagtaaattatcataaaaataaagatcatcgaatctaaaaaaactataactataaagagagaaaagctgaagtcaaattcacaaaagttataattataaaaaggaagagaaacaaaaaaaaactatgatagaattaccttatggatgaaattcgaattgtaagacatcgtgattgtcaattgtgcgaaacaaaactataatagagttacctataaataaagtttagatggtaagacctcgtagttgtcaattatgtgaagaggagaggagaaaataaaataaaatattttatcttatatatatatataaaaaaattatatataaaatattttaaattatatatataaaaaattaagtaataaagcgtgcttcgtgtttggttatattttatttaatgataataagtgataaaagtatatcaaattttaaattttaatatttatatatatatatatatacctagttttaataatataagtaacttttc

SEQ ID NO: 301820 - DNA, 616 bp, Cannabis indica
acactccttaagccatcattttaagaaagaaaaggactacagttccaattcaattcaaaaatatatactaacaattagtatatatatttataagctagttccaactcaaatctacttgaaagttatcgcattttgtattttatacatgtgtgtataagcatctaaagactaatgcagcttagcttttacatgggtacccagaagaaattaatgaaattgattcgcctcaacccaactaagaattatcaaattaaattaaccagtaactaaaatctgctaaagcgaaaaatgaaaaaaataaaataaaataattacctgacaccagcaccaataacagcaactctcttgacagaacctggaacaattccatttccaataataaatcataaccattctaaattcttgtaaagaagatcgtttgacacaaattgataaaaaagcatgccattttgaagaacatataattgagtagcccaaaatttgtgaaaaatttagcaatatatataatttgacatcaaaatgcaaagagttttcacatgaattcgaactttgtgttggtgatgatctcaattatgaacagagagagagagagagagagagagagagagtagagtac

SEQ ID NO: 301821 - DNA, 2695 bp, Cannabis indica
cacatatatagttatgaatacatatatatataaatatataaattattgaataatttatttaattaatttatatttataattatgtattttttaaaaataattaatttaagatagatatttttatagaaaatttattaaaataatagtaaaatattaatttataaatttatgatttaataaaatattaaaaaattaggagtattaaagaaaaaaaaaataaatttagagagattttgtaccgccacgtcacccctagtacttctcctttaataaatttcagaattcaagtagattagaagatgctatatattgctcccattatttataaatagagccatttgttattatttttttcattctctctcttaaacttaaagtaacgtaaagcaaactaggtagtctctcctatatatcccatatatccaattatcgagtatggatgtgtttgccaaaaatcatcgatctaggcaatctatagattgggctgggatacccaaacccaatgatcatgttctggagttaattctggagaagattgagtcattaattgattatttgcaatttggtgctgtttgtactcaatggctggctttgtgtagcgaaatccaatcaacccaaacttagaaaagcattacacacccaataccgatatcaccaagttccaatgcttttgactcctgatcatgaaaatactacatggaacatttttagtgttaccaaggataaatatttagagtcaaagattgtagtacgtaccattcgataaacggttttgtgggtcttcaaaaggttgggtgataaccgtaaataaggattggacagtaacactttacaaaccattctcaatgatttccagtcttattatttcccaatgagtttgaagaacgtgttgataatggtggtgaagatgatcccttccgtatagttattgagccagaaaatgtccactgcttcaacgttttcaaagctctactcactaatgatccactagaaaatccgaacgacgagtgcataatgaccaaacatggacaaaattagagcctccaaaatattttaattcctcagatatatattttgtttcataacgatttgttttatgccctaacaccaaattgtgaattgagatcattcaatctcagaggctcttgcatcaactcaacaataagacaacttgctcatgaaattccaagtttatatagagcagaattatttgaattttcatttattaagagatatttggtagagttatgcggacatatcgtaatggttgaaaggtatcttcattacgatgaagtcaaccttaaaggtcgaacaactagttttgttagaatttggaggtatgtttttgagtttgacaagtggaatgaactgaaaagtctaggcgatatgacattatttctgggtgataattcttccatatctattttggcttctaaatctaatgggattcgaccaaattctatatatttcactcatgatcttgatgccgtcgttgctttatcattccataatattatttcagatatgggtatctatgatcttcaaactaacacatttaaattgcatttgaatatagattcaactctactcaacaatgaacaacagaccaccaatttgggttgtacccacattttaatattttttttagtctgctaatacaatctataatgaattttactttttatttaatttattcaaatcatttttttcttttttataataataatgttgcgtgcatcatggaattgaataattttgtacatttaatttttactcatataattagccaattagcctctctctctataaacactctaatattttatcatcatggccgtcatattattattttaggttgcataatatattatcatcatagctatcatatttttatttaatttacactaagtggctagcttaaactttatcattatcaataaagtactacataaaaatattaagagatatttccgacctatatagtttatattttcagtttcatacacttatatatactgcatgtttcatacaatgggcagggcgtactttcatttaaattaaccacgtttggcttgccagtctagggagtggttgctgaaccatacccctggagtcattactcaccctagggggtgatcacttaaacatacacatgaggaatagttactcactctaggggtggtcgcttaaacatacctttggaggtagttactcactctaagaggtgatcgcttaaacatacacctggaggttagttattcatcctacgggggattgcttaaacataccccgggagtatttactcaccttaggggtgattgcttaaacatacccgtagagggtaattattcaatctcattcccatacatagaacatacctcatgaggataataactttacatattccttatcaatttagtcttgaataatctcgtgtcacgtgttattatactcactacgtcatccttattaaaatttaattcatatcttcttgttatttttataataataaattaattcgtttagttgtcttataaatgtgagaaaagtttttaaaaccattattcaaaatattttaattttttaattaatttaattttaaaatataaaccgttaatcataaagttggtttatatatattttttaggtgagttaccccatatactattttgttaactttttttttttaaaaaaa

SEQ ID NO: 301822 - DNA, 1575 bp, Cannabis indica
taattttttagtcaaatttttctcatgatcatatacgttatagttatttaagacatcctgtaaaattttaagaaatttagaaaagtttaatacgccgaaaaatacgttcaaacagcgtgttgcacgcgtgacaattttattttatacccgtgtaaaatagactgtttgagcattgttttcgattatgtaagttattctgaatttctcaaaattttgtaggttatctcaaataattataacgtacatgaatatgaaaaaaatttagactaaaaaattcttctggatgctgaaacaagtcaagagtgcatcagtacatcccttttaaggggtacattgtagaatcacccactaagatattatgaaaaattgaaagcagaaaaaattaaaataaattcatacgtaattattttaaattttttaaaattttataaaatatcttaaattgttatattgtacgtgaatataaaaaagattaaattaatttttttttaaatgctgaaataaataaaaaaaaatgtatcagtatatcccttaaccaataatattaacctacataattattaaaacaaaatttgactatattttttttataaatatcaaaatagataaaattaaaagaataattgaagtaaaatttgagtgtgggccgtagtgaatggtggtgatgcaatctcatatatggcagacaccctactaaccaccatcgacggtgctcctttaatggacttcatttcccattcatgcttggtgggccccacaatcacacaacttcatgcaacactttcgatttagcccacgtggccttctcccattagctgaccgaaacagacccaaaagtagaagatgggataggattgggacccaattaacaacaccacctccatgcctgaaggaaagctaaggatgacgccacgtgtcatccagctaacgtcatgatgattgggaaagtgtgattcagatccgatgatgattatgtcactcttgtggaagaaaatgtgggacccacacaaatgtccacgtcatctgacatatctttttattactgcacgcaccaccaccactaccacccgtagttaaatcttaccgttccacgtcagcatcaggtgacgtcactctcatttactgccacgtcactctctctctcttccccatgtgatctagttcaccggcaaatatccagtttttccgaactacctgatcgcgtgatcatcccaacattaatctacgcgcccttccgagctcgtgtcttacactttccaataattcaaataattatttattttttaactttctttcctcaattatttcttcttgttatcttttttaagtgtaattaattgagtaagtgtaattttattctataggacgttgttattattaataattatctgtcaattttaaaaattattctaaataatttatagtgtaaaaaataaaatttacatattttagggtaaatactattttggactctgtgttttgcaaaagttatatattagaccctgtgtattgttaaatgatgaaatagaccctatattctctaaaatagtaaaaataggaccatgagcttaattt

SEQ ID NO: 301823 - DNA, 1276 bp, Cannabis indica
ttcaatccaatccaatccgcgcaagttcggatatcctcattttgcgaattgaattagattagatcgtgcggattggatccttattgaacacccctactaaccctttaccacgtttatttcttctgtgccatttttcgctcactgtgagggaggataattaaaagatgagaccattctacacttaagcaacttaaaaggcagttttactttctcatggatcatttctgtcaatttgagacataaggttcagaaattggatctaataactaccatttcatgctcactacaagaaacttatgaagcaacgctttgtcatttggactttaacttaaattaattagcgtgaaatatttgcctctttaatttgtctccatagcgattgtgcttataggagggcaaaaggacaaataagaaaatcattacacaaaattttatgatgtttaacaaataagttgtgacgatatgcaaagactaaaatgaaatagaaagaattaattgaatattaaatgtcaatgtgaaaattgaaaggaaaaaaaaatagcactctaaactatagcagtaaagaaattaagtatttcctcttttctttcaatgctgcagccaaaatttcaacaggaaaaaattctgttaggttctccagcctgtgaaaagcaatgttaaaagaagagaacctcgtatgtactgtacaatcacgaccagtgcttgattttatcttcttcgataatctgcatgaaggaagctctcaaatggtgttcctgtgagagccttttggatgtcatcccaattttcaaccagattagacaaagaacctttgtgaatcttcacttggcggctctttagttccattcgcggaacctttaaaaaatcttgaacatctgtaagtttctgcacacatgcaaaaataatataagaaagaacaacaaaaatcatgatcaaactatagtgatactcagtattctgacataacagatcaagctcagtcatgtatattgagtaaagattgcttacagtgcggtttttgactacatcctcgtagtaaacaaccatatgcctggtactcttgaagtactccaaagctttggttgttgtctcttctacttgtttcaggttgggtatcagcaatgttgcattaactgttggcttgtacttcgccagtatgtctgcctgaaaaccattggaaagatgagttaaaaatcttggaagtgtgtgtgtatgtgtgtgtgggtgagagagagagagagagagagagagagagagagagagagagaggaggacg

SEQ ID NO: 301824 - DNA, 1342 bp, Cannabis indica
tttttttttaaatttttttaagtgcttaaaatagcaatacacaactaatttagtattatatcagagattgttaaaatttttgggataagatgaatggtattctatctcaaaaccaattggcaatgggaggagtagcccattcatcttatatatcacaatttatttccacacattagcaatatgggaccaactctaatactccctcctcacgtttgggcctgaaaagtgtgggtataacgaacgacctttaaaagaccacagggtcgaacgtgacattgaaaagaatcccataaggccaaatatcgagaaatttatgggtgtatcggtcgggaaatttgtggatattttaaagcaggttaaagatcccaatgctgaaaattggcacacattggccaaaaggtcccaaatagaggttaaaagggagacatcagaagtatctttttggaccggtggcactttcgctcacaacggatcacaaacgactttttggaccggtgacactttgaacttacaacggatcacaagtagctttgataccatttagaatccattaaaggagaaaataaagaaaagacaatgctaatctgatcgttagtcttcctagtgagaatgctacgttggatgatgctcttataaggtactactcaaagaatgggaactacactgttagaagtggatacgaagtggccctgaaccaaatcgaaaaaattgagtgcttggatactatgaaaaccaaggctttgtggtcttctatttgaaagttgagagttccacctaaagtcaaatactttttttttattgaaaattatttcttcgtggctttccactaacaatgtatttttttttcaagaaaaatcactattggtagctgttgcttcaggtgtaataaggaagctcctcttgatgcatgccatttggaggtgcccttcaagtatatacactactaaaaaaagagaatttctcaaattttaaaacggttggatatagtattattgtcgatctttatgattgatgtctattcgaccatcgcaaaattgagtggaataagcattggtagaaaatcgtcagatatgcctatatcctaattgtttaaaactgttggcaataattgatactataattgatagttttaaacaatcacaaaggaattgtcgtctgtctaaaatcttcggctatagtgagccattattgctggcagttttaaatcgtcataaaaattgaagttttgaacaaacaaaagaacaaatgagtaattcaaaaagtctccctcgtttttttgctctagcagcttgaagctggtgccatggcaaaaactaggtcaaaaatgttgggttttatgccc

SEQ ID NO: 301825 - DNA, 1418 bp, Cannabis indica
gttattttattgcatataaattagtgtatcaactgtataaatgcaatccattaaacatcacaaaataaagtccaaacacaaacaaaatctcataaaatactttttggaagggtatatataataaatttacttttgtattcattccttgataaaatctcaacattttattttattgatggaagattttagagttttaaactttttaactaatagtttttttttttgagaaaaagaccattatattaattgaaatgaattacataacaatcataagtggaggtgaaaatttcttcaaccaaatacaatcagtatccaccgtaagagcaaacgtagccaaaacatgggcataattattagtagatctagacacatgagtgatctgtgctcgtggaaaaatgatacttaaaagtttacatctttcagaatagtatgaaatgtagaattacaattcatagaagctttaagtccttgaaccaccttcatcgagtctgtttcgatgtagtatgctgaaagattacgagacatgagccattgaagtgcgagagcaaggccaagagcttccatttcctctggtttgtaacaacctttgattggtttagataaagctacattgacagagccatgtgaatccctcaaaaaagcaccaatgcctacaatcccattcattttatccacggctgcatcagtgttgagtttaaacttctctggtggaggagcaatccaaggaggcttcgctggaatattttccgtttctgcaggtggatgtataaaagtatcgaaagatggctgaggttttataattggcatcctagcagcctgatatttggccaaataatcagcagcaaattgaacaattgcaggtggagtttttgctggtttatcatgatattcaacattcctttcataccatatacttcaacaaagaaccaggaacaattcaagctctgcagttgaggtgttggttgttactaatagaagaaactcttcacatgttgtcgttgcagcaagcttgaaatttagggacagctgtgtgagatgccaaacttcattggctcgcgtgcagaaaaaaagagcatggttgattgtttcattatgtttcttgcacaatgtacaaattggggcttccaatatgtcttcggtgtagttctgcagcaacaggtaatgcattatggaaggctttccaaacaaatatgcaaagcttagaagggatgtttaacttccaaaaaactgtccaccaattctcaagggagttgctactggttgtatcttgtttttcaaccagtcatgtagcaaattggtaccccgatttgacagtgtaatttccagaggtagtattgttccatatcatgacatctgctgtgggaaaaatatttaaaggaatggtgagtattctactaatgtctgttggaaattatttt

SEQ ID NO: 301826 - DNA, 1440 bp, Cannabis indica
tacaaagctttcatatttgcagtatcatctatgaatgagccacaaacatatcaagaagccattcaaattgaagaatggcaaaaagcaatgcaatatgagctaagggcactcatcggtaacaaaacatggagtgttgtgccattacctccaaacaagcatgccattgggtatataaaatcaagtataataatgatggaagtgtggaaaaacttaaagccagacttgttgcacaaggatacacgcaacaagaagggcttgatttctttgataccttttctccagtagccaaaatggttacacttaaactattacttgctatttccactatcaagcattggcacaccttacaactagatattgacaatgcatttttgaatggtgacctcaatgaagaggtctatatgaccttgcctaaaggactaacactcccttcttctcttaatgcaaaaacaaaccttgtctgcaaattacacaggtcaatttacgatctcaaacagtcctcttgacaatagtacaagaagctgtcaaatgcattactctaagaaggtttcaggcaatcacaagcagattacacactgttcacaaggggcaccaaagacacattcatagctctacttgattatgtagacgacaccatcatcacaggacccaatctctctattctccatcaacttcaaaacacactacaccaaaaattcagcttaaggcccttgcccttaagtactttctcagatttgaaattgcccgtgccaaggaaggtttatttctctctcaaaggaattatacccttctactccttaaagacacaggctatgtaggtagcaagcctagcaaaactcctatggatccaaagcttaaacttgacaacgaacttggtgaagcacttgacaaccgctcgcactatcgacaactcattgggaagcttccgtatctcaccctgtctagacctgacatcaccgttgctgtcaactgtctcagccagtttatggccaatccatagacaactcatctccaagcagttcatcatctactacactacctcaaagaaaatcctggtcaagggctcttctattcacctacttcagcctttacactacgcggtttttctgactttgattgggcatcttgccctgttactcgatgttcaacaacagggtattgtatcttcctcggagacagtctcatttcctggagagcaaagaagcagtcaataatatccaaaagctctgcagaagtcgagtatagagccttggatgcaacaacaagtaaaatgacatggctgcaatatcttctccatgacttccagataccacagccacatcctgcctttatttaatgtgacaactagtctgtaattcacattccaaacaagtcgactttccacaaaaggacaaaacacatagaattggactgccattttgttcgagacaagatcaacac

SEQ ID NO: 301827 - DNA, 1737 bp, Cannabis indica
gcccaatacaaccttttttttttctttcttttctttcttttcaactcctagtctcaaacaagagaacaattcaattacagtgccttattcgagacagccaatctccacttcgccccagactaactctaccttgtacacaaaccaaattatgtacactactgttctcttagcagccaaagtagatttgaccaatagcaacacacaaaaccagtacaacagctgtacaactaatctgaattagttttaatccttttacacctcacataagtgactcttattggaagtcatcagagtctagtttagtggttgttgatgatgatataatggagtggattgtcacaaattgtttcagacaccagatagtgttatattatcacgcaccattggaaaattaacaggcttctgggtacttctggtcctggctctaacttgctcagcataaatatctcttgaaagattcttttggtaaagaaagcaaccacacctgcagtgattgttttatgtatatacaccaaataatctctatattggtagttcttgcatttctacgcgttattattattattatttgatttttaaactaggcgtcttggctatccttacaatattttgggactaggattaggatactacaacaattgctaggtaggaacccaagagagatttgaatccaagacattatggaagcaaactacatacttgaccatttgagctatccctattgggtactttgatttttgtttcttttaaaatgaaaaagaaatgtttcatgtttattgtgtgtcttgactatttaagttatgctgtttctttttattgctggttcctacgttagcacttcaatcatgaatctttttttctttaacaagcaaattggtcaacagacttcatctggctgcatggtctggaaaaaccgatgttgtgagttatctttgcaagcatgggggagatattggtgctagtgccatggatgatatgggcgcaatacactttgctgcccagaagggacatcttgaagttgttcggacccttctttcatctggtgcttccatcaaagctatcactcggaagggcttggctcctctacactatgctgtccaagggtctcacctagaacttgtcaaatatttggtaaagaaaggtgcaaatctcagtttgaagacaaaagcagggaagacccctcttgatttagcaagcaatgatgaaattcgctcatatttggaggaatgtaaaacctcatcttttaaacctgatcatagagatgaactgaaagctgaggaatctaatcagcagtcatttgaaaagaaagaagataattcttgtagtgaagctgctgaatctgcacatgttgaaatagaggatcaaggtttgaagagaaagagtgatgaagacgactctaaggaagccacagtagaaccgaaaaagaaaaaagttgtgcttagtcatctgttaagtgctgatgacacacaagatgatgaagaaaatgagtagggtggatgaccttttcctagcatctatcgggtataggcaggattttgtcattgtttaatgttttttcttttcttactgtttaacttgttacattacattaatatctccttatccttttctaacatccctggcaatgcttgttccaatgattcttgcatcatcatgcacagtgacgaagccagaaatttagttgagtgagggcttgaataaatattaagtcaaaaactaataaaaataatgataaat

SEQ ID NO: 301828 - DNA, 5748 bp, Cannabis indica
ttactgatatggataggtgttatgatgttttataatctgttttgatatgactatgtttcatgttttgattatctattttgctggcgtgctgttaatttgaacatttttatatagtttggtttgctcttatggataattgtcttgaatattgctcttgacagttgtggttcaaaatttatcaaatatgattgtgcaggaaattttactttgaatatttgttctctaatataactaatttaaaaaaaaaaactggaatcgataattgtggaatttgattatttaagaaaatcgattaaccttaacattttggctattaccaattctggaatgcctttttctctgatgcccaatcattcgctcggactgcttgttagatcatagtttgctttcgtttaaaattttcaagaattttttatagagttagtgagtttgttttgcactttttacaaattacactttttttttccataatcagttagtactgtgtagtaaccaaccatttgaattgcaggtgctgttgattgtcgagatggcaatgaggaaagccacaaggctcgcccagtcggctttgttaaccatcaatgcaagaaactctcttttacagtctcgtacaatagtcacttgtgcccgcccactctgtggttcaatcacttctcttcatcggtcttgtgttgctgatttattcttcgccaaccagaatgacatagtttcttgccagctatcctcaatcaactttactcgcaagtttcactcttctgctccgtctttctattctgcaactacttcacaggttttaaaatttagtatatttatgtaacatggggttagagtaaaattgtgtttttattgaatcttttattagaaatggtagaaagttgattaaactttttgtggtattgaaatttgtccagattagtcaaaatgagttcactgaaatggcttgggaaggcattgtgggtgcagttgatgctgcaagagtcagcaagcaacaggtgattgagacagagcacttaatgaaagcacttttggagcaaaaagatggtttggctaggagaattctcacaaaggctggacttgataacacttcggttcttcaagctacagatgattttatatctaaacaacctaaggtatagtgggttttttcgaccatttttgtttgttttgtagtgtaggaactttggttatgtatcttgtttgtctttgtcaggtaacgggggatactagtggccccattataggctcaaatctaggctctctcttggacaatgctcggaagtgtaagaaagaaatgggggatgattttgtttcagtggagcatcttttgttggtttttcactctgataagagatttgggcaacaattatttaagacactacaacttagtgaaaaggatttaaaagatgctattaaagctgttcgtggaagccagcgggttactgatcaaagtatgtaattaccttttgtacgtgtaatgtttttgaattttgacattttactcagtaagattgattgaattgttacattttgaacttttgtttatgtttgtttcttaatgcgtctttttgacacttgtagaccccgaaggaaaatatgaggcactagaaaaaatatggaagtgatttgactgagcttgctaggcgtggaaagcttgatcctgttataggccgagatgatgaaataaggaggtgtatacaaattttatctaggagaacaaaaaataatacctgtaattattggggagcctggtgtgggaaagactgcaattgctgaagggtatgctattaatttgacctaaatatcaaaatttccactttcgtacataaaatcacttaatcctcctatcctttattttagattagctcaacggatagtgcgtggagatgttccagaaccattgctaaatcgaaaggtaccaaatagtttaacataaattaatatatagttaattttgattgttctgttatcatcttaataattgaagtcatatttctatctatgcttttgctttcttttatacattttcagctttttacatttccgagactatttgattagtatgtatagttattatagttgcttgttcatttgacattgttttaaagctttacttatgtttgtttaagacttattttggagtatggataagctgtgtgtactatatatctttagtttactttgctcaaattcgtattcaaggattttgaattaaatcttgcactatgcagttaatctctctagatatgggttcattgcttgctggtgccaagtttcgaggggattttgaggaaaggttgaaagctgttcttaaggaagttacttcttccaatggccaaattatattgttcatcgatgagattcatactgttgttggtgcaggtgcgtgcctatattaggtgaaatgttgggaactttcaatcggtttttatttattcatgatgctttataatgtgttgaatgtgtcacaccgtcattacaagttatatatcactgggaaattctaaagggcaacctcctaggaaggggtgcattggtgcatcacctcttgtttttggtaggtgaatagtaataattccaatttgttataacggcggtgtataatttagttatttagaatatactacatgtttagttatttagaatgttctacatatatttttttttaaatatttagaatatttacattgctgaaaacatgattcaaatactttgttgcatgagtttttattattttatgctcgtgtgaaacatgttgtttcagtaatgtaaattatttagaattttccaaaaattcgtatgattgttaaataattacaatatctactatcatataaaaacaatcgggttgttggccaattaattattttgaagtcaaaaaaacgatgggtgcaccgggtgcagccattttgggtgcaacgttgaagccttcatatatcattatattgatataaaatgtttgttgacaatatttaggggctactggtggtgcaatggacgctgggaacttgttaaaaccaatgcttggacgaggtgagcttcgatgtattggagcaactactttgaacgagtacaggaagtacattgagaaggatcccgcactggaacgtaggtttcaacaagtttattgtgatcaaccatctgttgaagacacaatatctattcttcgtggattgcgtgaacgctatgagctgcatcatggtgttaaaatttcagacagtgcccttgtttcggctgctgtgcttgcagatagatacataactgaacgatttttgccggataaaggtaatttctaacttgggctattcaatgatatgatctttaagaaaaactttcaacttttcatgaaaattaaatttatatgttggatatctgaatatgattttcatttttccatttcgatcggtcatctctattaaagaattttagagttttacatctctttgcaacccaattgttccttttcagccattgaccttgttgatgaagctgctgcaaagctaaaaatggagattacttccaaacctacagagctggatgagatagatagagctgtgttaaaattggagatggagaagttatctcttaaaaatgacacagataaagcatccaaagaaagattaagtaagttggaaaatgatctagcattgcttaaacaaaatcagaaagagttaagtgaacaatgggatcgtgagaaggtgcttatgactcgaataagatcaattaaagaagaggtaaaattagatgttgaagtaaatttaccttttggttactcttaggatgttttatttgattttgaacttattgtgagttgttttgtaggttgatagagttaatttagagatggaggctgctgagcgtgaatatgacttaagtcgtgctgctgagctcaaatatggaacacttatttctcttcagcgccaattagaagaggctgagaggaacctttctgaatttcagatgtcagggcaatctttgcttcgagaagaggtcactgatcttgacattgctgaaattgttagtaaatggaccggtatacccttgtcaaaccttcaacaatcagaaagagaaaagctagtttcgttagaagaggttctccacaagagagtcattggacaagacatggcagtgaaatcagtggctgatgcaatccgacgatcaagggcggggttgtctgaccctaatcgaccaattgctagcttcatgttcatgggaccaacaggtgttggaaaaacagagcttgcaaagaccttagctggttacctcttcaacacagaaaatgctcttgtaagaatcgatatgagtgaatacatggaaaagcatgcagtttcacgcttggttggggcacctccaggctatgtgggctacgaagaaggtgggcagcttacagaagtggttcgacgaagaccatattcagtggtactctttgacgaaatagagaaagctcaccatgacgtgttcaacattttgctacaattgttggatgacggaagaataactgattctcagggaagaactgtgagcttcacaaattctgttgttataatgacttctaatataggttcccatttcatacttgatacactacgtaacactcaagatagcaaagaggcagtatatgacataatgaagaaacaggtcgttgagttagctagacaaacattccgtccagaattcatgaatcgaattgatgagtacattgtcttccagcctttggattccaaagaaattagcaaaatcgtggagatacaggtaaaattgttggtttctttttccttattcttttctgtcagtggcaaatattttaactcgtgtgttgttggtgcgtgtatcagataaaccggttgaaggagaggttgaaacagaggaaaatcgagcttcactacacagatgaagctgttgagcttctgggaacgcttggatttgatcccaacttcggagcgaggccagtaaagcgagtgattcagcagctggtggaaaatgaaattgcaatgggagttctaagaggtgattttaaagaagacgacactgtcattgttgatgtcgatacatcttcatcagccaaaagcgttcctccccaaagtagattgcgcatcaagaaattggagaacacttctatggatgttttggttgccaatgactgactgttttaagatatggtgttgtaaataactgaaaacagcaaagaatgattttcttgtaatgttttttattttccccttcggttaatctgtatgtcattttgctatacgtgttgaaacaaaaacatttttacctaagatagattggggtcggtcttgtcctactaagatataggagttaggacatagattgtgaagcgggtccgatcataccggctctgttttatccggattcaggagcttctgtatttaataaatatataaaaaattaatgactaattaagcaactccaatcgttccaaacatgtgtttgttcaactaattgataccaccaatcagcccaatgatgtatcagtcttgttctagcactcatcttttctggcactcatctttctttctgtcaaatttttatttcagcaaaaaagtatcacaacacctttaaaattacgaagatatcatgaagtatcaaaccttgttctgttaaggactttatatcttcatatatgaacatatacatatacgcatataccagcattatttcagtacaagctatcaaagacaatcaaataatgcactccacttttggttttcttatccatgactgtcaaat

SEQ ID NO: 301829 - DNA, 5303 bp, Cannabis indica
aaatagataaagatatactagaacgatcgatccttctaatttgcacttaaaatataaccctaaaatgataataataagaacatttccaatgaaatactataaaaatgatgtaaatgtattttttaatgcatgttcataaaattaaactctaatgatggtgtataatgtggtctaaatttaacacttgctaaaaattgtgccaaatttagcacaaaatataatgttaacggtaaaaactcgtcaactaaattttatttaaaaaatcaaatgcaaagagctcagatgaaaaatttaaaaaaaaataaaaacacttggttatcaatggagtaaaatattctcatgttgaatattagagctctcttacaagtaattattttcaaaccccttctctattgaaagagaagagtacttataaggagctctaatggctccaaaatacaagtgatctcaaaagttagaggacaaaatttattttgtaccatgaaaaccagtgcatcagatgggtagtggggaggtggtggtcaagtgccagttagtactccgagtgagacaaataatatctccactacttgtatatgtcgtacaaccacttcttccttagagacgtgcatgctttaacgattttatcttttgttgtactttctcttttcatccccctctttatagtttgcactcatgatgcggatataacacttaaaaaatttaactaaatgtttggtccatgctgagtctccttgtctaggtgtggagcatgggggagtgagtgaagagggtgatggggtgagagaataaggagatagagagttagaacatgagagaggggagcggggagtagggagctcccgcttgcgtacgacgaaggagggagcaaggagcagagagctgtgtgcacgttgggagtagctggtgcggggagttgctggggtgcaaggatcttgctggcgcggggagttggctggcacattgggagcatgcccggttgctcctcgtggaggatattctcgtgaaaggcagacccatatttgattttctaacaccagtgtgttttaagatttttctcgaaatctccaaaaattacacataacaagtgtcaaactccttaccaaaatgtattataagtacaactccttaataagtgtcttataagtatttaaagtttgaaatttacttaatctcaatcccagtacaactccttaaccaaaaacaaatctcagtattctaataccaaagacccaattaggagtttgttactctgattgttgtggttgctaggttcactcaatgactcaaacggttggctagcacaaatggatttaacttagtatagcaaaacactaatctgtttttttttcctccctatatatttatattctttccctatatttctgatgaattcaaatcttacagccaaagctgctgctaggacaggcaatcagatgtgaatctgtgaaaacaaaaatagagtgaaagaaatgctaacaattcatagaacaacaaaagatatattcattcgtagtagtaaattacactttcaacaacagaaaagaaaaaagaccaaggtactatgcaacacaaaattaaaaaaatgaaggataaaaagacgggcgattaaacgctaaaatttcaaaacaaactaatcaaaatataaacactagacatttttcaacaccgcactttctttttatttttgttcactcaatcatttcttcatcgtcaataatctcctctatcttcatcttcttcacggcctgagcagcatcatcactctttactccattgggcagttgaatgagaacatctgacttttgaccggtggcagcattgaccaaacctccattcttctcaactcggtaagccaactctgatccacttggccctgcatctataaacacagttgagttctcatcaatttcttccctcacaagcattcttgatagctctgtcaccaccttcttctcaagccatctcctaattggtctagcaccatatacctgtaaaagccaataaaacatgtagagttaagtatctttccattgaaactcaaatcaaagtacgaactcttttaagttacaaccaaagaggagtcgtttgtaacattctaaaatcaaatgtggggtatgtacttactgggtcataactctctgccaagacatagtccaatgctgcatcagtcacacccaaggcaattcctttctcagctagtctgccagctacatccttcatttgtagcctggcaaccttccttaactgttcgtgagataggggatcaaacacaacaacctcgtcaagcctattcagcagctctggacggaaatgcttcctcacctgtcatataccagcaatggatttgttagtccagcaagaaacacactacatactgtatttacgtagaaaaagattgtttatcactcccttgtaatgcatcccagaaatctcccaaacccactaaacaaacactgagttcagagattagagcatgaaatatatacctctgtcatgactcggtctcgggcaatttgcattgtgcatttacccatcaacccggaaaggagatgctcagctcccaggtttgaggtcataataatgacggtgttcctaaagtccacagtacggccttggccgtctgttaatcttccatcgtcgagaacttgaagaagggtgttgaatacagacacgtgtgctttctctacttcatcaaacaacacaacactgtaaggcctcctcctcacagcctcagtgagctgcccaccttcttcatgcccaatatacctgaaaaaaccattaagaaggaagtcagtttaattttcttaatccaataaataatggtatgctccagcaccaaaagttttcactttaagaaaattttcttaagcattaaaaggaaaaatgttcaaaggggaatgataaacttacccaggtggagcaccaatcaagcgagaaacagagtgttgctccatatactcagacatgtctatcctgaccagtaagttttcatcatcaaaaagttgctcagcaagagccttagcaagctcagttttaccaacaccagttggacccaagaagaggaacgatcctgtcggctgttgagggcgtccgaggccagccctggaccgcagcacagcctctgcaacagcagcaactgcttggtcttgtcccactactctcttgtgcagcctatcagcgagtccaatcaacctatccttgtcatcttggccgagccttgtgactgggattcctgtccaacggctcacaacctccgcaatttgatcgggtccaacagtttctgttagcattagattttcatcagttgtcccctcaagctgagctatggcagattccacctcttgaattgccccatatctcaaatcagcagctctggccaaatcatatcttctttcagcctcttgtaaagctatgagaagctcctcacgtttctgcttgagacgcctaatctcatcaatcctttctttttcctttctgtacttcatcatcaacggttgaagcttgtctcttaagtcgtcgagctctttccgcaccttaaaattaaaacaaacaaatgttaatacgaaaacgaattcatctaattggaactttacactaaacttcgataaaaccaattactcacttcaactagacgagctttgctagccttgtctttctctttctcgagcgcatggagctcaacttcaagctgcattctctttcgttcaaggttatctatttcttcaggctgactgtcaagttggactctgacattggcacaagcctcatcaacaagatcaatggccttgtcgggaagatggcggcctaaacaaccaaaacaaaaacataaatcaataacagaacttcccaatcaaaatcacaaccaataaccaagattcaaaaatcaaagtactattttcatcgatgtaagttaagaacatacctgtgatatatctacttgataactgagctgcaattacaagagccctatcctgaatcctaacaccatgatggccttcgtatctttctttcaaacctcgaagaatgctaattgtatctggaacactaggctccgccacataaacctgttggaaccttctttcaaaggcagcatctttctcaacatactttctgtactcctcaagagtagttgccccaatgcaccgaagttgacctctagctaacattggtttaaaaagattagctgcatccatggacccttctgttctgccggcaccaagaacaaggtggatctcatcaatgaaaaggataaccttcccttcagcctcttcaacttctttcaagacagatttaagcctttcctcgaactctcctctatacttggccccagcaaccaaagctcccatatccaatgctatgagcctcacatcagcaagattacttggcacatcgcctctcactattctctgcgctaatccttcaaccacggcagttttaccaactccgggctctccaataagaactgggttgtttttagtcctcctcgaaagaatccgaactactctccggatttcctcgtctcgtccaatgacaggatcaagctttccagcctgctccacaaggtctcttccataagtcttcagtgcctggaaattagtatcaccagaggcactttctactttcttcccatctttcccgcggagcttttcaacctcggatttcactctggcagtggcaacaccagcttctttaagcaaatcgccgatttgggaatcctccaaaaggcctagaatcaactgatcgacggctaaatgagtgtccccgcgtgatttctgggccgcctgtgctctcctgattaccttgattagagatgtactagctggtatatcatctggggcaggactctgagatgggagtttcttcaatgcctgactgaagactctctccacagactttggagcatcttcactgccactggcattggcaacagcttggctaaaaatgccacttggatcattgatcaacgacacagcaagatggagtggtgtgaactgggcatgactcccactcattgccagttcatgagctgcagctataacctcattggtcttgtgagtgaacttgtctggattcatacttgcttcgtttactggttagtacctaaaaatgaaaaaggccaactataagcaaagtctcagccaacacttgcaaaactacacaatatccccaattaaaaaacaccgttccattcacagaatcagcaaatgatgaaagacatcattcctttcacagaattcggatatttaatcaaaattattatccattaaaagaaaggcttttttatatatatataaataaat

SEQ ID NO: 301830 - DNA, 4352 bp, Cannabis indica
aaatatttttctctcatcaatttatttgattattcgttggatccaatcattttctcctaagtccttagaatcgaaagcgacgaagctctactcattttcttcttcttcttctgattttctcacatctccaaattacaatgatttcccccaaacaacgaccaaagtctcagtcaattttttctagtcggtggtatatatattttgtattatggtatatatattttctaataagtgtatataatatattgaatttgaatttgataataaatgtatatcttaccatagctggttgcattagatgttaataagtgtatatatatataaaaattgattctctttatattgtaatttttatacttattttcctcaaatgtttattgtggagattcctagattagcgtttgaaaagtttgaccaacataacatatatattatatatttttttaaaattataactgggttttgagtaattgtgtgttgtatattcttacttattttgttatggaaccaaatctatttaatttatgtctcagtattgttggaactggttccctctatttttttttaattagaaccgatttttcagttattattattattattttctcattttgttgtggaataagctctattttaatttatgtatatgtatttttagaattgattatctcttgtttttttttttatttaattataactagtttctaagttattgtgtgttgtttttagttattttttttgtggaactggttctattttaatttatgtctcacctattttttttattttttatttagtcatttcaaattagggttcttgaatttatttcagttctgatttttaatttaattaatttaaagaactggttataaatttagttatttcaagaattgatttttaatttagttaatttaaggaaccactttttgatttatttatttttatttaactgatttttgtgtgtaagtatttatcttggttgctttacagaactagtttctttgtcttatattttaaccagttgataaatttaatcagtttttatcttatattttgagttatggtgtattatttgtttcacttattttattatagaaccagttttgtttatatttatacctcagtttttttttggaattgattctcatttttttatcataatcgatttctgaggtattatgtgatatttgtgtttattcactttattgtggaactagtattgtttttaagttatgtttaagtattttaagaactgattttctctttattctttaattataaccgatttttgagttattatgtatttttttactcttttttatgtggaactggttctattttaggtttaatgtctgagacatctaactctggtgacaataaaaactccgatgacttttatgatgacggtgacaactccagtgattttttcggcaaattttttttggcgatggtgattttttcgacaaatttttcgatgatgatgactttttcgtcaactaaactggcgacattgactttcctggtgccggtgtcttctccgatggtatttttcatttgaagttttatcaaatttaattatgatattttgcttaatttctcatattttaaactttgattactttttaatctaatatctttttgtattatttatttattctaaaatttaaatcattttcccatatttataaaaaagaattctaagaaataatccagtccaatctaatttaatccgggacgagtttcattgttccattgttacattatcatacaagtacaatgaaaaagcaataccaataatgcatttatatactttaagtaaagttatttatcatgtctctaaaaacatccaaattagtggtagaacttattggaaatcctttttgaaatatagctgcaaggtttcttgctcgtgattttatgtcatcgtcccccattagtgtctttattcccttaacaatttcatgtttcttaatcttttccgataaattatccgaaatcatgaaacccaatttcagatgagccacaacgagtttcgcattataattttggtctcctctaatgggccaagccaagagtgggactccaagcccaattgcttcaaccgtagagttccacccacagtgtgtcaaaaatccaccaatcgatgaatggcttagaacgagtaattgtggggcccaaccatttattatcaaaccttttgggccaacttggctagcaagcccatgagggaaataatcttcttgagttggtccgcgacttggtggaggacctgaccttcccgtcccggaatggaccacccaaataaatggttgggtcgacgcctctaatgcatctgctagttctgagtactcttccattgatggactaacctcagtgccaaaacacacatacaatactgagccacgtggcttcgaatccaaccattggatgacatcatcctctgaaacattcgattgtcgatttgtacgaatttcatgatcatgaagaatcgaattcgaactaatggaattccaaaattgttcgggcaaaagtggtcccacaccccacacaggctttcctatttgcttggctaagtattcgatgaacggacgttcaagataatcacacgtgttaatcatcaaagcaatagaccctttcaatccatcaacccatggtggttggctaccatgttttggtggacctcttggtcttggtccggccctacctaaatagggaggtggtggtgggcctggaggcccatgtgtaccatccacaaacgggccttgatgtccaacaccaattaagtgtagtggaggaccaggtggctgatgtggtcgttgattggtatccaagtaagtaactgccatttcttcgggcaatccagggagcaaacggacctcaccaggcttgagatcaatgggttgagccttccagaggccatactccatggcagctgagcaagcaccagaggtgaagaaaccaaccgttgggacatcaaatttgataaagatctcagtcgtccaatccatcatgacatcaaggatggcacaaatgggccgaactgaatttgggcctgttacttgggcttggaggaggttttcaaggccgatctcgaattgaccagggttaccatggggaggttgatcgcttgagtcaggccccgggtgcgtcgatggcgccgaagtttgttgaatttcagcgatttggagaagtggatattggcggagggagaagggaattgagaaggagagatgggaaggaataacaaggagagtgttgatgtttctagaagctatttgcttgcaaagctccatgcttgggaaaagatggccttgcccgaaaaatgggactacccatatctccttcgacatattatggattagtggatttctcagtgctttgttttcactaatacaaacttatatatataaaatatatatatagagagagagagaacggaaaaatactctgttgaagaaagcttagtgattaagaaacgaaaaggagttgcatttatgagttgggaagaaatagtgtttgagttttgactgttagataggtgtgagattgatatgtaatacgtgggactgtgatagagagagaaatagaaagagaggtaggactgtgaatctggttggtttgacttgcagagaaaagaaagttagttgtgttcatttaattaaaaaataaaattgttgggattttagttttgtttttaattgttattttttttaggacatagagattttttattttcttttcttttttttttaacggaaagaatttctttcctcaaacaatgaaaacactttttttttttaatatgattttagtttcttttttaaatacaaattttcttttaataaatatttattcataagcacatattaaactttcagtttactgaatcctttcaaattatttatacaatttttgttggttaattatgatttttatcctttaaattatatgtattaaattatgctctttgaatttttaaagtcgttaaaaatattccatgaactattaaaattgttcgatgtaagaacttttatcaaattttagtaaaaaagtctaacataaataaaagtttatggagtataatttagtgcatatcaaagtttaaggagcataatttggtagatatcaaaatttaaagagggtttagtagataaacaatcattgaaataataaaattgaatgaaattagacaaaaattcttaaatctaacaatcttaatagttcagaagaatttttaagaagacataattttatacatgttaaagtttagggtgattctacaatgtaccctcttaaaagagaagtactgatgcacccttaatttgtttcggcatctagaagaattttttagt

SEQ ID NO: 301831 - DNA, 1420 bp, Cannabis indica
aagaaatgccgttagataggcacttttaatatataaagatatatggagcatatacatgacctcttcttctgttcttacaaaaaaatataaatagtatgttattgtgaattaattaagattaattagttatgaatatatttcggaatattgcgaaaccaacatggtctcatggcctttgcgagtgtggcaatgatttttgtacatgtaattaagtttactatgaactcatgcacttaattataatgacataattaagctataacgagatcaattaattaattacttaattcgcattgtgattaggttgcgtgacttgcctcttcccatgtgtgacttttgggagagttggtgaaattgtggacgagggaacaaattgtaagtacaaattataatgtcattaattatatattatagataattaattaattaattaatgcataaatatatatagcatgctgttgtcttggatgtggatattgcttgctatatatgttccaatttcagtggttgctgagttgtttctatagagagaaacttcgagccaagtatggattaccagctcacccttgctctgattgttgtgttcacttcttttgtcacccatgtgctctgtgtcaagaaaatgctgagctcaaatcaagaggcctagaccctatcaaaggtacaaatttcggttgtaaccctataccagtttcgtccaaattttttagtctaatttttttttttaataagtacgttgtattatttaagattatttgtaaattttcagaaaatttcgaatgttttacagtgtttaaaataaaaagaaaaaatctaaaaaattatccaagagagataaagagtaccgatataattctttaagaaggtatactatgtattgattattatttgtaggttttcattattaataaacataaaatccactatatatgtacaggttatcccaaatctcaagttcttcctccaagattttcatctatgtttagatgatgatgatcatcatcaaatatcaatatcatctattaatgatgaattaattaattacaagaagatgaagaagaaattggggtgtcatccaaagaaattaaaagttatttttcacattcagttgtagttcaaggaattatcacatgcattattatttgtatctcctttcttttttctgtattgtgagattaatgtttaagtggaattatataagctctttttgtgccttaattgagctacgtacattaatcatcaactttgggcctgcttttaatctatgtgtatatgtgggctttcataatgggttttacgcttttgatttggacctatctatttgtttgagcttatagaataagctctgggccttaatctatctctaatgggcttttattttttatttaggggtatattgaaaaatacctcttttatttat

SEQ ID NO: 301832 - DNA, 3304 bp, Cannabis indica
agtaaatcaagggatatggaatcacatcatatgatagtgacctgtattgaaaattaaattaccaatatgacattattaattattatattaaaatattaatgatggatgctttaagacaaacaaccattaaaacactttaaaaggaagtaacctaaatggtcaagttcaaggtctactccaccgacctatcaaagattgataggccccacaaactcgacatatcatatatatattcatataaatatatatatcatatcatatcatatgaataattaaagtctctcatttcactcactcacccacccacccaccaactttatgggatgagtggttagcacttggcaccacaaaacatgcacattcattcccattttattttttttaataataaagattgggaaagaatccaatccatgtatgataattaattatacagataagatagcacaacaacctattcatataaatcataataataatggtattgatattaataagaagaataactttgaacttggaaatgaatctaaaaatgggggggttttagtttttcaaatatttctttaagtcttttctaaaagaaatataaactacttccccccactgattcattttcctgtttttttttttgttcagtcaaaattatatagagtaattaataatacaatattccaaaaaaacattagagcaaaagacaaaaaaaaagagggtctttagaatacaaagctcttgttccatggacaatggaacctctttgaagatgaaatttaaagacaaaaaaatatataaataattctagaaacagagtaatggaagaatacctaacccaactggttccttttaatactagccagagtgagagagtgagtgagagagtgagccttcttccttttttccaatctctgctacaaagaatatatggtaagaaatgaataatcttgtgaaactttttgagccatcctagtagaccttctccttcgaaatttttacctatagtttagttaccttttttttcgatattacctgtttgttgtttgtctttccctccacaacaaaatgagccccgagaatggaaaaaatgaaacatacatatataccatctgaatctatatccactgagtaaaatgatttttttgttcatttttgctagactaagaactgatgatcaatcaatcaagctagctgcatctgttcaacccaagctcctaaaacagagtgatcgatggactcgattttggatttggaattcagaccctcaccggatgctggggcaccatttgtaactgaaggtgccgccttatctttcatcatctcaggtggtgattccttgacaagagactggacccacgacaggtctggctcctccccattgttgtttccgaattcgagtgaagaagatcttttcattcgattgtggtcttctccgttgttgacagaccaatccaactttccgttgggagaaccccatttagaccaatttacaggggaaccgacaactgatgaagtgtggttcgatccaagttcccttgagctgaggctgcgcagttgctgctggtgctgttgttgctcgcgctgagaaaaggcagagaggcgtgcactcattggagagattggttcaacactcctaggtgacatccttccaggagattgaacaccaaatgaagcctgtaaaagagggtggtccactgttttgggtgacataacagcggtattaattggtgatagcatgcactgctgctgatgttgaaactggtttagcaacgctgatttacgagtaggcgaaaatgtggaagctgtcatatggtcagagtatcgaggtgatgaagagatctcagcagaaaagagctcttcgaggttggaaggtgttagtgtttttgaccgacaagaacgattgactgaagcagaactcatccgaggctgagaaaaacagttcatgtcattaaagagctgctgttgggcatcaagttcaagcaacatgttcaaatcctcaggtggtatgtcacgagcactgagtgaagatctcagtcggcttgattgaaggttacttccagggagatgcagtgttgggacattaggctgcggccaagccattgaggaatgggacatgccatttgctgaaggtgacatgggctgcgtaaagggagagggagacatgccagagactgatgatggagagccgggaaagagactcaacgcagcagccatgtccataacactaggtccatttggaccagatgctgatgcacgaggcgaagggactccagatccagtggagacatacaaaggtcgaagctcttcagttctgtgggcaaaaaagcatacccttctattgcagctggtaccatccttacagagacgggtacggtactgagctgggtgcagccagcactcaaacacgccatgagcatactcacacaagtccccacgcctacaagctcctttcctgaattcaggacagggaacacagctgtagtggaacttcctcggatctctccttcgagcattttctcctggatgaacaaaaggacattcagtccaatcatgtgaatacgctcgtgaacatggtcgaaccttaaaagagaacatacgaaattcgtccgttgcataaatgctgttcttgatgtcagggatggatggatcgattggatattcctttttctcaagtgtagagatatgaggcagatcagacatcttggaaatcacaggagatgaaactgagtgaggagagcgcacttcattgtcaggagaagaagagagtgttgatgaatctgacttcgagcaattaatggacagatgcatagggtgttcaccaacaccagagccaccaaaagcatcttttgacaatagctcctcaaatatagctttcatgccttgaagctttggatgaatgacaatcacatcaacagggcgatgaccattgacgtccatcaagtttggatcagcaccagcagataaaagcagcttgacaacatcgagagcattaacagatccaccagaagcagcacaatgaagagcagtacttttgtgcacaccacaagatagatttacatcaacctcaggacacgagagcacaagcttcagcacatcaacactaccataagtggcagcaaccattaatggagttctatactcagaaacaatgtgcttggcacctttacggcggctataccagactccaacatcgttaattgaagaagaatcctgctcaattgagcgcttaaagccgtcaacatcattatcagatgcaagttccagtaaattacttagagaatcttcagttttaacaataagaccattcatttct

SEQ ID NO: 301833 - DNA, 1426 bp, Cannabis indica
aatcttccaattatcgtggaaatattataaatataatatatatttcctcgtaatatgttaaacagttatgcatattgtcttcttgtatgacttatcaagcatcaaattaaaatttgtctgttccaacagacatcaataacacaagatttcattttatagagaaactagtaaacgtgttgctcttttgtacttgatatttgggtcattagtattatctagtaaactattaaaaggcattagtattatttagtactatttaaagtttcatatccctattaatatttgatttttatataatttaatataataatttttgtaaaatattgctaatcattcaattaaaatttcatgttaaaaggtagtgttatatgctgtgttaaactaatttaaatttgacaagtcgactaatttaatttatattaaatatgttaatatttttgttgactcaattaaaagtttaatattttttcaataaataaaaatttaatttacttatcaaatttagattgatttaatatagtatgtgacactttttaacaaagaactttaattcatcacctaagtactgattcgtgatcttgaactttataataatactccattgtattatatttgctcaaactttaagggttgattacggcaaaatctctaatagtttcactttatttgcacttaaccctcaaaacttaaatttaggcggcaaaatcccaaatactcgtgttctgttagcaatttaatatttctgtccattttaggtgttaagtgtcatattgtagtgtacacgtgtgtatctacgtgaagacaatgtacacatgacacaattttattagtccacgtaaaaattaaaaaattgtgaataaataaaaatattttttttctttgccctttttcttttcatttacagctctctctctctctctctccctgaaatctctcactctccccaagaaactaccatcatgtaaccaaaacaaccagttcaccaaaaccaccaccacagaaatccaatcaaagctcacctgaaacagttgaaaaaaatacaaatcactaaacaccaaaatgtagtttcttaaaccaaaataggatggtgaaaatttgtaaatcgcctctctctccacctagatctataaaaatgaaataacattttactgcaatatatatgataagagaaatgaggagaggacttacgagagcaccgagagggagagaccgtcgaggtggcctgagggttgtcgaagaaccgttgaggtggcctatggtggttgcccaatgtttttgaaaactctagatcgggactgaaagagatagacgaggtcacaagagcttgggatggttggagaaccactgaggtggcctgtggtggctgcccaagggctttgaaaaacctaaatcgggactaagagggagatagagagagagagagaga

SEQ ID NO: 301834 - DNA, 2244 bp, Cannabis indica
atgtatatatattatatattatgggctatgcaaaaaatattatttttactttaaatatatccatgtcaaaaggattagtcgttctcacaccatgaattaattaaaagataataataacaatacaaaataaatataaaataacgatcgatgaaatggaaggagttgtcaatttattataaggagctatataatatatattaagattcagattcgatttattttgtctttttaatgttcgatcaaaattattcaatgtatataaatttatagttttcactccaagttgctttaaattatattgtcactttctttttttgttgatagaaatatatatatagaagtggtgaaggttttttttaagcattgtataaaatattttgttatttttaaatatatttatgaatgtaagagcatgtttatatttatatatcttcaaattaagtaattttattaaacaaaaaaagaaaaaagaaaaaaggcctgccaaagataaatgtagcccaataaattcttttttttttgttgatacaaagcccaataaattcttagttgaccttaaccatgatgaggagttattatgggctgagcccattattattagggaacattcaaaaaatacctaagattttgatacatttttattattaccaaatataccttttaagtaatgtaatttttatagttttatgaatatgatatggtttaagattttagatactttataattttcttcttacataaggtatgacatcttttatgttaggtagggccgtcaaatttagtgggctattgaaaaaaaatatttttgcacccttaattatttagaaaaaaaatatattattttttaaaatcagtaaaaaaaattatgaaagaggataatttttttttggctcctgagctaggtgggccatatgcacacgtctagctcgcctatgcctagggtcgggccaagatttagtccgacattatgaaaagaataattctaggtctaattgcatgatcaagcttgatttgaggaaatatgacacggtggagtaggactttatttaagaaatgttagatgctctctagtttcccgctaagatcattaagttgattgtggtatgtatttcaactctcagattctctttgatgtttaatgaatcaatgcatgggtactttgatgccaaaaggggtttgagacaagatgattccatgtccctcctactatttgttcttagaatggaatatttatcgaaaatcttaaaaaaagttgagaaaaatagagaatttaaatttcatgatagatgtaaagatttagaactcaatcacttatgttttgccaataatgttctattattttgcaaagaggagtatatttccatctacctcacgcttcaaggtttgaagcttttttctaaaacatcaagtttgcatccaaataaaggaaaatctattgtataatgttgtaagatgaaagatcaagaagtgcaaagagttctggactatttaggcttgtttgtactaaacgcctgttttgagctgattatgcaatataaaatgagtaagaggatcagaatatgaagctctcagaacctctcttggaagagctaccttaatcaatttaattttggtagccattcatacttattggccttgtatcatgatcctacaaaagaagctattattacatgaaatacaattgcattaggcaaaaacatttagactattgcaacaacataagacaattttaaaatgcctagctacttgggtaattcaaactggtgggattacaatgttcagacttctagtattgatgaaggatcaattttaaaattatattgatgttcatactctcacctccaaaattgtatcacataagctaaggctatgagaagttgatgttgaatcaaagtaagtgaattggaggaatgaataagtttgggtcagacttagtattttgaagcacaaatttatgctttggttaatagtgctttacataaggcacaaaagaaaagcttcctaggataaatatagtggacaattgaccacttattcttcaagtgcactgctagcattaggtgctttgaaaaaaaatcaagtcttggctccaatggaagataaagctatgacaaacaagggaatgttaaaggccatcagaagaagcaaaacctcaaagaccaagaaacatgtgtctatgcaattgtaacgcccttacttacgtaaaataagatgccataaataaactggcgttaagatactaat

SEQ ID NO: 301835 - DNA, 6427 bp, Cannabis indica
tagagaattatgccccctaaataacttccgtccacatcaagtgtctagtttaaaaaaaaaaaatggaattaaatggaaatctttgatacaacaatttcaataatttgaagaaaatttttaacacgcttaaaaagtttggtgagaacgatttggtacatgtctggaggagaattctaagtagcctttttattattatgacatattcttaaaagttgtattatattagagaaagcaataaaattattatcttgtaagttgtgttgctgatatacccaatgaaaaacacagcacttggtttttaacaaattgtgtgacataaagaatataataactatcatgactcaaagtggaaaaacttctttttttagaatgttaactaatgggcttaatggggctagtcatgacaattggtttattaagatgggaccatataacattattggtttagttccataattgaatggaatgatttgtgtgttgtgtaccaccaattactcaactgttttctccttgaatttggaggaaaaggaatataagttagaattaataataccagtaccatgttagcagaaattgtaagtcaatcttcatccaattccacttttgtgatgctttgaatcttagttgttctctccaatcaattctcttgagaccatcttttcctaaactaactatgagctttctcattcttaattctcccacaaaacttgagagctaatgaaccagaataagttacaccttccttcaattttcttacaatgcagcaaagcatgattattgatctcaaaatgacagaggaatccaatctaaacaagcttgtcttgccacatgaacattttaacaacaataaaataaactttcataagtattcaaatgccaaatatatatttatgccactaacaaattgcataattatcagtaatttcagatttgatcagtctattttaaagtattgagcgaatgaaatagacaaatgtttcaaagtacaaacaacactacaaattctgtttataataataataataatcataagaagaagagaaaatggttttctaataattagtttcttggatgaacaagtggtccagtgaagacaacaagccgagaagactgttcaacatgatattcgaggaggcttattaagaggtctcctactggctgtttcttgactctttgatattcgagtttgagaaccttgaaacgatcgttggaggagtaggagtggtaaacatgatgagcattcatgaaagatggtcggcttgttttttcgctgagaaggtaaaaactcgtgctctttagtgttggaggccttgaaagaaacttgccatgcacctttgaaatataatgcatttgcaacacagagtactggtggtcctaatctttctctctcacacaaaatttctttgatcaaacctttggtctctttttccacccacaaattcacgtctttcttagcttgatcaccctatacatacataacaaacaacatttatgatcatgagcgaagctagaaataaaatttagatggaacgattatctatttagattaattattgatgattagttggtatgatgataaataaaactgtaaaaaaatgtacccttattatttacttaccacctaaagataccatttaattgataagtttccaatctaaccacacttgtttgatgtgttgaatcttaggccaatcttctcctttctctttctcacaccgttgctcaaccaaaggacattcatcaatttctaaatgagtaagcgatgtaggcagtccttcttctggcatacaccgcagccttggacagttatgaatattcaatgtttgaagagatgtgagttgttgaaaggccttgccatttagggtctcaaggttgctagaaaaatagatttcaagtttatcaagagtgataggaaggagcccttcctcaggaaacgattcaccttcccacccactgatagttacctctttcaaacaagagagtctttgcagattccatttactactgttatcataaagagattttatgtcccataactcaatactctctactttggagtgtgatccccaatgtagaagtgactccaacacaggaaaattcattatctgtatgtaatgaagaaagggtggggctgtctgtgacagtctgttgaatagttctcggaagcaaaacctccatttcttcacaattccatatagtgagacgttccaagaatggaagataacaaggtaacccaacattaagctttggacatttagacaaatgaagttttttaagaagagggaataatatttgaccttcttcaagaatagattcattaccaaatgaccattctttccacatcaatatattttcaatactaactttctaaacacctgaattgaggaccactgctatcaatctcatcacctattgataacacactgtcacatccttcaattctaagatctttcagagaagctacccgtccgagtggtggcaaaaaccaacagcttttacaatcttccaacgtgattgacactaaattagaaaacgcatgatcagtaatccagttagggaatgttgtacctctataactttcaatcacaagacacttcaagtttgtatggtgtcgaagtgactcaagtacatctaactctttttgtgaactatcaaccccaacaacatcgttgttccacctcaaagttagtttcgtaaggtccttcttatcctttaaattagcctttgaagcctccattgcatcaccaattattgttatagtggaaggttatcgtaatttttatttgccacgagataattttttggtgtgcatttggtgctttgattattattcgtgaagtactatttgcattgaaagatatctgaaaattttgaatatgttttgtgattgctactgatctttcacatcaaaaaagaatgtgtgcccattgtattttctcacaaatattagtcctggaagggaattggaattctgtccattattctcaacagtaatctattttatttgttactttattttggacttgggagtttctatgctgaatcacgtgtaatgttgtgaaaaaagacaatggttgcttaatataatatgatgttagttagtggaatatataaggactgctacaaatttattatacaaattacagaataatgtaatactatttattgatgttagacccttggtgtgtttcaacaaattctaatcaagaaacatttaagcacaatgacacaacaaaccagatgagaaatataacagaaagtaaaaacatcactcagaatgtgttaattacaatgtacaacttgagtttctttacaaaaaaactcttagaatcttggagcactgcaactcgatatccacacccaaaacacattctccaaaagccttatataagtatttttattgctgagattgcatgttcatctcttgttgtcttgtcttgacttgaaatataatgaattggaataaacaaacaaaagaggtgatccccaatccataagaaaattaatttctacggttctcaaaaagcgcttttgtgttccataacaaaattttctcaactttggagtgtgatccccaattcagaagtgactccaacacaggacaatccactatatgtatgtattaagttctatatgtcttatactaactgtataataaacagttatgttagttttctgttaacagttaattctgttttacttctcccctttctctggttttatgtcagaggttagttaggtataatcagtcttagttagttgttgtattccttactattttatcttttcttctcctgtataaatactctgtattacaacttcattcaacatatacaaaattcctttttcttcatttccgtattagtatgtaagcaagaaagggtggggcgtgtgacagtctgttgagtagttctcggaaccaatacctccatttcttctacaaatccatatagtgagatgttccaatgatggaagataaaaaggtaaccaaacattaagcttgagacatctatacagacacagttttttaacaagtgggaataatatttgaccttcttcaagaataaattcattaccaaatgaccaatccttccacatcaacatattttcaatacttaaaactttctaaacacctgaattgaggaccactgctatcaatctcatcacctattgacaacacactatcgcacccttcaattctaagatctttcagagaagctagtcgtccgaggggtggcaaaaagcaacaacttttacaatctaccaacgtgattgacactaaattacacaatctttgggaaatatggaacaatatgcaaaacactgtttgagatgtgtaggtaagtgatgatagctcaaccataaagttggaagaatggaaccctccttttgtacagctcctcccatgtgtcactgttaagtatatcctcccattttttggcatctcgttcacaacgtagcaatccaccaagtgattttattgttaagggcagacctttgcacttgtccactatttttttgccaaccacttgcaattcttgtagtcacagaccatcgtcattaccaaatgcatgtttgacaactaattggcaacaatcatcatccaacaaagtttgtagataatgaacacgtccagttgctatgcctatagtagaggcgacaattgtgcttcgggtagtcacaataattttactaaacaactctacaaactatcccacaaagaataagactcgtaaagtgtgttgtcttattccttgtatacatcaaaataaggcaataatctatttaattaataatggtcctttgtttattatatgattatatatatatatatatatataataaaaaagttgtgttttattatgttggaatcaattgtagtgatcaccctgccccaaaaattaaagaaaaaaaaattgcatgtgccgtgttggtgttctagagcagattaagttgttaaaatttaagttggataacataaggctgtgaagtgaacatccgtgccaatcacttttcttgtggtagagaaattagatacccaatttgagcacacagccaatctgccattgatagttttttcttggcttttaataattagggagctgtgttagtggactagtcttcaatggtcctttttttcgttaatatttttcttttgtttattattatatgattatatataaaagcaaaaaagttgtgttagtgcgttgtttaatataatacttaactctgactattcttcttagtatataaattatgaacttcattgaaattgcatcattttctcaagcaaaggcagtcattttctcttccaaggttggctccataatagtttctagctatacaatgattgagagaacactataaatttcaaaaataaaaggcagataagataaatagtaaagatgagaatcgtaggaagtcctcaataatggagatgtacagtgtttttattctcattcattttggtacacacacttcacttgtattattctatcattcctatattaacacaattgctagaataaaaatcttattagcaaatgtggccttttatatttacatatatagctcaaacttgttattatcaatataattaattagtttcatttcatgtaaagggaaattctttttcattttcatgttcaattgcagaaatacacaactattttaaaaacagaaaccagaagaataacaacaagaataaaaagatcatttggtcaaattgaattacagatcaaataatccaagtctgactattcttagtggttatattaaccgaaacaccctccgaatacccttctatgaccacttgagctagcctatgcatgagaattacaaattgatggtattgattccgtcccagtaataagcatcatcccaccggtccttgtatcgatcttgcatttctatgatgttcttgacgcactcttcgtacatctgatatctccactatccaatctgcattgcacagtaacctccaaaagtcatttgatcagataaaagaaacactaatataaggtactttgtccaatttcagggtacaatactagaatcagttctgcacatgcgatcagttagaagactgaaaatgaatttgatttttagatgattagttggtatgatgataaataaaactgaatttaatgtacccttattatttacaaattacctaaacataccatttaagtgataagttcaccatccaaccatactaatttaatgtgttgaatcttaggccaatcttctcctttctctttctcacacagtttgctttactaaaggacactcttcgattattaaacgagtaagagatgtaggcagcccatcttctggcaacaccacagccttctacaatttttaatcaataagtgagggatgtgagttgttagaaaaaaaaaaacagaaaagaagaacaaaagtcaca

SEQ ID NO: 301836 - DNA, 3290 bp, Cannabis indica
aaaaacatagtaaaaaagtaaaaaataccgcctgacagtatttttataaaaaaatggcaaaagttagtatactatgtaaatttcccttattattagtggcgggccagtccgcttgtaatatatatttttttaaaatttttaatataaattaataatcaatatatttttaaataaaaatattaaatattaaatagtatagatcaaagttttaggctattattaattggtgctgttaagttgtaagatatttgttgtaataaaatttgctgatttagcaaaaaaaaaaaatattaaataataaaatttaagcaaattaattaatataaatgtgaagtaaaattaagtttaatatataattataatagtcattacacaaactagctaatacaaatattctccaagttaataattaaattgtcttaatttaacaaaaatacaaaagctaattactagcatcgttcataatcattccaaaacatgtcaaggttaatctttattgttgtgccctgtggccgacggagaagatcgcctatgcatgaggtcgctaaactaatctcgaaattgtgagtgttcggggtaaataaaaatgttactcttgttaacaaaccaataaactcactattattagtaaatacttaaatgatatggaataagaatatatcattatttaataaatgattattcattatttaaatgacttatttagtttcactactataaaaaaaaatttagcggcaatcttttcggccctttaaaggtgattttgaagaattttgcgattgtcgctgttctagggttcactaaaagaacgcaagaaaatcaaaggcatagggagtccctatgacatcagttattatatgaaatacaaccgacgccatagagactctccaaagcgctagatcgcccttatagcgacgattattgttaaataaatcgacgttataaatctctatagcatcggatatttaataaataatcacccccatttcgttttgtttttttaaaaaataattctaattaataatatgattttgatataattttttttttcatatatatttttatttttattaatatatttaaattaaatattaatttcgtataactaaaaattaaattgacaatcaaaataaatgtacatatttacattactctaaataaatatattacacaaatattctaaaattaatctaaggtggcgtttggttggaaggaatgaaaacataagaatgggaataggaatatataggaatggaatggaataaaatttaaaatgcataaaaaaattgataaaaaaatttattaaattttttgtcatcatgcattggaatggtctttccttccattttaaaatggaattgtcattccaccaaaatgttagaaagaccattccattggaatgacattctaacactttaatatgcaaccaaacaaaggaatggaatggagattgtttcctttccttttcattccatttcattacctccaaccaaacgccacataagtgtttaagagttatctaaatatagaaaaagagaaaaaacattcttgtacaagtgttctactcattgtgaaccactgcaaacaattttgttagcctctctcgttgtaacggtaaagtctttttttgcatcatatagagactattgtccaagctttcaaaagagcaagtaaatatttttattagtgtatatattagattgtttgttaagataataaataaaataattaataattaataattaaaacttactttttttatgtttatgaatctactagaatttctagatttgacgatctcactggtgtatctcaagatataaaaactacattcttaatttttaggctactttaggtaaactgcttctgttatttctagatacggtccaaagaacgcattcatcctcccgctcttcttgtatgccttattttgaaaattttattactatgtcaatctattaacataaattagttaaaaaatttcttatatagagagtaattaaatttttacctccttaacatatatcatcaaattgtttgataggtttgtggccaattagggcccaaatgtataatctttcttcacgtatcgacctcgagcatctaatgtgtactaatatatatataagatagtgtaaaaataattcaatgaataataaagaaaataattttaaattatatctcttaatagtaggctttacttgatatttcagggaataaagaatatttggtattggcttttcatcattcctaactaactagccaatctggtagccgcattctgaaactgtcagtctataactttatcaccgtatatattgtgagaagctccgagtcataaaacttgaaagcatgtttcatgtcagataagccttcccaaatgcacctacattaattaagtgttaatgtttttttttaaatttcagcaaaaattctccgataaataggattacccaacctgtagatattcaatgttataatagccagtataatttctcttggagaatttcaagttagttaggttaaagaaaatatacctcaatccgaaaagaattccttggtttctgataaattcacataacataacttgttgtacatcttccccagttattgtgatgtgtgtatgaggcgttataaatccacgttctaccgaaagtttggttgtaccatgttttccctttacgctcaaatattcgtcaaccatgaatcagatggacttgggagtttttgccatattgctggagtgaatagtccatcatcaccaccaccatcttcttataacgcccccactttaagcctccattggacctttcctcacggatttatggctcttatacatgggtacgtcacattgtctgtttcatggagtaacgacagaccctacaaaccaacaagagtgttccactgtactttatcctcatacttcccaagaggtcacccattctaaattacccttaatcaagcacgcttaactgtggagttctttcatgatgggcgaccagattacaggatgcatcttattgatataggtagtaccaatcaatccatttaattcctcttcaactgtagtcccatacctacactatctcagaatcatcaaacttgaccttcctcaagcgatgtgggattgcacagcttacctggtatttccccttatggatcacaagactactgactatcacaatcaccccccctttgggtgtccaacatccttgtcgaccacatggatgggtcaagaatttgataccatttgtaatgcccccgctttaagcctccattgggccttcccc

SEQ ID NO: 301837 - DNA, 4051 bp, Cannabis indica
tagagtttaataaaatctccgaaattgagaaattacaactctaatatttatttctaaatattgggatctaaaataactaaattcataaataataataaaataataaaaattagcgctaattgccttttctaatccacaatactagagcggtcattacaatacacttaccaaatcatactttctaaactacacatgtccatactctaacatggtatcagagtcaaactaaaactctaacaagtatctgatccaaatccaaaaatcagtccaataacgagctaaaaagagtcgcttgtgattcggagatagtgagccaaaaagagccattgtgagccaaaagtaccacttttgatcaagccgtgcaagatttgtaaagcaaaaaaaaaaaacaagtcaccatcttaaaggggatgttagagagtcccacattaataatgtgtggaaagtaaatactatacataagatgcatggactactactctcattatcaattggttttaagatggaacctcataccccttaccatacaattacctaatcatactttctaaatcgtacacttctatcctctaatagtacttttacaattctttttaggagttttaagttttcactaaagaataaggtcatatcattttttacttagtaaaaaccttacattgcttgaaaatgctttaagtgttggtcatgaaatttataaataaaattcttaatttttttttactttaatgttaatattaattttaattaattatttttattaaggttgattaattaatatcttacccaattacttataaaaaaatttataattgaactaagatattattctttatatatttagatttatttatatatatattatatttattgagttcatatatataaagttgataatttattggtaagattttttatgtataaaaataatatctatatcaatatatttatgtaaagtaaagtttaagagtaatgagatggtatctcaaattttttaatgtaattttacaatttttggagaggtttaagtttacactaaagaaaaatgtcatatcattattcactaacttattattagaaaatgtcacattgcttaaaaatactttaggtattgctcatgaagtctataaataaaactcttattttttttattttgatgtgatacaatattatttgtaatttatttttacttatacatgtgattgattaatgacttatcaagttataaatattttgtagttcaactaatatattattcttatatttagatttatttacttgtatttatattatatatatcgagtttattgagagttgataacttatacttaagattatatttattattattttagatgaataatttagtagctaaaaaatatatatatttttattttatgtatgaaaataatattgagaaattgtaatgaatctatatatttatataaaagaaagtttaagagtaatgaggtgtcatctcatatttttttcaatttgaaagttttattaagtttcactaaaaaaatcttatatcattttttactatcttgttgcgatcgaacctcactccttaacaatcaagatcagaagcttacgatagctatgaacaagaacaattacagcaacaaaaacctcagcttaagagattgaataattatgacttttattgattttgaatggagagaattatagagggagagataacaatctgcgcaaggctctatataatcaaaaggaagaatgagtagctagctatatatatacattttaaacaaaagttaaaaaataaaaactaataacgaacaactaattactaaccaacaaaaacagagtgtggcatgagatagatcatatctcaaaaaattctccttgatttgtttcatgccaatttgagaatcaacaaagaagttgatttgccaagtagtctagtagaaggagttaaccataaccccttagatgtagaagatgtgttggaatttgacttgagtcactgtcttggtaaacatatctgtaggattgtggttggtgtgaattttctggacttgaacttcttggcttgagattacatccctaatgaaatgcatcttaatatatatatatgcttaagcctctcatggaacataggattcttcattagatgtagagcactctgattatgacagaaaacggtgatataggctgtcttgaatcccacctcttttgcaaaaccttttagccagataacttttttaattacttcagtagcaaccatatactcagcttctattgaggatagagcttcaaccttttgtagatttgccttctaacttacacatcctccttgcattgtaaacacatatcctgtgagggatcttcttgtcttgtgtctaatacaaacctgacataatttgagtcttcatagcctaagacatcagtttgtgtcttgtaatttgtgttgtaagttagacctagattaagagtgcctctaatgtatcttattatccacttaatagcatcccaatgtttctcatcaggatctgcaatgaatctaataacaatgctcattgcatatgctatgtctgaccttgtacataccatatcatacatcaaacttccaaccccactggcgtagggcactaaatccatgaattctctctcctattctatcttgggagcttgctctttggacagtttgaagttagctgctaaaggagttgacataggttttgagttgtccattttgaacttctgtagtacctttttaggttgtttccttgtgtcaaagtcagtgattcaggtacgcttcttttaatcttaatgcctaaaattttcttagcttcacctaggtctttcatctcaaattttgagtttagtaatgactttatttctccaatttcattcttacttttccatattagcagtatgtcatctacaaagagaaggaggaagagtgtgttgttgaagtacacacaggggtcatacttttttggtgaagccacttctcatcataaattcatcaaatttgagatttcactatcatggtgcttgtttcagatcataaataaacaaaccttgtctttatcttcatcaaagtcttttggcatctccatgtaaaatggtctcatctagtttttcatgaaagaaggtagttttggcgtccatttgctcaatttctaggtccttagaagcagttttagtcgtgattgctctaattgatgtctgttttacaacaggtgagaagatttcaattagtaaattctttggatacaagtctggccttgtatctcttgcaatcatcacttgatagcccctttttttctctaaagatccacttgcaattgactagtttacatccctctagttttctaacaacaatccaggtcttattccttattagtgactatttttcctcatcaattgcatgtaaccacttatctctattcttgcagctaacaacttcttcataagtggcaggttcaacattctcaatctcactggctatagttaaagcataggtagtgtaatctgcaaagccaaatctagctggtgctcttatttctcttctaaccctatctctggccaattgatagttttcaagagaattatcttgtgtttgatcaatttcttcaacaaattactgtttatcatagtgatcacttgcctttccttctgatctcaccttaacttgtaactgtcttgtcttagtacttaattcagctttatcttctggtttaatggccatcactttctcattgaagattacatctctactctctatgcattttttgaacccttcttctaagcaccatagtttgtatcctttaactccaccaggataccttaaaaacatgcacttgattgctttaggctgcaatttatcctgtttaacatgaacatctgcacactaggggtgttcattggatattggatttcgtcatccgatccaatccaattgaattgagtcatccgatcggatctgatccaattgatgtattggatcatatcggttccatccattggatgctttaactggttttttattggattggattggatccattggatggatcca

SEQ ID NO: 301838 - DNA, 1275 bp, Cannabis indica
tagttttagtcacaacaagtattgtgattaaaaatacatttagtcacaacaaattataatttttgtgactaatacctttagcggactttttagccacaacataggaatgataatttataattagtcacaatttttttacttttagtcgtaagttttgttgtgactaaaagtaaaaatttttgtaatgaattataataaaacatagttaaaaaaaaaaacaaaacaaaacaaaatcattctaaattacatcttttagtttcgttggcaacacctaatttaataaattggtataaagaaaatttaatagacactagttacatccttaacctacctaacacataagtaaacaacatgtaatatcgatattggttaattttaataataaattctaaaaattttaatttagtaagtaatataaccatttttttttggtaatgtttaacaccttaaaatatatattatctaataataacaatacataaaaatttaattatatgtcaatataaagaagaaccatattatataatgggaaatattgagtaatatattagaagtgagatactataattaatcaaatatatatagctaataattgtgtttggaaaaatataaattaaatacttaaaatacatgcatgcatggttaattggattatagactatatatatataaatatacgtactcttgagcaagcttgagattttgtttggcatgatgaattggaccaattgagatccactttggttggtagaacaccttatgcttttcatctgagattagaattggaacaactctttgtatttttggtgatgacttctcatcatctaattctgaccttgttgacccaatgagttcattcagtttcaaacgtggtgatgatgaatctccaatattattgtttattatctcattttcttcaatattattcatcatcatatcttttcaataataaaaaatatatatatatattatatatacaatgatcacatgtgtgtgtatatatatgattgttgtgatgaatattatactttttatgaatgaagattggtataaaataatggtgatgatgtgaagtaaattaaagaacacactgttttttttattagtgatgacccttttttaattattacctacttttgtatcaagttgtggatatatactttgctaaaaatatatagcaagctatatatatttcagcaatggaatattctgcatgtaaaacatgtaccatcaaatatatggataatataaatttgtatatatatataaatatat

SEQ ID NO: 301839 - DNA, 2421 bp, Cannabis indica
ttagagttttatattgattcatttcaaataataagttgagagtaatttttttttctcacttttttcttttgtaatattttttatattgtgtactatgttgagtttcatttgttgttctaatattatttttaattgttctgtttagtgttttataattattttataaaaagacattatttttgtaaaaaatttcgtgtgacggtaaagtgtaaacttttgtcaaaaatttaatatttttgtaaatatctttttttagtaagtcagttttgttaaactgagttagaccaataacttttctaacatgatattagagtgggtctaattttataatattacaataacttttctaacatgatattagagcgggtctaattttataatattactcacacatgatctactctccgcataaaggaactattatactcacacattgagtgataatatgtactcgattcaattaataatgtaaaagcaatcttttacaagccaattttattatgttgagttaaacccaataatttttctaacactaatgccatattataccaccaaacattattttaattgtcaccaatatcatatttacctaccctttgaaattaacctctattaatttttcttcattgagtttttcatacacaaatggatccatttggtaatttcaacaaatctgtttcccagaattaaggttctttttcttatttatatatttaattttcttggtgaaatgatgttgttttgtggctgaggagtgagggcccaatggtaatcacagcctttcaacaccgtttaaagaaagagagacgttagaaaatattgcttaggacggcaaaaattaaaaaatatgaatgaatgatgtttattattttggttttggggaaaattaattaaagctccacatggtacaaattgtaatgataatgattttattgacttgatatatatgaaaaacccaacattattattaagtatatattgcacatatatatatatatatatatatatatccatatcgaaacaaacagttatatatggtcccacgtattaattttatatgcttatacttaaggatttattaattaattgtcgtatgatcttagattgtttcattcataaagagagaaatttcaagtgcagttcccactttctcctaaatttcctttgcttgtactgtcatccattagggaagcaatccattaattaatgtatatcaatggttggagtttactattcagttttagagtttcaattcagaaattcttctatatttcgataaattcgagtttcggatgatgtttttacttgcataattttttataaggaaaattgttatgtaaaaattatttatttatttgattttaaataaattagattttgtattttttattttttatttgaattattattattttttttaatataactaacttaaatgtaatttctaacatgaaagatataaaaaaatacaattaatatagtcataaacatctccaagtttgattactataaagttttatttttgataaaaattgagatcatggtaagactaaacatttctaccgagtttgacctggacccgatcaacccgcctagtccctacttggtcaactcgactgtgggaaaacctgttctctataggcgggtcgggtctatcccgatcagtttcatcgggcgggtttgagtttgttttctgcataagctcaaatttgggttggacctatacctgcccaccaactcagtcgttttaattatttttatttatttatttattatttttttaaaattttcctaatcatttagcttaacttaaatccttgaaaaaaaaactatcatcatttcatttcaaatccctcatgatagaccccaagagaaagaccccataacaaccctaagaaccccagacggctagaccaaccaaaccagaccccacctcccttgacaacgtcgttgacgctccctcctctacgaatatgacctagtcgttgaagctacgtccctcctctcctctctcagtcgctgtcgatgcctcctcgttggtgtctcgtttggtataggattacatagttgaagatatcttatattgattgatgggtactacctatatcaaaggtgcatcttattttttggtggcccatcacgaaagaactctacagttaagcgtgtttgatctggagtaatttcaagatgggtgacctcctaggaagttttttcaagaagcgtgcgagtaaggacaaagcatgttagaaacactcgtgttggtctgtagggctagccatcactctaggaagcagagtgacgtactcgtgtataagattaagagccataaatctgtaggagaacccaatcgaggcttgaagcgaaggcattacaagtagtatcagagccttgacctagccagaagtgtggtcgacgaggacg

SEQ ID NO: 301840 - DNA, 2690 bp, Cannabis indica
aaatgccttggtcttcctctgtataggtccaaaaacatcgcttcttacctaacctacagtactaattgattgatgacttgaaaatcaagcgtgaagggtggaaggccaaattgttgtcaaaatcttattgtgctatatgcttgttagatggcttgttcaatcttattgtgctgtgcgcaacccttacctcttaatactacgcaaaatatgtatttctgctatatatatgtactcacaatttttctttatcttttctctattaaaattcaagctctaagctttgccttaagatatttaaaaatgaaatatatagttatgagtcaagaaaggtcgaaataataaacagaaagtatataacaaaattaaaaatataggggggtttgtcatattgtcaataagtgatgcagcctatcacgaccaaccttagatgcaagcgaatcacggtacctggatcacacctcatgtgctcaaaatcccaaattgaaaaaggtcttttttttttttaaaaatataattgtttaatttagaagaataaataaaactaataacataaaaataataaaagagagcacaaaatatactttagttcataaatcaatattatttataataaaagttaatttaaattttttctccctaaattttcacatgtatcaaattatgtcctcaaactttacagaactttaaacattctccacgaacaattgagattgtttgattcatagaattttgtctaatcttactaacaaaaatttgacgtagataaaagtttaatggacatgatttggtacatatcaaattttggaggtataatttagtacaaaaataatttatgcgttagtaaattgaacgtaatcagacaaaaatcctaattagcctataataataaggacctcaattcaacaaagttttaatagagaaatattcgatccctctttccctttgagtacaattccttcttatagaagaattgttacagtaaatgattcctaaataagtagggaatgattatatgatcacaagatcttacattcaaataataaaataatacgattcaaattattacggtattcgacttgtttaaataagtcctttcaatatctatagttaataaaattgtaaataatatattcaagcatattatatcccgatgtctcgaatagaacaacatactttgatatgatgactacatgtctaagcggatatgacataattttctctgtaatgttgaggtctttaatttataaacattgaaatttttgttagatgagatcaccttttttttctttttaaaaaacggcctcattaaaacctagtggaaaaatctcaaaaagaaaaaaagtgctagacaataacattaattataagaatctatctgcaaagcatcattaacacaatcagggtggtcaggccattagccataatgatcattcaaaggcagagctaacttcgctaaaacgtgagccacactattagcagtcctaggacaatacataaaagaaataccaataaaattcttactataagaaatgatatctctaataatacaacttatatacaattgatcaactttacgatgaagaatgccattgtaacattgagacaatcagactccaccaccaccctctgaaaaccaaggcacaagcaagtatgatcccattatatatacctaaaacctcaacaatatctggagaataaccaccaatctaagtccaagtactcgtagttaagaaaaaaccagtgacatcacgaaacacagctccgaccccagatttacccaactcaaaattcaacgcagcatcataattgattttcatgaactcagaggaaggtttggaccatctgacaactggttgactctcaagaagattagcaagacgaggagtatgtttattggcagaggagtaccgacgaaggtattccatacaccaatcaaacaaaagatcatcattaacacaactcttttcattctcccatttattttgtcgataccaaattctctaaagacaaataatgaatttttcaaacaaggcaatagacacaccgccaagacaagtatacaggaactcatagatgtcccaataaaaagaaaattaggtacctgaagatggagaaaaatattatcacaaatggaagaaagcttatcacaaccccaaagagcatgcaaggaggtctcaggaacctttaaacaaagagggcaggtggaggcaacatggtcaccccgttgagtaagattagcataagtaggcagccaattatgagaggtctttcaaagaaaatatttgaccttaataggaagatgtaatttccaaattttattccaaagatcagactaaccattagaactagagccttgcccaatgccaagaatatcaataatattccagtacttactccaaacattaaagactagaactctcaaaatgccacaccatcttatcatgttgaggaatatatggtctcgaggtatagcaagaataacattagcctccaatgccaagaaggagctagtaactaaggagacattccaatgaccatcaggtagtaacagatcatacataaaagaatcaataggaagagaatgaggaaaggaagacttattaccattgtgacagtcagtagtcccgtgatccgtaaggggatataccgggtaagctgtgcaatcccacaccgcctggggaaggtcaagt

SEQ ID NO: 301841 - DNA, 3669 bp, Cannabis indica
gtattaaataagctaaaaaaatagtattgttattgagtaccagcattacctaatgttttctaaatatgttttcttataattagctagtaatattctttaaaaattattacattaaattatatagaactaaatacttaattggagatattaatatgtaggaaagtattaagtataattggtgtcttttagtatttttttgactaaaataatatgtcaatatgtgtttttgaactaatactttaaaaaataagtacgatggttcgtaagataaaatattttattcctatttttatcgtttaaattaaggagttttaactacaaggttttcgtcagtagtattatgttttaactgatcacgtgatgcacgtgactaaagcgtacgttacggctgacatggaattgtgtgtcggtgcgtgtttacgtaccttctttctttacaaatacaatagtttagtttagatttcacacaaaggaattttggaattttgtacccaaatttttgcaattactattttcacgtgttaaacaatgttgcacataattatgtttggaaatttttgtttctaatttattattattacatcaatatcagataattatgtaatgcaacagcaagaccagtacttgtggttgtggattcattattgcacacctgttataattaattccaaataaattaaaatattgtccaaatattaatggttccaattaatacatttccaattcgttttctttttaattggaataaatttccaattggaattgttaatcacgagttattgtcatatattgaatattcacctgatcatataacaaattatgtattatgtaaattcaaccataactcagtttcagaaagaaaaaaaaattacctttgtcataacttaattaaacctgaaattaaaaataaaaccctaaagtaaattcattttcttaaaacaaaaataaattcaaaattgaaagagtagaatcaccaacaacaaataaaggaaatgtttgaatttgtttttagtagtttcatttaaaaaaaaaaatgtgttataagtataatttacattaagaaaaaaaagagttatcaataagtttaactagattattaagaagattgctttcaaaaaaagattattaagaagaaaattatatatatttatacaagaaaaagttgtacactaatttcagataaaagtaattgattaatggaactctgactatgcattaattagtgtcatgtcaagaaccggggaaaatatttacgttaattaaaaaagaaattaatattaatagtttctaaaaggaaaatttaaaaaaatatgcataaaatactttaaaaaattttccatatattttaaaattttaaaaatatgaccactttacaataaactcaaaaatacccttctcattttcaaacctcaagtctctcttcttctatctctttcggttgttctctcagcatctcaccctcaccaaccctctttttttttcatcggatgtgatttaggcaaaatctgggtttggagtttgatttcttcgagcccgatgcagcccgatgccggtccgatggtaacacaaaaaaattgaggaagacaaaggcccgatagtgggcctgatgatgggcccgatggggcccgatgcatgtttaaaaaaataaaatttgatatggcccgatgggcccgattattggcccgatggagcccgattgcatgtgtaaaaaattagaatttgatatggcccgatagtgggcccgatggtgggtctgatggtcgacagtgtagtgaaataaagagagaagaaaagagagggggtaatgtaaatggaggtattttagggatattataaaatgtgtcatatcccaaaaatatcaaatattttgagtttaggagaaaacttttaagaatatgtaagcatataaaattaaattttccttctaaaatagaggaaatagaaggcacatatcatcattgtgcatttacatgtatattttatttaaaaaaaaaatcattgtgcatgtatgtatcatatgtatttatatattttagggagactaaatatatattaaataaaattaaagagtccatgcgtacatttttaaattaaagagtgcgaaatggacaaatattttatttaaaatcaattaattaatatgatctggccaaaactagtcaataaaggaatctcccgcacaaaaaaataatttttctaaaaagattaatgaaataatactcttcaaacaatacaattttgtcactttgttaatttgttacacaatacaaactaaagatatacattttttgggataatattgaagtagtgatcatatcacatttataaagaattaaaattcaatttttctatacataattatgtacattttaattatattgatactattttaaattcagtgttttttgatatgtgatttgtgagttttgttagatttagagatcgattttggcattagatttgggcgagaacttggtttttatgacaggctcgatgctggttagatgtaggtcagaaattggtatgatgactttatgaaattaaaagtttttaagttaaaggcgtaagtctgatagagggtccaatagtagcctgggagcactcgatagtgtgcttaagttttatacttttttggattagaccgatgtatggtccgatatatatgaggcctgatggggtgtgtatttttgtgttattttgttaggctcgataagttcgattgcttctcatttttattttggttttttgtctataaaggaggtagaacctcttgtttccacttagactttattaacctcttagtttattccgtgtcttttaatgaaatttcaagttttataaagaaaagaatatcattcataatttatttgaatattttgcaatcgatcgtacgttacataatttggtagtagctatactttctctttctctaattgtagaaaatcctatacttgaaatctcgaaatatacataattaatcagtaggttcagaattttgtgagttatatgatagaataaagtaattaaaaagtgattagctgccaattaacattagtctcctcttatatactgatcattttcttcttctctttggaatttggatgttaagtgaagttgatgtattaacaaattagttaacaacgacagaacacaaataaaacagattccctaaccaacctatctaacaaatgatgaccaaaccactcgcaaacgcatattctattcctctcccaaaacaacacacatatatatatataaatatatatatatatataataattaactaacaaaccattcccatgaaaatattgaacaacatcacttgagttcagtaaacaagttgaggaaagttgccaaatagagaagaaggtttccataatcgccacatgtcgctgaatggaagcacataaaatgcaaacggtacccacgtgtgaaaactaaggagagctgaaatggagaagggttaatttcacaaatgcacaaaaacaacaaaaatacgatttcacggaattttaaacatttttatcatttttttgattttatttacataaaataccatattgaaattttgttcatttgttgttaattttttgttatatgtatgttattttttgttttttttttgttgttattttgatgttattttcatgttacttttatgttgttttc

SEQ ID NO: 301842 - DNA, 4102 bp, Cannabis indica
gagcattggttgtggatgggatttagtgctggtagtgctctaattggctgccaaactgatgttcccagtctcttgcacaccgggtgtgatcctagccagaggggatgtcacacctttgcctacagtaggtggctgcgtgtctattttccctggattggttcttggtgggaccttgtatttccaggagtctacaatgtaggatctattaacagtgggtcactctggtcaaccacgcctctgcgagtttgtaccaccattctgtgtgtctgataaaacttaaggcaaagagcaaacttagatttttgctctctatgaaagcaccaaaatgttgacctcgcttttagccaatgacagtgagtcaattaataagcgattaataaatgtaattaagacggagcaaaaatcaatacgcaataaagaacacaggattttaaagaggttcggccccttgggttcagtaataacctactccccttagattgtattgacttgagaacaaagaatgcagtgttccctctctcaaagctctcacaatggaatctctgagtgtttactcttagatctctctgatgcaattctttcgatccttttctcagtgaagctagatcactatttatagggctaaatgcatatgagggaaggtatccttttgcttacaatatctataataagtaagaacatacattatatatttagaatacatgaaatgagggattcggacaacttgccatatgcctttgatacgatcaatgctgaagtagctaagtcttgatgcacggctcagagaaatgacttcatttcttgttcagatcatctgctcttgctctgctcggtcaagcaaactttgtgcgtgcagaagtattactcgaagtctgtttagaacttttcgcagaaggaataacagacacgtgccactagtacatattcccacgtcgtggtgcgaaaaatgggataacaagaagaatctcaagtaattacaaaatcgaattgacttatacaaataaagactcccattttgaaattttcacaattgttgtagtctatactcctaatcaaattttgaaagtgtcgagatctcaaactcccttcaaatcgtagcacttccactcttccttccaaaaagtaactcacttgcacttttcctaccaaaatgtatctcacgaatgagtcttctcctgaagctcgatgatcaatatccaatgtgttcaacttgcacatttcaataagaaacaatacagaaataagcagtaatatacaatactaagaacttgttggaattaagttcttcaaacaacaaaaaaattctctctaaacttgaaagtaatttagaatttgatataccaagagggttaatcaaaaccaacgatctaagggcgtctttatacaatttagaaaccctttacgtcgtagaagatgaatcatgaagcaaacaactattaaatggaaaattttctcaaagaggaaactcaaattttgttctaataagttgttaatttattcaaatagatacattgaacatggacaattcttttagaaaaattgtcttatataaataaaaaaacatgataaacaataaacatccaacatgtacacgatttcttcaagaaatcagatcaaatacaaacaatgaatattgatttttttccttaaatataaaaagtaaaataataataattttaaataaagaaactccaaattcattcaatcaaaatcaattacaatctcatttcaaaacttttttcacacacaaaaatagaaaaataattttagaaaataataattaaaaaatataaacaatttcgaaaatacgattagcattatttttatctattaataaatgattttacaataactgtatttatctgattatcaataaaacagatatattcacttcttcattgtgttttaaactcatataattgcttattctgccgtctcatataaatttgccaatgtttatgtataaatatatttatttatatattgaagaggcactaattattatctgatgtgttgtcatgattatatattgatattaccaataaaatatatttgtttgaactagtacatcacctagtagtataagtagtagtagtacaataacctaattattgtctgccatgattgagagaagctaatgacattattcataagagaatagctaattaaaaagtatagtttgcacccaacaagtgttggtgggtgtgaatattgcttttttggtcttatatatttttaataattaatataaatttttaattttataattaatacgagataataaaattggctaaccatttctatattcatcactcatttgcatattatagagcttccctccttcctactcctacttcgattatggtggaagcctggtgtcctcaccctcgtgattagattaaactgaattgcaacttaaaagttgatttaaaaagcatgaatattgcggtagtagctagaaacacataaacgcgtggtggcttgggtaagcacgaccaaattggatttttttgatgccctttgtggagaatggctgcgtgttgttcggtcctagataaggccaaggaaaaatgattcaggttcattcttgtggagtgcgactcaagggtagtgatcaattctctcaatggcaaggagactcgatgggaagttgagaattactctgcattttgtaatagtatttctccttattttgtgggttgtttattttcatgtattggtcgatcatgtaattttgttgtccataatgtggcaaagtgggtctttacccacaatcagtatggttgcttatctgtattctctatcccgataaatattttgtgtaatgaccgcgagatctaactttttatctatccacgaactattttccttaaaaaaaaaacatttctaaacggtgaattagtatattggataacttatagtgcgtaacttatagtgcgtagctagcaatggtgatctattaaaagaattttgattactgatagcaattgcaatcactttccattccatgtagagatgtatcccttctcgatttgggttttctcgaaagaagatcagttcgttatgatgatacgaatcaatgtggggatatcctttttgactggaatattttttctttgtgaggaactggtttaccacttatgtaaagctttatgtgaacccccatatatttgttattaaatgatcccccatgactcaacttagtacggagaacttttatattttttttattatttttcttttaattctattcaaattttagcatatacctagtctataattaaattaattataattgcctgtggacgttgcgaaagagaccgttaaaacaccacccacctctagctatactcatcataaagagtactaataacttgtactgactttctctaaaatatatatctagaatcaagtgtagacatgatatatctctatattatttttctttcatgaatttgacatgtatatatagtttgttagattagtttatacgtatatatagctgacttagaactcaataattatattattattaaagcattcgcatggataaccaaaaggattaggaggtcatttcaataaaagatcaactggtattaaatttatctcaattaggccagctgtattagttgccgaaacccacttagctacaagataggctattgaattacacacataagaaacccactcaaaagaataacccttatgattagaacgaaatgtaacacatgacttaacaaaactagaaatatcccacctagctgaagtttaccaagttaagcataaatcatagtgagggagtcatactcaatccacaacaaaatccttcgagaaggctgtgaccatctctaacacatgttcacaggcagcgacttcgcctagtgtaacgtgcgtgccaagatggcacgttacaagctaagtgatgcccacaagttagccaagtggtggtcaaatggtggcgcatgttgaggtgcatgctggtagcatgatgatgtttagtttgtacggcagtgatatttttgtaaatatcttcaatattgcccggattgggatgggacttagtattcactatttatttgggtctacgaatacaatggtgcaa

SEQ ID NO: 301843 - DNA, 3323 bp, Cannabis indica
atttctttctctttttttttttcctggtgttgtgttgttcatttgaacataattacccagaatatacaaaacacagctgaaactcctaataatgaagccgatagaatatctaacgttccttccgtcctcactttcctctctattctcctcattttcctttctaaatactcttcgtatcttttccttcctcccatttcccttctcccactatttacccttttaccctccaaagcttttcgtaaaattaccaaactctccttccctttcatatgccttccatccatgtcctcaaccgttaaacacacttccctcacctgcaacaattccgggccttgggaaactccgcacgtgaccacagcatcgcacgtgacagactccgtcgacgaccctttatcccccccgccctccaacaccgacgcaaaacccacccgaacctcaccgctcagccagtgacgctgtacggacactggcttgtggcttgagaggttaatcgctcggcttcccatcgggtcgatcacaatccagctcagcgtcagttcctccgccagattccggcacgcggtttcgttgtcgatttcgtttccgttcgggtacggtattcgggtcgggacgatgtctttcgggtgaagcaggtcgacccggaaaggcgagcagcgaaaccaccccgacgaggtttcggtcacgacgaccttgctgaaaatgagctctccgcgatagtggaaatcgacggctgagatgaattccggcgtacggtggagatcatcggtgccgggatttgagggcgagctattatatgtggtggtgattagagggaaggaatcggcgaagaaagatcggtgggcgccgtggaaatcggcgatgacttggcggacacgtggtgagcttgtggaaggccacgtggaatggcaaatgttggtccaaagagtctcttccgtgtagagggagttgagttgggccgaagcgcagcccactgaggccagagttgggccgtcgagacgagtgaggatgtgggtttggattatgtcggaatgaagggtggagattgaggcggcgccgtcgtgatggacggtcgataatgaagtggaggaaggtataatagcaatgtccattgactgtttgtttgtcgttcccaacaagtttggacactcttaatttggagtcctctttgttagtttatataggaacattaatcattaggttgacaaaattgcccttaacttactttttaattatgtatcctccaaaatattggctatgtatttttatttatttatttaatggactgtctttgaattaattcacatcacaaaattaaatcacggaatgaaaacttaatttttttttttaagaaaattaaattcctaatctacacacacaaatagggtccctcaacttcgctacgttttatttttgaataatttatggtataaatatttaattttaatttataattacaaacaatttctgcaggtacttgttaagtgttaagtaaattggaacgtgagaattcttgattattacacgttattaaattttattttcttaaaaaaaattattttaaatgtaccaataaaaaaaatgacacgtggataataatttcacatttaacggtgatatacttatggagttctagaaatataatttaggtattgttactattaaaaattaaacttaggtatttatttacaacttaaagttaaactgaaatgtttataccgtaaattattttttattttttaatttaattctaaagcctgaattaatggctatatttatctatttaatgatatgcacaaaacaaaaaaaaaaaataattgtaatagaataatgatttgagcacatttaaattacacacactttctatacaattataattaatcttaaccatataataaggttatcttatgtcctacttaaaaataaaaataattaatatttaatacacatcattatgtgtaatttatatgcagcattacttagtgtaatattactaactgtataattagtaattatattatatttaaaaatacaatgcatatttatatgatgtagtacttatatatgaatattcataatattttgtttgataaattattagtaattatatatgaaaatattatttttaatagtttatatttaaaatgaaagtttttaatttttacttatagttacacttacaacatgtttggtgaggtggaaggagaagagaatacataagatggataatacgaaggaaggtgaagagagtaattcgtttaaattatttggtaggagaaatagagaagtaaaacgatctatcattattcatttatgaaattgctaaattatttttataataatatttttagagagtaattttacaattttgaacaaattataatagagagtatcaatctttctattaatagaaggatttaaaattgtacatttgagtggatttatcatctcttacttttcatttccttggaatgatcttttttgccaaacaagagaatgaatgatccttcttgccaacaaaaggattcaacctctcctcccacttatttcccttctttcctttcccagctcctactttttcttctcaccaaacaatgttgattctcctaggaccaagtgatttagaaagcataattaaaatctctaaattacttcaaattacactattcaaatatatgcaattacgtagcaatgtcaaattatattaattaccattacactcaaattcaattcttaattatattatttttcagaggaaataacatagcatttggttggaggtaattaaatgaaatgaaatagaaatgaaacaattttcattccattcttttgtttagttgcatattaaagtattaatggaatgtcattttaatagaatgacttttccactattttggtagaataactaattttgaaatataaggaaagatcattcatatgcacgataaaaaaaaaattaataatttttttatcaatttttttcatgcattttaaattttatttcatttcatttctattcctattttcgttctcattcctattcttatatttttatttctcctaactaaatctcacttaaatgtaacattgtctgtggtacctattttgctcttgaagaattaaaattttgtgcatgcttttacatgttaacatgcatcaacattttcttttttggtaaattccttataacttttaaggtaattttttttaggttaattagtaatttttctcctttgaactttgagatgtagtaaatcgtgtcccctgaacttttttgtcgattaaaattactccgaactatgtagatgttaaatttaaggtacttt

SEQ ID NO: 301844 - DNA, 2072 bp, Cannabis indica
ttgtgatgagtgtatgacacattacacatagtgtgggtttaaatctcatgacaattctttaccaatattatttatatatactctaaaagtgagggaccttaaaaattactagccttaggactatggtatttttacgggcaacgcccggaccgggctcgcaagtactcacctataatggtgcagagattatccatctaaatggggatggggatgacactctccgaggatgtgattaatatattactttttatttgattaatattttatattttatgttatatatttgtatttttttattatattagtgtcatttttataaatatttaagttgttgcgttttatataataattagtatatttaataataaataatgtgtaatattataatttttctacaatttaatatttttatatagttttttttttaaaaaaaaaactatttttatattagggggatttcccaccctattcccgccccattaagggattcacgccccgtccatgataggaattaaatttcttaacggggatggagacagggagaggactcccatcgcgtcatagttgctctcttttaagttagaagatatagagagagaataattagtaaaagtataatgttatccatttgaacattaatattatattatttagtatttttactcaccgaattatgaactatgtattattgtgcttctcaatttttcatttccttaaaaatgttcttttattcacttgaatcatagtgtattttaaattatcctactattaggttatcacatatatatgacaaacataataatgacatggatatttagatgacattttagtgtcacatgtgtaattaattttaaaaaaattaatgattttttaaaatacatatttttagtgttttttatttaaaacacatgtgacactaatgtaacaataatataaatatctatgtcatcattttgttttccatgtgtaacaaaatcaaataaaagattactttacaatgttgtgaatagttcagaaattatttttaacgagctaaaaaattcaaaggtataataatacataaatcagagacaaaaatctcaaatagcccaatatctattacttttgaaagataattttataatttatacattttattttgtcttttcctttaatcctcccataattggatggactaaattttttgctcttaccaaacaagagattcaacttctcctttcatcatccctctattcattttcatgaacccatctttcctttgttcctaccaaacataataaatgtatttccaaacttacctcttttttctttaattaattaccaaatcaatggaaattcaacctgccacgtcactcctactttgtaatttaaaccataaataggagatataggggttacactatcaaattgacttttttttttggttattattattatcaattatcattattttttttttaaaaagtcaattatcattattatactaccaaaaaggaagaaactcatatggttaatatgtatgtcactactcattttgtcttgtttggtagaaaatagaaatctcctcatctaattatgtacgattctatgtatttgtagttttaataattattaaaaaaatgattttgtttattttttattgattttgatatggattagaatattatacgttctataaaaataatatacattttttatataaaggaaatttatataatttacaactaaaaacagattttttaacattttttggtacatttttcttaatttatatttttaagtaatttctcaaaaaaaaaaaaacgaattttttttaacaagttttcacttgttttttctatggaaaaatatattttcacacaaaaactatactctatatagttgtataaattacattattttagtaacatcaaaataagataaaaataaatatttacatattttgttaaagaaaaataagtaagaatatagaagaaaaaactaacaaaatttgtaaataatgtaaaaatttttagttcaatttttgtatatttatgaaatgattccttttattatactccaaaaccaatgag

SEQ ID NO: 301845 - DNA, 3579 bp, Cannabis indica
tctctctctctctctctgttgttcatctctctcattagagatctgcctacttgattcacacgttgtatccttatactgagttatatcagatccctcctatagcgatcagaatagtattatctctaggtatcaataaaactaaaaggggagtaggtcattacccgctattataagggggtcgaacctctataataaatctctttattttgttcctttttttttcttgtttgtgtaacaagttgcaagcatcagattcatatgaccccgccgtcggttgatcactttttgaagtcaataatatgcatgtcgtttaaataatacataactcatatacaagttatatatatatatatattaacatgtaacatactaaaataatataatatatcactaaaataatataaaatatacattcatacatatataactcttatatattttttacctataataacatattaaaaattcatatctcaatattgaaaaatatgttaatatatatcactattatataaaatagtaaattataatttaccatatttcttacctttatattgtcacatgttgttttgtttcctttttggttgttaagaaatattgtgcttcattagaaaaactaaatcaataagattacaactctatgacaaataatatataagaaaatatatatattaaataatgttacaactctattgaaaaaatacacataaaatagagaatatgaagatgaaaaaaagattacaacacaatgctataaataacatgtaaactacaagatagtaaatagcatatatataatgtgagaataatttgaacaccacaaccacaagtgataagtagggaaatcaccaaaatttggacaagattttacacctttgttcaaaaaaaaaaaaaattcccaaccacaagcactcagggaagaagaatagaaatagctttctaagtttatcaagcctaatatgtttctagcaaggtgctctcttgatagaaaatcttttgtaccgaaatgaaccccaaagacttctatctatagtattttgtgaaccacatttgaaactcacattccaatggatgttgcaatttggtttagggccataaatagagataagaacattgctcattgatactgaaaatgtccccattaaattccaaacgttttgcaacattttgttcaagaaaaggctccaagtaatatgtcgttggtcaccaggtgacacgtctcctagagcaaaacatttgaaccttcgagatacgtcgtgtcgaaactacacacgccgatttaggcaacatgttgcctgaaacgtttcttcagctccaatttagaatttttaatctcctcaacgagataactccaattccaatgttctcatgtaacataaatattttgcaacgttttgatccagaaaaggctccaggcgatatgtcgcctgtcactaggtgacatgtctcctggagcaaaacattaaaccttcgagatgcgttgaaaatatgtcgaaaaacactacatgtaggtttaggtgacatgtcacccagtaagaggcgacatatcgcctgaaatgtttctttagctcctatttaaagttttgaatctcctcaataagataaccccacatgctttcattactcacaaatatatttattcttttaataacatattatgaaatttggctcatgatttacaaatttatttttgagttgtaacctatcttatatatgttaaaaaatatgtgttttaagtatttatatctcatataaaataacttacaccaaatatatattaatccatattaatatgtaacatgtcatattttattttaatctagtatgatattatatgttaaacaattaatataacactatattctttagatatcatttttagtcaatcaaagattttgtgtcaaaaattatgataatatatataatgtttgaaatagtctcctctcaagtcccaaaaaatcatcatgtacaattggtataactgtgtgatcatcgatcaagatttccattttatataataaatagatagaatataatatatatatatatatttgtatgattaataatgatttttttgttgcatacaacatactcaataaatacatgggaacattaaaaatcaacgaatttagttaacataaaatattttttaacttataggatagagaactcattcaatttcaaaacactcataaaaaggtaatcaatactgcctgttgaatggttttagtttagagtgttgaatggtttcagtttagagtgttgaatggttttagtttagaggaaaaaaaaaacatgtccttagacagagtaaagatgaagagaaatctttaattgactggaaaagaaaagaaaaaaaccaatgaaaagataaaacttaattaactactgcagttttaattacagacatagtatctttgtttcatccagtaaattcttcagcatattattatattacaacactaattaataaggtgaagacaaaatatcatgctcatattcttaatctttctatacaacaacatgtggtttgacataattaattatttttaaaaataatggacaaaatcattttgtaaagtgaagtacatcataaaacgaagagcaactttgcaaaaggaaacatattaatcctaatcgaaatgaggaagagtctaattaactaggaattggattgattaatcgaaatgagaatatttgtttacttgaaatgagaatattgattaatccaaatcgaaataaataagaatttatgttactttgaaattacaataggttattttaagttaaaaaaatacgctttactataatttcaatattgaaatatttttttagttgaaaaaataattaaaaaagattaaatgacattttattattttagaatgaataagagtagcaattccaccaacttcaaggaattaccaacctcacggaattgccaattccattcctcaatcacaaattagtatagaacccacatataactttctcattccttaaaaaaattaaaagagtaacaagctaacaaatcctattctttattcccattatctattcccacaagtaaacacaccataaagtattagaaaacatatagagagacctctaaaaagaatagaaagaaaaagaaaacatatttattacaccatcttttttgggagatatatactatattttaaaaaaaaaattgtgatatatttacattattttttaatattattatctaattaaatattttcatatttaattaataattattaaaattctaaaaaaattataacttcatcattaattttataattattttattatataaaataatataaaaatataaataattctaatttaatattagagttaatatactaataaaataataaaaaataggataaaaataaataacaagcgaaacttttatagtgatgcaagttctgcatatgtcatagcaaatattcttctaaatctaaatttgcaccaccttttgacataccattaaaatacattttcaggtaggtgttgagcataaatattttacccaataaactgttatagaaaggaaggcattgttgggttttatgc

SEQ ID NO: 301846 - DNA, 2929 bp, Cannabis indica
agtgaggacaaaacacgctagaaacacttgtgttagtctgtagggtcagtcatcaatccaggaagtagccaagctggcatactcgtgtataagaaccatcattccgtgggtgtaaggacccaatggaggcttgaagcgagaacgttacactgatcgtcaagtaggttttttcactcaagttaatcgacacacctaaattcataatcaatgtaagattaatataatgatatacatgcttagtgtacatatttttataattgcctattagataatatattagtaagaacgatatcagtgtacatagagttgcactggatatcgacaaatttatgtttggaaatttctaaagccattagtttagcatatcagtaagaatggcataggtgtacatagaattacactagatatcgacaaatttatgtttggcttatcaggaacactctagactagtacgcgttagatgtgggataggatcgtgattaggtgtatgggtgcctagttacagtttagttatatgtttatatttatatttttcttactgagtctgcagatattatttgcatgtgcgggtaagagccatgactgaaccagaatgaatctagagctggatgaagattgtacatatcaagactattaacctagaatgtttgggtcttcgagacaatttatgctcacattttgattgttgttgggcgataacttttgtataaaatatatttttaaaacagttgtaaacttttaacggtatcccaaaattatttaaattatgtttgtttattcaagtttaagtttatttaaaaagttttaattaattacattttccaataaaccctgagtgtatagtaattaaaaaaatattgtagcacgtaattcggtgtcagagccaccaggttgttcttcaaatgtaacaccctaacaataggaacaccacaaataatgactaaacaaatgctaatcctgctaaatcgagattactagagctaagagcaaaaaattaacctttaaaacgaacatagattaaaatcataacttgtatttatcaaacattacaaacatccaaaagattacatttttgtttcaggactccgtaaaaacttttcaaaatattacaagtcatcagtacacgccgacctaagcagcaaaagtggagaacacaacatatttcccctggtagacctaactcatgtggtctagcttggcctaaacatgtataatacaccgcaaaagccctcaacctcatggctgatcaacaacagatttaccctttcctgcacacaatagagcacctgtgagccaaggcctagcaagacaatataaataacaatatgcaatatgtaatataatcaaaaatcatataattattgatgccactacatctattatttattagacatagacctacgtgttacacccacatgtctatttacaataaggccttagaatgttttatctcgtttctaattactgagtctatgccttaaccatataattcttatatcaacatatacatcataatattgcattcataatcacctaaattctagagtaataaccctagatcacataaccgctaagtttaggataatcaccttaatctcgattttccacatggcatacacaaaataacatatacgggcaccacatcgctaatctctatgtgctagtttattgtcttacctggtaatccaagaatgtggagattccaaatcactgagtgttcttgagcaagcgtcggtaatcctagtcacacattctcgacatttcacaaataggttaatcccaaattcatttttacatatacacataatttgaattacatttacagattaacatatagaggccaaaacgagcttttcaaagatattcagaacatccaaaacggagttccgagtcaaaagttatagcaaaaatgagaaaataaaaatccttgggaaaaataaggcttcgccgcaacaagccaagctgtggctgcgataatgggccctggaatcccaaacatgccaactattcaaagcttcaaaaatcaacacaatacatacaaaaaacctattcaaaaccatgtataatccactctttaaactaaaaccaaaccaatctaacatcgatattcatttgagcaccacacaaggctaaacaaatcaaaatgaacatcataattcaacatacatcacaaacaccatagatgcacacaattgcacaaacttaaaatttaaagcttcaaagaaatactcataaattaaacattacagttcaaccctataacctcccaaaacaacaaggatgcctcaagcatgaacctaataacaaccacacacccaaaaataccataattcacactattttctacaacatgcaatcataagctaaagaacatcaagaaattctacaagaaaatagatcaaaagtaattacctcacacaagagtatacacaaacacaccaaatccaagctttccacaacaatcaatttgaaatcatcaaatggtgagggtgaggaagagagggccggttgggtttgaaagaattcagaaaatggtttttattttgataaagatctagtttttgttgaataattgcttaattggctaaatgaccaaaatgcccctacgacatatataggcataaacataaaaaagagtaaattggtcattaccattcacacacacatatatcacataaattatattttctcatttatcacataaatgccataaataaattccgaaaatgtattttgggccatgaactcagttaggcacccggttgtgactataccgcgtccacttgtcagaaaatagatgcagataaacagaataaacatactatataatagtatagtccataagcacagtatatcataaaattatgattttactctttctgggtcaaaattacaaaaaatatccatgacacaccaacgtggtcttaaa

SEQ ID NO: 301847 - DNA, 2363 bp, Cannabis indica
aaagggaatgctatgaataattcagaatatatagaacaaaacctgagaacttttagcaagttcaagacaaaaattgaatgatggacttagaggactgcctgatcccgctccatagcctatcgccccactccaattcttcaaatttcgatactttgcactatctttgcttccatctgagcaaaacatggggaagggtgggcatcaacaaatgtgaacaacaccatatatttatttatgttcaaaatgatatctaaatcctacaaatgcaaattgcagggctgagtttacacacctatgcccaacccaacagtgaacatagaatagcatcacacttcggacaggtaaaaacaataatataaagtttcagtcaaaatgacgcaaggcaacagataagaaatcttagctccaggaaccgcatcataaattagcctatatactttgaactagagtaaaagaaaaagaaaaaaaaacttacagtcgggctcatactgcagtccagcaattacccttcccaccttactcacgagccatgcactttttggaaattcatctctcactgcaaagtatgaaaattatgaagagttcagttcttaaggtaccaggtatgtttggatggaagtaaacaagcaaatggaaacaaaaattcaagggcattctagaagtaagaaagatggtagaactaagatagtatcactacaaaaccaagaccattactaaaggattaaacgtaaatgataaagaaactcataaatttgatttcaggtaacatacaggagaaaggcatgcatgtggctccaaaggagaagtttcttgaaccatatctcaatcccacaacaccatagtcttgggaagatactctacaatgaataggaacatttcatcaacatttaagttaacgtgtgcacactcaatctaaaccaaaataaaaatctcaaatttgcctaaaacaatcctgatatagctgcaccttttcctcatcagcaaagggaaaacgccaaatcctccaattccaagtttggggtcaaaaaagcatgatctcatttgcaaaaccctgatcgaaacaaaacattggagtatgtcaaaagatacagttttaagtgagactaaataaaccatttttcgacaaaagagcttcttacggatcagagctcgacacgtaaaggtcaacaaatgtatgagggtcatcaatatccctgcaaaaccaaaacaacaagaagaaaaaaaggatcataaagaacttgttctatacaattttaacgttcaaagagctacataacagaagcaattcatttgcaaaataactttacttgtacaataccgttgccagcggaaaaatgcattgccaacaatactcttctcaggtttgtgatccaacggacctgaaacctaaacccaatcaaggaaacaagaagaaaaaaggagtatccccgcattccaaatacaagaattaacatttagactttgtttacgaattcacaatggccatgaaaagaataggaatacagggaaattttcgctttctcatctatccattcacgtgtctatatatacatttatggaacaacaagaactaattcgaaacaacattaataataatcaaatgtaagatgtaaataaatggaagaaaaaggatacagtagcaaccaaatcgacatggggatcatcgattggctttagcattatcattgtcctgaaatgttgagcttcttcgaaataatcctcgaagaggcatttcaaagcaagcttcccaaataacaagttatacgacgactcaaccatcctgcaatacaaggaagcactaagttgagttcaaattgaacaaaagcatcaaaatcactgaaaatgtggatgaatgaggataagtcacctggtacgtgcagcgagaggaggaaaatcaaagagtggagggacgagcaccattggcggtggcggttccttgtcgaagaagttgcccattacagtcttgtatatatggctagggttttttaagggtgttgataagaagaagaagaaagtagcctaattaatttcaattcctcgcctgctgaatcggctctcgctccctctcttagcctgagaaacgtgtcagtcgcggcaaccttctcacctttggacagaacaaaccaagcaatccggcgggattacgcattcctcacatatgggcttgggctattcttataaatacaaaatgggcttaagcaaagacaactttgaattacacatttacaattggggtaagttgaaaaatgcctcttttattcatcaattaatcaaatttacctctaattttatatttatttgaaacatacctctttttatatgtattgtacccaaaatactcttacataagagaatcacatgga

SEQ ID NO: 301848 - DNA, 3639 bp, Cannabis indica
ttaatataattatctttttaaaattctcaattttatcattaataaatttatttaacgagcattgttattgcgattgattagcgatactctaaaagctattatattaaacaatataaaacttgatacttaattagaccaacaacgatataattaacacataagaaagtgctaccattggtacactttagcatttctcttatttaacaacattaagaaggtgtatttgaatctacaacggaagaaagattaagaagggtgctcaaattattgcattaagatacaagtttcaaaacaaagagtactcaaaatttccgaggttcaacaaagatagatgttcttctcgagggcacggcaaagcatcctgtggtctcttcataagtagacgccttgactccttgatcactggacattagctgcaccatattttcatttgagaaaaaatatatacatatatattgccattaaatgtagcaaactctcaaagagtcactcaaaatgctaatgaaatcgtgttttgtggttaggaaaaatctaatgcccagaccaaaatagcttatcaattctttgtttgaacttctataaattccaataatttaaaattagtattctttactatgactttattttaaagttcatacagttaaattattgttcaaattcaaactacttttttatagacaactcaatacgagaactacaagtttcagaatataatatagcaagtaggcctaaaagcaagggaaaaaaactaatttaggatgtaattcaaaatgtctagctcttaaatggaatttagttaggagaaatgaaaatataaaaatatgaatataaacggaaatgagaataagaatgtaaataagaatagaaattgaatgaaataaaatttaaaatgcataaagaaaattaataaaaaaattttaaattttttcttattatgcataagaatgtttttttttaattttaaattaaaatagtcactctagtggaaaaaacattctattaaaataacatttcaatatatattaaaataacattctaatgtatacaatcaaataaaataatagaaccaaaattattattttttttatttctattctatttcattaacaccaattaaaaactctcaaactggtgaatgacaattgaaacaaaaatctccagcaaaaaaaaagacaattgaaacaaaaataaataaataaataaatacataaataacaagaaaacaaaaagaaaaagaaaatcctaacgataacgtcaaataaaacgactgaaatcacaattttactggttgagataactgaggttgactttcaattactaagagtccaggagtagaggatgggccagtgttggggaagcgcacccgctcgaaaaacattggatacatattatattatcaaggctatgttggatgaacgctggagggagtggccgattgtgatttgttggccaaatgcctccaaattctccataccttagaattttcagcaaaaacaaactggaagtacctcatttacaaggcatcataactcatttctcaagatgcaaaaacaaacaaaaactacttcaaatccatgcacaactaattaccaccggcattattcaaaaccctccaattgccagcaatctcattgcttcttttgcctcattttctcttcccactacaatctccattgcccattcaatagcaactagagtagagggtctggatactttcacttggaacaccatcattcgaggttatcttgatagaagcaatggtaaacaagctcttctagtttattcccatgtcagaagtataggtctcaatgtggatagttattccctgcagtttgtaatcaaggcatgtggacttatttcagctgttctccaaggaaaacagatacatgcccagaaatgcaaattgggtttttcatcagaggtcatagttcaaactgctctaataaatatgtatagtttatttggtgaggtggattttgcacagaaggtgttcgacgaaacacctcagagggatacagtgatgtggaactctgttcttgctgtatatgctcaacacaatatggcctatcaggcacttgtgtatgctcgtgctatggtaaatgctggcttgagacttaacggggtcagcgttgttagtgtgctatcagcttgctcgtctttgaaggccttgagagaaggaaaggtagttcatggctacttaattaggcaccttattactgatattgatgtaatagtttacaatactcttattgacatgtactcaaagtgtggatctttatggaatgctcaccagatattccgggtgatgtccataaaaaacgtggtttcttggacttctatgatcaatgcttatagctatagtaacttgttcaatgaagcattgactttgtttcaagaaatggaaggtgaaaatgttacaccagatgaggttaccatgctgtccattgtttcaatatgctccaaactgggaagctctgagcttggagactggattgacaattacattaagaaaaataggtttaaaaagtttcaaagcactactatgttaaatgctctgatggacatgtatgctaaatgtgggaacatcaaaaaagcttgtgaagtctttgactggatgatcaagagaacattagtgtcttggactactataatacacggactagctatgcatggatatgcaattcctgctcttctccggttctctcatatgcaaagggaaggttttaaaccagatggggttgtcttcctcagcatcttatccgcttgcagccatgccggtttagctgatgaggggcgcaaatgttttaactcaatgatacaggaataccacatgaaaccggggagagaacactacggttgtatgattgatcttctgtgcagaggtgggctggtgaatgaggcatttgaacttgtttgcagtatgcccgagaagccggacatgatcatgtggcgtatgctaataggggcttgcagaaaccaaggagatatcagtttggtagatgaaatatctagccatttaaatggaaatggaatggggcctaagtgtagtgaagactatggactattatcaaatgtgtatgctgaagcgggtcagtgggtacgtgtaaaagagattaggaaagagatgaaaattaaaggtttgatgaagcttgatccaggttttagctctgtagaggcatattaaaccttaaaggtttgaccaagacattaattataggtcagtttaagcttggattatgccacgatcatgaggttggttcccttcccttttcacttgctaatggatttttaatccttatcatgaagcaagcgctgcataccttgatgttcctgaataaattaagaattattactcagtctgaatagagaagatgattcgacatggcccttaatccatgtcctactttcaagttttccggatggttgtgagacagcatctaataagagtttctttgtaatttgttagttctaattaaatagtttgcatctgtattgtccaaccgtctcttggttcttccctgtgataccattcatctgtttcagattaaagatttccactattgggaatgatcaaggataatatctttgctcaaatagtattttggaccctgtgttttgttcaaaataaaccatatattt

SEQ ID NO: 301849 - DNA, 2118 bp, Cannabis indica
gccggcaaaagctggttttcttgtagtgttaatttataccgtgggtccatttatttaatgttttgtttttaatcttaagaaatctactttttttttttattatacaatgattaaactggaaggatacattttatcaaaaaaaaaaaaaaatcagaagaatacaatatgtaaacaaattttagtttgagttgaagagttgttgagtaaaaagagaaaaaaaaaaatctactgttgaaataccaattttcaaatcaagaagaaaatttaataatatgattaataaaactacaaagaattggtgaaatttttaagcccatttattttcaccctcttatagaaatgagaaaggatgagatccacatattaacattaatttttttatcttataattttgattcccaaatgtttcatcactgagtaaaagttattattttacattatatatttttttcccactgtgtttttccttccttttttttttttttttttgtagtaaaagttcactattattaaaatacttaatcatttacaacaatagtgcaaataggatagggaatttcccctagccaacaaatgtcttgatccaactctaaagcatgtttagccaaatcatgtgccgcatggttagcatttctcttgacatgagagatacgtgcttcagggaaaaaggataaaagacatcgaaaatccaagattaaatcagagaaactagacaaatctaaagatgtagaaattagagcatgataaactcgaagggcgtcaatctctataatggtgatgtttagattctgctgcagcgcccaattaaggctatgaaaaagcgcttttgcttccatttcatccgaacggaagcaaccttgagtcggcttggagagtgcagcaataacatttccacaatggtctcggacaatagcacccacacccaatttttttgctgcagaaatcgtagcagcatccacattgagtttcaaaccaagagcaggtggggctgcgaattagtccctgtggtgccatggctgctgctagaagaagtggcagcagtgttagcgtcagttgaacttgagagcattcgtttccgtatggatgagtgcctggatttttctaagtatgttttgcaaacgcagcagtttgtgtcccatctgaggttctattaccatgtagagccttatttctactcgaccatatagcccatagtatgcatataattagctcgaaattagtttgtgaatgaatggtagaaaggtggaaaatataatcaccattatacatttgttgcgctttgcttgaatccatgataaaactattttgtctccaaacagattttgcatgaggacaattaaaaagagcatgcccaacagattcccacatgcaagaacacatagaacaggctgccaagtcaagaactttccgtctgtgtaatgcagcagcagttggaagagcattatgcataactttccatgcaaatattttaaccttggagggaagagttaaatgccaaaaagctttccaccatgaactatgtaagtctgaagatgaagattgttgttgctcatccaagctagcagccaaatgaaaacccgacttaactgtgtattcgcccaatgttgtgtggtgccaaactaaacggtcagcaggaggcaaaaatctcaaagggattgagacaattttgtcaatatcaatctgaccgaagtagttgttaaggagatcaatgttccattctctttgtcagtgataaaatttacaaccgggaatgaaggatgacctgtataagtaattggatgaaactccgaatggccagaaatccatttgtcattgccactttgaatgtgaaatccattcgcaactttatatcgaaggcctttaagaagcagttctcgttcccaatgaatgctttgccatgtaagtgagggggagttgccaagtcttgcttccaagaacgagttatttgagaagtatcggctctttagaatcctacttagtaaggatgtgggcatgtcaaaaattctccaggcttgctttgcaagtagtgcttgattataatggacgaaagaacggaaccccattcctccttcaaatttggacttgcaaagtaagttccatcttttttaatgtattttt

SEQ ID NO: 301850 - DNA, 1727 bp, Cannabis indica
aattagtaacttttgtaaaatataacaactaaaatagtattaacccttgaaccaatattagtgagtgcaagggtctatgtccattggctctaactatgtaaataaaaatattaagcaaataaataaaaaaaatagattgaaatttaatatactcacaactttgttaatattaccttttaaaaaagaaaacttttaatattaatatttaacaacgtcaaacaaattatttttttaaaataaaaataaaaatttccattaataaacacaaatcatacaaaatccattacataaaaatagatgtagttcatagattaaaatcaacaataataatgtaaggttttatttaaaagaacttaaaaatatttctatctttttattaggccataagctaataagatggttcataacttttctagaacctctttattctatcctgattgcaattaaaatgtgggctcagttgatttgctacattttttggtagctgaagttattggttaataaaatgatgattttccattaaaaaaataaaaaataataataaacataccaaattattaatcaaactattgatcacacaattttaacatattatattaattatgttagaataatatcgatttggtacacttcatatttggaaaatatgatcacttgaatttgcaatgtggaactctaccaaggcaaaaaaataaaaaattataagactaattaatatttgttaattaagtttttctaatatgtaggaacctcacaaattgacacgtagaacataaaatataatatatgtttatgcttcaaagtccatttttgacttctaaaaatgaccaaattcataggtttattattatgacattttattttagtggcctcattactaagaatgtatgtagatatcatcattaataatccttttttctagatataatgataattaaacatactaataattataatgtcaacattctttgaaccaaaccaactaaaaagtctcacccatcttctctaataattattagatattgatcatattcatatttattattacataaaagtttttagatgattatatgtaaaaatgatcaaatggatcatcaaaaattaattttcatgccaccaaccttaactttagaatggaattagttttagatgattattttagtattttttaacacttgacaaatttttattgaaaaagatcaactgggtacatcataaataaaagatgaaattttccatctaaatcagctcaccattcactttaagtgtgtgtagttaattcatgcataatcatatcgactaaataatttgcatgaataagagatgcctaagaaaaattggataataactaaaaaatcatctaaaaaaagcctaaatcaatgcaaaaagaacatctcttgaaaaatgcagagattaaagctaaacacttagactcaaaaaataaagagaaaatccaattccaacagccaaatcaatgacacccttagctttttttcatcattatattctacattcatcttagtctccttctttcatacccaacaaaatcaaaataaattaagagtttttttggaggttaaatccttgtaactattattttacttgcatttaacccttcaaacttaaattttagtggtaaaaccttcaaaactactgaatgttagtaaattaaggtgtcatctaataataatattaaatatattaatataaacgtatcatgtgtacaa

SEQ ID NO: 301851 - DNA, 2274 bp, Cannabis indica
tagatattctgattgtatcaagatacaatcgaaatcaataaggaaaaagcaataatcaaggtttccctaaaaaagataactttccataagagaattgcttctcttacaagaagtttccaaacaaaggaaagttcagttgaaaagtgcaactctcctaacaaggaaaagagaaactacaaatcaaataaacaaggtaagaaatagattatgaatgcacaagaatcttaccataaaagccaaaaaaatattttgtcaactaacttgccaaaaaggactttacagtatgttagtcaatctcagagatgcaataaataacatatgatttaggacctaaaaaatcttaaaagagttaggttaattttataatctatcattcacttaaggaaagaagaatagtagtcagcattaataattgggtaattgaaacaacatgattcatttccctaatttagatttctttgattaaacacttatattgctttattttattttcttgttattttttatcaaaattattgtctaccaaatagaaaaataagtctaatttggtgatattcaattcaattctttgtgggttcgacctcacttgtgtgagtactacttgattacgtgcacttgttttacaatttttcataacagtgatcaatcaaatccagcgttataaacggcctctgggattcacaaaagattacaaggggtcgatcgtctgggtactctctcattctaatttggaaaaggagtttgatggctttgtcaaagagttcgttcattcactgaagaaatcttcactagtttttactctctaaaacttctaatttaacttggaaaatttgaaaaagtctgaaaaatggtaaatggtggtcttactaagtatttatactttggagaaatgatccgcgtgatacccaaatcaatggatcagatttatttttaagaataaaaaatatagatccaacgatctagaatgccatcattcaagcattaaatgctatatttcggatcaatggaaaccgcatgatgatattccccttgagactcgcgctaaagtaaatagccactagtttatttacttcgcgctccaaagtattctcagtgagcgttgatcccacgaactaatgaagcaatgccacatgtcactttaattaaaaaaaaaaagaaagttgtcttccatccatgaaaaatatttggaaattgaaaaggtttcacctttagcctccgccaatccatccatgcagtctaaagcaagcctcaacaacccagagtgttttagatgcttaggggtaaatattctccgtatttttggcaagggaaacgtagaatccaaataataaatacatatcatatatatctaaggcccaatcgtgcgcccaaacaacgtcactgagctggatccccataaatcagcagtccttcctagtaaataacgattaactcgtctaagcgtgatttcatccagcatggtcaccatccagaagacatgtaatagcacaatcgaaaaaacctttcagcatgtattaagaagcccaatgtagtttcttgttttctaccaaatcacacaagatgaggaattaccctcctacaatctcagataagagatcatatctcactaaataaggaagcaaagtaattgacaatcaagtaattaatgtgtcattaattttccatgaaaatacgatacgattttgacaactagtatcgtgatgtggcatccacgtcagcatacgcaaagcaccgcatgggccaggcttcaccagataagcgcaagttaatattttacttgttaacttcccattagagggaaaattgtaactattatgactctataaatactacataaaccctacatgcaaagagttggaatttcattattcgcatgtccaggtaaaagagagagtgcgcataccttcttgtaatccctaaagcttctctagcctaacttaataatatttactcattgactaaggctaattaacgccccaatcacgtaaaaacctggagtgttcttatctcttttatttctgaattattattctttcgctcttacacttaaattattgatttttgaaaatctcagtaaacagtttatataaaaaaatatttaagtaaactcaactttttttatcctttttttctcgaaaatgatttttttttgccgaaaaacttttttaatttctttttcagccaatggaacaatcccaacccgcataatgtaaaaatgagagatttttctaattagataaaaaaattaagtataaaaatttaaatttttcctaa

SEQ ID NO: 301852 - DNA, 3503 bp, Cannabis indica
taacccaaattacagtattttttactaagttttcccctttttttatttagtatatagaactgggctttattagaaaagccgtgaaggaattcagaccatgttttacacggaaaatcgtggcccagatactttaaggccgtggaaggtcagtcatagcccaaatattttggtccgtgtgtatgcatggagttttggaaattatgaacaggaagttttcagttgtacaggcagaatgcatagcaatttttgtggttgtagattggattaccttttcaggattggatataaatgttgttgaatctaattgcttagtatctgcttaacattcttatttcaatgattttggttcattattagaggatataacaagcttattttctaaggccaagacagtgcacatgctcttcaaatggatgaataacttgtttggttagatgactctattaattggttttcaatatcattgcttgaaaaaagaaaaaatgagaaaaaagaaatactcattggtctctttgcatcaaaaagaaaaaaaaaataatcattgatctacctcttttgctaccaacactcaaagttgtcattcttgaacaagaacaaaatcatcatagaaatctcgtttaaaaagtcgagctccgatctttgcaactcattccaacatcattcatctttggctcaactttgttatttttctaggcacttgtatttttgcatttgttgttcgttttattgaagatgaataaccaattaccaatctaaaaactaaaatgcctctggttttgttcatgattctgtgttagagtttcattctttataaaaggcaccatgtccaagcattgatatactgttgtttggttgatagtcttttaaatttaatatgatacataagtattttggtactaaattataccacatatattccttataactgaaccatgaatgtgtcatttaaaatgaaaaatgtgtaacccaacagaaaggaagctcccttgttttctgaaatcaataatcctcaagaaccccaatataagaaactcaaagatatatggaatggaaagctggttcagattaactaaccaaacaggcagcctcaccattaaacttttaccaaaatgtcacattcagcaatggtgccaaaggataaagtatctttaaacataaaatacacaaatctatcaagtatatgacaattaaacaaagctaaaacctattatgtttcttttataggaaagaaccaacatgctcattgtggtacctggttcggttaagccacctcatttgtaccatcttcagccaattctttttgctttacttgttcctctgcaaaacaaacacaaatatgtagctggtgaattggatgcaaaacacagaatctgacttataataatagttacactaacaataccatcaatgcaagttacatttcactcatttaagaaattgataggaattacctacactattcaaacacacacaggcagacaaaaatggaagaagaaactgtggaagtttgcattgctatgtataaaaattcaaaaagaaaaaactacacttgtcctcatgctacatccaaccaattccctcatcaccattcccaaaacacacctgacctgtgcttgtgactccaaggatgtctaagtgcataataattagtattgatggggttaggagttagggggtctatcagaaatttgtgttaagagcaaaacaggtttcataaattctttcatcacacccaagtagtttatgcaagtaacactcaagtgacaataagaaacaaggctcagaaagaatatgcgaaagtgaactatgtataagcgatattcaacaatccttcacaatcaaaggaaaacaaaacagcaaaaacaagaatattgatttacaaaacccaatattgatttataaggaatggaatggaaaggaaaggaaagtacatacccatgagagtataaattgccttctgggttcgtttttcaagcttatcaagttttttttgcacatcccttctgagatcccaattaggttttttaggagctatattgacaaatgggtcctgaaaattaaacaagaattagggtccataaacaagaagataactaaaattacaaacacagtatcagtatcagtatcattatcatatgcattcattgttattaataatcatatacatatacctctttcttctcagatggtggaggctctactgcaacagggtcttcaaatttcggaagaacgggaggggcaaccttggcctcttgaagcttcttatcatgaggaacataatttcgaaatttcatgttaagattcctgcattaattcaaacaaaagtaaataaaaaagaaaaattgattgaaagagaaatgagttgggaagagatatgaatagtagagtactactgacgtttctttattggtttgattgtcatcttcttctggggtatttgagagctcttgtgaagctttgagggctttcagcctctctcgacgttcggccacagctttgtcgacggaatcatcattttcagtagtcatgtttagatatagttcccaagtccagaatcagtctagggtttacgaatgaagatagtctttaaagtaaagttaatgtatatgaaaagaagaagaaggaaggagttacagatctgaaagtgggctagcggtccttaaggtcggagggtgcctccatgaacggcttcaagctgcaataccttcgtgtatgaacggatttattagtttaattctataaatacttaaataaataatttaatttaatttaatttaatttttaacttaataatatatatatttttttaataaaaaagaagatttattaattaataaactcgttcaaaacaatagaacaaaaacaatagaacgcatttcggcaataagccaacttgtttacagatcgtttaacaaaacataacttaacaaaagataaagcatcttgaacaataagaccaaactgtgaggacataaaatattactttggattgcttggacacacaccaaactatcagtttctaacactacattgtcccagggatgagttacaatccaactcaaaacttttttgatgcctatgatctcagcaatttgggattggacatacccaatctttcccttcttgaaagcttctaccatggttccatgatcatctcgagctacacagcccactccaaaccgcccctcttgttcaaataatatttaaattataattatttgagttaaatttaaatattaagctacaatttttttctataatcctatttgtttctttgcaaaatttctctatctctagttttttttttttttgaaacactagtttttttcttcttaaactatatgacctctctaatacccattttaactaaataatcttattctaaaattaattaatttattttttatttttatatacttacattaaagagtttttttttagttttaaccaaaaaagataacaatattataaaaatactttcagctggccaaataaacaaatat

SEQ ID NO: 301853 - DNA, 2384 bp, Cannabis indica
aaagtaaccaatccaaaataaccgatctaatccctacttttgtggattagattggattagatttgagctattgtgcggatttaattagatctaaaaaaatgaaatccgcacttagtgcgaattggatgcactataagcaaaatagtgcggattggattggatgaacacccctagttgagaattcaagaagatgatattcccaagactgaatactatgagtttctagtgatgtccaaagtttaaaacttggctagggcatatctctcatgtatcctacgacagtggcgaagtagattgcccataggaagttgttgggaaccaaaactgatgtgagacgacactcaagatgtcaacctggacgcccaacattgatgttggtcccatgttgagccctggaatgtccacgtgacctcctcaacttcatggttcattattttagggtcatggtgacctatttgttaaaagataacactctgaaatgacttcgctggatcttggtatttacttggattccccttgtgtgcaggtaatatcgccttatcccaagatgtggggcccccagtgttattttcttcctgccacgtgtcaaaaatagtatcacgtcatcaagccagctttctgggtaaacaacttgcaaaaggttttgactacctcttgtttattcaatttgttgaattctctagtgttccaaatgagaatgttgcacctctacatccccaaaattcttagaaagtggttcatcattttgtaacgcactaaaggaattccctctgttgaattcttccaatcttcttctttagaatttcctgtccactattggcctcaatcaattgagaattagaaatatttttattggttattgtaaccactttagtagcagattcatcagttgaaaaagttatagccgcaacctcttttgtgcctttctctaagtggtttggtgcattggtagttaaaaggctcaaagaaccccctactttagaacttggaatcacaacatcagtcttcataagaacccactcactagttttcttctccacaatattcacactgctctgtctaggttgccatttctgcttcttgccaacatcaactccatgcctatacccattgcaatttaagcacttcgtaggtagtcattcgaactcattcaggatagaggtgagttgatcccattcattcacaaatgtatgacagaaggaggcttctcacctatctccatctcaacaagtactctaacaaactcaatgtgtgatctgtccttcgttattctgtcgatcatgattggcttaccaattgtactaatcaacacactcaaataattcataccccagtattgaaatcacaaatcatgaattcaaacccaaatcgatatagatttacaaatttgattgtggaaaaattagttgcccaaggcttcatgatgactggtttgttatcaaaatgctgaacacccccttccagaatcatgtctcgagcttcctcatcaacaaacttaaccaagtttagcctcgaactcatcctcactacctgctcaagactcaatgattaccacattctctttacaaaactttcaaacacttttataatcaaattctcccctagaactttacacactataacaaatttctactaggcacaattagattcaatttcaaaaagatcaagtttagcaacaacctaatctgattgtcaaattggaggcgtgtagtgtaaacaagctaccacatagctggatctagcttgaagattttcccacttctattgagattgctcttgaaaaatagtttgagttctctcatcctctttcgcctaggattttccttcaataatttgaggaaacgatccagtaagtgttccaattttctccttcaaaatgagtggaaaatccccatcacatgcatctacaaactcaactagatcatcaatcaaactcttaatctcaatttccccaatctctttctttgactttagtcaccgtcaaatccactcacaaatctaacttccgactgggcttctttttcttcgccatgcgagagagaaaatcaacttcaataaattttttaatgaaatcttaaattttagtattattatatataataataataataataataataataataataacaataataataataataataataataataataataataatcacgttggttggatgggataataaataatactctcgtgaataacatgcgggaaatttgttaaaacatacttaaaaatttagactattcttttaatataccacattttaacaaatactctaaatattctccaaacaccctaaaatcccaaaagtacccttacaattcaaaactctcatctcccactctctctgtctaactttcccccctctctct

SEQ ID NO: 301854 - DNA, 5370 bp, Cannabis indica
ctaatttgtatatgtgatgatcattcatccttctacataatattatttgaaaaaatttaatttaggtttgagagaatatttacttttgtctttagttagtagtggtatgtctagtttttggatacacattataattttagttggtacaccattctatgtatatttaagatagagtaagtctacaatacacttattaagaatgtttcattaaggatgtttcaatacattttttatttgtatattttacattcaagataatattattttaggtttttttttttattttgtacattgttaattatttaggaccaagtataaattttataaaaatttgaatagcttacatcaacaaaaataaaggtcaaatatttgttggacaaatagttatatttttggcataattttttatactgtgataaataactgtttaaatcttatttttaatactataatatattcataattttcttaaaaattacaaattgtcacacattatcataaaaagaacttgaactaagaaaactctttgaatactaaaacatccctctagcgattgcaattcaaatttctcctataatatatactcaaacagttagtaattttacctcttgaatttttaatactacttaattcttccctttaaaatatacgcttactaaaattttttcataaactttatatttataaaaagagtaatttgcaacataaatacttaagtttaactcccagttgtaaataaatacctaagtttagtttttaacggtaataatacctaagttataattttgaacttttgtaggtacctgaatattattttaatttctattttttaaaaaaataattttatatttttattgaatttctaattacttttcattattttttgatacatgattttataaatataaataagtttaattttttctgcacaaactcttaattcgtttaaattatttattgaattttcatttattttggtttattttttttaagatatgtatttataaataatttttttttaataatatatgttttttgaagtaaacttaatatatttttattaattttatcaagtttttttaataattttttaaaaaaattagagaaaattataatttttaaaattatttttttgcaaaataaaaagggacaaaattttatattagtcaaagtttattgggtaaaaatattaatttttaatagcaaaagaaacataacctaacatatgataattatgtaattgttatattttaggttgcatttttaacaagttgtatattttaaggataagatcaggtatcgtcgaatgttcaaagaaaaaaatgttaactattattattatatatatatatatataaaacgttgctattaagcaccaatgatatccaacactttaatttctaaatgtgatatatcttataattggctagtgatattctttaaaaaaattttgtattaaattattgagcattgctagatgtcatcttataattagttagcgatatttttttaaagttatttttttaaattatatatgtgactcgatatttaattacactaataataatatgatgttaagtataatattgcaatactacattttaacatacttatatgagacaaaatatgtataaaaggaaagtagtaattataactagtcctagctagtagaaataacattaattattagatcgccaatttcaaagcatggaagttctcgaaaagatatacatagcatagcaagtcattttgttgaaagttaaaacgtaattaattagtggagtagttgttaaatatttaatatatatttattttaatcaaaactaaattagattacaatatttagatgtgacatttcaattgattaaattaccttattaattaattaaacatggcctcatcatgtgatggctatggctctatataatatatctatctttgtcacactagctacactacactacactacaattatcactaactcacaattctcaccaactcaccacaaacaagaactttttaattataatataaatttgttaggattaaaaattattttttttagttataacaaaaaattatttgtgattaaaatatattgcgtatttaattatgttatttattagttttaatttataataaatattacaactaaaaatatactttaatcataataaattataatttttgtaactaatatctttaactacaaatattttaattaattaacaattttatttagttttactcacaaaaataattttttttttataatgtttagtttgtattcatatacatattcaaatcactcctttttgcttcctatctaagaattattatttattaattggtacgtactattttgccacatttcaaataatattaattaatatatacaaattacttttaggttaattataatatactttatttgtgatattattaatttatttacttattaaataataatttctcaacttatttagaacgaacatggtacctacttttcatacttaattaattattatctacttataatagggaaatgtgtgattatagtaatcgtatagctcttgatctgaaatgttaattaattagttgtaatttatttatgagaaatgctaagggctattagtggtgtctagcacccttctatgtgtcagtatcgttattggttaaattaagtatcgggtcctacatagtttaatataatagattttagagaatattcctagtcaatcgcaacgtgacatgtcgagaaggtgctagccaccactggtgtctaataacaatgctctttatttataatttatttaattaagggaaattattggtaagatagatatgttacaaacttacatgttaatatatatttcacctatatgattattcaataactcctaatataatatatatatatatatattatatctggccacatgttattttttagggatagagaaatcactcactcaaataatattaataattgatattatgggtgagtgagtatatgtatatatttatagctttaagtccacttcaaattaagtgtctaatgtctatatctcccaactgtgccaatttttgtttcttcccaactatatatatatacatataactttccctattttcattatcaatatgtatatataaacacacccatttgcatattatattaaatgtgaatataaatgaaacttattcccacttgattaattaatgatatatttatatataataagtgtagatatataatttaaccacaaaattctagctgcttccataacatgtggcatttatatccctaataactaaaaaaaaaaaaaaaaaaaacaaaccataatatatatcattcatttacatagatattagggttttctactttaattttttaaataatttaataaacctattattattgatcgatttttatttgatttacttaatgaaaatctttttttttttttaagaaaaatgttataattaattagtagatatttgaattgtgagacttaatattctaactatattataatttcatacaacatcggatacctatcatgtattataatatatatatatatatataatattgagggttatttacattaatttatatatataaagatggaaataaaatataaacgacaaacatgcatagattggcaaatggtccaaaaatatttagaattaattaaaatattaagaaaatattctagattcttccttcagcttatatatttatttttgtatgttgctacttccttcaccctaacacgtaaatttttatacgtaaaataaaaccttcatattttcataaaaataaataaaattcctttttttttcttgagaaaatattaataatatgcaccctattcaagtattttgtatagtagttgttctagctaggtttgtaggatataattgtgagtttgttaaaaccactttgtcttattattgttgaccaattctaatccacttaattaataaaatatattatatatttgtagttattttttttttattattgtttatgttatttaattaaagttcacttaagcacaaattaatcccacatatatagtaacaaattttcaggaaaaagggtaacatgggattcatattaatgcaatcaaatgtaaaactaaacttaatttgaaaaaaagtagcaaacttgtttttttttttttttatatatataatgaattaaatcatagaaaatattacaactataatcataagaaaatcaattgctgaccttgaaacataattaatgaatttttttaatgaatttaaaaatgaaaaaaatggatttaagaatctgaaataatttttttttaaaaaagatagatttataatttaggaggagacataaataaaataaaaattaataatatataattataactaacaatttttgtaagagtgtgatatttttattggtataaatatatttttcttgcatttaaaaagatcataacatttttttatatgactttagttctatttttattaattttaaaaagtttattaataatgtataatatccaaaacaaaatttaaaatagggaaattatatatatttttttaaaatttatggtttgagttatctaaagtaattttttgtagattgttatacgatttttagttgcgatttaaatttctccgttaattgtaataatttttttttttatgtagaattccgtaaaaataaaaaaaaaaaactattttaaaataatcaattacattatataatataaaatatgaattttattttgagtaaactaaattaatagagtattgtgtactacttatgtaaccacttggggctagctcaaggccataggtgggtgtgtgagtgttggaggtcttgggttcgagtcccaaataaaatatgttgtaatatataaacgcttaaataaaaaaaaaaaaaaacatgtactacttatgtaaaatttgtaaaaaatactaaaaataaaaaggttggagggtgagaaaaattgagtatagaagagaagagaggggaccacaataggaagaggctgccgtgtccacttcattcctcctctaacgtgcgcactgagcaccgtgtccacttcattcctcctccacgtgtcaccattgagaaagagtattttattagataataagtgttttagacatgttaccttaccattacaatcagatagtgaagttattacataaattatagggtaaatactattttagactttttgttttgttaaatgataaaatggactctgtattttctaaaatagtaaaaataggaccttgagcttaatttttgataactttttttttaatacaactaacttgaagataatgcttaatacgaacagatacaaa

SEQ ID NO: 301855 - DNA, 3857 bp, Cannabis indica
aaaaatttttcggatgctaaaacaaataagggtacaccaatatattcattttaaggttgtgcatagtagaattttcttatttttttttttttggtatggatatttttttttttttggtaagattttggtatggatattaatattaggttttataagacgcaaaggaaaggcagttagatacacacgtcgatttgatatgattttttggttttctttatttttagttttttttttttgaggtgatgtggagggaaaatgagttggataaatagagtccataaaaagcagtgtccttattagttatcagtttaaccaaaataatgtacgtactgaaaagtgaggtagactactggaccatacaaaaagtctaagactcggtatcaacctcttaattttaatccacaacgtacgttctttacttattggcatagattaatttggatttctttctccatctcactatcacacagtactaagtagcattatttattgttaacgttattgtttcttcattttccatgcttttttttttctttttgaaagaacaacttgacagttgtgggtatgtgtcatattttaaacactatgaatttcttattgtccaattaacacgtacactttaagtccacgtgattcttttacaataaattaatgaatagtagtgttgcattctacttatttatatatctctttctagtatcgactatgtttttgtcttgtcatatcatatgtaagttgtagccaaaacacccataatacaaattcacgttttacatatatccatacgtgcgtcctaactgattggcgatttcacatttggaccgaatcgttaatttgttgctttttgctccaccaaaactagattcttaaagcatctccaagtgaagtttttaattttttttagctaaattttagtttaaatagttaaaaagttataggggatttttttttattcttcctccaatcatatttcttattttagtcactactacaaaagaattattttagctaataattaaaaaaaagaagaagctaaagcatccatacaataagaagcgtagtaaaggacatatgatgtcgatcatttagtaataattgccgccatagatacaccgttggctgacacatgtcacttatggcagcggtaattaccatataactaacgctatagggttttataaccctgatcgaaggctcattttttcatcttcctcatttttttatctcagaccaaaatcctcaaaaccctcgacatccatcacccaaagagtcggcgtttataaaaaaaaaaatctctaatatttaataccgagaaatacatattgtcagaatagaattggattaatttttttttttttgtatttgtgtaaaaaggagctttgaggtggcgcgcagttgtggtgattgtagctccagccgccagtattggaggagaaaacaacgtccattaaaataaaaatctaatctttaataattttaataaggtacattgcattattggtagtcaaattttagtaataaggtaaatatataatctttaataattaaatattgtgaatgaaagaggaaaacaaagattgagaacgagaagtaataaaacaaaagcttagaaactagtttttcaaaaatttgttaatgagaaataatatcaatatgttgatatttttttttacttttcaaaatagtgtaaaggctataatttcaatataagatgagaaaaatattaacttttttatgtgtatattaaatttaattatatatatatttctatttttattcctattcatgtccgtttttattttttttactagctagtaagtagttaataaatactaattttcatttctgatcatatatttttattactaactatttactcattagtaactagttagtaataaattaactagttactcataaattatataagtagttaaataatttaatttttaattttttagtattttttatattgtggttgtgaggtcaatttgtaagaatctgacttagttggtgttgatcgatttctagctagttagggtatacatccactaacttttgtgattaattaattatgaatgcttagaagagttcgaatatcttaaatattcatccgtaatgaagtaggttctgtgatataatgtaccgtagtcaaattggtggaataatatgcatgaatgagtttaaatatcttaaatattcatctgtagttaagtaagttttgtaaatacatgtactgcactcagatggacgatacatttttgtattactaaatgttgttgggattattttatcttattttggattattttttgttgttattagtagctaaatttttttcggaacattcaattatagtcgttatgttgccaaaattttaatagaattaggataactagtaatttagtactaactagttactagttagtaatttaatatactataattagttagtagttagtaatttagaataaaattagttgctagttagttataaattatataactagtaactagttgtaaattaattttttaatttgtagtatttttgtcttaggaggagttatgaaggagatttctcaagtaagtccctttcatctttcctttcattttttttttttgaatagttcagattttaacacgttttccgcacaggctggtgtgaaagtggcttatgcctactctcgcgccaagtcaactgctgtcaagaatcttgccacctccaacacgatgcaaagggacatggacttggccaggaaagacgctgaagagacgcggacccagctagaggtcgtgaggaatgaacttggggaggtaaacaagcaactccttgctaccaacgccagagttgacgaactgaccaaggagctgcaagacataccctcgaccgcgcaacttgaggcaaacaatgtttcattatctcaagaagttacaagtctcaaggatgagagggagggtctccggactcttcttaacgttggaggaggatgctaaaaagaccagggaggaggaacttgtggcagaggtcggaggactcaagaaggaagttgagaataagaagtccaaggtagaggagcttgagagggagttggatgccttggagacagctggtctcaaggttttctacgatttttggaagcccaatcccaaagcgaactttgattaccttggcgcttccaaagatatctattttaattactgcattgccccaggccaatgaaaaccccaaggcgaccacttccaatgctcttattgaccagaatgttgatactccttccgtccagaatgatgatcctccagctccttcaaacccagttgatccacatcaaatgcatgggactcctgctgtttaattgctttctttttatacctttcttttgtatatatgtctgttcggccagtaggccttttttttttagacatggtgaccggccaagcagtctttaaacttagaatatattttttatttttcagacaactgactgactgggtagattttaatcccgggtttacatgctttgttattctttatgaatttcattccttgttatgatcattgtgcaactgtgtttgttttatttttttttggtgcttgttatttgtttttagcgaatgctttgtacgggtatagatgtcccccaagtgaccggaaactaaaattcataaaaaaaagggcagaaaaactattacgaaactaaaattcatccggaaatccagtttaatttacataaaactaatgtcctgacttcaatttttagatccatgaaaggaagatctcaaaaagttgaactggagttcccaaacaatccaactcaagtataatccaaaaaaaaaaattacatcaatactataataaa

SEQ ID NO: 301856 - DNA, 747 bp, Cannabis indica
acaattttgatattttctttttaattgaaagtgaaatatacctcattattggcctttttttttttttgttactcataattaaccaaccaaataatgcaaatggaccaaaatgtagacagttatgtagccaatcgaattcgaatcgaataccaacagaattctgttgaaatttgaccaaaaactcccccaaagcatcaaatgacatatctgacccataggcccagcccaaataggcccacaacggccgataggtccgaaccacaaataatatgagtggtttatcaggtacggatccgtaaaaccactacaaccaacgccaaaatttgggcctcatactcgaattgggcccctcatttaagtgacacccatggggcccgaatacattattcatctaattataaaattattgggttaatcatttgatgagatcaaactgttaatttgataagacatggtttgtgtggtttaaaaatacgttctaataattgtgaatggacctatattgatctatactccatagaatgtgtattagagttggcgtggcctttatcaagcttcacacgtattgcaatctcaggctaattccaatcattttattttgggctattttcaaaaatatgggaaaaattattaaggttatgataaatatggcataaaaagtaaatgccactaaatatggcattatctaaccaatcaaactaaaaatatgggtttttttctaaaaaaaaaccatataagacattaaaa

SEQ ID NO: 301857 - DNA, 5077 bp, Cannabis indica
tcatatatgaagttgttggtaattaaggccttttgaagtgactgaaaatttaagaccattttgtgtattaaaaaaaagaagagagaattgagataaaataagaaaatatttgatgttattgtatatataaagttagtatgattaacgatataatcgttttttgaaataaagaacaaaaagaactaaaatttaaaaatggtaactaaaaccaaaaaaaaaaaacaaatttaataaaactagtaaaaatgaattaaaaaatagtccacaaattttgttgtaaatacaagtttgatccatttgtatttgatgcaactacatgctattaagtacttataaaattatataataagagtaatataaatatgatcgattatatatacgtacctaattaagatgtgcagtaaaacccttttaaaagaaggctcaattattgtccttctcattatcatcagcttccttaagatcaacattgagttggagcagattttgaagctgactgtgaagagaaaaatcatttggtgcatcatcattagcagctgcagcagccctagaagaactagcaccatcatcaccacgacgattgccgcggtagaagggacttgcggccgccatctgccaatggaattgctccataacttctggtgaactcatgggtgcagttggtcccctaactcccacattgttgtttgcatcttgttgttgcgaaagaggaatattctcaaagtaaaatgggcgcaactcgggattagtaggcatgggagggacactgttatgatcagggtgcgggtgaagctgatcgaattgagctgggtgagggccaatgtgagtggctaggtcatttgaggtcgagttgatcttggatcgggtttggttaaggcgattatggaggatggatatgaagcctatgaccccatagactgggtcacggatgcgtgcttgtgcctcatagaataaggagttcacagctgccatgcgctgattagggttaataccatttaggatcttgctgacgttgcttgcaccataaaccctatggatggtggcaaacttttgtggttcgtaatgaggaaagtagggcgcgtatatgcatccctcgttgcatttccttctgagaaacttgcacgctgaacatgctaaaggattgtcttccggtggtggatcatcttccagttgaggatcgtcttccggttgaggatcatcttccaatggaagattgttttcgggtggaggattgtcttccattttttttcttcactttggttgtacactacaaaagaaagaaaagagagaaaaaaaacagaataaaaatatattgatctaatttagttaattagatcatcaattattattgagtattattagtgtccaacattctttataagtggcgctccataattaaaaataaataattaaattttacaatttgcttgaaaataaattgtgaaaaaaatagtgaagataattaatgacaatgatagtttggattcaatgaaaatataattttgttttgctttcacaaaaaaggaaatataattaatctatatctacagatttttgtttgaatactcatattgtttggaggcaaatatttctactcctatatatgttattgtaaatgaatttgtttcttaatctacaatatagcctttcactcaaaaaattgcatgtttaaaaaacatatataatattttgcaaatatatatatattaaaactaaaaaaataaaacccctaattctgcatgggaatttctctgggcttaggaaatggtacggtaaaaacacatgcataatttactcctgctctgaaaattgtatgtaattaagaaaatacattcatatataattagctgtaaaaattaaactaatttctaaaattaacataaatcaaatagagaggagcaagcaaggaccctctaaacaaaatataaaaactctgtaaaataaaacatttctgaaaggtactcaccttaattcaatccaaactcagatgttttcagtacacaaaattagatatgaccatcattgataatatcatggtatatttatactcaaattaagtgtctttctttcttcttctttttttggtgaaaaaaaataaaaataaataacaatcacatgtgatttccccctaactacattaggtatttttatcagatttttttttttaattagctacatttaaaagatttttctatttctgaaaatggtaattgttatccccattgatatttttgattgatatttttgttgctctttttctatttttgtgttggtgtaatatcctaaacattcaaaaaaaaatctcatctctgtaattaaaattgcttttatggatttttcttcttattttgttgcatgttacttctaaaacttaagattttttttttgaagatttagttgttgtttttattttttattttttttttcaaaagagatttggtggttttgctagacccttgttttagttttctgtgtattgtttttgtgttctctgtgtattgtgtgtttttgtttttcatgccattttttaatttaatttttggagcatcctatcttggttcgaaattctaatattttttttttaaattatgatacatatatgtatttattaaaaaaaaaatagtcaattttttcatttaaaataaatcataaaagtataataataatttttgttggagagcaaaaatgagcagcaaatataattacaattatattgattgaaaaaaatgagttacaaattaaaaattgatggagacatataataatatataaatgaaaagaaataattacctttttattgaataattaaaatcaataatatcgatagatagaaatgtacataagatcctccccaacaatctaatagagaaaatagttggaaaagaattgataggatcatgtgggtattcctcgtacaaactcctcatcatggtttaactctaggttttgaatcgaacaaattggctagcaaaaattctcgagtacagtttgctattacataatttaagctctttaacactatatttagtattaaagattgaaatttccatctctaatagatagatatacattcagaaaataaaaattactgaagtattttagacaaataatggtttaagtgttgaatgattgacgacccttttttcatctataaatactgctatcttagagtcggggttgttgatattctattcgcatatttttttttttttttaatgcgtgcatttatatatgtcgcatctgttatgtccgatattttctatttttaaaatacaataattttttatttttttgtagtttataaatcaagcggcgtaataccagcaatagtatcagagcaattcttttggtaggtgtattagtgacttactaaaaatattaccagctgttaatatactttacttatagtgatttgatattttttttaaaattaatttgatgtaacgacggattgtttgatttaaatatttttattaaactaaattttgatacaatttattaatatttttttatttgtctaataatatattaacttattattgttacattagaaattatgccaaaatgttatattttattaataattttgagtactttagaaaatttatttacattataaattttattctattataatagaaaatttatttacattataaattttattatattataatatttattgttatttatttataacggtattttaatttaatttattttatttatatatgtgtatatctatatataatatatattgcaatttttattagattaaatctccttacaagcttaattcaacttatgaagttatgtttatttcactgagtgttagttatatctgtttgcaacagaaccgacttcatcaactaccaagactgctataaatagcaaagcttctcaacttagatgacaatcacaacttgagcaagattgagctccaagagagctagataggaaagtattctcaagagagagaaacaaaagagagttagagaggggaaagagagaaaagttgtaaatagagtaagagaagaagaatgagatcaagaagattaccagtcaacttacgtgacttggaatcttcaacaccattgatgtaattcaagactgattatagtggaagagcagaccaattcctatggcgagctcaatgtagatgtaagctgtttaacgtctaaatgtgactttcattagcggtggttgtagtatagatcaggtggtagattctacagggaagtatatacaaaaggttaataaagctagagtggtaatagtaaccaatgagtttatgatttttattttggtattaaatagtaaaagaaaacaaataaaatgtgtaatcaatggtaaagagggaaagattttaagagtcatccatatgattgtttagctattttgtaccttcgattcacaaagttgagacaaatgatgtaacattaaagctcattatattttgagtatagaagttattgaaaataaaagaaataatttaatcctatgtcactacaacaaaaactgtcatcaagagcgacttttgtcgttctagaaaacctcctaattcgttctaggagattatttggcgcgactagtcattcttaatgttttgttcctgataactcaaataagataaattatttaattatttctaataattatttaattattatcaaaataagatagattttatccggaacgactttgataagtcgcacctaataccatcactattaggaatgaaatttcattgttcctgatactgtcgcgcctaaaacctgtatttgctgtagtgtgtagagcctagaaataatattatacatcaagcaataatgctataaaagactaaacataaaactaagtcaataatatttttaccaactagaaacacatagaaagagcatgactaaacttacatatttaaaaaacaaaagtaaataaaaacgaacatgatatatagaatatgagcaatactatcattaatattgttacccttaattttatccaaaatacgtggaccagtgcgactgcgacacgtggatttgaggagtagggttttgagataatttgactaagtctt

SEQ ID NO: 301858 - DNA, 1242 bp, Cannabis indica
gcacaaaacccaacaaaatattcctttagtttttggaaggcatcctcgcactccttagtccactcaaattttttatttttgcacaatgtgttaaataatgggatacacttgtccatagacttggaaacaaacctgttgaggctgcgatccttctagttaaactatgtacatctttgtgcttcttgggataaggcatgtctatgaatgctttgatttttttccagattattcccagaagctaacaatgaaatccaagaatttctcaaaggagactccaaaggtccatttctttgggttgagcttcacgccatacctccggataactacaaaggcttcctctaaatcatcattatgctctctagaagttttgcatttcataagcatatcgtctacgtacacttccatgttcctcccaagttgatctttgaactttttgtcgaccaaccttaaataggttgccccgacattcttcaatctgaatgccataaccacataacagtacactcttttgtccatttggaagttggtgtgttcttggtccgcgacatccattttaatctgattataggcggagtagggatccatataaatcaacaattcgtatcctgacgtctcgccttttctcctttggctttctcattcttggcgtcaagatgcctttggaagtctacagtggactagctatcgtcagtaaaaacttcctccgccccatcatgttggctaagagaatcgttagggcggttattccttccctaggctttgatactttcatacaaggccttttatttagcacaactttgccttatggagcagaagtgcatccaagcccagaggcgttggtggccttctacattcctaattgctgattggtcgcggtcacacttttctttagaggtaacggggcatttttggtctgacgctcacctaccatcccatttcccatgtcctttgcggtagttggggtttcagtgttggtagggttcactctattttctctgtcaacaagttcttccgaagtatcctccttagagtctttgtccagatcatcgaatttagcttagaggcgagccatcattttttccattttttgagtaaactcttcctggcatgctagcttttgctgagtttcatgtaactcattggacacttggagtaggtctgcgtagtagtatctgttgggtttcgtgctctaaataaaactcatttcaatataatcagatttataaattaataaaagattag

SEQ ID NO: 301859 - DNA, 2002 bp, Cannabis indica
ttctattatttttctttttttttttttgagtgcatttgcatttgcattagaaggtgtctatgttgaattagaaggatttgtgcatttgcaatttgattttacttttacttttgtcgaatgattcgttgtgttgtctcagtagtaatttgatggtgcaatgcaataatcgtgttgtaaattggattctctcattttgaaatttcatggacttcaatttggaattgttgattggagtttgtgttgcagcaaactagaagaatttgttttagaattttgcaagtccttttaagatttagtgttgtacatagttttcagttttgttgactagagatattaaagattagagaaaagtacacagccatgttagtccttttaagcctccattggtgaatgattttgttcgaggataggctgagatctgtgaattagtcatgttagctgttactggacttctttacattgtcttttaattgtgaaacatggaaccctgaatgttatctgattaaactcctttcatagatcgttcgttgagtttttgaggccttctatgagtccacccgatgtctttgaatttactttgtataattggtatttgaatgtttctatgtgctgctaatgttagccaagttgtatttggagaaccttttcgtgtaaattgtctgcagttcaactgaaatttccctttaatatcagaatgtctaactagtattgctgcaaaagtagtcttccaaagtctcaagttcattagtgttgctgcaaaagtagtctcctaaagtctcaagttcattgaaaaacaaagtttggttgatgatagcaaatgtttgttttggaagattcagctttgtgcataatccataatccataatgtatttatttttactattcatttacttcattaattatcaagttactttgatgttaatcgtttgatatattaacagaggtagtcactcagcaattatatatctattctacgtttatgctttgctcaatgctccaaggatttctttacccaaattacctaacatagatagccataaatctgaaacaggataatttgcttgattcggcttagcattatcaagttctatttttcccaaaataatatgaaaagatgtttactgaattgccttcttgtgactacaggacaaggaggacatggaagccaaatgtccaggataagcgactttttagttacatcctagaccgtcatattcgagtcaaagtgacaacccacgcccttcgttgcatagacaaggctggtgggattgatgagtacctgctgaaaacaccttactgcaagatggacacagaaacaggtctcttttggaaaactaaaattgagaagctctatggagaacttgggaacactgaggttctcttcttttcacctgaggatgaagccaagttcgaacaggaattcaaagaaatgaagatagctgaaaaggcagctcgtagtgaagctaggagaagggcgtctggttggccagataaactaaagcagattgaaggaggaacagacgctgaagaagggagcttacatgaggctggagatcatgcagatcatgagaatgaaaaagttgctaatttctaagtcttgatgttgcttagaatgcatatcagatgacatttgttttttttttccctaaaattttgctgcgttgagaaaagatgtcaatatatttagacgtaacaaggatattgacggactattagaataatttttccaaatttattttattttcttttaatgaattttaaatttttttttaattttaagttacattagattttgaattcaattagatatatatatttgtagaaaattaaatttgagttgaaaaataattatttaattaatttttgatcatcttaaattaagtaattttcataatatttattagacaattaatactaaggatggaaaagaattctatttttattttattttcaaatcttcctaaggtatgattttataaatattaaattaaaatttatattt

SEQ ID NO: 301860 - DNA, 928 bp, Cannabis indica
taaccatatagttacaataaaaaatgtaaccattgaatagtcacccatatatatatttgactacacaaattaactttaataatctttacaaatcagaaaacttaggatttttggtagtaatatttatgatttattggtgagctcaccatatttaatgtgagtgactcatatataatttcttatttaaagtatttcacactattgttatagaaatgtttagaagaattttaccaataattataatttaaaacataaaagttttgatgccatgcatttaaactaaaatgatacatatgttagtagatccattagagattatgtttgattaaactaatgctacaagacatggttaagattaataattgaaaaaaaatgtatatatatttagtaatgtatgtagtccaacattttattatcattattacttcaatatttatacaacaaaataagtaatatttataccaatttcttcactatccccaaagtattttttccttcaaaaaattgatttaataaataataatatttatagtgaaggtggaaaatgaacttgacaagttggaaataaatatcatcatcattattattattattattattattattattattattattattattattattattatgacatgcatgattaattttgtatctgtaattttgtcaactcggagcttgacatggatctcttagtgtttttttgggggaattaaatccctttagtgtaaaatcaccaacaagcaaattgtaatctcattaagatccacccacaaacatgaggaataataaatattcgaccatgtttaatatatttgtatatactatatgattgttacgtgttaagctacgtagtgttagttttatttaatattttagttttttattttaattaataattaaaatagtataattatttgaacga

SEQ ID NO: 301861 - DNA, 2885 bp, Cannabis indica
ggtccaatctgtaacttttgcaaaatacagggtccaaaatggtatttacccttattttttttatgttgttttgttgtagttttgatgttgttttgatataatttttttgtgtctttatagaatactataaaaatattaaaaaaattaaacgtaaaagtataaaaaaatttacaaaaaattacaatttatgtaatttttttttattactatcattttttttaaaacataaaatcattagttataactaatattttttaaaattatatttatatacattacatctgattagtactcttttttctctttgaagactttctcttggtgttttgataatggcaaacgctttcaaaaaataaaataaaattagatattgattactttcaacatcaaaaatacatccaatccaaccacacatgtatgtactctcgttattataattattttcaaaatttaacattgcacattttttcatcaaataattgggcataagtaatacctaatatattttatagatgacggttcacgattaattagtaatattttttaaaaattcttttgttaaaaacttatatgaaacctgatatttaattacaccaataataatatgatactgggtaaggtagtatagtacttttttttttaacaattctccttaaaaaattggtgattactttttaatcatactaccgtgaatattttgactttctccacaaaaattacgtgacaagtcatgagatgactcatgtatctatcttaaattataactaagtggagtttactataaatacacaatcacaaacaattcaattcataactcaagtcaacttgtgaaatcctttaaatcaattatcaacttacacacaatcaatttgtcgaatgttaaatataattaactaatggaatatttataattattttttgcacctcttaagatgatatcgatgatgatgtgcatttaaaggtgcatatcttatactttgaatcttgcatgcaaaccatgttaatatgtgagatggttgaaagtagatataatattgctattgaatatcagtgtgtttaatattttttagatgtatgactttattattggttagtaatattttttaaaagttattatattaaattgtatgagattcgatatttaattgtatcgataataatattaacatataagaaagtacaaaatattactggtgataatccaaaagaaaattattaaaaccttatttgaagtatgtaaaagtaaaaaaaaaaaagaatgacatagaagacgcataagatttgagcaaaagtaccaagacatatggttgtatcatatatactatatcactatggaatcctattgtccattaatatgctaagctaaaagggatgcacacaggcagggaattagcggggagtatttttcctgtttccatcccaagtaaggattttaattcccatccccgtcccatccctgcttattctctatcggggacggggcgagaaattccctaatgaggagagacggggtggggaatctcctattgtaaaaataaagtgtattttaaaaatttaaatgtataacattattaaattacataaaagataaaatattacatattatttactatttaatatagtaattattatacaaaaatacaacttcaaaaattgtaaaaataatattaatatactaaaaaaaaatataaacttatatataaaatataaaataataataacaaaataattaataaattaaacgggtccccaccggggtggagagtgtcattcccgtctccgcccccgtttaacatttggggacaaaatttgatcctgtccccgccccgttcctcattaattcgggaattctcgcctcattaggggtgggtcctggcggggccatccctttaagaaaaatgtgcattcaaagttctatggctgagaaaaaaaatataattttgagactatattaatatttaattatcaaaataataattttgtagtggtaaacaattttaaaatttttaggagttctaaaatttaattatccatagctaaacattaaatattttttttaaaaaaaattaaagttagatattgggaattgattcttaacttcttttgcttatagcatgtccaaaagttaaatttgaaagaacgtttatttaggtggacaatttaattgataaaataggagagtgctatattattagataatatagaggaataaatgtcattttaggaatttatttatattgtattgatgttatcttctattttttttaataaaaaattaaaataaataaagttatacaatttataattaaaacacataatatatttgttttatttttaaaaaatatatttataataacatctttgaacgacgctatactgttagagtgtttttaaacgtaagagtgtaaaaaatgatgtaaaaaataaataaaataaaatattatatttttagatgatgtagaaagttttaacatctttcaagaataataccattagactcttaaaagcataatctctactattataataaacgagaattggtaaaaagtcactattggtgcctaatactctcatcaatgtcatactactattagtgtaattaagtatcgaattgcatataatataagaatataacttttagggaatattactaaccaatcataagacgtcacctataaaaagtagtagacactactagtatctaataacaatattcataataaacaatattttgttatattttcttattatttaatgttgaccgaggttttcggcaaccgataaaatattataagtttagagagctgtaagaaagttagagaaggacttttacgtagttggggcgttaatgagtcttagtccacgagtctttgttatttatggat

SEQ ID NO: 301862 - DNA, 2012 bp, Cannabis indica
cccattcccattcccattccaatatttcattcctcccaaccaaaagccacctaattgtttagtatctaatatgtccatgaaacaaactacaaaatcactgataccactaatacttaagatttgtccaatgacagtaaacaaaagtaatgatatgacatgagaatagaaacatatttgtgtagtttagattattaaattaagagaggttcacatcaaaatgcactcatacaaatgaagctttagtctcattttaaatataattctaaaaagcagaatatgcaaatctcaaatttactttaaaacagcagcttcgatatgaaataatgaaaccacacaactaagtctaaccatatgcataaagaaagcctatcaattcagaaccataagatttcagagacaatgtagaattagctagttgtgaatcatatacaacatatacacattcaagatttcaatggacaacatataaactttaaaaggccaacaaagcaaaacatgatggtagtatcaacactaattgacagtaaaaatgaaagaatgcatatacaaggaaattaacattgactgtcaataatgatatttaaatgatattaataaaaacccaaaatgggaagtaaaaaaaaatagcttttaactgagctctagaaaaccattttaaggttgaaatcaactacggaagttaacattttaagaaccactttttccttatcatccaactatggagtcacaattttagggacaatagcagcaccaaccttcacataacttctcaccgacaacaaaatcagccttcttcaagcttctccttccaatcaatctattgaaaccctgatacagagcagtaagaaagcaagaatcaatggcagaaaatgaatctaaagtcacacatacaaatcctttttctttttccaatgtttgtcattaagttaaatcattccatttgctgaggaaccaaacaccttttacataacacaagatttcaaaaataaaattatgatagcctagccaaagattgacttgagattaaaatggtacatgtgacgacaccaaagggataaagattttctctactcgagtttcaaaatgacatttcttagacgaaatggagtaatgagagggaggaaaaaaaggacaagggtcctgcaaattatttgggtaagggaaagagtacagtcagtgggttggggagataaggttttgggtggggacaagaagcataaacgccccatcttggttggccgtttggttcaacacttagaagtattcaatcttttaacaaaagaaaaaaaaaactgaaaaataaggtataggtactaatattttctctcaatgttcagaatctgcaagcttcttgtacatatggtttttagtgagcatactaaagcaaacagaggttccaacctaaagagcaatttattggtccatacaagcaataaatactcaaggccagtgaaattagaggactgaatagtggaatcaaactaatggaagtgttattggctctatagaactagatcaaattcaacgaaaatattggcgtactaaatgcaatgaagtaaagcgaaatcagccttagattagaaccacttataactaagactcacaataaactaataacagggcaaaagattacctgatgtcacttttgagcaaaatctcactttatatacttaaatcagcaatttatgcttcttctacaccagacttcaactccggcgaagtaagttcggactctgcactctccgtagctggttgcttgtttctaataaaatatttactgcgttctattcgaattggtcttcccataaacaccgaaaagggggggggggggggggggggggggaaaggaaagcgaagttagagaactctaccaatttaaatgacttcatgaaatttggatgcagataggtccatgcttatatcaacaaataataagatagaaacaaacaacaagaacaacacttggtaccttccctgaacagagattagagctgcctcagtcttctttcttt

SEQ ID NO: 301863 - DNA, 1881 bp, Cannabis indica
tttttttgtcaaacaatctaagaattaaaccgctgattatttagttcgtaattctaattctaattctagattagattgcaaattattattaaaaaataaattgttggtttctatttctttttgtagctacgaccaacaaaattaataaattaacgtgcaactatcatatgggtggagatgtttacatgttataacgttataatcatttataatcatcacctctttgagaaagcttttacatttctcatgtagtagaccttcttctataagcaccaacaaacataaaggaaaaaacaaaagataaaggcgcctcgtcaaagattattaaagtgaagcccaagagattctctctcctctactttactcatcaaaccacttccattcccatatctcaatattttctttcaataatcaaaatagcaccatctgaaaatgtcatcaacatcaatctctctctcccaaatcggaatatcatcctcaccacgttctatgattattctcctcttaataacaatcattgtttatagcatcagaccagctaaagcaagcgtatgcagaacctcatgcggcaaagtcccaataagctacccatttggaatagacgacggttgcggcagcccttactaccgacacctcttggtctgttctcaatcaggaaatctggagctccgaactccatcgggtcggtacccggttcgaaccataagctacgggtccgatccccacattctactcaccgacccattcatgtggaactgccaagacggcaacaaattccgtccaacaagaccctttagcctcgacacgagtacccacttatcactctcctctctaaacgagtacctcttcttcaactgtagcgaaagccacgtcatcatcgaacccaagcccattttctgcgagcgcaatccggagaggtgcgactcctcgtgcgacagctcagcctacctctgccgtcacatgccggattgtggatcgacggtgctgttcagaggtggtagcagtgatgatgattttgcttcttgttgttcttactatcctaaagcgacggaatcgttgaggttgatgttgaggtattgtacgagttatacgagcgtgtattggaggaacactggtgaaactcagccttatgatcaggtccctgaatatggggttagggttgattttgaaactccagtcactactaattgtcttcgttgccaagatatgaataaaggaggtggaacttgtggatttgatattcattcacaggatttcttgtgcctttgtgaaaaagcaaatgttaccacttattgcaacggtaagtaataattattaattaatttttatatttcactctaaatttgataataataataattttggtaccattgatattgttgcagatcacagccttacacagcataggaaagtaggagtcattgcaggtataagttaattaattatatatgaagtttggattaagtttagtaatagtgtaattatttaagatatttattaataattattggatgggcagggacagcaagtgcagcatcagtggctggagtgttaggaattggagctggtgtttggtatttgaagaaagtgagagcaaaagcgccagtcacatgtggggtacaatccaatgacaacaggcttttctaaagagtaaacatcatcagtactcaacaattaatacacttgttcttacacggtttgattaattaatattttttattaattaattaatttttgtttttttaattcatcaacctgtaatagtactccaaatcttgatggatttgattttgccttcgtttaacgatgttcttacttttatttggtcggccatgtattcataatatacgaactactttttattaaattccaaaataaaat

SEQ ID NO: 301864 - DNA, 3073 bp, Cannabis indica
aaataaaataaataaaagaaaaatagatttctacataataataatggtgggagagagtaaaaagggtgaacttcacatgtagaatatttatatacatatatacaactttaagttgaatacaagaaaaagattaaaaatgaaaagaacctatttttatttttatctaagtatctatataatatgatatatgattttcttttctctctctctctacaagtcaaggtacaaaacaaattgcccttaaaagggggtcaagcacaaacacacacgatcccttttgtacaatttattttttctttttaacttttttctttaacgaattgtagtcatcactcatcacaataatgtataataaaatatcatataataaatatatatattatgacatatatacatcatgtgatatgcctttgaaaaagcttttttaaaattaggttttattttgttgggtatgtataggaataaagtaaatatatcaaaatgtgcaatgtgtgaggccatgatcattgtatgtacatatagtaactttggtatatacattatttacattatctttttattatatatgggttctttaatcaactttttgttacttttgatttgccttttggatttgggtggtggttaaaccaaagcatggccaatatggttgggttggattaatgtgaacaataatagagaagaagtatttacaatattgaaaaagagaggtgatgaaaatatgataaagaaagaaagagagagagagaagaatcacactactataagctacttttcatctactctccttcctcatcaaggctctcatgaactttcatgataacttaaaagcaattctttataatagtttcatggccaatatgatttaaatatatggtattaattaaaaccctaataatataatacattaatatataatttatagtatattacttacaattctatatccattaacctaaacaagttataagtagtaatatacaatattatatagcatattcttttttacgtgcattatggggcaaaccatccacaaagaacatgctctacacccacctgaaaactaattaccaattatatatataaatacaaaaacatgcattagagataatcatatatatattatattctaatccaattacatatcttgtaaggaagatgctctaacaataattaagagctcagctacctagctgtgtatgtatactatgtaatgaaacaatttaatttaattaggttatatattaattaaagagctttatagagcttttatatatatatatatacatagggagagactgatgatcagagaggtgtggtgattaagtaaaggggaaaatccaggccattatggcatattaatgcctttgtcattttgtgtctgtacggcctgactagcccatgcaccattatatgtcttgcaaattacgtctttttatatatacattatatatatacataatcttaatcccatgtgcctttgtgtatgtgtgtatgtaacactctatttaattatatatacatatatatattattagtatatatatattggtattggtatttggtacttactaaataatatatatatagaaaatattaaaagtctgaacaagcctgttaataatgctattgctaggttatgtcgcaccctcaaatgttttatatattttattatatggtacaaattaaataattataatgtttaaaatttttattatatataattatgatcaaaataataatttagctggcaaataagttttaatcgtttaattgccactgatatatatataaaaataattttgacagatctcgttttgtcattttgtctccttaaatggagctagttttgtcaatcttctttactaattactatatgcattgagaacatcattttgttctcactttcatatatctatatatatatatatagctgtataataatcaagctatctaaccatcttgatagctgcaaattagggcaacaaaattaaaaactaaataaataaaaattattaatattgattgattaagtggcttaattattatcattattttccaatgatgatattatcgaaatatacaagaacgagctagctagggctaattaattagggttatgaagaaaagagctatatagcacaacttacataattattattaaggctaatatataaataagacattaagtatctaaggctataattaagtaatattttttgagaggtttaattcaaccctaataaattagagactatatagtacatatgtatattatattattaatagctaggtacactttccttataattaggttatatatagttaattatttattggtatatatgtatagaggtttttgtatgtgggaaccatttttaattgcctaacctatctattttaattaattatcataaaagttggcaaaatctagctaggaaatgcaaaagtgaaaaatacatataatatttatataattgcggggattacaatttacatgaaaatattaattaaggaaggttttgattaattagaaaagcttcttattctaaatcaccccaaccaattagataataccatatataatttaactatattatggtacgtgttaaacaatatgtatctttatatatatatatatatattattaggcattattgtccaacgctattgcaagatttataaggtgaaatttacgaatattataacaatatatatatatgacagtgacacgtactattagtatatttatcgtatatatatatgtatacacatccacatatatataagtactattattatgatcatgagattcaatatacagagattttaatggtggaccaaacaatgtagataattcctattagcccgattcttaggtacgaagttataagaaacacataatataaatggatatttttcatatatatatgaaaccaagataaaagtcatggcaataagtcagcataaatctagaacaattatttaaaatcttcccatctataaatatctttatatattaaaagtgtctatctaactgcatttcttgtttaacattcttggtttaacagaa

SEQ ID NO: 301865 - DNA, 3357 bp, Cannabis indica
cgtccctgttggacagggcgttatattttttctttaatttttaattatatcacttttaaataaaataaaaaatacttaacacgaagcacgtaactttttactagtataaatattagatatataaattctctcacttgataacgtgaaaaacattttgccacatttattaaataaacattttattgaaacggtaaatagataatagcttattcaagaactaacataaaattggccttggcactggtgacacatcattcaaaagaaacaaacttaaaaataaaaatagtgcattcgtggtgatgaaagaactaagcattcacaacaaaagggccatgtcaaactgtcattgtggcctttgtgaaagacaagaatttcacagatgtacctaacgacaacttggaagcctcaatcgtaaacgtatcgtatcgtaggaagagttccaccaaaagtaccctagacagcaacaccacaagatcttttcctggacactgcttgtcatcgaccgttggattctgagtctcgcgcccatttgaccaataaacgtactgcaatagcttctctccctcttctccaacaaatctatcactcacaaattcctcggggttagtaaaaatcctgggatcttttgtggcaaacggctgatatccgaagatcatctctcctttctttatctcaaatgccacgtcatgactattgaccaccatatcctccttcgccttaccatattggaatggaacaggaggctcaattctcaatgcctcgtagatcacagacttagtcaaactcatcttattcaaagccgctatggtaaccccgccttcttctttaataacggtcctgatctcatcagccagctgccgatgcaaactctctcctcctgatgcgacccatttgatcaaacctggaaacaaagctttcatgccaccgtaagcgttgaaaccagctacgaaaaccaagttgtgacaagcttcatcccttttgatcttgaaacgatgctccgcttcgtcgaggattacacctgcggacgagtaaaaggcgttgtaaagcttgtcgtatccggatttaacgagaaacgaaggtaaaggaaacatgtgcagaagcatatcttcgaacacgttaaggaacttggaaagccctagcgatatcagcggatggagttgaaaaaagatccacttgtcgaaatcagtgtttgctttgggcccaagcccatgttccgtcggctttccgtcgcaaaagagacgaaaaacgaagttaaaggacatgtcatcgcttaaggcattgaagttggcagtcttgttatctcttatgttgtcctcaatgttagtaaaaagctcggacaagcaagcacggaagagaggaatgaaagtgtcgtgtttggaggccagaacagagagtatgaagctcttaatggctgcgtgtttgggctccgaaggatcaagataggcgcacacgcggtggccgcccgtaaaggaggtggagggcatgaacgtgccgtcgaggacgttacgtttctcaactttcgagttgtctagtaggacagaaaagctgactccgtcaaggacggcaaccaccctgggatcggaggagataaatggaccaggcggcatgttggtgcggaagacggttgagccgtatttcttgatccggctgaggaagaacttgtcctgaccttggtaatagaagtagtcgtggcggtcttttagagcaccgaagaacggaaggccatagcttcctgggatgggcttcagtgggcgggaattctggtctgagcttggtgaaggcatgtttatatctcaaaactagtgctacgataattataatatattagggtttggtatcattatttaggataagaaaatgcactggcgtatacgatacttggggagacaatccaatttgtggcaatagcttctataatagtacttatataacaaagagatgcagttacagatgatgtgtagttttattcaagtatagaccacagggagggaccaaccttcatatatggccaatgttggtagatacaaactgctcagttatttgatcttgctttacacgaggaatttgtggattgataaaaataaatggccccataaaggacaattatacggtacattttaaacaccacatggtatccacagttccacaccaattatgcaccataccacattcacgtttaatttgtgatcatgtccagcttccagaaattatccctatgttatattatttgataattaaagattaaaatgtaataaatatattattatgtgaattaggtgtatgataaataaatatataatttattgttttaactaacattttgtattttaagcgttatattttggagatgagttacaattgacttgtaatcacatatttaatctaataaaagggttgttatacaatttaatttaaaaatttaaaattagatataattattacaaaatagattaatacttgtgagagaaataaaatgtgtgtgctaaaattctaagtgtgattacctatacactataaaaagagattttttgtgctcatttggaaaaattagttttctatcaacgagcacttgctagaaaatacaagacttgataattctaaaaattattttctagagagtttgttcgaaaatattctcattacaagagggaataagaggattacaaacaaaacactcaaaatacaaataaaagtattatatcaagattacaagaaagctagagaagaataacacacaagaagcttgaccaaggctcaaggatctttgtcctaaaagtcatttcctccctcatatgaacacttaaggaaactctagaaacgctcttaaaggatttatcaagccttatatgctcaatctagtgtctaaagatgagcataaaagttctaaccacaacaaattattttaactacatctctcacaagtgaacaatatatacatatatatggtctctatttatagagttttcactcccatatatatgaacatgaatgaccatcataaagttcttggatgttaccaattataaattggacgtttatggtattaattgagtgatttagaggagttttgggctgttagaaagactctcaaactttcaaaaacatttgtatgttgaaaaaaatgcaactagttactagttatattttttcaactttggtcaattcttcttcaaaatgtttcaaatcactcacttgattttaaaccatttatacaccttataaatgaataaatcaagtctccaacaactatattttaaatagctatcattcattcacattcataaacaattagtaacatatcttttactaatttaaaagtaaaaaaaaaaggtgagagttacatattcaagtgatcat

SEQ ID NO: 301866 - DNA, 1442 bp, Cannabis indica
ttgtaatgggttttatttagggcacaaaacccaacaacttctacttccctatcatttcatctgctcaaatttttcaagaatcctctcaaatttcccagaaaacttctttcagttttcagaagattattcaaagattttcgttactaaaactcttggcgtcagattcaaattcatcttaaagagaaacaaccgcaaggttttagatttcaaggtagtttctcgagttttttgttttgttttttctttctttttagaaaccttcgaacaatcgcatgtattctggattttattggtttaaaatgcatgaaaatgatatgctaatttatgggtaatagaggtttaggatttaatgaactgaaataggcaatttgttttggaaatttgtacctcctttttgaataatcacatctttttcataaaatctatgaatattcacatgcttctccatagaacactttgaatgctcacatgcacacacacatatatttataggttttacttataacatgaagaacttcatgaatagtcacacttttatccagaaatatacaaaatcctttaacatcatttttcaaagaaatatatatttttaacattgtacgagtgaggaaacaatttttattaaattgcacgcacaatacgttgaaaagatcttttatctttcaaatgagcgatctctcgaacagtcaagagcaccggtctcaaggggaagcatctgtgaatgaatcccaaaactgcgacaacttcattcccacatcgatgtcgaatgaagctactccatagcgcaaggattcactatccatggaggatatagctcacatggttggggatttggaggaacttgtggtaatagagttgcgaggaagcaaatcgactgtctttgctcgaggcagttttattaacttggaagctttgtcagatggtaaagtggaagaagtcaatcaatacatcagattacctgctcgcggagaggacgatatgggtaaggaggaggaagtaggagtctcaaacaacgaggatgcacctttggatgagcctttctcctatgaggaccttgtctccaagacaagacaattagacttagtttctttcgagaaaataaagctcatccttactggatgcacgaggcatgtaacaagatagcgacctcacgtccgtttcaccaatcttgatattattaagatggaagttatggtctctcgattcccattcttcaatgtggagtaatagtctctttccttccttttgtcaaatccatccttgcttattatgacgtcgcaccctttcaaatagctacataattgtagtgacaacatacttaaaatatggattagcaaaaaattagcattaattaattaagggaaatttgacattttatgctaaaaaaacacacatggtgttattttatgccaccctcacaaattttttttaacatgctaatc

SEQ ID NO: 301867 - DNA, 723 bp, Cannabis indica
tattcaagaattattattttagtggattttggtgaaaaacaaagtgttatatattgaagtcattagattattcaagaaggaattatataacttcactaagaaaatcaagtcacactcatgttctcttcaaaccctctctatcgacctaatctaaacccagagaaaacaaagaacaattcaacccaattcatactttcaacaaagtttttcggctttaattttaaggatagatctaagtttattttcccttttaattttcaagttaaagttttatttcatgattttgttgacttgattctatacgagtttggggagattaagaattattttttaagctggtttgaagttgattttgaagtgtaatactcattgtagaaagagttgagtgagtttgagttttagaactcaaaattcgctcaacaatggtgattttgattcttagtgaaattatgatttttgagttgtggattatatttagaattcattttaggactattttggaaaatatctctgagattgagtaggtttgggttggattagaattgaaaaagtttgagttttaaaaaactgcagtgaaaccgtttaccgtttttggagaaatgagtaaccatttcatctggtaggccctgggtaaacggttacccatttgtggtgatttttggatacctcaaaaacttgttgtgaaaattatatacgcaagtatacgcagtcacacaagtaata

SEQ ID NO: 301868 - DNA, 1598 bp, Cannabis indica
attagttacattttttgtatctgtttgtactagaatctagtttcagcttagttataattaaaaaaataacgaaaattgagtttaaggtattatttcgtaccatttgaaatatatagagttcgatttatcatttaataaaacagagcgtccgattaatttttgcaaaacacaaagtctaaaatagtatttgctcggaaaataatactaaaagaagtgagaaacttataggaagcactgaacatttcaattttaagtgtatatgttagttttatttaagaaaggttgtatgttcttacaggtaacagttggccgaaagccagtcactgggctaagactagctctagaagggatcaagcagaaccgactcaccgtacatatacagcatttagtgtctcttcccaaaatcctccaacctcactgggatacacacatagccatcggtgcaccaaagtggcaaggtccagaggagcaagatagccgatggttcgaaccaatcaaatggaaaaatttctctcatgtaagcaccgcaccaatagagtttacagagtcttgcataggagacctttctggtgttcacatagtaactggagctcagcttggtgtttgggatttcggtgccaaaaatgttttacacctcaaactcctcttctgcaaagtacccggttgcacaataaggcgatctgtttgggatcacaacccgaccgccccatcttcagtacagaaacccgacggttcttcatcatcatcatcatcacaggtaaacaacaaaaccccggaagataaaaaggaagatagctcaacacaagctggaaaactcgccaaaattgttgactcgacagaaatgtcaaagggtcctcaagatattcccggtcattggttggtaacaggtgctaagctcggtgtagacaaaggaaagatcgttatgcgagtgaagtactctttgctgaactactgactattttttttctccctttcttcggattttgtaacttttttaggctttcttagtaggaatttttagttgagcattctttgcacaggcagttgatgatcctgttcttttgtacatgttcattttgtttgtaaaccattttcggttactgtcacaacaatcattatttgtctgagatttttcattcttataatttgttataactagaagttatgttgttgttgagtaataatatatatagttgttttagttgatagctttacataatgttttctcattgaacaacattagtagaatagtaaggtctttttcattttccttcattttgaatctaaccataccatcaacaactcgaacgtgaaatggtaatgtccatttttcatgatactaatttctaactcgacacaactcaacataatatataatttcgaaaattgcaaataactatgagggcttgaatctggggagaattcaaaccttggactcttaggaggcgtttggttgggaggaatgaaaatataggaatatgaatgggaatgggaatgggaataggaatggaatggaataaaatttaaaatgcacaaaaaaaattgataaaaaaataattaattttttttcttgttacattggaatggtcattccttcc

SEQ ID NO: 301869 - DNA, 1275 bp, Cannabis indica
aaaaaaaaaaataaaaaaaaattattaggcttttatttaagtaaaatttaagtgtaatataaacaacaaatatttatagcttagttggttgaggtggaggacataatgtccaaggtcgtgggttcaaattccatgacactctttttttgaccccaaaatttaattcgtcttgggcccataaattttcagggctggccctgttcatatggcactagctttgtgaaccaaagcataattagctaaagcatcaacaactcggttggcctcgcaaaatacaaaagagataccaacaaaactatcatgggaaattaaagctttaatctgatctagcagtccatcgacatcacggcatccatcctccttattttggattaattggatagcttgtagaccatcggtttcgacgctaaacctctgtaatctcctctgaattccaacttgaatccccattttaatagccattagctccggttgtaagggcagaagttcttgctccagcactgatgcagcagcaaaaagaactgcaccagtcggatcccgtataacatagcccagtcccgaatgctttcctccttgtttaaccccagcatctacattaattgtcacttgattcactggaggaggcacccatctgtgatcatctctaggacatttccggttgctgctcccattatcgcccctaaactcagcaaggtacctaccacaccattcaatcatctcctccggtttaggatggtagccgccatgtgtcacattattccgaacattccaaatattccacgacaccaccagaaaaaattccaacttttccttctcccatttagtagctagtctcataagcatggatatattgtcaactccccccaaccgcttaagatcgtcatataaaccacttaccacccaataacctttgctagccttacattcccataaggcatgtgcaatggattcatcgacatggctggagcatcggttacaaatgacacccgactgaatcccacgctgcgacagattggcatttgttggcagccaattatgtgccaccttctagacaaagtgcttaatcttgggaggaattatcaatcgccatagcttcttccaccactgcacaatggacaaataattgggctgatgttgctcagtgtttaatttaaatatttaataagactctttttagcaattaatatttataaataattttatttttatatttaagttcctattataatatttttaacatttaaatcttttaactataatatttacaataaaatt

SEQ ID NO: 301870 - DNA, 2728 bp, Cannabis indica
tgttgtaaaagtttgatgtaaaatagaaaacatggtgatttagtgatctattttgaaggacagagtaaagaaactgttgagattgttcttagctaataatttagttagacaatatagctaagcattgttcattagcttaaaatttgcgcaattatagcttatttattgtacgtgtatttttgtcaatttttttttaccttttagctatatttttatttttgtagctattatacatttgctattgggagtcctctaactaaaaaagtaatttctatgatggaagtttaggattcttatttttagtaattttttaattaagattatagttttaatgtaactattaaaatttgatatatatatatatatattcatgtatttatttggtcaataaaagtgtgttgtgtatgatatgcgtaggtgacccagcaggtgctaggctaaaacctggaagtggatatggatacggagttggcattcggttggagtctcctctgggtcctctccggctcgaatatgcatttagtgatagcaaaaatcagaggtttcacttcggagttggtcaccgtaactagtttttctttgttccttttttggctacacttggtaggaattcttttattattattattagttctttcttgtgttatatttgctgttgggggtcctttggttttgcttcttaaatatagataaatacactttcttggatttgccttgcacctcggcggtacagctcaaagttttttgtcttgtatacatcaatgctatttgtggtctcccttgcccattgtaggaaacagacaaagttgttaagctaacaatccctaatattaaggattaactgtccaaagtgtgaaaatgattgattgctcatagcaaatgactaagaaaattgtctcttatcatgggacatacatgacttgtgttgagatgacatttctctttatttttttcacttagaactcgctttcaaacacaacgaatacccttttgagactatttgtcatttaaaataaatttatttctagcaagtaaagaaatacgagctttacaaaatttccaaattcacactaacggaaacatctttatcccgtggtatagtggttatttaaatttaaatttgctcttcattattttatattttgttcaattgtctgactcggtaagtatgatgtaggggaccaaattgcagtatgtgcatatatatatatacacatttctttctaatgaatttgtcaaaacaaaacaggtgttgacaaaaggaatggaagatgttcaagctttgattttgtggacagcatacatttgatttgatttgattctttccacgaaaacaaaggggttcaataaattattgagataccagtactactgctgacacttattgccaaaagtgtttgaattaagtccccaaagaaaacaattcacttcacgtaagagggaccgggccacccatgtgaggtgagcccccctccctccctttttttttttggccgtcgatattcatattatataagcaaaccttaatcatttcttggacaagtattgagaaaatctttcctcttcttcagtccaagttgtggcagtttgagtttgatatgaggaagaaaatgacaaaagtgtacataagctaagctaagctaagctagtagctatattaggtttatataagaagtacatgctgttatggggaaacagaaaaattatacacagaagaaagaggtgctttatatgcaaaaagtgacgtcatatctttatgcaaacagtgttttttgctcaatcattgcacttgcctttggcctgtataaatggtcatagtaggaagttataagggcctttgtccctttgccacccactgcatgcatcttcatgattttgccacgtgtttatcctgttctgatgacacgtttcgcttctttcaagtgaatgcatgcatgcatacatcactgtagatggatgtgtcggttagttttgattaatctcctctttttctttttaattttattcatactattagaaatttatctaccaatgttactggatatgtagactcagattatgctggtgacttggatacaagaaagtctcaaatagagtgtatttcagctaaatcaatgtacaattagttagaaatctaatctctaatctgttgtgacattgttcacaactgaggctgaatatatagcctgcacaaaaactgtaaaagaggctctttggctcaagggtatcactagagaaatgggaatagatcaaaggagtatacatgttctttgtgatagccatagtgcattgcacttaagcaaaaatcaggtattctatgagaggaccaaacacatcgatgtaaggttacatttcattcgagatatacttgctagtgacagggttaagttgatcaaagtgtctactgatgataatgctgcagatatgctgactaagtccatgtctgcaacaaaatttaatcattgcttgaaacttttaaacatcgacagcaggatgtgtacctagtgggttgtaattacaaaaacaaggtggagaattgttgtatggtgggtcttagacattaggtgtcacttactatttttgtccttgtcagttaacaaaccgttaaataactatatttggtaacttcgggtgtatccttaggttttgtatcttggggtatgattaatataaatacgggtaaataccattttggaccctgtgttttgcaaaagttacagattggacc

SEQ ID NO: 301871 - DNA, 3826 bp, Cannabis indica
aagttatttgtgaaataaaataaaaatagccttaagaataaataaatcgcatttacctttcttaagctcacaaagatatttgatataatttctcttccagtgtcccattacgccacaatgaaaatacttgcctttagccttcttgtccttagacttgggactcgctttgttcttcttggccttgggtgacttcttatcactgctattgcccttactgttctatttctttttcttaccagaagaagaaggatagttgatttttgctccaacaatgtttgattcccctttctttgatttatccttgttaaggttctcaaacgcggtcaactcgttcaacaattgagtcatgttgaactctagcttgttcatcacatagtttgtgttaaaagccttgaagcaaggagatagcgactcaaggatcatacttacttgagtcctctcgtcaatgatagccccatgtgtctctgcctcgtgcattagctcaatcatgtgcaatacatgagttctaatagggacactcttctttatcttacaatttattttgatatgagtagcatcatgtcttgtttgattagaatgttgtccaaacatggactgtagagaatttattatgtgagatacattctccgtatgttcatgcgtcttacgtagaacatcgtccatgctaacaagtaggggtgttcattagatcacatccaatatttttaggccaatccagatccgatccaattatatattggatgttagattttaccatccgatctgatccaattaatttagtcatccaatcgattcaacatccattggatgtttgattggatcggttctatccaatagatgtatctcatatatatttattggtttaatttaggtttatctaatattttagacttagtgaaaacatatagacatgcatgggcatttaaagtgtcttatgtaaaagaggcgaatactcgaagttcatgatgaagaagatgcaagtcttcgactttttggtaaatcttttttaaaaagtctcttttcagtctattttccccctagaaattcattacatagaaccaagcctattattttcatgcattttctaccttaaaaccctagaaattatgcagctattcaaaaatatgcatcaaattagctgaaatattatcagaagagccaacctttgaattcaaatgcttggaaagatttctgaaacaagatccctcgaacaaatctcagtgaaaatcctttggaaaagctccttgatcagtgaaggttttcaaaaatttttgagaggataaagtttgagggagcttgagttttgagagggaaagtgaggttttcatttcatattaggaaaacttatataggggtcggacccacctgttgggattacgacacacgcattcagagaccaaagatcattcaatccaacaattattccaagtcatgcctgcacgaaccccgaaggatctagtggcgtggtaccttggaaaagtaaagagcaataaatgtaaccatccttttcgaaactctcaaacggacaaccaaaggtcattacgacgtgatggtgtaacttgtctatctctttgaggtagttttgttgattgacagggtgtcatcgcaaaactaggggcatttgttattgcgcatattttttgcctaaaaatacgagtccaatctcatgaaaagaaaacaggtgtacttatcccttaaaggaaaatgatgacgtatttttatagagtcaacctcgcatgattcaacttgtgagaagatgtgaccgaaacgatggtctaaacgcatgattgacatgctcaaagaataaacaggaccgagagaagttagtactagtcgcacatatctgttatatgcgatgagcaagtaaaactcccccatgtcaagtaaagatcgtttttttacataggttgtagtccgtctgaaaagtgttttgacgatttctcaaagagctcgcttactctaaattgtcaacggaatgtccaaagtatgtgatcaaaggtggtcattgacgttcaactaaataaggcccaaggcctattctgcgagtacaacaccacatagccctcgtgagctcgcgtgttgagatacaaacggacaagctacgaactcacaattcgcatatgttgctacaattatagaaaagataaatagaaaaaactattcgtatattcattatttaaacgttttttctcattaaatataattaatgtaataacaatcctaactgaccagttgtgtaatcttaacagacacatactttatatataaaggaatgatctaaatttcaatggactaggaccaaagcaattaccaaaagtggactaagttgactgaggtcccactgaaccactataattctcttatctcttttatttttctgttcttgtctttgtttatttcgcattccaaactttgagtacttgcgattttaagtgattagtcgcataactattagtgacgttcttgtttaacttgaatactcacataatattgcttagattcttccgacaataatagtcattctaattatgtgtaagtaaacgaatcgtatgtgttatcctaaatcttttcctttatatctttttagtttagatgtctttgtgagtgttaatggtatttgtactcctaaaaccagtaaaagggtacctcttcatgttgctttttgggcggcatcgatgaaattatatgttagctcgataatttgtgaaggaaagtgggaacctttgattccactagtttttgtttagcaaaaagacaatagtaatgtatttatttaatacaaaataaattcatattattgttgctcgagtgatgagatgaagcatttaagtcaagtaagtcaacttagggtatacgtgataatgaattttgtgatgatgaaatactttaaataaaaaaaatagccaatcattgactacataaacaaattattataagtcaagcatatgtaatttttaaagagctttattttttatgttgatggagctttccactactatatgatatattttagaccagccttgcaaaactgaacaagaaaatctaaccattctatttattaattcaatttagtctatgtatatataattggaaagagattagaaaataataagctataaatttaatagtcatatattataattaaatctcttattttaacttctatttatattagatttttttttctaaacttttataggacaaaatttgttagagacaacatcattcttgtaatatttttcgaaaaaaattcaaataatttatcatgttaaaaataaatttaaattataatcaattgaattatcaacatatcaacttaataggtctttcattaaaaaaaaaaaaacccttaatggatccttggccattagatccttgaaatatcaatatcaagagagccatgaatcctagtagcatgagcaattttgatgcttgagttaggaagactcaaattccaaaaggaatgaccatttttataatatttaatcgttgatcatcacctaccaaaaaccacccttgtttcaaaatcaaagagaaattaagatcatagaacttcttaattacaaggccaccaaattccttaggtttacaaatagcatcttaacaagtaaaagctagaaatctacttttatcatagccccttatggccaccaaaattttctaaccactttatccaaatatgtacaaaccgacttagggagaaaaaatgaagatagatagggatgctcgaggcaattatttcgtaagtatttttttataggagaatttttaaaaatatttttttttatgttttatttataattttacggtttaaaatttttaatta

SEQ ID NO: 301872 - DNA, 2122 bp, Cannabis indica
gcatctacacatccaatcaggttggggctagcgctcaatttctcagtgttctactatgagattctcaatcaatctgataaagcttgcaccttggccaaacaggtactttctttcaactcaaatcatagtttcacatgtttgcttcgttgggccactgcgtagaatgttatgtgattatttatataatattattattattatttattgtttaaaaaaacaaatatgtggtcaagttcagtgtttttaataattgtatgcgactcggctacagcaagattgagacttgaagggatgggtgctacgattcttttgggtcacccccactttgcctaccttatttttgctataatcattattagcgtgatatgtgctcaattggtttgtatagttttgattactttgttttatttattttggttttgcgtgaaactgatcattaatttgctcaattggcttgtatagtgttgttacatcttagcaaattagttgaactgtgattggagttttgattacatgcttcaattgtcctcactgaacatgcatctgttgacatgggtgtttgggttgcctttactaatcttctcgcttgattttcttggtttttaataccaatctaacgttgttccagttagataggttcagtggcgtcccttgctgttcttattattttgagatatacggctttccttgtaaattctaatcaattgtaatttgtatgaagttttttaattctcaagtcttaactaagtctcttttgttctactctggaaaggcatttgaggaagcaattgctgagttagacactttgggggaggaatcgtacaaggacagcaccctcatcatgcaactcctaagggacaacctcaccctttggacttcagatgcgcaggtcagaggctcatcttccgtttctatttactatttagttttgtgccatattgttattgttacttcgattgagcaaagatgtaataaacttgagttgttttgaaataatgcaggaccagttagatgagccataggaggcgatgtataaatatgagcaatccttttcttgtggaacaggagtgtttatttatttgtggtgattggaagaagtgtgttaagtcttgtaaattgggtgtcagccttggacgtgatactccatattcagaccaaagttgttcttaaatatatttactgatgtggaatcgtggaatttgatagccaagctattttattagctgtgctctataaaagtccttttcttttttttattgctcattcatataaatctcacatgggttagaaaattctcagtccttttccaagcatttaaatacgcatattgtagcattacctatgtcattttcccttttttttttctttttttgcagataccttattttctatttatttatttctattttgtagattccttattttcgttccccatccttttcattttcaggtcgattttgacaattgaattcattatattttaataattttattttatttataaactagaaaacaaatcgcacatcgtgtgcggttttgtgataattatgttataaaagtatatcagattttaaattttgatattttaatatttttgatataattttttttattagtaaaattaactactttataatattttttacttatgaaaataaattaatatcttacaaaataaagttatgaaaaaaagaccattgataactttatagaatgatatgattttaaaatgggtatcatcataccttacttgtatatatttgttacaatatttaaatttgttgtcattgccgtctcaattatagtcgccaattctacttttagttgcaactaactcactaataagtttgctttgtacatgaaacaaataagtcaattagttaactacttattttttacaaataagtaaattattttgttataaatgggaaatttgaattaatatgcttacattactttataattttttccctaaacttatacttaacataatttgttatatatgacatttttttttgttttccccataatacccctaattacatatacccaccccaaccctctcttctcatcaatcccttccccacccgaactcctatcttcaccaccaccaaattttttt

SEQ ID NO: 301873 - DNA, 805 bp, Cannabis indica
aatcaaatgaccaaaaccccaccttactatttcctatcctagttatttaaagttttgtttttttagaaaattttggggcataagaggctctgatcacctcacaacctttcatccctgaaaatgatgtgttttgaacagatgggctcaggcatgaagagagcagttttcacagagagtgtggcgaagggtctgcggaggtggctgaagaacgcaagaagaaatgcttggaagaacagctccacttccagtccaagacggtcgtcgatttcgttgcagtcggacacgactgacgcgtccgtttctgaggaacaaattatgtacaaacacattcgttctaggtctgcagaaatcacagaagcggaaacaacaacaacgacgacgacgacgacaactaccactccatgcgagctgatggtggtgactgatcacatagaagaagaagaagaagaagaaatgaatcatagtaataataatgataatccgaagatggtcaccagaggaatctatgacggtgagatctcattcggaagtagctggaagaaagtggaaattggacaggacagtggagaaattacttccatagctgaggaagaagatgcctctgttatgttttgactcaacctaaatttcagatgatcaatataaaagaatgtaattaatttatagtatattatcatatatacattatgtccacacacaacaaatatatactaccataaatatttatataaatattgttgtgataatattatcactcgaatcgaattagatgaatttagtgttagacttttatttgggcttacat

SEQ ID NO: 301874 - DNA, 4167 bp, Cannabis indica
ttcatatgtaattaccacctcatatccaaacacaccttgcattttaaaatacagtgtaattattaaactgtgtaattactaccctagtaattaccctacttaagtacttagtaattacacagttacttccaaacataccctaaagaaaaaagttttcttgacttttcaaatgatatttatattttttcttaaatgtatttattcaatacatagtaatttttaatttatttattttcgaaagtattaattgcataatattatgcatattatttgtatagttattatagttaaagtataattttttcacgagttttattttagttaaagtgaatttagtttgatttattctttaatgctctttcttaatttgaataataattgcattagtgagtatgatatctttttaaatgatctactttttaatttaagcaaaaatcttacctttaataagttattttataataagatacacgatatgctttttcaaagttactatatatatttttcaatgtacaagttctgagtcttccatcttctctatttatattaagctatatagttgttgataatttgattatgtagttatgacagttagagtcaagttgttagtagttaatatttattgactcaagagttatattgatataggtacaattagttactatcttcaattacaaactctagtacaaataataaagatatgtactcttttctatcaatcaataataagagttattttataaattattctttcttcatgctaattcgggtctggtatacttcattttcaattataaaaaataacatggtatcagagccttactactagtaaacttaattccttctccatcttctttgaattattgttttgtgatcatggcacgcggtgcatgtgttcaaacacaaaacaattcgaatcaaggatatattttttataattcaaatagatttttggctcttgagccaaatagtcgatcctactttgatgaggcttgaaactcttactttctctctctctctctctctctctcatggcgatcatcttggtgtgagtctggtgtcgaagatcttgattagatgtgaaaattatagctcgtggagatgttcaatgatggttgccctcgttaccataaacaaagtaaaatttgtcaatgggaagttgccatcacctgaagaggacgataaatattacgatctaagttcttactgtccaaggtgcaatatagggccatctcatctggtaactgatggtttgggtgtctttcatgtctgaacactaaatgactcaataaggtttacgaatccttcaaagggttggttttacagtgccattctttataatagtattttgcacccagtccctgggaacctttagtctgacattggtttaaaaatcattgatgaagcgttgttgagacggtttagagcttcgtcccttatttgcaagatttctcaaagacgagttttgagttgcgatttttgttgttggggccatgacccttattagtttccattgttgtttgtcatgaggacgttattttcatgttgttccttagcttactcgctaaagtcatacttttatcttgtagcaggaagccttagggttggtggagttttgtatttgaatcatggatcatcacttttgactctaaacactataattatgacttattttatttttattttttaaaaaaaataaaacaatagtaagatactataatatgagattcatgtacgaagtagaaaattacaataaaaactacataattttaccaagcacgattacttaaaatgactttcatatattatgctcttaataattaaacataattaaacaataagcattgcattatgatatcaactatatcaatatacaactataatgctcacagagtcacatgctattaatgagaatcacataattttgttactccatataaaaattaagataattatgacgtaagtatttaaaattttgtgtttgtaatcggtataaatttaataattagtttacataagtatccaacgttaaactgtatttttcatccaatttgtcaatacaatcttctttctaaatttattaaaaaaattaaaatattacatgtttccgtccagacttaataatttagaatatgaattttatatgtgtcatgtttaaaacactaacaaaatttgtactaataaaattggaaaaaaattacacttttactaacatttagtacttatgtagttatatcgctaaaaaattattaaatttatatcacctacaaactaaaaatttaaatatttataccacaatttactttaaaaattatattattttactacgaattaaggttaggtaattatttaatgtacaagaatctcattaaacacaaataattgaaagtacatataattagttagatataagattcacaaaccatgacaataacttctaatatatgaatccatttcactcaaaaccaaatcatgtgtttggaaataactatgtgattactatacagtctaattattagggtagtaattatataattttgtagctaatatttaaaacaaaaagttttttgtaatttcacgttgtaattacattcaattttcatggagcaatgagaattgaagagtgtaattggaactcatcaataatttccaattacacaattacagtataattacatggtcagataaacatactaaattgtgtaattacctccaattacatctaaattgttatttagatgttattttcatgttgctagttttcttgttgttttcgtgttgtttctataaaaaaacgtaaaattgtaaaaaaaaattctgtaaacgtaaaaatgtaatttctttttacaaaaaatagtgtcttatgtaattatcccgaaattaaactcatatgtaaatccattttttcattaaaatatataaaaaagaatgtcctatttttgtgtaaaataggtaaaaatgttgtaggaatggcatatgcacaaataaaagcggagccatagaagatagaagcccatcaaaaagcccaaatgtaaagagaagaaagaagcccatagaaaagcccaacagaggcccaatggccgcctccgccttcttcttccgcttccacctcctacacgattacgagtgactccgcgtaaaagaaataaattaaattaaaaaataatataaatattatataatatattatttttgaaaaaataaaatacaatatctttaaatcttttaaaaaatgtgatgaaataaataataataataataataataaagcaccaagggcaaaaaagggaattttctataataataaatatgaatatgatgagttatatttgtactccataaaataataactacacccaaatattttggattttttttttatttttatacttcaaaatatttttttttggcatttttacggaattctatagcaaccctatatcgcaatcaaaatccgtgtagcaacccacatagaaatcatcagagcaacccaaactgtaaattttaaaaaaattaaaaaaataaatatatgaggtaattctttgaaaattaaacttaaatgataatatatttttctaaattttcttctcacaccaattcatattaatttcattacttattttaattttattaacataatctttttaaagagcatgtatatttttttccaaataaaatttcacataattttttattttaacttttttattataatatttaaaatataatgtataattatagagaacaccaaggttattttacaataatttttattgttgtgtcttttgagaggtaaataaaacaaaatataaattttttaaggttaattgtgatgctgcaatttttttttaccgatcttattttagtccttttatcaaataatctgagaattagacgactaattatatgactcgtttttttaattttaattttagtcatctctaacggagaaattatctcgattgaattgaattgcagaatattaatttcgttgattgtcattaataaaattttattattatttagaaaaaacaaagggcaaaaaaagaatttgttataataataatataaaaaaggaaagggaagttttatttacacccaaaaaatttctgaagacactctattttaataatttttattttatataaaatttatatctttaattat

SEQ ID NO: 301875 - DNA, 1357 bp, Cannabis indica
tatttgttctatataaaaagagaaaacttatcttatcaaatgcagatgatgccgacattagatcctgaacactacagactacttcaaacaatttaataacttaataactcaataactttacaactctactaataaccaagaaacaaaattctataataattaataccactaatggtcataataaaatctacctcatataattaataattaatacagtttaatatgaaaattttaaaataacataagctaatacaacaaaaactaacacctttaataataataatttatttttaaaaaaaaaatcataaaaatagcagcatatataataccattgatattttttttttaaatgtaatgtaagggggttgagttttgatattattttttaagaaagaaatgattagtggacctacaaatagtgtgtagacgttcacagatttatagattgtttccattaaatgaaagagggaaagagaaaaagagaataaaagaatgataaaaaaaatgagaaatgctaaagggcactggtggtgcctagcaccggccctcctatgtgtcaatattgttattggtccaattaagtattgggtctcatataatttaacataataacttttagggagtatcgctagtcaatcgtaacgcaacatgtcgcaaaggtgctaggcaccactggtgcctaataacaatgctctatatatatatagagagagagagaaaagaaaagagcaaaaatgattaatagtgtaattatagttatgtttctttgggttgcccaaacaataatcagtgtgttcttttctttttccaacttttagaaacattgaatttttattcgtaattaaaaagtagatttattattaccaactaccaaatttgtggtttagcagataaagaaagttctctcgggagctctgctagggcttatttcctagcttttgtagttttcttatttttttactttttattatttcaggttaaaaatcgagttgtcattgcacagtagttttcattatgagatctttagctgatagtactgaattgatgagtgtgattagttaaattttcatttgagttaattaaacatttagtatacttcactaatttgatgtttcaccactagcacttactagtcatcttatgaaggtgttaccaggttttctttaggagtgtttaaagattgatttggtctgaatttttaattttttcaaatcaaaccaagagtttttcaaaaatttaaaatcaaactagatcaattaaataatcaaaccaatctactcaaacatattgctttggttcgaaactatagttggtattttttaattctatttttttttacaataattgtttatttttt

SEQ ID NO: 301876 - DNA, 3423 bp, Cannabis indica
ttttataaaaaaaataacaaaaattagtataccatgtaaattttcctttatattctagctttttaatacgtgtcattaccatattatagttgttggaaatatgaatatatcacatatgtaataaataaaacacaaaaaagtacatcaatacaacaaaaattttaaactttattttcataccctaaaatattcaaaattttctatgaataccatcatagaaaaaaatatgaaattaaatattccacggtgttaccatataagaacgatacgtagtatgtaccgttagcgttacaaatttaaagagggacgtacactttcactataacttgtaaagaaagaagcatgtgtatgcgttaacttacaactaggtagtttgacatatatacacacttccatatccaaaccaaagtacatccaatccaacaaaaagaaaaaacaataggaaaagggtatccctatatcacctactgctgacaagttacgtttcgttatcagtttattgttttgtgagttaaaaaaggaaagaaagaaagaaattaataataataatggtgtaaaatgttaaattcaatgaatgcttaggcgggaaagttggtccaatttgccgctatggcatccttttaattaggtattgggtaatgtctcgttttggtcttccaaaccccattttaaccataacaattaaccaacccccttccttctttaattacactataatataattggctacttcttcctaactctctaaccaagtatcatcatcatcaagtagccgccaacccttataatattagaaatttttttttgtactctcctacctacgtctagatagttttaaaattaatgttttatataacagtttaaattatggttatttgagatattttatcgaattttaaaaaatttaaaataatttataatacataaaataaggttcaagctgtctatttcacgcatgtataaattaaaagagatatttgcgcgacaacttatttaaaccttatttttaatacgcgttatattataatatcttaaataactatgatatacactgttatataaaaaatttattattaaaactatctagatgttcaaaaatgaaagagtctattagtaaaagtaggtccataataaattattaaaaaatatacactaaaatatattttcacagtccaacaccactaaaaggtactattatattattagtataatttaatataaaattttatatattttaatttaataattattattcaaaatccttacctacttgtaaatgccactttataagattattgtactctataaatacctaataacatgatctttatacattattgcatttgcacattcatttcttcctggtcttaaggcatggtttcatcacatggatgaaaacaatttcaaagtgtcactttattattttgttatacataatctaatattgtaaactatatactactcattactcatacatttttcgttgggacaactaacctacaagagagcttagatttgggagaaaaaaaaacagtattatggaactgaaacatgttattgaaaaagccttgtttctttggaaaacgtaaccggagaccaggcgtgttatttgacatttgtctttctgtactaatatatttttaattttattacaacttattattggttgagtttatcaaattcaaataaattattattattattattgggggagtgaaagaaaaagtcaaaacccatttaaagggtgaaagaaacgacgtaccatgcttcacgcaacattaaattaatgcattaatttgtcaatgactcgataaatgaatgctatataactcttatctattatagaaacaactagtactactaatcagtaacaattaccccatttcaaaaaagcgaaaaatagcaactattattattaaattttttcacaagtcccaacatagggagagttaagtgacgatgaagtaatagttattatagttttgtcataatggcattcaataataattcacaatcatttgtgtataaatgctagaaggtattagtagtgtctattatttttttatgtgttaatatcgctattattggtctaactaactatctgatcttatataatttaatataataacttttagggagtattgctagtcattcgcaatgcaacatgtcgagaaggtactaggcactactggtgtctaatatcaatgctcaaaaattatatacatttttagtgaagaattaatacattttcagttatttataaaacaagccaattttattctctataatataaccaaaacacatgtgtaacaggttaaaaagtacaatatatatagtttcctggaactttcaatattttctttctcagaatttttagttattgtaattttttttattcaaaatttatttaatgaccccctcattttgtttttttgcactttgctcccatcacaactacttaattataactcatggaaaaaaaaataaagcttaaaaaaaggtttttgcaatatgtaaagaatttcccgtggaccaagtgataagtttttttagtagaaagtctccaccactaaatattaagagcagcaagcactctaaaaagttaggagtgaggatttattcagatataacatcagctatcaatagttcatggataaaaataagattattgcgctcccaatcatactactactacaaaataagttttgccaaaaattgagtaacaacattacaatttctaaatcaataaacaaaattaacatctttggacttattgcaatgaccaaaatatatctaaaataagccccaaagaagtaataaaagacacattgttcttaattttaaaaacaacactcaaacaatcagattcaataataatgttgtcataccaggcattgagagccaatgcttggcggatagctaaagcttttgcgacttcagggtcgaagcggtcctccaatctccaacttgtcgaagcttgaactgcaccaaactcatcacagattatcatacccaaaccactacagttgcaaccaaatcaatggcaatatcggtgttgactttaaggctacctagagaaagactcaaccatctatgacccgtcgaagatgcttcaggacacactgccgatcgagaaaaagaactagccactgttgggcttgaagaagaaggaatcaccgtcctttgctttttattttgaaagtctcgaaggtaatctcagtacaacatttgacttcattagcggcggacaactccgccgctaataccccctaaatcggtcgttatagggtattagcggcagatttcagccgctattggttcgccgctaatgcgtggccgctactaatagtattagcggccgaaatggggtctgccgttattaatagcattagcggcgggaccccgccgctaatgctctttgtc

SEQ ID NO: 301877 - DNA, 2808 bp, Cannabis indica
attaaaattctaagaaagcttcaacaaacatacataaaaatacttctactggctccaaatgccatactttctacaagcgagcatgacctaggaacagattgattttaattgcaacagattgtattgcacatgaggtaacaccaaacacatcaactgtcaaaaacaaactaaatatcagaaacacagaactgatgtacaaatttgaaaaccacattttgcaaatttaaatagcaaaaatgctactttattctattagagttagttaaagttttttataggaaaattagttatttccgttatttcagtttgtactcttctggtatatataccagcttcaccacttgtaatcatttgattcgattcaatacattttcatcagcaatagaaacttttctctttactttgttttcactaatatggtatcagaagtaaacttgtgattttcttcttcatcacttccaaatcttgaatccatggtgcgcaccagagctacctctttcgctacaacaactgttactgatctattggtcgatgcctcaaatcaagatgatccaccaccacaaccagaaccaaatacaggccatactcaaaatcctccatctcgactgaatcgttcttccttgaaggattgtcctccatatgaaaatgtgagacgcccttattacctgagtatagctgatcaccctggccttgcccttgccacccctgtcctcatcgacagaaatttttagccatggaagcgcgacttcaagatttccattggcgccataaataaaaccccatttcttgatggatctcttcccaaaccaccaccaaatgatcattttttcagttcttggatcagatgcaaccaaatggtcatttcctggattcttcattctatttctcctgatatcaagaggagcatcatgtacctggatacaacttctcaaatgtggactgaactcaacaatcgcttcaatcaagggaatggaccacacatcttcgaactcaatgaatcgatcatcttcttgaatcaaggtgatgattcagtcagcacatatttcaccaaattaacagccatgtgggataaaatcaaccaatttcaacctaggattcctttcacttgtgcagcttctgtccaatttcaagaatagctcaatcatgatcaagtactacaagttttaattggtttaaatgaatctaatcatgttgttcgagatcaaattctccttcttgatccttggccaccattaaataaagttttctcagtgattgttcatcaagaaaggcaaagaattcttggtactcgatctaatgtcccaatggatgctgctacaaccaaaccccttcccacacttgaaaccaattttgatccatcagcatctgctaatcttgcttcaagaaacaaaagaatgagacctacatgttctcactgccataagccaggccacttgaaagacaagtgttattttcttcatggttttccacttggttatggaaatcgcagatccaatgatcaatctacctccaccagtagaaaaccaagcaattagaacaacaatcgtgccactccttaggcatctcaagtttttggtccttctactgatatcaacccatctcaactcacaaatgatcaatgcgaacaactaatctcaatgttaactcagcaacttcaacctacaacttcaacctcaactgaagcagttgctacaactaatttctctggtatcatcttttcatttccctagaacttttagatcatagatagtggtgctacacaccacgtttgctatgacattagatgtttcacaaactgtcaattataacctcatgccctgtaatattgcttaatggcacaacataaacaaaaaaggcactgttcgtacaaatagcaaaatcactctaacatatgtgctttttgtacctcaattgagatttaatctcttatctgtcagtgctcttttacaaactttttctaatggcataatgtttacatcaacaaattgttatatacagggaatgtcacaaacatcaaaaattaggacaactgaaaagctaggcaatctttattacatccaacaagagtttgctacagcaaatactctacatatttctttcttgtaatgttcatcataataaccaatggcataatcgctttggacacccttctgtaatgatcaccaaaaaaatcaataaaaaattcaattaacattctacttctatgcatcattttcattgctccacatgtcaattagcaaagtaaaagaaacttccatttatttcaaaccacaactttgcttcaacaatttttgatttaatacgcagtgacaattggggtccttatccaatcaattttgtagaaggatattgttattttttagctattattgatgatcattctcgtaatacatgaacttacatgttatattcaaaatctgatgctcaaaatattattcaaaatttttttagactcattcatacacaacatcaactcacaattaactctgtccgaactgataatgcaaaggaattaaatctaacaaccttttttcccaacaaggtgtcatagagtacaactcttgtctaggtcgaccacaacaaaactctgtggttgagcgcaaacaccagcacattctgaacatagcttgagctttggccatccaatcaaatctgccactaatctattggagctatatgattagaacaacaacatatctatgttggaaattattttaccaggatctagatttactaacaagtatattggattaacaacctaatatgaattctaaaacaatgaaaattaacacatataaagttagaaaa

SEQ ID NO: 301878 - DNA, 1528 bp, Cannabis indica
ggctactaaaatgcaaggagcctcaataaaaaatttcgtttccacatttgtatgtaaattatatgtgcatattttattactaattatgtgtgcacatttatgtgtgaattatagactttattccggatgtaaatgtattacgtggtgtacggtgggtttgtttataagaggtgatgaagattcttacttggaattgtcgtggcctgggaaagtgaggtcgtttgacaactcaaagagttaattcactgcaatcaacttgaaatcattattcttttggaaatgagattgtcgaaagaacattttaatactactatttgcaagcttcactttaatgatttgcttatgttctttctcttgggttattaggaggtttcactctctggtagaaaattgatgttagatgttcgatagatcaaaaagataagaacttagttgttggtactagtgtatcagaccctccacaccaacagtggcaactttgtgcgatctatggccctcctttgggcaaagacaagaggagttttggacagaatcgggggttggattttcaatgcttccactcctttcctcctcctaagggatctcaatggtacactccaagatgaaaaaagtatcaattatgtgaagcttggtaacacttcttgttattcttttgaccttagaaggatggtaaatagggcaggtgttattgattttgggtgtgttgggtacaagtttacttaaactaaaaataaaattcttttaactcagggttagctatttagaaagctatactagatagaggcttcggttccattgattggaggctccttttcccgaatggtattgttactcatcttatggctgcgacttttgatcataagcccattcttcaccatactaatggaggggttggtcgacatcgaggccaatttaaatatgagaatatgtaggatagaattttcgatattggttgtctgagcaacttggtttgagcggaggcatcaacacttgatgattaactttaacaggaaattaaagatcactaaaaaagagctttcgaagtggaataaagctcagtttctccacattagaaatcaagtcgaagacgctaaatcttacttggaaaaaattgagactgaggaacctaatgatgtggccaagtaggaagatgttatgaatattcggagataaatgaagccttgttaagagaggttattcattggagacagaaatctaaggttagctggatggaagaaggagataaatgctccaaggttttcatggcttctactattgtctggagaagaaggaattttattcaggccattaaaaactcagatggaatttgggtggatgaccccagcaaaatcagtaacctttttctttccaaatttaaagaaatttttaggaaaaactcttcataatagacttgatctttcatgatgtagaaaataatgaatcgaattatctatatatttcatagaatagtatatatttatatacaaagctagagactaaaaagggaaactaccaataaaataggaaa

SEQ ID NO: 301879 - DNA, 2343 bp, Cannabis indica
aaataaaataaaataaaaatgagagaggcctctagacctagcttcagtcttcagtgttttgattttttttttttaattgagagatggaaattttcaactttgaaagagtcgtagtagtaagctatatatgacttcttttcaaaaatgccaatacttaaatgcttaatcattactaatcataacataattgtttttttcttcaacaatttgtttatacatgattgtttaagcaattattaatttaatttcgttttacttaaaaagaacaatttaatttctttttgattcattattataagcacaaaccctcatccctcatgatgtatacacccattattcaacttaagccaacatgaaaagatacattaaattaatttaattgatatgatagatattgtttatctctattatacatataaagtaagggtggcagcaaagtaggtttttccacgatgaaacgacacaaaatttatgagtttgaaaaaattaggtgtagactcaaagtcgattgacatgattggcataaactaaatattaagtactacatgatacaatacaatttttttgtttgaatgaaaatgcgagatttaatattagatcaaagtttcagctactaaataaggcaatcaattaaatggaacatccttcaatctaaaagaataatcaggatataatataaaggttttagcaaaaatatgagctattatattaattgattatttaacaaaattaacaaaaatattgtgtacatcaacgattaaacttttacaatcatttatcacttggccaaaaatagagatcatatgaatagaacttcataaaacttgtatagccaccaagcaatcagattcaagagaaacatgttgatattgatgacctttaatctaactaagcacctcacgtatccccattgcctcagttaaattggtgaaactaactcatgaatgagctttttgcatccttccaataaaaaaccttaaatctacttttttttttctctaaaattattctaactactcaataaaatggattaaaaatgggttaacacaagcataatacaattatctataattggataattagatgaaagtgaaagataaatcaaataaaatataaatacatatatatgttgacacgtacttttgctagctactcatattattatagagtattgctataaaatagttttatttttttttaaaaaaaaagcatgatctgtccatatatgtcttatatagtattgcaagaccatttaaatcaaatgtcatcagtataggttggttttgccagagcacaaattgcgtcggcaaatgcaaaggcccttcttaggagcctctttatgctggcaattttcgttggtgcatgtggtcaaatgagccagtttaaataatatttattgtagtgtttatattaggtgtatttacgctatagagttataacattattttatcaatatcattatccttgtattatttttgttatagagttgtatttctagatttggtatctccattgaagcagaataatttttcaaaaataaaattgaataaaattagatagaagttcttaaatctaacaatcttaatttatagtttgaaaaaaaaaaaaattagcctcttcaaaagttaatggggacgatttgttgggaacagaattaattcttagttagtctaatatatgtttatttattttagtacttgttgttctaatattaattgtacacagatcaaatgtaaaatttttaaatcatttataagaatatacactacaaaattttttacttttatttagtcacaataaaatttgtgactaaaagtaaaagagtagtatttatgttgtgactaaaagatccgcggctaaaggtattagttacaaaaattctaatttgttgtgactaaatgtgcttttagtcacaatgtttattgtcactaaaagtaaattagcgacaacttgtatttaaaacccatattttagtcacaagtaattttttgttgtgactaaaagtcatatttagccacaaaaaaattatattgtgactaaaaatttatcactaaaagtatttattttttatagtgaaaaatgactctggagtattcctatttaattttgagataaatccataattttttggagcattgctattaggtatgttgtcctcaaaagtgagtgttttaatatttatactcgcaagtgcacgaatcgtttcggaatatagtgttcatgtaagtgcaaggtcgaacccatgggagttgactaacatcaaaagaaactatttcaaacaaaataagaatattctaacctagctccaaatatttgatgggattttagttttgcaaaataaaa

SEQ ID NO: 301880 - DNA, 7143 bp, Cannabis indica
aaaaaaattaaaaatttcagtacgtagtataaaaactcctagttattttcttattgaatacttttgtatatcttaaagttttattggaaaatttctatcatactttccataaatttacaacaaccaccatgttaataaatagaaagaggtctctaggtgatagcaattgaatgacaattatttcgctacatgacttctaaaattagtttggtaagtgatataaagcttcagaatattaacaaaatcaaaaagaaaaaatcaaacaccaagaagctatattatatataagccaaaacttcaggagtggagcatttacagcttatcctaacttggtttagacacaagacaaccaatattaccacatacaaaatggaccccctcttacagcctcaacccctccctaaaccaggaagaagaagattggagtaaggttctataagaatatcaaagttgtgcttctgtcattctagtatatcagccattgtagggggaaaagggaacatagttttgaaatgcaccaacaattgaaagtccaacagtgtagacatccctgaaacatatagggcattgtggtgggtttcagagtcttttatcaactgaatataaaaaagaagatcaacaaaaacagcagacagagctccataaccaagtaagatcaaactatctactgagtaaataaatcaataagatccagtgtacttcatgaaagcatgacaaaaagaagtgaggtttttaactgactaaacaccattccatgatgttatatttaccatggagtgactgaggacaatgcaaagggaaaactgaagggaagaaaaaagaaaagaaaagtatggtttccaacatttttacaagccatgcctatcattcttgaatctgaaaccattcttgtagattaggattttagtgtgcatactaaaagaaattgatgaatggcgggcataaattaacgaagggtgctattagcaatagagatatatgtaagaggactcataacaaactattaaccgaaaagaataaaatatatcataactaagagattacctgatgtcactattgaaaaaaaatctcacatatacacttaattagctacttctgcttcttctacaccagagttcaactcctgtgaagtatcttcagattctgcaccctctttggctggttgtttgacaaattgtttactgcgtgccactcgaattggtcttcccataaacaactaagggaagagagacagagagaaaaatcttatcagggaatctccattttaaaagactcttataaagctcctttataattggcttatgttcacaaatcataaatattaaacaacatgaacaaagccaaattacctttccttgaatagaagttagagctgcatcagcttctttcttggatttgaaggacacaaatccgtatcccaaggaccttcttggattttcatggaatataacttctgcagagactacactatgaccctcatagttaaagaactctttgagatctttagctcttgcttcaaatgacaaatttgcaacaaacaaattgaatgtcacttctggcttaggttgtgggggagtgacaactttcttctttcttggtctggcatagtcaagtgttataacacgaccatccacttcctacagcatttgtttagaagaaataaaacttcttttagtgtagaaaacacgacaccgaaaagagaaagcaaatgtcacaagttctctattaacttgtttgataaaatgaaggaaagggatacaaagatggcaaaatagaacagaaaattctgtcatgtcaccacaagggttttgtgaaagaatttggtagagtccttgactgaaattcgcgtattgaattgcagtacaaggagctatttttccagtacatctggtgagaaattgtacatcaatcaacacaggtcaaaatacaaacaaaaacggaaagggatgctatgcacgcattaagattgtagctacatggttatgtagataataagtacacttagtaaaaagaggtaactaaggttgcatttggtaggaagaataaaaacataggaataggaatgagaataagaatatgaataggaatggaataaaatttaaaatgtataacaaaattattaaatttttatcatattgcattggaatatcttaccaaaatagtggaaaaatcattccattgttaaaatacaatcaaataaaagaatggaatttccaaccaaacacaaaacatatgctgtctttctcaaaatgaccataaaagaattttgagttacaatttgtttaaaattagtggaagtgattttgataatttaactttctcaatattgtcatattagttgtttagattaaaccagaaaatgaaatatgcttacacacgattgaagattattgagagcagcaagagcctcctcaggtgaacccattgtaacaaatgccaaacccctgtttctggtcttgttatacatagaaagctaagccaaacacaacacaacacaaacccagatcagaaacacgcaaaaataacaaaaacccttcaaagaaaaaacattgaatttcataattataataataagaaaattgaaaagctcacctcaacgtctacaacagttccatacttgtcaaaaagagcacgaatatcttcgggggtataattccaaggaacgttctgggcatataatctgtctttataaacttcctcggtgtctgactcaagttcttcactttcactgctggtagtggcaccactcaccggagaagattgaagtgcttggtcttgggcagtggaagagcaatggagaacgaaattagtattgactcttttggtcgtaaatgaaagtttgagagagttggaagtggcagagatatgagactgtgaatataattgaaactgtcgttctatgggaaaacatgtcgtagctgggaagcaaagaaggcggagggaagccatagatggatgccaagctcagagcttcgagttttcgaactagaagaagaggagttcgatgagtcttcaaaggttttggataagggcaaaagtttggattttggggggacgcaatgcaacggcgtcgttttagagtgtggtcacattttgttgttttttgatttgtgaaccaaactaaactacgtagcaataaattgtttgatattagaacaacaataaagcttcttattaagattttgatctatattcaaccaatgaaccacatttaaaatttgttgcatcttatgtgctaattagggctcttacgacacaattcaaaaacgatacaaaataaatatgtttgtgttacacatttaactttcgcgttgaaatgtttaacatgcttattaaacgcgttaattttagctcaacacactaactcaaaataataccattataacaagcataaaaaaataatcataaaaataaaattaaaacaatgaatcttatgaataatttttgtatgtgtgtttaatctggtcaatttggtgctattatgtgataatatatttaattgtgtgttatgtgataatatgtctactcttgtgaaatatatcaattttatttttggtttatgtcacacagcacgtttattaaatgctatcgtgttaccttcatgttcactataaatatgtcgtgtcataacttgtcgaaaggaacaaacgataacacaaattacaagccctaaattgctaataaaaaaaagcttatgattccattctctttgatatggtcaagttgcctcctttcatttctttgaaaacccaccccaactacaatacttgtcttgttctaaatccaaaaaagagtattatatgatgatctgtgaaaaaaaaaaaaaccatcttaagcattctttgaagatataccaactaccactataggggatattgatagtacaattaacataaaaagaagaaataactgaaaaatacggtatagttgcccgtacattttctcttaacgttttacaagacatgtttatgagcagattttcttgctagttctcttgtagattttttcaagtattataagactgcatacaagcattagcgacacataaatttaagaaaaatattggaaagtgaagtcttttttttattttattaacattgaaaagtgaagtcgagctatatttatattatagcctttttagattagaaccacttatgagtgagagtactcaattacaatcatgtacacttattaaatcagctatttctgcttcttctacactatatttaactctcgttaaatattttttagactacacttttttatggcaggtaattttgacaatgggtttgaggttcggggtcggtccggctctgggctcgggggtgggatccaaggtcgagattggggccaggggttgggatcctggttctatgattggggtcgaggaatgacaccaagtttctaccagaagtgttgggaggtggtgaaggagatgtggttacacaagttcaaaatttcttctcgtcaagggttcttcaagagggtctcaatgctacaaatgtggttcttatccccaagaaaaggcagcctagttatatgagtgatttaagacatatttcgcttgtaatgtgctcctaaaaatcataacaaaagttcttgcgaataagttaaaggttgttctgcccactgttatatttgacaccgagagtgcttttctccaaggtcgtcttatctctgacaatattatagtttcttttgaaattatgcattatttaagaagaaagactcaagagagaaatgtcctgatggccttgaaactcaatatgagtaaagcttatgatagaatatagtggggatatcttagagcggtgttgctgagtatgggctttgatggaagatggatcaatttgattatacactgtgtggaatcgatatcctatacttttttccatgttggacaagaaatgggcccagttctcccatcctgttgcattcgtcaaagagatcctatatctcagtatctctttatactttgtgttaagggctactctgcacttttaaagaaatacgagattgatggcaagatccatgaatgcaaagtggctagaaaggctccggtgattttccatatgctatttgctaatggtggttatgttttctgtagagctactactcgggaagctgattatataatggagttgctgcatctttttgagcttacttcgtgccaaagagtgaatgttgagaaattgtctgttttcttcagttcaaatacaaaaactatgatgagggatttgatatgtgggcgaacagggatttatgaagttgatgataacacctcctatctgggtttgcctaatactatgggacgtaagaaaactgccattttgggttttctcaaggataaattgcagaagcgtattcaagggtggaaaggtcattttctttctcgaacaggtaaagaggttttactcaaaacagtcgcacaagctattcccaactatgcaatgagtgtttttttgcttcttgtggaaacttgcaaggaattggagggccttatggctaagttctagtggaaagcaggctcttcgtctacaaaaaatattagctagatgagttggggtcgaatgtgtaaacataaaaatgttgggggattgggattcaggagtctcccaggactttaatttaactttattggggaagcaagggtggcgactacttacaaataaatcgtcattgcttggaaaggtgtttaaggctcgttattacccaaatgatttgtttctagatgctagtttgggcaataacccgagctttgtttggtgtagtatacatgaggctcagtctattgttcgggctggtgctcgaaagactatgggtgatggctccacggtttcgattctacatgatcccttgttaccttgccatttggacttgtatgtccattcgaaccaccgaggattgaaagacaaaagtgttaatagtctcattcatttggatgttaatgattgggacacgaaaatcatcaatgatttgttctcagcccgtaactgtgaccttataacttctattcagctgagttcaaactaccatgtggattgctggtcttggaaactcgaaaggaatggtttatttattgttaaaagtgcgtaccaattgttggaaaatctcaaaggagattggattgaagatgatacttcaagtttttagagaaaattttagaatttaaaatcccaccaaaggtgagcaactttatttggagagtcgtttcgggtattcttccaacttgtgtgaaacttctcgagtgtcatgtggttattagttacacttgtccaatctgtcatcaggatgaggaaattactcttcatgctctaatgggttgttcttttgctagagcttgctggaatagatcaatggtcagcatttctaattggtcaaatgtgaatttcggctgctggttttagtctctctcggcaggtatcaatttccaagcattagaggaagcggtaatggtcgcatggggtatttggaaagcccgtaatgagattgtttagcaacgaaaattccctactgttgcatttgttgtgctgttagcaagatcactccttgatcagtttgtttttgcacaaacacggaggacggcttcgttgtctaacagttctgtgggactgcattctcgtgtgcactggactacaccagctactactcagatcaaggtcaatgttgatggagctctgtttaatgatgtcagccgttttgggatgggttgcttggctcgaaatcatgcaggtcaggttcttgaggcctacgctaaaagcagaatgggaattgttaaactagagattgtggaaatcattgggataaaagaagctcttagttggattcagcgacataattggcctaatattttattagaaacagatagtttggtctctgttcaagctctccatagtaacttgcatatgtcgtctgagtttggtttgttggtgaatgattgtcagattattttatctactttgagtcatgttgttattcattttgttgaacgatctgtgaacaaagccgtccattgtttggtgtgtagctcttatttttccctaagtcgtgtttttctgaattattagttaactcctgaattatgtagggcctgtttggcacagcttttggaaaagctaaaagctgctttttgaaaaagtgtga

SEQ ID NO: 301881 - DNA, 3527 bp, Cannabis indica
tttatttccttaattagaaatattctaatatttataaattaattttaataataaactaatagtttaagtaaaattgtaatttaataaaagtcttgctaattaattttgatacataaaattcttggcataactcttgattagggatcccctttaaaaaaatattacaaaagatgtcattacattatttcaataaattacactttaaagttcagagcatcataaaatttgaatttcgaccgctcggatccacttgtcgaatcgactaatgtgtacatttgctagagaagatctctgactcatggtttcccaaacgttttctaatctttacatgcaccacatagcaccaatgagtcacaaagactcaacaagaaaagtaaaagtaaaataacatacatttaagaatttacataatcttgaaactttaatcaaataccattcattcatacaaactcagctaatagcagataaccaacacaaataatcataagtatacaaatatccagtactatatatgtactttccttataagataagctattatcattaccttataaggtaaccattttccattattgccttaaagtaactttaataagcctaaccagtcatccaagtcactgtcattacctaatgaagtaactgacaagtaagaaacctaacaatagtttcaaaaacaaagtaatgactctttctttcaaattgatgattaccgtatcttatattcgatattaatcgattaataaatgataataatcatatcatatcttaacatgctatgtagtacaattgtacttttcttacctttaatccaaactcttccatgctggtcaacccgagtggagaaatgcttgacgatctcggtcctatgtcataacaacggtaaatcgataagtgtctattccaaaatacaatctaatactcacataaaatgatctaggattttaaacaaaatcttatagtataaacactccaaaataaaccttatactatgactttaaaatatataccacattgtagagctcgtcataagctttgaaatggtttatagaacatctaaaatggacactcgagtgaaaagttattgccaaaatacgaatttcgatcctcttgaaaatatcaaaaacaactagcttgggttttccaaagctaactacttctaaatctatccaaatgaactcaaatttcacggaacatttatatactatcaatagaacataacccaactaaccgaaatgaaaaacaaagcatagatcaaaacttgccattaaataccaagctttgagttctaagaactctacttgctcagcaacaaaactagctacaaattactctaaaacaactcactagctacaacaaatcaagcttaaaacatattttaacacaaacctaaccatacaatagctaaactgtaaaaacccaactagaaccaaacctttttctaccaaaaatcaaagagcaagaaagagatgatggttaccttctaaatcttttaatagaatccttcttctaattaaattcttagatgaacaaagggagaattagggtctgagttttagtgtttaggttttattttccttggctttctcctacccgagcaaagaaagaaagaaagaaagaggataagaatatggtttgatttgttttaagtctatcaactcatcaacacttacctaattaattaaaatacataaataagaaagccactaattttctatttccaacttagcttaaagacaaaggttaattaaaacttagaaaagactacattatccttaatttgctacttaaatattttctaacctagaggtaatttggtcataaccaattaccctgtaacaacccaaaaattcaaactcaacttaacttctcgatttcataataccacaattaatactgttgtgacattaatggccatctgtcgggtctccatggttgccagacctaaaaatattttatttcaaatatggtacacataatacctatatattcaaaccaaatctccgtaattaataaattatgctcatataatcattttttttttactaaaatccctaattataatataatttgtttaataagattataatcttattcagtataccgtaaatattcatataatctcatatttaataaaatatactgaattatacataattagattttcaagatattactgttatctacgtacggtaaaagggaataagtgtcattcctaaaaatcctataaatatggacagaacctacaatataagggatgaccaattttgtatggaattgctctgagagaataagtgtagaaacccagtatttcttacatttaatattgaatattttatattttgtaaagatttacaattgaaaaataatatggactagtagactatgtagatttaactacaaaaccacgtaaaaattatcttgtcttatttattattattactattagtattattattattattattttactttaattttttttgacaaaaagaaatgcgtcttactcatgaccagacgaatcatccaccaaaatagcttgaaaagtagtagggacaagccccccaccatagccatgacctggggaagaacaagcagcgatcgcaaaataattggctaccttgtttgcagatcgtttaacaaaaacataagaaatattgttaagatcagacattaaagtacgacaatcaaaaataactaaaccaaaatgagacaataaaggagccaaactatatagagcatcaatgatgcttttacaatttgactcaataataatttaatttaggcctcgttctttgatccatcttaaagcctccttcaacacaattgccttcaccaaaagaagagagacatggccaggcaattgtttgaaccaatgataaaggacaactccatgatgataacgacccaaccctccaatcctaaaataaaaagccccagcagtgacagaggcatctacattgactttaaatataccaatactgggaaccaatcaatgctccactcgaacacaagggctagaatccattgtgtttgcaaaatttttgtgagcaatcttccattgattaaagtaagacaatgcagcagccaccaccccatttgtagcaaaaattttactttgccaaacgagcccatttcttgctttccaaaaagactaataaatcatcacaacatgacaaaccaaagtctttggaaatcctatgaccagttgataaaaccatctggaaaaatctatagctgaaaggttacaaatagtcccatcaacccgctgccaaaacaaaatatggaggattgattcatcaacacgacgaccttttaattgggtcagtgttggtaaacacccttaatatgccctccaatgtaagtctttaactttaggaggaattttgagtttccataatgccctccaaaggcccaaattattatctactgaccacctaccatgaagcacctggaaaagtataacgccccaatattttaccttattttacaaaatattaattttgatgcattaattaaaaagattcaaa

SEQ ID NO: 301882 - DNA, 2553 bp, Cannabis indica
gggcataaaacccaacagccttgaccacctgcttaaatccttttgcttattgtttgacagtttttgcctgattgctttagaaccctcaataattgacatgttgtgtaagataactttatcatgttattgacgaattgtattccacatgtcttcagttttgattatgtaaatatgtcatgttaaataaataaaatttgggataataatctttttttttttctttttttttttttttttattatccaactgagttatatttgtttagtgttgagtgctccaaaagaaatgttctaatcgaattctaatatttgattttttttttctatatgttattggaaaattatacaacttgggacaccttatttgtccatattggtatgaaatgtcattttttataaactagaaataattattaatcaatttttcttatatgactgcatgtattgtagttataccaggtattttatatatattttgctttctatatatatgatagggtttgtacttacctatggacacatagtaaattgtgtcgtgcaatcaaatatattgtagtgtgaatcaaataaattgtttgtgatatggccgaatatcttaacttgtctagacacatttgtatgtatatataaatatatatttatataataagtaatacactttttcagccttccttaagattatttcctatattttgaaattttttagacatttcttctcatttaaaaactcattcaattgcgtgaataagataattatagtttatgtgaagcgtgaagtgagaagacaaactatgttgaaaggtatatgtctattatgtcttgtctcatgcagagaaggataaaattacttagagagagaacgctcataacctactcactctcaccctgtcgatgattcttcaaacatgttagtgtgaatgtgaatgtatcaaccatcaaatggttattaataaatatatctatttttgttaataaaaaatattagtttttttataataaatattttatagaataaactgtagtattaaataaacaacataaaattcttaacctgattttgaaattaattctttctagtctacaaatttatattattaaggataataattagagtacagaatataattatgttaaacaataataatgtttgctatttctcttgagatttttccgtcccttttagtctgggttctatgtcttacaaggactgaacattttgagcgagttcaacccgaacccaatcaagccaacctgcaattttttttaaaaaaaaatgttcgggcgggttgggttcaaaccggtgccattcgggcgggttgggttataacttacatattataaggtaaactgtaaatcgtttgaaaaataagattggattgaacttaaaatatatctaaaatatttagtaaactatgaaaaataagttggatgcaaaattataatatctttcttatcaatgaaatacatgaagagattaaattatcccatattcaggaaattatttaagatgttgaattaattttttcattatcctctattttcacatcaaaatctattaaaaattatattgttatttctatccaatccaatatcatctttctaacgtgaccaacaattcagagttagtgccacacttaaattaattaaacataccaatgtattttattttaaatattttaagtgtgtcataatcactacttattctaaattgatatttcatataaaagatgaaagaaataattattttgaataaaaaattaatttatttaaatagttgaccgagttgaccggaacctgccaacccgtgacccgccaacctatgccctatccgggtctgggttcggttttgtttttttgaacccaaaacctgtgaacccaaaacgtgcgaacccaaaacgtgcgaacccaaaacccgataaacccgcccgatgttcagccctaatccctatttatagatgtctcaggtgatagttattctcttgggatctattcattcataacctctcatgaaacttggatattccccacattttcttattatgcatataagataatatttaccgagatttttgaaaaccaaatattttaagagcttaagaaagaaataacaaaataaataacaaatacgagattttcacgtggttcaggctttacctatcattagtccacgagtccattttattaggctcattgactagtaaatttgaatacaaaaataaatacaatagactagaactccttattcctctcgttcctcttgaagaagaagaagttgggtaggattttttgtggagtttttctgtaagtagtatattattttttgtttccaaagcgtctctaaaaaatatctctcttttctaccttatggagtgtaggggtatttataggccagtttccctccatgcgctagcttgaattgatcacccttaggcgagatgcagtcggttgtttggcaggtggctgttggaagttattttaccaggaacttagatctcctcgcaagtatgttgatttaagaacctaaatatgaacttctaaaacgatagaaaattaa

SEQ ID NO: 301883 - DNA, 2225 bp, Cannabis indica
tagggcacaaaatccaacactatggccccaatattggagtaccaaaagtctaagtgctcttgttagtacaattgggaaacctataatggtggaacaacacaccaaagataggtctcggttacaatacgcaagaatcttggtggaaatggaagtcacagatgaaccaccgcggttcattccatacttcaatgaatttgggcaattgcaagatcagaatttggaatatgaatggctcccagctaagtgtgtcgctttctctaggtacggccacaccaaagcaacatgtagacatgacaaaattgttaaagcgagggccaagaaacgtcaggagttggaaaaaaataagcagaagaaaaagaagggagccaagaacatcgcatcaaccaacaaaccacaacaataggattgggagacccctaagaagacagccactatggtgacaactcaaccagcaatagacacaaagggcaatgctaaaaaaatcagtaactcatttttagcattgcaggagcaaaaggaggacatagtagctattcaagtagctacagatactaatactcttgatgtttctttaactgcttatggataacaacaatattagttgttggaatgtgagggggttgaataaaatggagaaacaaaacactgtttttgaattgtgttgtctgaataaaatagggttgtgtggtttactggagacgaaactgaaagggaataaaattagagagatggtagatagaaagttctctaattgggaatttttacactagtcctactattgagaacagtattctggttatatggaggaaacattttgttcgagcaattgttgttagagaaaatcctcaatatgttcattgctttatcgaaatggctggccagtcgaatgctatgagtctcacttttgtgtatgggtttaacacaatggaggaaagaaaggggttatgggatggtttgctcaaccttaagctctccgctaagtcgtggttggttacaggggatttcaattctctctttgaattggaagataggaagggtggaaatgtggttgctttgaatgatataagggatgctaatatgtggcctgctcaaaatcacgtggacagactcctcaagacaagttcagggtacacttggactaacaaccaggatgggagtgaaagaatctattccaagatagaccacacctttgtgaatgaagactggacatattatttcctgaggtctaaagctcactatagctgggagactacttttgatcactgtctttgtctcatctcgattgtggtaaatgaagaaattgggttcaaacattttaggtattataatttctgggctgaacatcaggagtttaaagatgtattgcttgaaagttggcataagccgatgacaggtgagggaatggcatcactttttttgaaacttatgcgattaaagcacacaataaagaagttcaatagagaagctattggggatattggaaagagttatcatgaagcaagagacagttacttagaagccagattgcaagctcagacacatactcaaaacccagtttaccaacaaatcgagaaggaggctgcaatagctttcaatactcaagagaagatgtatcatagtttcttgagacaaataagtaaggttttgtggctgtgcaaaggggatgagaacaatgtgttttttcatgcctttttgaaaacaaagaaggatggaaaatagtattagtttcttacacaaatgagcaaggggagataatagattactttaaagaggtggcaaagcatttcataaagtattttcagggttatatgggaacaagtttgcatccaactcaaaagcttgtaaacaattgcatggaaatggggaactatcttactatggaggagcaactaagtatgataagaccctttactattaagaaaatcaagaaggctttattcactatcccgaattcgaaatcccctcggacccgatgggtatgaagttgggttctttaagaagatgtggcatgagttgggtattgagttcactaaggctgtgggcagttttttcaatcaggttattacctcaggagttcatgccacaatgataactctcattcctaagcggaaaacccacaaaagctattgattccagccaatagcttgttgcactactgtgtacaaaggcatatccaagttctaatgtttgagactttctcaagttcttccatggcttatgatcag

SEQ ID NO: 301884 - DNA, 2876 bp, Cannabis indica
ttttaaattttattttcatttaaaaaaataaaaagtaaattttttatgaaacatgttttttgaaaatatttttatttttctaataaatagataaaaataatttaaataatagttacaggatacactcttaaggtgcatttgcttttcttaagatttagacatctcaatttgaataataagttattttatttaaatatgaatattaaaatactacgactttttttgttacatctggatgcattttttagtattggttactcggcttttagtaaacaatatagagtgaagaatatgacagttaatgaatttaaataataagaacaaattatcaaggttcagttccaatgtgttggtaataactattggaaattacatacaaggatcgtgttatttttaaatttattttacaaattaaacaacttaacatataaaacagcgtagaattacgtttctaattaatttatcataacagagattaaagtacagatacttacagtcatgctgcggaattaatgaatcctctctctgaattccttaactctttgtcctttctgttgctagctatattgtaaggaattcaaaccatttttcttctataatttctttttaatttttctcggagatgtaggtatcaaatagcttagtgtgagctattccttaatactctagcaatagggaaaagagagttttattttgtaataagaaatcgagagtgaatagcttaggttaagagctctcacacccaacacctgagcaaatggactatgtcctttctggaatttctaatagacttactgatttggaatgctcatgcttggaagcccctttcacggccgatgaagtctagcaagccgtttcccaattagctagtgataagttccctggccttgatggcttcaatggcacctttttccaaaaaaaattagcatttgattggcgctgatgtggttcaagctgctcttagcttcttgaataataatgtggatttgtcgcccatcaataataccattattgttcttattctcaaaaagagtcaccatgaagccatcactgattaccggccaattctttgtcgaattatctcgccagcccaaagtgcttttctcaccaaccatttaatcttcgataatatcattatagggcaagaagtcactcactctttcactcatcggaaacaaggtaaagttggctggatggctttaaagcttgacatggccaaaggctttgaccgagttaaatggtctttccttaggagggttatggaaaagttctagttcccttcaaattttaccaatcttttcatctcctgtctttccactgcttctttctccttttcaatcaatcaacaactctatggatctgttataccttcccgtggaattcgacaaggcaatcactctttccccttatctcttcctattatgctctgaaggacattcatcgctcataactcaacaagtcaatcagcgtcttcccaggaatcaagctcttggtcttaagattgcccggaatgcaccaataatctcacatcttttcttcgctgatgacagtattctttttagtgctgcttctcccagtgcagtagttcaaatcaaggatctccttcatgctgacagcctagcttcgggtcggcttgtgaactacgacaaatcatcgctctatttctcacctaacaccagtgatctagtcaagaactgaattacttccttgctcaatgtgtctattcgcgactctatcgagaaatatttaggcctccctcaatcatgtgtggaaccacctaaacagatggcactccactttcttctcaaaagggggtaaagagattcttctcaaatcagtggttcaaacgataccgtcctatgcgatttcttgctttaaactaccccaccatttccaccataaactggaaaccatgatggcccaattctggtggggaggaatctcacacagtaggaaaattcattggaagagttgttcctccctttgtaaatctaaatttcatggtggccttggtttccgatcaatgaaagctttcaatcaagctttgttagccaaacaggcttggcgtattctttaggctccttcctctctagttgctcaacttctcaaaagccgatatcacccacactcttcttttcttgactctgggaaaggacaccgcccttctcttgtttggaatagcatctcttggggaaaatctctccttagatctgggttacgtcatattgtcgggaatggtgcctccataaacatttttaaggattcctgggttccgagttatgggaagctgcacgatcttctgccttcacctaccctagatattatagtctccaatcttattacctctaacggagcttgggattcacagcaacttcaaaatctcttcccaaatgacgtgtaccaaacaataaaatcaatgcccctccttcaacctctaagtcaagatcgaatctattggtttttggaatatgttttaccaaaatctagatttactaccatgtattttgtttaacatcctaatataaattcatacaacaatgaaagtaaacacatataaagtttcagaaaaccttacattgggtgcagcagaatataatggctccttccgctcagatctctaacctttgtatcctgtctgtcgcaaagtatcaccaagatctgagcctgaatgtccttctcttgattctggattcttcacagccttacacactatgattgagataccacttgatgtgtgtgggcactcactctatcactcaaggtatgaaaaattgaagaagaaaagagagaaaaggtggttcggctatgggtatagaatagatgcctcaaatttccagaagccaagaaaatttcatcatcttttaagtgtgagccat

SEQ ID NO: 301885 - DNA, 2010 bp, Cannabis indica
actgtgatgacatcactgtaattgtgaataactatatattcgagattaaatagaacttatatattaaacttataatcacataataaacatgtgagcaaagcatatgacaagctcaagatatgatttctaatctttattgaaagtaaataatattacaataaaattagatttatttagagcataaaatccaaatacctagaattgaagaggaaaaactttgccaaaatctataataaaccaccattattggtgaagctcaagagctcaatatagttgacttgtggaataaggcttgttaatgccccaatcacataaaaatatttgtcttaaatcatctctaatctttcttttctttctctatatcattatttatttatagtttccaaaaaacagttactatagtaaattaatttgttcaaacattgcctgctttttcctaatgattcattaataggcaagaaaaatattttctttttaaaaatacaaatattcatgttatgttaaataaagtaaacaattgatgcctggcaacattggcaatatctcccaaaatattctattgaccattagagttgatttagctccacgaagcataataatatgtaggccatatagctcctctcatccaattttgaacatgttgaacaactttcttagaataagaacattgaaagaagaagtgttcatgattatctatgccatcatcataaactgcaacgtctaagaaatctacattaacttcctaatctttaggcagaagatgagcattttccgcttgccaaagaataaatctatgcttaggcatagacaccaaatagctcgagaatcattaaccatgacacaatgagcttggaaggtaccatacattttgttaattttgagttttccactcttgcttgcttctaagatttcctctcgagagaactttttttagtggttaaaaacttcctccaataccaactaacatcaagctttagctcatgctcccaaaattcttgaattctcaaataaattgcattaacccactttatccagagatcttcttgctttgttgtgatgacctaaacatacttggcgagagatgctttgttccatttaactccttcctgaaagcccattccaccaaacacttgggtttacacaccatctcccaagaagtaatttgaagcttgctcaagttacctttaacttcccatataatgtttctacataatctatcgatctctttaattatcttttgaggtaacagaaagatactcatccaatagcaccttatactaatcaaaacataatgaatcaaatgagcacgcccaacaaaagagagttgcctactagactaattgtgcagatacataatgatattttaatttattgggctacaatcactttccttctatttggtaggcctcaaggtgacccttaactatttttagaggaagtctaccttcatcgaacttgcttatctcaatgatactcttcttctcaatcttctcaacgcctccaaagaagatttgagacttactgtggttagctagctaacctgatcaactattgaatataatgaaagctttttttaattatttgaacagatttgctctctcctttgcagagaatgattaaatcatcaccaaagtaaaggtttactgactttagtcttttgcataaaggtttacaaataatagattttcttatatttttcaaattttatgtatttttttatttatttcaaataagagaatataagacaggagggttatattatcataaaaaaatttgaaaaatataaatactaatcgataaatatagagaagagaaaataaaagtcaacgatattagttcagtggtgagggaggagtagaaaaaagtaagaaggcataagtttaatgttggattaaaatcttattgtgggcacatatgtataatgtatatgctattataaagtgtgatacaatattaagtgaccaattatgttatgtgtatcaaaaaagtattaaattgtcatgaaaataa

SEQ ID NO: 301886 - DNA, 2411 bp, Cannabis indica
tttttttaaaaaaaaacattgatctatagtgacgcaataggcccaaatgggtaaatgtgtccaaaccctcctagcgcgtcactatatcatacacctaaactaaaaaaaataattttaattaataaactcttaataaataaatgataaaaacaacgcgtggttttagggttacatatatacatttttcaaaaacgtaaacataataaaattttaataagtaattaaaaaaatgaaatattaaagatataagggttacatattagttaagaagccctatatatagccaaaaaataagaagaactaacttgtttttcctctctatcatcaccctcattccttctaatcaaacgtgaacgagcaagatcacgacaacggcaagtgagtgaggatctcttatgcaagagccacaaccaagacgatggggatgtatgcttacaaacctttggcacccgatcttctccactgtcgtagccccattctagtgcttaactccatatttcttgatctgagctgctactgagcaacgacccaaactccgatccaaatttgcctctatcaaggttctctctcatagaaacccccaaatctcactcttatttctctatatgtgtgtgtgtgtgtgattgttagactctgcatttaggtttccaatctttgaggaattagttggggttttttttttggattttacgtctttgttaaactttttatttatgggattttcttcacatgttgattgaagttttgatacattaaggactctattgaagttgaaaaaaaaataggattaggatttctcattttaatttaaggaaggtacttatattttttctctttaaggttattgactaagacagtggattaggagttcgtaaaaccgatctgattcatagaacactgatggtggtggaggcttaagagtttcataattgttttttatttttttttctagtttttaaattttcatactaagtggattttaatctttttttatgcttggttaactgggttcataatgtgtatgtctaatgtttctgttggaaaaaaaatcttttcaaattttgttcttagcaatagaaatcaatgtacaaattacttacttttttttatttctaattatgttgattaatcaaaagtaatattattttgttctgtaaaaattttattataaatatttttgttaattacttgtaaaatattaataaataacattatcaatatatttaaaaaaaaatggaaatataatatacatagtgacgtataatttgggttactattatatttagagtatgacatggtatgactctaaaatgatatagtgatgctcaatggtatgactctaaaaggttttagtgacctgtagtgaagggtcactatatattactttttcaatcacccacaatagtgactcgaagtaaagggtcactaaaaatcattagagtctctcaagatggctcattgaagcccatttttgtagtactatgccttgcatacaatgattttacactttttcaaatcttagtctagggtatttataagttctactggtctaagatacattgatggtccctagggaacaagcttgatgcttttgtcttgtagggtacaggaggtggtctttgtaccgttgccgattgtcaaatggtctaagcttgtaggcgtagtgtctgtagcgtgccctttgtcggtgtgtcaaggcatgcaggtgacatgcctctactacttctttatcttatcttgttagattgagatttctccctagggatctcagacttttgagaaggggaaacttttccttggggtcctacaccatggggagttgatgacttccattttgggtctcgtgactaataagggtgtgagcctctttgcctagatgctcttgtggacatggatgagatggtgcttgaagcttctttgtcgagattggcatgttaatctatattgtcctcctttcattctctctttctttctttctttctttctttttaacttaagggtgatgttggtttacgaaatgttttaatctcttatgatacctagaatttaagggagacgtcggttccttgaaccttctcgacctatttttattaatggaatttaatggagacattggttcattgagccttctcaacttctttttatctttggaatttaagggtggcgttggttccttgaaccttctctacctcttttaaatttttgaatttaagtgagacatttgttccttgaaccttctcaacatcttttttaaattttgaattgaagggagacgttggttctgtgaaccttctcaacatcattttaatttttataatttaagggagacgttcgtgtaaagtccttttttggcaagttagttgacaaaatattttttttatggtaagattgttttgcattcatacccgatt

SEQ ID NO: 301887 - DNA, 977 bp, Cannabis indica
attttaattaaataactttataaaaacattaattggactatttttttttttttttatatagagactgtactaaaacaattaagggtacgtatactataaattttccctacttactattactattaattgtacgttatgttttgaaaattgcatttaaaagtaattgtattaattttccctacataattatatatataacctctaataatttgctgcatatatatatacatgcatatagaattaatacttacagaacatataaagatataatatttccaagtatccctatatataatttgtttttttttaaaaaaagtatcctataattcaattaatttatatatgcacctttctaaaaataataatgttattagctgatgataattagatatacacataatatttatataaatttgtagtgagtagagattagatatggggtcctcttggagaagtgggataatatagatataacagaggaaggaggtaacactgtgatggtgtaagaagaatgacccttttgtgtgttggcctctctctctctgttatattattattattattatttggaacactatactcagtactcactcatatattcgctctcacacataataatatttatagcgtcccttccatggcttaaaaagacatatgtggtttgggacaggggtttagtcaagcttaggtcatcattttcccacttctctcttaaaaagtaaaacattactggccagtacgtacatttgctatatctctagatcaggcctaaacgaccattcttattcacctgagaatcatatttgtatgaatttgcaatggatagcttttcttgattttttctattttaataaaacggccattttgacaaactagctagtctctttctgtctcaatattgttatattactttgtaatagatgcttatctatatctattttttatataaagtgtgcctatataactgaattcttggt

SEQ ID NO: 301888 - DNA, 3355 bp, Cannabis indica
aaacttgactaccttcactactctttttctgctctctattaagtgtcctttgatcatgattattggttagtacctaaacttaaactggaatggtaacaaaatttaacttcttgtacttttacttgcactttattttagatttgatatttgatgaattttgctttatatagtttgattgtactcttaattaccaaactatgaatcaaaagaggaactagtcttagctctaaattgaattacaaaacaacatttttgtggatgagttgggattagcaaagttgattgatttttcatactccaaatgaatctgtctatgtcagctgttgcaggctcatatcatatggctatattaatactttttgtgttcattcattaaattcatttgcattaattaactactttagcaagaaaatgacagttttgagatcattatttgctctaaagtctgacacatgcaacaaaattatcatgcttgaaccttcacttctcattccatcattactaaagatcactaataaaaacaagacaatagtttgatttgatacagtcataatcttaattagcatgattaaccaaagctcaagttttttccatatcttttgaatcccaagagctattgtttccttaacaaaattcactttcttttcctctttatggcttcagacaacaggcaataaggcagcttccatcctcagctcattcatcttcaagttcacatcactcaatttggtctcaaagaaatttctgagatgagttcccatggataagtacacctcatctgtcaacaccataggcaagtcgggacaacaaagagcgaattcaaggcgcaagacttccttgaggatcattcgaaggagctctaattctgtgtcattattatcattctttgctgctctgttcacaatcaaactctgcttgttttttttcatttttctttctactaattgaatcacacataagaaagtcttgatcataatggaaacatcattatttttctcaacactcagtagctttatcatagccttgaaatgatcaaggttcttcattataagtttcctatcacaccaaaatcaccaccaaaaaatccaagagatatttgtgccaagatcaatcacaactgtcttcatggcctcaaaagtactctttctccgagattgatgatcaaggtgttgcactcaatcaaactctttttgccttttcttcttcccttttcggtttctttagtccaaattgtcatgaactcttgcaaatctttcaagtaatccttgaaacagtgatgatcaagatatggaatgttgtacttgaagtgtttgtcttaaaactcattggcgtgtttgctaagacactcggcttgattcgtcatgtctatgaattcgagtgtgaatttctcatgaccatcttcattattccccaaaagggctgatgcagcaacaagcaaggacctgtattcatgtgctatttccaagaagtattgaaaatcttctgagttttccagttctttgaacttcgtggaaatgtttttgttgacatatctccatgctaagagatgtgtgtgaattggatcatcagttactacacgacatgtcgtttatttcttacgacacaaaatttgtcacttcatgaaatggtttggaaatgatctgaatatcaaggatttgttgaggaaaaatataattaattagtcatttcaggaattacgtgcaactctaaaattcaagaataaacattatgaaaggattctaacacagagcaaagatcaaactcaaagacaatcttcattaaaattcatacaaacaaactcttaattgcatgattagtactaaaggtcaagtttgttccatatgttctgaacttctatagccattgtttccttaacaaattcaacttcattttcatctttatgactttggacaaaagacaacaaagcaacttccatcctcagcgcattcatcttcatattcacatcattcaatttggtcccaaagaaatttctgagatgaattcccatagataagtacacctcatctgttaacaccataaccaaatcaggacaacaaagagcaacttcaagtctcaaaatttctttaagaatcattctcatgatctcgagttctatcttgcccgcgatctcagtctcttctcctctgttcccattcaagccctttctctttcccattgttgtttctactaattggatcacacctaagaaagccttgatcacaatagaattatccttattcttctcaacacttagtagttttatcatagccttgaaatcatcgagattcttgattatgtgtttcctatcacccaaaatcaccaccaataacagaaaatcagtgatgattttagagacattagtgccaagatcaatcaccacattcttcatggcctcaaaagtaatctttctctgagattgatcaagctcttgcagccactcaatcaaactcttttcgccttttcttcttcctttttcagtttccaaattgtcataaactcttgtaaatctttcaagtaatccttgaaagattcagtcacaccaaaatgtggaatgttgtagttttggtgtaatttgtcatgaaaatcatccacacgcttgttgagacagtgagcttgttttatcaacacaatcattttcgattgaatctcgtctttacaccccaaaattgttgatgcagccttgagaagagagcgataatcttttgctaattccataatgcttataggatctttttgattttttgaccagttcatgtaaattcttgaaaatgtttgctgacatttgattccatgctaactccaaatccattctttgacaatttctcaagttgcagcgtttttttttctttgagatgagagagtgataataagacttgattagtggaaagaaatacagttttttctgttatttatatataatatgagaaatgctaaatccaagtaagatttaatattaatattgtttgcaactcaatattagatcttatttgttttactttaataaatattataataaattactaattaattataaagtcacactttattgtggtattatagaaatgttatatacatgtcttataattgaagctttgaaaccaaaaataaatgacttataatatatatgttttgttttataattttaaggttaaataaattttttacatttttataatttttaataaaaataatacgaaaacaaaaaaaaattacataaaagtaacataaaaataacattaaaataacataaaaataacataaaaatcaacaaaaaatcaacaacaaattaacaagagtataacataaaaagactgtattttctgtaaataaaactacaaaaatcgtaaaaaatatt

SEQ ID NO: 301889 - DNA, 3064 bp, Cannabis indica
aaaaaaaattaaaataccaaaaaatatcaaggtaacaataataataaacaatcatcaatactatatcataataaaattattttagagtaaatataatgttcatacatgtattacaatttaaaataaaattattaattttacgtaaataaatttataaaatatatatgtttattaagatgtaattattcttatataaaagtatattttcttaatacgtgatttaaaacatttataactaattataatttataagttattcttattcttatttataattaagttaaattaagggtaaatagcggcataagtacctaaagttttatgtttgtaagcggcataaacctaatgtttatttttagcgtcataagtacccaatgtttgtaaaactataattttcttccaattttgtcagtacagactctgttttgaatttattaaaagaacatttagaagtaactgacaaggccggttataagcttgtgcatcctgatctattgtacaaggcccatttaaataagggtctaatttcttgccttctttttaggttggcttttttgtttttttgttttgcttttttatgaaatgaaacttaaatgaaataaaacagtatgaaaaaaaaaattattactttccacttttcaagtattgttctaaatcccacgtttaacagtaatctataactattttatcaaacttcttttattctattatatttttttttttaaaaaaatggatattctattcattccaaggatattatttttttatcttctatataattctttacaattaactttcaatattccatcaaaagttaaaaattaagaaaaaaattatgaattttaagtaaaacgttaatgttagcttaaagttgtaatgggataaataataattttaataaaatagtttaaactctttggtgtttaattttgtaaataatataaacgtaatataataatatttgaaaatattattaattttttatcgtatttttttaagggccaaaattttaagattagaacagggcctcaaaaatacttaagacggtcctagtaactgatactatatatttctatctagacccggtgataaaaaatttaagctttatatgtgtcctgtttaagacaatatcagagtctgtactgagaaaattagagaaaaattacagttttacaaatattggatacttatgccgctaaaaataaacatgtggtttatgccgcttataaacataaaactttaggtatttatgccactatttactcttaaattaaaactaagttaaattaagttattcttaaatagattattcttaaataaaagttatactgttttgtggcggagatagtctaataacgttagtgtaaatcattaactaatttttttaatgtgcaaaaacattggagaaaatgaaagatttgggggagttcttgctctgctcttgtgtttgttttgtgtcgtttgacttttgatgatttttgcgtgttgtttatagtcaagactcaagtgaacgttccctataccttctcgtactagggcccactcccactccaaactatataaagtccacacaacaatagtttttggttacttacactccatcatcatcatcatcatcaaaaatttagattcaatttcagaaaaagaaaatagaaatattcatttcagattcagttttttttgatgacccacaaaaggcattctcctcaacaggctcgtagtagtagtagtagtagtgatggttttcctatcccaattcgagattccaagaaaaaacccattttcaaaaggtgggtgtttttccatttcttctcttgcttttgagttttgattctaaattgttgtttttctcttattctttctaaacttgggattttgtgttttttttttttctctttccagtgttgttggaaatttaactagaggattttctcttaatgaggcccaatgggagccttttctccgaagagtggtaagatcatcttggtctctttgtcaattacttaaaaagatttgatctttacttattttaaaggattttctctctcttttccttttgttttatgtttttcttatagttctcctagtggggttgtttggtacttgagaaaaatggtatgactatgtttatcataatcatgctttaaattttgacttagattcaaacccttgttcattttcatggtttgattttaatttggtttgatttggggtgttttttacagaagtatttgaatttaaattcttaaaggctgtctcttttgttcattacttaatatattttgtttggctttacagattcgagaccaggttgaacgtacaatatgttctgtcctcaatttaaggttagttctttcaactcaattttcttgctatttaataagattgagaatttaaaaggttctaataagaataaaaccactgtctttgttgatttcaggccctcagattatcaggaaaattcacctgaaggaggcggtttgcggttgcaatttgtaaccgaattacctaacaccatcttcactaacagcaagatccaaaccgagcaagaaacacctgttcaaatcatcctaactgatgctaacaacaacatagtcaattcaggaccatattcatccttgaaagttgaggtagtaccactcaatggcgaatttggttcggatgatcaggaggaatggactgagaaagagttcaatgacaaggttgtgcgcgaaagagaaggtaaaaggccactcgtgactggcgagttgaattttaacttgagaaatggggttgccaatgttggtaatgtatcctttactgataactctagctggatcagaagtagaaaattcaggctgggagttagagcattgcagaaagtttgtggcgaaataagaatcagagaagccagaagtggcgcgtttaaggtcaaggatcatcgcggggagtgtaagtttcaaaagcttaactttttgtacttgttgctcatatcaattcaagtaatcaatcagtgcttatttgcagatcagggccgtctttagggtagggtggctagggccgttgttttcaaaaaatagttttt

SEQ ID NO: 301890 - DNA, 2695 bp, Cannabis indica
tacatactaattaaacattaacacttccaaaaaattcataacctacattaacactttcatataactttttgacaaattaaatatactaaataaatacaaaaaagagcatgtactcttatagatcataagatacaaaaatgataactttattttaagcattttctattactcaaacttttttcaaatctagtaaattaatagttatagaaaaagaaaaaagtcaaaacaatctttcataatgaactaaatttaagaataattttggaatgaggaagaaaaatcataaaataatgacttattttttactcaatacataattggataaaatttgacaagtattattttctattatgattaagtattattttttcgatttttcattctgatggttgctataccttaagcattcttacaaattgtatcatgcacaattagtaatataccaaaattctattttggaggagttgttgagaaaagttttcccaatcccattttcaatcttgttttaaaatctttgcaacaaaagctctagtaagtattattgcaaggtacgccccacctgtaatggcaataccacccaatagaacaagacggtcataagcagcactctgcactgtgtatactcggagccctattgcattccagttgctttcagtccaaacaggatcgtgcatccccattgggtcagaagaatttggaggcaggacattccaagttcctgattcgaaactcaaccgtgtagaatatgctggtacatacctgtgaccaaaaagtaaaatatatatttttttattatataattgtctaatgtatagaaaataaaatttgagttaacatgtcacttagccaatggttatcaaagcagcaataaaaacaaaatagcaccaatcatacaactcaactatacagataaatcgtaaacagaaagaacacaaatcacagatgtcttttcactagggcttccaacttcttcaagtacttctagtccatgttgagctatgtaaaacagcacttgacctatccataaaggctcaaatattgtaagaaaggcttaagcttcaagtgcaggcataaacatgtcaatgtggggggttaaaacgtatgtttgagatgtaatcctaaataataaaaaccaattctaaaaaagacatcaaggtacttggcatgataatttggacttgaaaacaaagatggttctatctgtagcaaggtaccttgttgtggagaaaacacaaattccctttccatctacttctgctctagtgcatactccccctttcttgctgcaatcttctgagcaaacaggagtcttcccttttggaggagaagttttgtcagccagaaaattccacacaaatctggaaacatcaccgatgtattccggagacggtgtagaagaaggttcctcagaaataacaccaacataatggcttgggcacgtactggacggagcaataaagtttttcactagctcacatgagagaccaggctcacattctaataggcaacccataagttgttcgaccagtgaaacattcacattgacagaagctagagctgatttgctgtcatctttagtgtcacttgtaaggacataaagggtgcgtgctaaaagagaagccgccgccacaatagatgaagagtttaaattagctgcagttaaaacatggttgagagacaaagatgaaactgcagtatgtcattcaacaatcaaaattataataacaacaacaacaataacacgagtaaactcacatgaatcatcaaggtgactatgatagaacttgttggagaagatggtatcaaaatcttccaaaacaactccagatgtaataggattctgttacaagatgataattattctctatagcataaaatataaggcatcagcaacagtacagcaaagaatttaagttcatgttttctattattggttcaaatcttctactaattttccatatgaaccagcttgtgattctcacaaagaatttcttgaatactacattgttgggctggttattcgatagaggaagactgctactaatcaggaaattacttgagatacaaaggaatacggcaaaatagctcacatcagattcgataagggagctcaccttttgattggatcttctattcaataggctggaatactacatgaacaattaagattggtttctctaaacattcaccttacaattgggttctattcctcatctaacaatagctatggtggccaagggatttgtagaattctcagacaacaggttattaaagacagaaaaagtcaagtgttcaattatagagaatggcttgagaataattttggggaatctagtggggacaagggatgtcatcagctagtgatttggcaaaggcatattcatatttccatggatactgttggatagtgattagaactaatgaataattttggatggattccacgtgagcacattttaggtactgaagctccaagtaagatccctgaagaatttgtctttcagtatccaacaaattggaatttagatagagggaacgagcatggagaaagaaaacacaaactgccattacttgcaaaggaacgacaccacaagctagttcacatcagatttgctatggaagctcactatttgaatggtggaacatttaggaatggattctctaatattcactttgaggacaaggtgaaagtttg

SEQ ID NO: 301891 - DNA, 3476 bp, Cannabis indica
tttctttttcttttttcttgaaaccttgtcacttactactttaagattccaggttattgtgtcacggatgagatacatatcatcacaaactgatcgtgcagtacgatttgtgggtctctctacggctttagcaaatgcaaggtaatttaagcaatgtttcttcaatcactttatcttcatatggatattttagtgtttcttctaaagttcttgctgtctctatttagtgacttggctgactggctgggtgttggtgaaattggactcttcaactttaaaccaagcgtgaggcctgttcctcttgaagttcatatacaagtaagtggattcattgcttctagtactaccaatactcacaaagtatttttttttcttttctatttttaatttcctttttatcatctttggtgttgtattcttgtgggtagtgttaagctctttaagatttatttctacctattctgattttatcattttcctaatactatgaaaatagttcctggtttaagtatttaagcttctttggcggtcttttttttccccttaaacttaatgatgcttcggttgtcaacaaagcaacaaaaagaatagatcaatccaagaataatgggtttttttcccctttttattttgaaaaagactgaaaagtctaaactacagggatgatcttacaagcagcagatatagaactagtcaactctagatatagaactagtcaactctacgaccttttctttcgaggtatacacataaatatattatcaaaatacccagacctactacaaaagagaaaccccaaaacgaaagatccctaaagaaacaacaaaactagctacatagatcatggttttgctaaccagattttatacaaaactttggatgattttcggaaaagctaaggtcgagagttatgactgacctcccgttgaaaaaataagggaaggtcaagcagtcagaaaactcaaacttaaaaaagggaagaaagaaaagaaaagaaaagagagaatttccacgtaaaagttagtatccatggctgaaaaaacagtagatctacgctttaaaacaaaagatctgaccagatccaagccatatcgagacgtaaaaccttcaacaaaacactagttgcttcaagattaatcgtagatgctacacctttctttgagaaaaccggaagagggagagaactcggcggtggcgaagctatacataccgtcgaccctgtgtagaacagaaaagttcgtgtaggttcttgagatcggattcgagtttgaatcgtcacaggttctgggccaagcaaacccgccgactcaggattggttagtctgtagtgttccttccgaggaggactcgcgtctacagttgacttcgttgttgtcttagtcatcgtcgtaaccttttctttaaattcctcgccgcgtttcaagatcttgatttgacccgtgaagaagcttccgacgtgatgaggcttttcgaccgtggatttggtagccggaggggaggtggtgccgttggaaagaggagggatcctttttcggcgattggcgtgaggacggttgttgttggggcgtttgttagggtttcgagtatagtatcccatgattcttgagaagaaagtatagagagagagagatgaaatatggtatgggtttttttcccctttctttgctttgtctatggatgttgtggttggatagggactcgtatcataagacaagttgataattcttggttagggagcttacagttttatgtacatgtttgctttgttaccacgactttctttcgcctgccataaatgaggctccctaataaatttgagagtaggtagacacgtgacctttgtcttgttttctaaaataaaataaaaattagagtggatttcgaaaaagcatatgatcttgtagagtgaggccttttcgattttgtattggggaagaactttgggaggatttggaggaagtggataaaggggtgtttaattgcagtttcataatgaggaaattacattgtatacccactttacttgttttaatttttacctctattttcatatttttttagatatacccacttttatggatgattttcccataagaccctctaggttatgtaaattatatgctacacttaagtagagagtgaagatatattaggcaatccactaaaaaacgtgggtatattttaataaaaaaataatatgaaggtatttttgattaattataacaaaaaagaagtatttttcaacttatccctttcatgatgggagacaaactgaatgtttcatgggggttcataatgtaaagtaatttaaagataaccctttctcggattggttgagagaatgaacgtttttttgggttctcagtgtttatgtctagggagattttggtaattttattctacctttttctgattttgtaaactttatttaataatactagtcttgtttttaaaaaataaataaataatgatatgattataataatgaaaaggagaatcttgcaacaagttaagagtattaaaattacggctaaaatacttggactgttttaagggacagaggtcaaatgtcaaaattgttattagaaccctcacaaaaagtagagaaataccatggctacaaaacttgggacccccaagagagtacaaaagcacaaaaccacaaatttctacaattagatctgaagctagactcagtttattaaaataggaaaacatcacatctattacaataataggttaccccagtctaagaaggatagatcctcaaagtgctttgacttaaagatctatgatgctacccaaaatttaattttctcccacatgtcctttgctgaacgctctctaccctaaaaattctgctatttttctcattccaaactgcccacataactagtactgctgacttccacagttagacatacacttgcttcctaccagcttactcttgatcattgggagcaacaatgagtaagacccgaaaaaccccaaattccaaaattaatttggaccataatttccataagaaaatggtcaatggtctccctgcttgccttgcagcaaacacaccagcttcgagattacacatggtatggtcttctttgttgtagtttgtcataaacgttcactttttccaaagttactgactattcaaacactttcaccttagaaggaacactacttctccataaagccctggcccactttacctcaacatgttgttggctcgagataagcgatgaaaagaaagatttgaaagagaacacttcacttggctctggatgcagattctgaatcaaagttattatacagctatattgtataataataaaaaagttgattttccaacactctcccttaagctggacaaaaaatgttctccatagtcagaaaatcaaattgtttcttacacagttcttgtgtaaagatatctgccacctgctcttcagtagaaacataaggcatacacacttgac

SEQ ID NO: 301892 - DNA, 2527 bp, Cannabis indica
ctaatgtgcatctcactaaaaattactcctaactctttagtaacccgcacttttgtgcgtgtcactaaaagtctattgttgtagagtatgagacacttatggcatttgcgagtagtacgactgttgtatgtgtggcatctgctgcattaatatcatcagtgacgactgttgcatctgagactatagtgtcatatgttacatcgatagcatcgaaggcatctgttgcatatgcggtgtctgctgcataaaaagcatctattgcaaatgtcacatgttaaatatgcgccatttgctgcatcaaatgcatctggtggtgctgcatctgtggtctttgttgctacatctatggtgtgtgttgcatggaaggcaactgttgcatctgtagtgtgtgttgcataaaaggctgctgctgcatctgtatctatggtgtctgctacatctgtatatgtggtgtttgttgcatcaaaggttgttgctaaatctgtggtgattgtttgttgtatataatttacctacagctgcgacatcagtgatgacaaccaaggaaaaagggacatttgctgaggtgatgataaaggatacataaatagaatagtactctgctgcgtttggtgatattgggaagtcccgggctctgaagataaagcagacccacctccagacatttgaggttgaaacgtctgtgttggaggcattggcatcccgaataactcctctttactaggtagacgaacatcaggtcccaacctttgagaaatccataatatttttcttgtcaatttttcaaattgacgctacactctgggatccataagcatatcttgagtatgaataggttgtgtgcgctgtgatgaagattgttcctttaattttatccccactcctcggtgatcaccacgccattcaccaagtacttcaatgggtacgctcatttcaatctcctcaacaggttcaatgtcaggagtattggctcattttttataagtggaaagtagcccaccctattttaagaatacaagtcagaaagcattataaacatatgtaaaagagtattttatttataacatatgaataattacttacatatctttgtgcaaccaataaattaacaaatatatttgttctttttgaggtatgaacatccttccaagtctcaatgtaactcttactcttctaagagaaattaaaaaaattaaaaattgtaaaatttaataacttaattaataactctaagccatagatttcgatccctgtgttgtaggttaccacattttttttttttttctattttcaacgtttattttagaacgagcaataaactctagattggtaaaaacttacaaagaggaagccaatatcctctggagtaaaatcactaggcaggtgggcaacaacattatcaaaatcaacaatttttttgtagtattttttaaaatgtgcatgtcttaacaacttgcatttcttatatctatatgctatttcagtccatgcaatatttgtaattatctcaaaatattcatttttgttgatattgaaataatactggtttaaaaactaaattagcaacataataatcgcgagtaagaaaaaattcaatataattttttttatccgaagtttgttgaagactgcatcatgattcatccttaagacttttttccagctaccataatatcctgagacgttaaattctaatctctctcccaatcaaacgagaaaaaagcgccactctcactccaactattttaatagcacgaacgtcacacaaaagaagtagcagcactgaaatatttttcttttggtcgtctaatttattaaggacattacaatcacgtttcctctttgtcaaaaaattagaaatctcattttcatcttcagaagcttcagaagcaaactcacaatcggtgggaatcctagtaggatctagtgggccctcacccctaccattacctcatagtatctagcaacatctgtcgatattatactaaaaaatataccaccttattaaattgtcaccataaatataataaatattatattaaaaaaacacaccatccattactataacaaaagttcaaaatataatttaattttgagaataatataactaaatacaatagtcactatcatcatcactaatcgaatttgagtctatttgtggggatggtgacacataatttgaatcatcatcaaaagcatcatcaacaagtatgtcatcctctgcatctaagattttttcatcttcatctttatcttcaatatcatcgtcatctacaactatcgataaacttttagggacatcaataattattgttggtggatgattagtttgttgcacattcaaggaatagtgaaaaatttgatgagtttgtttcatgtacaatatcaatgtcaacatcatcgttgtcatcggtgccatctacaattttgtcccaaagttggtgatgattcacatcttggacaaccctccaatttcgacttttaaccaaatcatccactaagaaaacttgtttcgcttgattggcca

SEQ ID NO: 301893 - DNA, 1259 bp, Cannabis indica
tttaaagaggagtctggtctcgagcttctaggtgagagaaatctcactataacagagaggatactcgcacatagttcgatacatgcgagttattctcttgtcccgcataatacgagttataatcatgcgattagactttgatcatgttcgcagtatctcgctgactctatcttgagcgaggtttaaaacttcgaggagtctcttgcagacgactcagctttcattggaaaactgagtacacgtgtcctctaaacaagagtatggtctcgagtttctaggtgagagaagtctcactataacaatttgcattaggcactggtgttagtattgatcttccatcactcatgtatgatcaaatagtaagttctgtcactgccaaaagggtgaaacacacgctaccttatccaagtttgattaattgtgtggtgaaagagggtttcctactatatatgagcatgacaagatttttcgtattcatactcttgggaaaactttcactcctgtgtgtggcaaacctttgccattataagctatggatgtttcaactacgggtgaggcccttgcatctggtgtcccttcttcctcgactgctccttcagcttctttggaagggttcagtcctgcatcttggaaaagttagttattcctcgggtgaatgagtttgttgacactatgctcgtgatcagctcaggcagcgtcgattgaaaaaatagttattgatgtgttctttgctacgactgaagtcttaaaatcctctgaggcttgtcctgatgttcctgcaaatgatgttttctccagttcttcagatggtgttggtgctttttcagtgcattcaccagtgatttctccattgaatatggttgtagaaccatctgttactgctggtcataattcttctatccttgagtctaatgttaaaccatcttctatgggtattcatcaaggtccttcaggttttgctactgtccacgtggagtcagtctctgctgatatctagggggaaaacattgttccttatgtctagggggagcaagatcttgcacatgttcacaatgattccacaactgttgatgtttagggggagcaagatcttatacttgttcagaatgattcaacaactgtcggtatccaaggggagcaacccactaatgttctgtcctatgtacctgttggtgatgttactttagttcatggttcctccgcatcccttgttgcctattctagcagcgagtaattatgatcatcgagggggagattta

SEQ ID NO: 301894 - DNA, 4045 bp, Cannabis indica
cttctttgcagtgtgatattcgtcacctcttagaagttgctctagccttgatatttattatccatgttcttaagtacctttggtggatgctattctcactgctgcctattaacaaccccataatcgttcacttcgttttaggacaaccataaaactttgcctattaagacatttggttgtagtgcatttcttcatgtatccattggttactctagggatgcactaaacttgaccctagagccattaaaaatgtattcattggttactctcctacttaaaaggctatcgatgctattgtcctcttagaaagaagatgtatgtctcaatggtcgtaagcttctttgcaaactctttgtacttccctcccaccttgctccaggggggacaacacttgtctgcaacacaaggctttgtggtcatgggggttagaactacctctcaatcaatcttctacaaaagactttgatcaaagaatttgaagtcaaggatcttagaacactaagatactttctaggtatggaatttgctagacataagaatatttttgtatggaaaaggaattgcattcttgatcttctaaaagaaaccaaaaatgctggtagtaagccttgcaaagctccaatcaaacttgtaaacaaagcatgaaagttcatagcagatacatttgacaagggaagataccaagagttaggtggaaagctcatctatctctcacacactaaacctgacattgtttttgctatgagtctagtaagtcagtatatacatacatcatgttcacctcagtagttgaagtaggcaaagtgttatttttcaagaaagctcttgaatgaactgttgaaacagatgtatataaaatcaacacacatcttacaaaagagaagcttgaaagtggtttaatttgcactatatttgtctctacatagaatcaatttgcaactcacctttccagtgcagttttttatgtctctagttgacaagcttggaattggtaatccattttttagcttgagggaagtgttggaaaacatggttttgacctaattaatttaggagattaaatgttatatcttatgaggtttagtagttattgtattcattggttttagaaatttagtttcacctaggatattctttgtaattcttttttagtttagcttctggggatgtatatttttatatatttgcactaaatgtaatgtatcgaaaaacatttaatgtcagtttataagtatcaagattacatattatgggctgtattcaattgccagtagcagcctctggtgtgttgtgagtggtgtcaagcgaattgggttttttttttttttttttattttatcaagttgtaaatatgattatttctgaaatgttcttataaatatggtattttctaatttttgtttttttgcttacaaatgttttctttgtgtaattttatgtagtttagttataatttttcataacattcttatgtatatattggttggatgttggtcatctttccctaacaaatgtgcgagtttaaattttcccaaatcacagtgggtgtgaaatgacaaaatttgctttacaagaaggttgggatttgattgagagggtgactagtatttcttaagcatcctatatactaagtagtcggctatgtcatttgattgcaatcatactagtcttcatgtggtgtacttactacacaggagtcagcagcaaactatccaagatgctacaagtgttattattggttttcagtctagttagtgtgcttttgacggtttatgtccaaataggcagttaaagattagtcaaggctgagttgtgactcttgtgagttaatactatataatgggattttgaaaactaaccacatctttggattatctcccagtggcattcccaaatatttcaaaggccaattacccactgcctagcctatattacttgcctttgaaagcagctacacctcattcagatcagtagtcttatatatatgtagtgttgcacagtaagtggatttctctgaattaccttgagattgacggtatttcttgtaatactatgtaatttttcgtttttcagcttgagtagctgtgtgcattatcaatgagaactaatttagctatttctagtgtgagggagcgagggaaggaggtttatacaagttgagtagggtttagggtgatgatattttaatccttttggttatgtattttcatgttttatggttttctggtttctgtggtgattgtgtagttttctagaaaaaagtatgattagtattgaactaaagtaaagttgcatatgctagagagttatgattactgttctgtttatgctagttctctatctttcaaaacattaaaaaataagggtggtgttctgttctttttttcccagtcctgcataaaggttgcacttgactttgtctcgccagaaaatgttggtgagtgcattcgattagcagaggaattccgagaacttcccattagtcacaaggccaacgaggacaaattggaggtacgtgatctttaggttcatgtaggatggtgttatgtggttaatgccttatctattcttgctgtttgtatttgatcagatcacttttagttgtatctatctttagagatatcccatactgaaattctacgttatttgtagaacttatgtggcagtcagtatatgtaaggactcatttataacttacataaactatttttaatttgcaatttttgagtaggtgaagaaaatgaccctttatgcaacggcgtcggctttggaaactctggatccagatttagactttggtttgtttccagaaaaaaggttagtttgtcataacttgtatgtgtttattgcaaaattgttttaagacttgcttcaagcttttagatatttctctattatgttaacttctgtaaactaatttttctttttctggtatggttccgtgtcttgaattcgctagtagagagtatattgagataagtagatggtgttattttagcttattaaaaaagttggaattgccagattaactttagtttgaattatttatcagacgtttttttttcttttcttttataatcccattattggattgtaatagaagttgtgctcattctcaggtctgaaacaactgggtcgaagggaaaaaagaagatcacccaatcctaattactttcgacttaactattcaccatacttacgactggtataattttctcccttgtttttggagttgtttattggatcaaaacaggctactctgcccacgtgccaggagttctctgattttgtctagtagtattggcagagtttaggtggcacaaggaaaagttaattcacttttgtgagaaactccttctgtagatagatatattaggaagtaatataatgtacctctataaaaatgtagtgagtatattcggaatgactgatctttcttgtaagactacggaatcgacgtgtagccattaaagatcgccaactcaagtagctccatctcaatttatgtggtatcattttattccagtttttggtttcaagcaatttttacattagatccgaaactaaataatttgaatgcctaatgctgtttgattgaggttgaatagagtcggctagagtaactaagttttgagatttgtttgagttatggagatacaaattctgttgaaatgtttaacttatatcctcttggttctttgaagtttcaacacaataaaatggtgattttaataaacaacttttcaagtgtttagtgcacttgaaaaatgaagcttgttttcattcgttgtggtgcacaacaaaagcaaaaataaactagtacttcttttcatcagtgaaattttgttggatttgtgtatattatgcaagcatgtgcccgtttatatgatttatagtgtatttgggaaggaaaattagtatgtgtatgttatgcaagtatgcgccaacgaatgggacaccttattaaaagggaaatttgaatttccatgcttaaataacccatatattattcccctaaactaaaactatataattaattttatat

SEQ ID NO: 301895 - DNA, 6598 bp, Cannabis indica
tctggtggatctgatttaggttttttgttgctgggatttgaatctgacatcttgctaggtttaggtttgtttgattgtgtttggatatgagttgtgggattgtgtttgagttggggtagagttggtggtaattgtggttgtttggaaataaaaaaagaggttaaggtggcggtggatgggtggtggtgccgtggtgggcatctgtggtggataatggtggtggagatgatgatatttttgaagaggaatgaatatgaaaaaaaagcctccaatagaaaaataaagattagagaaaagataagaaaattaatttaattttttacttaatattttttttattgtttaataattatttatgtaggccaatcaaattatgttgtgtattctatgtatatttttatttacaatttttttaatttcaaattattttttttaattttttaaaaaattttttacgtggaccaatacaattgtgctatgtgtataccatgtccacatggaaaatccaacatggcacttaacacctaaaatggatgaaaactataaattgctaacattttcctagttttgggggttttgctgctaaaatttaaattttgagaattaagtgtaagtaaaataaaagtattgggagttatgccgcaattaactctaaaaaaaatatactaactattttctatcatgcttgtcatcatttagtagtaactcttgtaaatatttgtttcaagaaatgtacctatttaaagcatctttaagaaagatgatattaatgtttgtcaaaccaaaaaaaaaaaaaattggtttttctggtgtctctcaattaagacatttttcataatatttaagtcaccttttattaaaggaattaaattacattttacgcaaatttgatcatacttcaataattttttttattgaggtgatacgaaattagaaacatgatttatttatttttatttttttgttacaaaagaaaattaattttatttattaatcagtcaatctatacaaccaacaaaccaaagtattaacacatattaaacaatgaagcctaaaattttctgtgttttacattttgtaatctatacaaaagaatcattttcatctcttttcctatgtatgtaacagaatagaaaaaatcattatgaatacacatttttatctccactagtaatagaaagtagccgctaaaagagcatagattatatcagcgaaaaggtctatcttcttgttccccatccacactagccaattcaaaaactctattggccaagcatcaaaacccatccaactaaaaagatgtcgaactaccctttttgataaaggacactcaaataagaggtatttgtgacttacatcatgcccgccacacaccgtacaaacttgggagtcaatcttcaaattgcacttgataagattgtctctagtaagaagataggaatgagttgcttgccacaagataaatctatgttcgggcaacctaagacgacaccaaattgccttcatgaaggccacgttttcatgctgaattatactatcgtacagcttcctagcctgaaatttctccttgtaacaagcagctacaatatctcccctattgaaacttttcagaatattgtagagcttgcgtcagtaccaactcgagtcagccttgagttggtacttccaaaaatcctattctttttggtacaagttatggacccactttacccaaatgagatcttaattttttaaaatagcccagatgaaatttgccaaaatggctatattccacttagagttatctttgaacccaattccaccatacagcttcagaaggcaaactttctcttaagaagcaagatgcatcttgctgtgagtctcattgtgaccccataaagaccatctacaaatcttgtcaacttcctttgtaacattgtgaagcaagataaagatacccatctaataatttctcaacccaagtaaaactgaatgtataagttgagcccgaccaacaaaagataaattcttactagcccaagtatgaattgagctatgattttttgagataattaccccataatcttcaggttttcacattgtagatctcactgaaataccaagatactttatagggaattcaccttctccatcatcaatctcctaaagtaaattatctttgtcaacaactataacaccaccaaagtaaatgtttgagtttctcaaattggctttgaggtctattgaacttgttgctagtcaacgacgcagagtctataaaactaatcgggtaactttaaattataggtggtcccgttcttactttctcaagaagatgatactagtgtttgaataataataaagattatgaataactgtatacgaaataggaaatttatagaggttcagaccctttcagcgatgacaatctacttccctttttgttgtattgcttataaaagaatttaacatcacaaggtccgcccaagtgagtttcttaatatctctcaaaaaggttacaaatatttacagagtattttctctcttgaaagtgcatagcaaaagactcctcaatagtaaattggcctccctatttataggggagagggagtacatttaatcttgaaataataggataaaaatcattgtggatttgaatatgaatcccatgattttctcattctcctaagttaaatcccatgaaaatagggatcttaaactggtcctattatagtggaaacaataaggaaagtatcttgaaatttcttcagcaatttttctggtctgtaactctcattatgcatgtggtttgtattgctcagcgcaagatgagatcttaagctcgtttacgtgtcttggaatcatctagcttgatcggtacacagtagtattacacactgtctaggatcaaacttccctaccacgtgtcaacttcccaggtgccacatcatccatgcaaattttgggataacattttccctccaagtctgcatggaaatttctagtcatacgaggacttcctaagcttacaagttgtacagctaagtgacacgcatttgtacccacgtgtctgcgcagatgggacgttactcctgcatgactagtgaaaatcttgctcagtcctttcaaatctcaacattaattgctttctcttggatcttcaagtttaattgattaaaacgaacccagatgctgactattagggtcaattgatccgtgttgaatccttatgtgtgtatttttctcatatcgttctcttacgccttttttgaggtctttagggtttccagaaccttacaacttctttctccaaaagtacattaaggagatcgattcttttagttaaatctctttcttttctctagtttgagtactgggatgttttttcttgaaaagcaattcccaagctatttggtgactcacgtctttgtcctccttcttttgtagatgaatccagttgaattctggggaggtgataaccaagaaaatgatgatctgctcaaattactatttgaagataatctaacactctgtgcgacagactcatcctcatctttaggtgaaatatctctttcctcagattcttctgagtgggaagcactaagtgactccctggagcctcaaccacaacaccatcactatcccgaccagatcagtggaaaaggatatgaacgtcacatttaggagttgcaaagaggttggaggcaatttcttccagtctggtggacttatagagtcaaatcagacgttccaaatatgtggcctattagcctaccaatataaagtctaatgccttaataattaaggtgcgttacatgttttctaattattgtgctaacctttactaatcaaagagttttaagattaaaagtgtatttaataaaaaatttgtgataattaaaacttttctaaaattaaatacttttatcaaatgtttacaatctggatcccaaaatctagtaacaaaaattttgcatcataaagacaaaaagtgtcatctgacaaaaaatacaattgttttcctgtgattgtctcaaagatcgtaaccctttaggtttagacaaacatatatgaacaatcttcattcatgctccgaattcactgttgttcaactttagtctttcatttacctacacatagcaacatatatgtgagttaacgggctcagtaaaaaaaaaagcatgcatataataacttataaattttatttttaactaagcacccttacactcagttaccatcaataaaataaccgcatctagcgcgtgaactgagatctaaacattcgtacctatagcataattaaccataataccaacctgatttcagtactctagtcgtactaatgcccgtagcattaatccatactaatcaatattgcataacatactagatatcagtatcttggtgcaactctacgtacacacatactgatatctctaatatgatagctatatggaaacatcatacatgtataactaaacatgcgtcgatcaacttgagtggaaatttgttcggtgatcagaggccctaagtcacattagcagtaaactggtaagtgactagctaaaataatttctaatactaaaatacataatctaggttttccctattaatcaatagggtggaaataccctaacatatgaaaatcggggtatccccaggcctaagcaatcagtccaccggtttacaaagctaacctgctacaaaacctacaactagaaaaattttgagttctcttcttctacaacctattcaaaaactaatctaaattgcccaaacttcatagaacagatatttttacctaaaaactaactctggtgacgtggacatcaatatttgacaagtgataagaaagaaaacatcccaaagttgagtagtctcaagtcatgatagtcgacctgggaggggtccctagccttgtgcctaggttgacttcgagaactcccaaatgggtgtttggattccgctaaattgtttccatttaactatctatcaatattttgtaccatgaagacatgaaaaatccaaatccaaggcctgcaagctaaaaatatatgaaacaaaaacccaaaagtcaacccaagtgcctagcgcccaggctgacaacccaactaaggttttggtttctgggcccgtattagtgcaaatgaagtaaaatttttattggaatatgaattagacctttcacaaacatatttgatataacaaaattagaatcagagcactttcagttttgaccactcgaagcaccaggtgctccaggtacccaacgcccaggttgacatgttgtcaacatgcggaaattcaaaccgcaatactaaagaaatatcctgagcattttcttcgtcttcatccaaaacgaggaaacacgtgcttttttgtgggagaaatggattgatctagaggccaaaatggggacccattgctcaggttactttgtcaacctaggccacattcatcagcctttcaaatgaaatcttttggtcatattctccctttttcatcaacaataaagatttgagtgctttccgaaagcaaatagagttgtttggggtcagaattgggacccaatgtccaggttgacctggtactgagcccagcgtctaggttgacactttgtcaacttgggccatttccaagaagtttttctaagaagtcttccagatttattctccatttttttaaagattaagatacaagtgttttgggggatcaaatggagtcatcaggtggccaaaaacttgattcaacacccaagttgacattttatcaacctgggctatttctagtcattcttctgaaaaagtgtttaggaaattctttctgttatcagaaaagacaaagatacaagtgatctcagggagaaaatgagatttctagtgagcgtgaataggcccctagtgcctaggttgacatggtactgggccttgcgctcagtttaacatgcaacctagttcacatgttttgctccttaaataaaaattctactatgggaattcttctcaaaattgtcaaaagcggggtaggagacctggttttcaatctcaaatgccatagaagtatcaaaacgagccccgggaagcacccaacacccaagttgacacctgatcttgtgcattggattctacttatcaaaatttgatttcacattgaaaatttaaatatttttttttttttgtagtacatgagagcttaaacttgtgacaggtcaaattcacactttaatatttcaccctttcaacaagatggaatatcgacaaatcagggagttttgagtcttccctatttcccaaaaaagtgacatctctgagaattggtgaacagcttcactagaacattgaatctaactaagtggtgtcaacacatcacttggtcataaaaggaatacaagtctaatacattttggaactcacccgacgtctaggttaatgtcagaatgtcaacctgggcgttacgtgtcaacctaggcgttgggtgtcaacctggtcgtagggtgttgaacaactttcagtaaaacaatcataacttacttaatattgatctaattgacataattaaacttgcgtgtcaaagctacttcaaagatccatcaagtcattgttggatatattttacc

SEQ ID NO: 301896 - DNA, 4188 bp, Cannabis indica
aaaattcggttacagcctgatcggtttcggtttttcagtttttactttcaccccaattattaagattttctgaaaaaagaaatgtatgttcctctaaaatgggagcaaaacacttacgctgcccaaaatttgctgggtttgtagtcgaccaggttcgcccagattagttcgccatgttatctgaagcttaccaagaacattacttccctcaactttaatctgtgcagaatcagtagatgactgttttaactgataaagatagttatagattcctcctccagatttgacaagaactggtgtcttaattatttcgctgaaaaaaatcattaaattcgtcaaccaaagggaagaaagtatattgaatcataaataatacccgaattcaaaatacactgactgaccttgcttgagaattactctcaatggggtgctcgtctgccattagtattttggcagtccaattcggagctggttcaaactcaacttgatccatgaaaaggtttgattttgtatggttttcaatacaagcttccaaaaatgtagcttcctacgagattaattcgattatcacttgtataagaaataatttgacacagaaaaaaacatttcttacagcaatgaagtaaaaagaaaatacaaatataggcaaaatgtatcaaatatatgctaaaaactcgattcctcatctaggacaaaacaactatagcaatttctatataggtaccgactttgaactcgaatttcagaccacatgtccaaccatttgagctacctcttaggtgcttcttgggtggttttaactcactatactaagaagactagtggctagcgcaacttcttgctaaactattacaatatttggagaccaatatactataacaattgcaatgtaggtatccaagagggggtcaatctcggagaccttatgagcctaaccattttagctaccccaaaaaagttctgattcctcatctagaacaaaaaaagctatagcaatttctatattggtacccactttggactcgaacttcaaaccacatgtccaaccaaccatttgagcgagctacctctagagcaactccccgcctaaacaattccaaagtaggtatcgaaagagggtctcgaaactcggagaccatatgagcctgaccatttcagctactacacctatagagtgctcctataattgttaaaattgctcataaaagaattgataaaacttacaaccagaagaacaattgatcaactttgtcataccttaacaacacggacctgcagaaaacagaaattaaacaacataacatcaaattcactaactacattcattcacagacaaaaaaaaggagagtaatatcaacaaaaaaggaaattagatttgaacaaataccttagtcctaactgacaaaggattagcaacgatgaatttgaagaactggggaagatatttacgctcaccatcaccatcattgtacaatgcagtgcaaaccaacctaaattcacatcaagaatatatcatatcatagcatcactcaattcaactaaagactaactttattcacctcaaactcatgcacattaacaaacaaatatatatgacaaaattatagtagggacaccacttttttaaaaaaaaattcatcctttttgaaaaattctgaataatttatgatatcgaaaacatagttcaatgatccagtcacacacgtgcttgtttctttttgcaacaagatagttcacatccagttgcacacatgcttgtttcttttttgcatttgtgcatttgaatgtttcaaccttgtgtttttgacactataaactattctaaatttttagaaaacaggtcgagtgtataccaaaacaacaatgtacatatcactcatataagaaaatcttagttataatttctctaaacagtaaaattttcctatatatatcattgcacaatgcagtgcaaacaaacctaaaattcacagatcatatcatagcatcagctcaattcaaccaaagactctaactttataatataaatacatacatacatacagatatatatatatatatatatatgtgacggtctaatatcatagcataaactcaattcaactaaagactttaactttataatatatatatatatgtgacggtctaagcatcccatcccttttcagaaattctgaataatttactatataaaaaacatagttaaaagatccagttgcatacatgcttgtttctttttgcacgtgtgcatttgaatgtttccttcttgtgtttttgacactataaattattctaaattttcaaaaccaggttgagtacatactcatataagaaaaatctcagttatagtttctctaagcaatagaattttcccatatataaatatatatatatatatatatatatatctcattgcacaatgcagtgcaaaccaacctaaattcacatgaagatcatattatcatagcatcaactcaattcagctaaatactctaactttattatatacatacatacacagatatatatatatatatgtatatatatacgtacgtgtgaggtccaagttccttgacatcatgttcaacaatgaaatcatatcttcctccagctcgaatagactcaaccggagatttcgaagtatccaaaagcagaatcctctgtctctcagtttgaatttccgcctattacatcaaaaccaaaattaatcattacaaacgaacaaaaaccaaaaaaaaaaaaaaatcgaaatcatttcaaaactgagatcaaaatcaaaaccttaataatcacatccctaacttcaaaactagagctgttattgatactaatatagctacagaatgtttcgcccaaataaatagctccaaaagcttgaggaagaacgaggagtccagagagaccgattgagtcggagagatcagggaggaggaatctagaacggtaggtgagatcggaatcgacggtggaggaggatagagaagggagaagacgagggagttggaaggcggcgattggatcgtcgaatatgtcttcgcctacgaggagatcggttgggtcgagacggagtgggactggatcggaatggaatgaaggtctgcatagtctcattactctgaaagctaaggaatgggatcctccggtggctccggctccgcttccgcctccgccgccgccgctttggccggtggagctcattttcgaatctgaagagatttttcactgatttttttttggaagtttggttgtttgagtcgttatttagtttagattcacaaagcctagtttgttaagagtaatattgtataatactctggtagatagataaagtaatgtattatattaattattacgatcatattttttaatataatttaagttgtattatttaatacataatataatggtttgttataatatttataaaaaaattggagttaacttcaatctccgactaagactcggatctcggactcgggacacggatagattgaggacccggatctggacccgagacccagactcgtgactcaacccgtaatcggtgttggggtcgagtgtattgaaaatatattatatttttacataatctattaatacaggtcaataataaacatagtattgtattaaataaaactaatgcaatacaatgtaatctaacaaaatacaatataatgcggcgtactaaacgagcctaaaatagtatattttttatggctaattagagtttttgtccctgaattttgacatgtaccaaatcatgccccttcaactttttaaatcgttaaaaatttcccatgaactattgagattgttaaattaagggtttttatctaatttcatttaattttgctaatatttcgattgtccatatactaaattgtgtctccgaactttaataattacaaaatcatgtcccttgaactttaacatgcactgaattgtgccccctaaattttcattcacatcagactttctttagtaaaattaggcaaaagtccttaaatctaacaatctcaatagttcgagagaaatttgtaacgactaaaaaagttcagaggacatgatttggtacgtgtcaaagtttagggggaaaaatctaaattagctttttttaattaattaaaataagagtaatttgcggcaaaaatacctaagttttatctcgagtagcagataaatacctaa

SEQ ID NO: 301897 - DNA, 1395 bp, Cannabis indica
cagtacttaatactagacggagtaatgtacaagcatggattttccttgccacttttaagatgtgttacaataaggaagctactcgacttctcactgaagtccacagagggttctgtggatcacactaggggacaaagtttatccaaaaagatactccaacaagaatacttctaaccgaccatgattgaggacttaaaagcccataaagagatgtgaaaagtgccaaagaattgaaaagaaccctagatctctacccaatgaactgatccaaatgcaaagtccctggccgtttgcaatataaggaattctcgtgattggacaattgccaaaagaaaaaggtgaggtccaatacgctgtagtggcaatttactacttcaccatgtgaacagaggttaaaccacaggcaacaataactttacaaaaaagtgcttgacttcattgtgaagaacattatatgttggtgcagacatccttagaaattttttttcaaacaatggcaagtaatttgatagccaaatgttcacaaatttctgcatgaaacatggaatttttaagatcttttcaacaatggcccacccaaacaaacggataggtcgaactagtgaacaagatccttaaagacaccctaaaaaatgtcttaaggaggttaagggaaacttatccaaagagctacctgaagtactctagtcgtacagaacaactgaacagacaaatactagataggcaccatttgcaatggtctatggctatgaggaaatgctactaattgaagtggaaccccagtcctatagaagactaatcagaaactccaagaagaatccttagatgagctcatggagaaaagagatcaatccaatttaaagcttcagtcctaccagcagaaagtggctagatacttcaataaacaagtaaagaaaaggaagttttttgtgggagacatggtaattagaatagttttcttgaatacaaaagacagtgcaacgggcgtgctcagaccaaattgggaagtgccataccaagtcactaaaatcacaatgttaggagcctacaagttgggttggtacaatgagaaaattgaacttattttagtgcctcagtattggaatagagaacatctaaagaagtactaccaatgaatgcaaaggttcgatgacaacttaattgtattttttgtttaaaaacactattcttagatggtggtttctggactggcaacctgctcagaagttcttaaaacatttagtgctaaggtaccctaaccacattaaggcaccttttatgtaacaaaacaccattcttgaagggaaatttgaatttttataattacatataccgaatattttttccctaaactaatacttttctacattgaaaatatatgaccacttttccaaa

SEQ ID NO: 301898 - DNA, 5119 bp, Cannabis indica
ggcataaaacccaacaagtgtaacacgtaagtctatgatacatatacatttattatagtgacattattatatagaataatgtaatttaaagtgcggtggctcagtatatatacgtattggcatactgtttgaagtgtaattattattataattatcatattgtattattttcagtcttgctgggccttggctcatgggtgctctattgtgcaagtaagggtaaagcaatgtcgggtcagccatgagatcgaggactttaaggatgatttgtacatattttggccaagctagaccacgagggtttgatctgacagggaattgtataaagattccattttgcctcttaggttggcttatacaaaataacttgtaatattttaaaaataattttgcgggatcccagttttgtaactttaaattattttggtttaaagtagaatgtgtatattattgcaagttatttatttaattaattttattatttatttaaaatcacttggcttatagaccccaattaatgggattagtagattgtaatcattacatgtggcatccatctgagtaggatattacaattgtccacctagatcaaatatgtacctactagcaattctcattgcacgagccaaatcaggtttagtacacaccatggcatacattagacttcccacacaactagcataaggtacattatccatacttgttctttcttcttctatgataggtgattctttctttggcaatttgaagttagatgtcagtggtgtagaaactagttttgcattgttcatcttgaacttgtctaggactttgcagaggtagtgcttctaggacaattttattttccctagtctctcccttactatctaaatccctagtattttcttggtttggccaagatctttcatcttatattcatcctttaactgagtctttaatccatctatgtcaaatctatctttgccaacaagtaggatatcatctacatatagaagtagatacagttttccatttgagtacacacatgggccgtagttgcttttggtgtatctaatcctaggcatgaactcatcaaatctcatgttctactatctaagagcttgttttagtccatgtagagatttctttaggagacatacctagtttggattgttactttcaaaccctctgggtgcttcatgtatatttcttcatacaatgtgccacgtaagaaagtcgttcttacattcatttgatcaatttttagatcttcttgatcatcttttgacattatagctcgaattgatacttgtatgacaattcgtgagaagatgtcattgtagtatattccctcttgtgttaatccttttgcaaccaacctttccttgtatcttattggttcaattcttagaattccctctttatgtctgaaatccgtttgcatcctacaaatctttgactaccagacatctttactactatccaggtcttgttctttctcaaagaatacatctcttcatctatgacattgagctatttccttccatctttgctattaagaacttctcggtatgttgcaggttctgaattgtcaatttctgtagctgtagccaaggcaaatgaagtgaagtgtactatgtctacataaccaaatctctcaggtaggtgtatctctcttctttctctctctctctctcttgccaattggtatgttctgagtcccccttgagatgcatcttctctttgttttgatctttgagctagggtgctagcttctgtttcaccatgtgtgttcttctccatctcaaactgtatactatcttgtttacttgtttgaactggtcctgaacctgagctgattttcataggcatttcattttcattaaagatcacatcccttctgattatgcaccttttgtgtcctggttcaaagcaccatagtttgtaacccttcactccaacaaggtaaccaaggaagatacattttagagcccttggctgtaatttgtcttgtctgatatgtgcataagcattgtaaccaaaaatccttagatggtcacagttaggtggcttccttgtccatttttgttgtgatgttagaaatccaatggctgtagatgggcatatattaaccaaatcacaagttgttgaaacatcttctcccctaaaatatatttctaaacctactccattccacatgcatcttactctttccaaaagacaactattcattctttttgcaagcgcatttcgttgggcatttttcacaactattttatgccttgtaataccttccttgatttaatttcaaaactcttttaatcaatactcaagatcattatctatcctcgatttcttgaccttctttctgatctgattctctatcacctttctccaatttacgaaagtgttgagtgcctatcattgcttttgagtaaaaaaatcaacacctttcttgagtagtcatctactatgctcatgaaataactagctcctctaagtgtcttgattctcgagggaccccacatataaaaatgaatgtaagccagaggttcactagaggtatgtatgcctgtgttgaactttatcttccagcttttaccaaacacaaactgttcacagattccacgttgaccactaagttttcctttcaaaatttcttgcttttctagttatttcattcctctttcactaacatgaccaaatctttgatgccatagcttagtctgtttgaggtcttgatgttgtttaaacctgatgttgcaacattggttactgatgaggcactactagtaactgtgtcttaccaagcaagtaatatataccatttttgtattcacctttcatgacaattaggaatcctttcataacttttagacaactatcatcaatcttaatagtacaaccattagtagttagtataccgattgaaatcaaattccttttagcaagaatgtacttaacatttgtgagtgctctctaaatgttgtcatgcattttgatgatcacagatcatatttcttgaactatgcaggccctgttgtcaccaagtaagacaatttcacctatcttttcttctagttgactgaataggttcttgtcatgacacacatagaatgtgcaccctaagtctaaaattttttcttgactagtgtcaacattggatgcaatcatgacatctgttgattcatagtcatcagagataatgctggcttcacctctctctcctttgtccttcttgtccttttattgtctctattcttcttgtttcttaagaaataacatttatccttgttatgactatctcttttacagtagttgcaggatttactcgttttggattttgattttgatctatttccaccatgacctcgattcccattgtttttctggtttccatgatgtccatggttgttattgtcagagttcttgtggtttcttgaatcctttttatcagatcttcctcctctacagaacaacacatcaccatttgaatcacctttgtcttcaaacttcttttgagtctctttcgaattcacctcaaccttgacttcaaaaattatttacctagaaattgaccctggtgacgtaaaaaccaatgtttgacacatgtcaagaaagaaaatatcctagagttgagtattcccgagtcatagtagtcgacctaaaaggggtccctagccttgcacccaagttgactctaagaactttggaatgggtgttttgatccgccaagttgtttctaacttataatctttcagtattttgaaccaagaagacaagaataatccaagtctaaggcttggaaattgaaaagagatgaaactacatcccgaaagttaacttggcgcctagggttttcacccagctcctaggttgacattcccaactatggtttgagctttcaggtttgtcttagtgaaaatggctcaaaatttgtacttagacatgaataagacctgtcacgaacatgttaaagtcattggatcggaattggaacacctgtgcacccggtgcctgggcaacctagtgatgcacccatcgcccacgttgacatattgtcaacttggggcgcttccaaccgcaatattgaagaaatatcctgatcattttattcatctccatccaaaataaggaatcaaatgctttcaagaaagaaacaaatcaacctggaagctaaacctaggacctagtgcccattttaacatattgttaatcggggccatttccaacaccagtttagaagaattattttaggcatattctctgtttttgtcaaaaattaagatatgggtgctttcaagaaataaaaggagccatttgggagccagaactgggacctagtgcccagattgacttggtgctgggcctagcgccgaggttgacatattgtcaacttgagtcatttccaatatgtttttatgagaagtcttccaggcatattctctgttttcaccaataactaagatacaagtgtttttgggaatcacacaaaagaatttgatgggtaaaactgggacccaacatccaggttgaccttgtgcctgggcctagcacccaggttgacattttgtcaacttgagtcatttccaactgttttctcaaaaagtgtttttggtatcttttctattttaaaaaataaggaagatacaaattattccgaggagcaaacaagattctttgggagccaaaacaaggcctcagtacccaagttgacatgggcactgggccctacgcccaggttgacatgcaatgtggtttggaagtttttgctcctcaaacacaattttttctccaagaattcttcttattttgatcaaaaatggctaggagacctctttcacaatctcgaatgccacagaagtatcaaaaggagccttggaaagtccctcgaggagcacctaacacccaggttgacatgtggcttggtgcactcggttttgcttatctgattttgtttttgtctcaagtatttgactattttttcgtagtaaatgagagctacaacttgtgacaagtcaaattcatactttgatatttcaccttttcaataaggtgaaattgttggaatttattttaccaggatcttagatctactcacaagtatgtttattaaataagaactttctaaaacgatgaa

SEQ ID NO: 301899 - DNA, 3316 bp, Cannabis indica
cggttagaaaattagatttttttcaaagacccacgagagaaaaatttagtaaccattaaataccaataggaataatacccctttagcgtcagttttcctcgttagcgatggtttagaactgatgctaatgagctaacttttttttaaaagaaaattaaatgtacatcccaatattacacaaaacaaccctataatatatatttaggatttcattttacattcagttgtaatttttctctttctctctctcaatctcttgtgtagccacgaagcatttgctgatctaagtcgtcgccatcaagttaggtaaccaccactttgtttgtatatatctctctcacctcagatctctctcgctctcctttctcattctttccatctcatttctagaccaacaaccccctcgatctcacacttctctttctcgcctgtaaattttaatttcttgcaagttgtttagcgtgtgacaatctcgggtggcggatctctaattgtcgataaagctacaatttattatatatatttataagcattgtacatatatattgtatatatattaagattttaataatgatatttgagatattagatttgtgattattgtttttgttgttgtataatggtagagttgagatatatatctcagaatttatttattttttctaatgtgtcggtttaaagctgaaataatagttgctcactatacttgacgattaaaaagccacaacaaaggaattatcaacggttcaaaactgccagttattgtgtcaattattgctgacggttttaaacagttgagacataggcatatctgactattttaccgtaatggctattcaacccaattttacgttgatcgaataggtatcggtcatagagtttgacggcaataccattaccctactattttaaatagtcgagaaatctccttttcttagtaattgatagtatataaattgccttcataactctagccactagagaactaggagcataatacaatctcgttgcttgcttagcaaaaagatcttgtttaaagagagtcccagaaacctataccaacatcagacttgtgccaacaaaatttcttccaagtacaccaaatgaagttttttctttttctcattgccacgccactaaaattgtgcacacaagctatgaatctctttaatgaaagaagcaagaggtttaaaaaagattcataaaatacgtggggatagactcgattaaagatttaataagaatttccctgccacttaatgagaagtatcgagacttttaatcataaattctattctttatcctaccaagaagagactgaaaaaggctcttcttactctatctcgcagtataaggaagaccaacatatttcttaagataagcaaccaaagtgacatctaaaatggtagacttaaaaaaattcacagattgcccaaaatttttcccataccaactcgaaattcttttaaatcttgaacaagaaaactcagtagccttaaaggaaaagaggttatcatcaacaaagaacaagtatgaaatagagggcccagttctaccataggagagactgtgcaataaaccattcaagcaatcacaacgaacaagaataataaccttctacacaaataaggaaaataaaaggaaagagaagatcaccttgacgaagacccttagtaggatttaacaaatgaagaattttcccatttatattaaataagtagtcaaccggggatatccattcttgaatcaaattaacctaattctcatgaaaaccaagcttgcgcataaggcaacgaagaaaggactacaccacctaatcatatgtgttaacttagattttgttaacaataatgaagccttataaataaattattgatacttataattaataaaatatatgtagaacacaaagagttcttacctaattttgtagttaaatctacatactccacgagtcattcttatttttgaatatttcttgggaaagtactttgattacagaggaataaatatgaatctttactcaatatattcctacaatcaatcgagagggacagaatatgattggctctatcccgtatttggagggtggggatggagcatttataggttggcactctctaaaagcagtgatgacgaacctactggatgtcctaagcaataaaatagttcttagcatctcctcccacctttaaaaagggcgtgctattggtatcacccaaacactgatagccaatctggctaaagtagaagtatcctgactggttctattttgggatagacttcaagtcaaagaaataccctatctcataagggaaggttgagtccagcctaactcagcatagaggataaacatcgtcgaaaggtactttataccttttggggtgatttgggttgggcaaactctaaattatgtggcaatgtctctgaagtaggggtgtaagagcaatgctacgctctaaccacgccatctagttaagggccaactgatgcgctcgttggtccctcgatagctgctcacactggacacctcctaccagtccactctccctaatcttgtcaagtgtctcgacgctgataatggatagaggagagacccattgatctcgctgctccccctgatccagaacctgaggcacgatagcctcccccataacatggtctacatcgaccactgcaggctgaccaagcctattcaagggtcgcccaacctcatcttatgagcctagagggttgttgaggataatagaacatgtcctgtactgtctcctcctaacaagtacaaccttcttaatctcaaactcactattcgagctcttcacatcttggtcaactataggtgcctctacctagccaacctctagctctctaccatctagaggctatgcaacttcctcaactacacagactctaaccctagtcaccagcctagtaatgtgagggttaaaatgtggtgccttatagcaagtttgtttgacccttgccttaatggaccactataagactcaagatcacttgagaagctgctagaggaacggactggatactagtccatgaagggaagaccaattgaatctctgtcgacgcgattgttacctcccccaattgtcactcgagatcacatgcacagagagataaggggaggtgagaaactagacaacgcaacaaaatgcagataaagttctggccaattgaacccaacggtactttccagacaatctaattgtacaaggttgagtatcagcgaagtgccatcccaagtgtaacaacttggacaaatgttgagtcttaagttgagcattcaactataatagac

SEQ ID NO: 301900 - DNA, 1959 bp, Cannabis indica
tcgacccgtgtgcagccctacttgcagacagatgagattagctggattagttatctagacttttaatatgcccaaacactgaattgtacaaattagtttgtctaatccaatccaattctgcgtaccaaagaggcagttaatccttcgtggatatgaccccatcgaccgtgttaattgtactacccaaagattgtcgttttcgtagttatttattacagctgacccctgcttttgcagtatatatatttatatagctatacattagttaactacttgagagaactaaatttagtttgatgaattaatagacaatatcaataattaattaagaataccgatggagaagagtagtaactatggatgcaaagtctgcgttacaggaggttcaggcaatatcgcctcttggctcatcaacaagcttttatccaagggatatactgttcatgctactctccgcaacttaggtatataattacaaatgtttctcacctaattaaataattagcttattatatgtatatttattaatagattaatttaatttaattacaatagatgatgagaaaaaggtgaagtttctgaaaagctttccagaggctcagacaaggttgattctgttcaaggctgatatttacactcctgatgattttgagatcccaatccaaggctgccactatgtttttcacattgccactcctttgctccaaaccaatgttgtttttcagaacaagaattccagtgaagctactataagtgcggctaagagcgtcgcaatgttttgtgagagatcaggaacagttaaacgcctcatttacacggcgtctgtcgtggctgcatcgccgttaaaagataacggctctggttttaacgatttaatggacgaaacttgctggactcctctcaatctttcaattccttacagtaacgatgattttagtgtgagtccttttatttttactctttacattaggcacactttagataataataattgagcttataaaataatttgactttttttttttttttaaatatattagtaaaagaaaatgactgttactttattatttaccaaagggtagctaaatataagacttaattttgtactaggcctacctatattctaagacaatatcagagaaagaactattgagcatggggaacaaagatggtggattagaggttgtaacacttgcttgtggccttgttggaggggatacacttttaccaatggtaccctttagtgtggcaatgttttattctcacctcaaaaacaatccaatactttataattctctaaggtatttggaggaattgcttggaaaagtaccaataatacacatagaagatgtttgtgaagcccttatcttctccatggaaaacccttctgtccgtggtagatatttatgtgcaagtgcctatgtttcctctgcagaaatagcttcttattatcagcaaaatcaccctcaatttcatgtcaacaaagagtgagtaatcaattaattaatacccttttctgtatttatatagatttacacattataagatcgtcataattgataaaattataaattgcaatttttaggtacttggaggggccaaagaggaatgtagagtttgatttttcaaagcttattgggaagggctttatttacaaatacactgcaaatatgatattggaggattgcatcactactgggaggaaaatgggtgatattaaagagccattataaaatttaataatatatgtatcgttatttgttagatggagtataagattctattgctgttatatataaaggacttcgattgtaatttgacatttaattatgtgtctttattgatgatatcgatgtaggatcttcattttcctactttatgacctttcatgaatattaatatgcagacaattacattcagggtagtgtaacgtccccccttcaagcctccattgggtcc

SEQ ID NO: 301901 - DNA, 1513 bp, Cannabis indica
tgcctagggccggccctgtatatgtatattacgtactagctaggtgtatatatgtattgtagagatattatataacgtagtacgtatagctagttattattcaaaacttcgtgcacagatctaatattataacgatagaagattaattttgtgtagttttgataagttaattaattggttgatcttatatttgaaatcgaattcagtcaaaaaaatttaacacttaagctagcatcatcaatttgaaaaataggtaaatcacttaattagtatcaatctatacaaaaaaacacatttttttaatttataaaattttaacttgaaaacaatttcggataatcatgaattataataatgtgagtttccatctctttaataaggggcacattattaattatagtaatcaaaatataaaaaaaatatatatatattttttaggaaaaagaaattataaaaagttattatttacaccatgttgtctttcttttttaatagtgcaaattagatactatctacaattgaaaaacttaataggttcatattatcccatacatatatatatatatatgtacatatactaatactatatatatgctagaaatatttaatttttcatacaatatactaatatatatcctacttctagcaaaaaaaaaaatatcctactataaatgatcatcggtggcaaaagcaattatttttagggttttttttttcctgcaaaaagaaaaaattattattaagtttttgcttaagaaaagaaaatgaatttatacaaattaggtgcaactaaatcaaaatataggccatcattaataaaaaagaagaaaagatcaatatatgtaggcctcatatataaactatataattacaatatctgtgctatccagcatacgtaatcaatttatacattagttacacaaatacatacttttactttctaaaaataattattaaatatatcaataactaattttttattttttaaataaattattaaattaatatatattcatgtacttaattaaaacatttttttccctttaaaccccatctagaagagatgatatatttatatctctccctccctctgatttgtacatgtgtgttttttggttggagagatagggaaacgacaagcatgacaatcaactctgaaaaactttgtttttttgtctattactctattaattaatacgagaatatattggtagtttataataatgctaaaaaatattaatggtgtttaataattttttactgttaatattgctattgatataattaagcatcaatctcatatatatagtttaatgttataatttttaaaaaatatcactagtcaatcacaaggtgacaagtttaaaaggtgttaggtactactaatacctaataaccatacttttttcaaaatacaaggttattatacacatattttatatatatgagcactagagccggctctgacttttagtgggtcatagaaaaaaaaattattttggacccttatata

SEQ ID NO: 301902 - DNA, 1140 bp, Cannabis indica
gttcggtaggtcggtttgaatggatttttcagttttttggattttatgctcactcctaaaatcaagggaagagtcaacttcccagtcaccagaacgagcacgcttgagttaagaccttgcagaaccaaccacaacttattggggttgaaaggaaggccgcttaactctaaaagcagatgccagacccttaccacgtacattagaattaggttggccagtaggagggttagttcccatagcagatgaatcaccagcatgggtaataccaccagcacaagccataaggagagcagaggtagaagaaaaagtttccatggggcaatcagcacgatcagcaacaaccaaagagtcagtggagtaggaggtaaaagcagatggacgcaaagaattatcaaagttggatctagtaaatggaagggtcatagttgaaatgttgtggttgaaagggctaggaaccatcacagcaatggtggaatgaggtgaaatgaattgagtgaagaagctagcactgagattcagaaaagaagggaaagtaatagaatgacttaaaatatttccaggaggtagattaaggttaacagggttcatattaactattgacctcgcttttagccaacgatagtgagtctaatttagtaagcgacaagtagtttataacgattgaaataaaataaagcaatataaagacacatgaattttatagaggttcagccccgagcagttcggtaatagcctaatcctcgttatttgtattaactcaaaaacaaggagaaagattccttttcttatggctcttacaacaatatctctgaatataattcttagacaatatctctcaagtaaaatccttcgaccctttgcccagtgaatatgcatcactatttacagggctatgagcttggagaggaagtatttcccttctcgttaaaatggatataagcaaaaagattgcatagtaaatacagaattcaccgatcatgagatttggatagcttgccatatctctgcaattcgatccccaagttatagggatttccttgatgactcacgatgtgaaagcctaattcgctaagtgttggtcagtaggtacggattgctgactgcttggcttcgatcatgaatatgaggtatcctgttcgg

SEQ ID NO: 301903 - DNA, 1923 bp, Cannabis indica
tggcttattttagtgttaaaactaaattgtgttataacccagataatgaaaatctcaaatttgttgttatattgtaataatagaaatgaattatatttgcagttatcaaactgtttgtgtaaatgtttatctgtgtgaataggttgttaatatataaagtttacatttttttttgtgtgggaatatttgttctgattctgagtgaatatttcttaatttaaaattgatagatttgacatcgaaggacacgttactgggtttggtcatccagactgggctagaacacatgaagcagcttctggaacatgctctgtggtttccactcttgttgaaggaggagccacatgcattggtaaaactgttgtagatgaattagcctacgggtatgtattttattcttaatatgctgaagaatttgaaccatttttttcccttttaatgcaaatgccttgctgtttcggtttcgtttccagcattggttgagaaaatgaatgtgatttttggttcaaagagatcatgtgtgttctagtttgtctttctatacattttatatatttgttctgattcttatattctagccaaaagctaaacaatggttcctttgttttggggcagtataagtggggagaataagcattatggtgcccccacaaatcccgctgtgcctgaaagagtaccgggtggagcttctagtggagcttctgttgctgtagctgccaagcttgttgatttcgctttgggtgagtcttgtttttccctcctcttcttgtcttcttcttttacatgctctttcggtagctaatttagttatcccacttgtctgcctcagcttgttaaattttgttaagttcgaatttgtgtgtatatatgtttggaacaatattcctgtttaattgtattatggtgagcgtcttcgaataaaaaattgtatttcttactaatacggtggttttcaggtattgacactgttggggatgtcagagtacctgctggattttgcggtgttttaggattccgaccctcccatggagctgtttctcagatgggaatcgtacctgtctcatcaagtcttgatactgttggtatgtattgtacacaattaatttgtaagctggatgtgttgcttgtcctagtttctgctctctgatgcactattgagatcacttagatggcaaataatagattttgtgtgtgtggtctttgtttatgttaatgaaaaatgtttactcttattattaatttgttctgtttcgagtatgaaattaccactatcccatcaattcatctctttctgtactaatgtatttaattattattattattattatttggttctttgggggtagaaattatgttagctttccatatgaatatacggactgcttttgtttgcgctccacaatctggtagtggtacaacaattcttgcgagagctgctctatgtttcgtcggttttcattttatgttttgatatattatctcattaataacaatagtcttaatctataacccatcaattatgtttaccttgtaaaatctcctctgcaggatggtttgccaaggatcatactgttctccgacgtgttgggcatgtgttgttgcaacttccttatgctcctcaacgcaatcctagacaggtaataatagccgatgattgctttcaactaggaagattcccgctgaaaggattgttcaagttgttgtcaaatccacagagaagtttttggaagtaagttcttgtactttgttgtataagcatcattaggatattgatttcttttctcagcacttccatctttattgttactattactgatattatttatttttattcactttcaaaaatttataatttctatttatgttcgcttaggcctaaagtactgttttctttttccttttcggtactttccatggatattt

SEQ ID NO: 301904 - DNA, 4152 bp, Cannabis indica
tttttaataattataataaaattatttcttttttaattttttttaatttactattgagtttctaccttaatttctatttgagttgttatataaattttagttgtaatttaaattattgtttgttactttgtggatttccttaataaaaaaaaaactgatttgaagcttaattttctttattttgggtcatagttttagtacttagtactgaatcattattcattgctgtaggcagccattgaaacactaattaagagagctttctaaaatgtgggcaaagctcaatcaatccatatcaggtgacgaatacgatcgaggagcaggaggagacgccttcttcgacgatgaacaatctgatggcttgtgttctctctctcccactcaggtttgtttgtatgcttttaacttctctccaaaacccaaaaattcaaactcacacattttccttttcattcaattcaattctgagcatttagaacgcttttgcttttctgggttttgatcttatcagagaatgtacggattcgcggcctgtttgatcgctggattggcccttatgttcctggtatgatgcccatctactcagtcaactttctttttctttattccagaaattgggcaagtgtgtttagtaatcaatttccatcttaacaatctgaaaattgtagcttcttatgtaaattgaaatctttgactttatgtttgtaattgtatgaatttaaaaaaatttacttgcttttgatgtagtttgcagaatttccttttttcaaatgatttatgtcagttgattcagttaaccatatgaataaccctttaagttgtaacaaagtgtactgttggtataaatttctatatgagaaattcttgtatggcgttaagctgtgatgaatcaagagaaaaaaaaaagaactactttacatcaaattttcggatttgaattagagtggtaagatatagggtgctattcaaggaagaaaacagactttagaaaagtggttcaagtagctcagttggtttgagcaaaaccaggcttcaaagtttagcataaaagtaggaacaagggttataaaacttaatttcgtataattttattgttaatcctttggaatgtaatgctatgattgattggtggtgttgctacatttccttaataagttactttttgttttctgcagtcgctgatcgtctttgcaaaaccaatcaagtttgcattgttattcactattggcaatgtggctgctgttggaaggtaggtctgcatattttctctagttcttgagtgcttagttggtcctgtatttgcagtcagtgagagagagttagaattgtgtgtgaagtattttaggtttcgatatttcagttcgaatataaggctatgtttatttcaccccatttggtcaatatattagttctaatttttagtccttgttggaaaactacatgcttacctgctctaactaatgaaatatacaggaatacatttccataggatcaaatataatattttagttttcactcgagacaacactgccacaaacattaacattcttccttcctttgttgttccctggactggcagcacagccttccttcttggccctgtgcaacaattgggaatgatgtttgattctgtccgagttttcgcaacagctatttatcttgggtgtgttgttttggcactcatttgtgctctcctggtgagtaagcaatctatattctttaacaaaatggataaagtcaagtacattacataacttttcacatctctttttcatcttacagatacatagcaagattttaacaatacttgctatcataattgagatcttagcccttttttggtgagtttctcccctcacattaaaagcatatctcttcttcactactataatggagatgagaaagagtgaccaccttcttgtctattaaggaaactttctataacttgtgatcaataatgtacaccatcaaatcaaaactgattacaaagctttgtaatttgtcatctgtttcaggtatagcataagctatattccttttgctcggagaatggtgtctgaactgatggtccgtttatgcgacaccgagctttagatgataacacgcttcaaagatgtgtctttcactgactgctgaaagtccagagattttttcaaaccggtttacacttttctttttcccacacaattatgattatttgatacatatttgtgtgtaatgggacttgtatataagtcttcatgtagtggtatctgctttttctgtgattggtaaaggaattcaagtaacattttgttcccagaatatgcaaacttttctctgtttctcttgtagaattcatttggggactttaatttttcaatttacttttgtctatatggttatcacattttggaatatcaaaccatctaacatgatttatcaaatcataacttggttttatcaacgtcattatgagatatcaatatggtatattgatttttaaattaaagctaattaggatttttgtcttccgaattttgacatgtatcaaatgatgccctttcaacttttaaggtcgttaaaaatctctctgaactattgagattgtggacttttgttcaattttaataagaaaagtttaacatgaatgaaagtttaaagggcatgatttagtacatgttaaagttcgagagacatgatttagtagacatcaaagtctgggaagtatgatttagtacataaacaattactgaattagtaaaattgaataaaattggacaaaagtctttaaatataactatctcaatagttcaccgagaatttttaacgaacaaaaaagttcagtaagcatgatttggtatatgttaaaattttagggggaaaaatcttaattaaccttaaattaaattctgtaattctcttacaaaaatacattgttttggaataccatttggtcccttttgagagagtaggataatattggattgaactagataatcttttggttttcatatacttatgttacaaaattatagaacgtattaaacactaaaatgaatgaaaaaaaaaatctataataatgttttaagtcgaactcaaagtaaatcgtatcaaacaaaaactcaatttaggcccatagatatatatatatatgggccattgggcctgcatcaaaattatgcttagcccatggaacaaaatgggcctttgttgaaaactaactaaaccaattttttgagactatttaatgtatctgacaacttacaaacgtatgttactgtcaccaaatttttacactcagatgaccaattatttaaggtaaatcttagaaagaagtttggtgttggtagaatagaataggcaacagaattcagaaagaacagaatagaaagtacaaagcacataaaaagaggcaataacatacatagccacctctcacacaaaccaattgaaaagaatcaaaacaaaacacaaaacccaatacataacataactaccaacaaacactactcccaatcacaacaacaaccaactaccaaaccaaaccacctctgtatatacatacatacatatatgtctttctttataactacttcaaatcaaattattactatactttgtttgacaagttgatcatcactcaaataaaaaccaaacaccttttgtctccatatcaccatctaccaatcatttactctcaactcaaccccatttgaaattgagtgagtgagatgataccatgatgtgcattttctatggaccacgtcttcataactcattccactacttttttttttacagtgttttattttgattttgattaaaaaagatatcactatgcatgcatgtgaatcaagattctgatgtagtatagtaaaatttattaatcatgtgaaatgtattgcaatagaattttggtgtagatccatgtatagtcagtcagtctaaaaagggcgatcgaatcaattaaaaagtgtttaaaaaagatgcagttggttggtggagacaaatatgattattatacctgttaatttataaataaaataaaatgttagtgccacgaaaatccaaccccattaggtcattgaaacatcaacaatgattaatataatatatatatatatatactaggtgattgttacgtggccaagccacgtagtgttagtttta

SEQ ID NO: 301905 - DNA, 1381 bp, Cannabis indica
tactgatgttacaaatatctcaatttgtattttcaagttgttttttccattggtgaaaaaaatgtgcacgatgaagggtgatgtagatatatgtagaggtgttggacaagtaaccgtgaccatttttggctgcattgaatgtgaatgtgaatggctcccaccaattttcatattattgagtgtttgattaattgtattgtactactacttgtggatggattggacaaaaccacactgtgacccttattttgagtacacaaactaagccacaaacacatcagaaacaaaaaaatacaagatttataagatatgggagtttgatttgatcatccctacttcaaaattttgttaaaaacacacctcttgttgtttgtaagacaaagacagtgacactagaactaacacaatgatatgtttttcttcccaaatatcttctctctcacacacacactcactcacaaaaacacatatattatatgtatatatgtatataaatatatatatatatatatatatctgtacacgttatgcatgatgggtcaatcaaaagacttttcaagtcatgcttattgatgtgactgaaatgggcagcttcctcttcatcttgacagttggaaagtgaacgatttcatccttctctgctatccatctgtgtatggattatcatcacaatcacaaacatcagtttattattattattattggctaattctcatttcatacctttatctatcttaataggtaagtataggtaattctatattacttctggtaaaatggtagatcacttctttatatattaaactagagaatagatccgcgcttcgcgcggttttaataattttttaaaattttatattaaaaaaattaatttttagttacgaataaaatttcaagtctaatactattttatatttttttttatgaataatataaaattatataatatatttattttaaaaaaaaatatttgtgattagcacaaatcttaatcataatacaataaaaataaaagtacatttgggataaagttatttatcataaaagaaagctattattaatatatatatattttttttaaatgaatcaaatattataatggtataaatttttctgtaattaaaaaaaattatcattttttaattattcatttataataaaacttaattttttttttttcaatatatatttaaattaaatattttaataattttatttatttatataaaaatattaatttaagtattaataatttaaacgttataaatttttaacgtttttaattgaatgagaagtagatattttaaaatattatttattatttttttgttgtcaacaattcattaaattaatgaatcatgatttgttatcttttttatta

SEQ ID NO: 301906 - DNA, 2367 bp, Cannabis indica
aagaaagaggcattaatttaagagcaaatgtgatcttggctttgaattcatgagaacataattcagttccccatcaaagtccactcaaaagtctatttggttaccttaccatataaccaattcaagataggaataatggaaatgtgagtttgataaacaaaaacataaagtgtgagagataaacctggtgtaaaggaacagtctatttgtgtctgaatcatattgcagcttccttgggtccctagcaaatgttggatttttcgcaagagttttcacaaactgaaaattaacaatttgaactcgaactatcataaatgaaaagaattccacaaacccaaaatcagtatcacagtttgatattgtactttcaatattttcagaaatttaaacatttcagtaaagaaaaagtaattggcatgtttttgttacttatctatgagatgtcaaacattaacaacaaacccaaataagcaattcttttattcaattttcgggaatattttgcaaacccatgaatgcattttgcttgtaactctgtgaaaaatgttgataaggccaagccaagcatccaaaaccataaaaatcacttctttcatataaatttatagttaaccaaccatgaaaaacaaaggtaaaagcaatttcagaaataacaataacaaaaagcttaagaaaaatgaaagatacctcttgaaattttcgaaagagaaaagccatattgagactgtgagttaggctaggctttttggaaaaatgagtcactttcacctgctgttagttacattaccacaaacttgcaaatgagactcactatcatggaacagactaagagtgaatacagtttgtatgagtgataagatagtcaataatgaaattataattgttgcccagtgtcaaagaatactttcaaagtcccttacaaaacagaaaaagtactttcagagttattccacactcacttcatatgatcactttaaactggaaaacagcatcacattcctctaaaaaaattatcattttccaaaacaaaaacaaatcttttagatccttattgaaacccaccttctttagtgtcctaaactgtaaaacgatacccaattgataaatcaacttaataatcaaaagaacagaggtgacactaaacatattcgaatgtttcaagtctaaaacatcttaacctaattagtagatggtgacaaaagtagctctaaaattaagagagagtagattgcatattgtgatttgtgagtataaaaaatgtagcttcttatttaacaattttgaataaaatctccatcaaatgcttgtagcttaaaatactccataaaaataaaatttcacaatccagaaaatgataattaaaaaattcatacagagaatatacatatacatataaacacaagatcaatcctttaactcagtgaacattctcataagacaaaatcaaaagccccaaatagaataggcctgaagtgaagccatacatacatacactaaaagaagaataggtccaagaaaaaaacaagtagaaaaccaatcatacataatttaactatatagcattagcagagagtctctccaagtaatgccccagataatttccaatgcattaataaatttttgtataattactaactccataaattaaaattaataatagtaagtttacacatttatagatatatatactcgtatataatacctgggaagatcgaggattgaggattgtgaaggaagaggatgacaaggaggactatgcagagtgattccggcgaagaaaagacacagagaagacaagaaagggattagcaacaccgacactcgagaggagaagagaacgactgggattctaggcgtttgggttgctatccacggtggttcatcttgggcatctgggttgcggtcaacggtggagtatctgtgacggttgagatgtggtttcggagatttgggattctgggtactttggtgactgagatagggagagggagaggttatagggtctcgtcgttcggggtttcaggaatctagggtctcgtcggtcggggttttgggattctaatgtctcgtcggctgcggttggagcttgccgccggaaagctggtgttggtggctgccatcgaagaaaaagaacaaagacgaaatgagaaagaagaaaagaagaaaggaaaaataatttttttttctaattttcatttatttttaatttttaaattagcccttttactatttttaaatttttttttctaaatttacagtttctccaatagtttctacagcgattgttatgcgtattttaattgcgatttacattgctctgttaattcctataagagtttctatgtgaaatttaataaaaaaaaaaaa

SEQ ID NO: 301907 - DNA, 2542 bp, Cannabis indica
attttatattattttataacactacaaatattttatagatcaacgctggcttgtattgaccaggataagaagcaccatctaaattcaggccgcaatattgctaagtcagtcgccctctaaaatgttttatccaaacaaatcaaattaaactgcagcacttacaacaattattttgcgttgacttttgagatagatagaatgttttcactgaaaatataacacataaaatatattcttataaaaaagaaaatatttgtttgaccattttcatgtcaaaccttctgatcaaatcaacatggaataataattgagacgtacgatttatttgaaaatttattacgaagattttcaaaccaaattatttttattgatctcatgatatatcaactgagctcccatgtctataaattcttatatatttacacaatttttcatataaatcataagtttaagtagttgaatctcgagagaagagaagaaacagaacagtgatctattatcaaaatgataatgtttctctcctggatcgtgtttatagccatatatgccttcaccaacaatttccttggcaaaataaagaaccttccaccaagccctttcccagttctccccattattggccatctctaccttatcataaagaaacccttagtccatcgagctctctccaagatatcagatcgatatggtccggtacttctcctcaagttcggctctcgtccagttctcctggtttcttcgccttcagcagcagaggagtgtctagctaagaacgacgtcgtattcgctaaccgtccacgtttgctggccggcaaacacttaggatacaactacaccagccttgtctgggcttcctatggagatcactggcgaaacctccgaagaatatcaagcaacgaaatcctgtcctcccatcgcctccaaatgttatctcacatacgatccgaagaggtctcctcgctcatccgccgccttgtgcgctcagctcaacaagatccaagggtggaaataaagtcgctcttgtttgagcttatgcttaacataatgatgagaatgattgccggcaagcgttactacggcgataataatgtcgaaatggttgatgaagaagctcataagtttcaggagatagttagggaaacgctacgtttagggggcacgacaaatgtcagtgactttttaccactgttcaggtcagttttgagtagaaagtacgaaaaaggcttgattgaggtacagaagaagagagatagtttcatgcagagtcttatagatgagaatagaacaagtatagcattagcagcctctcgacaaacctctctccctaaagaccacaagaagaagaacatgatcgaagttttactgtcgcttcaagaatcggaccctgagtattacacagatgaaataatcagaggactcatgctggtacaataataattaaaaattatattctataattcccatttccagcatattaactttttaaaataaaataaaacaatggaaactataatgaaatgattttgtaggctttattatcagcgggaacagatactacagctggaatcatggagtgggccatgtccctaatgctgaatcacccggaagtgttgaaaaaagcccgtaatgaattggagtattgtattggacatgatcgtctagtggaagagtcagatttggggaagcttccatatcttcatcgtatcataaaggagacactacgactgtatccagtgggtgcattactaccccatgaatcatcggaggagtgcataataggtggatatcgtgtaccacgtggcaccatgttattggtaaatttatgggccatccaacatgaccccaaagtatgggatgagcccacaaaatttaagccggacagatttgaagaaggtgatcagggagtgagagaggggttcaaattagtaccttttgggtcagggaggaggggctgccctggtgagaccttagccatgcgtatggttgcactaactttggcttccctcattcagtgttttgattgggagatggttgatcatgaggccaagattgatatgacagaaaagctaggtctcagcttgtcaaaagctcattcctcactactcaactgccgaccacgtcctaccatgtccaacattctttctcatatatagattgattgttctttacttgttaatcttctatatagatatagatataaataataataaaagaaaaaacaaataatgtctatttttgaagttaagaaaactcaaaaataaattatattggccagtttggcacagctgtgctgtgggaaaaaataactgtagttgtgttgtaagaaaaaacttttaaagtactgtgagttgttaagatctattataatgataatgataatgttatagttcattatactcacaaatatataaaaaacttattttatataatgttttattcttttatatatttttaatttttttaaatataaatttatatgaatttgataaaaataatttatagtatttgtttattatgttttatcaaaaagtaaaaaaaaaaa

SEQ ID NO: 301908 - DNA, 1919 bp, Cannabis indica
attattattattattatatttgtaattcatggaacacttataccaaataatagtgaaagcaacacttctccttaatttataattaactacaaaacttgaaattgggcttctatgagtcaatgcctactccttttcaaattataatatttatatgttgtacacccaaaaaaaaaaatattatggtagtgacgggtccaagaattttgctctatgggaacttaattatttaataattataaaaaaatatttgtatttacttcaaacaaacaaaaaaaatatacaattgcttttagtaaatttatttaatttaaaaatgcttatttgttatgaaataatatttgcaatttttattactttggtatatacggttatcagttaagttaaaattaaaaataaatcttgacagtcttaaaaaaaaataatcaagtttaccattgaactaaatttttatatataataggaacccaaaatttaaagtgagggggcgtaattttttaacagtatggacaagaataaattagaaaaaaaaaaattattggtaggatttaaacctttaacttctaatatatatgcaacttagcttaactattacattaaagataagattatttctataaatattatttttattacaaatatatattgtaactaattaaaatatatctatatattatttttatttttttcttagagggtttaaccctagttttaattttgtttttcatgaagatataaggaaattttaatatattttaattttttttcatatcttttaatgttaaaaataaagtttaaataatttattatactcacattttttttacactagtaaaagaagttgttaatttttaaaatcgaaattggtataaactatttctaattttttaaaaacgttcacgcggttcattattttatactgaaccccattatgaaaaatatttgaaattaaaatatttaaattgtatgaatttaaagaaatattataaaatatgatgtatagtaaatatggacacacacaaaattaggagggtcagttgcctcttgccctttcataggttgcctatgtttatatgtatttatttatgtatatattaattatttattgggtatggattaagataagatacactaataataaccaatagggatgagattccattccaacatggcatttctttgggcgacacatcaaattatattattttcaacatttatttagttagaagtttgttattggatactttgtggtattttagtaatttttagttatgttaatgattaattaactatatattttaaaagttattgtattaaattagataagatcttatatataattgcaccaatagggttgaccctgaagtaagagaaaagagccggccgccttagccctccaccgctcagccccaatttaaaaaaaaaattaataataaaataaaaaataatactcataatactatatgttataactcaaatcaatgatagtttttagaataataactaagatgttcatagttcaaatctcaacaattttactattttactgtgttctaatttttatttttgcttaaaggcccaaattaacacataaccaaccctaacaataacaattagaaattagaatggtgataagtacattaatacatttaagcatttctcattcaattagtgtgtctctcttacttaatttaccttttaataaaagtgttgttcagtacattttggtgtaaattattattatactatatgttgttagatcattatgtatcctaagtaaaaaactaaactaatttataagcacattaattaaacttgtcttaacttcactaatataaagtcattaaatcggtagatttttatctttttggcatctaagaaaatagttcaacttttttttttgataatggtgcacgttataa

SEQ ID NO: 301909 - DNA, 4237 bp, Cannabis indica
ttttaatttgaagatatgtagaccaatgcttttcaagaggtcaatgaggagattcaacattgcatggtgggcatactcattcccaatgaccgtactagctttggcttcatttgagtacgcagaagaggtgaaaggagggattgctcatgtcctaatgctgttactctttggcctctctgttttggtgtcactcactttggtcgcactcactgtcataaacacaaaaatgctcttacccgataatgatcctattacaaccactctttttcatagtactagaaataatttattacctttagtatccaccaccaccacgtctcctcactaatgtctttgattactttccaatgggatataaattaatgtaagtttaattaataaatacatagataaaatttgaattaagttttccatgatgatatcatgattatgagtaatgatgtggtctatcattaaatatattttatcttctatattaatgcatttttgtataatgtttgattaattgatcagtattgctatattatatgtgcaccaaattttttttgaagcaatcataattttctgaaattaagatttttttttttttagaaaaaaaacaggagcacctgttattacattactacctatatatgcatgcacttaaattttacatgacaatttttttcaaccgcaatcataattttgaaggttcattagtttagaaagtagcctaactttctacaaaattttatacaaagctccatcaattaaaaaaaataaagatatatagtagcctaactttgcaatatatattttgatattaggaaattattactacatttaggtacgtcatggggagaattgaaccttatcaaattttgtcttgaccatttgatcaattgatcttatatataaatatatattaaattaattaattttgtatactagctagctaatattgttgaaaatgatctgtgtacaaatataaatatatatcatgtatagatcaagataaacataatatactgattatatgatttataatataatctgccaaatttcgtcgcttcattttgacgtgactcgcgaatcacatacctacgttgaataagttttatggactgatgcacgcattttctgaacaccaacacaacaaaaatatattaatttcaaaccaaattatattatattaatcatcaaacctaatctctatcaaaaacttaggtatatatataattttttgttgggcatttaggttaggtatatatataaatatacttaaattgtataaattgtcttcttcgaacttagtacgacgacttattttgtataaattagtaatagttttatctgcaactctggctttatataaattggtttaaagtttacgtcgtcacctacctcacccaggatgaagtttaatattaagagactaagagatccctcaaaaagatccgtcaaagtcatatgtttgtaaaagtctggtactgtgtgtttataggaaaagagaattgctaaaggaactagtgcttattatttttctttttgtgttataattaaatatctcatcttatatataatttaaaaaaaataatttaaaagaatatctctaaccaatagctacatataaaaaatactactagtatctaataataaggtaccctagacattataaaaagtagcataatattgaaacattttaatattaaatttatatattttaatttaataaataatataaaatatcaagagtgcattactataagtctataatattttgcaccttaaatcaaatataggattaaatagctaaacaaatcaatgcagctgtactgtacatgtgtatgtaaaggagtaggaaaaataaaagttcgtccttgtccattaatttgcttagtttgcaatccagctgtacatgtgtatcctttagtttccgatcgatttgcttaattacctaattacggtgaagacgtcattcctaaacgacctcaccatatgacaaacaaaaaatatgagaacaataaaacaaattatttaaattccaatttagtaaaaaaaaaaataataataaaaatctgaacaatttgaaagcttatgtagaattacattataccatgttatgtaaaaaaaaattatttgacgttcaaatttttgtgtgttttaattttatactaaaattctttaattttttttgacaactctcttaaatttacttttatttacaaatttgaaatattagctaaatttcacagttaaatgttaactaaatttccactatttacatttgtgtatacataacatgttttcgtaagatttaagattttaatgtcacgtgacatagataattacaataacaatctcaattggcatcgaaaaataaattttaacaaaaaataaatttaagaaacttataaacttaaccaaaaataaacttcaaatttacatataaaaataaacttaaggagtattatcacaaaaaaataaatcaagagattaagtatataaaaattaacatataagaaaattttgttgctaattctccccaaaatattatagcttatgtgtgttgagcctattggggttttgagtgttgagttcacttaaattattctttgtcactataatcatccacataaatcaacaccatgataaattaattgtaaacttacattatgttatagtgtgtatttttcacctagaaatcgagatcaggctcccataaggatgacacgtggactcatatccctcgaggattgctgagctgtcagaagaggacctcttaagaatagaccttgcctgaaccaaactcagcgagatgatgtgacactgacagagtctggtcgcattattacccctcgcgtaatgtaggaccaagaaagaattatacaagtctcgcatataccgagatatatgcgataactatgaagacttctcctgcagtttagtaaagatcgtttctttacatagcgagttggtccgaatgacctaacatgttcgatgacccaacaaggactcacatgccctaggttgtcgacgctgacaaggtatccgtatacgcgactcgattaggacgcagatacctaagcgtgaaacccattagcctcattttaacagaacgcaccctaagcctacgagcttgtgcgagtatatgaacagacaacttgcactatgaaaattgcatacattgttgtatttagtaaaatagatttaagctgttcttcatttattccatttatatttttcttaatttaatgctaatattcaatgtaaaacggctcaaataattaagttctgtgtaaccaaaggaacacttgctttgtatataaaagaatgatctaatatgaatagaacaagctagaaaatccttgcaacagtggactaagcagactgtgatttgactgaaccactatacctcttcgtgctcattatttttattagtttttttcagtcagtctgtgaagtctcagttgcatactcgccattctaggttgagtactcgctctcttttattatataattatatttttatttttatttggtgttgtcaaaattcctccaacaacatttggcgttgtctgtggcaatcgtatttatttttgattttgaaagaaaattgaaatgggtgcaaattagacgaacagaaataacaacacgggatccttcaatgtcggaacgatgaatgtcccactcccaagcaatggagcgaatccagttgacacagttaatgggagtgtgggacgaatcactgtcactcccctcaatttatttccaaaaaccgtcggtcatgtcttgttgaacctcctccatggcagctagatgattgttcaccagtatgacctcctgcttgacttcctacacatctgcaggagcaaaactggaacttgcaacagtagaaggatttgcaccattcgagaccttaggacgcttgggaaaggctccatcaaagtaatccgagggttgaaaaatggtgctagtaaggggagactcgagtgtctcatgggaataagccacatccttctgagagaaaagaaatttatagattaaattggggaaaacaagcttatgagtatgttttttacctctttgaaatgaaataatttggttcaagatataagaacccaaattgatggatgcccctgaggtgatgcgaaagagaaaattttccaagtcttgagacactacagttttattagagtttggaagctaattgctaaaagcaaaccgcatgagtgaagcatggccataagtgagatga

SEQ ID NO: 301910 - DNA, 2857 bp, Cannabis indica
gctttcccaacgacattcaaatgtcgttattgataccttcattttaatgaggacttttaggcgttggtaatagtggcgttggtattgaccataattcttgtagtgagttgtggaagacaagtgtccaagcttgagatgcttatagcgagattgtatttacaatgtgtaatgcaattttttggaccattaatgacttccctgcatatgctttgatgtctggttggagagcaccaaagggtacaaggtcatgccccacttgtaacgaacacaccccttccattaggttccgcaataagattggttatgttggacatataaggtataatgaccgcatgatcagaatatggattagcagggcaattagcattaattacttttattttatgattatatatgaatatgtatgttgtgggtcccatttttagaaaatttgcattagagttataacttctcaatttcagagattttattaaactttaagtgtattatttatgctatatgtgaaatttaatatttttatgatttttgcttggtaacgatgaaaaatgtgatgaaaggctgatagagtcacatgagttagtctagaatcattattttaacaggatattcatatgttgatatgtggaatatagggactaggcgagattgtggttttagactattttactcctaaacttaagggttatttaagtggtaagttaggagtaattttggaaattatccaagaggttcactttgtcttattatggaattgtggataatttcttttatttttattaagctgagtatattttggattaaaggattatgataagcatttttaggttatttttattagaataagaaaaagaaaacacaaccttttcctctctctctcttctcttttggctctaaagaatcaaggttctccataattcttgatgattcctacctattgttaaagtaattcaagctaaagtaaatccctaaacacttttcttattaagtttgtaaagtttaaataagatcaagcatgcaaaaatagtaattttagttctattcgaacacagggttacttgggttaaattatggagttatttcaagttgttttaagcttgttttagtggattttgattgttgattattgaggttgagcaagaactcaaacttggctcatagtggtggtttttggatttttatatattttgaagttctatcacttagaattagtctattgtgatgttattaagtgatctggagctggggttgtttggagactctttagcaaaaaaatggctcgccatttataaagaaatggcctgccatttttcaggcagttttctcgtaatgtcattttttttatgttttctcaatatatagggcattattgtaacgccctgatctgcaaggacgccacatatgtatttttattaattagttcataataataaactaacagtttaagaagaatgtggtttaaataaaatatttagtgaaattatttaaattattacttaaacttctctttcaaaataccactagattcggggatccctttagttaaaaacttttactaaatactacaaaatcaacttattataaaatattgttacatattcaaaacacaacaaaagaaagatcatgtctattgagaaccaaaacatggcgggttgatatgtacattaccgggagacctctaactcatggctagaccaatttcccctttcccttacctgcaccacagagcacccgtgagtcacaaagactcaccaagaaaagcaagtaacacacaacatcacgtatagcacaatattttaatatcacagaacacacattgtagcatatagcttaagcagtcattcaaagtgtaattaaatgttaataaaaaaccatttatcttataagacaaaccaaactcgatactttataaagcatcctaaactctcgttaccaaagagtctctaatgtcactatcattacttaattaagtagccgataagtaagaaacttaatagtggtttcaaaagaaagtaagaattcattcttaacaacggtaactaccgtatcttattttgacatattaagccgtgcaattgacttttcttacctcaagtacaaagttaggtgtgcggattgacctgaataaaatgtagctcgacaatctagggccctatgtcacgacaacaacaattggtaaataatctaatcaaacccgaaccaagacctaaactcaaaactagatgagtccctatcgattaaacacaaaacctagctgttagaaatactccaaaatggaccatgattttccagaaatggtctaccattctaccatttctttgggctatgccatgtaaaaatagtcgaccgtttatatagttcactgtaaaaacggcaggccatctttcctgctgaacaacccaaactcgggtttttcacttcaaaacttctccaaacctaataaaactttctagaatagtttaatacaataaaattaacataacaaatattcaaaactcaaaaatacactaaaattagaaattcactattgttgagtgagtttttgagttcttaaactcaactcacccaactcttagcacaacagacctaaaatcatcaaattaaagcttaaacaaccctaatttaacatctgaaaacaagctctaacaaagcaaacatccacataacctatcttatctgaaacctccttattccctaactttaaaatcccaaaacgttcaagagtaccaagaaaaacttaccttaagttggataactcctaaggctgaagaaatttacaagaaattgattaatagagctgagttttccttcggttctgctgggttcttcttgagccaaaaagaggagagagagagagaga

SEQ ID NO: 301911 - DNA, 999 bp, Cannabis indica
ataaattggccaagataatgaataagtacatgaattacttggcatcaactgtttttttttaaggaaaatttacatggttattaacttaattttactattttttttacaaaaatactgttagatggtattttttttacccttttattgtatttttttataagtttcatactacagtatactatgttaagttttcaccagtgttctattggtgttttatagttgttctactgttgttttgagttgttctgttttgtcacagtatttttgtaaaaattataatacaaattccagtatttttgtaagtttttcattttgaatgtatgcctacaacataaataaattgtactgcttgagctagaagctatttaattatatattatgtataagaaaaaaaaaagaggttgggaatattggatatggcttttaaatggatataatctgtacaacttaattattccacattcggccattcattaaatattgtttatatgacactaattaatccaatgcatgaacatatatacatgactgtatgtaacaactattttaagctttattaaagctatgattaagttctaataattatatgatttcttttatatgcttatttttgttgtaggttaatcacccttgaaatttggttagagaatattttttcttttatacaaccgaatgattttatccattacaaaataattaatcaaaagttaaaaaaaaaataagataagcttgtgagtactacttttatctttatttttgacataacataggtatatattcaaattgttaaataaataattatacttatcctttgtaagtaaatctacagaaaaagtttatattgcttatcccttgttatgcctatttaattaagtctaaatttgtctcttttatatttttctacttttctttcttttgctctaaaataaaatgtctcatttctatattgtagatatataatatatatataatttttttttaaaaaaaaatttacattta

SEQ ID NO: 301912 - DNA, 3742 bp, Cannabis indica
tagcttaggtcaaatgggttggggagccccttactgttggtgttgtagttgtaaaagtaatatgcaatcaagttgtgtaatataatctcttttttatacaattttcagggtacttcaacgattgaaggattgtcactgtatacacgtgatattaagcatgatattgacataaagccttccaccttcaatgagatgtacaatttaagattgcttaaaattattgtatgcatggggaactacaaattacgagtttcaaaaggtcttgattttcttccagatgcacttagatatctcaagtgggttcaatacccattgaagtctttaccatcaactttcattccacataatcttgttaaacttgatatgcccttaggcgagtttgagcatctttggaatggactccaggtaataattttttattatgttaaatgaaaattagacttatatatataaaacaaaagtgttgagtataggaaattataacactttattgttatttatgaacaatacgtattgctagcttaaactacacttagacaatgaaattcaactcatttttacaaacttatttggatttgacttttttttttttctcagatacatagaacatctttaaatctttctaaaattttctaactttctatgttaattaataacaagtttcaaccattacctaaataattctacaattttttttataactattcccctaagtaattttatgtttcttctaaaacgttatagcaaaattgttgtagagtctaatacttgaatgccacacaactaaaaaccagttactatgttcataaatcaacaattaaaatagctctttattgatagtgttaatttaatcgttacacaatgaatcaaattgtgtcttagtttcaattggaaaatagggactttatatagactagtccaatgtgttttgacacttgaaactaactacacctaactaactgtaaaagactaacaatagagctaactaacactaactgacttaactgtgctaacggtcacaactaactacaagtgttttctagaatttgcaatgacttaagaaaatgcactttatttatattaattaagttgatgaaatgaatctattcttcctttgttcacagcatgtggatagcttaaagtatgtaaagctttgtttctcaaaaaagctatataatgcaccaaatttgtctagggctaatctcaagagtgcagattttgaaggttgcacaagtttggttgaagctccttcaatgaggtttcaacaactagaaacaaataacaataaggtaattatgaaccaaattacatcaaaagtttggagccaaagagaagatttgttaagatatggatcatcaatgggaatcgaaatccatgaaaactcgttgaatctaagcggttgttctaatctcaaaactctttcacacttgtctggaaatattgaatatatatacttacgctcgactgcaatagaagtattgcatcattcaatttggtgtcttggacatctatctttgttggatctcaacaattgtagaagccttaaaaacctaccaaaagacatgatttgtaagttggagtgtttgaaggaattaaacctaggtggttgtgtgtgtatcaacatgtttccaaagcttccaaagaacatagtgaaagtagatttgagtggaacatcgattgaacaagtcccctcatcatcatttgattattgtttttatagtcttgaggttttgtcaatgaaaaattgcacacagcttggatctattacaacaagtctcagcaagttgaagatgcttaattaccttgacatttcatattgctcaaaattaaagtgctttccacacattacagagcctcaggtacatttggcgcaactttatttagatggatcaggaattgaagagatacattggtcaattaaaaaattaattgggctaagaaagctagatttaagacggtgtaaaaatcttaaatctcttccgataggtattttttgtatgaaccactttgagtatctttacctacctgagcgttcagaaatgggaagttcaacatttttgagatttgagtatcaatactaccacgatgcttatgacatagctaaaaaatccatctcaaatccattccaagtatgtccccatgcaactcaaaatatgctttaaaatattaccaacatagtaatttcctcaaactataatcaaactggaaacaaatgtttaaaaaaaaatatggtcatgtgactatgtgtaatattttgtgcatgctctaagtgagcatatcatattcatcttgcctagctagttttcttatatattgaaatttccttaggaatattcttatcttgtttttattttagcagataatagattactctgaaaaacgttatatttatcaagtagatcaaattccattctgtatatcccaaacccatctgaaggatcgatcatccatggactttaagttttcatcaactcggcttgatgaaaccatctcaataactattgctttatgcatagttgttgagtttgtggagttaagaactcatgatgagatgatgaatcatattattcgatgtggaagccatttcatcaagcatgagaacacaactcgaaaatgtgtgtttatgtttcctaaacaagctaatcatgccatatgtttcgattccaagaaatatttgttcgtttggtatgggaatgagatgtgtagctatattcataatatagttaaggtttcttttgacttatccattgtagatgtaaaagggaaacaacatgttgggtttttataactagaaacatgttataaacaatgtaattataaaacattttttgcagttaactattatgacaactaaatatttctacatgaataatgatgatgaaataaaacaaattatataatcaagaaagttacaaattaaaattatgaaactttcaaaattattgagttaatttggttaaaaattttcatttgtaggaaagaaatggcaaccactttgatatgtacctgcaagggaatgaagagcccttctaatatcattacaattgcacgacgagacagactagggaatgaatagccattttgatatcattacaattgcatgatgagacaaactactacaagtctagggaggcaaggtgcataaaatctagcgtagtatcgcctcaagaaataatacatattcaattttaaaataataatatttacactaaattttatatcgaaatactttattgtctttgattttgaaggacatttgattaataaagatttatttctttcaacaaaaagcatcaaagagtgaacatgaggaatatatttatttatatatatattgaggagctagtacacacatcatattaatatattagaagttacatattaatatattatttataatttaattaacatgtatatagtatgagatttataatggaattggatgaataagctgcaacactatcttttgtgacttttctaacatgtgtataatcatcaccatttttgtagagaagatccataaccctgaaaagattaagagcaagttgtaattagagccttgttattaagcaatattagtggtgtctagcaccttctcgacatgtcgtgttgcgattggctagcgatattcccttaaagctattatatatattaaattatgtgagatccgtacttagttgaacgaatagcaatattgacacataggagggtgctaaatatcactggtaccctttaacatttc

SEQ ID NO: 301913 - DNA, 1762 bp, Cannabis indica
taatttctactaagaggcatataatcatacattagtattaaaatccttaaatatctactaattctcatgatttaactatgcggtcattacatttttctttgaagttgccaatttcagacacaaatctcagaaacagcaactgtcaatctcaaacattgtatgcattcaattcttatcttcctcattgaaagattttgagcactcaatccccaagtaacctaggtgacatttttcaactgggcatgtttttaaattacttttagtttacatctttggattgcacatttcaaataagcatgatggcactgcatttcctaatccaattgtcttctgttttcactttagctcagataagatatgaccacaactcaatgactaagaattataaatttatatcatactatgaaaagtagttgatattatgaaatcatatacaaacaaggaaaaataaagaaaagacttacatagttataagtaattttactcaaagacatgcagatgtgcaatccaaaaatagtgtgttatccgtgtttttgcaaagtacaaaatgcggcatttaatgaggaagatcaatttaatccttccctaatcaagattctttgatgcaactttgtcatgggaaagcctgtggaactgggaattatctgggatagaaagacacacaaaagcctacttatttctaccttggcttcccaaatgtagtagacgaatggtttctcctagaccaggaagggtcttatagagaaactcactaaggtggtgcccaaacgggtacgtaaaaggtctaaggtggatatcgaccattatggagtgtcgcaaatgttaactttttatgcacaccaggtcacccaagtaatggttatactttttatgacaaagattagatcttctctcctacatccaagcatggtaggtgcataccaccaccaccttttttccaggaaaatattacagacccctactcataaaggagctagctttgagctacacgaggcctctacttttaaagattgaacatttgcatgctacatggccatatggaacaaaatgatccccattatccagctgtagcacacatgggcatattgtttcccatgggatcatttggttagctctgatattgcatgtaatttactccaatagtgggattttagcggatacctaaggcgggtcatgggattttccatacccgccacttagcctatacataccccttgattctcatacgaagggggcatcacaattcacgtagctaaaactcttccaagattgctccaagtattctccttcttcaagagaatcttagagtacagagttagggttttctatcaaaatactataaacacatcaaacttgccctaagaggctaatagactgactcgtggactaaggtttattaacacttgaaccaagcaaaaaaccttcatctctttatttctacaataggtaatctctttagttcttaaatatttggtttccaaaaatctcagtaaatattttggtgttttcattgagagttgaagaaagacataaaccactgttacggtcatggtgttcacatgaaagacagttcctaggaagactcttcaaggtggcctcaagatggtcatggaggaagtaaaccccctcttgcctgagcccgcccaaccaaacgatgcgagaggtagggatacgtccaatgtgaacgatcgaaaagatgatccagagaaccaactgctgggattttatgccctaaataaaacttatttcaatataatcttat

SEQ ID NO: 301914 - DNA, 1289 bp, Cannabis indica
aaaataattttttaaaacaaaaaacagaaaacaataccaaacatgctcatatcatttttaccaattcattaaagcctctttcctcatctaacacatctcatcccaaaaatcactatccttttctaatttctacaaaatcaaagacctcaataattcaacatgctaaaagtattcactaataaaagacacaaaacaaagaagtttaccaaattggcataccatcctgtgtgagaagcgggtaatccatcgcagttaaagtaataaaccaattccaaccactatcaagcctcaacaatatagccgctgcgcgcaaagtggtggcgatattcgtagaccccatgtaagtaagccgatcaggtttccccaatacatccacatttccaaaggcccgaattgacgccaccgacttaaccagcccagacagcctccgtctctcttcctccgacacctccaccgtcagatgcaaaaggtaccgattacgcgggtgataaactgcaagtaatagcctgaagatccggtcacagtcgcctcgtccaccccatatatagtaagcaaatgctggcgggtagtgagacccgacttgaacaatcgatggaaagggtttcgagaagctaaaggccgaaattgaagagaacaacaatataatgagtgaaagaaatgcagcagagaaaagggtcaaaagccattttctctcagctcccataattggtgagctattaaattgagtccaaatatagattcctggaaatgaagaaaaaaaggcttagtcagttgacaagagcatgtaataaagaaaaccatggaaaccaagaggacactattaaatgaaataaaattcatttttatcactttttaaaattaaaatattaccttttagtggggtgttggtccctcaatttaattatcattaaaacttcaaaataacaacattagaattgcaagttcaattattatatcataattttaaaaataatagaggcacttcccacaaaataataataataattgtagagttggaggctttaaacctcatttgtaattcatttgagacttgtaatttaagccttggacctccaaattttaatttaattttattacgttttatcagttactttaaaatgtaaattaactcaaaaaagaatagtataaactctttcggtaggaagtgaaaattccatttatgtttcaccttgtagtattttgataattggataaataaatgctaatttggtgtgattaaatctatcaaaaaaaaaaaaacttgtgtgtttgttccacattgctcatgt

SEQ ID NO: 301915 - DNA, 4188 bp, Cannabis indica
aacataaaatgttatttctgatctttattaataagtaaatcgtattatattgaaatgggttttatttagggcacaaaacccaataggggatttatcttaagataatgtggcttaaacataagcttaagttctttaatagggagttaattggagatgtgggacgatcttatgaggaacctaggactcacccgttgaataccaaaatccaagcccaagagaacccaagagatatagagattcaagccgttgaaaagttggctgcataagttttttatgtcaaggagaaaatgtatctcagtttttttaaaagtagcttagtaagattgaatggcttcaaaaaggtgatgagaacacttctttctttcatgctaacttaaagaaaggaaggttgaaaatcatgtagcatcgtttgtcaatgagaatggagctattacaaacaactttccactagtggtagatcatcctggagcatttctcgtgggtacattggtagcaagagtagtaccaacagagattgaataaggagtgtgttgaaaggggtaatccgcttaatctagagcagcaacttgatctcttaaaacctttctctaagaaagaaatcaagaaagccttcttcagcatcgctgaaactaaatcccttggcccaaatggctactgatttggtttctttacagcactgtggaagaatattgataaacagatttttggagctatctctgacttctttaaaatttgtaatatgcctagtgaattgcacgttgctacgatctgcttaattcctaaacatgagagcccttgtagagaagtagattacaggtcgattgcgtaccgcaccgctatgtacaagtgcatctccaagcttatgtgttcaagactttctggtgttctgacctcattggttagtcaaaaccaaggagtgttcatcaaaggaagattgatagctcataatgtgatcattttgcaagacctatcgaagacctgctttgtgcctacaacctacctagtcgatttgttcaaaggataatggaatgtgttagatctactaattatttcatatgctttaatgggatggtgcaaggttacttcaaaggtgaaaaaggcttgagataagatgatccgttatcacctcttctctttgtcttagtcatggaatatctcacaagaagacatcaaatggtagtctcaggtactagttacttgttccatactttatgcaaacatctttgtctaattaaccttgactttacaaatgatttaattctgtttagcaaaggtacaaggcaatcaatgcttgtccttaaggaaatattggatgagtttggcaacacatcagggcttcatatcaatgaaggaaaatccgaaatttattttaggggggttcaaagtaatgagaagatagcaatacatggagacttgaagttaacagaaggctcatatcgtcttcattatctgggagttcctcttaggcctactaagtggaacactaaagattctggtatcattatcaaaaaagttcaacaacttcttcactcctggacaagcatgcatctttcatatgcggggaaaattcaattgattcattatgtgttgtttgggttttgcaattatttgatgagtatcttcatccttcctctcagtgtcacaaaggaaatagaaagattgtgtagaggtgttttatggggaaccaccgggaatagtagcaaaattgatattacctcttgggataagatttgcttatcgaagtcttatggaggaattggttttaaggaaggaataaagtggaatcaagcgattttggcaaagtttatttgggcaatcacagagaaaaaagacattctttgggttaagtgtattgtgatgtatagaattcaagctgtaaaaaatagaaagttgactagggaagaaaggatatatatacaacatttattatgtaactagttcaggtcttttttttcctgttgctaggagtgttgcatcctttttgggtgttgtattctttggtgtttgtatagttttgtgattaatgaagtattccttctcatgataaaaaaattagaaatacgcaattattacccgattcatcatcattatttatttattaattttttaaataatgtttattaatagttgattaataacgtgcccatgcattagtaaataacatgccctacatagaaatctcatatagttgtattatcatgcatcacatagtagaaacatgatatattaggattgtctgatgtgtttttgtgtaccatttttttataaatcgataacatgtaaactgactaagattaatttagaattaacttagttttttaaattaacctattaatttaaaatagttttaaattatgaattaaagagttaattcagatttaatgattacgagaagaaatttatttataatttgagacttttattataataaattaatcataattattaaaatagttaatatgtattaattttgggaattaataaaacaaacatattaacctgaaatagtgagtgggagaaggagtacatgtaaatgcaacctacgacctccattattggtcaacaccgagggagtatagactggcaccaagacggcttagattttgtccccctaaggaaggtatgtgtctatactcttgctcaaggttgatctcttgactaagataggaggaagtgatgtattttagtgtgatagcgacccttaaggtgacacactaagttaagtcatgaaatttgaaataatgggttacactcacaaagtacaactaagcttcatagtggttaattgtttacttgatcaaaagcagtactttatattttgaaaagaaaatatgagatatttacgtttcaaaataataaagatgagaattttttcataggctcaataaaattaactcgatagtgaccctaaggtagtgatcaattgtcaaaaagttttattgtggaataacttaaacaaaattttatgtgatttacttgtatgctctcatgcatcacgtttacactaattctggaatgatatttattattcatgtatattcatcatgtcactttatttatttcagtcatgtctactatcaaaaatccccttactactttatgaacacttaaaaaattgaatggtgataagtcttatgaatggaaatcaagtctaaatttaatgctagtttgtgagaatcacaaatttgtcctaactgaggagcgacgtgaggagccccctgccaataccccaaaaaaattttgggacagatattatgcttggatttaatccagcaacaaggccaaatgtttcatcttgtaatcatggacgatgttttgcaaaagacgcatgaaaatatggagaatgcatctaaaataatgaattctctacaagccatatttgggtagctacctaatcaaacaagacatgatgctactcgtaggtacatgaattttaagatgaagaagggtgtccctgttcgaactcatgtattgtgtatgattgagctaatgcataaggcgaagatacacatgcctatcattgatgacaggactgaagtgactatgatccttgagttgctatctccttacttcaagggtttcaccataaactatgtgatgaataggctagagttcaacatgacttaattgttgaatgagttgaacgtgtttgaaaacgtaaacaaggataagtgtaaggaaggtgagttaaacattgttgaagaaaaatgtagaactccttgtttttctaataagaaaaggaagtggaacagtaaggacaatagtggtggtaagccaaaaggcaagaagtcacccaaggccaagaagaacaaagctagccccaagtccaaggaaaaaatggcgaaaggcaagtgttgtggcgtaatgtgatactggaagagaaactctagtaagcatctctttgagcttaagaaaggtaaatgcaatttatttattcttgaagctaacttagtgaaggatgataaatctttatggattgttgattctgaagccacaaattatatttgttcttctatgcagataattgaatcgtcaagggagctcgctgataggaaggtgagtatgtgtgtgggaaatggagcacaagtgtctaacaagggtgtgggcagagtccatctgaaatttaataataaattttctttatgaaacaatggttattttattcctgaatgtaccaggaatattatt

SEQ ID NO: 301916 - DNA, 1506 bp, Cannabis indica
aaagaggcttttggctgatggagctcggaccaaacgaaggccagccgcgtggctggtgagtgcagcaaacgaaaggcccaggaggggccgtgcgtgccactcgcgcgtgaggagagtgaggagacaaggcaccaacaggtgctgtccgtgtggggcccaggcgcagatggcctctgcgcgtgacacgtggcagcggagagagagagagagtgagagagaaggcttgggccaaatgggctctccttcttgggctttctttttgatcttcaaaaatgctattttttatagttttgggcctcatttttatcatctttttatttcttttccactctttcacaaatgctattttctcaatcaaacacaaacaaaattaaatccaaacaaaatattttcaacataaaaatatattgtattaatttcatgaaaatattataaagaattaattttattttatatttttacactataaaatatgtagtattctagcatttaacattgcaaaaaagggaaaagtgtttcggaaatataacagaaataggaaagcgttttgaataatgacttagagactgatttcctatataaacaaatacccaataacctctagaagaactggtttggtattggtagcacctggatcaataatcgaagtgtgtacgtaccttacaaatctgcataatggtgctgagcatagttagtgttagaattgagttaatgagaaatctattagttgttataagagttgttagtgatggagtgtactggtttagtaaccagttagttactgagatgtacatttagcttgtaattaaagcttcattagtcaatgagaatacatttttacacattttattttctctaaaactaacaggttaggaattaaattaactaaattttgttggcatttggacaatccaattatacactttaaagtctttttgttgatttatacactttaaagttttgtttttaatattctagattaattcctttactagtatttaagtatgggttccaagacttttgaaaaagtctgcataatttgttgcaggttgggccccaaaaaattgctaactattataatgatcgtaaaactaacaaagcagacaaaacacactatattggacatgatacatatataacagcagtagtacatctacaaacaaaactaattaccactagcgttagttaaattcttcaagaatattcgtcataagtatttagaaaatatttactttaaatatcattcatttgtaataatcaattaaattaaactattaaaacctgagaatattatcatctatttctattaattataattaatattttaattaacagttattaagttaattagataggaaataacacaagggatccgtggcgcaatggtagcgcgtctgactccagatcagaaggttgcgtgttcgattcacgtcgggttcaataccccaaagctttaatcccaacttttttgtgtttatttcctattttagttttcatttttttttt

SEQ ID NO: 301917 - DNA, 1651 bp, Cannabis indica
acacatatcgagtaaaagtggaattctatggtaggcagtcccaggttcaatattgtagaattggtaattgtaattgtcgggaattggagacaaatactggttactcatgtgaaagtgacaagtacaagttgctcaaagaaaaaagaaaaaaaacccaatagtcaaaccattaacatcatttctgcacattattacattattcattttcatgtccttacaacaaaggtcatcttcttccataatccaaaaaaaattctgaaaactgttcaacatttttggccacagattttcttttttttaattttttaatgggctgtcgtcagtataagcagtgcacacagttctatagagagacagagaagggtggcccagccccacaaggccaccactactacttttcttgacaaaaacccaacatgaaatttgtgctttggactcaatttcttttctaatatgaatcagctatattacattatgattggggagttgggacttaaattctgcggccctatcacctaaaatagaatccaaaacttaattttcaaacaaatgttctttgtctccacgatatatatacatataatatggtgatttttaattccggtatgaattattataagagcattactttttagggttagatatgactaaaaaaagaagtatgaaattggctaatgtagaatttctctttctcttgtatttatgacctataatgtggatgtatgtgttataatgtcagtgagagctagtgagatatcaaagtttgaaatagtgtagtcggcaaagatggttaggtagagaatagaatagagagagttacactgttacagtgtaaaggcactgtcaagtgtgtcaatcaataataataccctaaagtagggtctccagaaaaagataatgttgtgtgacagaataatggtgacccattattcaaacagaaaaaaaaaaagaagaaaataagacccttcaattttcaaaccacaacaaaacaaaccccttcaatgcacttgtcaaatattattttaacacgttggaaaatgaacgactattaggctctttcaagagctttgggcctacgcactaatgggcctttcacggttcagtttgattggtatgtaggagtgaacatttaaccaattctaataaatgcaagtcattatttttaaataatttttatttttattttataaaaaatacagttttgattttttttttaacccaaggtacgtagcaaatgaaatgacatggcaaataaaaaaaaatggaattagacgccatatatgtgatctccatgcaaataatagcatgggatcgtcatatttaaagtgacatgcaaattacgtgtatttttatgtttattccttaattccagtaatttagccagggctgacttcgaccctatcttagggctccagttacataggggtcccaaaaatttcaaaaatattatgtttatatttaatttagaaaaatatcactttctatatgtcaaactgaaaagtatgtttttcatattcacagaagtctcctttttgtaattttatattgggccttcattttttttatattgttctcttttatttttaccctcttttttaaagtttattgtttttacctctttttttaaacattgtaccaattttacccatgt

SEQ ID NO: 301918 - DNA, 7855 bp, Cannabis indica
aaatggtaagatggtaacacataaccatttgcaaagaactaccagttggtgtagcctttaggcatgacatatacatataaagtacatttttatacattgacaataaaccataaaagcaattttatttctaactaatcacacatttcaagtggggaaagtctcagctacctaagatttaaaaaaaatcctgctataaactatgagggtcaaactacaaaggcaacgactaaacaacgtttcaggtcaatcaaaaaaggtgaacttactaataatagattgaactgcacaccttcaacttttcatgagcttctttcactgttttcccatctttctttttcctccacctgtgaccatccttacgaaaatatcgtagtgcttttcgatcaaacaggaacagagagccagctgaaaaacaacaaggcttagttgttgattgcaattacacaaatatgcttacatacactactccataaaatttccccaaactctaaggaccgtttggtatgaggagtttacagttttcacattattggaagttgaagaaggtaatttaataatttggaaacttatattactatgtttgactatgcactagaatcttatttttgattcctaggaagaatataacttttttttgcaattttggaaccaatcgacccaaaaagttgcaacttttaaaagagaagaaatctaatcccgtcgacccctcaataccaagcctgaaaaagcactctctagtacgatatctacacattgaggccttattttgacgacccttatggacaggtcgggggcaacataaacccaaccttgtgttcagtacttcaagtgttcccctaaatcacatttataggaacttcaaaactaaatttttgcaatcataagactactaaaaacttccaagtaaccccctaaacataagtaactataacacatgttaagcctaataaataagacactagtatcaagaattaataaaaaagaaattgagttattattatgttcactaatataataagaatattaataattccatttaagatgaactagcaaaaacctcaaaaataattccaaaatacaaaaaggacaaagcctatttctaagtggatcaaaaaacatacataactttacaggtaacacagtacactcccacatttctgtacaaatagtcagtctagtgtaagtatctaaatttacatataatattatctaaatttacatataatattatatatatatatgtatataaatatatatattaatgataattttgagtaaagaaagaacctggaggcctaacaggtggatctggtgttaattggaacttcagatagttgcgaagtatttcacagatttcagtgggtcgtagccaacgatgttgtgcttcttgaagtatctgttcaaggtctgccatttaaaccaatgcataaaaaagattaaaactttattatttattttattatataatggaggaagctaaatagaataaacgaggtaatcattatgttaatgcaagattggttgttaattgagataatcagcattgcccattttgtaaataatgtgttcaaatcaaaactaaatgaattgattgattgattttgcttcgttttcaattatgtgtcacattggcattgaaatggtgatcaagtaaaacctaaaccagaaagattagatgatgatgatgatgatgatgatgatgattgcaggtaaagataatagcttcatttcataatgatatatatatatatataaaattgatcaaaagagaaagaaaataaaagggcattaagatcaaagcaagaaagataagaaagtgacctaattgttgattgggaataaatcttttgagctcagccatgatgaaggaaggaggagcagtagggtcagaaaaaccctaaatagattttcatggaccaaacaaaaaaaaactaataaatttaggagaaagggaatccaatgaaaatatcaaattcgcagaagcagcgtgtagaaaccactcaaaaatcaaaactttaaaataaaaaagctttcttttttcttagaaccatttatcaaatgaaagacaagacacataacaaacaaagtcaatacttttttttcttttcctttcttttttaagacaaaaactttaacttggttccacgtggcacctctcaaatttaagcttttatttattttgatatttaatttactattttgaagtaaaattaaagacaaaaacaaaactaatgcactatttaatgattcctttttcttttttactacaatacaatacaattccaatttttattgataccaacaacactataattgttatgtgtacagtttctttcatagtaagaaacaaaacaaggcatttcattttcatctcatattccaattcaatgactcagatcagatcagatcagcttgatccatacttcaacctttcccacctgaatggcttgaacacatatagtacttctggtgagctcttaaacagcaaagcaacacaaacacacacagcagcaatgcccaccaaacacatcattgctggtttgtacactaaagaatttctcctcttatgttgcatttgcctttgtttatgccaatgccatctctgcaatattccttcatttcgtacttttcgatctccatgttcccgcctttccatctctgcttctgttgcttgtttgtgttgttgttgttgctgttgtcgtcgtctaagatgtcaaccgccacatgctcgctttctgatgatgctgatgttgttgttgatgatgatgatgatggtatattgctcatttttctcttgacaagttgaatataggagtagtagcctcttaaacatgcataatcatttggtgtcaaacctttttcatcttttgcatttttccacacttcaattcccacctgaataagtcaattcacacttaggtgaaaattgacattttttaatgtcattttgcaaaacaagtaagattttttcccattgaattatgactcttataaagttttgccctctgaactattttttgttgcaaaaaacttcttcccgaactacacaaatcgttaaatatatttcacatgcagttacattcggctcattttttaaaacaatttgtttatgtaatcataaattacaattttagttgcaatacgagggtctatttaataactttaagccactcgaaatccaacttataaatattaaacatacaaatattaactctaaagatacatatacatattctcatatatcgttagattgttatttatgtatttatttgttatctgaattcttaaactagccagataaacgtcacattagagtgctacattaaaaatttatttaaagaaacgagctgaatgtaactggagggagatatttgcaacaattttggtagttcaagaaaaaaatttgccaaaaaaaaaagttcaaagagcaaaactatacaagggtcatagtttgaggggacaaatcctgtttactttgtcacacaaactctttgttatgtattgttagtttcttaaaggaacaaatatacctttcctggatcatctgtcaaggcatctaacacaccatcacaaccaccttgatttgctgcaacatgtagaggagttaaccccatagcaccaacatgatcagctttgaataacaacacctgtgacttgtccataattttctgtgggattacaaattttaacaagttatcaaccataggctggctatttctctgcacagctctatggagaaggctcatatctagtattgcaacctcaatggaaggatgttctccagcatcaactataccttcaaacaaaatgcacaagagtttcttaacaacacaacaccagtcatggtccatggaaaactccatgagcttcttgaaccgtctgaaagggaataaatccgagttgggatccataggacctaatctaagtttggcatgacttctatgaagaagccaccccatttcatgtacaaagtcaagagcctgattcttggctttaacagcatcaccagcagtctcctccacctctattgcaccctgcagcatacatatttcggtacatacctctttctctgcaactatgaatggaaaaaaactgctgctgaagccataatcttcaacctgaaagaataagaaacacaatcctattttgaatatgctattcttaagcaagttcaaagatagaaacaagctatgtatgatcacctctatgaatcctcgccctgtaaccgttggtatagaacaggagaatttaaggcgttggatcttatcatgctcggcggttgtgctagttgtgttgtccaccaactcattacaaaattcttgaaccagatacttcccatctaatgcacacattaacctgtcactcagtagaattcatcaactgcagaccagggccggctcaagggtgggacagcgggcgctcaagcccaaaaaaccctttaacaaaaaggttccaaatgttagaagaacttgataaatacctcatgctggggtgaaataagttgaagcctttcacttcgaattgagctctttcggacaatgcaactgcaaccggtttgatggttgaaattctacaatttttatagcttttctgaggtaagaaagtgtctaagacaatttgacctgcatgaccataaatatagtaaaaaaaaaatgaagacatgaacaacattatgagtcaaatctagctataaatatggagaaagaagaggaaggagacaccattgtgcataaaagctacatgattttgcacccttgaatacacccaaccagttctccagaaaggatcattggatgcagctagtagcctcttcaaacaagatccaagatcacattgtaactgataaaacgaaaaaactagtttcacttaagatcaaacaagttttcagtagagtacaacaatgatatcagagattcataatcagcattcaagtgttgtacctcctcccaagtcattttctctagatggagatatattgtaaagataacacagcctggtcttatgtaactttcgatatcagtaggaaaatgagataaccagttgagaatctaaacaaacaatatgaaatatcaaactctaacttcagttgcacaagaataataccaaagcaaaagttatgtacctgtgccctcaaaaggaaaggaagatcttcaggctctttcccaaagagtttgaaaacaattcgattagttcgactctggaaataaaaggaagaaacttctgatgataacaaaaatgaactcaaaggaacattgaacaacaaatcttcatgaaagttaagcacctgagcctctccactagaactagaatttgagttctgtctcgggtaggatgatagaggattattaagagaaacagtatctgaagttagtggcagatgtgaatcatcatacacaatattcaagtcaatattgttaagtttgacagatttggctgaaaatgtttgcatattgccatcatttgcatctactccacatactttcttgagtgtcatatctgatacagacttcaaaggagttccaagaatgatgggctcatcattaaccttagaggctgaaccaaaaagggtatctgaaataattcctattggcttttgtgaggccataacagaagtgcctgcattaattaagccttgggaattttgcagcaccgtcgacatgtacctccttccatcgactgaactcgaaatgttggccaaattcttcaacagacaagacaaaacatcttgatcccttgtttgatcagagctgtttgctgcaaatcacacaaggacatatctgtatagtcaaacaagccactacagcttagaacatgagatgactcaagagacaaagagaactaacaatgcatattggagagtatccttaacaaacttaacaacagataattagtgttcttttcatcatgaagtgtggaatcaggatgtgtcttcctcctcctcctcctgttattatggccagccaaacgccgacgacaactcctcttcccttgatcaaactcttgaagaagatgaaacctgcataaaaaaataagtatctatttccatctatcaaaagaccaaacatcaaaatttactaactataacactaaacaaaagtaaaacctgctgcattgttgacaaaaccgctgcatagtattcgaaacaagtgctttagttgctttggaatgcatatcacagactttatgccttctgttataatccttggctgtagtgagatcaactgaacaatcttccactttacacatgacacttttactactactagtctccactgtcttcagcttcttcacctctgactcctctgatatgctaagctttaacttgagtgaaatatttgattcttcttcatgaacaagtagagcccttttatttttggacaagtgagctgaggaagggaatgggttcaatgatggggtggcattgaaaagatcaccatcccatctccaatcatttaaatcccattccaaactccccttgccaccaattttagcttccattttttttctcagacctcacttagtaactgaagaaacataatattaaaacaccccaattgcaagaaactgaagaaaatataatatagataaggattagggaccccccttaatattaataatgagacaagatcactatgcaaattttgtcattatattttcttttctttcaggaagaaagagaaaggaaacagcttttgttttcttatgatctattttttcttttcaaaaaaaaaagaaaaagaaaaaatattgaaaatttaagttacactcactcaccaatattgtaaactagaaaagaaaataaaaaaggaatcttttaatgccactttcaatgttctcttctgtctttcttcataggatgtcatgttaagtaataaatccttaaactgttgtgttgcccctttgttcacggctgcgtgcatatacagctagcccagttcaacaagtcacaattggaataataattaaaagaaaaaaaaagaaagtaattatgtgggaaagtaagaaagaaaaaagttgtttttgtatctttataattacatgtataaaccaataaagatttaagctttaccagcactaatgtaccggatcccactgaaactctgcaattaagtgtactttgactatagtagtactaggatgggcgagaagcctcgtgttgcacccctaaatctttgaaccccgtaataaaattttgataattggataaatattatgtttggcgtgaagcttggtttttgttgcaaatggaatatatgtatgatcatgtcacactagtattggtcataatagcataatggtgtgaaaatgagaaattaggcccaagattccaactttgagacatagatctgttttctactttaaaaaccaagatattttttttgtactaaatagagataagaattcagtagcagcaacaggatctagatagatagtagtactagtttactcacttccataggaaatgataattgattgatagatatttttgttgggtgatgaagtggaaatggaagtggaggtggagccaaaggctatctatagtactactacagttactattgggttggtttggtagtattaataatggagagatgatgagtttctttttctttttagtacaatattgtctttgttgtaaatgggggcaaatcatattttcacaactaaactaaagtaaccttacattatacatacattgcaacacatatacatatagcagttttgttataagtcaccagtgcctaataccacctacctaaaggcattttgtataattaaatagcgatattctatattaaataacattatctcacatagattaaatgtaaaaatattgaaccatatataagaacat

SEQ ID NO: 301919 - DNA, 3088 bp, Cannabis indica
cccattttaacagatatagccacggggaccaactcatcagataaatccgcaaacaaagctgaaaacctaagcaaaaaaggctcacgacaagttgtaccttcagggcagatgaccaagtcactttcctctagaaccttctttattagagcagcatctttgattcggtctctgcttagtggtgtggtctttattggtgatatgatctccgataatcgcgcaatggaataagagacagttgtcatctgtcgttggagagcccctgcaacgaaaactgcatcgaggactgttcgatgagaacaaacgaagagaagcccagatcgaccagtgttacccttaggaggtgggtttccttttactttgatttgaacccccgtaacacgaagcatattgtgttgatttgacaaaggagttaatgaaagaattgtgattcgcaaacatgaaaggagtatcccaattggtgtccaaagaatgataagtaaagccatcaaaggcgtcggtttttgaacaagcctaccgtcgtggaaaatcacagctttaggcagcttttcgcgactgagtggtttaactttgatcttcggatcaactctgtagctttctttacaaagcttcataaatgggtaatcactttccttgtcacccaaacctatgtttggagtcgaagtttttaggtcaggaaactcgcgcctaagggcgtcgaccttgttttccccaactattactcccgggcttcgaacgaagcccgtggcaaaacctttgatggaagttatttccgtgccaacaaccaaatctacacccaaataatctttcaagaaaggttccaccatgatttttggacttgctgtcaatatgcatcgttttttgcatgacgtaaaaacctgccacgtgtcaggatgcaagtctaaggagtagaacttgggaagaacggcagtggccacccaatttatatcagcaactttcataccgacaaatgtggcaaaaataaggacccgaataccggcggattcagagacgaagtgatagagaattccagcaagtggagaagccaatagcatgaagagaagcctaaaaattccaccaacctcgtaggctactagggcaaagtaagggaaggagctttgttgggtaaacaaagtaccatccatgtcagccacgatggtatcgttttcgcgatttgtgaattggcatttgtcaatggttggaagagaatagaagttgtactcttctttggccatagaggagggttgattcatacgtacatacatgtgtatatacacaaatcttatgtttgatatttatataaattatctcattatcttggatgtaatagcccactttggaattgacaataattaaatgagagtatataatacacttatttaaaaagtagagctctagaggttgggggatcattattatatcctagccctatattatctacctacctaaagcttctttcgtcttgtaaattttgtttggtgcggtatcaaagtcacacaaaattaacaaaataacaatttacaagcagtggtagtacattctcaaactaagatagtttatcgtttaataaaaaaaaacagtaattcacaattggcggtggttctcgaacaagaatagtttatcgtctaaccaaaaggtatgttttgcgctgcaaaattcttattttgagccacataagacaaaattatctccaaaaatttagacaataaagttataacatcctcaaataacacacttagaggtcattaaagaacaattttcctttattgatagctgtaacaagagacaacgaatatgaacaaatctctttaattaggattccgcacaagagagcctaactgagtccaaccaaaagtgtcaaagtctcaacttgtaatactaaaatactacctgaaaacaaacaaaactataaaataccacaataacaagatataagtatacacactcgtatgctaaataaaactaaaaacaaaaactcaacatagtacaacgaaacccaaactaaggacgaaactaaaaaaaaataaaaaatacaacgtaaagcataaaacatcaaaacctgatgcaaagacgctcaagacaagtatcaccaaagactatctaatctttttaaaaaaacacctatccacactattaaaatcacgatttaatattgttcaaacttaaacctagcaaaattcttaaaggcttgtacaaatcaaaaatagtttgtcttaaaattaacccactatctaatctttgagaggcttgtatatgtctatgaggcatattaaagtattcaaaaccatactgatatgatatattgtgagtggttattagttttttatattatttattattaaataaacagtgtaaaatctaatattaaattacacacctaacatttctctataaatttctataataattcctaacaattacttacaaataattgattgatccacactaacctacacctacagcctaaagtcaacagctttcaattttgctatgcgaacttaattagtaatgttaatttccataattggtaactgtctaattaatttcatattaatactatttataatattatcaagggtaatttacagtaaaactctttaaattttaagtttagtatgatctaataacccatattagaaaaattatggctaagtttccaacttttacaatcgttttggtcagcgctccttctgttaattttttgttattaagtgccaaataaacctgtcactgtatacacatatgtactcgtagcaaaattttattgagccacctaatataaaaatatatttaaaaatataaaaattaaaatatttaaaaaataaattaaaatctttctttttctttttcttttttcttttcttcttctttttcttaattgaaacacaacttaaatacacaattaatacaaatgcaaaaatagtaattttctaaacttttttctattatgcatccacaatagaaaggtgttatatatgtttaaaattggggtatattgaaaaatacctcttttatttatcaattaactaaatttacctctaattttatatttaattgacatatacctctttttatatgtattgtactcaaa

SEQ ID NO: 301920 - DNA, 1556 bp, Cannabis indica
tttatattttttaatatttaactacaaaaaattaaaattttaacagttacaatctctgaatttaaatttcctaatttcaataagttttaccgtcaaaatttcagtttttatagttaagtgaaaaaatataaaatttatgtaattttgccactaatatcccttttaattacagaacaattttctaaaggaacccctaatttttttatttattttttgataaaagcatatttatttttgagattgaattctaacttcttagtatgtaattcaaatattataatataaatatgcttttaattttacccaaattacattgaggctcgttacataagcaagttaggtctgtacttagaacccacttaacagatgacaaaaaaaaaaattccttttaaaattatataattttttttactaattttgaaaaatattaattttttttttctaaataaaaacttaaaaatatatatattaaatttcaagatcggcctgattactctctgtatgcctctagctcaagtggttaggaaccccttaatttttcgaagaaactatagatcacacatattacctattttcatatattaattttcaactttaaagtaaaaaataaaaaagggttgggtttaaaaaggagagtgtcacgagagtgtagctacaaaagaaaaggaacatgattgagttggacacgtgttggagggccctttggtctttattcatttgtgtttgtggtcgacttgggtagcaacaacgacaatgacattattcacaaattttagttttaattatttagtaataataatatcatcatgatgaattttattttataccatttaacaaattaattaattaccatcatttttatttatagtccataataataatatattagttctaaaaccagtatagtagacactagttatttattggttatgatggtctaagagaataagatagctagttttgagttgggtgtgcactaagaatagcatacaataagtatttatttatatgatacttttagcaattattattaataaataaggcatgtacctattattctaaattatttcatgtgaaatcatgttctttattattatcttaaacataatttggctccaatagatatgatcatgggaaagatatgggttttatctcagatgacagtgtacttttaaattgttatgtcttttgtacggaatggtgactcctatctatgtaagttttgtatttaaaaataaatttttagatatcatattttgtaaaaatgtattgaaattatacatttggatatgatttttactaaaatatgtatgcatgaatatgattaaaatattttgtcgctttaaaaatttattaattttttcctccgttaacaagtttctttgatctagttattttttttttagttaaaaaacacatatgttttttaatagttctaatgacccaattaattttagtaattttaaaaaaatttagggtccaaagttgtgacagtcagtagtcccgtgatccgtaagaggaaataccgggtaagctgtgcaatcccacatcgcctg

SEQ ID NO: 301921 - DNA, 6285 bp, Cannabis indica
atgatgtgttccatgttttgatgtttcagaagtatatctcagattcatcccatatcttgagttatgaagcattggaactacaaccaaatttatcatatgaggaacaaccagtgcaaatacttgatataagggagaaagtcttcagaaacaagataattacactagtaaaactattatggaacaacagaatagtggaagaagcaacctgggaactcgagacgaatatgcagtagaaatatttgaagttgttcaggtaaattttgggaaaatttctataatacccaaatattatgaaaatggattagcaaaccctaactagttaattgtgtattattatggaattatattattatataatttattatatatgaaatagtatgagttatgacatgttaagaccccgttgatgagccaggggtattttagtaatttttacacaagaagggtaaaactgtgaatttaatttatttacatgcttatggactatattattatatagtatgcacgtttgtcctttttcaggtatgttttgacaagttggcgcggtatagtcacaactggtatttcgggccgaatcgggtttgggccgaaatacaattctgcgattatttgatgacattgtattaataatgtgaataatctaaaatttatttgaggatatttatattggaaatgactatatattacccttgaaatgtttatatgagagttatgtggcctatgagcattttggtaactttgcatgtatgagttatatttcaacaaaaagcattttaatgaaaataggaggcatttttctggttctttctcctcaaaaccaaccctctctccctctctttatctctttgttttaattgttgaattggtgaggtttttcttggttcaagctttgatggctttgtgcttgagtttgaagggaattgaggtacttttttttaatggtttttagttgaaattatagctgatatttttgtgtggaaaagtaagaaattgtgttgtgttctcttgaaatgcatgtgtgttggtattagtgtttttatgataccctatgcttgtaggttgttttgggttgtgaatttgaaggaaattttgagtttagaatggttttctagttaatctatgcagctctgaaattattgttgagatttgttcttgagttctagctcttgtgtgggtgttcatggtggatttttgctcaagtgttgagcttagttttgtatagtaatttactatgatttgtgcttatgggaagttattttcagccataatttggtgcttcaactctcagtatgtatattgatgtttttaatttatagtttgagattttgattaaactttgggtgtgatttggtgtgtttgagcatgaaaattcgaagttggtttttgggtttggaacccaggggccccgacccagctccttgggcgccgcggcccacctccagttggaggcctgggattttagccaaggtgcggcggccccatgtggggtgccgcgccccgccctttgtttttgggcagatatttacgtgttatttgaatcctcataactttgtgatccggactctgtttttggagttctatatatcgttggaaatctcgttcagagctctatgtgaatatctgtgatttaaatgctagatatttgttttgtgaatgtggaaataggggttaaccctatagttgtaaatcttagaatttatgactaggaataccagcacttggtcaggagcacttggggttttggaatctctacatttgcgggagatcaagcaagacagtagttgcacttagagttatgcgcagtggcgcttatgttgaaaatgatatatgtgactaattagaaactggaattagggttattaccctaacatgagcagtttagtggcctagggttattaccctagagatgaattattctaaggccttattttaaatagacgtgtgagagtaacatgtaggtctatgccacatagacataaatagatgtataagcgtaacacgtaggtctatgccacatagacataaataggcatgtgaacgtaacacgcaagtttgtgtcatacacacaaatgataaatggcattaatacttatgtgatatgttaagtatgattattgatactttatactgtcttgctgggcttggctcacaggtgctctactgtgcaggatagggtttatctttctctgattagccatgagtgtgagagctgggcgatgtatgtacatgttcgggccacactagaccaagcgggttggggtttaccagtgataaatttttgtacctcaattttctgcttacgtcagctattcagaaaagacttgtaatattttgtaaaatatttttgggatcccaaaacatataattttggttgtaaagttaaagttattacaagtttttattttaattcaattattgtttaaagtttaaagttcccgcgcttttctgtatagtaatcacgtttaggggattagggttcttaatcaccttgggtagcatgcctatttgttagggcattacattacgtgtttatttagtttctaaaagtcttgataaagaacaagtctttgggtaatcagtggaaaaacccacctttgagggctatcataccgttcttctgtataatcatttgaagttggtgcatccatttcaaggacaaatgcaatttatttgcttcccaactggtagcttggtgaaaaaagtcccacactggaattggaccattaagaacatgctttaatgggaccaaagggggctcagagatcccttcatctttcttcgaacttttcttgctccctgagcaaaccttttttccttgttcttcactatacttggacaaaatctctcgataaaaggagtaaaacttgtgagcattgagctcttaaaggccctaaacagttaaccccttataccacattaaaaaaataaagattgaaatgggagtcctctaactgccaataagaggcccccacttgataccaaaaacaaagatatatttgcacagggtatcgggtgccaaacacatcgcttctgaaaatgaaaatataatgtaaggaggcgaagagagaaaatgacgggctctccacaaaaatgaaacaaaccaaataaataaataaagaaatatcaattgagtgcatacaatgaaaattttctagaatttcaacataaaatggccaaacgcacaagtcatgaccccctaaaccagaagttttcaaaaaatcccctactcttcgcatgcattcctagaatgaagaagttttctagaaaaaaaaaaagaaagtatacaacagatttaatcacaaataagcctaatacttacaaaattaggtccaaaatattgaggatggcgcgatagaacaatgataatagtactttgcctagcagcatcagagtacaacaaaagaatatttggcgagctcaaagatttttcaagtttgtacactcaaagaaaatggtaaaagaaataaaattataaagaggtagaaggcaagtggtatttatacccttcagcccttgttcctagcacttttgatcctacaaatcctttcaaattttaattagcatattgtgatcaaccagttgggaatgagcatgaagaaacacatttatgaggggatgtttgaagtgattgagtatgcaattatttgcatgaaattatggcatgtcttttaattttgttccacagaatgaatcaacattaccaaaaccgaggagcaaatgcatgcagcactaagagccactcatctagaaacccgtagtgtacctacgcgaataggcctactttatataaccatctcatgatggtgtaaccatttcagaagaaaatttaaaggtgaacctataacaagccccaacatatgaaattgcaagctagaacttgcgggtaaaagttatctgtggtcattcgagagttagtcatgtgtctagtgggccagcgataaaagagataaataaataattaatattaacctccaaatcatgaaagtgtctgggaggcaccttggtatctgtggtcattcgagagttagtcatgtgtctagtgggccagcgataaaagagataaataaataattaatattaacctccaaatcatgaaagtgtctgggaggcaccttggtatctgagagcaaacattatccctaaaagatatcccaaaactaagccatagtctcaaccttcgagaggatggtgacctcccagagctttaaacatccacaaaccattctgatccttcatacatttcctaagacaaaatactgtaaatggttctttctatgaagatggaaaaatagagctgctcccaaaaagaagatgttttgatatttagcccatacatttcagacgttgcgtcaccccataaacgcatattgatgactttcttttccatattcccatcagccgcaaacaccttaagttttgtctcaccaaacttctatttaaaatcctacctgaaacacccattattagaaatcatttcttatatctaggaaaaggccacatagagtcaagagggatagagaggacgtacctcaaaccatgatatgcttccccattctcgcctataaatagggaaggaatggaggaaattgagagcgaaagaatttcgtataaaaaggaaattccattgtaagaacaatattacatagataaattcaacagactcgtggactaaggttaattaacacttgaacaacgtaaaaatattattccttgtgcataattaattttcaaaaaaataagattaagtagttgtcgaatgtagtggtcaacaagtggtgatgggggtttaaacttagaaatacgagtatcgaggagagaaagtgaaaggttttccttttttctaaaaaactataaactttatatctttaattgtttagtaattgcttaaaatataaacctactagtggagacctatgactttagttattaccaaataacttaagatataaatctccccatgtaggcctaatcgatagcataggtcttagattttttttcttaaggttttaaggatatttattttttatatatttatatataatcgaagatataggttaattatcatttataaaagcaataaaaatactttatttttcagttttttatttttttctcattaaaaaaacaaaagataaagaactaaatatcaagaatttccttctcctctttcggttatggttgttagtccattaagttaattggtccttcttgattatttaggcagttggtctttacttttctgttatttcaattagattttattttaactctggtgtgtttagctaactcttgctagcttagtttatgttggtatatatactggtgtactctgtatttattttcgatcatccaatcagaatcaatacaatactttttctcctcttttaattccacaatatggtattaaaggtcttggcaaattaaagtattttctgggattcaaaattgcacgtgccaaggaaggattgtttctctcccaatgaaaatacaccatgcaactcttggaagacacaggctacaccattagtaaccttgcaaaaacaccaattgaccctgaaatcagattgaatgatcaagacgatattccacttgaagacccatcagcatatcgacaactcattggtcaacttttgtatctcaccttatcaagaccagacatcacatttgcagtcaacaatcttagccagttcatgtctgctcctcgcacccctcatatgtaagctatccaacatctcctttgatacctcaaaggcaaacctggccaagcattactctattgtgctaagtcttctctccaccttcgaggattctcagactcagattgagcttcttgtaccacagccagacgatccacaattggttttcgcatttttctaggtgactgcattgtttcatggtgcaccaagaagcaacactaaaagctctacagaagcaaaatacagagctttagcagccaccagcagtgaaatcacctggcttcagttcttcctcaaagatgttcacattccacaagatacaccagtatttatttattgtgacaatcagtcagcaattaatattgccaacaaccccacatttcacgaacgcacaaaacatattgaactggactgcaattttattcgagacaagatcaagcaatctaccatctatctcatcctagtcagcaccaacttacaacttgcgaacaccttcacgaaactcctgtcatcgaccatactccaatctcacatccacaagatggttgtatactgtaaagtcttttttttttggcaagttagttgagaa

SEQ ID NO: 301922 - DNA, 2914 bp, Cannabis indica
tgagttgggacaagctatgtcgtccaaagacaacaagtggtatggggtatcgatacacgcatgatttcaacatatctcttcttggcaagcaggaatggagattaatgacgaaaccaaatgctctggtcagtagaatttacaaggacaggtattatcttaatggatctttcttgactgctgatcttggaggtaatccaagctttatatggaaaagcatttttgagtcccaacatgtcataaagaaaggggcagctgttcgtgttgggtgcggtaatacagttcaggtgctaagggatccctggcttccaagtgaggtcgacccttatatccatatagtaagtgaatccttggtggaggttacggtttcaagcctcatggttccagaccaacttcaatgggatcttgagctcctttaggatatcttcatagagagggacattaatcttattctttctattcctctgccgaatggggggaatgattcttggtatttgaggtttgaaaaaacaaggcattactccgtggagagtgcgtacagaagtttacaagaaaacaagggggagtaacaccagtgatagttctggtttttggcaaaaaaatctaaaatttaaaagtttcgccaaaggttaaaaatttactatggagggctgctgcagggtgtttaccaaaaaaatcccagctacaaactaaacatgtctaagttaacaaactttgtccgttcagtaatgctgagagagaaactatctcgcatgtgctgataacttgttcttattcgaaagtctgctggaataggccaaaaataggcgtcccaacactggtcagcagaccttctcaacttggcttgaggaggtttataccaggtttgttgacagtgagcgaaggctgatctccatggttgtttgggctatatggaagtgtagaaatgatctggtgtgggataacaagagcaaatttgttagagaggttgtgacattagcaactactgtccttaatcaatggcatagtgctcgggataagatacaagacacatctttgggattcttaaattcaaaagatggtgatgagcattggcgaattccaaatgtagaaacaattaaggtaaatactaatgccgcaatctttgaacaatctcaatgttttagttattctttggtggctagaaaccatattggcacgttggaagaagctagatcagtttgcactagaaaaagcattcaaccagaagttgcagaagcaattgggattcgggaagcgcagagttggataaaagacaaactatggggtaaggttgtcattgaaatggattgcattttagtcatccaagcgatacgaagttcatctactatgttgtcttattttggcagagttattgatgactgtaagagtctgttaattatatcttcttgttaaaaaaaaaacaatgctatttaatatgacagctaatattttcaaattaaaatcatatgtcccaaaaaaatgttaattattatgaaagttatgcactccgtcttaacatacaatagctaagaaggattacacttaaaaaataatgtatttatgagtgtgtaataaacagctaaatacccaaatttgaaggcacttttaatggtcactcaataaaattaagagctgatttgtatttgcatgccaaaatactgcaacaattataaaattcactctaatttacacactaattagagtaaatttttataaggttttttatttttgaaagagaatataggtaattctcattaataaggttaatttgacataatttattacaaattcaaacgaccaatatcagtaacagcttattacaattttcaaaagggaaaaacacaacacatttaaactaattctaagaagcattatttagtttccaatgtgtaaagtaaactaagttttcttttgagaattgacatatcaactctaataatacaaacaccttgacgcaattataagattaaaggcttgattattgaaaaataaacaatgatttaccacggccatgaaaactaacttcataaaccgaaagacttgtatcgtgtttgtctagatccagatatgattgaagggcaaacagagaagtactgaaaatcacaaaacttaaaactaataaacgagttgaccaatgcatcaaagagaaaccaagaacaagaaaagagaaagaacttcgaattggtgtgtaacaatgaggaggcacactctatttagagactttcaaggaggtatgaataagtactagaatcaagcaagaaaaatcaggtatatgctcaatctattgattggtataaattgatatggattaaccttttgtggctacaccgtgctcgcagaatgtgcgagcgcatacaagttgtatgtatttttgctcccctaacgataatttatacactcatatgcgcgcaaaagagaaactagttacttatcaacttaccaagctaaagatatgaaattctatacacccctttaaaggggtactcaaattttcatgtaagaccaccataataaccctattatttttcacttctcatactaccaactttaggtgacaattactcgcacatcataaccatggaagataatagattgtttgtatattgggggaggagggattcaaatttgagattttctccttgtgagaaaagatgtgaaactactagactatgcttatgaccacctcgaatagttacattcgaaccagtgaataataacgtttgtattatatgaatcaaaaccaaaaataaattaagaagtgtattgtgcatatgaattattataatataatgtacaaaacatatacaacagagacttcactgccaaacttaatctctctgtttaagcagcaccaccagtccaccaccaacacatttgagcaacactactagtctcatcatcatcatcatcatacaac

SEQ ID NO: 301923 - DNA, 1736 bp, Cannabis indica
tactcaaaaaaaggaaaaagaaaatcttggtaaatcttgaaacccaacacaaaactaatatgtgtgcacaaatcatcatggaatgatgagcttcttgccagcgtaaatggtagttcctgtaattccattagcttctttaatctcatcaatggatacctattgaaaatcacataaaaagttaatcgaaaaggatccgtaaaagttaccatcctcaacataccaaaaacaatgggacaatcaacaattataaaatcacaagtgagtgaaaaacataagaacatttttattcttaaaaacttgtctacagtaccagtcgtgcccaatggcctcatacgtgttattggcaattcaaatactagactagacaatatgccagatttttgttggtcttcctaataccataccataatctgttattttaaagaagactagaagtgcaccttctcatcactcattaaaatccaaaagagagacaaaacatttaagattaaaataaatatctattccatatgacaaataaatattctacgctgcacagaaacaatatggagagaaggtaagaacatacataccccatatttttgagagagcccccagagagtgtcccctttggcgacctctatgcttctctgtgaggattctgatgtctttgacacattttgttccacaaaggtaactggtttctgcaataatgaccccaacatttgaaggaaagataaatgaatcagcaagcaatgagaatcaacaaccacaggtttacaggtctttcttccaaaatctaatgtaaaagatcaatgggcaagaccctagtattacaatattctcaatcagatggataggttccagaaatcgtcatataaattgatcaaacataaggagagagtgaaaagaagcaaaagaaaagagacatgggccattgccgtaccttcatgacaggcattgtctttttgggaatgagagtgaaaggctggggtggagtctgaatcggctgagttggctcagtgagtggctgctgagtttcaatttttcttctgtttaaagggtttatggatttgattatactcagcgcgatgccggagaagacaacgaagccggcggccttggccagcatgttgtccttggcgtcaccggcccccgaaccagattgtgggtatggcattttcgattgatggggggtctagagtgagggatccaatcgaagattctagggtttcggatcagggaggcgagtgaaggtctgttacaggtctgcttagctgagctgagctgagtcgagccgagtgagtgagttgctggtttttgtactgagttaccacgcgcgtttttacgcgcttctggattttattcgaagctgaccgtagagaaagaaagcttccatcgatattggatcgaaatacgatcccgcctttaagaaaaggaaaaagaaaagtacgaacgacatgtcgtttgtcatcatcaaaacgtgaaacaataataattaatgctacaacagcaaatatgagatgagaaggaggattgttataatttttactaaagtaaaataaattagattttatattaaattgtatcactaataatattatatatcttatacagtagaatctctatccaagaatacacttgggactaagtaaattatattctaattgaaaggttataactaaatagagttacgctagaaaaaaaaacttaaaaaaccaaaaaatatcaatgttacaataataacaataaataat

SEQ ID NO: 301924 - DNA, 2416 bp, Cannabis indica
gggccacagtcggcccgtcgggccgggggcccggcccggcccgcgaaaatggcccagattgacattcctacccatctttaatccaattaaccttggatttttgttgtaggaatgataacagcaccttatgcttctctgcatatttctcacgagcctctttctcttgttgctgcaactcagtatttaacagatcttgagccaaactttgttgacaatctatcatccactgtttggccttcttttcatcaccatgaacattagagaatccctgtctgttaattgcggtcagtattggtttgaggcttctcaatttggtgacaatttgatacattttggttccttcgactgactaagaccagacatcagaaacttgctcattaaaatgggggtaactagaccacattttgaaatatttaaatggtttcctaccacttggaggtaaaggatacatagtcaatattgccggagtgtgatcaaagagactctctggtgagaaaattgcttcagcatatggatattcattcagccagctttgattcgccaatactctatctatctttgagtaaatcctatcatccacttgttgcttattactccatgtaaaatagcttcctccaaatttgacatcctctaattgacaagccattatgcaatctttgaaggcagtagggctatagtgagcacgcttgccaattctttctcccttctctaaaatatcattagtatccccaagcacaatccaaggttcatttgttttcagcccatctaactttttccaaagcagtctcctctcctcttccttgttaaaaccatagacaaaggtgacaagaaacttattcctattgtccaaggtagtaatagaaagatggattagttgacttgagcaccacagtatatccaccatgaaactcatcggattccaagccactactattataccccctttatgccaagcattattcgctgtaaaacaccaattggaaaacattcgaacgtaaaaggccccaagacttggagccttaactctcgtctcaaggagaccaagcaaaccaacattatttttagcaataaattgcttaacctcattttgtttatgttggttgttgattcccgaacgttccaactgagaatttgatccattgctttgaggaggctctccccctcctccagttatttcctattcaaccctgtcttcaagttcccaaacttcaaattcctgcaacttttgtgttgtatcattctatagcacaatgaactgattcgaggttgatggatcagctaaatcttttttaggtcgcacacccttcacaaccggcttgaacccttcttcatcagttaacttttttgtttctccattttcctgcctctgtttgcctttgacaacccactcttgtttctttgcttccttcttcctgcaatcatctgtggaatgtcccatacctttgcaatgtttgcagaggataggcttccattcatagttaacaatcacttatgtatctaccccatactcattctcaaagtaaatcagtccaggaaaaccctgttccattgaaacttctatgagtattcttggaaaaagaagcttatccctttctcttgtaacctcatcgaccatgattggttttcctagctgacctacaatcttaaacagcgatttttggccccagtatttgagttctaaatcctctaattggatccaaatgggtatggttcgtatatcgtcttttttaagattgaggttgggatcccaagccttcataatgacaggccttttgttaaagaagatatatcctcctgctagtatatcatccctatctttaatgcttgtaaatcgaatgaggaatatgccataagagatcatacctatcttgtctaccttgtccttccagatccttcttgcaaatccctcaagaattaataatggtggattagcaccaagaacatagcacacaatcgttgatttccagtacgacacttcttcctctatatcatccatagtaatcttcactttctcatccttcttcaaattagtaaatgaggattccaaattacgcattactggctctgctcgaagaattggaggtgttgttttgatgcccttcgagatagaattctggcattccttgttcgcagcaaggaaataaccaaaatcggcaactatctcatctttttctttcaacaatctcagtgacgaatctggagataaaggaggttgaagctcataacgaagcaacagatctggtctatcttcttcatcatctgagaattccactagttcaacaccaagaatttcctccatggatttagtcttgttaacatcaacagatgaattcggacctttctttttcgatttcttgttggacactttcgattttcccacaatcttggacattgttttcgccatggcaccaactca

SEQ ID NO: 301925 - DNA, 2058 bp, Cannabis indica
gtttaaaaatcacgtaatacgcataaggtagttagggtgttacacagtctatctccctcggtaaagtgtagggcatttgagggtctctaaagcagagactcagacttcctacgggacaagcatgtcgcaagagctgcctaattggtttataatgtcttgagttgcttccctttgatgtaacaccagggttgtagttacactaggcggtaggaacaacatggggcatactttgccaaaagttgcctgcttttaccaatagtaccataaccaggctgcactagtaacctagcaaccgccgatggtactaatggtctcctctcagcagctgccatcgcaggatatgtttcttagtaactttatcacctgtaggaaaggcaaggaaagtagttgtcgagagacagatccagccctcacgctagtaccagtgttagagtctctagctagatagagtcattgtgtctgatgaccccttctgagtcagtcgtcgtaacggcatcgggttataggtccttttgcattgttctgtatgtgcgtaatgacacggcagtggtcctgagcctggggacatcggcgactggccttgcccccagggagttggctggccagatctaagcttccgaggacggatatcagtgcagtaggtgttttgaaactgcatgcgctagctctcaccacttttcttgagtagactggggcctcgagcctccttctggcaacaccttggatctataccttttcggccttcagccggacctcgacaagtcattaggaggtctaccttctcttcttgcacggacctttgtctagggaatctcgccccgatagccgccatgaatacttctttcttcagctcacaataagagcgccaaaatgtttaccgagtttttcggcaaccaaataattataaagcttaagaaagtagtgaaggcgtaaaataacaagactatagacgatagatttttaagtggtttaggcgttaattatccttactcaatgagtctattttattaggctctttgaccggagattgtacatacaaatacaacagggatggactttactccaccctactgtgttcctctttaagaagaagaagcttagtgggaatattctggagttgtaatggagttacagtaatgtgtaaagaatacccctttggcccttaggcaaaaagtcaaaagagaagaagtcaaggatcagaaatagaatcccccgcccagtgtacctttaggtgtatttataggccaatctctttgcataggccattttgggtggatcttctcaaggatgaacccccactattggattggtaggtggcatgttttccatgtggcctttagcgatgtgagattgtactagctgtactggtggtgctttgaacacctgtcgctctaaggccgttcttatttaaattaccattatccatagctgttggatggtattgcactgtacacaaggacacgcatgctctgcatggtagtgcggcatgggagacaactcctgacatcgtacacagaaaagcatggtcattgggtccgtagcctgatacgcgcgggttgagcatccgtgggtcaaaggcatacctcggactcatgcgtcctatcttacaaagatccactttccacgcagaagcgtagggttcccagattctagtgtcgattgagtctctggctcacgggcgtcttccttggggctcgcatccgagaagacttctcatgcgggaatctattttgtgatacctctcaccttcccggagcacggggtgaggcacttagtgttggaaattattttaccaggatcttagatctactcacaagtatgttgattaacaccctaaatatgaacttttaaaacgattatgaaataaacacatataaagtattagaaaccttacattgggttcagcggaattaaaatgtctccttccgttcagatctcgaacccttgtatcctttctgtcgcagagtattatcaagatctgaacctggatctctttctctccttctttaatgctgaaactccttcttgttgaatccctttcttcacgatcttcctcac

SEQ ID NO: 301926 - DNA, 2718 bp, Cannabis indica
cactaaatttcaaggccgaccctgtgtatatcggtcggtttggtcgggtcatggtgtatttttaccaattcaatataaatgtcgggttgtaaatatctaattgtaacccgtccaatgcaaaaatagaaaaaagtgtaacccgcccaatgattttcgtcagtttggtcgggttaacccgtttaaaccgatctttatttatttattttttattgctgttagtttttagtgttcaaataatttatttttaaaaaatatatagtatatgtctttctagattaaaatagttatagtttaaattaatgttaaaaaaacatatataaattgaataaacattaagtattaaacaatattttttattttctaaaaatacaatattaatagaataaaaaaaatatactcttatgtaaagtctaaattcttaatttcaacttcaatattcaatattcataccttgactttcatttaccgttttcacgggtggttcctctttgggagtttgtgaaggagcatttgaagtctctccaatttcaagattttgaacctcatctcctaaacctacaacatcatcatctaaatttttgcttgtaggcgggttagtctcatcaaaagcaacatgaatagattattcaacaacattaattcttttgttataaattctataagctttactatgtgttgaataccctataaaaattcaaacatcggattttgcatcaaattttctaaggttgtccttggtatttaaaatatagcatttgcatccaaaaactctaaaatagtcaatgttgggctttctcccttgccaaagctcacaaggggttttattcatgttgggcctaatgtaaacacgattcaaaatataacaagaagtaatgatggcctcggcccaaaaatattttggtaatgagattaataaaatagttcagtctacttttaaaccaagcacaggattactttcagcataattcaatcttgtccagtccagtccaatctatttcagtccaatgtagtgcaatcctgcgtaccatacgggtgctaaatacttaacagccgtataaatgtaaaaaagagaaagtattatgttaaaaaagaaaaacttgtcatcataagaaaaaaaagtaaaaaaaattgatttttagtcatcttttgtaaaaatccagaaacaaaagcctaaattttaaattatgggcttcaatggtagtgcataggtatgttgtgacgtgaccttggcccagtccattgggtgacattttagcccaatacaaagtttggactttcaactcacggacatttcttctagtccaatggaactccagaacagaaatctataggcaaaagtgtttgtggaaattgccgtacgcctcactttggtgccctagtccttcagttcttcactactatatatattcagtctaagcaaaaaccctaatatcaaaacacttcttaaacctctatacatcttcaacctactatcaccttttttaattttcttattgtttgatcatggtgtttttattatttttctctttaatgtgtttacttgtgcctttgcctatgatggttttaaatatactttgagattaatctctatgaaaaaaacttaaatctgaggcttttgaggctcttcctatcctcttgcagctttgtagatcgtttggttgataattcctaccgaggtaccaatttttaattcattatagttgtatttgtttgttaatttgatgattccttttctgggtttatatttcattcgttttgtgggttgtttcaagtgatgataaaatagacagggacatcagtactcatttcgaggatgttgacacgtctttgggaatctctctgatgattttttcttcccacaaagttcaaaagttttatgagattttgtttatttgcaattcaatttcaactaacatttatgttttatgcaagtgacgataaaatagacagggacatcagaactccatggagtgttgatgatttgtcgctgggaatctctctgatgcatactatcatgtttaatactatgaaaactttttcattttaattgaatttgttagctttttagttaatggttttgctttgccaatgatgcattttaatgcacgtattatcagaaataattatgatgatttgtaattgtcactaccgctgaggcttgaagctatatttacttgagaatattttttttttaattatatttgtaatgctgtaagtgtaaattggccttgtgattgttttaagaacggagatttgaatggtgattttgtggaagctttatacatagtataggctccaaagtcacctcatgtgattaaattccgctggatagtatatgaaggctttcattttaaatgcaaatgtttttcagtattgttcttttctggttcatttagttttagttgtcaattattttcttgtcaattgctttgttaggcagctaagttttcaactaagctcttatttatcaaattttgttgattatgaaagttgttttttttttgtggtgtgcttaaactgattgcacaagttttaaacatcaggttctgctgctgttgagttgctgtagaattatattagttactactttttgtaaactggtatggttacataattcctatctctttcaatattttcttagcgccacaatttatacgtagagcacaaacataatagcatcaaaatgagaacatgttttattgcgggacttactgtctt

SEQ ID NO: 301927 - DNA, 1224 bp, Cannabis indica
tattttgtaaaattttaaaaattcataaagacttagcacaccaaaaatagtataaattttgagaaattttgttttaaaagtttgttgtttgcgtgaattttttttattttataggtgaaaatatttaaatatatactgcttttttttattataattattttaaattttttaaaattttactaaaatatcttaaataattataatgtatataactataaaaagattaaactaaaaaaaatcttgataccgaaataaataaagattcatatgtatatcttttttaaattagaggatagattattatagaagcattcctagtgtacaacacaattcattattatgtaggttgttacaattatttaattcatacaaaaataattattaggcacaaaattaatgtgttaatatatggaaaatgccattaatatacctactatactgatgagtgtagtgtcaaaaaaaaaatgtttgtcatatatacataagggacctgtgcctacaaattcaattataatatatataaaataactctgatcaactctttaattttgctgcttgagtgtccctgctggtctggtctgctagttacatgtatttcagttttggaaggaagctatacatatataatatataatatttatatatgagcaatgtccaaaccttattctttaatttctttttttgccaggtaatattaattataaaattgatatcttctagatcaaataaataaatgcatgcactacaaattaaataatgtgtgcattatttgtatgccaattattattaaatattaatagtatttaatatttttttttataagtgacacactttttagtactacagtagaacctctatttattaatactctatccaagaataatctctaatttgttataaaaaaatcaagtcccgatttgggccagttataaataaaaataacctctaattataattagttatacattttctaagtcccgtattaacaaagtatacctctatataagaataattacatcttaataaaatacatatatgtattttgtaaatttatttatgtaaaatgaataattttattttaaattataatacatatatgaaattatatttactctaaaatatttctattatgatatagtattaatgattatttattgttattattattacattgatattttttggtttttttaattttttttctagtgtaactctatttagtta

SEQ ID NO: 301928 - DNA, 988 bp, Cannabis indica
actggagaaaaatcttcacaattaggttttgtcatcaaaccaaacacctgcatacataaaacttcaattgttataactcaattcttcattgatttcttgttaccataagaaaatgtgtcttaccactgtgactgaaaagaactactagttatggtactggtgatcatgaatgcattctcacgcaaaatgagtgtggcctgatctaggtaaactgcacgaataaaagtttagaatcattttgttttgtcttaggttgacaacagaagtactcacaccaaactctgttaagacagagtaaataacaaaaaaaaaataatctacctgattataggctagtgccatagaaacagcaccacgcataagacctgaccaccaaatggtaatctgcaacaaaaagagaattgcaaatcagattttaaatagttttggaatatgagaagccaaatgttagagacttatacctgttgtttgaagtccagtttgtcatctggagagtccttagttaagttggataagaaagagagggggaaaacaaaggctgctcttccaactagaattagtcccaaaagtattgaactcacaccaattgatgtcccaggactaaaagcaaagaaaaaacaaaaattaaccccgcgctaattgaagaacattgctataagatacagtagtgatacccaacaccactatatattgattggtgtatttgagtagcaagtctcgtagattctgttttaaatcaaggctaattatgatttttgcacctaaactttgacatgtatcaaatcataaatttcagtgattttttatgtactaaaccatgctccctagactttgatatataccaaatcatgctcctcgaactttgaaatatactaaatcatacccctaaattttcatccatgttagatttttttactaaattgaacaaaagtctttaaattcaacaatctcaatattagggggacattttttaacgaccttaaaagtt

SEQ ID NO: 301929 - DNA, 2572 bp, Cannabis indica
taacttgtttcggcatccagaaaaaaaatttagtctaattttttttcatattcatgtacgttatagctatttaagatatcctacaaaattttgaaaaattcggaataatttacaatatagaaaacaatgttcaaacagtctattttacacgtgtataaaataaaatagtcacgcgtgcaacacactgtttgaacataattttcggcgtgttaagtttttccaaatttcttaaaattttgcaggatgtcttaaataactatagcgtacatgaccatgagaaaaaatttgactagaaaattatttcggatgctaaaacacatagaagtgcatcaatatatctatgttaagggggtgcattgtagaattttccgttactattttatattttaaaatttaaatacacgattaaatggtttgaaattatcctggaaaccgttttgtatttgttctattattttttagttattttatatagatgtcttgtctctctatgcaaaagagtacatgagtaatctagcatagtctatatgcctttcgtcaacaagtttttttatgactattttttttttcttttcatatattttactcttttctattgctaatatttccattttctctctcatctcgtttgcaattaacgctatcatttctatcattcttttcaatgtttttttttgttgggcaattgtatagctgtaagtgaaaatttattcacaaataaaaagttaattttttttcttcatttatacgtttataaggtaattttatttgcaaacgtgtccatccgtgacaaacggtatctattgtttgaagctttacagtatcatttcctttggctccggcaagattttgaaaactattatcagagctactgatatttatctatcactcttgaaaaatctaaagaatcaaataatcaaccttctaacttattctttaattccatccaaatttgcaagaatttcaacaatttagaaaaaatttggatttattgaaagaaaaaaaaaagctttctagccctttaaatctcaacagtaattattaatttcaaattgaaggtttattatagtcattctattttttaattaaggtaatttcaacttaaaattcctttttattgatattatgggtaaatctgaatttgggtgctagattttgcttattcttcatcttgtttttagatttgagtatgattcacattgaatttgattgttttcacataatggattgtttttgttgttagagttatttgattgtctttacagattgttgttagagttgttgttggagttgctactaggatttcaattattctttttgtattttttatttttttttggaaaacttacaaaaatattaaaatttaagttaatttttataaaaatactgtcacacagaaagtttttaaaaatactgtgtttttatagaatatcaataaaacacaaaacagaacaactcaaaataacagtagaacaactaaaaaacaccagtagaacatcagtgaaaacttaacacagtatactgcagtatgaaacttataaaaaaatacaatttaaaagtaaaaaatactgcctatgagttgatgttaatgttactacttagttttttttttttgtaaaggactactatatagttattattactgtttctgcacatatcgctagaacatttgttgtattcgattattagttagttgctataagtgaaactgcaagaattgttaaaatgattgctcggttttattattaattctatttacacaagattattgaaagtatttttgtgggtgttgctaaaatggttgtagtattcaattctttgttattttttttacttagtgttgttggaaatattgctatcaaagttattatatttttttctttgtttccttgttctttgtacatgtggttgttgtagatgttgctaaaaaggttattttatatttgattattacataggtgtttttattgattgtgttacagaaccggttatattttaattataatcggtttgagttattgtgtgttatttatttttattcattatgttatagaaccgaatctatttttattatattcgagacattaatttgatccctattttttttaaaaaaaaaaattataaccggtttttatgaggtattatgtgttatgaagtattttattgtgaaactagttttgtctttaatttatatttcagtgtttcaagaactgatttcttctttgtttttaattgtaatcggtttgagttattgcgtgttacttgtttgtattcattatgttatggaaccgattctattttagttataattagtttgagttctttcgtgttatttgtttttatttattataacactgttatagaaccgattctattttaattataactggtttgagttattttatgttatttatatttatttattatgttacagaatcggttatatttactttgatgacttttctagcgacgttgactttttcgcgcggctgtcttttccggtgccggtgacttttccgggtgccggtgacttttctggcaaaacttattgttgttttacaaatatgggatt

SEQ ID NO: 301930 - DNA, 1454 bp, Cannabis indica
gggcataaaacccaacaggggtatcttcttcatcttccttcataatttgtcctgagtgagtgttgttcttgtcaaactccacctccatctgtgtgctctcatttgttttagtattgaccattttcttgttgagttttgagtgtatctttgtataccttattctcatcaaatagcacatctctactaataaatttcttttgatgattaccaggttctacattccacatcttgtaccccttgacaccttctggataacctataaagatacactttctagcccttggttctaacttatcttgtctaacatgagcataagctatgcaaccaaaaactctgagatgatcatacctgtcattatttcatatcttatcatccattggtgttttgaaaccaatagctgatgatggacttctgttgattaggtagcaagtagttgtgacagcttctgcccaaaaattctagtaaactagagtgaatcaacatgcatctaactctttacataatggtcctattcattctttcagctagaccattttgttggggtgtttttggtactatttagtgtctaggaataccaactttcttgcaatgttgattgaacatatccacacagaattctagtccattatcaattctcagttttttaatcttcttaccagtttgattcttaattaaagtttttcattctagaaatattctaaatgagtcgtccttattctttaagatataattccaaacatatctggtaaaatcatctataaatgacaaaaaatacctagctccacctctagattcaattcttgaagggccctataagtctgaatggatgtactccaaaatagcctttgacacatgaacatctttaccaaacttgactcttgtagattttccaagaacacattgctcacagaactccacctcttggatttgatcctatccaaagattcctttttttgagcacttacattcctccattacgtatgtgagaaagtcttctgtgccagattaaagttggattccttgtttgtttgattgccgcattcacctcatattttacagtgtgaccttgcaatagataagtccctatcggttcagcaacattgcacactcaagaatagaattatgagatgatacgcacacacgcacataatcgaacacagaatacaattctgaattgagtctaagctctgttattgaaaatggtaattgtgtcaatatatgacaacttacatgaactaagtcacatgtccttttatgtacaaggaacaaggacatcacaagaaactttaattaactataacagtgagttgtgagctgaccgtgactaatcaaacattgacacttaaatgtcatggcattagttaggcaaagcagttttataacaacattgcatattgtagttttttttttttttttattttttttagaaacggaattcattcattcaaacacac

SEQ ID NO: 301931 - DNA, 3064 bp, Cannabis indica
ccatttcttgagatgtctagttaatcctttataatttttgaatttttttatgcgggtgaggtcacttgtgttattctcgcactttcaccacactgaaaagatcttctatctttcagatgagagtcctatcagatagtcagatgcccgattttggaggtggggccttcgctgatgaactggagaagagcgatagctttatacccaccttgatctttgaggaggaggttcctgatgccagggctatgcgtcatggctcgctatctactgacgaaatagataggatggtttaggaactcgctgagccagtgacagttgagattcgcaatagtgaatctacggtgtgagctcatgagtatctcgactcattcgagccatgcccctgacatcgaagtcgaagaaatggaagaagacttcgagtttgctgactacgtgttagaggaggaatagggtgctgagggtagtgaaacaaactcagttgacgatgctcaactgaatgaacccttctcttgcgaggacccggtctcgtgagttaccaaatctgacctgaacacatttccatggttgaatttggtgcgaatagggaccatgcatccttcagcatctctaagaccccatctcccctttaccaaccctgcgatcattaccacgtaagacgtggttttttcaatccctattcttcgatgcaggtatctttaccctttcatcctttcgttaaagtcatcctcagacattatgatgtctctcccttctaactaaccccaaatagttatcgcatagttctaggattctatgcgatgtatatggagtatgtccaaggggagccgacgatggaggactttagctacttttacgatataaaaaatgtaggccacaacaatggcttctactgctttagtacatgggaaaattctaagattaatggggtagaaggcatgatttccaatatgggggattggaaatctaagtgattctacgcgtttaaagtaccaggagttaggactgacttcaattatcgacctagtacgtcagtatctaacacttagtatatttttattacctttcaaagtcgctaatgtttgtctttttttgatcgcatataggccaactcgacttgttttggaccctgttcacagagaaattgctgaagttctaggtaacttgcctattcaggatcgcgattggcgattgctatgtacgactgccaaatttcgagaacacaagcctattcctaagaacgccagccttcaacgagagccatatacaaggagccttctgagaaataaaaagaaagaatagacaagcgtctatgtaaacaaacatcaagaccaacatcaggtaatacattgagtatatacatgttattttacagtataaaaattatacttatcctattgctttgctcgcagaaatgatgttcctgaagcaggctccgattctcaaccgaaaacctaaggctagaactgcgacgacttctcctgttatccagtagaagaggaagagcaaggttttggtgactcccgtggctgactcctcgaagtaggtcaaaatcacccaagacaagaggaagaaggtcatgatcgaccctgctattagggctcacaacttcataactctctaggacaagttcgtgagtgatgtgtttgtgtccaaggtcaagggatttcctgctgaggaattgatgtcgcgctccgtagaactggcctcctagttcatgaccatgttctcgaaggctttcgtcacaggtactaaggagctcaatctcttgaggaagcagaacacccttctacaggagaatatgaggcaattgaagtttgaagtgacttcaaaggagaaagacgtcgaagacctcaggaaggccaaggagtaggaagaggagaaggctaagcaagcagaggaaaaagccaagctctcagagttgagagttgaggaatggactcgtgatcgcgatgagtatgggaagagatagtacaatcagctgtttctaactacatccacataactttgtccaaattgtcaatttttacttcatagtccttggggcggaagcagctaaaatagccgaggctttttcgtgctatgtcgcctacccaaactcaaggatgtgggagaaatcttttccctgaagaggccaagaacgcggatacagaggaagtcactgatggtgctgcaagcaaggtcgcaaatgatcctaaaactccagctccttaacttttttatgttcttttttataattgtcaaactttaacttttttttagttagcagtacatgggtactcgagttttggacttcagacaaattttaattacttatctaacactatatcctttcgaggatatttacttttgcatatttattaagcggcacatgggtactcgcataatctaaactgctattttgatgatacttctattcgcaataaatttatcattacagcttggtgtaataacttagaatgtaaaacttgcgaagaagataaaaatttatgaaaacttcaaaaatttcaatataataatcaatagtacaatggtaggttataccccctatacttagtaaatttatcaaaataaattgactaagtaaaaaaacaatgcgagtaatattgatagtaatactttaaactctctccattccaagctctcttgatcactgttccatcgaggtctgataatcggtaagttgcactaccgattttttcagcgattaggtatggtccttcttagttatccccaaaaactccatgtgctgagttttgtgtgtttggcatgacccttcacaaaactaaatcacctactcccagccttcgttctttgaccttcgagttaaaataacgagttgttcactgctgataggctgcatttttcaaatgagcctgatcgtgcttttcttctagaagatcgacctgtaacaactgattttctgtattactattgatgttgaaaacatatctccttagagatcctgctcccacttctactggcaccatggctttgcacccataagagagcgagaagggggtttcaacagtcgtggatcgaggagttgtattatacgaccatagaactt

SEQ ID NO: 301932 - DNA, 1244 bp, Cannabis indica
ataagtgaatgatgtaaggtgtgattgatctaagtcatcaatcaatgacgtgactgcatgcatgtaattgatgtgtaagtggtataattgtaataaaagaaagaggaaaggtaaaaataatgatgtaagcgtgtagggtttttttgtaataaattgaataaattggatttttgatgtaaaaatttcttaaatatttccaagggttagttttggaattattaaaacttatagctattctatgtggttatatatagagtcattctatattactataagtatgcaaaataattaattataaattcccaaaaaataacatttgaggttacaaattcaaatgaattattgtgttctaggctctagctagcacatataaattaaaaactattaatatatattaaattatacataaataaattaatgatatatatattttaaaatgaaactatataggagagccgaccaagaaaaagagggtatgctacatttcccaaattagaaaacccaatacaataaaattaaattaaaatattaattaatttattgtgttctttagtgcatcacaatttaggtcaagcaacttattaactcagagttcaatcaattggcatagttattgttaccaaaaattaatcaaccaaaaatattgcagaacaactgtaccaatttttttgtactataattcatttatacatatatataaacataactatgttcaactactatatattaataagttcaaaatcattattacaaaaaactttacctttatatgtaaatattaactaatttgaggtctataccagttttaactgtgccaatggatttgaggaatattattttacaaaactgtaacttttattacttagctatataggtagtacctattttaatatatgtataattatgtattatatttcttgaaatgggtaagaagctgaatatatatatgaacataagaaagttgggtttggtttacaaaattaggaaaataaaatttggttttgatcaaaacccttatatgtatacatgcatatgtagaaatgttatttatatacatgtaccaattttgattatacttaaacaattaatatatatattgataatatatagtttattaattactttcttacaaatatatagttcattgatgctaagtcaatatatatttacaaaaatatcaatattcctcattacacattttttttttaagaaaagcgaagcaatatatattaatgatgaaaaca

SEQ ID NO: 301933 - DNA, 2703 bp, Cannabis indica
ccaccaaaaatctaaaaataccgatccaaaaagtagagcaaacgaaccacttgtgatcagggatagtcatgagccaaaaaaagaatcacttatgatcgagttgtccaagatggtgagcatataaaataagcaccatcttggggggatgttagagagtcccacattgtcaatgggtgaaaagataatagaatatataagaggaatgagatactcctcctattgccaattggttttgagatggaacctcattcactttatttccaaattctaacaactatatatcatatttgattttctttttcatgttataaagttgaatagtattagttttcaaaaataattaaatagtatttttcagccgaacattagcattgtgaagaatattataactaattgttaattacttgagtgaccgtttttttttataaagcttgttactcttttcctagttgtcaatgactagagttagttatctttcttaattctctatttctcattacatttgcctttatattaattgttgttaactgtgatgaaaataaccacaattcattcaattcccttccttccttttctctttttcttcttctgttacttaaccaattatgtatcagaacagggtgtcaatgacgacctctgcaatgcttcttcaagcttaacaattgttctacaatcgtatttcttcctccactatgactatgccagagcaactatattctttttggcagtctcaagtccttcccgctactagagctcatgatattgaagatattctcctccgacgacatccacgaccagctccacacgtgcttgaatcaccaggttcctcaaatatgctacataatactgatttctctttggatgcgtcttggtcaatttcttctctctcactcttgactaatgtcatttatctctaaaccaatgattagtcatgtggttaacaatgaatcatcagctgaaatctaaaaaacattggattagtttttcaacactcgatccaaggcgataatgattcactaattgatgtctctgctccagaacacaaagaaagacctctttctattgatcaatacatgttaatgatgaagagctatgttgatggtcttcgagctacgaggaatcctatatctgaagaaacgttgattctttatgttcttgttggtgctgacagtgagaatgagtccattgttgttcatctgacatcaaaagatcacacgagtcttcaagaatttcagtttatgatccaaaatcacgggatgcatcttgaactcacaaaattcacaacctgattgtttctcaatgccctagctaccaatcttgctggagttagaaatccccctccttttggttcttctcagactggtcaatcatctaactatgagccaccacaaaattcttagtgtcgtaggggaagagggttcagttccaatcgaggttatggatacttaactagttcatgtttgatttttcaactgtgtagtaaactaagttacttagtataaaaatgttatcagggttttgatgttagtttccatagtgtcaaagactcagtttcccaccctcctgatccatcaccacattaatttgtggtctcctcctcctctatgcctaatgatgcttagtaactagacaattggtgcctcagaccatgttaagtaagccttacagttaccaaagtggagacatgttatggatgatgaataccaagtgttatacaaaatattgggcggatgatgtggcatgttcctttcggtgacacgtatcctcacccagagacatgggtggataaaagagcttcatgagtcaaccacccaagatgtattcaagtcggtagaaataacagacatgctaagagaaactagccgcacatcatcaacacgagcaaagctggtatgagggaactcgtatgaaccgcatacatgccagttataggaaaaatgtatgacataaatacaattaataacagtgtttatttaaatatgtaattaatacccagtcaaaagagaattccaattctatttcctttattttaggaagatgagttagtttgataaattagtgggatgatagcttgaggggattaaatcccagtttgaacatcctctataaatagtgaatcagttctaccaaaaagaaatctgaaatcattctttcaagtgagcctagacgctgctcaatttcttgtaaagctttcgagagggaacaatactttttgcgtctctactcataagttaaatacaataataaggggagtaaccagaacaatgtggttgaacctctataacacattgtgtccttgattttactgcatgtcatttgtatatttctctaatcttataaacttcttgtcactttaagtactcagcatcattgacaaaaagtgaggtcattattttggtactttcattagagttgaggactcaagaacacagtttgattagtatatttagtgaagagagcaaatggttgtagaaactcgaagaacttaagccattgatcttttagatccaatggcaactattccaaatgctcacaatcctgccaattcaagaaaccctcccgtggttgatccaagcaccaaaaacactggtactaatggtgttactgttggaaattattttaccaggatcttagatctactcacaagtatgttgattaacaccgtaaatatgaacttcctaaaacgattatgaaataaacaga

SEQ ID NO: 301934 - DNA, 2798 bp, Cannabis indica
tatatatatatatatatgtcccaaggagaattatcagtactactaatgggtactgatcagagcagtactttcttccagtgggatgaaaacaatccatggctattaccaaaccccttctccaacttagaaaactattcattgcctgccgccgacgcaggcaatgaatccgctgaacaaaataacaagatggctgcggccgccacagcctcaaactctgatggcggtggcggcctccagcaaggtgtggcccccgaaccgaatggattcgggttagttaataataataagagaaatcgaggtggttgtaatgtaggtgtttgtaataagaaagggaaaaggatcatgagtagtacgactactactgaggatgatgatcaaccagctggtgtgatgatcaagaatgaaggcaaccgtggcggtggcagtggcggtggcggtggcggtgattccgaccatgaaatacatatttggacggagagagagaggaggaagaagatgaggaacatgtttgctaatcttcatgctttgcttcctcaactcccttctaaggtatattattattattaatattattattaattactttatatttattacatatatataaataccttttatgatttattatataaatatataatatgggtttttgtttgtctttaatatcagaaaacaagcaaactagaatgcctttttcatctttatgaatatgatgatttgaaaatagagagttataattaattattataagttttttctatttattacgctttagttttgttttcatgggtaccgaccatactggttttagtggcttttcattttttgttttttaactttcttttcatcgtatatgatataaatacataaaggccacatgtttttattgaatctgtgcctttctttagaccaagctataggtagcctcgatattaattaagattaattattgtaaaattattgcaacgatgagattatttcttgttacaaaaattattattataatcatagctaggtgctaattaagtttcaatgatagacacaaaatttgtacacaaatagtactgtaattattctttaattaccattagcattaattatatatatatatacctattttataatttgtatacacaaatatcacttctctttatatacatatattttatatataaaaggaaagaggaaaggctttaaacattcgtatggcaaattcaaggtcttgactgtttattcaaacaaaaattttaaaaacatattgactgttgacccatttctagtcacggttctatatatatatatatgtaaacacccacccatatttcaccaaaaattatattaattatatatatatataatatgtgttgaaaataggatgaatttttagaattaaaatttaggttgagttgcgaattaggtcgttctttaagatttttgcggcactgtttagaactgggcaagcaggctatcaatcacatcgtccctcatgataaaacaacttagttatcgaaactctattgcacgataaaagacatatctagcgcaaacgttcgcaacacaaccgagaattgttgcaatattgaagaacaaaaataaatctagctgaaatttattactatcattacacggagaaattatatattacaatgcttgtgatttatttaatatatattacagccatatttaattctcggttatattatatattagctttattaataataaccttgaaaataattatagtaaaatcatctgatttatatatacatattatttatgcaggcagacaaatccaccattgttgatgaagcagtgaactacattcgaaaccttcaacaaactcttgataagctagaaaagcaaaagctagaaaaggttcaagctacccataatacttttcatgatcaaccaccctcatcatcatcatcaatcatgaatattctcaataataataataacaatccacaactaccaaagcttgtgtatttacctgctaacaacaacaacaacaacaacaaccctagtagtaacaataataatgtagtgttccacacctggatttctccgaatgtggtactcaacttgtgcggtgaagaagctcatatcaatgtctgttctcctaggaaggctggtctcttcacttccatttgccatgttttggacaagtataagatttccattatttctgctcagatttcatcccattctattcgaaacatgtttatgattcatgcacgtgtaagtaataatataattcaatatatatttcctttattttattaaattattattccaatgaattaatatttattatttgtatgtatataacaggttagtggagtgggttcagatgagttctttgaggctttcaattctgtggaagaattatacaagcaagctgtttcagagatagccttgtgggtgccttctaattaattaattggttaattatatatatatatatgttataattaatcagattattattattatgagacttttgcttatttaaattgctccagaattttggttatccatttacttatttaaaggatatatggaacttaagggtatgtaaatatatttaatttatttcagaaaaattcagcctagtagtataaaatcttcatcatctataaaaatatatcatattttgcattttcttatattataattaagttgttgatttcttttccatatgcatgctgcaacttttttgtgtggcacttcttaataaataattaattttattacatttaattacttattatattagtttttttaaaacaaaaaaactt

SEQ ID NO: 301935 - DNA, 3317 bp, Cannabis indica
gattttatgtttgtcttaatctggacagttatgggaaagtaaaaatatattcctgttgagggaggtttcaaaagttgtagtcccttttttttggtttgtcttcaagctttgaaatcttcagctccaatgcatgtgtaatgtcagttgaagaatgaggcccattatgattcttttagttatatacaagtagaaaagaaaataatatatattatatacaagaaaaaaaaaaaaagtagacccatcaatgagagagggagagagaaagaggcaaagaagtttttgtataacgtagcataatacgccagccttttccagccaatacccatttgtgactttgtctgatttctttcatatttagtcctttcaactaaatcttgattttgattagagctttcaatcttctttgcctatgttttgtctctccaaaactaattgctctttactttggggggttgttttaatttttggaaacagatggtaacaacagttaacaattgcacataaattttgggtttgaaacaagaagacaggacagcaggagcgaatcgaagtattcagaagctaaagttgaagcatttgcctaatggttttgtgatgttgtccaaatatatgaaggtagaagttccttttttttgtatcagtttttactatgctgctgctgtgcctgcattttgaattttctagcagacaagcctgacaaatcatcaccagaaaaggtctgtcttaagctgttataatgaaggattttccttcttgttttggtgaaaatggtattcaagttgctgattcttcatcttcgagtactagtaaaaatgctcaaaacttggttacctgtgtgtaccagtgcaaattacgcggtcgtttatgcttgattaccgtaacatggacgaagaatctgatgggtcaaggccttagcattgggattgatgattcagccaaccaatgcctctgtaaggttgatataaagccttggttgttctccaagagaaaagggtctaaaaacttggaggtggattcaagcaaaattgagatgtattgggacttggctaatgccaaatttggtgctggccctgaaccattaggagggttttacttagctatcatattcaatggggaaacgattctacttcttggagacatgaaaagagaggcatatagaaagattgagtctgaaccagggcgctgtaatgccattcttattgccaagagagaacacttatttgggaagaaattctatgttgccaaggctcagtttattgataagggtcagacacatgatgttggtattgagtgtgacactgttgggctcagtgatcctagtcttgtgatacgcattgatagtaagcctgttatgcaggtgaagaggctgaaatggaagttcaggggaaactacaccattttggttgatgggttaccagttgaagtcttttgggatgttcacaattggctctttggcaatgccatgggaaatgcagtttttatgttccaaacttctctctcagctgagaagctttggtctacccattctgtttacaatccttctctgctctctcgggcttgttctcagcaaatgaaagaatctcaatcacaaggtctgggtttctctctagtattgtatgcttggaagaatgaatagagttgtattttttcagttttgagtgttgatgatattggaacaatatgctaatgttgatttgattaatatatgtgatccatacagtaaattctagtaaaaaaaagaaagaaagaaagaagacttggttggttgttctctgctttttttttctttctttttaagataatatgcatagcatgatgaattgtatactcttatcactcttggtttgtgtgtgtgtatgttttttagtctttcatcaactgcatctttacataacctgttcctagatattaatacagttccaactgaaacctaagaaactagagaaaatgatcctcagtttacttattctgggcattgtttatttttggcatgaactagactagagatctttgactcattaaacttggaagttagcttctagaactatatccagaagccatggcataggttctgtgaccattttcttctgtttactttgatttatacaaatcttgtacttggtactttccatgaaatttcttatctctgtcatttgtttatttctggggttggtcatacaatataaaatggactgtaatttgcatgtgctagtatgatgaagtatggaatttgaaagtacaatgatagaaaacacagatgacattttttttctgacgaagatatgataatgatactcctctcatatgtttatgcagatttgtttatacatttggctcattttcttgtattattgtaagagtacaaaaatattaaataaaatgtcctttaaactttttgtaacatcttcgataggcatatatcaacatcagtttgcacattattgagccatttacacacccgcatttattgttgagagctttagtctattgctgaaattaggttaagaagcacatggtatgattggatttttatagtttttatgtgttaaattacgaaattagaatgtatttgtaagaaaattaatctcccactaaattgatcattatagctcgaggtggtgagatggtgatttctaattgagaaatttgagttaatttcatcttagttattctttatcattttttcttttgagggggttcattattttttgtttccaaagtataaactcatttgttttttcattattattatttaatacgatctaattgtatgttgttatgtctgtattcctaaataggacatttttttttttgatcaacaacaaacttctgtcaaaaaaagtagaaactacaaacagtactacatagtgttcatacaatttatttttgtcaattgtgtttgtatgtattgtttctccatggaatagttgaagaagaggggcgtggtgtgtttcgttataaacatggtaaagtctaggagactcctcttgcttctgtttgataattcatgtgttctaacttctaagaagaagaggccaaattgtgctctactggcgaaaccattatggctttgtatctttctttgaatgtcgacattcaatctaatcagttttcgttttgttcttttgcattctctatcctattcaattattttatgggtcatattcatataagatggtgctcatgcaaatttatgttaaattaagccgtactttctgtgtgaaccaaatttttgcgttaaaaaatgtatatacagtataacctctatccaagattacacttgggaccaagaaaataatattctaattgagaggtta

SEQ ID NO: 301936 - DNA, 5453 bp, Cannabis indica
attattattatttttattttatttcattcagaaaactattttaaatgtgttaaatttgtgttaaacgacttgtatcgtgtttgactcatttttattttatgttaaattgtgtcgacccacatgtaatttttccgattttaatccatgaaatttttatttggattggtgtagcttgtcccgttttatcactcttaaatatatagtatggtgtggttgggtaaccgtagtttgtccaaattgcagtcgtgtgagcgtacccaatataaatagtattattgaattaagggcaaaaatatcattacacgtgtgtacacttatcttttacgatgaaaacaaaactttgtaacttaaattgttaagggctgacgtgtgaaagttcaaactttcaatagaaaggtcataagaagagtactaatagatctaaatccactaattttttatcaatatcttttaaattattgtttcttattatgtttttttagataaattattgtttcttattcgttcattagtaatttgtaacatctcttttttttaaaaaaagtatgtaacatctcctattaattaatatgtataaattttggtatatttattaatattagaagaacgtgtgttgcttgatacattgcgtggcttgtctccatatttcattaatacacgaatcttgatttttgagattccaacccctcgttagtttctttttatttatttgttaacacaatttcaacgttaatcagtttaattaaatcttcttgcaaaaaaacaaaaaagttttttagttgaaaaaaataaaaataaaattaaaattaaaggtaagaaaaagcttaatggtgctgaggtgagtaattgcaaaaacgaaatatgagtctcccttccaaaaataaataaatagaacttaagatgggtcccacattaacaattaacaaagggaggagcataaatgttggtacgtacaagacaaagctacaaaaatgagagaaaaacatgcataagcatactgatcaagaaaaaagagtttagtgtaaaggcatatatatttacgggttgtaatagagaagagggtaaagtagctagcaaagaagaaagaagagaaatatagaatggcaattggcaaacaatcaagtagctcaaagaaagtgccaaaataaccctcttaagcagtcaccatcaatcaaatgaggtcacaaagcttcctttttcaggattttatctgaatcaaatgctcttacatctttctcctaaccaacaactagaaaagaaaccggattaagaagaacatcaacaactgaaaaagctgtttatatacacatttcataacagaaagaaaaaaaaaaacaacctatgtataaataacaagttttacatacattcaatggtagagaatccatacacaaagaggagcaagttcctaacccatttgaaagtggcaaagggggaaaaatttttggggggaactgagagaagtgtttttgtccaccttcttctttctttcttctttcttccaaagaatttatggagaaaaaaaaaattgggggttccaacatgttttcttccttgtttgttctctcttttttactgcttgtagcttacttctgagccttcttttatgctcatctctaccatttcaactgagccaaaacctccatcatcagtggcaatggtggattgagaatcaatccctgaacctgcttggatttccttgaacattgccattacctgaatcattgttggacgccgccatggccgatcatctaagcatgcactggctactttcaagtgttgtaagagctcaatctcgaggtttggatcttccttcatgagttctggatcgaaaacatcactgatcttcaatttagcgtgctgttttacccaccccacaagattgttatcaccaaagtcaatcgaattcgtaggctgcttccctgtaagtagctcgagcaaaaccacaccataactatagacatcgccttttgtagaacatctgaaactctgatagtactctggagggacataacctggtgtcccggccagagtgctgacactcaaatgggtgtccattgcactcattagccttgccattccgaaatcagagactcgagcttccaagttctcatcaagaagaacattgctcgatttcatatcacgatgtataatgtgagggatgcaattgtggtgaagaaaagccagtcctctggcagccccaatggcgatcttcctccttgcagaccaactcaacttgatcccagatttctttgggtcgtgcaaaacatcatctaagcttccaaacttcatatactcgtaaaccaaaagcctttcttcacctactttacaatacccaagtaaaggaaccagattccggtgcttaattttcccaattgtttccatttcagctgtaaattctctatcaccttgtccgcttatatgaatcagcttcttgatggctacagtgcttccatcttttagctgggccttgtacacatccccaaaaccaccttttcctatcaagctatcattgtggaagccattggtggcctcaaggagatcggcaaaagtgagttttctcagtggcttatcaaacgttgcaaggtgaatgctcaaggcttcgcgggtaccagttaggttccagctcacatgaccagggcccgaatgtgatctactatcaatataaacgtcaagacttgattccttcttcttcctccttttcttggtttcaatggcaactatgataaaaccaagtatacagaagagcgaaatcagaaggcccattgccacacttccggccaaagacgccagccggtgagacttcttccggtgagaatttgcaccattcccagagtcagcaccacaaagaggaagagggtagccacaaagtcccgaattgttcacgaatctgtatggtgggaaggtctcaaactgacccgactcgggaatactaccggttaagaagttgttggagagatcaatctccatcaacatagagagctgagtcaaagtctgaggaatcttcccatcaagccggttgtttgacagatcgagaatgttaagacttgtggagcttcccagctcttcagggatacccccggagagattattatggcccaaattcaagatcaaaagataccgcattttccccatttccttgggaatacttccagataacatattatgagaaaggtcaaagaaaatcatggacccgtcatggttaaatgttggctggatactacctctgtatactcgtgtgaagttgcaggggtttctggttgaaattctgttcagttgctccggtctaattcctgcaaactcgagcaagtttccagctccatggcactccttgcttccatcgttcttgatataaacataagtcttggacgtcatgaagttaacggctatgttcccagactgtttgaaaagcgccggaggaattgatccattcaaaaggttagtattgagatccaaccatatcaggctcttacagtccccaagctctggcggaatgcttccatagaaagagttgttgctcagcttaagtatagagagacttggaagccggcccagtcctgccggaatctcgccactcaaccggttattcgacaaagaaatccagttcagattagagcagttgcttaaacccgaaggaataggcccggtgagttcgttaaagtccagaatcagattctccaaagactgcattttggaaagctcttgtgggatttcaccattaagttgattcaaccagatgatcacgtctctgagcttggtcaaggacccgaagcttggtgggattttgccggtcaaataattgaagctcaagtctagagaaacaaggttagaacagttacttaaagtttctggaatagtacccgtaataaggttgttctgaaggctaagctcctttaaactgttcccaagtccctcacagagaccaactggaatatacccagaaaaattgttggagctcagatccaaggattccaagctcgggaggttcgacagtgaatctggcagcttcccgaaaaatctgttgtgagaaagagccaacgacttcaacttcggaagcttcatgaaaatggccatgggcaactcaccggagaagttgttcttcgaaacgtcgaacgattcaagagacgagcaagaggttagtgagtcagggatcatcccaacaagctcgttaactgacaaatcgagctcgagtaaagtcgagcaggaatcaaacaggctctccggaatcccgccactgaacttgtgtcagcaagtaagaggaactgcaagttttccatcgggacattcggaacaggaccttcgaacaagttgatggtgaggttcaagaaggcaaggttccgacaactggagagagctcgtgcgacgtcgccggaaaacctgttgccggagatgtcgaggtgtttcagagccaaacaatcgccaaaggagggaataccaagtgagatattgtttgacgaaaggtctaaatgctctaatttcttacaaccggagaagctcatctcaccgtcgtcggagccggtgattttgttccccttgagagacaaatactccatctcattacacccaccacgagataagatccaagagacgacgttggaccctgaaatcttattccacgaaagatccaaagtctgaaatccaaacttgaggccggccgagcctttcgccgaaaattcaagcgagttggaagatagattaagaaccttcaagctcgagcaagaacccaagtaagaaatatccgaaatgggtccatacaagctgttctgagatagatctacggaggtgagtagagagctacacttggatccgtaagggaagggagtaatggagccggtgaggttggctgatttcagagtcagggactgaagaccatcgaggctcatgagaaaggagtaaacggcgcttagattcgtgctcaagtagacgaaagttaaatctatggcggatactctggtcccacgacaagtgacgccattgaaggtacatgggtcctggttatgtagccagttggagaggacggtttggttggggagagaagctttgaagctcaacagcttctggatatcactaaaaccggcggaggaggaggccaccgccaacggtgactggggagataacaaggtgatgatggcgacaaggagagagagtagcgaaatggcagtagaagagtggggtttcattgtttttctcttctttcttattttagtgtttgtcgcttctctctcgattgagattagattgaagtaaagtagaaggtttcggtttagggccggatgctttctgccattagagaaggacagagggaaaaagctttggcttctgtatagaaggagagagagagagagaaggggagagagagagagagagagagagagagagagtacgaaagtcggagtaagaagagtgaagtaggtattatacgaagagagagagagagagagagaggacgtacg

SEQ ID NO: 301937 - DNA, 2932 bp, Cannabis indica
gtattaaaaaatttaaataattatttcttatagaagtttttatttaaatttaaattagacgccgtactttataataaatttattagatatattgttttaaaaaattgtaattgaattgtattaaatttaaaagtaaaagagacatggcatattactagctaatatattcacatattgtatcttcctctgcaactttagggttctgtacccccacaggtgaattttatatgtgattaaatgtttgttccttgtgagtttcactgccattattgtaattcacggtagcaattagagtttaacgtgttgtggtgctaaatatccatttaatcgaatagtacaattattgtactaaatatctttcttttgctccgcattcttatcccggggagaaagtggtatgttacctttctatttaaatttgccaatctattgtttgctttttctcatgaacactctcttgatgagcttctgcgagtctggttgggctgtctcttgatgggaatggagcaagcctattcccatatgatatgttaacagtcgaggcccctgtgacaacactgtcaggcgttaccggatcataccatcctagctgtagatgttgaccttagttgcagcagcccttgtcagcctataatattctgttgtctgcagtgcagtatcctctagaacctgttattgtcagttgtaataaatcatgcttgttggataaaaaatatgaaccggatcaactagaacctgttattgtaaattgtaacaaatcatgcttgtcgggtaaaaaaaatataaacaaggatcatttttgtatttgttggtgtaggtggtgattccatttcatcagcttaaggcagttaatccatctgcaagcaaagtcaaccctgctgaaaaatacatacaggttatatctattgacaaccatgagttttggtttatgggttttgtacactatgacagtgctgtgaaaaatcttagaggactgttgcaacctggcagcttgtgagaaacattggaccaaacttgctatgtcatggaagaaagcactgcatgttagttgagctggcttgactttgtggttttggtggaattgtatggaacaattgctttagtgttgtgttttgttcttgtgctgccgttgtttttgtctggatttattcttatattcttttactataatatttgggggtatagggaagtaacatttgtattagttgtaaatgacattggtaatggttgtatacatttcatttgtacttggtaatgcagatttgtattgttatagggtaattactaattggcggctataatttaaaattctaataatttaagaacttaaacatttattatggtaaaaatagttaaatcatggtttattgtaatagtaattgtaatggaatcatgattattattataatgtttaagtttactctcaaaagtgatgtaaggaaattagaatgtaatgataattatattatataagaaaatattatattaaaaagttatgtaatgatgattatattacaagagatcaaataaagtaaaattaaaatgacttgttctctcttgttatataaatttaaaaataaattaggaacaactttgttaatttaccacttattataataattaatttttattatgattcttattccattatattattattatcattactattatattatattaaatcaaacttcaccttaagtcgttgccattcaaatatttaacactgttataaatttttggatatccaaagcacacaaattagttatcactataaatacttaattgtatttctctttaattacattgatttagccttttattcttttggtcttatttttgtattaaccagttctctcttcatctactttctcttgattttagtatattcttaatagttttataataggataaatactcattggtaacctatatttaattgaaatacaaacttagtacctcatatttttaataatgatgattgggtaccttataatttaaaatagtacccatttggtacccctaaacttagatttggttaaccaattttttggtatggactaaagtgtccttatttacatgtaattaatataattaagcaattataattaatttaggtaaaatattttacgtgttaattctattttcggtatctttaatttgacaaaaatattttatactttaaaattaatttcggctatagtatttatttggttttcatattttgtgtattatactcttatatttttgtattaattaatttatatttggaagaaaaattgtctaacttttctatttataggaaataaggtataaatggtaagtttgatgactcatcctttctctattatctagccgtgttaatttgatcttgtgtgagttttttaatatgtttaatcaaatttcttgtggagaaaaccgaagcaagattttccttttctataaaaggataatcgcagttactgctcacatttctataggtataggggctgattgaagatctattttagggaattatctagtgagctgtggtcttgttcagaccgtgtgtaagctgtcaataaggtgtatattgattataaatacaccttatagcagctaggtcttgtatctcgttcatgcactttgaattgtattcatatcttaagaaaatagtgtctttgttttgtaaagaagaaagtgttcgtctcttactctgtttatatgtattttgtattatcttaagtttgtattcaagtctgcaaaagaagaagaacaatagtgctactttgaggagaaggttttacaagctttcgtgagattactatttaagtcttgtctcgagaggaagcaagcactctttaaggagattgaagggagttcgagcacttgaagtttcagcaagattcgattagaatgtggaacccatcaagcttgcggcatacaataagag

SEQ ID NO: 301938 - DNA, 2467 bp, Cannabis indica
ccctcaaaccaaaaaaagtctattttgtagtagtgattagtccaaaaagagtatctttttcgaagtggagtattggaagaatttaacacttagacataatctttatgtgatgcatatcgaagaaagtgtatgtgacaatgtattggggactctcttgagtattgaggggaaatctaaagatatgtacaaagcaagacttgatttggctaatttgaatattcattctgaattatgaatatacgaaggtaaaatagggatatggaagaagctgtctacaagttacacgcttagtgttaatgagcatcgtgaattttgtagatttattaagtttgtaaggtttctagatagttttgctttaaatttggagaaaatgtgagtaaagatcacgagggcaagatatttggcctcaaatctcatgattgtcattactggcaatatttgatgcctaccggtattcaaaagtatttgaagaaagatgttcaggatacgatcattgagttgtgtgtattcttcaagcaactatgttgatgaactttgaatgtcatctcattagtatgctgacaaatattgtaaaaatattgtgtgatgtttatgcttgcatttacctaaggaagaaattcttggtagactagtgcactataagtggatgtacccaatccaacgatgcatgtctatgtacaaaaattatgtcagaaatcggtctcgtccgaaaggttcaattgttgaggcatatattgttagtgaggcattaactcactgctctaggtacttccaaggaattagaaccaaatttcataaagcataacggaatgatgatgatgacatctcaaacaagctcaatcgacagttctctatatttaagcacaatggatgacatatcgataaaaaaaactattgacagactactgatgaatcgaaccgaagtgcgaagtggtatattttgaatatttgtgtcgaaattgaacattatatcaagtaagacaggctatcaaactttactttataataattttaattcgttgacgtaatttcatcctaatcattaattaatttttctgtagtgagcatatgaacgagataaggtgtggtatacctaatatggaagaaaggcaaaaaaatgagcttcttgaatgggtcgaaaattgagtaagctaggttaaatttagagtgaatcatttatttctagttatatttaataaagctgacataatatatttgttcattactagattatttcgacacactagtctagacaaaatacttgatgagttgtatgctattgctaacaaagaaaatgacatattcttcttttattctggatgcattgtgaatggtataaaatttatatagttgagaaaaaagataaaagtcataaaatatagagtagcagtgttatggtacctatgaaaatggtgttaatttttatggcgtactagaataagtaattaaattgacttatttgaaggattgtagagtattatttttcaagtgtaaatggcatgaaacaaacactactaggagtaggattgaaaaatgcccttatttttactagtatttgtgttaatcaccaatggtactaaaataaaccattcatccttgcatctcgggtaaaattggtttactacgctaaggatatgaagaatgaagatgatggggagcttgtagacaattacactccacataatattgggagatttttagatagagatgatgatgacatttcaatagttcaagatggcaagtcatccagaattcaattagtagtacaactttagaatcgaataatttttgaatatattcgagaagatgtcgagtcagttgaaatttccaacattcatgatataatgttagatattagtaatagtcgaagtttagatgattttgtggttaatgatgaaaactttaaagataagggcaaataatgacgataataataatgaataatttatagacaaagataacgatataaatgacaattgtgtttacgatgatgatgtcgtcttataaatttcagaagttttaatattaagatttagtattattaattaatagtttattttcaatcttaataataataataataattgttgtattttattaatgatatttctaatcttaaaattgcattatttttctagcatgtctactcaaagctctttggtacgtttggcaaggaagaacaaggaaaaaagaaagggggtttggcaggcctataaaggcacatgtgttgaagtcatctgtctcatcttttccactagaagatgttgctaccattttcgcagaagatgttactgtcgttattgaccctactatcatgtttgatcctccttaaggacatcctatgaaaactcgagcaaaggctagcatctttaagcctcgagtcttcctgggccaagctttatggaatcctattatatcttaatatttgtgccctaaataaaactctattttaatgtaatcttttcta

SEQ ID NO: 301939 - DNA, 3574 bp, Cannabis indica
gaatgccacaactctcgaaagactaacgaaattttgaatattgaaagcagaataagaaatttcacgcacaagagaagagcataacagtccagagagagaagcaaaaggtttgcgcggtatcattttttatattaagtttttccaaacaaataataaagtctcctcaaagatgtgtatgagaatctcaattaatccgttagtgtgaaaatattaaacagaaaaagattcacagaacaaaaacaaaataaacaaataaaaattgctgggttgaatttatgcacagaaataagactaattatacatacttctttcccagcagtagtaagatatgaagcgttggtgggttgaggatagactccttgactgttaaataaaccaggatcaacaccctaaacaacacaaaatttggattcagaaaaaaaaactaagaaaacatgttgagttgctataaaattgagaaaaatcaagcaacaagaaggaaaaacaaaagtgtggtactagccttatccttgagttttaatggacctgagctcgtattgcaatctgcatcagagaacctctggtttccaatatcctggacatagttttttatctctaaggtggataaggatgagtgctgatgttgtttcacatagatcatatctttcccgccaatagttacagatattataacatgtgtcccgaagttttctatgaagcttaataaagaggaaaaagaaaagcaatcagaaagggatcaggaatatcttatcgtcacatttcacctaacattataaaatgcataccttgctaaggctgctgggtcccaattgcttggtacagctcgcttgacattttctttcaatacaagtggggacataagctgaactttggaaagtggaatgtagaatccatcaatagaaagggtctttgtggatgcagcgtcaatatgcctcgtgccagtgaaattgaatgaagcattaaaattaccgagaggaaaggccccagaaagattagccttttgattgaaatattccaccatctgcaacattcaacatgagaagtatgatacttgaacaatattacttcaaaacactgatagtttttcattgcacatctcataaatcttaggtttgagcaaaatatataaatcaaatatttgtttcaataagctttaacattttccaaacaataaacactaatgcacactgcttccacctaactttaaagtaaaggtgaatatagccaaacataagaaaacaaacactttaagattgtccgaatcttgaatctctctaactgcccaataatacttggaaacatcaccattttaataatcagttttttatgtgaaaaaattgcaatgtcctgtggcttttgagggatgaaacgatgagttgttctgatcaagtttcaaggacactgtggtcgtgtaaatcaagtatcccagccaacaaaaccacttcaattaagtttgtctatatttttggttcaactcaatggtagtttgcgtaaatggtttcagcaaaggtgtagctttctaagttaattccttaattgaatcaatacctacccaaagctataaatcaatgtccttcataactgatgtatagatgcactcgattaacaaatcaaacctagcatagagaagcacaagtaggggtatgggtacttaactgttaaatgtatatataaatatctactgtttgttgtaagttattgtttagcagtaagctttatgtcctaacttgttagtgtgttcctagattagtggtctcccctgctaacagccctaagtttaagtgattttactattaaagaactgaacatgtgtatatgtgagagagctctttatgctgcgtaatatatctcagtgaaataaaaaatattctgactgattacattttggcaataacataatttaaaattttcctaatttcagaaaatagaaaaacccatatgatcataggtcaatattccttttcagaagaaattaaaaatttatcaaggttgcagatataataaggtatcaatctgaacagtataaacaaagctggaaatgaaatagcaatgttgatcacaaaagccttaaactaaaagcatccaaacagagagaagttttaagctcttttgccactctagcacagaagaaagcaagaatttcacccattaccacagagaccgtactccatttccagctaaaaatttgagaaaggtgaaatttttgagcttttctaaggatttcagtaattgaaaactcatagttagaaggcttctttctgattcaccattcaatatagcaagctcatttaagttataaattggtaaatggtcactgcagtttgcttctctatttcatagcaatgacccatatactactactccaaaagatgctgagctaaattctcatccaatctcattgcccattttgttcttcattcaggttcctagctactccagctagtttatttatgaacatttgacctggatttagctcaatcaccatcaacaggcaaattgggcacttaactaatattagttgatgaaagaataacgaaaaaaacatttacaacagaaccgatcgcattgagttctgcaccataaggttgatcaaccaaaactaattccagtcaaggtagtagtagtagtagtattagtatctgatagaactggatcaaaatcatgagccacgtgttttgtttactaatcaactaggaattgggacagataacgagacagaaaccaacaagttttcgatacttaattgagaaaaagagagagggatgctatcaaaagcatgataaattttcattaagctacattaccctgcattctatattaggctatctttctctaacatcaatagtcaaacattcatctaattcctcaatcatcacaaaatagtaaaacaactaagttatctcagttatctccaccaagctcccactcacaaaaacacccagaaacatcaaacaaaatgaatccaaaacatgcacaaaatcaatacatgcaaaacacaaaacaacaagaattataactcaagagaaaaacaagtcatacctcattgaaactacaaaccccagaactttgacggccataagactcctgagaattcctgatatcccttgagacattaggcacaacaacatcatcatacaacaagagatccttggtatgctcaacgtcaacctcaactatacgagacccagaaactcctttacaataaagcaacctagtatcaaaattaacatcgaaaccccttcctaatgcttgaacagagttcacagcagtgtgcaaagctgctgcattttcccccatttctcatcacaaaacccaaactttagtcctcagtcaaatcaagagtcaaatacacaaaaactccatctcaaatttcaccaagaaaatcaaggaaaacaccaagtctgatcaacccacatttaccaagccttcacgttcaccaattcgtctgtcctcgataatttgaaccagtaaacaaaaaatttaatataatatatatttattgaataatatacaatacaaagtaccaaagaaataatccgacgtcccacattaggttgagatttgttttttaatg

SEQ ID NO: 301940 - DNA, 2626 bp, Cannabis indica
caggtacacatacctaattattatatcttactattgtgttctatgttatatacaaatagatcttgggttaaatgttaatcgtttccaaaataatttttgttgcagggcataactgatctacttacgcacccatccttaaagtttccagagtcccaagcactttggtttttgggttgaaacccaggtaaacaccggcacaagacggcattcttactattgcagacaccaaactcgccacaaacttcataaacatggcatgggtcacttggtgataattggattgagcaattaactacgctatgaaggcacatgtagaattgtatctgtccattgaagctcatcaccagtctactgttactgtaattagacacataaggtgatataacctctcccttccaacctttcatcatacggtacgaattcgaagtattagtacttgatactctagtgaaatttgttagaaaatagtgtgcaatgggtgcaataccaccaaaactgtctggatattctggattaggctgacttgaacttttccaaaatgtggctttcgaaacccctctctgtatcatgtacgggtactcttctctcttagtatcaagctgcaggaaagcaaattccccctgtttagggtcatcttgacttgtccatgaaatcaacttcatcttcaaagtcatcatcataccaggaagaaatgtatcagtaggattaagaaagctttcccatacatgtgttctgcttaacacagcacctctactataaagtacatcactcaaaactaggtttccagaatccatgagagtcacttccctcgtgacagaaggctgtaaacgactactaacgttggctctccaatgcatatccccgcttttctcatctgttaccttaagttgtccatcattcgaaacgacaaaaactccattggtgtttaacagtggtttgtcccggttggcaacccatacaacaatctttggtgataccttgtaataccaaatgcccaaatacctcttgttaggagagcttccttctggggtaaagaaccccagttcgaatctatttccagctgaaactagagactcattttggctgtctttaatgggaccgttcatcaaattcatggtatcagtagaataacacatcaaaaagatgaatgataacatgaacatggtaaagaagagcagaggtgaggagcagaaaagcgccattgttggcaggggaagaagaaagaacagagatgtccggtgacgttaaaaatcaacggacaacaattttattatgttgtctgtgaatatccaaagttttgcataatatgaataagagatgaccaggtcaacgtgtatggacttcaggagtatagaaaagaccgattcatcagtacagtcaaaaatcgacacaataacgctagtcattatattcagtcacagttaaaagatgaacattgaacattgtactagtcaggatactaaaacggaagcggacaagaattgatattacaactatgtgtttgacagatctaattttgagatgaacattgaacacattagatgttaattttttttttttttttgctcttttcagaaatttttaatttttaacttttgacttgtttaattaattagattttatttatttttaataatattaatttttgcttaagtctatagtacactcacagtagactcttcacctgttttgccctagagaattttttagtttttttttcataatcatgtacattctgttatttaaggtcactaataaatttatataaaattttaataatttataatgccgttcaaatattttattgcacgaatgactattttttcttattcgtgtgataagaaactattttaactttatttttaatattgtaaattatttagaattttttaaaaaatttgtatgcatttctaaataattacaacgtacacaatatgaaaaataagacagcagtattgggttatttgaagggtagggtcaaaaagcatcttatgggatgggaaggaaagcttttatcacaagccagaaagaaatcctcgtcaaaatagtagcgcgatctctcccaagttatgctatgaatgttttcttgttgcccattgagattacacgggatatagagaaactaatgacaaaattttggtggaaatcttcattgaaacagagcaaaggaatccattggatgtcccgggataggttgtgcaagcataaggacctaggtggtatggggtttcgtagtttaagggattttaatctcgcaatgcttgtgaaacaaggttggcgtctcatccatcatccgaatatcttggcttccaaggtctttaaagcgaggtactttcctcaagataattttctatcggcccagttaggaaataatcccagtttgtttggagaagtattgtggaggctcaatcggttatttgtagtggttcaagatgggctttaatatcccgataagcctaatggtaaataattcgagtttatatttatactatgggttaatcaggtaattagtgggattacgatcttactaatctattttagtataaaattaaattttagtctataagtgagtaataatcgtaattgttaattacggtagatttatatagcatgtgtgaatgtaata

SEQ ID NO: 301941 - DNA, 2335 bp, Cannabis indica
ggtgggtcgaaatccagataagctcaaggaagtttctgattcgattcaagccaaatttagtaataagacccagataaagactgttgttgttgatttcagtggtgatcttgatgagggtgttcagaggattagggagacgattgaaggtttggatgttgggattttaatcaacaatgttggagtatcttacccttatgctaggttcttccatgaagtagatgaacagcttttgaagaatttaattaaggtcaatgttgaaggcaccacaaaggtcactcaagctgttcttcctggaatggttcagagaaaacgaggtgctattgtcaatattggctctggtgctgccattgttattccttctgatcctctttatgctgtttatgctgccacaaaagcgtaagcatttttcatttattttttatgttttaaatttcaattcgtggagattgttgattgttgatcttgggttgtttttgcttcttgattcagatatattgatcagttctcaaggtgtctctatgttgagtacaggaacattggcatcgatgttcagtgtcaggtaatgttttgaagtttggtttttatggtcaaaagctttgaatagtagacacccaaaatatcagatcttgtcatcatgatatatgcataatttttatgtttatttagttgaagagcatttagttttcactagcttgtttgggcaggaaattttgaaaaaaaaatatatatttaaatgaaaacttgaaacaccattcggatgacatagttaggcaattttatatgttatgttagaactcaggaaatgattggccattgtttaaacttgaaatacaacatgtttattcttacttcatgtactaacttttctcataattctaaacaatagtgttgagatttgaagatttaccattgctaatcacttcactaattagatgactcagttaagataaattgagaagagtttttgtggtttatattattatgtccattctctttgtctttgtcttgcttgctattctatattatagtttggtttgtaactacaatgctttggaagtttgccaaaggattaggacttttctatcatgtccaacttaggtgttcttttttctatgcaggttccattgtatgtggcaacaaagatggcatcaatcaagagatcttccttctttgttccatcaactgatggctatgctcgagcagccatgcgttggataggttatgaacctcgctgcacgccttactggcctcattcccttctatgggctttggcaaatgcattgccagaatgcatcatcgatgcatggcgtctgcggttttgtcttgcgattcgaaagaggggacaactcaaagattccaggaaaactgactaagaaaattacaacacctttacattggtgtagttggagaactgagaaatgagctttataatagatagataatgtgattagaatgtttcttttgaaaaaggttgtttagaaaagcagtttgttttgttggttaaacttaagaacaatgattgtgtaatgctggttatttaatatatgatactttactttattgtttaacttagattattagattattgcccctacaacaaattattatctacactttcttcatattatgttttgaagatttcaccaaacaccaacttccggagatattgggcaatgctctttttctcctcatcttttcattgaaacatatatttctatttccaatcatcctaattccacgtaggtctatgttattatgacacttaaaaattatataatttatctggaagaaacaagaaaacgcttatgttgtttagctttattttagtataatttttcgtaagattgattttttaactaggcaatatagccgctcttcacacggctaatataattattttttaatattataataaatagttacttaaaaatataatttaatatatagtaaaattataaatatattatcttatttattaaaactaaatgtacaattttattaattattacttagaattatttattaagaagtttaaagaaattttagagtatcatgtcaccgttttatatctctaatatatatatatatatatatataggagtgcaactttaatgggtattacccataatgggtaatattaaaaaaaattgtagttttatgatttaattttttatttaattaagaaaaattctctattttatattatatgtgccgggttgttccattagatgaaaaataataaaaatagtttcgaacaaaaaaaatgaataaaaaagtagtagtttacttaaatatttttattatatacatattttgtatatagtgtaaaaagaag

SEQ ID NO: 301942 - DNA, 1913 bp, Cannabis indica
gaaatgaaaaaatatgggatagaaggtcagcaaggaaatagataaagttcatcaacacatgaacatagtctcttgatgctacaatcaggtcagccacaccattcttgaacacgttaaagcttataaaaagccaaggaaaatgcaaaacaaaaacagtgcctagtctttaaaataatttcaaagcctctcagttttatcttttacatcacatgatctaataagttaatgtttaacaggaattctttcacgtttctgacgaggattaccttcttgtttaactgataccaataatccactcaaattttactcttttgcaactaattttctaaagtcttatctgtttcagcaatctatcctaataattcaatcttggtctctcacttcctatctcagctcaacacaaaattcaacagttttccatatgaccaaattgtctaatacgcaaattaatggaaaagatatacaatgaacaatacctgcatgtaatcaaataacaccatgtatacagaatcatttaaaacagaacactcagccaagaaaagaaaaacaggggaagggttactgtagtttccacaattcaatacaaaacaccaaacataccaaggggattgatctctgctccatagccatgaactctgatcacctcctcaaacgcaacagcagcttcctttggtacgccataccacgtctttgaagcccccatgtgcaaataattgagactatgcaagtcatggtcctcaacatgccaagcaaaccaactgaacagcatagctacatacaccatgggggaagtaaccccaggaatctcctccttcatgaaccgcaacaaagacccctttgacctagacaccgccctcatgttccaagcagtctcaccaagagtcacactctcccctgcttccctactcttcttagcattaacaggaacgaaagcagagccaggcatgtcgttcgcgtactcgactgaaaagggtttatccacagtcgctttccagtaaagggtttcgatttccagtggcgaaagccctcctcctttcttcccacatttctttaaaaaccctttctcaaaacccttcgccttagtctcgaattcctgaaacgtgtactgctcaccactctgccaaaccggcctctgaactggacgaggcttccgagggcagaacccgatctgctgctgccgagtagtgaatgtgggaggtgttttgggattcgaaccttcagaatacccagcacgagcagcaagcgacttgtttagattcgcaattacagtcttcttaggcgatggagacactggaggaatgattttgcagattccatacttggaagcctctttctcgatcttaaatatatatgaaatcggatcttgaaactctgccaaagtaggatggtactctggtgctaaaggtagggtttttagccatgaaaacacctctggacttgggtcagaccccaaagtcgaagctgccattaacaaataacaacaaacaaaaaaattgactctgagattttcaatgggtttctcattcaaaacccattgaagaaaaataaaaacaaacaaagaataaaaatgaaagcttttctttttttgtttcagattctatgatgcttcatctttctcagctttttccttcttcttcttcttcttcttccttttggaggttatattatatattatattatatataaatatatatatttgctctgtattatattatgagatacagagcagataaaaattggggcagaggagggggcagggcaagtgtctaagtgagtgagtgaataagcaaaggatgtatgtattcatgtgagtgggttttgtgccaaccatttgataatgacattcttttttctattatttaccattttaccactactttttattgttttttcattagttggtaaaaaataca

SEQ ID NO: 301943 - DNA, 1369 bp, Cannabis indica
gtaatttggagatgtgagaaaactagaagaagaaaaaaaatgagcagagcttcatcgctttcgattgtgagtaattaaggcaaaatatttggatccaacgaatgaatcgaataaatggatgagaaaaatatttcatcaccttttgagagaaataacgataattttaccaaaaaaatttgaagaaatccaaactaatcggaaaaaataaggagaggtgtcatttagattttggagcacaatttctgtttctatttggagaatgaatataatgttaataatacccttatataactaatggtattttaggtactaagaaaaataaaggtcatttgctatattatttttaaaaatggacattaagcttcagtaaaagaggataaaaggccatttactactatttctctttaaaattgagtatttatgttctacatttataaaatagtatttattgctttaaatatattttattaaatgttttagatttaattatattttttataagataatatgtgtaaatattaatattatatgtttaaaatgaataaaatatattaattattttttaaaaagaataactaaaattttagtaatgtattttgaagaaattgatgtaatataagtgtttgtggtaaaatagatcaaatgtgattttaatggtatatttttaaagataaagttgagaagtttaaaaataaagtgtaatgatttcgattctaaactattaagacaagaaagatgaaagtcatatgaaatgtttagtaaagtacgaaccaagctaataatctaagaattgagtcccgtgatttcagaacactgtccaataattaaaaataagggcatcgttatatgttttcttttgtttctaatgcgtcgatgtttgtaaactaatcccacaactaattaaaaagtacttttatttatttatttattttgaaaaacaaaagtaattacattctctatttcactaagttataaaccataattagtgtacgaatataataattctcttctattattttacaagtagataatgaatgcatctttctgccaacattgatttttttctttttctttgaaaggatctttatgccaactttgtataatgagcaatattaaaagtaatagtagtgtctagtaattttatacatgttaataatattattattggtataaattaaaatattaaatctaatataattattttaataatttttaaaaatatcactaaccaattaaaatataacacaactatacatataatatatatatatatataatcacatcaattttctacaaataacccccattacataataattacaaaaatcaaatatattaaataaccctacatgtattattattattatta

SEQ ID NO: 301944 - DNA, 8337 bp, Cannabis indica
aattagtttttagcacaacaaatattatgactaaaaaacacatttagtcacaccacaataatgataatttataactaaaagttaagatttttttgtagtgttacattttctgtatctgtttgtgttaagaattttcttcaagttggcaatattaaaaagaaagttgtcaaaaatttaagctctgggtcctatttttaccatttttgaaaatacagagtctattttatcatttaacaaaacagatagttcaatctataacttttacaaaacacaaaatccaaattaatatatttaccctttataatacaacacatttaccttaatattattcatattaagtcctcaaatatgaatacaatacaatttattaacaagttactcaacacaaaaatgaaatatgtaataacatgttttatagttgtgttgtatgacactaaactataattgacaaatttaatacacgattaaatattttaggacataacgaaattgacacaaaaaaacaaaattatgtataattataaatattacttctaatagattcatagttttattttattttgtcttttgtttataaagagtgaggaaaacaaagttttgaggttttttttttcttttttattttcggatttataaatatccctaattttttcttaagagtattaatttatctcccctatcatcaaacttaacaacaatcattttttcgtatacgtattataattatgtcatttttaaattaaacgtgttgatcaaaatataatatgtttaataaacgtatttttttagcttagagagcttgaatatgaaaaaagagagagagagagagagaattgagtaatttcattcaattcaataatcaattccagagtacaactatatatacaatatgttactctattactaaccgagtggcttaacacataaaccaattcctgttggcacagctacacctaactaataatactcactaaacactacatagcctaatcttaatactactcaagattagctatatgtactttgtaaacaatcttgtctttcatatattggaactgagtagtaaagaatgcttttactaaagatatcaactagcacttttggtatcagtttgagggttgatagatttaaaaatgacacaaaagaccaccctaattcttagggtgtcagtattaaccgatacatataatgacccttaagtatcgattagtaaccttacaattaaataataattgacgctaaaaaattaaatatatatatatgctaatttggaaacttttcctagtgacatggatattaatctttgacacgagagaagaaagataacatttcagagttgactagtcctaagtcatagcagtcaacttgggaggggtccccagtccagtacccaggtggactctgggaattttggaatatgggtgttcagattcctatatgcgttttcaacccactatcttttagtattctgtacaaacaagacatggaagcaaccaagtcgaggttctgggagctaaaaatacacgaaccaacactttggaaatcaacctgggcaacaagggtttcacccagctcccaacttgacagccccatctaaggttttaatttttaggcccgtctaagtgaaaatgggttaattaaactttacattggaaaatgaactagacattccacgaacatttttgagacattaggatctgattcagagaactttcatttttgagcacctggatactcggtgcctagacaccccagcacccaagttgaaaatctgtcaacctcggccacttccaagctttatagcaaaaattcgactcgtgcatcttcttcgtcttcaaaaaagacggggaaccaagtacttcggggaagaacaacccatctgggtggcagaacagggaaccagtgcccatgttgacacctagggttggcccagtgcccaagttgatattttgtcaacttgggccaattccacaaagtttttttgaaaagtcttccaggcatattctctattttcatcaaagattaggattcaactaattttgggcactaaagaaaacttccaagtggtcggaaattggacccatcgcctaggttgacacctggcattgggcccagcgccatcaaaattgagcccatcacccaagttgacttgatgttgggccaagcacccaggttgataataaacctggtatactggttttgatccttcaaatgccaattctgctccaagaattctctttgaaatggtcaaaaaaaagtggtagaagaccttgttctcaagttccagaaccattgtagtatcaaaaagacattccaaatgcgacgaaataagcacccaatgcctaggttaacaaatggccttgtgcgttgggtttggcttatccaacattgattttgcctcgaacatttgcctagtttttcataataacaaagagccatgaagtccgaagtgtcaaattcacaacttcatattttcacttttccaacaaggtgaattactcagaaattgggtagtttcgagtctcttgtttctatagaacagtaacatcttcgagaactggtgattagcttcgccaaaatacaaaaatggactaagtgatgtcaaaatatcactaaggcatcaaaaaatacatccccaatgtgttttttcactcacccatgttaacctgagtgctggatgtccacctgggcactggcccctgaacaaccttcaaaaaaattaccataattcactcaatattgatctaactgacacgaataaacttatatttcaaagctatttcattattttatcaagtcatgtcttacatttcaatcacaattatgaagttatcgactctaaatttcacccaagggagttacaaatttaagctccaacttacccaaagtgggtctcgccaacgccactcgagctctgaaaattgacaattaatctctgaagttaattttcacaattagatcatcatctacggtcaaaaatagcctaaatgtattttttcttattttttggattattttattctcaattaatagaacctccttcacctataaaaggagtgctcaactagctcattttttaagttcaccccttgagacttgaaaagatttgagtagaaattgacaaaatgagaaagaatggtttgggtaccactaacttgagaaccatctgtatgggtgatatttttaatgagatttgtttttctacgagtggaagctttgtgatggaagaatttagtattcttatcccctactttaagctagccaacacgagctctttgtttcaaataaatctcatctttataaataagggattccaaaaaggattgcaaagatttgacttgggaaacaatagactcaatgggctgattggtgttgagcagagagtcaagagcctagggttcaacaattttctcttttaaagaatcttgagactgactctaaagcttgatggtatgaacacagttggtttatttggaaagaaaggaattaagaggggagttagtgcaggcaagatgagaagaggaccaggaagaatcaaccacatgaaagaaagactcattagtgagccaatggttctcgaaagcaaaatgggatctcctattgctaagtcttaagttttcctccaaagtgactttaagggctctgtgatcagagccaacaaatcccagatgagaaagacccgcagaagtgtacatagtagaccaagaaagactaacagtgcacttgtgcgttcaagaatgagaccatgattccaagtgaatttattagcggtatgagtgagaggcatcagatcatatttgtgaagaaaagagataaaatcatgcatagcatgagagggaggcggtgactgagttcttatcacttggagaaaggtaattgttaaagtctccaaaaataaaccaaggcaataaaggggcagtgtcatgaattctatttatcagcatccaagtaaattgcttattagaggggtaaggagagccataataacaagtttaatgccacttcatatcattataaacacagaaacattacagtcaatatgattaaatgaaaaagtaagaacaatgacattaataaaattgttctaaaaaagtaaaagccctccccctaaaccactcctaggcacctcaaaaacattatcgaaatggagatgattcttaagcatagttccacggccagcctggagtttggtttccataacaaaaagcaaaatgggtcgatgttgcttgaccaacaaggagaggttacagaatgctcgaggactccctaatcctcaagcattccaactaatgagacttattttcctcggcggggttgcaaagcagcacccgtcgtttgctcattatcaataagagagggtccaacaacgtcttcactcagagtagctcgagctctcttcagcatactccaaactgaaccaccaatttaggcagtctgtctagtgaaagggcgtgtagccccagaaatagtagagataatttggggggggggggtactggttggctccttaattgtgaggtttctgggtcagatgttggtggtatcaatatcaggggaggaatgggtatgaggcatagcaatgcccttacccttgtcaatatgagttatcacggaagtgaccataatggaggttggaatatttgtttggcaaggtttgggtggttcagtttgcaggtggggaatatcagatgaaggtgtggggttgttgctgcataaaataggggcagagaaatcgagttccaagttcaaaaattgatcaactgccagttaaaggccctaatcagagttgttggcacgatagatgtattcttcaatgggggtggagtttgaaagttcaacaggattattcttcaaagtgcttctggcaggagcacgaaggtgatccttgtatcccaactcaagggaaactaggaagttatcacacctcagaaggtattttccacacttattataagtgtggtccaagagcccacataaatagcagaagttttgaagcccttcgaatttaaaactaatccatttggttcttgccagagtacggaatcgtatattcatacccctccttaatgattttgtaacatccataaggactctaaggcgcaaatacagaccaaaactttcaaggagggaaagagggtggatttcgatcaaatcacccaatttatcagtaatgagctgagccaactggagacttttacgcccaaaagggatattattatgaggttgcacccagaaggggacaaaacaaaaattatcaggagtgatggtatcgagatcttcagcattcgcgaagatcgtatgaaatttgtcaaaatgccatggcttatcctcaagaacctgacgacggtccccttcacactagaaagtggtgaggaacaaaccagagagataatcggagatttccactggaaatcgaagggtccaagccttgcgcataactttttccatctaagcaggctttagagatttgggtgttaaaacctttaagactagacaatgagagctagcattgtcagcagtgttgagagaaatgtggtcgaactcatggattaggttttcttcgtcagtaagagaaaggggggattggtgggtttgagaagaggaagccatttcagaagaaaagaactgatgagaaacggggttggaaagtgagaggaccttgggaaggatttggcatcttaaataaagggcagaaaaatacagaagatagaaggtagaaggtatacttggagatgaagagccttcttggaggttgagaagatagcatcatcatcctttctctgagctagcatgtaggggtctggaaaagaaatgattaagctatggtatctgaagtggtggtcatggtggttaaatttctatgaagaacatggaggaaggatctcagatcaaacaaactctgggtttttaataaatgtgatattacatgcgccgtcaatattaaatgcaattagaaaagagacagtgtattaaatagcacctgagtatatggagaattcgggtggtaatcatttagttttgggatgacatcagagtaataaatgagaaatggttgggataataaatggaaaagacggttgaagttggaaggtagaagatcgaagaggaagatggaaggcatacacctagaatgacgtagaagcaatttggaggaaagttcaggaagaagactcgtgttcatttttctctagctttcttgtaatcttgatataatacttttatttatattttgagtattttgattgtaatttttctattctcttttgtaatgagaattttaccagcaataattataataaaaatataattattaagtagtcacccacatatttatatatttatatcatgttggacttgattttgcgtgtaaaaactgtagtctgtattgatgacactaattgtaagtcaccactacccactacccagcctatgtaattccaagttttcaaaagccatgcattcagcatttagaatttttactgttatatattgcggtgggacatagtactatagccttattttagtttatacatttttttattcaaaattattaaaggctcaaattaagggaatatattccacgatatttaatttcacgttagcgatggtggggactggggacatatgccatcaccaatatttgtaatcttgctatttgcttgtgtcactacaactttgagagtgacgcaagcattaatattcataattaagtgattagtatatacttaattaaggccacactagataatgggttgatcccttttggatttgtgtatgtatacattatcatttgtcttttccgggcccttatgtcccaatcttctcatgatgatctaggcaactacaatgtgattgtgaagcacgatctagctaccatacaagagattgtgtgttgcttcaaggaaaaaaaattatggtaaaacaaagggcacacctttcaagaatatttttttttgtcaacaaaagaaaatcatgataacttaacaagtattacttgagtaaaacaaagctggtattaggccaattatctgtacaaataagtaacgactaattagaacgctagctcatgtgggtcataggtaggtgtgtgttagaggtgctgagttcgagtcccagctaaaacataattgtaatatataaacgcttaaataataataaaaaaaaataacaactaattagagttcgatatttacattattttagctttaattattataaaaaaaatattttgttcctacttaaaataaaaattataattattctgaataaatttatttgactttataacaaaatatttgtgagattttttttattattttcacgtataattaatcaatctacatatctaaatatatttatggggctatcacaataggtattgagtattttacttattattagagataataattgttatacccgaaattcagccacacttcaaagagtgacacgtatcaattagtggaatatgaaccacttagtataataacgttatatcatgtgcaaaaaaaaaaaaaaaaaaaaactacattaaaaaactcattaaatatagaattaaaagagtatattcataacttgctgactgcatgatcttaaatgagacaagaatacaaaactattgatacctgtattgacgagacaccaaccagcctcgaaatatacaaattcatatagaagatttatttattttgaaggaataagtgatgaaataactcaaagcaacttcagactacatatagcgaggtattcacctcgctattcataagaaatattgacgaggtgaatcatttgttaaacacttaatgtattttccacattacaataactaagtgtaacaacttagaaatatacaaagacacgattgtccagtctgcgaagccttatgatcaaagaacagttcttaagtttgctcagtacactggtaattatgccattgctggaaggcatatgattgtccaaatcagcattgaccatctacaagttaagcgagctactattggctaaatcagcatttactatctttgaggataaaaataataagcaattatgcggttatcaattgttatccacacgtgatttaaatgaaacgtgatcaattcccacatttcgtgaaacaattatgtgtaaataactgccaacctatattcctataagtagaggcagatctcataaaaaaatgatatgaagaatctttgagaaaaagattatcaattgtatattgtattaaaatacttagaaatatcttgaataagatagactcgtagagtatgtagatttaactgcaaaaccatgtaaaatatctggtgttatttattaatacttattatactttattaa

SEQ ID NO: 301945 - DNA, 3464 bp, Cannabis indica
attttaaatattaaattaataaagtttctggttaaaaataactttttttctttggaaaaaaaaaaagaaaatgtatgttttcaatagacaacttctattggagatgtgttgaagcttagacaaactatataatgacctttttttttttccttgggtgccaaattctataaattgttgtttgtttgattaagttttctatggctctgctctgcatataagatattggtaagatagttgagaaagcgcatcgaattaaagccactggaggaaggctatgcggtgaaacgacaagcaaagggtttaaggtgagaaaaaacgacgggtcactattcgtgggagctttttgccaatccaatgtaggagatgtcacaccaaatgtgttgggagcattttgcactgacactggaaaaccttgtgattttaatcactcctcttgtaatggcgataaccaaatttgcttgggccgtggacccgggtacacattttttaatgtcaactctaattataatgtacatagtataacaacatatctatttataatgagtgggaatttcttctttggttttccatggttaacaggtatccagatgaaatactgagcaccaagatcattggcgagagacagtttcaaaaggctgttgatctatttacttcggctacagaacaagtgagtgggaagatcgattatcgtcatgtgtatcttaatttcactaatattgaagttgagttagataacaacaacaacaacaacgtagtccatacctgtcctgctgctcttggaccaggttttgctgctggaactactgatggacctggtttcgctggctttcagcaaggtgataaagaggtcagtcatcatacatattatatttatataattataattataatcttaatctcttcatatttactttttttttcttctgaaaattacagataagtgagaagtggagaaaagaaagggacatattgaaaaaaccaagccaatatcaagtggattgtcagcaccctaagccaattttgctcgacactggtgaaatgtttgacccttatgcatgggcggtaagactctacatatagcaaagataattaacattagaaaattatagagttgatatcaataatttaatatattaatggtatggttatatatatacataaaaatatgcatgcagcctgcgattattccaattcaaatgctaaggttgggaaatctgatcatacttgctgttccaggaggttgggtttcttaattataaaataagagcatgatgaatttcttgccgttaattaatcttttttctttaattatttctgagttactggaattaataaattgcagagtttactacaatggccgggcgacggctaagagaagcagttaaggagacacttataagctatggtagaggtgaatttgaagacgacacacgtgttgttatagctggtttatcgaacacttattcacaatacattgctacttttgaagaatacacacaacaacgatatgaggtaataattatagtaaaacttatcatatatatatacatataaaatatttgcggctcgtttggtgggcgtcctattatactaaataacaaaatatagtattgtattaattatttctactataaattttaatacaatatgaattttattatttaaagatcataatttgtattagcttgtattataatatttaaaaatgatccagggtttggatcacaggtcaagtccagatttgaggtttgtgtcaaggtctaagttcgagttcaagtttgggtctgggtccaagtctagagtcaacagtttgggtctagatccaaggtcgggatctatgggtcttggttcaggtctaaggttggagcgaggtcctaattcagatttgggttcgggactgtggccaagatccaacaccggggccgaggtccgagactaggtttgggtatagagtctggagtttgagttcagggtcctagtccagggccagggtgaggtcctcatccgcgtttggattcgggactaggaccgagatccgagactgtggttgagattcgagatcgggttcagatccggagtctaggcaccgacggagggagaacctaaacatattagggggacaaattgtaagataattaatttaagaggggctaatcaatgtatttaattttcttaacaaattttatacatgtaaatttttctttgggaggctacaattaacctctgtaaccttctaattaagtggcttggtgcctaagtctaggtctggggtattggttcaggttctgaggtcaaggttaaggtctgggtctatatttgggggtcgaggtcagagttgggtttatgataaatattatataattttacaccacctattaataaagtcaataccaaatatatatagtatggtattaaataatacaatacttataatacaatgtattaaacgagtatatgactcattgttatatatacacaatcatcctcaaattaatttactttcaggcttcttcaactctctatggtcctcatacattgtcagcatatctccaagagtttaagaaattagcgaaagcaatggcaactggagaaacaatcagcaagggtccctctccacctgatctttccactatccaacgtagagcccagataggaccatttggggattcaccaccctcaggagtgaagtttggtgatatgaaagaggacataaaagtaccaaagagagggttctttaagagaggggatcatgagaacagaccctatgcaacattttggagtgccaacccaagctatgatctcttgacagaaggaacttttgctgttgtagagactcttattcaaggacaggggtggattccagcttatgatgatgatgatttcagcttgttctttaaatacaaattggatgaaagtggtttgtacagcttagctaatatagaatgggatattccagatgatgttatgcttggtgtgtacagactaaggcactttggctcgtcaaggaaagaaaaggactcccctatcgtatattttaccggcgcatctagtgcatttgcagtactatcataagtatgaaaccacaataatatattctctttgatttgcaagatctcatctcaccctcattggccagctaataacaattaccaatgtgttgttgagttgatccatagtactgcaaaccataatatttatgttctatattgtgcagaagtataacctatatttattaatcaacaatgtatatatatatatatatatatatatctataatcataactctataaaagagaatatgtgttttggctttccaaagtaaattaacaaaaaaattaactgattttctttgttaattactattatattcttttatttaatggtaagaatagttataatttttccaaatataatttgattatataattagataacaatagacatagattagagagttccatttt

SEQ ID NO: 301946 - DNA, 2137 bp, Cannabis indica
tcaattttctaggtgctcaagttgcagttttttaaatatatttacttgtattatttggggatgtatacagtattataatttgaagatattattaatcataatataataataataataaccttaataataatggaaaatacagtgttatatcttattataatacatcgcaaataatttgaagatattattattattattattattattattattattaatattataataatgataagtgatgtttagcgatgtgctttaaattttttagtttcatatcgcaaatacatcgttaaatacgctcggtaaattccatccctaacttcagatttgctctatcatttgtaaatacatcgctaaatatcttaaaatactgaaaaatcagaataaaacacacagaaaacaagcaatgggttgagaacttcggcgatgggtggagattttgggggtttcaaggtaattaagctcgtagattttggaatttcgagatggagacgatgagacttagagagagacaatgagagaagacaacgataggggcttatgactggggatctaggtctgggttcgatggcaagggttatgggtcagggttcaacgttgtagagtggaagagtaagagaggtttttttttttaaatgtaaggatatttttgggagaaaaatatattaaaagtatagatttgatattattatatattttttaaaataaaaattatataaatattttatatacaaaaatttaatttaatttatatatttaaaaataaaaattacatctatataatcacatctatataaaatgtatatatttaaactttaatttcacgacaacctttttgttttaaaaatgattaatgatatatatttctaataatttgcatactttattattataaccacagaatcttaactacaaattaaaaatattgtatctatcactatcattattttttttttaaatatatgtttgggcataataaataagatgtattttgaaagtagttaattcatttttttattgtatatataaagtacgtatatataatcacatttaaagagcacatcatagctattatagctgcaatagctaaaaaaaaattcttaaaaaatcaaaatctcaaaccctattttaaaaattaaaataaaaatatattacttaattaaaaaaattaaaaatacatatattgtaattaatatcacttaattaaatttaattaaaaaaattaattatacgtaatttgcgcttaacatcaattgcaatgtaatgtaattctatatattaatgaaaggctttttcatttttctaaaaaaaaatatatagaaatttttaagtgaatgaagcttttgcatgttgtcataaggctgctgtagtgaaaggattaagttgccccttataacaccggcgttatataattaaatcccaaactcttgaggcatagacttgcgacgcttttgaggttgctttaaccagctaccatatgatatgggtttaatattaattaatgtagtacgttaaagtcgatctacatgctcagatatttcactcatgtatatcatagatatttgtattcttctaggattaataaagccacctcagttccaataatacacataaatatctaccatgtaaatatctcatagcttccacaaaatcatatagataaaggatactatccaattaattaagagatacaaaggttcaattaataatattatagacacttttcttagcattaattacatttttttacaccatatatatatatattatttgatgaaacaagatgcaatcacaaagttaaagcatattaaaattactaggtttggtctaataagaagggttaggaattgggatatgtaagaccaaggtaaggttcaaactttgtatgtcttgctactcttggtgatagagtggaatgcatcttttagataggacaaatctccttaataacttggtgctattacaatcaacaacatatctctccatttaatttatgttatattatattgttataatataagatagattaaaatattaaaataagatatattatagattaatataatattaatgtatataatgtgattaagagttacatattagaatattttatatatggaagttattttctaattaa

SEQ ID NO: 301947 - DNA, 3454 bp, Cannabis indica
ttttaattagttttctaagatagagcctccaaaccctaattttaagaaccctaattttaagaagggaaggaatgaaaaaaattcttttgaggagcttttacatgctctgataccatgtagaaaaatgagaaaaatgagggaaatgatttttattttctgatgatctcttttagattatacaaagggtatatataatacaatgtgaacacctagtaatactagagtaaatggaaaatacattaaatgtaaatttacaactaattgctagcttgatttcttacaatttgcaagtttacaacaaacaattcgtacaaattgcaaaattccttaatgctaaatcccttggcaaacttggcaagatccccttgcttctcgatcgttgaaattccttcaacaaaatcttagatctaaacatcttcagatttgtttgcgaagatatgattgaactctcttcagttcacactcatcgactataggccatattcagaacctttaaatcaccattgacaaagttccaaacttcgacctacaagaacacaagaacaaaaagagtggaaaagtaaaaagtaaaacgtgatctcaatctccgatcaaaggtgttagttacaacagaataaagatcataatatttatacctaactgaactaagaacaataccagaaaacaaacaactgtaatatacttgacttaaaaaaacactaaaatgtatagactaaacaataaactccaaacataacaactaaagaacccgggcatgactagacataatttgtcataaaaaaaatactggaccttacataaattaagtttatgtatatatgtccattctacaaaatttacataacatatggtctatatccataaaatcttatgaaagctgaacagtttgtaatcactaaataattgtagattgtaaggcttattaatcaattgaaaacaattgtacaaagcttccaaacaaacaaaaacaaagttgggttgaaaaaaaccaaccactgaaataattcaaaggtacaatctctccgagaacagaaatttccattccaaattggccatctataattgtcttcgtttaataaaagtggcagctcaacccggaagactgaactcattccttgagcaccaatgtcttcataagactcaagttttgcaccttttggtgaccactttttatttttatcgacaaatatcaccaccaccaccacttgtgtaatacaagaacacattttttctggccatgaattacttccattgaccttcgaatttctaataagctagttttcctttcatcattatctctgttctctgaatggtagttcaacttgaatcttcttgctcatcagagtccactttcaaatccaataaatacctattcttctctcttgtaaaaataatagtagtattcgtgcaacagtagcgctgtagatgcatcaatcgcagctattttggttagcaggatcagttatttttacagtgataatgtattctgtgattcttccaaacaatcgatttcaggagcatgaaaaatcctggaatggagataaaacaaacaagattgatagttgatgtgccattctaagaaactagttcatttaaggtcaatgatgagtccgattctatctttaggcctctcccataggcagcaatgagtaaagcttcagctctccctaacaatgtttaaaaacattagaacaaaaaattacactgaaagaatgccataaaatgaagcaatgtattttgagtccttggaatcagaatacagtttattcatctgtccattttttcaaacttttcaaaatataaattctctaaagagaatgacaaactaagaaatcagttaatagatgaggttttcatgatgaaccccacaaaaactaagttattttgggagttttcccatggaaataccgcaatcataattagagtgacgtttcttttgcctaaaacctatacaacagaaaattagagtacgtcaaatagacaatacatacatgttcaaaaagagtgccccgaattttacagtagttatttgagtgttcctaatgagttgttcagtttctgatctggttggccaaaatgtacatcttcccatttacgtctataattttttttaagcatttactaccgtttacagcagacaaaggcccacatcttacagtagttatatgtaccgtccaacaataactgttcagtttcttctctttttgtggatcataacttctttgaatcctttgtcgatatttcatgtctgactttaacttaattatcatagcagtgatcacatataacaccagcaatagtgcacacacacacaaaaaaaaaagagaattggtcggatatgagttaggtaccgtgatctttttttcgttgtaatagagaactcagagaaggaaacattgttgatgccagtctcctgctatcatcctatcaagaaaaatttcagtactgagaattaaattctttttaggaaaataaaaaaataaaaacaatagcaatgtgaattttcatgtaagcaatagcacatttttcttcacctaacattaatgttaataaagacatggctctgaacaatgtaaataataatgtcttaaacagtaagcttgctatagtttcccatgagatacagaatatggatatatgatagttaattacacataatagatttcaatacatcatcagacaattaaaaagcccacacttgtatatgctgcaagtatcgtacaaataaaatatgggcatgaaaaatacagtgtagaatcacccatacctttgaaaaagagcttcccgcgatttcaaatttctttttccatgagaaagatggcactgggacaacagagaatcccaaggcgactaggattccaatccataggccatacccaaatcctccactccaccaacccttcaaaaacaaaagggaaaatactgaggattgttgaaaaagtcagtcacattgagaaagtagcatcgtagatgcagcttgctaagttgagtaaaatcagaagcttccaaagttatggcagaatttaaacagaagagaatgaaaccattacttagctccttcgaaatcaatatgacatccaaaagttctttagaaatagttggacaatggccagataaaaaacctaagtaatacctcagctatttttaccaaataaaattgcccagctctatgacaaaatatctgactcatttttcttcattttttttttaaagttcaacactcaaggacttggaactcctgtacagcccataatacaaattcccagaaacaataacagtaattgaactacagacaacaatgtgcaaatgaatttgcctaaaattatataatgctctggagtagcaggagaaaagaacctggttctacatcaaatactaattatagaaaatggcagtatattgagacagatagtagtttacctgctttccatcttttggaaaagggattgattgc

SEQ ID NO: 301948 - DNA, 4221 bp, Cannabis indica
aaaacggggtcagttagacgggggagtgtatttgctaacaaaatagtggtctaggtagttttaccaccaaaattttagattagggggttagttgcaaaaacctgcccactttaggagattttgccgcaaataactcaaaaaaaaaatcagcctttagtactctgtaaagataagatggcaaaatcttcatccaaactagctcactattgacacttaaatgcgttcacaactaatttatgaacaactttatcataaccagattatataaatgagagaaaatttatcacaataaatatatgatttgtaaaatgtatttttttttgctgtgactgcttacatatctaacccaaatttttttcccaatcacagacacacacacaaacaaacacactcccccaaacctttgtctctctttctcctattacttcaattcgaatctgcaacgaacgaagactaatcgacaagaaaagagtggctggttgttctgagtttccagtacaccggacctaaaccagaactcactctccgaccaaacatgtcttctgagaatgttcatcctttcatcgctgctcagctcaattacctcgtaactcattttcctctttccattaaggtaaaccctctcttttttcccctttctttaattcaacttcaaagtaaacaaatctcgtttcattttctcgggaaagaaaaaagaaaatcactgcttcattatgggtctgggaataatttgattttacagattgagcagatgtggtctggtagcaaatactaccctggaacgcttgatcggttcactctagctataccctattgtctagactttctcaaatgtgagtattgtataattatatattactttatcggtttcgttttcataacgagttcaatttattttaggggatattatatttgatgcggagtctccgttttctgctcctgatgtaatatttggacctgaggacgaaacttttaatctatttcttctaatggatggtgatggagaaggttacttaaagtctccaaagaactgcttcagtgattggaatagcaaagaccctactcggcttatgattcttgttcaacaactcaggtaaggagcttactgcaatgggttttggtttctatttagagttttcttgaggacaatgtggttcatggataatacatggctgttgataatatttacttatttgattagggatcaatacaagtcctaccagaacaggcgtgttggggaggttgatgatgataggttgaaatttgaagttggcacaatgttacctagagaggtaataattaactagattttgtggttccataataagttaggatgctgattgaactaagtcgctagtacgtgacacttttgattgtaactgaataactgatattcatgaattggggtgaatcttatagtgtaataccataaaaaatgatgtcttctggtgacgtagtgatggttcgttatagttatttgacatatcaaataatcatatgtcatgttcattgactgaagcatatctgtatcgcgagacaatgcagatttatgttaatgatatttggattgtttaatgcatatgttaaggatatttggattaaacaatggttcctatgacggattgttttaatcgctgtttactttgcatcaggggatcgaaatgcatacggtatccggggttgaaaaggtattttccaaagcagaatgtacgttttcaatttaaatgtaggagctctataatgctggatatgccttttcattatgtgtggtttttacacctttgaatgtagcgtagccagaagaagtcaaatttgcaatacctctaatggacatggacataaataaaatggttcctggatgcccttggagacttccacagaagatatacttacaggtcaaaattgtctcctcgattctctcccatttccacatttcttcgatgttccctctctcatttttgttaataacagtgttatatgactctgcaggtcatatatcctgttgggaaaaaagttgtttctactccttcagctcctcgggtgaaattattttccacatctgagttgaaggcactgtttctcattgaagatgttaaacttcctgtgtgggtggatggaatgtaggtctctcatgccgtcatacattatatgtgcccaatctatctgacttctggtttttattggctgttctgtttctaataattttcttctctcacaggtgcatggctgaatatcttccccatttggaagaatctctggcgaaacaggtcaactgcataagctatgcttcatttctttttggtaataacttgaagcatgaatttttaatatgattagaactttatttgatttgctttttaaggtctcggaggctgttatctccattgatgttagaagacaatttatcgaggcattagctgttgtgtttggaagacctctagaagctgattcagtaagcatctaagccaagtattatttacaaagtaaatataacttcaagtaatcagcctaagaaatacttttttgacaggttttctgtagaagggcaacattcctcgcttgctctggagtatttacattcatggtattatatggcatattagttattgtttgtttttgttttattctgttcacgtcctttgttatttggagtagtgacaaattcagattaacttcggagttaatttttcactattttgtaataaacgtgtgtgttactggttcgggtttaagtcattgtaaatgtctatctctttttctgcatatctttactctcaggttgctgctgatcactccttcctgtattttgttgttgtaggttcactttcttatttcaacccagtttccaaggcaacatccaattctgatacttcaaagttcccaggtaacaatgttcttttactaatcttgaattgtttatacgtgttgcaaaaattttacaaataatgggctaaactaaactgttcattaaatcataaatcaagaattgtaatacaatacaataccctatagtttgctcctacaaggtctgaggttcagcccctcatggggtatgaatagcaattgctttcttagtttctaaatattgtagggctaggtggagatcttagtttcaaaataaataactgaataaaaaatcataataataggtccacctcaacccttataaataagaaaactagccactcatgatgtggttcataatctcaatatattgtcaaaattcagaaaataaaaaagaaataatgaagaatgaacgaaaacgattgaaaactcgtcaattggcttcaattcacgtcttaaatctcaacgtttgtttcttctctcgtcaatatttgtgttttagtcatgcccccctcgctagcccctaaacacgccctttggccgttccaatttaaatttgagtaaatgaaaattgtgtgggcaattagatatcccgcaattggtggcacaaaagatgacgcgtcacggcgtaacaggcaacatgtcacatcacaacaaataacgtgttgctcgttgcaattctttagcgttacaaggaccggtgacacgttgccaagtagctggcaacatgtcagcagcagtattctcaggtctcaccatacatttttgtcccttttttcatattttggtgatttgtcgctcaagaagaagcgacgtaatgcatacttcattgccttgaacatccaatgtgacccaaaagtcatccatttaaactattactacacacacgaaggaaacactttaaatccaccctaaaatggaagaaaagccaaaacaagaggaaataattgtaaataaatgcatcaaatacgcactcatcagtacacatgcaattttgttacgagcttgctagtaacctggttggatgacatcccaaccagttcttttttctatattctgcaactatgtagttaccccagctttgaatggaagggatttagttaagcaacatagttatgatcaagtatttagttagtggttcttcggtaacatttttgctttttgtaatattactttaaaaggttatagtttcttcactgtttttgattacttaatcagaaaattgttttttttaattgttaccgaacaagcacttaataaattgcttcaacaagtcatattattagactgaacaactgctatttttgtttattataataatattttcagctatgctattacagaactatgcttattaacagttaattaaaaaaaaaa

SEQ ID NO: 301949 - DNA, 3950 bp, Cannabis indica
tcgatcgtcaaggatgattcaagaatcaacaatcaaagatacatacagcagtaggatctaacacaaatttttataaaatttcaagctctagataccaaatgaaagtgctactagtagattttattgattcaagttaccaagttgtaacatactttaaattaattctacttagaattaccataaaaatagtaaaaaaaaaaattattttagaaaatgttaaaaataataaaactcattttttttaggattaaaatattttaaattaaataatcataattaaactattttattttaaatcgattattataacaatccaatagttaaaactactttattttaaatcaaattattataaccgcgcggtcacctaacctagttttcacataaatgaacgcctttgctctgcggacccaaatccaaggcatttccttcctctttacacaccgatcggtaatcgtccttatcatcctttcttctttttatttatttattttttatgttttttgaatctagaaaagtaaaattttcgattcgatttaatcggtttcaataattcacgagttaggcttagttaactaaaggtgagtcctttattttttatgaccctctatttgattatatcggaacccaaacaccagcgaagatctaacggatgcttttttttgttttttacttttgttttcatacagtagcaatgatagcggttgcactggcatgtgactctgaccttaacatattctttatccgaagaaattatacaaaatgaacctatctaatgtgtttgcaggaagagggttttgagttttcgtactccttttagaaaagcttcgagtagcatgaagggccatgaacacaaggtaaatactcattcaatttgttggaaaaaatagtatttttagtgttatatgtgtttatatttatatatttatatcaagtgtatgttgtactgactagtgagtgttcaacactcgttgtctatcaagattttgctgttctggtcttttgattttttttttccattaccctgagtttacacacgagtgcatgagtgcattgcatatttgtagtaaatggcatgattaaatagaaattgagattttttttaaaatttatttctttgtatatgtcttgcagctgcgattaccattcggaaaatttgagaattgtgttttacaaatatttgtatataaattaagcatagaaatttaaattaaattttaatgatttaatattttaaaaattaatatttataataaaatttataataaaatttggatattaagtgtccatatatattatatatatttgttatatatttctgtgtgggtgtgtaatatttaactaaggtgagttctattgaatttattttctagcatagaaagggaaaacgtggatagatacagcaggaagaagatcattgaattatcatgaataaaattccgtcagttttcctctttctttatctactttcagcttgaaagttacggtatatagttatgtttatacttaatagtgtataggggtttatatgataattcttaaaatgagtgttcagatacaccccttttgttttcagtcagtggtatatgaaggtggacatcctttattcagaataattactttatcgaaaacagtgttcaaacatactgttagcataacagacatgtattgaacaatctttacgacactaaattatacaaagtctttcgaaaatatacaccattttgttgaaaaataaataaaagctgcaatatacacaaaaatgggaattataactatccaagtatcgagaacaaacacgagggatgcaggtttgggtgtgcactttaacattttcttattatatgtacttacaagtgaaagaataactcaactttatcctagaatcacttttgtctgcacttgatataatgtaagttcattttgaaattatagatgccaagaatggaggacattcttaaccttcctgtccaagatcctccagctgcagagttttctgctgctcatttgaaatgggtaaaagtagatggcgggcggcacggtggtgacaatatcgctcttattccatttgctagagtggatgattttgtaaaaggagaatcctcaaatccagaatgccctgctagtttccgcgttgaatcaagaaggaagagacctgaggggagcattagtaaaccaagagttgatggctatcttgagtatactttgtatgttgattttgacttgcaatgctagttttattttgttgattttggttgttcgtatgttagatgaagccttgttagaaccttttaacttatgttgttgatgcttagattttggttaccaactttctgaaactatctactctagtttaatagatattaatttccgggtaaagctgatttagcacatcatttataaaatctataaaaaattcttgaaaataaaatacaataaatgcctactttctgaaatacttttaatgcatgtgttaccttgaagttgctgctgagtgttgcaaataaaatatggtgattttacagatactggtgttcttatggtccggaagatttccgagacagccaatctagtttggaggatgggttaaacgtgaagcctgcatcaggaaagggaagcaggcctggaagacgtcatatgatgagaggttgtgtttgccatttcactgtaaagcgcttatacaccaaacccctacttgctctcataatttataatcaaagaacgcatgtagataaatcaggggccccatgtcatggtatacttgatcaagatgcgttggggacaagagccatgtatgcccctcgaatatccgaggatttacgtcaaaaagtgatgtcaatgctttatgttggaatccctttggataatataattcagcatcacacagaggttgtccaagggcatggaggaccacataaccgtgacgacttcctaactcggaatgatgttcgtaacatggaaagggtaattcgtaattcttcacatgagttacttgaagatgatgaaagcagtgttaatatgtgggttcaacgccatcacaaacatgttttctactttcaaagtaactccggtttggaaccattcattttgggcatacagacggattggcaattgcagcagatgctccgttatgggcataatggctctatggctttccattcaatgtttggtttgaagagacttaaggtactgcaagtccttctcccttatataccatgtttgttctaaaaattatgcaaatcttgataggcatcatttttcatgtttaagatgtctgttgttcaggtttttgatataaaaaaatacacaatttttatttttctttactctttagttgcacttacgttgtaggttttggtctcttttgacagtatccactgtgtactcttcttgttttcgatctatcacataatgcaattccagttgcttggattatatcatcctctttttccagccaagatatccagaagtggatcgggttacttgctgaaagaatacgaaccaaggaccctggatggagactcaattcctttctagtggacgattcttcattggacatttctataattaggtaggtcgttcactgcacccagattcatatttctgtggtaaggtgttaatgtacatgaaactattatgcttgcagagaggccttccaatgcagagttctgttatgcatatggcatgttcgacgtgcctggataagaagcctcttaaagaattgctgcaacattgatgtacagcaagagatgtttaagcaattgggttgggttttgtattgcacaagaagtggacaacactccatggatgcgcttgatgaccttatgcaagtatttgttgatcaatgtacatttatggactactttaagaggcgatggttaccaaacataggtgctttaaatcactttttttatttttttatttttattgaaggcatagtatttgttgat

SEQ ID NO: 301950 - DNA, 1698 bp, Cannabis indica
cttacaccttaagactgaatttggattgttaagtttagcataggactgaatatacatatatgtataaatatattgtgtgtatacaaaattaaaaagaaaaaacctaacattgattcagaaaaatgaaatgaaaacacttaatgctgttgctactacaatctaaacttttaccttagaattggatttagctctacgtattatgcagttttatgcacactacataaaagtgatctttttaataaataattttttgatgagagatctttctaacaaaataattgatacttactcgtgcagccatccttgcccacttgttcccaatctgggcatggagattaataatcaagtcctcttcatcattagtaaatgcacctttcttcaaatctggccgcaaatgatttgcccatcgtaatctgcaacttttgccacaccgagaaagccctgagtgcttctgaactgcattccagttaccctccccatgctgttgaacataagtcctcaaaatttcatcttcattggctgtccatggccctttctttaaaacatgtcccccacttgtgctccctccgttattttcatcaattaatgaagaatcactctgatagtgggagatttgcccatcttcactctcatttgttgaccggctcatctctaaatttgatatcaattaaaaatgcctaccaagagctaagaaccaagcaaatggtaggttgaacctgaacatgtggaaaataatatgttaattagtagattatcttatctacatggcactatgacagccaagaaaattttccacaaacaaaatagggtaccctgtgcaaaattttccacatggcactaatagttacttggataattatattaacaagttaattgcttaaaaatatgttgttctgattttcaaaaacgaaacttcaatcttgtaataaacataatgggttaatgatacatgagaaaaaagtgagtggaagcaaccataaaagcagaagccagaaaacaaacaaagaaataaaaattacaagtcattacaaataaacagctcatctttgatgaaatcagagaatgaaacacccttgaattcttagacatgttatataaccaaatagttacctgatgtctagtttcatgatcccaaatgcaaccaacatttctctctacatcttcaaagattctagcctaggaaatagcctttactgctgtaacccatctgtctagctttgcctcctttcaaaagctaaataacttaaaccagacctctttttttactctattatgtttgaagaatcatctttttgttctttctttcttacttttcctttttttaatgtggaatcatctttttcagtcacaaataatgattggcagttgtagatgttgatatcatttttaattaatatacaattttcatctcttgaataaaagtgataccatgttaatatttgctaactgcttgtgcgtgaccatgtttgctagttcctgccgatgtactatgtatttctatgtctgtccatccatacgagcaaaaagactcaaaacagtcagcagtgagagagagccttagatatttaccctatgattacacaaagtttggaagttgaattttggtagggaaagaaaaaagtacggaatgtaggggaaaaaaagtgaaaaataaataaagaaaaattcttatgtttggtatggaaagaaaaattgtat

SEQ ID NO: 301951 - DNA, 2635 bp, Cannabis indica
tttttcttttcttgtttttgacactaaacgacaattgaatgtgaaattactcacattgtttataatgttgcaacttatatgcaatcattcaccctcaagttgggtttgcatttctagtgaaagtgatgataattatgacatgacacgattaaggtaagtataagtacacgcagttaagtaatacgtacacatgattattaaacttgttaagcgtgttgtaaacctaaatcaaagctcgactcaatatgattttggtaggtttaaggtttaacaaccatatgattatacatttcagcattatgtaacaaaattccatcacccatcaaattaggtttgcattttgtgtgaaagtggtgataattatgatatagtacacacggttaagtaaatatgtaaacgattattgaacttgttaagcgtgttgtaaacctaaatctaagctcaactcaatattattttgataggtttaaagcaaatttaagattgtcgtacataattaaataacaaattatagaattacttggttcaagcaaataacagatttaatatatgcaagttaacaaaactgtcacaatgtgatttttcaattgtatcattgtgttgtgttgaaattgctgacattatctccaaccaacctttcactttgttttactttttttaatttttaattccatttttatattctttaagatatattcacttttataaattatgtctccattagactccttaggttgatgtaaattatatgctacacttaagtagagagtaatggtatattaaacaatccactcaaaaaagtgagtatattttaataaaatataatattagagtatttttaattaatagatacaaaaatggtatttttcaacttgtcccaattttgagttcataatatacttcaaattcgaatccaacctagccttaggttggattagattggattagacatgaccaatgtgagaagcgtaacatgtttttcgagttgagggccaaagtggtggctcaaatataattctcactagaatataatgagaatggtaaggttttttctccgatttattggaaaggatgtcgcccttgttagcaaccttcttgtccaagagacaaccatcaataagctaaagctaatggcggcctcttgggcgcaagtaagtgaagaaaacatgcacaaagattgacctcgacaatgagagaatttttagaaaaaatcctacttgatcctttttttaaccctcaactatcttgacgtattattcaagcataccaaatacatttatatatatttatacgagcattgttattagacaccaatagtatctagtatctctagacatgccaccttgtgattgattgactagtgatattctccaaaagttattacattaaactatatgggacatgatacttaattagagcaatagtgatattgacacataaaaatgcgttgagcaccactaatgtcttttagcatttttcagcatttaaaacacgtccaaaactcaaagttgaatctttattgtatgttaaattgtttaaaggcatgggatgcatgtgttggtactagactaagccttggtaaataaaacctttaaatacggccatggtaggggctttgtcattgtttggacacgtgtcaatcaaatggtacatatataccagtaactaaatggtacaagttacagcacaaaacatttattgaataaagaaatctataaaatgtgtatgatattaatatatagttttaagtgtaatgatatgcacatctaaaatatatagtgtttagttacatatcttttatacacacttcatttttcataatattttagaagtctgaacatcagtttggtgacgttgattataaacaaattagaggtctagaatatgatgttaatattactcaaattaaagatcagtttgcctctatatataagagtacactatttggcttgtcctgaacaagaaggtacataactacagttgttatcataactcttatgatcatattattatattaactttgttttgtagtgctatatatgcagaataagcttattacttccttctatctaattctaattctaaaccacataatgttgctgttgggatggttgccccggccccggccccggcccctctggattcattcaagcttaattgcgatgcggtggccgtcggcaacaattgcatgacggcggcctgtgttgtggcaatgatccacaatgagaatgttctttgttcatcctctcttaattaagagaaacagaagcttttttggccttgaaagttggaagttgtcgctgagaagaactaatattttatcatcattgtgagtgactcttaagttattgttaaagctctaaaggagaaattttttttagatgggaaatatcatcacaatatatttacctcttaagcaaatcttttattcttgtaatttttctagatagagattttataatgccactcataattatatgactaaattctataatatttttagttttgttgagtgaagttcgctctaaaatatttgtatttttggtagagattgtttagtctaactttttaatgtatatacattaacgtttgtttttttaaataaaaataataataaaataagaaatattgtact

SEQ ID NO: 301952 - DNA, 2252 bp, Cannabis indica
agtcgggtcggatttgatccgatccaagtattgatcagcggggcggggcgggacagatccctacatgatctggatcagatcggatcatagccggatcagctctgacccgactcatttacactcctaattgaaatttggatgtaactttggttttttcaaaaatcaaagataaaatggtcgaatattttggtagttcgtgattacctggtttaggaaatcgttttttatgatttgtaataagaggtaggggtctaatggacaatataatatgcatttgacacttaattttgtgatcatatttagacgcaaattacttttagtgtctctcttatttagtcatcatgaaaattcttttgcatcggccttcctattacccgtggaattctttaaaattaacagttatccattaaatagtcaaagatgtaggaacgttaacaggatgggatggggcaggggcaagaattgttcccccaaccccatacccactccaatacccatttaaattaaagcggagatgggatgaggattatcctacagtaagattcctatcggtactcattgcatatacatttttgaaaaaagaaaataatgtctcaaatagaattaaaaaatttataaaaactcattataaatacaaacataagttaaatagtgtataataaatggagttaataaatacaaaattggcaattgaaaataagtagttaattgttttttttttaaaagcagttaagtacgattattaataagcatcaccgtaagtattttcataaaaattaaaatatcttattaatacaattaataaaaaacctaaactataaaattattttaattataatagttaagattttaaaatttaaatatatacatatattatattgagatgagtttcgaacgggtatctatttcccgtccccaccccgaacttgactcgagtataaatttttaaatctatatccggccccacctttgaaattcgacttccgcctgaggggcaaatacccatcgtccaccgatatctgaacccgcaaatttaattgtcacccctacaaagctgtttgtcaagcaccaaaggtaccatcaatggcctctctccaaattaccattagaccattagtttttcattgttttaattgcaaattattgtgactatttttgttttcacgacataaattttgcatacaaatgatatgtgacatcatttattttatcaataaatttcggaaagttctcaagagcattatatatatatgtacgtgttagacactataaactaatataaatatattaaagtttacatgagaatttcatatattataggtgaaataacaataatgctttggacactcgcaaatataatgttgtgtagctcacattaattatcgtacgtgtaatacattaatattacactaattttttttttaagtactatatataatacatatatagttagttgaaaatgatatatgtcacaatgaatgtaaattttgttttaaattttcaggtgtacgcttaatttttttggtcagaaagtagagtgatatatcaaattattgttacgtaattagagccaccaggttattatttatagtactacatattaattattcactcttttacaatgtgtggcataaagtttatatatatttttgggtaagtttacaatacacattttgaaagaatattttagtagactttttcggcatcgatccaagagaattttaaatttttttgtttttattttatgatcatttatgttataattatttaggataatttataaatttttaaaaaattgaattaatttataatgtcaaaaataatatttatgtatttgttatatgtgcaactatttttcttatacgtataataagtaactgtttattagacactaaaccgtttctttagttagttaattttctgttatgctgtcagtttattgttttgtaactaactgatgtaaagtgcctactgctataaataaaaccagctactcattcaaatgagttaagcttttcttgcatttctctgttttgttctgttatgagttttactctcttggttatacctgctactggtttttaccaactcatgcttgattagcttctacatggtatcagaagtcttccatggagtcctcgattccatctcccgatcctactccttctactgtcacaactcctcctccagaaatgaccgcccaatctgctcctgctagctcctctgcctggaatcccttttccagttccttg

SEQ ID NO: 301953 - DNA, 857 bp, Cannabis indica
aaaaaagtaaaaaatactgcctggcaatatatttgtaaaaaaatggcaaaagttagtatacgatttaaatttcccattaataattttgttgaagttgatgtggctcatctgaacaagttccatttgggttgggcttgtgtggtagggttttaagttcacttcaacttgtcttttccaatccgccctctttgttggaaaattatcctacacgacttgagatttcttaccctgcatttgcaccagcgattgaacgttctccgacaatcttttcttctcaggcgcgacaacatatttcccttcggcgacgacaccaacaactcttccttctctggtgctatcttcagcatctactgtctctccaacaatgtctctgtcatatcatcccattcggcatcatctccaatgaaacctttttctcagacaacatctcttgtttctctctaccaagagtttcattcttctcattcatgtgctgtaactcaaatgatgatgagcccaacaacttcatcttacccttcgagagctccgattggtcagaagcttcgtctcttcaacctcaaatcgctgagtggaaattagagatgaagccatggcctgagagtcgtgtttttgcgactcatctttcttcccctttttaatttgatgttgtggtttcagttgttctttcgctatgggagctttggtaaccacatctgagattgtcctaggtcttaattcatgcatcttgttagagtattagctgtatattaggtgtaaaagaattagggtaacttgtatttagtagtttcctattttgttggtagtttcctatttcctagtctcctagctttgtatataaatatgtactattctatgaa

SEQ ID NO: 301954 - DNA, 1266 bp, Cannabis indica
cacaaatcccaatagatatcttaccatttattttaggtttactttttattaacttttattattggctgtgaaattttatctctgcctaggttgacgacgaagttcacggtggttcatgaagggtggttggagccgcagaggaggtggatggggtcgatcgaggttcataaagggttataaaattgtatcaaggaatttatttcctttgtgagttgcaataattttttagtatttcatcttttttgtgaccaaatgtttatattatttttgtatgttcaaatgtccatatatcttttgttgtattcaaaatgtttgtatgaatgttcattgtgtttataatcgatttgtacttaaattatattatattttttgtttggtaaaataatttgttaatgcttattgagattaaaaaatttctattgttgttgtcatttattataaattttaatttagtataattaatttgtttgtaatttttagaaagaaaataatcttttaaaaatgtaatttaaattatgcaatatatttggttggtttattaatttttttctaataaaagcatgatatagtgcaacgctttgcgtgttgctataatcaagaaaaaataattaaaataaataaataaatagatacagtgacgcgtcaaaagggttattaattattgtctttctagtcatctacattagtgaagagtcattaaaatattatagtcacttaacgagtgtcactgaagctcatttgtttccctctatgagccacctctcatgtaaaattttcctaaacagaaagcagttgagatagtatatctctgcttagacaataccaacaatagagtggtcgcaacttatttgtacaaacatgagggtcctatcaaagttcacaccttggactatatgattcacatgccagcattctaattttagaaatgctacaagatgttgaaatcccagtatcaattgaggggtgcaaatatgttaggaaagtagtgaatatgttctttccttgacctaaatatttaattttaacatctgaggtaaaatttctttcctagaagtcatcattacaaatcatatatacaacttttgatatattatggtatttcgtatagagtccacttgctcaaccaccattaagaagtgttatgtcgaagggtaaatgtcctatgccttgttgaaaatgtggtggtgatcgagctgatctattattcattcgagagatcatggcgcaaatctccaaggcaatcagatggatggttgaagaattttt

SEQ ID NO: 301955 - DNA, 2235 bp, Cannabis indica
tacaactttacatcaaaattgttttcttctaattgatcaacttgttgattattaatttacctcttcaataaattcttgtgtgggagctccaagtctctttttaatagcaacaagcatcccatcatgaagcaaacccttgtatacctccccaaatttgccttgtccaatcaaattattgtcactgaaattcttagtagcaagagacaattcatccatttgaaaacgcctggtttctctaactgaggataactcaaccccaacatgccttccaactgcaaatcatatcctaattcatcatcattatataatccatcatcatcataagtaacaaaaacagaaagaaagaaagaaagaaaggagaaaccccacaaaaaatacttgtggtttattttgcaatgaaatcattttagggtggtggggtttgatgaaacttgagttaccttgtattgatggatcagaagaacctgtctctgatgttcttgaaacacttctatggcgagatagatagaaccaaatgaatagaacaattatcccaaccaataccaaagctcctgcagcacctcctaatattgctgcaagagtccctgacatttggtatgggaacccctttcaactaacccaaatggtattatcatacattaaacctgaaaatatatatacatatacatataaaggggttgacccctcccaaaaaaaagcataagataagataagaaaaaggtagaatatatatacctagttgttattgttattgttgttgtatagataaggtctatgtattgtacagtgaacagtgaaaaaagagctatctttcttttatttaagctcttctaagtgtctctgaataaagttaaattaaagaagtgaaaaagggtctccaaacaaacctgtattcctcaaaaagatcctcagcttcatttgcccaaatgggaaaggaagaaaaaataaatgaaacccagaaatgaaatgattgaaaagaccaattctttgatgattaattgaagaaagaatcaatttttatgattaaattaaggggaaaataatgaaatagagagagagaaactgtctgcctgtcatggctggtcttctttaagacaatgccgacagaaagtaaacttgcgccgacaaagcttttttttcagggttttattactaatgcaactgcaactctttacctaatcaccaaatctcaattcaattcaatttctttccttttcttctctctccctctctctatatatacacacacacacacacatacatacagaaacaaagaacccttttttattctttttgatgcagaccaatcaacattaaaaaaaaaggatgagaaaaggtaaagaaaaacagattgaatattgcagaagaagagaaagatgatgatgaatttttatatttatatatatatgtgtatgtgtctatataacaataaatacacaaagaaagagtaggttttggtttggttcaagcttctgttttgtgtgggcttgggctgtaaagcagtatatttggttgccttctattgcaacttgaataatgaatattagagagagagagagtggagcaacttacattggcatctttgctgttacagattcatattagcactataacaccaccaacaacctgtgtccagcttgccttgccttgccttgtttacttattcatttattttcttgccaatttttatatatgtataaatacatatatatatagagagagagaggaagagagagtatataccagtgttatatatatgtatatacaaataaaaggaatataatttatgaaagaaggttagaatatggacaaagtaataagaagaagaagccattagagattcaaaggtgtgaccttttgtggggttgctatccccaccagccagctatgttgacattgctcctacttataaataaatatatatattttatatattacattttactaagcaaacaaacaaacatacaaatatattcatattatattagtagtaacggctacctcattatatcaaataataaaaatataaactttatatatataattcaatataaaaatatgatctttatttctttcttttggctttattgttattcttttctttttctttcttttttccagagtagcagatttttattcacatgaactcttcggattcttccttatatcaactttaatttataagcttttgataccattaagaaaagaggggaaaaaaaccatttaattataagc

SEQ ID NO: 301956 - DNA, 1425 bp, Cannabis indica
aaaaagtgggccactattttatttttggcttttatttttcttttttctttattttttctaaattagcattggttttaaacactcgctaattttttaagggtcgatcctcaaaaaaatcataccatacccttaaataaaacactctctttatttcccctttcattctcaagcaatctcctaggcaatggaacttgagatttgactatcacatgatcaaaattggttccaacaaaagtaataagtatgattcttgtgtttatttcaacaatcacatttacttgttgtatatgtaaatgttattttgatcattggcaatgataaatcaaagatagatgaactaaagatatgaaactcaacaatgaattcaaaatgaagacctaggagctaccaagagaattcttagaattgacataaagagacctaagccaaatacaataactttgtcttagaaaggttacttacagaaaatattgtgcaagtttgccatgaacaaatgcaaggaagtttccacacttcttgcacaacatttcaagcttattgcatgtcagtctccaattactgatatagagaggtacaagatgagtgaaataccttatgcaagctgtgtgggaagcttgatgtaatccatgctatgtactggacctaatctagctcatgccatgagtgtagtgagtagatatatctcaaatctagggtgtaactattgggaagccctaaagtggatcatgaggtatataagtggaactctaaacactagtctggtgttcaacaatgagagccaatacagagaagttactggttttgttgactcagattttgcagtcaacatttggcacaagaagaagttgtaaaaggtatgtttttaatgtcctaggagggtgtgtcattgtggctctttcctccagagaggataaatatatggttggaactaaagccatcaaggaggcattatggctaaagggtttgaccagtgaattagggttcaacttaaagtataacactattcactgtggtaatattgctttacacctcatattaaaaattcaatattttacgagaggtccaagcacactgatatcaaaatacatttcatcagagatgtaatgctctcaaataggttcaagcaaggaagatccgcactcatgacaatcttgcatatatgtttacaaaatgtgtgtgctgagacaaatttcatcaatgcttgaacttgcttaacattcaagattgttaagtcttgtcagaattttctttttggttcactgaactaattcaagtggatatgttgggaattagttcactaaacgagtgactcatctgcatagcttttatatagatggagcagagatttagttggccagttaccactcttgtcacttactctctcggaccaaccaacttcaaagattaagtgcatgtttgacatca

SEQ ID NO: 301957 - DNA, 1584 bp, Cannabis indica
atcataatgtagacaagtttattatggacataattattatgaaaattttattttgttgttcttctgtgtagaaagtgttgattaataacatatgtaaagcacgtaaaaatagagtgatttcactttatattatatattaattttaacaataataaataaaaaaaatgaagatatattaatatgtggggtttgggacataatcatttggagataaggtttcgatctcattactccttttcatctcttatagttatatactataactctcttgagtaatacttaagcaaaaaaccactgcatgcacaacataagactagttaagattattattcatatcactataaataaataatgtcatacataaaaatatgcataaaacgattacacatgatcttatcttattactatagaaaaaaaatgatgatgattatatacataggacaggtgcacatgaggttagtacatgtcaaaatcaaatagatatcctaatatatatttatatatatattttgcttatgaaattaattctacaacatatatacatgactatatatatatattaattattagtattctatttatttggaaattagcaacacaaaattgtaaagcttaatttctttaaacttgccggtaacaaaagaaataattgactttaaaataaaattccctttcatggaatttggaaatatttggaaatagggcatatatttatttcaatgtatatttgtttataaataaaactttccttgtattacccaattactatattgagagaaaacattctgggtccaattattttttttccaactttataggtttcttattaatataaaaataaaaaatgtctccaatatatatggaccaaaagaaaacttggtaaacacttcattttctcaaatgtaaattatattctagatttgattccctttttgttagattcttcatttatactactttccattattggctatccatttctcttattatatacatgaatttatttatacaaaattatttcaaatatttatttacttaatccgtggtgtatcaatttgtaatattacttttacaattcaatacaataatatatatatatggactacagaaattacttcatttatatatactataatatatattatcatatatagtatgtccaaagagggactaattttacctctcaaatattttataattttttttgaaaagaaaatattttataatttaaatatatattattttagtgtactataaatagagggaaacacttattcctttaaatttggatttattgaaacattaacttctaaaatatggcaaaatggcatgtggaggtgtttttaataaatttaattttttttcaagaggatgtttattgtataatttaaatatcatgcatatttatatgaaatttttaaataatttacaatataaaaaataaataatttattgcataagtattaatttatgtatatacacgtatgtggttaaaactatttatttgtagttatgttttattttcttagtaaactattcaaaattaatcaaaaaaaaaaaaaaaaaaaaaaaactaaaactaaa

SEQ ID NO: 301958 - DNA, 3091 bp, Cannabis indica
acaccaattaatatcacacggattgtatgtaggttcacaccatgaatatgaaattgatcatagtatatattcccttgtaggattgccacttataataaaagcagctaccaacattcgttactccacccacccaagtattctccaaaaacttaaatatttaaatttactcgaaattaattaatttatttatttgttattttttaataaaaaaacattatactaaattaatgttatatttatttattaaataagattaattattgatgattaaaaaataattaatcttatattttcaataattaataagattaattaattataactgagtatgaaaaaacactcatttaacatagctagccagacttttaaaagagaagggggcaactgatcctcttaatttttagtacatatttatactatattgtattttttaattgacactatttaaatattttaatctcaattattttttgtgacaggatttattataattaattttatgaaagttttcaaaaaattacaaataacttacactgtgaaatttaaattttgttattgttaagttagttaggagttagttgttaattctaactattttcatcagctagctttgtactatatatacctccactttaccattatttcaattaatgaaatatttaatgtgagccaaagggtcctccttcccggtgtacatctttcaagttgacattttgaacacggtcaggaggtgaagggagttgatccgtgttgagaaaggcgtgcctcttgcctggttgagttccaggttagtgaattttgggctggttagactctgtattaggctctaaagttggtctaattgagcttgcacccctagatcaacttggcctgcctgttgatcgacctgggtcacttgttggacccctagaatatcaaagcgtacaaagttgtctctattctacaggacatagttgtccacattgataggatgattatcatgtggtgggacgaaatgtccaacccgatgacctctacttggttcaaatcatcccgatggtatttctgggcctaggtcccatcttttggatgactaagttagcttttggccttgtgttcgcattttggttggtggaccttactgacctgggaggatctacgacattctaggtgttaccatgattaccatcgttgggcggtttgtcctaacggtagtcacacctttaattatcattacagggcctactgtcggctttgtcatcatttctgctagggtatgattgtccactccagaacctttcataaccttgttgaggttgttagttggcatactggttctgaccatgaacttggactcttcgatcatgattatacaggcctacatgtcgccgagattctccaacttgtcaaggagatatgccctctctctttctctcaagtctgggttggaagttcgtcttgtcgtttcttctgaggtagtgaccaggtaaaacttaatcatctataaggtagccagtgatttgatcttggagcgtggaattagaaggtatataatttgttggacattccttgagccgatattctcgtcattcgcttgggattcaaagaccttttcctcttctagtgcctcgtctaggtggctggaccttctgtctttgccgccagtctgttgggtaaatttcctaataaggtcagtagcttccctgaagcagagatttatctgttcttgttgtgcacacatggattgagcttgacggttcatccactcctagagctcacgatgttgttgttcgaaagtatggtttacaacaatatgtgttttctcttggttgtggtggagtgtattggtatgcgtctggacattcttaagttatgcagcttagaattatctcccatgtctatttggggttctccttgggatggctgaacagtgtcaggtccagtttctccggcatcttgtgtactggtcgtcccagtctctcaaacaccaagtgtgaatctagtggtgggggtagtgacctgagtgcttctagtgtttgcacttgcggggacttcgagttgttgaggaagcagcccagtgttggggttgtctacccctgcatcaacgggtgcgtggacattaagatctgtcaccataggatcacatggttaagttgacgaggatcttcttgtcaaaaccatggtttgttgacttaagtgtggattgaaaatcgaaggttgatgagagcaagatgaaattctggccctcaatgaaaaaacctagatgtagaccccacttttagcttacaacacggaatctttaaagtgacaatatttgtatagtaaataataataaaataagaaaataaataacacacagagtttataaaagctcagcccctaattatgatatagcctactcctatttttattgtattattgtgacgaactatcaagaccacaaggtctggtcaggtgagtttctcaatagctcttgaaaagtgtacaaatatttttgtcgagtgtctactcttttagaatgcaaaaaaggtccccctaaatagtgaaatgacttcactatttataggggaagtgagattacgtaagttgttgaattataagagatattaaatgtaaaggggaaattttaggtaaggagttaaatctgaaatctcacaattatcttaatttgaatcccacgaaaataagaatttaattgagctacttttgaggaaacagttaaggaaaagatttgtggaagagtttcactcattgggtgcctctagtcagtcattagaatcgttcggcacgctaagcctacttggtattttacgagatctcagctctgttcggatgattgttgtcgagggtccgactttgactaattcaacttcattttggcctagtcggtataattaggagatatactctgcgtaggttcaattatttcagccacgtgtcacctcgctaagtgccacatcattggtgcaaattttggaataatataactaaaagtttaaaataactaaaataacaaaattgtccaaaaacaaaataaaacaaaacatatgtaaacaaatacacaaaacaacgaaattacaaattaaaaaaaactactaagatatacattttt

SEQ ID NO: 301959 - DNA, 1571 bp, Cannabis indica
attttttaattaaaaaaaacattctgataattaacaacggttagaatatatacactcaaaacaaaaaatatgaacacaaataatttaaccaaataatattagtaatattgcatttgttatattattttactctgacaaagttattaaacataaaactttacagaatcaaaaaaaaaaacagagacatattacataatttagtgtttcataatctattatattatgatttaataaattaaatatcttgagaataaaaatcaataatttcgttaagattgaggttaaagaaagaagaacaatcattatacatcaaccacaacatgtgttcgaacaaaattgcatcgacatccacaaaaacaacctttgtcttcttcatcttattcttctttttcagaactctgttcttgttgatcttctctttattattaatggtagtatcgatcaaaactcgaaaagggttttcttgtaagacaaaagggtccactaaaaactctctcttttcctttcccaccaccacagtcaccgccgtattttgattttcttggtcgccaaacacttcatcgtgggtcaaaggttggtagctcagccgtgaacccatgcacttgcttttgagtatggaaactgggaagaccaagcagcccattgagagagaaaaggtaagaatatgtagaagagaagagtgtgtatgtgtgttgtaatgaaatgggtatttggaataataggtgaaagtgagaaatgaaaaggtcttaattggttttgggtaaggagtcaatgagagtttggtgatgaaaaatatgaatgaaaatgaaatgaagggtatggatttgggtttgatgacagaaaaaagagacgttggggggttggagtgggagtaagataaagtccaaaatgggaatatgaccgactcaaacaatcaatgaatcaatcaatcttaataataactgggattgagagttgagagttgagagtggagagtcattctcacattttaggagcgtagcgtggacgcgtcagatgtgataacgcggtggaggcaagcttagacagctttcccaacccataaacaacttaccataacataacatgtgtctcctatctcctatttatcatcaccaacaattatagccgcgtacacattattatgattattattattattaggctaattagaatttttgtctcctgaccttgacatgtaggggtgtgcataaatcgatccaatccaatgagaaccgaccgatccaattacaatcgaccgccaaacattggatatccaattgtaatcggatcggattggatgttatttttaaatatccaattggatcggatcggatggtggatggggtatctaaaaatccaatacatccaacatccaatcgaactaattaatattttcatttagtttggatgagtaattagattttatattgttatacgtcaaatctatatgtatatatgaaaattaacattaaagttttacttttttttttactttggattggatggatccagtccaatccaatacatactggatctaaaataattggatggatccgatccgataccaaaaa

SEQ ID NO: 301960 - DNA, 1733 bp, Cannabis indica
tggtaaaataattccaacaccaggacccacggctaaggggcttcttcttcaacatggtcaacctcgaccactaacggaagatcttgggtattcacaaacctcatggcctcatcataagagcccaaaggattacccaagaccatgatgcaagtcttgaactgcctcccgatagcacctggtctactaacaggcatagcctgctcagcatcaaaatcattgtcatggctggccgaggtctcctcatcctggtcagccataggctgcttggccgcaggctcctcaacctggacgacccctgacttgtccacttgaggttgtttagcttcttccacattacgaaccctccctcttgtcatcaattcaacaatgtgagggtcctgaggaggtgtcctacgacacgtccatttggtcctagccatggcaggtttgaagtgcctagcatagtaaccacagtctcagtggtaggaagatcactgattgatagagttacccaacttgtgggcaacgtatcaggcatactgtcctagaaaatgtaagcccatgaactagggaggaactgcctccacccctggttcagctcccagacgaatcgaccgtaaaattcaccacctattctcttcgaatagtggtgatgctcaactttaggttctagggatccactactaatctcgaattcactcgaggggctacttgaagaacccttagaagaataactagctaaagaagttagaggatggtctttgaagagaagactaagcaagtcttcatcgatccggttgtcacctcccaaaaagtcacgtgggttcatctgtataaaaaaaatacaagggaaggtgagcaaccaaacaagataaaaagacttagacaaagtacgagtcaactaaatctaagggtactagtcagacatcttaatgtacaaaatcgtaaatcagcaaagtacaagttccaagtgcaaaaaattgaatgggcattggatcttaagttgttcattgactaagatagacttgccgaaaggtatgccatattgagtccctacaggaatcaagtatgggacaagggttaaataggcttaaaaggtcgtgagaaagtctttgctaaagtcaaaagaaggccaaaactgaccaatttgatgggaccaaagccatgtgccagctagggtcccaagacaaaaacacgtcttggaaagggtcccatgagcaaagcatgaaccggccaggttcccaggctagaagcccaaaactagccaggttccaagacttacaccatgtgccgactagggtcataaacaaaccttatatgtcggcctgggtattctacaaatcaaaaatcctacttttttaaaattcgaacgatgttctctgtcacctaaagagtcaagaatctaaacgtagcccaaaatgtaatctttttatcaagaagtcatgcattatacatcctaaagctatcatgtggattataatgtgaaaaagactacaatctaacgtgagaatcaagaatttaaaaagcttgaaaaagcttgaactcatcaatggaagattcaagaaaacaacaagaaaatgagattgaaagacttacccactaatgacgtttgctgtggatgctcgtgggaaggtcagatcattgaaaaaaagtgaaaaccacgaagaatgggaagcttgaggcgttgggcttggaggggaaaaaagaagagccttttccctttcttgaagggaattcaaagagagagagagaga

SEQ ID NO: 301961 - DNA, 2180 bp, Cannabis indica
tgagtgaattataggaatggagagaagtaacgagtcactacaacaaattttatttttactcacaacaaaagttgtgattaattatatatgttgtgaataaaaagtccgtggttaaatgtattagtcacaaaaattacaatttgttgtgactaaatatatttttagtcacaatacttgttgtggctaaaattaaattactgacaacttgtatctaaatactatgttttagtcacaagtaagtttttattgtgactaaaaattacatttagtcacaaaaaaaattatgttgtgactaaaaatttatcactaaaattaacagtttttttaaaaagtagagggactcgagtggactcgaaagtaggaaggtgaagagaatattgttttacttttctcttgtaatcctaaccgattttattattttttaagtataattaataagaaaatatacggttcaacgtacaaatatatagattaatgtgttgtaaattcatttttaaaccgggtatttaataagcctcgttataaaatcaaccgatcgacttttatttctaatgtttactcaagaaaattttgtatcgtcgataataatatatgtacatgaatatatatggccaacggatttattagttattaatccacttggacttttcaaatgtcgtttatttatgggaaataaaaccaattttaattaacaaacattattatagctccttcgatttctctatagtataaatatacataaacaagccttaagaaagtattactactaatatcgagttaattgaataataatatattacaacaatggagaccactacaaaaccaccaatgtcgaaagttacactaaaacttctaatcgattccaaagggcaaagggttcttttcgctgaagcaggaaaagactttgccgattttcttttcacacttctttctctgccagtaggcactgtgataagactcctctccaccaatggcatggtgggatccattggtaatctttacgagagcttcgaaaacctaagcagcacctatattcaacccaacgttaacaaagacattattctaaaaccaagcaactcagctctcggcggtgccgaaacactacttcttttcttgaccaacgacgatgctgcctcctcattggctgccaaaaaggtctacgtgtgtccgtttcagcataactgtaaccaacgccacgtgtcggacaagcctggagccatgtgtcctacttgtaatcgtgccatctcccatgagctgccgtacgtggctgccgcagcaggtggcggcggcgaagggggtccggggtccttaggtggtgatgaaggagggtttgttaagggtgttgttacgtatatgattatggatgatcttcaagtgaagccaatgtctactatttctagtattgctatgcttaatcagtttcatgttaaggaagttggctctcttgtggagaagactgtttcggtgggcttgaaagaggtatgaatatatatatatatacatatatatatatattattttgtttcacttaatcagtttcatgaccatgcatcactgcaggggttgaatttactgaaagcatcactgcagaccaaaactgttctcacaagtgtttcttgggaacaagccgaaggacaacaagttcatcttagaggatctgctttagatctttgtgttacgctaatatagatatatttatagctttatatatgtgtgctatttttaaaattgtgtgtttaattttggggtgatagggtgtttattgtggttcaatttggtcatctgaacttacttttgctgtaagggtttttttagtttgatcttatatagcttaagcttgttgccttggtaggtgtgtgtgtgtgcctccttgtttttatcagatactatgtttaagaaaaatttgtattttctcttttaaattgcagcgtgtcaactcaatatgatcattatcttaactttgaattgtttttttggatgttatttttaattatattgaagataatttcatagtaattaaaatggtttattatgaaaactgggaaggatgagagcttttcttcatatactattaatacataccagctaagacacttcaatccaaatgttacacttaggggccgttactattatttttaaaacgtgattaaaaaattaaattaaatatattaaacttatat

SEQ ID NO: 301962 - DNA, 1405 bp, Cannabis indica
caaaattagtacaatgtttaaaaaaagaggtaaaaatgataaattttaaaaaagaaggtaaaaataaagatgacaatataaaaaaagtatagagtgtaatttcctctatttatttttctagggttaccagcccaattccggcccaaatgaaatgtccatctaaactttaataactacaaatttatttgtcttgccgaactcaatggaaatagatataaaggaaattattgttcggccacgccaaaaaagttagttggcgagtaggtgaatttggacctttggtacctataaaataattatatttcatcatatcccataattaattaacagtcctacttaaaaaacacttatggataaagtattataaatgtcaccttacttactcttacttctcccctataatgagctcccctacaaattagcttggccccaaattaaagaagtacctcaaagactcactcacactagcttgtttcaaaatttgtactaactaatttcccatccttgtgttgtatatattatacattacaatgtggggtgcctttattacaacactctcggctctactattttggactatgcttctattttcattccccaccattctttctcattcggttgattctcctaccccaaatcatcacaacggcaaccactacaggcggcggctacatccaccgccacatcatccacgaccccataagagactatcaccgccgccgccgccgccgccaccagcatggttctatttctactcaccaccaccccctagtcctccatgtgctcctcatgacgctggccaacctttgcacgcgtcaccacccccacacttgcactccaagaatcgccgccacggccaccaccaagaaccattgccatgaagacaattaaagaagatctagttttgtagctcttctaatggggttatagtaataataattagttacaagaactaaaagagatgcaacatatataaggagtgaaaaattaagtcagacatctaacgttgtgtagttttccttttcaaaacagaatattatgaaatttacttttaaaccacacgtttatgttttacaaacgacgacagactttatgtagtttaattgttgttttattaaataaaacaaaacttttaataaataatccgtagtgttttttttttaacttgttcccccaagcacgatgatttaattgttgttttcgtgataatattgtattgggataattacattagacaccttaaattagatcttaatatcaaaaataacttggccatttaactattctattttaacgttaaatataacgttgccacataattaggtgcccttttttcttgttaggctttaatttagttgcccacatttttagttttaatctacacactgctttttatttttttctt

SEQ ID NO: 301963 - DNA, 3736 bp, Cannabis indica
gctacaagtaaagacacacggatctcatatatatgataaaaaacattgattgttattggatcacattcaatgtttttaggccattcagattcaatctaattatttattagatgttaaattttaccatctgatccgatccagttgattacagtcatccaatcaattcaacatccattgaatgttggattgaatcggttctatcagttagatgtattttatatatatttattggtttaatatttagacttattcaatattttaaaaatatacttttcttttaaatatatattttataagaaaaaatttaataaataggctaattagtaattttttccccgaactttgacgtgtactaaatcatgccccctaaatttttttttatggttaaaaattcctcctcaactattaaaattgttgaatttaagaacttttgtctaattttagtacatatcaaagtctagagagtatgttttagtacataaacaatcaccgaaatagtaaaattgaatgaaattagacaaaagtccttaaatttaacaatttcaatagttcaggagaaatttttaacgaccaaaaaagttcaggggacatgatttagtatatgtcaaagttcggatggaaaactgctaattagcctaataaatatatatgagaaaaacaatgaaaggtaaccaatcactttatattatttttctcatttttttattttttttttaaaaaaaaccataaaataaattagaaaaatctatattgcaaatgtcttaaaagccatacaaatgaaaatattacaaaacagataatgtaacacaaatgaagaattgctaaattacattcttaagtaatatcaaaaaccttaaccacacaatagtgaaaaaacatatacaatacaaaataatataaaagaagaaaattatgaattctgtttctatatataaagactattgctaataaatcaatactatagtggtggcactgctccaaataaaataaactgttttcaatatcattcaatctgtttatatataaatgtagcttaatataactattttatgaagaatgagcaaacatcatatgttttctctaacacaaggtgccgcggtccgcgtaatcgatcacttccagtacgccatgttttgtctcttggttttgatgtgctttggagacaaactcgaggaatcaaagatcaaagaaatcaaaactatgcaacgtcgcatgatgagggcattctccggcttcaacttactcaatatctgcccaactcttaccaagattcttttcagaaaaagatggcacaaattgtttcagctacgccaacaacaacattctgttctaatccccctcataaattcccgaaaaaaggtcaatgaagaagccaaagccaaggcttcttctgctcatgatgataatgattccgtgctttgctatgtagacactttactcggtttggagttaccagagaagaaaagaaagcttgaaacagaggaaatggtgagcttgtgctcggaatttctcaacgcggggaccgacacaacctccacggcactgcagtggatcatggccaatgtagtgaaacatcaagagattcaagagaagctgtatgaggaaattaaaggggtagtgttagtacgaacaggagaggtggaaatagaagaggaggatttgcataatatgccttatttgagagctgtgatactagaagggctgcggcgccacccgccggctcactttgtgctgccacacgtggtgagtgaggacgtggttgtgggcggacatgttgtgccgaagaatgggagtgtgaatttcatggtggcggagatgggatgggaccccaatgtgtgggaggatcctatggagtttaagcccgagagatttttggttggtggtgataatgataagaaagttgagtttgatataaaggggaatagggagattaagatgatgccttttggggcagggaggaggatttgtcctgcctctggtcttgccattcttcatttggagtattttgttgctaatttggtttggaagtttgagtggaataaggttgatgaagttgatttatctgaggcacaagagttcaccattgttatgaagaatcctttgcgtgcgcgcttgattccaaggcactaggattggctatgatacatattatattctacttggtttggctagctgtgtattcaagtcatgtttgaataatgtaaatcatagtgagtaaaatgttgatcatgttaagaagctaaagcaaacacgaaaatctccaataagttatgaatgattttgtttatttttttcgattgttggataagtttttgaggtgagatgttagggatttttttttctaaacaaaattaggtcttgatttcttaaaactattattatttttcaataattcagaatggcgtatttatcatactttaataatatattttttttatataattgtatgacacatccttatatgttaaatggatactatccgaaaccaagttaaagaaagaatatagatggattactttttattttcaaatgttaaagattatgttttatcttcaaatgttaaacgggattggaatgcgaatgacactctcgtctgggtaaggatttgttaatattttatttatttttttaatatattagtatatttttcttagacttttaagttatatttttttttgacgtggtgaacagagtcagatatgattaaaaatacagcaaattacaattggtggtgaaacctcctcaaactagaatagttcatcgtctaatcgaaagacatattttgtcaaaccatgagctgtaaaatttttattatgagccacatggaacaaaactgcccttataaatttagacaataaaactataacatcttcatataacaccaaactaaaaaaataccttcccataataatagttgttgttagaagtagcgaaattaataaaatatagcaactaaataaaaaaaaaacacaattatattagaatgacaatctttaaaataaaattaaaatacaaacttagaatttaatggggtgattaagatcacttaaatatatcataatactattagggcaagtttaatgggggtgtttttgagttgtttgttaggtacggagaggattgggatgaggtgcaggagagagaattaaattttttttgagttattgttgtaacgaggctactgtctagctacactgaccaataatttttcttatttttttaataaaaataatgtattgattgattaatttttttatgtgaatactctatagcaattgattgtattactttcctattcgttgatgatgatctttagtataagtttaatattcattcccacatagtttaatatcacctcagtattagcatcgttaataaatagtcgtaatgtctttatattttgtcttactttacaaaataccatttttaatgtataatttgaaaagataaaaaaacagtaaattgcgacataaaaataaataaataagagagatgcaatgctacaactgagtaccaatttggtatatagaacatgattatcgaattgaaatggcaatgtgaaaattgttatgagaactggttttatatatatatatattcttatagttttgtataaatataacacgaaaaaaaaaacaatacacaaaaataacattcaaacaatatcaaaaactataacaaaataagatacaaataataaaaaatcaacaacaaataaaaatacaatataaaaata

SEQ ID NO: 301964 - DNA, 2130 bp, Cannabis indica
taatttttgtaaataatacttttagccacgggttttttagtcacaacataggaatgatatttataattaattacaattttttacttttagtcacaaattttgttgtgaataaaagtaagatacacttggggctaagaaaattctattataattgaaagattataactaaatagagatacattaaaaaaattgaaaatacaaaaaaaagataaaatgtaacaacgataagaataaataattcttaatactatattgtcataattaaattatttttaagtaaatataatatttatacatatgttacaatttagaataaaattattaattctatataaataaatttatgaactttatattttttttatttagatataattattcttatatagagttatactttatcaatattgttattggtccaatgtctcatatagtttaatgtaataacttttaaagcgtaatagtactaaccaatcataaagcaatatgtctagaggtgctaagcaccagtgatgtacaataacaatactctttctattattattattaataataattatttgtttaataaacaaattattataaagcgatgactaataagttggtgtaagtaaccaagctcgatggatctctttgaaagtaaaaagttagtatttatttaatgaatgaaatgaagaaagaaagtatatatataaaaagggtgaaaaaacaaagtgaaaaagttgaaaaagatcaaatcaaagttggatttgaaaaaggttagtagtagtgggaaaagtgaatgacctttacagccagccaattcgatgagaagttaaaaatcattatgccataattgttttaggaccacgagctatctagctagaataatcagaaaacaaattaacaaaacaaaagaaaaagggtggtgccgtccgtgagacctgaatggctaactgagggacccaatcaaaattaatatatatatatatgaacactgtcagtgacagtagtgtgatgatatgatcacaagggaaagtttatatatatatacaaagacaagagatgactactaccgcttcatatgtcgatcaacccaacccattccccacttcttcattttctgaatcactcatctaattattacttaatcttattaattctacaaattttaatctaatatatatatttaaaaaaaatctagaaaaatttattaagctcaccaacaacaacaacacttacataataaaattacttacaaattcttagctttcaaccactttactatagcacaaacactattaacaatataattaaaagtgaccctaatagtagagagtttttgcttccaaaaaaccttatttctaacatataaaaatattaaatactttaaaaattattaattaattataaaatattatatcgatataatattaagtaccttaaaccgggactttatatgtatactcgtctcatcttaatctatgtacgtatcattttccacatgtactctccccacctcgttaactctctaactaattgatataaatgtttttgtctaaaatgtgttttgtttttcttattgtatcttaaattgcattcacacgtgttattattttattagttcattaattatgtaatttcttcttttttttaacaatattgttcaaaactggagaatctacttccccagaatatttactgttgatgattatatgtaaaaaaaattatacaagattatgtatacagtaattaattaacagtatatataatacgtcattcgtggcagtttcattattatcatcatcatcatctcatgagttataatgattagtacaataacggtgtcatgatgagtagatcttgtaaaatgatgatataaattaagacctttaagctgcttagtacacaaattgtacattcacatgtatatatgggtccctctatattaagattgtattgtattaaataatttttatatataaaaatttgaatagagtttgtattatattaatttggaaaattctacaatacacccccttaaaatggatatattgatgcacccctatctgttttagcatccgaaataattttttagttaatttttttctcatggtcatgtacgttattatttaacaaatcctgcaaaat

SEQ ID NO: 301965 - DNA, 3984 bp, Cannabis indica
gtatatcagtatgcatatgtatttacatgtttagcgtgcatgttagtaagcttgctagattacattagatatgttatgttggctttcgtgctctttgacagtatcacatcggtacgactagagtatgactagcgtaccgagtataggctgatattatggtcgatagcaccgtactatttgacagtatcacatcggtacggctagagtatgactagcgtactgagtataggctgatacagtatcacatcggtacggttagagtatgactagcgtaccgagtataggctgatattatggtcaaaagtaccgtcgtacgaacgttctaaactcagtaccgtgtgggacacagggattagggtttatgttaggggtatgggcatctgatcataatccgggatatatgtatgttatatgatttatgcttttcttactgagtctgttgtttgatgcctgcattctcgcgaaatagcttcataatcttcaggagctgcagtggcaggtgatggctcaagtgtggatagagttgatgtcttatgcagccattaattgcagcccagcaacacacgcgcaacagcctagtagaggcggggagcttttgactttcacttggttactcatgtatcatttgggtttaggaacacaattttctgagcaggtaccacatggttagtgttcatacctgacttgaagagaaggcaccaaaaatttgctggttttaattaatattaatgtatgtaaataaacactaggaactactaattaataaatgaaatgtcaagcattgagtttgattgcatgaactactgtttctactattttattatatatgctaaaggcaatctaaataaataatgacttgcataacatagcatgtgctataaacgagatttcctagtgtctcttaataaatagtatgcaagctaaaatgtgaataagaggattaactattcacatgagcaattaggaaatatttaaaatagctctaagtgttgtttagaatatttatagttttcactttaataaatatgactgacgaatattaactactcgcacaggagacgaccaaaactgttgagaaacagtcaaatatataaaaacatttaagttcgttgcttgcctgaggtttagaattgagaaattttttttgtcaaagtggtgtaagtaaaacttatttatgagcaaaaatacataacacattcaaaatattcataactcaaatgaaattttttcatccaaaaagaggaaatataaataaaataaagtggcatgaaagttaaaagtgtaattaaggcaaatttgaccatttaacaacgcaaaataaaattgattacataaaagccataaagggccaatcgaccattgtttagaatttttttgaaaactaagtctacattgtgggagactcagagggcctttcttcttcttcttcttcttcttcttcctcaacgacctcaacctcttcagagttgccaccttcctccttcttagtttgttcaaaatatgctagcatcgccttggctacctcacccaaaaagccaaaatctatgtttggattcgccatccaggtcatgtaaatcgaacacttgaccatcaagttaaccctcttgtcagtgtttacttggacatcttcaagattcttattgacctcttcaagatctttttgggcatgttggttagccttgtgaagccactcattatatatcttcaaacccttctcatatttctctagattttttaaaattttcttttggcaagagatctccaattgggcatcactccattgcttagccaaaagctcgcaatggttgttggacttacaaaactctgtgctaagctggttgaagttttgaagacccttttgttgagcccttaaggttaagaaggaagcctgcatagaaatgatgtcagagaagcagtttaaaaaaatattggaagttggactaactgattgcatgaggtcaacattcctcaccataagtcttgtatagttccaattattaattagatcccagtcatcttggaagaaggtctagaagtggcatcagttttgtgtagcatactatgagcaagcatgagaacccttgatacgtatatgttttggtaaggggtaggaatgctccaaaaggaccatctctagttgggtcacaaaaaattagacttgatggatagaccctaagaattacccatttatgctcgaagatgctggtgcatgagtgaagttggctggagtgactgtcctagactcaatgacaatgccaacctatgtagccttcttcctatttgtccccttcttcttcttgggagcttcatgttgtggctcagaagtaacttccacaggagcgttcctattcttacctctacaaactgggacactgggactgtagagaagatcttccaaactatccatatctacaaaggtcaaaactccaacctatattattaccaaaagtgttagatgaggaaggactgttataataattacaaaactccctacaactagaaatcatgaagatatcataggggttaagtggagacatatcccagtctgaactagcaacgctattggtgttagtaccatattgttcaacaattccatagtatgacctatcacaagttaattggacatggaacttgggataccatctatcgaacctatgggctattagatatatgcaattctagatgtagaagttgtattggctatctttacattttactaaagtattacgctcagtcctaagtacggtaggagaccatccataaacaagaattattacctcagggagtcccctcttcaaccttggtggcctcttgagtggttatgtttttaaggtaatggatgcgagcgacataatcgtggtcttcttcatcctcaagcacttgaacctactgccaagtaggatacttagagttcttgtagtccattgtgcattgatccttatcgagaagaccgcatgacatcaaattattataatgcaacaagaagtcagctactcgcagcccataggggatgttcaccaagatctcatgcctcctctagatctcagctgataggattggtctctttgtagtagctaaaatgtggaagaatcaacataattagcataagtgttaaaaactaaaaactcaaaaccaagattttgagagtaaataatacttacataaaatactgaatctggtggtattgatttgttggaacactgtcatctagaagaagtttcccttaaactcctttttgttgggaagtgttaaccccaaaaatcgacatagttgatttttgagattagtcaacgatcagccctagcagtcgagagatatcgactgtaagagtcggttatagaatgacagagttgatgcatatggcctaaggatcgttaatcttagaaatccatgcttgcaagtctcggggtatatccatgcaactcggtggtcaaccccgtaacaacttagagtagagttagtaagatcaacttactaacttacaattgttggaggatttttgtagtgatatgttaaaaattggatctttccataaacataagattcaaaggtctatttctcttctttccaacgcatcttgaatcgtccaattcccatatatatcaagacagttatggccaaaatactaaggcacctgaattatgaaagctttgtatgtaaagctatagctattgtgcgagcccatgggctgttgtgcgaccccctagctcttgtgcgagcccatgggatttcgtgcgagcccatgggcagttgggtgagccgggagcatttgggtgagtcgcagaacctttaggcatgtggtggagcatccattcaacccgcggtggagcatccatgctatttgatgtctagtcccttagtgatccaatggtgaaagcatggacaaaagaaggagtggttatgcatatgtagatagattccaggggcatagttgaccaggggagtgtttgagcaaatgcatggggtgtaaagaccgcttagttt

SEQ ID NO: 301966 - DNA, 1291 bp, Cannabis indica
actttatatgtgtttatttataatcgttttagaagttcacatttaggatgttaaacaacatacttgtgagtagatctaagatcctggtaaaataattccaacaactaaacctccctttaagttaggtgcatgcatactagcacgagtgctttgttgttcaagtaagggaaaaggaaagtagatcagccatgagtaagaggtttttcgacaaagaaaagggaaagtagataagaaatgagtctaaggtattttgtcaaatatacatattagctttactgaccatgctttattattgggaccatggttttataatattttgtctaagtattaatattttgtaatgaaatgatctagtaatatttttgtaaaagtttaaaacaaggggatccctgagctctgtaactctttaagtaaaagggtttaagttatattttaaaaactaattattaaagttttaattaatccataattttccttaaactattagtttattattataaattaatttataaaaacacacacttggtgcccttacgagttagggtgttacaacatggtatcaaagcgaccaaggtttaaaggtcctaaaactggctagatatgtacatttttttgtgaagaatagtttgactcaatgtatagtaagttctacctacttatctactatttcattacttgcttatatgatttttggaaaacgtgatgttagaaaagcatgataagaattatgtgtagcaatataatgtatgtgtgagaatggaagtacttattagcattggtaattgttcaataattctaaaatttgggaagtctttggtcacatgtgttttatactatgcaatgcacccaaggtgatatggtaggtttaaccgcgagctttctgggctcagggctggtggtgaggatgcaaatcctctaccaccataaaacttggaacaaatgtatttgcaatgcaagagacaatatgacaacaaggagaccaaattagagagttgagagagtagcaagttcggcctacttatgtccacattcctccagtacctttggttgtgccacaagatgtgggaaattagttagaatcgttgtatgaatgaatcaggaaatagaacccaccagtgtttaagggtaatgatcgtgttagatgtgttatattcatgtcatgggaggatgttaattctatttttggcatatttaattgacaaaaatatattattaattgtatatttattgtatatactatatttcggctggagtgtttaatttggttaccatattttgtgtatctaaactt

SEQ ID NO: 301967 - DNA, 4043 bp, Cannabis indica
cttaattatttaaacttaattatttaatctaaatattatattatataaaataatataatataacagcattagcaatgatcgagtgcaattatgcacccaaacataaatttaaaataaaaatactaaatatactattattgttttcttgtttatatttaactacctaaaattcaacgcaattatagtttagttagtagcaaccattatcctaattattattggccccttcctcttgtgcctcaattattaaaaagaaaatcatctaaatgagtaagagtaaacttaaaaaatctttcctttactcaaattattaccttctcaaatagtaaaaaagattaaccaaaaataaacattctccagctgtggccaaattatttatttcgatttccatttttctttttaaatttttcctttccatttctatataaatatttatttcatattatatttcttagatgggagaggttggtagtgggatagggacccagcatccttcatctaaatccaatttgattagtacaaattatataaagtagatggattagtacaaagatgtttaaagaacctttcactaggcagagtagtcagcagataacaaaaaaatagaagtataattataacatcaataatgcataagataaattcaagtgatttttatgcaaaattaaatcagggcttttaaaacccatttattatcattaactcaagggttccattaagggacagacaaggatttatgatgatcttaaaatgaaggatgtgttcacattcttctctatcatctctgaaaaagcttagataactccaagagcttgactaatcacaagtcacaactgaattggaatgagttcaagatgaatagaaatggctgaaactatatatctttttaagaagcataaaagtttacactaattcacgtgttagtgtcaaagagatagttacatgaaaaaggtgctttgtaattagtaattacataaagcacacttaagcatgataatttacttcttattacaagattagagaaattaacttacattagtaccaaaactctttgaaaagggtacaaaagtaacaagaaaaatggataaaagcatagcccttgtatggaattattaattaagcagaggtaagaagcaacataagattataagctttgtataatttcaatctagtttgccctgtcctgaatcacatccattgccatctcagtgggatcagtagcctgaacttcatagtggactccatctagagctcttctcagcccagctttagaggttgcatagagcatttttgctctaatccttgaagctgttggagacctgagaatccaaacaagccaacataatattactcaacgattctatatttgttctataaaaagtgaattgagcataatttgagatacccacacatcaccaaacgcaattggaaagcacggtaaacaatcatggttttcaaaatctgtacaaaattaagaagccctgacaagtaccacatgttggagataagatatttgaaaaaaaagtagtgagagaacataccaagcaataaagaagattttgctcttccggcaattgtcgacagttacaaaatcgaagtcaaacacggcatatctacagtcatcggtaggcaaagatgcagctaagtcatcgtagctctcgcctggaccacccaccttgtcgacggtgacgagccttgatttctcttcgatcttgaacactatgtacctgtgtaccttcttccatttcatctccatgaatgagttcttgcactcatcggttacccacattccagttgtcgcctaaggttaaaaccatcatcatggtaaatatatatacagaacaattagatcagcaaaacccatattacacaacttaaaaattcaaaatacccaagaaaaaaaaaacgatttttaaagagttataaagaaaaaggtaccatcttaaaagccatagccatggttggttgttgctgtctttgttgaagttgaaattttgaagtttttggtctgaatacttgagaatgtggcaattggcctttatataaagattgaatgtgaaaaatgccactattcttttgtctatttacaactttaccaaactagatctatgtctgtattgtgtatttatattgtatacttttgagtccattgtcctgctgtactatccaactcaatgacacatttgccctcaatttagtaaatcttgtttgtcttgaaactttagtttggtaccacctgggttatttctatttgtttcgattgtagatagtgatgttgaaatgaaataagatgttcatattccaaacccatgttcttcaaacttcattacaattttactcacaaatgattgtaatgtatatccacccaaagaaaggcccccacaatcttttaaagttttttttttaccaatgtctctcaacaagaacaacatcttgccaaataaatgagaatgtcatcctcatccttgcaatgtttacatgaaacttagctggaacatgatagcttaccattcttatttattttgttcaattttatcatccaaatcattcaataaattctcccttctcaacacagtttgtagagtagtttatgttcaactagtagaagatgggcatagaacataaaattatactaaacactcgctcaaacatttaaataaatatcgggtttgaaccccaatttcataataataattctcaaatcaaacactacccagtaaaaaaaaagttaggcgactggatattgatcatttcactttgttgatagtacatcttttattaatacatttctcaagaaaagttgtattaagaaactctaaagaaaaagtcacaaaataatatgttctatcataattaaagtattaaggtattatattgacatgtaagagcttctccaaccaaccttgacatatctatctaagagatatataaagacaacgctataaataaattgaataattttttattttgttaacccacatcactagtgatcaataattaatgagcttagaatctgtgtagataaagtcgagttgaagcagaagtgtgtgattttctagttaattgaagcatttgataagcaaattcagtctaagtagagttatgaagctaagtcacctccttaattctataaatacacatattgtctaattacaattatatacttttaataatcaaataaaatgaaaacttagttgataatattatattattaaattgtaataattgctatagaacacaaacttaattattatctaattattatatatattatagtattctatattatatacaaattttgtatcataagattattaacttttctaacaaataactaacatgtataagatatatacattgctctaatactattaggattcctgctataaggtaagcatcatcaaatctaaagacaacttaagcaatgttttcacaagaatcagcacgacttacgaatctgcagcgtgacttacgattatgaaggatagattgcttagttacctacacttgagtgatgcctaactcataacagtaatatctattcagtacgacccatgatgcacactatcactacttcagaaatctcttaaagaaaatttggaagaccattttgagagaagaacactagaaatttatttagtagaaagcttttctgatgtccttacaatgaaaaggatggctctatacatagccatttacatgaggtaggatacaaaatagaaaacttcctaaaaatttcttacaagcaaacaaacatacagaaggacaatttgacaacaaaaggacaaaccaacaaaatgacaaacagagaaaatgacagtttgacaacaaatggacaaactgacaaacatagaaaacaccaaaccgacaaacaaacgattgggaaaaatttctataaacattatgactattaggagttttttcacttattgatatcttacacaaataagagatatggaatctctttattcttcttattagcagtcgataattggctcgtgatcagcattgtagtctgagtcataattggggtcctcttgaag

SEQ ID NO: 301968 - DNA, 1349 bp, Cannabis indica
ccctaattaaaggttattaaaatactcttgcttgttagagcaatagtagtactctcgtaccctatatataaagaaatgggattgagtagattgcatagttaaagataaatataaagtatatgtatttatacatagagaaatttgcagccgaattcccttaaattttatttgtttaatacttaacactcattttttagtggaaaaatctcgttaagtccctttttgttggcaaatgtactgtttagttcatctcaccacgtttaccccttacgtgttcaattgtcaggtcacactaactgccaatataaaattatggaagtgtcaaacaaaaagcttgtttaggttttttttcctaattaaaataaaataaaataaaaagtaataaaataaataagactaacttaaaattaataaaattaaatcagcatttcaaaactcatgtatttttcaaacccaaaaccccaaataaattaagacatcaaaccataaactcacatatttctccatttctctgtgcatatactcaaaagcccagatgaaagtgcctcctcttcagcttctactatcgtcgacgaacaccgaacccaatcaatgataacccaacccttggaaattcgacgaacaataaacccaaatcgatgatacccaacccttggttgaatcaacaataacctagcccgaattgagaaaacccaaagctcctggcatttgcgacaataagaaacaagtgaaaaccttttatgtcgacccacaccgcacaactacgtcgtcgaagacagcggaagctaaagaaatggccacctctcaataatctccacaacacaactatgttgtcgatgtcaatggaagctgaaggaatggaccaaatatctggtcttggttttcttaaaaaaaaattatgattttattttggtctaatttaattgttcatctctttaatgttttattggtttttatttcaattagaaaaagaaacctttttatatgacacttgtataattattttgccacattggcagttagtgtgacctagcagttgaatacctaaggggtaaatggtgttgggaaaacctattgcaattaactacaattttttccctctttgtatgtaaaaaatgagatacttatcaaacaccacaataagcaatatcaaatattacccaaagcaccacaaacaatattaaatacacaaatcaagcataaaagtgagacaccaagatttttacgtggaaactcaatgcgggaaaaaaccacgggaccgtagtccgctcaaatcatccactatcaccaaagcttaataatgggattacaaagttcttctctagcaaaactagaggctcacaacaaca

SEQ ID NO: 301969 - DNA, 3002 bp, Cannabis indica
aaatttaatgtaagcccaaataaaaagtctaacactacattgacaaattgtaaaaagaaatgaaaagaatgtaactaaaatgcaatatttgtagcgatttttatgttcaggggtatttttgtaacaaaaaaatagttcagggacaaaattcttcaagggtcagagtttggggtagacaaattctatttatttgcaaacttattgtcccaggcaggaaaataaatttaagctcataaaccaattaataaagcatacgaacttttgtatcaaccatgcataagtgtttgcttattttgttaagatccaaaaaaatgatcaagtaattttactttggagggagtaggaagttccttggttgagataatgtaccatcagccctttgcagtggcgaagttattatgatagcctttcgatattcatttgtcaccaagttaatttttatgagagcttttgtttttctggtcatattgcaattgattcttaaaatttatatgataacagggaattgacttcttacgcattggtagacacgaagctgtgcatgaagaagtccgtggacacagcatttcaggttagattctacatgaatttaaagggcttattcggttggcggttttgtacctgttgtaattatggtgtacatggcagcaatgaacttgcaaggtgtggaagaactgaaagtgaaattagagcaagtcagagttgttgcagttacttgtttgggtattactagtcccttgcttaccaacaagagatttgacgtatgcatcatggacgaagctggacagacaacccttccagtatgtatagaaattctgctttcattagtagctcaaagtgtaaattttcgaagatgctatattcataagcattttacaattttcacaggtgtctcttgggcctttaatgttcgcttccatgtttgtcctggttggcgatcattatcagttacctcctcttgtccaggtataaatgttcgtattatagaaatatatgtacacacacacacattttgattttggtattcatgttttgagatttatgaaaaaattagtctgttaacagtgttcatttttttacccctagagtgtagaagctcgggaaaatggactgggggtaagcttgtttcgcaggctatcagaagcacatcctcaggcaatttcagcattgcgaagtcaggttagattatttaccaatattcttactgttacttatttttgtttctggtttaggttctattccagatagttaactaatacatttaatgcagtatcgcatgtcccgaggcattatggatctatcaaacgccttgatatacggtgataaattatgttgtggttcctctgacatagctaatgccaaacttaagttctcaagtttgaagtttggttcattgtggattcaggaggtacaaatattttttcctccatccatatataattcatacatatccgatatccagaccatattgaagctacatgcattttctcccccttataaaatgtataggttgggtaaattcagctcttataatgtatgttctctcattgtttcagattctgaatccagacagaccagttatatttattaatacaggtatttaagtctttcagttccttttgattgtacaatccaaagaaattaattagttttgtacatctttctcaaactagatacaatacctgcttatgaggcaaaggatcagaagaccataaataatccgatggaagctcaaattgtggtagaggttggtttttttacatatatgtatgattttctcttgtattctgttatgcatatcattgaatgagcttcatcttggctataggtcacagaagagttagtgaagaatggaatcgaagaggaagatataggcgtcattactccctataactcgcaagcaaatattattcgtcaaaaaataagcttgacctctgtggagatacatactattgacaaataccaggtttaacacaattacacactctttctctttcgggtgattcgatacgtgtggatttctcactcatattatgtgtatgtttgcagggaagagataaggattgcatactcgtgtcgtttgtaaggtctagtgaaaatccaagaaactgcagttcctcacttcttggagattggcataggattaacgttgctcttacaagggccaaggtaagctccattctataaaattgtaattagaagaaagtgtttattttatgtaatacttttgcattgtttttacagaaaaagttgataatggttggatcatgtaagactctatcaaaggttccgctgctgaagcttctaatcgagaaagttgaagagcaatcgggtattgtctgtgctcccaagaagggtatcaactgcaccagagggctcaacaggtgctcacaatcacagttgagaacttgactgagatggcattcattttgtattcaagtgtagatatataaaattttggtcattataattttgtgatacgaaacaatgttaaggttgtgctgttgttattgtatagattaatcattagcatcaatgagtctctaactgtttcagaaaggtaataaaaatgtttttgttttttctctcatggaattctgctacagctataataatataaaaatatactctaataaaaacaagtcatttctattgtaaaacaaaacttggataaaaatgtctaaaataataatattcacttgcatttaactctccaaacttaaattttaacggtaaaactttttgaaataaattattgggctagtagcaaatttaaagtgtccattcagttgactgtcactgtgtgctgcttatgtgtacactcttgtacatatggcacgtttatattggcaaacctaatatattatttaaaaattattttaaaattaaataaaattataaaaaataaaaataaaatatttaaaaaaataaaaaaatgttataaattttgaaataatttttatattttaaaataataatattaggtgtactaatataaattt

SEQ ID NO: 301970 - DNA, 2669 bp, Cannabis indica
ttcaaatttgtgattttcattattcgttattagatcaaaattcaatggtttgatatttttaaaattatatttatagttaaatttatttagtaactattcatggtaatacccattaagaagtattccatatatatatatatcttttgttacatagtaacttattgaacaaaggatcatgacattttgttcatgcaatatggttttagagacttgagtggaaacaaactcactggttcagttccaagcgacctcattgaaaaatctgacagtggcttattatcactaaggtcagttttctctccttttgttcatagttttaattatgtttaacgatttaagaacatgtctgtaaacactattatacttctttattatacaaaaaggatcatccccatggattttattctaactgttctattataacttttttttactatatatagggtgtcgggtaacaaggatctttgtacgtcactttcatgcccaaaaaaaatgacgaaaaagtatgtagtccctgtagtagcatcagttgcctctctgttagtcctcatatttgcattcttcattacatggagaattatcaaaggcagaaaaagaggtatataaataaatatttatagagtatactatttaattgcatacttctttatataggttgatattaattagtgtgtatagtttaagtgtgtgcgaatcattataatattttgaccaatatcatcataaatatcaagatggtgacttaataatattaatagaatttaactatgataacagtaagtacagaaacaacagcgaggagaaaagaaacacacaatacaattcccaagtcaaggaaagaaattaggtcggcttttgagcccaaaaaccatgaatgtacttacgatgagatcataagtattactaacaactttgagaaaatcattggaaaaggaggctttggatctgttttccatggttacttaaatgacgatcaagtggcagtcaagatgctctatgagtcatcggctcagggctacaaggagtttcaagcggaggtttttaagacattatatattccttcattctaaattaattgttttattatatttatctatatatatattcatatatgaatgtttaataataaattgctaacaggtaatgcttttaatgagagttcaccacagaaacttgactaatctcgttggatactgcattgatgaggatgacaaacacatggggcttatctacgagtacatggctaatggaaacttagaaaaacatttatcaggttcatttttattaaaaagatcagaattcttagatttatggtattttcatcaagaagtagtacttttaagtaatatactaaaccaacattaggagaggacttctaaatgtctaaattacagataatcaagcacataaactgagttgggaggaaagattgcaaatagctgtggatgcagcacaaggttagccatatattttatgcattaacttattcacgatataatctattaccttggttggatttatctagttctgtgctgattaaattttgatcaatcttaggtttggagtatctacactttggttgtaagccagcaatagtccacagagatgtgaagactgcaaatatcttgttgaatgaaaaatttcaagccaaacttgctgattttggtctttcaagagctttctcattcgaaggtggtagtcaagtaccgacaacagttgtggctggcacccctggatatcttgacccagagtaaatatgcgttcacttgtctaattaacccaaactttggaatacatacacaataacttttttcacataatctactttattttatcaggtattaccattcaaacttgttgaatgagaagagtgacgtatacgcttttggagttgttctatttgagataatcactgctcgaccagtaattgcgaaaatcaatagtaatgagaccatccacatatctcaatgggtagagaacatgctttaccaaagtggagagattaagagtattgtcgatcctaggatggaaggacactttgaacttaattctgtatggaaagctatagaaatggccacaagttgtgtgtgtttaaaatccactaaaaggccaacaatgaatcaagttgtagttgaattgaaggaatgtttggcactagagattgctccgaaggatgaccttctcacaaatgattctctcattggaatgactctaaagatggacactcatcatataaaccctttaccaaggtagagtaatgtatttgcagctgttttggattctcaacaacacgatgtgcaacaaatttggttcgattattttgaacagcactaaatgttaatggtgtgaagatattttttcttacacttatgactgtttcatcaaatattatattttatctttaaataatttacatttgacttcttcaccacaaatttaggaacaagaataagttgaaatttatgtccatttacataggagtaaataccatattagtttgtgccaagaatatatacctcactatgtctataaaaatggaatataataaaatataactaaaaacactactacaatatgggcctttatctcccctttttttaacccattttataaaaaggaaagctaaagggagtgaaaacacccaccagattcgaaattgacatttagag

SEQ ID NO: 301971 - DNA, 1997 bp, Cannabis indica
agagagagagagagaaaggaattcacagtcagcttatttggataatattgcagattgatgaagtagttgggtggaccaagctgttcttccaaatgggaagagagactcgatgttcagaatggtgggacagagaaaaaaacacaactttgtgaaccgggttttgctatatgctatttagaatcgaaaactagctcatacttgtctcctttcagtggagctaaaatggcataccatgtgcttaagaactcacgagccttttactttttcaaggacttgataatgaaagaaacaaaagaaaaaagtaacaataagatttgaagagaatttaaagtgtattgagaagaatagtatgattgaaatcgtgcctcgtatgtcagaatgccgccagaagaaccaggttgacgaattgtgacgttggaaacagctccattggcagagagaacacaaactcctctgggacccttttgaacaaatgagagaattttttctacaacatcctgcataagttcaaaaagttcagacctttgttactcaaactcagaaaacattctaagatctgagcaaaacatcttgtttgtacggccaagataactgtaaaaaataaaaaaaataataatagtaagagtgagaaaagatacacatttacctctccagtattaacagtgaccacatgaggtgtgaagtctccaccggctgtgcttgcaaacaattcaccttcatggatcagagttcaaatgttaagggggggaaaacaaagacccagtttgaaatatatgatttggaactatttaaatataaaaagaatgaaacttgagatcacattttgtgacattgcatatataatggagcccaaattatagcctttgtaaatagtagaacaatgttaaatgattttcaaaattaatcccattaacaagatttctcctataatatttgaactctgatcctaaactcagcccaaacaaatgatcagcttttgttatataaaaactttagtctctatttatggctggtcttcatggggtttctgctctggttttgaaagaagagaaagagaaagaaaaagcactctttttcatggtgggtaagttggcccccccttgtattaccaaaaaaggaatgttaacaaggacagaagacccacctctgtgccctaaattttctcatcattttcttggtaaacaagcaggaatgtttaacacaaacgcgccaccgagttcacctgaatttgatggagttgtagtagtagtagtagtagtagtagtagtagtagtagtagtagtagtagtagtagtagtagaagaagaagaactgtgcttgaactcacctaaagaagcaaggagttgccagttaccagacccagaagaaggtctaactttcccttttttagacgaacaagagaactctgaagaagaaaccggagacgacagagaaaacggtgtcgtttctgagggtggtggccttggctttggcttaagaccctgcaaatatgccaaactcaagttcccatcagcgtcgtatttcctcggcctacctcttttcttcttccctaacgagtcaacgcctccctgcgccgccgccgcatccaccgccgtcgttcctactccgccgcctgcagtcgtctgaggtaacgtcgccgacggtgttgctattcccatcgaccccatatttccctctgttcccaccacgtttaccgccacatgatgaaccggtacagagttcggtgactcagtccctgagttttccggtgacccagaaatcgtgctctccttgtcatccatttgaagttcaaacaaaaccagatatatgaatatataaatatatataaatatatagtagtgtaagttgaagtgaaatggcgccagtaatcgaacaaggttgcttttttacaaacttccctccattaatggaggacaaaaagaaactcttattttcagaatttgttttggtcttactccataatctcactccttgttttaaaaataaattaaaaaaaa

SEQ ID NO: 301972 - DNA, 1186 bp, Cannabis indica
ggagtggagattagtgtatgagtatatctaattaatttaatgaacacacgagaggaagttatctgcttatgtagttatataacttagattttgtttttcacattgtaccattaccataagcggttcgggttttattgtaggataattattttttttagaaaaataaaaaaaaattatttatttattggggttgaatgaattagatataaaaagtagtgaaaagacagtgaataaaagaggaagtgccgtccatttccttcttttgtgggtgcaatgccaaagagggaaataaggaaagagacatgagctaataaagtgtaatgaaaaattcaaaagtcacttccaacaacaaagtaattatatatataggtagagggagagttgtttgttagtgcatgtgtatggatgggacgattccttccctctttccccctttgccaaacatggtaatcatcctttcactcactcggaatcctcaccctttctctcctcgtgtaactcttctttcctaacaccccatcctttttcttttcctcttaattactttttatatatttctctatttatacatatatagatagtaactaaatgagaaacaaaaacaacccttgctagctatcacttctctcattctaacttaactttctctttcgattttcagctcattcctttcattccattcattcatgaatggaaacttattggaatgaaaagtaccaaaacacatattggaaacttaaacaactgctgcacacacatgaatattatttaaagtgaatgttgcaaatcagtactcttaatctgatgaattagctacattttatttctatgtaagttattctcatcaacttccactacattgtcaagattgatcacttgatcggtattattagttaatacgtacgattgatgtgaagactttagagatttaatttcataaatcattgatttcatctcattactaaagacgacaaaatatattttattataatggaaaaaattatgatgtattatacttttattgtaaaatataaaacaaaaataaaagattgattaaataaatattataacacatatatattatatataaaaatagtaattgaggaagataaataaaatatatggaacacttcttaatgggtaatacctattgatgcgaactaaaaaaaaattaataaggtaataa

SEQ ID NO: 301973 - DNA, 2101 bp, Cannabis indica
attccgctgcacccaatgtacggtttcctaaactttttatgtgtttatttcattgttttagaattcatattaggatgttaatgaaacatacatggtagtaaatctagatcctggtaaaatatttccaacaaggccttctttgatgcccattttgtcatttgaattgtgggtgtccaattgcatggctcttcttttcctttccttttttaagtgacagatttgaaccgagagttccatcttgatgcggtgtaaatcaaaggagacacaaaagttgcccatgttgagggaacaggccactgaggggactcaggtgcaagttcctgcaagggaacttcactcgaatgtcaccattggaaatatcatggaggcaactccgtccgggacatccaagaagttcaaagggaaagagaaggccaaaatttatcatcctgctcagaaattcaactactccatccaagatatggatcagaaggaaatctacttccgttcatacgggatgctagaaacgtatgccactgaagctggattactcaacgtaccgggacagatgtggcataggttggctgtcctggaggagtcaacatccatgagcatggatgggttcagtgcctagagttgttcccatatctcaagtggagcacatctccgtctaagagcttactttacggagtttattgcacgcattgggattgccccatttcaactgagacctcagacttataagattttagccgaatggtatattttttgtaaaattaataagtttgatgtgctctctctggaaaagattttcttcttctacggtgtgaagcctcagccgataagaaccaactgtaagaagttgggattctacaaactcgagaggtactctagcgctcactaccctactagtctcaccaaatgttccctcgacctcagggagtattggttcttctctactggttttcaagtgaagagggtatctactctccaactcagcttctaaatcctaggtaaaaactttttcacttgttgttttgatatgtttctctttgaaactcttttctaacttgattcaaaggctgattgggattccatattaatttgttgctattgacagagtttgtgcctcggagtgctgagattgaggaattggctaaaaaggcagaccattataaggccttcacgaagcccagttaaagattgaaggcctggtcaccaaacagctggttcgcgagcacgaacttattgcaaatttccaaagcatcgacagtgttagtaacaggggctaaagttaggcttcaaaagaggccaaggaggtgatagcttgtgacttatccaaaatcatcatggaggctgctaaagaggaccagcttctggaagccacttggatgctccatcacccaaaccctttgatagaggttcaggagatccaggagaggtatgctacaatgtacccggaagagggtgctctaggagccaacacttttagaagaggtaacagaccctttcgcgtactccgtacccccaacctccatcgcatatcctagacggatcaagggggattcgacaattacttcttgaatttagaccacactaagtacaccatgattgatttcatagatagggtagatgagatcgttaggagtcctagcaatccaaagttatctccgaacactattaaggttgatccctttgcacccatgtctttgttggtttttatagtccatatcaaagttataaaaacggaagtagaattttgataattttttttttataaaatatgaaaaataagcccaaggatctcaaaatagtgtctatagattaaatctaaactactgaaagaaaatcaattacctcttgaagcctatcagagtatccttgtttctttctgtataacaattgaacatccaatctaagaactttgttgaataatccacacattgatcatttaagccggtctcaatactcaagaatagagtgggctattagatcttatttagatgaataaatttaggtattacagtgtgtactcatctcatgactgtaatgagattagggttttgatctcacacacaccatgaatggtgtgggcatgtgagacaagagagagagagagaga

SEQ ID NO: 301974 - DNA, 1578 bp, Cannabis indica
atattgagcctgcatattgagttcttagagaggtgtctaaagaagattttgacaaagtcattggttaacaagttatttttgaaacaaaagttataaatatgacaacaagaaagagtgttgaagatcattttgatgatttcaataaagtgacactggtaaacattgggatcgcagttaaggatgaagatcaagtaatcatagtattgaattctcttttcagagagagttatgagcattttgtgtatactatgatgtatggtaaggattcattgacactagaggaagttcagaatgcattaacatcaaaggaattgaagagaaaatcagaacaacaagaaggtgctagtgatggattatgggtcagaggaaaggcttcaaagaagaaaaataagggtcaaaacaattcgagtaaaggcaactagaattccaagttcaaaaaaagatgctttgtgtgtaataagaccactcatttgagaaggacctgtcctatcttgaagaacaataatctcaagaaagatgggatgcaggtatagtttcagttggagaagatacttgtggctatgacagtgctagtgtttttgataatcttcaagaatagatcaaaatgtgtttagataattggctctggttgttcttttcatatatgtcatgataagaaccagttttcaagtcattcaactggtaagaagcttggggataatcaatcttgtcaagttcttggaattggcactgtcatgttaagtccagaggaaggaaatgaaactaaattgaagcatgttcgacatgtaccaaaaattaaaagaaatctaatctcagttgctatgatgtatcaagatggctgctctgttaaagttgaaaatgtgtgttaaagataatcaaggggtctatgatagttatgaccgaagttagcaggaatggtatctatgtgctaaatggaattttagccatgaatcatgtcaatcataccatgagaacagatcaacaatgatttaacatagaaggcttggtcatgttagccttggtggtttgaaatatctgagtaagaaaggagtatttgggaaagaccatattaatgtcgtggatctgtgtgagcaatgtgtgtttcgaaaatcaacaaagattaaatttggggttgaaaagcacacttcaagcaacaaattagacaatctacactcaaatttatggggacctttaaggattctttcaagacgtggagcaaggtactttctagttgtcatacatgatttactagatatgtatggattcatattctgaagaataaaaatgatacctttaacaagttcaaagaactcagagccatgcttgaagctcaaattgtgaagaaaattaagaactaataatagcccggagttttcaaatttgtttaatgattattgtagaaaggtgggtattgaggggcacttaatagttccaaagaagcctcagtaaaatggtcttgctgagagaatgaatatgagtattcttgagagggtaagatgcatgcttgtaacgccctaatgttaaggcacgctacaatactttttcaattacagtgctatctttgctaatcaaagattt

SEQ ID NO: 301975 - DNA, 3771 bp, Cannabis indica
ctaaaatagataatataaataatttgagtagttaatttttatttatttttttaaaaaaattttactgatttttttaaaaatttagaaacgtttaattaataaaaaaaatcataaaatacacgttagcaaaccgttagttttttttggatggaaggggatacaagtgttatagttcggggggtattttcactagaaagcaaaataattcagaaaaaaagagtttacaagtacaataattcaaagagtgaaaaagttttttgtcctaaatattaaaacttattaatacaaactgtaataatttatggttaacaactaaaatattaattaatggagaaatattaaatatatgatatacatagattgaaaacttacatgacttgcaaggatgtagaggaaaaagtttagtccacccttaacccaaacaattctagtcactgtatcttgactcttttcaagttctttacatgattggtagattcgaaaaaccctaggtaaatattgagacagaagaatagcatttagcaatattttgctagaagatcccgacgcttcaattattcctttatcaaaccctaaaattattacctacaaaataacaatatatatatttcaattatagtagagttgaagaattttaattatattttttttatacgaaattatatatattaattgtagtcaagtattgaaaatatttgaatatataatacaatcctaaaaatatattagtttagagagttacacttaatccttcatcgatgataaaattattgtacataatttttttagacaattttataatggtccattcaaaaggagataattggctgtttataatctttttatttgtatattgtagttatataacaagtatatatttaattaaatttattatatgtacttagctgtgcatgaacaattttcatcatttcatgtaataacttcattaaaaaaaaaaagtaatgtattcaataatatatatttaggaatatatatatatatgtacctgaggaagtgggaggatggctagaaagtcaacgaagacgagagaccaagaggtgtaatttgctacagccgaaacagtgatcttaactatatgatatttttttagtaactcaatggccttagctacgttacaaataatatcaatgatataaataatatctgttaatgatcttaaaacaagagctgaatttctcaacttattgtcaatcttaatgcattttctatctttgtctatcattggaatatagaggaataaagggtctaatgtaacagcaataacacaaaccaatagaaatgttttattccacattgggacaaaacacctcttttcattcaaaatttcctttaatttgctccaccaaaatttcatgtcatgatgatgaaattcattatcatcccttccattctccaaccccatggttggaccaaatgtgttttgtacgctccattctggttctgattctgcagtactgttgggccaaaataaaaaaaaaaaatttaactcgagaaattatgatttataaatgtatgttgtaattaattaaaatgcatatatatatattttttaattttttttttcagaaagacgactgttccttttcgtgggtctactcctggttggatagattaaatttttttaattatttatatatttatgtgattaatttatattgtagttatatggaatctctcataattcttttttaaaaaaaagttagaaaaaaattatggagataataatttaactttagggtattgaaatgatgatgattcaaatagcagatattggacacatgatcagagaggctttatgtagttttatttgtgtgttgttatatccataattctttaaacatttataaaaaaaacttatagctttacaaattatccatttaactgaaattatacttaagaaatccaaacctaatgcaattaatattatgccatattaatatggagagctgtcaaatattataaatatttcttcgttttaattttagattttttaatagttaataaataaataaatataagtgttaatatcccaatcaattataatattactgaattattgagatatttcaaagttgcaaagctaaattattataaactcaccccacatctattttcttctcctccttattttccatatatatatcctgcccaataaattcatgtaaacagatcataaattttgtgttaatctttatttcatttattcctgtatatataatattaatatattttaagaatttggtcatatctattaacaataataattaaatattaccaatgaagacttaaatacattaaatattgtaagtagaatattatgtatagtagtaattaaatacctggaaatttgttcttcttctttagcaatactttttggaggatatatttatggagttactgaaagaataattagaatagagagttttatgagttgttatgccaattatgaccaaatatatgtatatataattattttctaatttatagtacacctacgtaacatcacttggcaattatcttctcatatatatattttgattttttctttttatgtggctgcagcctacataaatcatctttaacaaaccataatgcaggaaggttcctttctaagaagtcaccaaaatatttttcaacttttttcatatttttttttaggtaataataaattaatatttaatttaatctgaaaaaaactcaagtaatattcttaaaaaaaaaccctaaggtaatattccaagtgttaaatatcatacaattacgtttttctttaaactatcaatttttttttttcaaactatcaatcacgaatcttttttaataaagatttttaataaaaaacacaaatacaattaattttaaacttatatatcaaatatttgatgatctatatcaatttttttttttctagtgaggtatgctgacaacgcacatcatatttgaatatagaaatatctcgtgtcatatgagtaagaataatcacaatgactcatgtctaaaagagtgagagagactaattaactttaattttgtttttaattcatatatactttttgattcttcatttattgatttgacatattaatcaatactttgaatattcttattttgtaaatactggtcagtgtgacctgtttttacacctaatttttttatatcattcaaaaaaaaaattatatgaacaaataataagattaaaatttgattattttattacttagttatcatgaaacactacaaaaaaaattattattttgtgtgacaactttttagtcataatatatttttttgtttactaaacatgatttttagtcacaacataatatctatatataaattgtcactaatttatttttagatacgataagtattgtgataaaaaaatatatttagtcacaataaattgtaatttttgtgactattatatttagtcacggatcttttaataataatcacaacataggaatgatgatttataattagtcaaaacctttaaaactaaaattttttataatgaaataaaaatatagcttattttatatatataatttaaaattttttaaacatccgtgcaaaacgtaaattatttactgataatttatatataaagtaccctcaaatatcatgtgatcataagtaatgtagttggtaaattacaaaaaaaaaaaaaagtaatgtagttggtaggacataaaaatgtgatattaagtaaaatttatggccatgcaaaataaccctaaatctaacaat

SEQ ID NO: 301976 - DNA, 1600 bp, Cannabis indica
cgcattgtaacgagagaggaaactcttcctccacaagcttcctagccctataaatagtgatgcatattcactgggcaagggatcggtcgaaaagcagttaagctaagactatactattatctaagaaatatctatatttagagatactattgtaagagctataagaagaaaaatctttctccttgatcttaagtcaatacaagtaatgaggattaggctattaccgaactgctcggggctgaacctctataaaatccctgtgtcttattattgctttatcatatatctgttactatatatcgtttatcgcttataaaatagagtcattgtcattggctaaaagcgaagtcaacaaataggatctatactcaccatcatggcaaacctgtcggctccaagtttacaactcatggtagcgtctggtccaataaattagccagaaatggagccatattagttccaacccaggacaaagtctctctctatcatctctttcctatttatgagatgaggaaaagactaatcccacttattgtaatcggcaaattaggtgttacgcctagtagcaatgttgccagctagttttctcatctcgtcatactcactgccacatcttttatagtaaaactactcaacatcctctaggtgtgccttagcttccttcgtcactaatgcaggcctaataggaagattgaagtgtggaggaggcaatagaggcaaagttgtgttctccctcgataattgtgtggtagtggcaggaatgactttagacactaggggtggtggaggcagatcttgattgtccttagtggttttagtgctccttctaggtggccttctagtctcaggcacatctgatccctttaagcactagacttttgtagcttgtctcctcgaggcagcaagttgtaaaaccttctccttgatatccacctttgcctttttgttggctcaaccttctgaggtgccaaatttcttctaaaaaattaacactggcccatcacactctgcgctgtcttcttcaacgttccccatgggtacttgttgtagtggttccacgtttataacatgctaagtcaggccaatgatggaagcagacatgtcttccgtggttggagacttaggagcagtctcttagcttgaagctagaggtgctggcgtttgagatccactcccaaaagcttgtccctttttgcccttgttcttgccttctttggaaatctcatgaacctcctcagatctggagctaatgttatccaagaactttttaagcagacccatttgtaatgtagctggctggcctgcaaggaacaaacaaaaaaaatatattatgtaagactatgtcaaatatggtcattgcaacgagctatcaaataatatgttagaaggaaccaaaccgtttatcttaagataattgattttctcctagcagaaagggcaatgtcctctccacctaaagtagtctcatgctagaagaaccctgtgaagtgaattttactaagcacgtccactctaacttgattgtaactccctaatatatagggaagccacatgtgtgattttataaaataatttaatactaatagaataattaattatt

SEQ ID NO: 301977 - DNA, 2401 bp, Cannabis indica
tttcatgcacagtattgtgttaagttttcactggtgttctactggtgttttgtagtagttctactgttgttttgagttgttctgttttatttttactggtgttttataaaaatacagtatttttgaaaacttttcggtgtgactatattttagtaaaaattaacccaaattataatattttttgtaaatttctcttctacaatagggtgtcacttttgccacaattctagcaattagtagcattaggcttacttcataataggattttgaaaattgagtaaatgttgtgttagatgtgatttaaccaattataaaaaaatctctttttggtaaattaagaaattataatttaaatgtttataatgtgtaattattaaaataataattacactctattttaaaatataatttacaaagtgtaactgtaattaatattttgtaatacatccaattcttataaggttatgagaattggagaattcaattgaaactctttatttatttcaaattactaattattgtgtaattattaaattttataattactctaaattacattcaattataattagatagtaactttttaaatatgcactatatttaatatagtgcatattgaaaataatttaaattattgtataaagagtttcttggtgcttattgttttttggtaaccggatgcatacaataaaaaaaatgaagttattatttgtgttcaaaaacagtagtgctcctacaataaaaccccgtaaaagaaaattgaaagtgatgaattttcatgactggaaattgtgtgtgttattacttagtaaagaaagcatatcgttagacaggttggaggacataccaaagaccagatgaaaaatcaggaggccatggagttggatggagtcctataatcccttattccttttctgtacctcaagaatgggatgaggtaaaaacaatgacactttataataacatttgttagtttctagtttctctctcacactatttgttaatacatttttatgttgtgtataaaaaggtaccagtatcaatagcagatctaggaggcacagaaattgatttgagatttgcaaaccccaaacaaggccgattgttcgttattgttgctcctgttctcagatttgcagatagtgagtttctctaattaaacagcaaattggcatttcaatggacttgtttgacagttggcacaatttttacttttcagcttaattttcttagttattgaaaatgtgaatgacctgttctcgtctctttgaatcaagggacgtttctgttggtgcttgaaacaattttgtcttcttactcgacttatcaccaattagtttttaaatgaaattcatgtttcttagacgcgcatattgtgtttattcttgtgtgtttagatttaggtgaggatgcaaagattgagcaaatagggccaccagagaaagtgataaatgcatttgggccagaagtgataggggaaaatgtggaaggaaaagttgtgagtatgtctgtaactgaacactcaggaagaaaatattaccaatttgaattggaaccacctcatgttctcattacagcaactgcagctggaaatagactttacttgttcaacataactggaaatggtatgcattttttttgttggattagtagtttttaattgcaagtaaacacatacacaatttcaatttaatttttcttttcaatttgtaggtcttcaatggaagagacactacaaagatttaaagaagattgctaattccttcagagttgtctgacttttcagatacttgtaaatttgtataccaaaatatgaaactttttgaattgtaattagattattgatcaaaatacatctaacttagatgggattttgcaggccttgaataaaattgattgtgattttaagagagaggggatatgtagttgagtataattttatgtacttatgatcacttaatctcactagacaaataagtgattttgctaagaacactgagtgcacgtattttaaaattgaaaaaaaaaaactgataagctgttcctctatgcctcgattgtggtagatacgatttggagggcacgcaacgacaaggtgcataataaatcaatgggtaacattaagcactatattgactctatttcttcttgttacacagattatggttcctgccttctctcccctccacagtctattgagacccaggcttggtttccgccgccagaagattgggttaaaatcaactgtgatgtcaaagtcggaggtgaaactatgtgtgctgttgcgattgcgagagaccataacggatcagttttgtgggtggcagcaaaaaggctacacttctctgacccagtcgctggagaagccgcgacctgtcttttagccatggagacggcggtt

SEQ ID NO: 301978 - DNA, 4661 bp, Cannabis indica
aacaatggagaaatactaaagggtactagtggtgttttagcacttttcttatgtgtcaatatcgctattggtccaattaagtatcgggtctcacatagtttaatataatagttttttagggagtattactagtcaatcacaacacgacatgtcgagaagatactaggcaccactggtgcttaataacaacactcttaataatagtataacatcaaaaataatactaataccttttaacaattctcattataaaatcacccaataaattttgtaggagttaccaaatatttttaccacaaatatctatatacatataactttagagagtggataaacttaaacacatttgcatttattattattattattattattattattattagctgtacacatttattatgctaattaattatctctgccacccttaccttaccctgattttattatgactcttccagtctttctttctctgcttttttctgcacacacacacaaaaaaaaacttctaatctttttaattttattattaataatttcttcataaattacaattattacacaagtaaaaaaaaatatttatttctatttttaatttttttagatagtgatgtccatggatagataaatagtagtgcaaaaactcacacagagaaactcagtaaagtattggactcaatgaatgattgaaatgagagaattggttagtttttttttctttcttctttcttattatatatttttttttttgactgtaaaaaagaaagtgtaaagaaagaaaaaagatgaatgggattgattcttgaagaactgcttcaagggattggtggaaggtttggtttttactctgcaacccttttctttatttttttaattattattattattattaatattaattttaaataataatattaaaatatatatgtatgtatgaatgaattcatatacatccatttatctatctaagctatatctttcatattctatctagtggggtttggttgttatccacttattattattataattattacaaagaaataatattttaaaaataagaaaaggctgtgttgtttttctctttattattgttattttattaattttatctaattattgattgagtgttgtgattcttgaattattcatttgatttgagtttgttatttggtgaattttgtggattttatctactctctcttggtaattttttttgggtagcttttgttggatgagaataagaagatgaagatagatcaaaagtttaaatctctatcttttaatgtaaataaataaataaaaaataaaaaattactcactaattttttttaatttgaagactaaagactagagatatcattaataaatgattttaatcataatatatttcaaaatagaaaattaatctttaagttttctttgaattacgtttttaaattttatttcagtccataaaaaactacgatcatggagaaattaatatttgggggagtgatcttgctaagttaacactaatgttgagcagttcttagcaatgttcgaacctactaacagaaagaaagagctttagttccgacatgagcaaggttctcttcactaaatacttcttttagctttacttcattttcttctatcttgttcctaatccaaaacaatgtttttagaactattgtggtatacaagatttttatttaaatattgaatcaatgcctttcaatatttaaatttcttttagtcttcttttaatttctataatttctttgaacgcttctgtagtaaccataaattatatttctatagtagataaggctactactaatcacaactgagatttctaactaatgcaacaagtgtttaattgaagtttagctccacttaaaggtagttttcaaataccttgaaagctatttcaatcattttcagtgttcttcacctgaatttgacatgtattagctcaatgtgctaacaatatatacaaaatcaggtttagtattaatcattgcatacataatacttctaattgctttaacataagaaatatctttcattttcttcctttccatatcaatctttgggaattgattagtagagaatataaagtattcaactagaggaatttgaacttttttagacattttcaccatattgaaacataagaattttattaaattttatctcatgtgactaacaaaatattgatatgattgataagttgatgtgtcatcgggcccaaccttagttcacaagcccctcaaacatttctttctttaaaattacacatttatttttattgattttaaaaaatatcatattttttttttctaaataagagctctaaatattatttttatcttatgacctataaaattttacgaccgaccttgtatgacttacaaaattttaaattatgcacatatagcactaatatagcaataacatgtaaattatattaaaattctattacttatacgaaataaaatttaacaaaagtcttatacttaattcgcgagaaatatttaaacactgtaatttttttaatcgaattttaaaattttaagaagcaagattaggtaattatgttattatgaagtgatagttggaaagtgttaatatatataataagaaaactttgcctcatgtgttgtccaattagaatagagaatcaaaataaagtcaaaaaaatattgatagagaaagaaataaataagatggaaaaagatgaaagaaatagtatggagcatttctggctttgtatgtggggaaaaaaatgccttatatccaaaaaggtctaagttctctgtttcatcaacagacactcaaatcatgttgaacaacttgtttaaacagaaaattttgatgcttttttcttttttctattactaaataaataaaataaataaaaataacaataaggttacaacagtaatggagattcttttgtcagtccacatagacttttgatgacgttttaattttcatcatttttgtacttgcacacaatattatcaatagttgtatgtaagtgtaatcaatcttattaaaataatccaataataataatgtttttggaaattattattattattattattattattataattattactactacagctttttctacctaaagaaagagtacttgttgtttttttcttctagaagagaacacttcttcttctattctcttctatatatgttatttgttgtcattattttaatataattaactaatgttgtttttccatataaggatttgctttatgtactttttctctttaatcaatctaattaatcaatgattagagtaatcattgttattttgttctttttagaaacaaaatcttgtatttcttttttaatgattaatcatatagttagaattataagatatataggattttatgtcaaagttaattaagaggagttcataaattttatatattttattttttctacacattagcaatgtgagatttttattttttctcaaggtggtagttattttatttacttactatcttagataactcgatcataagcgattttttttttctcactatatctcttatcacaagtgatttttttactctactttttggatttttgatggcttgttttttggctcactatctttgaagtacatgtgacatttttgggctctactttttttaggatcgagtttttgggatttggtgttttctttattttttgggtcagttgggataagatgtatgagattttatctcaaaattaattgactatgagagtgttagctcatagatcttatatattctattatctttctacacattaataatataagattgtctaacacaaatttaccaatattattatgtgatacaattaccaagcccaacatacatgactttttcaagtatatcgctattcaattcaaaagtttgatcaactttcttatattgaaaacaaatagtaggaaacctagccgactaggtttttgactaaatatttctttattgctatatctaagtagaaatgtcttttattggagaattttatagtacggtagaaattaagtgatttttattattgttacacaaagaaactatagtttaaatatgttttacctaacaacatacattatagttttaagaaatctttaataggacaatatttatagttacgaaaagtatacagtatgtacattattttaaaacattacttttttatttttttttcttttcatctatatataagatttggtacttttttttattaaaagtactctaatagttcacaagtttaaaagtaatccactataatctcatatatatatatatatatatattaaagcattaaattaatcattattacttagtatatataaaaacttggattacattatacatgtgacaagaccactttaataagcaatttctatcgaagatgttttaagagcatctcttaaataaaatcaactaaatatagttgtccaaattaaactcacttgatccactttttattttttagtcaatcacgatctttcttttaattttttaataaaaaacatgaaagagcatcggtgttttatgtgaaatctttttattatctctctcttcccgtcataatatagtatggcctactatttttggtcaactaacatgggactacaccta

SEQ ID NO: 301979 - DNA, 921 bp, Cannabis indica
ttcccagctcagctcagcagaaaattacaaaataaatacataaaaacataatgggcaggcaaagaaaacgctagcattcattatctcttgactcaaaaaccttacactggtcacaaatatgggaaaaatagctacacttgaaaggtattttgtatggttgaaatacaactttaagctagataagactaaatttagtgacatgatctcaaattctataaagaacctttagaaactctttttaagtgtcacctaagttggagaaacatgaactagcatctaaaaagtgttttgagaaagagaagactttgtctcaatttcctcatcaacatttgtcttggtccttcaggagacagcagaagaaactcctattcaaaagtcggttcagcaaaacgaagtagtttaaatgaagttaaactgattttattagttctatgcggagctcccaaggagtcacagtcacagaccccatgcatcaacataaaaaattaacatgcatctaattagcacttacagacaaaattttgtaaccacctttttgtaacctcctcagatagtcagactaaactcttaaataagaatgaataaggccctttaatattcataaagagagcgtgaacttagcaaaagagaagaagaaacaagtcaacatatctggttttattgttctagcaccattgctgaaagtggcaaagaggagagaactcttaggcatgggatgcctgcctctaccaacggggaaacaatgcaaggttcaggttccaggaggtaatgtcctgagggagaagcgagcgaggctttacataataaaacgctgcttggtgatgctcatttgctggagagatgaaaaagataagtgaacaaaatattaataagaaaaagaaatgtatgaaaagtttgtttatgcttctcttctttgttatc

SEQ ID NO: 301980 - DNA, 1362 bp, Cannabis indica
ttgaaataataattttttggtgtaaatttaacaccaaatatgagttttaccattgaaaatggccttaacaaacctgcccctcaaagaccaaatctgaacaaattaaaattgacttcagagcagcgatcgtagataattattccaaaattaattatatgaagtaattaacattatggcaagtcccttttgttcacttagggttgcattcacaccaggaccttggaactaactgtagcttgagaaacataaaattttctaacgttttaaaaacattttgattgtccaagaaatgattccaaatcccacttactatgcaataatgggtgttgtacggtggacgatgatgggcaccgtgttgcgatcgcgacagaataatgccgagatcttgtagtgccaccacgactggcggaagctggttcatagtgctgtgagaccaagcatgaatttgttggctaaacataatgcagccaaagcatatactaacaaagccatgaacgattggatcatgacataagaggtttaagggaagcacagcaaaagtcacagcacgagtaagggcatgcacattgtttgcaaattgacgcttagtgatagagcatggcaacatatgatgaccttgaaattctttaacttgttcaccgaagaagggagttgagggtgttccgtaattgtcaatcgcccaatggtaaactccagacaaaagatcagccatcacatacccaaccaaaccagccaaagtaatgacaaacaaattgctcgaatagggtgcaccaataattatcgacttcatgaaagagaccagcacaacggtgcacccagttgcaacccaaattcgatgagaccacgtggacagataagtaggatcaataacaataggggagacaacgttttgtgttacggtagacatcagcaaatgcttataaatttaactaagaaaaaagtttatatatataaatatgtatataatttacacagaggcaatggaacaattgttaattagacatggttcatttagcttaatttatctcttccatttcgatctttagtgttgagctggtgcactttatattctcgaccactcaacaagtacaacaattactacactattaatcaaagcctatcagagtgaatgcagtctgtagagtccttgatctattgcaaaaatctgcctgactatttattatatgaaaagtagggttatttgcggcaaaaccccctaaagtagggaggtttttgcaactaatccccaattctaaaatttttgcggtaaaaatccctaaactcaagttctgttagcaattagccctttctgtctatttttggctgttaactgccatggtagaatgtccacgtgtacacagt

SEQ ID NO: 301981 - DNA, 3597 bp, Cannabis indica
tcttatatgatatgaattaaatttttgtttggctggaattgcccttggaataggaagggtttgaaaattgaggagaacttattcccatacgatcacaattctattgctcaaaaggaattcttattccaatgcactcccggtgaaaaagcactttccatttctaactagtaactttttaacagaattaattatataattaatcatttgttgcttaattaaatgttactttttacttagcttaataattataatattttcgaaatacaatgaattactaatatcttttacttcaagtgaactttattcattagataaaatattacttttaaatatactaaatttcattattttaaaaatgtataaagcaattctaaaataagaacaattttgtcaatataatagttccatacgaacaactaatcaaaaatagttatctattgattccaaatattataccagacaatgatctaataccacaaccaatatgatcccattgaaccactattcttcctttttttttgtgcctaggaactactattctatctaccattctagtttgtattatactgatccaaacatcacctaatctcttttagaagctgcagaatagattgaataggagggtggaataaattgacttaatgaagccattaaaactcctcatgttaaagattccccaaatcacgacatcttcacggacgttatgcatctgctgtcaaacagatgctggcgatcttaactaaacagaattatatttattgcagtgctaattaaaccatgctttgaagtggttgcaagttgagtaagaaaatatggaagctgttttgcctactcttgtaaaagatgataaaccattttctcttagcttatccccaagcttgcaaattattttaggcaaaagaaaaaatttgcaagtgtcatttagcttcttaaagattttgtatccaccaccattggagatggctttttggccctctttttacttttggtcaattgctttatgtttgatctaactgttatacatatttagaacttgtggcagcttcggatgttattcataatgtttgattttgtaatgtttatggataggtaaacattacaaaattatgtaaataattatctcaactactaagccattggttatattcatgaataacattgaatcttgtaatttgatgcagggcgctgttgacttgcatgattgttctgttgctgtatataattattgctgctgcttgtggaggcatcactctaccttcctgcagatcttaagtgatgttaaaatttctgctgaggtatgcaacaatgattcctgagttgatgcatttcgaatctgttagtcggtattctgtcacttgttcatccaaaattttgtggtctgcatcgggcggaatcatataatctttactaaatgtctgtagatttctctagctatgcttgcaccccagtgaataacagttatttgttttatgatgcttaacatatgatctctatatattctttgaaaatgctaagattgtagtatattgtggagaaataaaaatggtttattacacttgtatttgtatctatatttgactaattgttttggctattactgtaattttatttgttgttgttgctgtgttttttttttttgaaattatcctattttttatttattcttttaaatccccaaaaaagagagaatttgtttcaaaataggtatgtactcacttcaaaaattgaaatatataccgttatatctgtataaaatgtgtacttttatgtttctaaataaaataaaatattagttccaagtgtaatttttcacatatatttggtaatttctcgtgatctacttttaaaatcatgtttagggtttgcagtgtaagttttgactattttttcaaattaaactgcacacttaatttttataattttttaaactgcaatcctggtattaacggtttacactctctaaataaacaataatgtaataaaattttatcatcgtaataaaaataatattaatatatatcataaactagtgtaaacggctgggtacgatctcaactagcaacatattaaatcttgtatcactaatataataataacaatgtataataataattctaaggtaatattgaacgtgaaatgattataatttggcagagaagaacacatctagtttgtgttgtaataattaaaaaattaattaatttggttatattttcaaaaaaaatttcaaaaaaattaatttggttatgattcacatgtatgaacttatataaagttgtattttcataattatacggtgcggtttaaattcgttaatattaaatttaaaactgcaaatcgtactgcactgtgtggtttggagaaaataccaatcacaattgcaccataaagaatttcaaactgtattttttatacagttgtgtgcggggcaagtagttgtgcagtatgaacggtttgatgaacactcgtgtaaaagagaatttatacatatgtataataaatatacaatatagagttcttctacggtatcaagaaaagtgcatcagtataccttttcataattgtgatatctaaataattataatttcaattttttttttatgtaaaagtgtatattctagttatttaagaaattttatcaagttttaagaatataaatattttacaatgtaaaaagttttacacatgtataaaataaaaaatcactcattcgatatttatttgaattttattttcaaagcattttttaaaaatttatcgaatatcttaaataattatattatccactaacatataatatatatataataagattaaaattatttgaatattaaaaatacaaaaagatgtatcgatacactcttgcctcataaaatttccgtacaatatattaagttaaaaaatatagaagatttgattagcaccatcaataatgatataagaagaatattacatcataaatttactttattacatatatatttttttcattcatcaagctctaagggcttaaaatacttaccatctattaggtaagtcccaatacttaaacggattgcccatacatccttaggctttcttgacacaattctgcaaattataacaaatcacttattaaattatgtaccttaatctagttttatcttgcaacataaaaattgtagatttctttctcatatttccatatcaaaatagcaaaaactcagcgtgctttccaacattgttttctcttactttccaaacaatcatctttcaagtccaatttttgatacaaatatttttaaattcatgctttgaaaatgttgtatatcaatgctagcatgtcatattgatgatgtgcctagttacttttaatttatttggtatgttaaaaagagaaagggatgaggggatactattgtggctctccactatatacactaagggagctcctaccctactttaggattgtttgccaaaatcctacttatagattagtcgcctcacttggtgaaaattatattatatattcacttttactttactttgttttaatttttactttctattttcatatttttttttttaaatataaccacttttatggatgatgtcccc

SEQ ID NO: 301982 - DNA, 890 bp, Cannabis indica
taaaattaaccaaataatatttttataagtttccttttaattatcatcctaataaattaataatattatcaaacacatttaattaagttgtatactttttgacactaataatgtcctcttctaaaatgatcaaaaaatacttatatttcaatagtcaaagttgcaaatcattaaacaccttataattctaaaagtctttatcataatggtctcacgttatgttaattattagttattattattattatgggccctatttattttttctaaaaacaaatccctcttatcacttctcttccatggtcaaaatatgctcaaacttattggatgcatgcaaatgcacatcattacaacactgcaaatcataaatatataaatgtattatgatcaaattaatttaatggtgatctttggaaacaatttcctaaaatgtaccaagtaataatattcgaatcctttcctattgaattcatcatatatgagactttcatgtataattgaaattgacctttaatgctaaggtgtaatgtgatgtttccaatggaaatacagtcactttccattcttttaagttagtgcaacaacaaaattaacacaaatatcattgacttttattttagttttaataatggtgagtcttctataaacatatatatgtttatatataaattaaaatagtgctggaaatacgaatcggctttttaacattgtacaaaattattacgagtccagaagacatgtatacaaattaagcacgaaaaaatatgcgcttgagcacgacacgacatgatgctacaaattagcacgacacgtaggaccggccctgagtagaaatcggtcataggccaaaaaaaaaattttaggcccttactataaagataaattatatt

SEQ ID NO: 301983 - DNA, 1567 bp, Cannabis indica
gataataagttggtttagaggatcaatttccacaagttaagtaactctacaataactttaaataacaagcatagataaaagcttggattacaagtagtatgcaaattcttaaaaagatgcataaaaagttaggttcttaggaaaaaaaagttggcaggagggtacgggttgaacccaaactcgagcatttgtagaaaaccaactcaaacctgcccgatgaaaatgagcgggttggacccgacccgcccataaggaacgggttttaccacacggcctggtttggttcgagcgggttgatcaggtctggtcaaacctgatcaaaatatcccgtcttagtttgatgtaactattgaaacatcctccatatatatatatatatatattgtaaggtttctttattgacaattaattgtaaataagtttttatgcacgtataatgtaaataattttttatgcacatataatgtaaataatagtgaaatatataaatttataaatttatcataatttatttattaaaaaagtctgaaatactttaattattattacttatattcaaaatttgtgtatacaattaaatgtagttatattgtttatttagattggatttaaaattgaggtggcaatcggaccttcattgagacatgtatgtgttgaagcaacaaaaaaaataaaagccagtactgtcattcttaccaggttagcaatttgttttcttttaatgaaatttttatgtgtacctattaaattttaatttgaaaaacataattttgaaaaaaaaaaaattaaaatttggttaaaatattcacataacattttatgatagtaattattaagaaatatatattatatattgatgactaaatataagggaaaacaataattcaatacattaataaaatatggttaagaagtttgtttgataaaaaaatgagagtctaacaaaatagttgttatggtatgataaatgcatggaagaaatatagggaaatgaagaaggataagaaatacttgttggaaaatgttcaatgtggagttttaaggataaaaagcaatggaaaaattgaagtgttgcaattcccaaaagaaaagacagaaagagtaagaggaatgagagcaaagcattattcaacaatgatgatcaatgaacacaaggaatcatccccatcatcagcatcatcaaccattgatgaacatgatcttttcagcatagaaatttagcaacacattatttatgatgttccaatttgatttgttactaattatgtaaatgaagatactattatcaaggtcgacccctgaactttaatgggtcataaaacttgtatttgaaaagaaatatggttttttaaaataaaaaaagatatgtgtatttttaaaaagatttatttttagtttctagactagatggactctagcacatgtctaatctgtttatatttaaggtcagatctgactattacgtatatatctgtatatgattaaaataagagaaaattacatgaaataataatagttaaaaatattttacttaaatatgacagttttaagtttggctacattttat

SEQ ID NO: 301984 - DNA, 1805 bp, Cannabis indica
gggcatgttggttgatgtagagcacaaatacgaaattgttagacgtttgcaagccagaaaacatatatgtggaatgactggcgatggagtcaacgatgctcctgctcttaaaaaggctgatattggcatagctgtcgccgatgcaactgatgcagctcgtagtgcttcagatattgtcttgacacaacctggtttgagtgtaatcataagcgctgtacttactagtcgctctatattccagagaatgaaaaattacacagtgagtttcttttaccttttccatattcaaaatggttataattttgtattgtctattcatgttaatgttctcattcttgttgcagatttatgctgtttccattacaattcgtattgtggtaagctattctggttcgctcttctttgcatgattgaaaatgatctgttgaaagtcatctggttttgaccctcttgttcattttatttcatatgcaacagcttggtttcatgctacttgccctcatatggaagtttgatttcccacctttcatggttctgattattgctatccttaacgacggtttgtaccttcttgtccatccaaaccacaacttacttatagttttaaaccaataacatgacatgatataatatggcattatcaggtaccatcatgacaatatcaaaggatagggtgaaaccttctcctcttccagatagttggaagctagccgagatctttactactggaatcatactcggtggttacttggctatgatgacagtcattttcttttgggcagcatacaagacagacttctttcctgtgagtaatctgtccatagtaccttcatttgtttcgaattttctttgccaaccttccattactataactcataccttttgttttttaagcatatatttggggtatctagcctacaacaaataatgaaaaggcttcagaaactagcctctgccatatacctgcaagtgagcaccatcagtcaagctctcatatttgtgacacgatctcggagttggtctttccttgagcgccctggtctcttacttgttgctgctttcgctgttgctcaactggtgagcagactgcaactgtttttatttctattctcagtttccaaacacattcattaattatgttttgtgtttggtatgtaagattgccacattgattgctgtctatgcaaactggagttttgctgcaatttcggggattggatggggatgggctggcgttgtttggctttacaacatcatcttctatttcccacttgatttaatcaagttcttcatcagatatgctttgagtggaagagcttgggatcttgtaattgaacaaagggtatgtatgaatgaattgacactgaactctatactttctccatttactgccttttttaaggactccaacatttttgcagattgcctttacaagaaagaaagattttggcaaagaagaacgcgagcttaaatgggcacatgcgcagaggacccttcatgggctacaccctcctgaaggtatgatgtttgcagatcgatcaactactgaactcaatcagatggcagaagatgcaaaacgacgagctgagattgccaggtaaaattccatgtctttggctagtttcaaccactggtacatgttttctggtttgaatataacttatgcagtttgatgatttgtgcagattgagagagctgcatacattaaaaggacatgtggagtcagtagtgagactcaaaggtcttgacataaacacaattcagcaagcctacacagtttgaggatttcatattttgattgtcca

SEQ ID NO: 301985 - DNA, 6070 bp, Cannabis indica
tatttaattatttttattttttactgaataaaatgcaagaggagctgattacgtggagctatgttgttttctggtagggaagtggaatctgttgccactgctaagctaactttgggttttaatgtcctgttttttctttcaatagaagtttgtgtgaatttttttttatttatacatttaggaatagttggatgtgtcgtattaaattatattgaattagattatatattatattttcaattttacacaaatggttattttgaaaggcttaaactaatatcatgtctgtgtttttttctttgttttttatacaaagatagtgattaaaaatcaatatgtgtgttagcttttgaagtttgagtctttatgctcagtacaaatactagcttttcattaattgtaaaaaatgacaattacagttaattaaatatgatttgtaagtttaatagaaaaaaaaatatgtataatctttgttgtagcaactagtcgtggactaagaggttgcaaacttctatttaattacttgtgttgagttaccaaatgagattgcaaaattgaattcaattgaattacatgttttgatttgaaaaatcatgttacaagactattaatttactctcgtgagtagtgaaattatttgatttatttgtattgagttgcaaatctctatacatttacttgtgctctttgcaaaattgaattaagttacttgtaattgtatagagttgccaaaatttagttgtagaatgtagaatataagagaaaactagaatgttttaagttgttattgatgatgatctttcctccctcccctcttatttttattctattaatagattattaacagcaacaagataaatttgggatttcttgtttaattagtgtttagttaaatgtaaatttaacactgtcattgcaacagccatgttagagcttcttgttacaggagcttctttattgatttcaaagtgctatgtgcagtggtgtataggcttctagtttttatattatgtcaattcttgaattttaatttttagtttgacaaaaagcaatattgtcatactctattacatgtttgagctgcaaaattgaactaatttactcaaatgagtttacaagagaagatggtctactgtgtagcagacaagattgaggctttggcatagtttgaagaagctcatttgacagatcttgtgaagaaccatttaagtacaagtctccttctgagctccaattccagttcttccactgtttatgagttgcatctacatgctgtgtaatcttattaagaaaaattaggagcattttcaattattatctttttggttcattgtctctataattgtattagtatggtgggtaaaatattaaagtattggctattaaatggaaataaaatttggtgttcgatttttgtttattacatgacaattattgtccaatttagtttcagattttgtgacaaatttggtgttcttccaatccacacataccatttttaatttgaaaactacatgagttccgttatctatcaaaagaaagaagcattgagcaccaaacaggtccactctgttgcctaaggttggaaacagtcacagaaaaatcaaacaatgtggtctcttctctttactgaactttcttttgttacagggcatatatatactgcaaactttcagagaaatcaaaagtaaagaattcctctaatcctatatttaactaaaattaatcaattcttctttctttcatctaccttctcctaaacatctgtcatgaacagagtcactcctacattgtttttctttacctattgtctagtatgatcctacctcctcttaactaagtattaaaaagatgactattatctaaaatgatggaatcaaccaacaaccttagcgcccgagccttaacgattctgcagtcagttaactttcttcatcataatcttcatcatcttcatcatcttcatccatcctcctatttaagctggccagttgtatgggatcaatggccatcttttccacgtccgccaaggaccaaccagagtattccccgtgcttgttttcaggaatgatctgtgcagtctgagcagggaaagggacaggcgtaagaacaggaacaggaacaggaggcggggtcatcacagccgttaagtcctcagtctcattcaagtcaacattcaagtcaaagtttcgaaccgatgctttggtgctatcatcacatgcaatcttctccttgggtccttcaggctctgctctatcatctagaacttcaagattttgatcattacttttcttgtacttgaaatcgtctggatcatcttcgtacgtgtcatgatatgcctctctgtctctaactcgactacctcgagcacgccctctacctctgcccctaccccttcctctgccactagtatgatgaccaacttcatgctaaaaacaataataacaaaaataaatagtcaagagcatatgatatggcagtaaatcactaaatcatcccataatggactcataagtacgtcaaattagttgtgcagttgtataagggccaatgagaataatctgaagcaaattaaactatctgaggtcaatatcaaagaaaaataaatcgggaagcaacgagtttcaaaacgtaaatgaatggacaaacagcaccaaaaaatatggacagctatatcttctgccttcttccatgattacgcaagataagggtaacttacccagtaatttagtttagttttccaccttctgaatggcaaggaatcaagtttatcaagaaaagtaaatggaaaatctttaaatgacaacagaggaaggcccggtctgtattccaaaaaaactaattgtctacaaagggattgactctatgataacaacaagtacaaaagtcagtttaaaaaattaccattttattcttctgaaaatcctcatcactattattgccttcggtatctacaactttcctgataaaaaatgcagaagaatttaaacaatcaaattaaaaataaaatccatttcttggctgctggacctaatatttgaaagagaagttgcatatttcacaaaccttttctttgcagcagatcgttcctccccagcagcagtatcagacccacccaaatcaggaactttgctgacaatatccttcaggaaatcaaaaacattaaacgagtgcacacactgttttctgcatgatcagaaaccaatttaaagcatatgtgcatgtcagtgtatcaaacaaaatgcaagaaagaggtacaaactttatggaagcaccaaaaaaaaaggcaccatgtgtcaaaagcaaaccagatatgaagggtaaaataattagtcactcacaaatgcagagcattcatggtctttgcacctttctgctgagtaataccatacgtctgatggcaaagatcttgtagaaatagttccaaagctttggctgcatagtgtaatttaaaaagccataattagtcaataaaacacgttatgtgatcactgttgaaggaataaatgagattattaaaactgaaaatgcatagctatacttaaactgaactgagtatttagacaataaacactacttacatactaaaagaggtacagccatagagatttttccaacatcctcatctgtttgcataatcttcttgatcctagcctgtaaattgattgattgaaataagacaagagtctaattatagagaggaaaaggtgagctgaaaatttagcataacaactttttctgggaccaaaaactttaataaaattattcagttgcattagcaaacaagaaaggaaaacaaaaagggtaactcagtaagtcgatctacaatgcacaagagggtttgtatgtggatatgttgtatctctaaatataaaatgaatccacacctgaagaagaatgattgaaagataaatcttcctacactgtgcataaactaagatgactaataaatgtagacaaactttgtagatatactaacagctaggacacaaaattgtaagccatgtggacaaaatattgtaattgcatgtgtttttgtgtgtgatactacaactaagcacaaaattgtaagcacgtgtatcttaaaataaactagcagtgataaatgtaagacgaaagaaagaatacatgatgcaattgttgaacacgtttggacagctgatgagaataaatattacatcaatttttactagatgctatagaagtaaaaaaacagagcagaaccaacttgaacaaaattgggagaaaatatgaaatcaaagaatgactctcttgtagaaacgaacaaaatcatcaaactaacttgtgggaaaaattatgcttactcactaagactaaggacatgtgaaatatcaaataatgagaagaaaaagtggccgcaaatttactttccactcaaacataattagaataacaattaaaataagcaaagagcacaagataacccagtaacagaaaagaaagaaagaaagaaatgtatcaccacaatccccatgtttaccaagaactcataagtttcataaattacaaccatttattatttacagctacagacttgtaactattctgcaaaacaaacaacttacataaccaccaaatcaccaaatagtcagaaagggtatggtagtagaggcagaggaaataggatttaaatggtggtctaaccacaaattcattgccataagtgataattgcgtgagcatgtactgtacttctgagaaaaatatataaaaaacaattcaaatcatagacttgcatacccaaattgtcacaacagcaaacttcttaagttgaatctctctggataaagaaaaacaaacttgaaattgggcaacactaaaaaggggttggttgagtaatcaagtcacataggctaggcttcaaattcaattctcagggtccctctacttgccatgatataactaacaatatgttttattgctttctagtctctacacattacaaggtacaaattaggggtgtttaagttacgtctaatattttttcatttctaacaaaattaaaataaaaagtggagttgaaagacgcagcccaaatatacatacatatcattttttacagagtaaaagattgtacatactaacaactgataagactctgttttaataaagcggcaaaactacacaggcattagaagttgacaagaaatcaaatcaaaaaaagaaccctctcttacccaaacttgctattacataaaaacatattgaaaaccttaaacaccgctataaaacttatcagactccaaaaaagatttcctagaaacttgaaacaacaacaagaacaaaacttttcacttgttttctttactcattcaaaacttagctaccaagatatccaaggagaagtatttaaacagacaaatttacttacagctggaaaacgggtatctagctttttcttcatgttggataactgtagtctgtgaccatgaaacggcgtaaaaacaaaaaccctaataacccacgtcgttctcgccttctgtctggaaaactcacacagaacacgtatgtacatacacaagaaagatgaaatataaaggggagggagaatttccagttcgctcaaaacaaatttcatttcctattttattaatattattatttaatttcgcgtcaaaaaaaaatatattattatttaatttaaaaaaaccggtctttcgagagaccaacccaatagacgtgccacggttctttcccactctgtctctcgtgttttcgctcgtgtttttttcgcccttatcctattgtcttcattgcctcgttttttaaaagtttaatttggattttatcccatatataataacgtgtactttctaatttttcgtacttttaaattttatttaaaaaaaattattaaaattggtggatcaaaataaatttcgtctaattttattaataaaaatttattttaaattaagttttttatagctgtgaaaaaagtggataaaattttatgaggacaatttaatatattagcaaaaagttacgtacgaagcacgtatactaaattttatgctagatttttttttatgttatttgaaagtgataca

SEQ ID NO: 301986 - DNA, 1038 bp, Cannabis indica
aaagtgagattcattgtgtctttgttgaatgacattcatttctgaacaagtttctttgtctccaatgagtaatggtataaaattagataagccagcctcattctcaacctgaaatataaaattaaaggaagatacatcaagttcatatataactaacagcaatagctctaataatataatctaacaaatcaaagtttggtacttcgcggggagaaactaatcttgaatctaatacgactagatattgttggttgtgttaatagttattctttataggttaatattgttcacaaaagactcgtattatgctggataacttgctgtaggtaagttataccacttcccatatcaatattgtctgtattaaataaaaaagcacaagttgccaaaaaaaaaaatcataataagaaacagaaaagagcaccaattgtcaaattttaagtactgcatttattactactcaagcaataacgggcactcattcacgaagggtgtactaattacgaaagcatttcagaaaatgttataataatcttaagaatggatcagctgaataaattataaaagaaaactaaaaagatgcaaagaaagtaaatgtaacaaattaccaacctcaatgaatactggaccaaaacagttggcttcagtacgagggacttgtatcctgtacaattgatggtcaaagctactagtagtgttcccatcagtaacagaatgagaagatgcaggactataagcacatgccaaatacttcccagagaaggataaaagaaacctgccaacacgatgatctttctttagcgctcattagactacctccaatgcaagatgcaaaaacagtgctaaatttaaaacaaaaaattaataaacatattttgcacaacttttacaattttactccaaagtgcccatagatatatatacaaagagatgtgaaaaagtaaacatggggctcgtttggaacattgtattaggtcgtattgtattgtattgtattatattaaatttgattatatatcatatttttatataatacta

SEQ ID NO: 301987 - DNA, 2359 bp, Cannabis indica
gcaatatgacagttttttgatggtcatatctttctttcaaatatcaacaacaacaaaaaagaatatttacagcaaaataataactttagaataaaattcacaaattagatattatacatagttttatttgtaccgatctatttaaattatatagatacgtaaagtctccaattctccacgtctctaaattttattttttagtaaattaattataaattttctatttttttgacaaaaattatgtctaatttaaagtaaatatttgtttattattattttatataataaaaaaagtgatgtatgatataatataaaaaatttatgtaaaataaaaaactaaaaattttgtgatatattttaaagattagagtagaaaaattaaaatatatttttaaaattttaaatatcttaatattttacaacaaaatttttaaataacaaggtatcaaattttaataaagcaagttgctactacttgtgttctttttttttttttggagaaaatataaattaaataggtaaattatttataataacaaagtatataggtgaaggtatattctccaatcaaaagcaagtttcatctaattctagagtaaatttagctaaattgtgagcaaccatattagttatactcttgatatgatgaataatattatctttagaaaataatgatagaagactagaaatatctataatttaatacttaaaagaagaaattatagacaaatgagttctcaaagcattagcaaacaacaaggcaacggtctcaatctgtgtatgagatctgcatatgaagggcccaattcaagttataaaatattactttcgcctccatcttatgagatgcaaatttcctactattagctttgagagagcagcaactacttgtccaacagcatcacagatcacaacaccaactctaataatatttcgatgagcatctaacgctgcacatgcatccacattcactttgggatcacctatagccgatggtgtccatggttctcgtacacaagggctagcagagagagccttggagtggcactttaggcaggatagtatttattttttttttatgaagaagaaaagaacttcattaatcgacataacaacaaattagtacaaaccaaaccccacgaagctccaaataaggcagctacacaaccaatccaaaactacttacatttgtaatctcaacaaataatcattctcatgctgagtcatgtttctattatttacattttataacctatactttattgtgttttttatatcattaacagtagaagaaatttttctagaatagccatcaaagatacatctattcctattaagccataagttgtacacaattgctgtaaggattgcaatgttaatgttctgcacctggttagaacttttcaaagaaatccaactaatccagccagtaaagcctaggggcaaactctaaagcccgactacgaaaaagccaaatctaaaactctacgagataaaccacaatcaaagaaaatgtgctcgtgagtctctaaatcatcaccacaaactggacataacaaagaatccagctcaatatgaaactgagccattttgtccccgtaacagctgagaattcaccacttgccaaagaacaaaacgatatttgagcagatttaaggatctccaaacagctttgtaatagttgacctagttttggcctaacaaactcttatataagcagttagttttgaatctttcagaagctctagctttcatgatctcaaagctcaaaattttttgtctcaatcgacacactttacgctaataccagcaagtatctagtttaagctcataaagaccagaaagaagtatttttcaagtagatgacactaatccatttgatctacagaaaatctttctttgctaaaatcgcccaaatatatttagcaagagtagtatggttccacttgataccatctttaaactgaagaccaccatacactttcagaagacacactttactccggaaagctacatgaattttaattctattgccattcataccccacaaaaagtctctacataacttctcaaccttcttggtaatattatggggaagaacgaaaaatactcatccaataattacggagaccaaataacattgaatgaatcagttggaccttcctagcgaaagacaaatgtctactcgcccaagtatgcaatctttctttgatcttcttgatgattatactacaatcctcaactttctacttggtaggccttaaaggaactcctaaatacttgaatgtatagtataagcatttcaagattaaaagggttatagttgaaattaatggtaaaaaacaaatataaattgaat

SEQ ID NO: 301988 - DNA, 2366 bp, Cannabis indica
aaaaaaaaaaaaacttgaaaaaccacaagtgatgagcttgataagctttatataagtacaaaatgaaccagaaaaagattattttttttaatttttaagatcaccttttggcaatccatgtaagcttccaagagattggagtactgagggtgagcaatgatcttatctttaatggtttcaacttctttgatagagcggtggtgttgaggttgatcgtgatcttcttgactttctggcaactgatgatgaagtacttggtgctgaaccgtctgatgatgatgatctcgagtagtcattagattaggatcgtagtgaaatttctgaatatgttgattatggtgatgatgtgaagtggttgcttcagttttcactataggctgatgaggattattaagattatgatgagattgaggatgaggaggaggaaaaccaccagtactacagtgatctcctccagcagtggttgactgaagatgaaaactgttgaccgacaattgacgatgatcatgatttcctctcccgtaattactattattaccacctcccatactatttatcgatgaataaaggaaattcccccttccaccagaccctgtgctctcctccatttgattattattagtattcatcaccggcctaaaaagaaaaacagaattcttttctattaaattaacttcataattattagctaaaaatcctaaacaaaaacataccaaataattatatataataagataatattctgatgacgacgagagaggttaagaaactgaaaccctaggaaatggagatgagatcaccagagatgagagcttgacttgactttggtttctttttgttctacatgaaataagaatgaaaataaagtaatatatattgtataaatatgtataattaagaacaaattacaattaataataatagcatataagaataaactaagtaggtttaattattagatgaaggagaaagaaggatataataaaaaggatgataattaacagaacaaattaaggaaacatcatacatatatatcatatatatatatatatctgtgtatgtgtacgatttgtttggaatgagaaaggagttctcacatggccgcgcgcgagagagacagagacagagacggaggggtttgccggcaaccgcgcgcttctggtcttcgttggctgacaagactttcttttgttgggagaaaaataaatattttaaaaattccttaaagcaaccaagcctataatagtacttactaggcctaaaagataaggcaactgtgcatttctttttattattattattattatttatttttcttgttattattaaagaaatatacttatttattttattttttctgtttactactacagttgaagatgtatgaatgttattaaacttactcacccattgtttcacggattttatttctagctagtgtgatataggagatactatttgttttgctgattgttgaaaagatattatcacatctagagtaattttgggtgcttttatactgtacctctttaaaataatccatttatttactatttatgagttttaaaattgatgagaactttttaatttaatcttattcttcgtatattgttatagttatttaaaatcttttgtaaaattttaaagaatttgaaaaaatttaacatgccaaaaataaagtttagatagtctgttgcactcgtgacttttattttatacgcatgtgaaataaattgttttgaaattccgtattttaatatttacaaatttattattcaattaatcaattaattaaatgcaaaataataataaatatggtactgaaagagttgttctgtaactacagaacacaaccctataactacaatataaaactagaaaataaaaacacacaaagtttttgtacgtggtatcaacaaaccttgcagattgatattagtccacgggccacctgcagagatatgatttattagatacatctcaaaaataaaaagtaattgaattatacataaatagactctcacttattgtatgccgcaagcttaatgtatttgagcttctcattgaatcttgttgaaacttcaagtggtggaactcccttcgatctccttgaagagtgtttgctctcccgaggcaagacttgaaaagttatatcccaaaagcttgtagaaccttttcctgaaggtagtactattattcttcttattttgcagacttgaatacaaacttaagacaatacaaaatacatataaatagagtaagagatgaacacactcttcttcactaaacaaagactctcttttctaaaaatatgagtgaaatacaaagatgtaaaagaggtaaatgacctagctactataaggtgt

SEQ ID NO: 301989 - DNA, 2474 bp, Cannabis indica
ttttgtaccatttttttcacaaaaaccgccaaaaatccagtgccatttatatatcaagtgaattctataggtgagcaaaaatgaccataaacatattccagtggtacaccatggtccccagatcaaataagtgaactaaaagattcatagctgcactaccttatatgttgtgcagttgcttggtcaatttatgaattgaatgaagccattggaacctagtcagaataagttggtgacctaccaaggttgaggttggcaagacgaggcagaggtaagtctatataccaattaaggctccaatctgacaatatatacctaaaaattatgattcagaaactattctctaagcaaaacaggacaaaatctccttatctatgggaagtgaattagcaacttcatatacgaatggaacccctttgcaaaacctttaaagtttaaacactttagcctttgacctaccaaaggctttgttctaaacttgagaaaacttgtaattaagaggaaagagacgactacattaaaccatcaacatgatgatccaaggattattccatttattgctgtcattatcttacttctaaatgatcctaagaagatacttacatgtatgttaatatgaacccaaatcttaaaagaacaaggctctcactcactcactcaaaacaatggcagaatcggatttcaaacacttgtactaaacattaggcaaggatattgaggaagtaaattcaaagagttaatgtatttctgattttcctccattgaaaaagggggtttaaacagacacgaaaaatgtcaccttatttcattactataccaaaaccccaactttcaactgctacatttgattatagggagtacaagattttgttaaagctaacaatatatggattttccaattgagccaagaattacatttcttacacaggctattaataatgaaaatcctcgtcaactaaatgatacaccatagtcaaacccaaacctgaacagcaataaaatcttcacaagaatcagacacaacccggtcaacgagaagaatagaggtcattcagatctcttagacaaatgcctccataggtagcgaccactagccatatccacacaggtccaaaatccagtctccatagctgagcgaacctacataaaaacaatcacaaaattcatcaaaaagtttgaaactttcacaaaacccagaaacaaaaaacaatcaattaaagctggaaaagaaaaaattaatcaattggggtttggggtggaaccttggagaatcggttaaccgaagaagtcgacgaatttgacaaatgggttttgtctgactcatcaagatcgtggtgggtttcctcgccggcaggggataatgcttcgtgctgtgacttgaggtttcggaggacaaagaaaccggcgagagttgccgaaaggaatatcagaattattctcagaggacacatttcttcctatctctctctctcaccagaaattgagaaacgtgtgttagaaagagaagggagaaaaacaagtaagaaaaaggagaaaggttgcagttgaagtttttgacaaaaatggtttaggaataatatatgacaaagaaaatcaaataataataatgcaaaggttttttgggagcatacgatggctgcctttgacctaacacatttgacaatgtctgaaccattatccattctctaattatttattacaatgttttcggtgaaattgtgtacctaatctttagtggtatatagtatttgtatatacccttatgtcttctataattttatttattttttattttttaggtgggttttcttttttatatatattgattttgggtcgaattgtttgtgcacaacacatcctcctaaataaaattctagaataaaagaagtctactatggtgctctctacgttggctcccatttattttcaagccatctcacaattgagttgactaacgatgtgtaagataagtcttgattttggatttaccaaacaaatgaccacaaatttattgctcttaccataatttaagagtgctcatgaactgtttgtttaagtaatgctaattaagtagtgttgatgaaaataagtgtctacaattcaaaaatacgtaatcaccacatggcactgattattatattgaatatattcccatagggtgtcaagtgtttcttacacaaaagttaaaaacgaatacacaaatcgaaaaaccaaaggcggctgcttaaggggacgctgcctagcattttgttatataaaatattactgtcagtaatttaatatctaattttatttaaataaaaattataaaaaattgttaattaattataagataaaatattaaatgacacgtaatacttgtataaagtataatattattattaatgtaaacacaataaaaattaagctaattaataatttttttcctttgaactttgacgtgtactaaatcgtgtcccctgaacttttttggc

SEQ ID NO: 301990 - DNA, 6579 bp, Cannabis indica
tttttttttttgaaagaacttcatgttcattaaattataaaaagatagggaatcaccgggggattgccctccccttgatacaaaactgctaaattactagagatcctagcgtttttagctgcaccatccgccacaaaattactactacgcttaatgaaattaaaacaacaaagatgaaactttttagacaaattcagaattagataaaaaactctagctactctccaatctggaatagattttgctgtcaaggcctgaactgctatttttgagtcagacaagatacaaacttcgtgccaccccatttcgaatgccctcttcaaagctaggaagatagcatgtaactccgcttccaagaccgactgtacctgtatcttttgcgaattaacaaaccaacaaccggatgtaacgtccactgtgattgcagcaatgccagcagtacccttcacccacgatgcatcagtcaacacaaaatgcctatacacagcttcggtttgattgcttctcgagacaaagaattcaattgaatcctgacatcccagatcaactctaactcctccattgcaactgtgacttgaggacaaggccgccttaaactcctccatctttctttcaatttttgacagagccaattgtgtactaccaatctgactctgaatacaaagggcatttctttgattccatatttctgtcataatgcaccccagataaattagcacctcctttctgtccacacattccagtttttgaatagcattctccatcatactgaacatatcatcaccagataaattgtcgaatttcaaagccatccggctaccgaaccaaatagctcttgaaaaactacacttccagaatagatgacaagcactttcttcttccatttcacataaattgcagactttttcttgcagaaaacagagacggttctttgtaggaagtgcttcacttagaactctccaaagaaacacggaaattctgggatgtatgcctggttcccagatccatttccaaagcttcttttccggtgcaaatctatcagaattttctgtcaaataggcagctttcactgaaaacatacctgctggattctgcttccaaaaaatctgatctctgtagggagttgggattctaggaatgctgataatacgcctccccaactcttctccaaaaatctgattaataacctcttcattccattcattaccttgtgagacatcccccaaggtttggacagtaaaacctcttcctttgagactttccattaaagcaacaaattctgtgtaatctagccaagggatccatggttggttccagaaattgattgtagaacctgatgctgcgactgacaatgaaccttttagaatcgttgttctggtatccaagatacatttccattggaaggagtcactgctttttggcttgacaccccaaaaattctcattgtagcagtattttccaagtaagcaataaacccatggtttctctgcctgagttgcaagactccaagctaacttggataacagcgctttgttcatatcttcacacttccttaaacccaaacccccagtgctcttcggttgacagactttatcccacgccttgaatgccataaaacggtttttatcaacatttcccaaccaccaaaacttcctcattaaagcgtccaactcacggcaagtggacaggggaagcttagaagtagacatcgaatagataggcatagcagaagtcacagatttgattaaggttaagcgccctgcttgtgatagtaacttcactttccaaccttccaatttcttcagcatactttctttaagtcttatgtaatcctcctttttcctcctcttaaaaacaaaaggattacccagatgcctttcttcccctctaacttggacaaaattcaatgtgtttaacaagttttctcttcttctgctgcagatgttactggaaaacaaaacactagactttggtttgctacaggattggcccgaccacttttcataaatggaaatgcactctagaagtttccttgcttcgttttcatttgcacgagcaaacaaaatcgtgtcatccgcgaacataaggtgagatatagggggggctgcttgagcaatcttaataccatgaacagaaccactctcttcagccctttggatgagtttagagaacacttcctgacagaggaggaataagaaaggggacatgggatctccttgacgcaagcctctctgaggaattatctttttaagcgggctaccattcaaaaggactgagtaagatacacttgtaacacatgacatcaataacttcctgcttcttacatcaaaaccgttagcatttagaactttatcaaggaaagcccattccattttatcatatgccttgtgcatatcgagtttcaccgccataagaccccccttaccttgcttatgacgaattttatgaatgatctcctgggtaaggatagatgattctcctatccacctaccaggaatgaatgccgattgaagaggagaaatcaactcattcataagaggtctcaatctatttgataaaatttttgcaataaccttataggagaaattgcataaacttatcggtctgaattgatccatactcatagggaagtccacttttgggatgaggcaaatgaatgtttgagtttaggattcataatcccactgatgaagaattcttgaaccgtggcaatgagattaaccccaactacatcccagtacttacgaaagaagcatcctgaaaagccgtctggtcccggggccttgagggggtgtaaaccaaacactgtttccttaatttctttatccgaaggaatctttgcaaagtttacatttgcatcaatgtcaatttttggtacaaacagatcttcaaaacttccatcaatactcggtctatccgtcgtgaaaaggttcatgaagtattggttgacaacatcggcaatgtgcttccgatccttccacaccttaccatctctatccttgatcgcccaaatactatttcttcgcttccgatgactgttgcggcatgaaaaaatctggtgttacgatcccccaaagccaaccacgtctccctagacttttgcctccatatactctcaagcttagaccaagagattgccagatttaagtgtatagccgcctcttcttctctgaacatatctagattaggttggttttgaatccaagccaatctattttccatttttttaatgtccccttctttaacttcactatggttcttcttccaactctgtaaggccgttctagtttgatgtatattgcgaatgaaggcagcagtagcattaacatccgagacagtccaggccatctcaacttccctctgacacgattcctcatgagaccaaacttcaaagtaacggaagggaatgactcccttggcagcaaatagatgagaatcgaaaactatgggagcatgatctgatattgaaataggcaaattcctgaccccagctgaagcatattccaatatccaatccggcgaacaaagcgctctatcgagtctctctctaattaggcctcccgaaaatctattattttgccaagtgaacttgttaccaatgaattgcaaatcaatgcctcccgtcctatccatgaatgaactcaaccatttagtatctgccgaggagacctttcgacctccaaccttctcctcttgagagcaaatacaattcaagtcacctatcagcatccaaggaaattgacaagcagagaactcctcttccatacttttccaaaaaacttcttttgcacccatgtaaggagtaccatagatcgcaaagaatttccattgaaaattgttttgaacatcacataccgtagcttcaaaaaaaaccttcagagaaatagttaacatccaattttatgttattgttccacattaaacaagagcccccagtcaaaccaatagcacccacacactccatgttagaaaaacccaacttactagccatctcttccattatcttaatactaactttggtctccatcaagaaaacacaatctaccttgtacctactgacccaagccaaaatagcttggggtgtcgggtctctcgcgaggccccgacaattccacgataggcacttcatggagcttgggggggcttgataagggccgcctcctcgcccgtcagaaaattttgagagctttcaacatggacttctatcaaattaagagtatcaagaagatttttcggattatcatcaagaacatttgaaaccgaagcatcttcattaacaggttcattatctcgagaactttcttcccttgtcacaaccttctttaatcgagacccttttcttctgcgtttgtcatttttcaaggaagaagatgatgccccagaccccattttaaaaggggaattgggcgctggagagaatttgggaagatcaggcacttctgtggtaaattcaatcgtattctcttcagtgtgttggacatatggtatcaaggttaggctggccttccttttccgaggttgagggcagtgatggactaagtccgaaacatccacagggtcatgaaagagggtgggaatgggctcaaacttatcaactggggctgggcccattaactcttcagccaagcctatttcttcagcatatatgggccaaggaaaatgggtgggttctgggtgtttatggggctgtctagattggcaaagttcagcatgggccttgtccaccatttggtcataagtaggcccgatattagccatgatagtggtaagaataccattatcagcaggatttggtgggggcctagaagaaaatttttttaaaatgtcatcatcagtaaaggtacgattgttaccttgataatgtctttgcagaggtctaggagagactgagcgtgttttccttcccattccaaaatgccttgtaccttgagcatcagaagccatgagtcctttgcctttatccaccggtttctcactagttttttcgaccactttcaaatttttgcctaaaacagctcctgaaccattatcattgaccctgatcaccttccttattggtttcgtttgagctgtgacaggcaggacctgctttccaccactatcgataatgggtcgttttccaaacgctttggacttcgggtcaatacccagagggtctctcaccggagaaacactgggatggttgcccgtgggattcgactgtctaacagtcgctggggaagctctcgccggagttacagtccggcccacgtcctctctgtagaagtctagctgattccgagtgttaaaacaactatagatagcggattcagccttcatccaaggtccataggctgggaccgcatcaccttgaggcggaaaggcaaaggctgtggaacgaaaacaagccttcttgtcatgaccgagatagccacaattataacacaacttggggagtttgaagtaccgaaattgtatccactctttccttcccctttttatatcaagaaaaaaaccagagataagttgaaaagaggtgtttatctccacttgaaactttagaaagccccgtctcgtgatggtgcgttgatttgctaagtcgcctccaatgaaacgccctgctttcgaagcgatcgttcgggtgttaacggcattaaggtatggagtgggcagtcccgaagccatgacccagaacactgccaagcccatatccatattataccagtccccatcagcaggccattccctgattatcaagagtttcccattaatgatccatggtctgctccttagtattgctgtacagtcctcttgtttgtcgaaaaagataccccaaacgcccggtttcattgtcttgagtttccaaaaccccttcagcttccatatctggttcaaaatatccttgagtctagacctggagactccttttccacccaaaaaactaaccagtacaccagagttaacaacttcagctgttagttcaaagtccggttcaagttccagggacatggactccaaaaagttgttacgcaatacttctatatcttcgtttggtttattaacattaccattgatgggtgagaccaccaactcctctgctgaatcattaaaggctccttccatattaacttcggttgattgtggtaggtgaggaggatcttctaaaaccataacttcaggggccccatcagaaggaataacttcctcaagtatgggctcacgtggtagaacactgttatccaccattgcttgcactaagagtgagaaaatagtactgaaaagaaacagaagaagcaactacctttgcaaagaaaaacaaaccttagctttaatattgagttgacaagactacaatcatgtcataagaaacgaataaaatagggcactggttcggatggacatgagtccaagttggaaatcccaacgctctcactcgagagaaaagttttactgctcaagcacgataggtaacagagtcaaattacatgtactggacccgtttgaggttgaccattgacaaaatatttgtatcatctttatatattaaaagtgtctgacatttcttggtttaacagaatatacttaaaaataaaagaatat

SEQ ID NO: 301991 - DNA, 2654 bp, Cannabis indica
tatccattgtaacaatctaaataatcagtgattttttacggaaggtttacatcgagtagtgataaatttactattttatcattcaatgtattttgtccttgaaatacttagctacttgtaaatgatatttcagtaaactaatataattactaaaatgagtgctctatcatttatcgcatttagccaagctcaaaggaaactatcgtttcacttcatagaagttgtaaatttcatatctatgatttaatgctcccactcaactgcactaccaaattcccaatatgtaagtatgggctagtcctacgggtaagttgataacaaagaattcaaagaacacgtgtagtacaattaagctagaacgtaacaatctcaggattgagatcaattgacctaagatcaactaagttacatcgacttaaaaaagacataacgataagtttatgatatcttttccactgtcactatcgatccaatccgatgtatagtcgatacatctactacaattttactttgctaatgcactggaaagggcattccacttatacaagtgtaagtaaaccatgtcgttgattatcacgtaagtgtaaatctagtgcactgataaatcgtgagactaaatagtttgaagcatataataataattattttctattgtgtagacaacactataatcatgaataacaatatgtttgggatttaacagaatttatatattaaacatataataatgaaagtaatcatgtgaaccatgcaacataaaataatttctgatcttttattaattattaaataagattatattgaaataggttttatttagggcataaaatctcaatacaaggaaattacttggtgctcttggattggatctagagttatgtccatgagagataaagtgaaatataaaagtttttattttcgttagatccactatgatgaacaagttcctataaattttcttcatgaaaattttctttaatcttggggtatacttatagttttatcgggtgcaaatagaactcccctttgattttacatgtgacatattttaaatttttggtttttctaaatccattttataaattatattttaattgggagtacttatgtctttataatgacttttttttagagaaaatggaaatttctgtcaataggaaaattagacaatagtccattacatgatgatatatgatatattgctcaaagaatagaatcaacaagataagcaataccatgtcatttataaaaacatgaataaaaaccctaatagcacttttaattaaaacactaataagcctctagtgttgaagtatcaaagaagcgcaaaaaatgttagatatccaatataaatgaacatgtgataaatcacacatattaatgactatcagctaaagatcttctggtaaatattgggtgatagcaatcctattattcaacctagaataaaaagaaataaccaaacgatcaaccatagtgataacaattgcaccataaaccatgggggcactaaaattctgagaatctcctagatctgaacatggacaaggatagtcatgccacgaacacaaacatactttgagcaaattgagattcctccaatttcttaaaaagaaataagactaaaatctcttgccatgaatgaataaagtcatactaccacaacaatagcaaggtggtgtagcgacaccattactaaaaataaaatagaataaaataaacttaaataacaacaaaataaaaaatgcaaatgtcataagctacatagacaccatcagttatctcttcaccccgtgcataacccatggacgcaacccttccacaccataaaccagcacttttgcccacacctgagcccccacctagcaaccaccacttggcccatctctaaacaaaccaaactaccgaaacaccccaactgaaactctaaaatccagacccaccaaagcctaaaaccaacgaccccactctcactgacttaggcaccccacgtatctcgatccatggctcggtaaatagaggaactcgacttctaggcaaccactagagcacctgccatcccacgcccaaagtaggagacaccagaaaagaagaaacaaactcgacaaaacaaccaaaaccatattgtaatggccatgaaaaccaatacaatatctgactagtgtcatgcctaggctataaatgaggttgaggacccctagttggacttgaaaaagaaagtcgggtagatgaaaccctagcagctaaaaaagaatcgtcttgtgtgtttattatttccctaacctaataaggaattttttactagtcatataggttcctttttgactattttaaataacaaataattactatgagctttttgagaaacatgagattaaacttgattatatgatccaaccaaaatagggaaattttcaaaaatattttttttatgttttatttataattttgcggctcaaaattttaattacaaaaatacgcttgaagtcttaaaattacgaaaaatacaatttgctcaacaaaaagtaaaaaaaaaaaaaaacaactacaaaacaactagaaataaacatcacgataactataaataaactataaaacaactaaaaataaccagaaaaataacctcatgataattataatacaactataaataa

SEQ ID NO: 301992 - DNA, 4271 bp, Cannabis indica
attggtatttttataatgtgcgatgcggtgcggtttgaaccgcatattaataattcaaaactacaaactgcaatacaccacgcggtttaggaaaaattcaaaccgtgaccgcaccgcaaagaatttcaaactgtatattttttacggtgcggtgcggtttggtgcaggcggtttgagttttgagcaatttgatgaacaccccaagtaattgattagcattctgcttataatgcagtaataggttacccaattttgaaggagatgaaaatagtcacctcaatttaccgactcactatgaaattccctacccccgcaagtatggatcagtgcaaagggtataggcagatttgagggaatgttataatactgcgttgaaagttacagaaaagaaaaaaccaataaatgtcaattacttgctcaaggcctctccacctcgacatgaatcattcagaaccgagaaagtaccgcatgtggagaaactcaatttggaccctagaatccttgactataccaacactgcgcaagccgtagaggaaacaattgaggtaccaatcgattcttctaataactttaaagtgttaaaaattggctctaaactaacttttcagcagtgagaaaagcttgtaacttttcttaaacaaaatctagatgtcttcaaaagcattcaaatatggtcgaaatactacctaatgttatgtgtcatcgcttgaacatagatcctaacgtgcgaagagtatgacagaagcgttgcaaaatggaccccgcgaggtgcctacttctttagtggtcttctctgccatcaaggccacctgatacaataatgaaatataagaaaataatatacaacagcgggaacaaggaaggaagagtcatagtttacccccattgcttgttgtttagcggcatgggtcaaggtaaatgcatcaacactactgcaagttgcccatgcctccaaggacagcccgaatgcactactatccacttcgtctaagagtttagcagtaaaaggtatagtttctctccccaacttggctgctagtcacttctgtagagcctcgatgtctaccatcaacccagttgggatggttgcaaagaggccatcaaaagtcttggccctcttcacggtcgagagcatgttagctctcttctgcaaaatcctcctttcctcctcgtgccacttctccaaggcattctcggcctcccccgctctctgcatagtagcaaggtatggggaacagtcttcatagggaatttaaagcccacaaaagggatctcaggcaggaaaataaatttttggtgctttggtattgttgatgcgggtttcgttattattgttggtgctcttggcggtagcgttgatgggatattgttggacaaacaacgactgattgggtggagttgaaatgttggctcgccgaggatcaccatctcctttaggagacacaattggaacatgtcgtcctgtcttttcctttttcctccgggacctcctccattagtgaagctttttgacccaatctctctcactgagcccagcattctcgcttcaaagagtacatgcaagcacaaccaacactggataagcgaaccattacgaaattataaagtcaggaagattatatagcaggcaatggcagacctctgagagtgcacacacagaagagtaggtcaccccttccgaaaggacttgccctcagtgcactcgcattccagtatgttgccgcacttttctcttacgtctcctccgtcttgacagaagggttagaccccctcaaatccttaataactcttaacaagtatggaggagttgagccagcctgataattctacaaaaaacattctatcaatcaaacatgtcgtatgtactaaactcaactagaatttagcatttctgtcctagatacgaaattgcacaaagtcaaaagagtgttgaggtacttactagatagtggaaaaaaatagagaaggatgtcgtgcgagttggctcaggtgtgttgtacccagtctatcgcgcaattatagctagcctgaccgctagagttatcgtctgaaatggggtgaagcaaattaggatttacgtgctctggttagaagatgcagagggatttcaaaaggttgaaggtgatgaaagggggtgaataggctcatgaaacttatttgtacgtcggttgaagtctttgcaatttgaaataaatggcccaaatcactcctaccaagaagaatcttttgatccaatggactgggagttaaaaaggttgcattcaatgatcagcctaaaaatttaacgttcgtcattgcatgtctcgtgtaatgcacttatttaaagaagggtcatctcaatcaacttgtcgtcgtcgtaactcctcccaagaaacacgctcccacgcgtgagtactgccaacaacaacagttaaagcaccgtccatgtgccatgctaataacacatgcagtaatcagtaattgacccattaactgacgacagcttgtgggattagaagcaatcccaaccagcaccacgtgtcaagaatttttcatgcataagcgggagagtactacaagctcctggaccgtagtacgtctcgagagcttggggtaaatattatttgtgtttctgcaagatatgacacatggcatttaatggagaatgccaaattaatcctccttcgattgaagtcctttaattttgctctatagctgaagggcttccacgaaccaagggtgacatataaaggcccgtgttaatatggcaaaattgataaatcaattttggaccttaaaatatagcccacacatgtaggcctagcccatacgtatagggtgacatataaaggcctgtgttaattttatttgattattttatcagttaaaataattcaaattaaattgattaattatctttccattattaaattaaatatattattgaataatttatttaattaaaaagataataagaaaataaaaagatttaattgattatattaatcagttattaaatatttatatttaaatttgatatttgaattcaaatcaaatgagttatttttttattttaaaaaagttaatttataacattatatatatgatatatgttataataaagaaacaagacaacttaacctcagatatacagtaacaagttgagagaaaataggaattgaatttcactccctcattctctatcttgcacgccactctctatctcctcatctcacagcctaacaccattaagtgtggtgtgagattgtgatctaccctatctcaattacagtgtctcatgaattgagaatacacagtaatacataaatttgttcatcctatagaatctaatagcccactctattcctcggtgttgagactggcttggaagattgcagtgtgaattcttcaataatagttctttgattggatgatcgtaatcatactaaatgatagcgaggatctcctgataggctacaggaggtattatttccttttcattagtctagatttaatctatatatattatgttgagatccttaggcctatggttaatattggataaaaattatttatatcaaatctgcttctgcttttctaactttcatatggaccataaaaaccaacacagctttcaagacatgtattaaatatctcaaacatcgaagagacattcgattagtcatgtcgtatcaaagatgataaccagacacgtgtcacccatctgattagcttcgtggccgagtaagttcgtgtgcgattaagaagatcccccgcaaatttggaggtaaatgttatccaaatttctgcacgatgatgcaacatccatgtaggtgacacatggaagacattctataaccaagacggacaatcctactcttagtgagtcgtacaggaagggttaattctcaaggtcacagatagaagttgtgacatccgtgcatagtttgcatagacagtttactagcttccattaagtaggtggttcacatgcactaaccaggggatgcgagttagcaatttcagagatatatcttatatatctccatgcttgcaagtcacagcactatccctaaattcatgagataagttcatatcattagagaagaaaggaaaatctacctaagtaattaattatagaaaataagctaacttcccattttatctcttattgattgagggaaactattttgatgtaattagttcctataaatagtgggctcatctcactattcaaggacacaaaattcattcagagagagaacactcaaagagagaatcttgtgaaacac

SEQ ID NO: 301993 - DNA, 1575 bp, Cannabis indica
ttatacatattttaaaaagaagcacgctcgtaataatttttacaattcaaggagaatttaactgagaatttaaccattcggggttaaattttaattacaccgagaaaaagttctagatacaaactctacaaaactcataattcaagaaagtaaaaaaaaaattaactatttaccctttaataataaacataaatgttaatattcccctttcatgttacatataaataaacaaaagaaaagacatactcttctagaaacaaacaaaaagtaaaacaaaacaaaccaatataacattaaaaaacaaataatatattaaaaaaaaaagaagtattagtggacaaagaacaagaattaacatttaaaaaatgtttccccctctaatctctatttaatctttaattatatatataatacatttttttttatatatatatatatatttttttaagtagttgagtagagagatcaacaataagtcccccattatctgggtctaccatagtttgaagtttgggcttaaatgatcaggcccagacttaggcccaagcccaccaccaccaccactactattaccagccatttgatgaaacccaccagaaccgtacacgtgtccctgatgttgttgttgttgttgttgctgacccatcataaccattccactaccgtacatcccatctccataaccaccaccaccaccgttacccacgctcccagacaccgcgtccttctcacgcgccgccgctactcctcctcctttctctccttccatctcacgaaacctctgtaagtagatcttgagtggctcaacgtactcctcaaaccctaacgtagtcatcgcccacagcagatcgtcaccgttgattgtcttcctcttctctctctgacacttgtctgaagcttctccggttatgaagcttatgaactctgatacgcactcctgaactgtctcctttgcgtcttttgagatcttcgcgttcgccggtaaagcctttttcatgatcctgctcacgttagctatcggcaaaagcctgtcctgttctcgaggtgaaagctcactgttcgcgttagctcccgcgttatgtcctcctgagtcattgtcggaatccgccattaacaccttcttcttcttcttcagtagttagggtttccgcgattctcgggggttcgaaaattgaaattactgtttttgagattctgaattcgcgtaatttgaattctggtaaagaaattgtgtgatcggcggcgaaggatttcgctccggtgaccggagaagttagtgagagagtgtagagagagagagagaaaggggaaagaggagagtttgagtttgagtttgagtccgttggatcgtttgggttaataaagcatatctttcgaacacgtggaagaattttgaccgttgtttgacgataagtgtgaatttgcacgaacgagattgaaaccgttggattggtctagagggctataatattgaccgtcgattcggtatctagcacgtggtttgtctgacctggctttaatttttatttttttgagctagtctgacctggcatttttctttttagtttgtttttt

SEQ ID NO: 301994 - DNA, 2096 bp, Cannabis indica
ttgtatttttttgtttttttcctatatataaatacttaaaaagaaaacattattttttaggaaagaattaaaactgatacaaataaaatatttaaaattaacacaaaaataaattaaagaatataaaatataaaaatggtaaatactactttgaaccgtgtgttttataaaagttaccgaatagactttttgttaaatgataatttggaccctgtattttctaaaagggtacatatatgtgataaaaataatcgaaagggtaaaaaagtcatttcatagccttaaaagtaaagaaaaaactaatatcatgatatgatagaccctcaaagaaaaataccatatcacttaagaggaaagatagctcaagaggagcatagctcaaacaagagatgatgaggagcataactcaaataaataaataataaagcttgaagagtttggaatatgaaaagaggaagtgcacgaaagaacaaacggaaattaatccacgtggagcaatcagaataggagaaaagagaaggactaactatcctttctgcttataaatatgagaccccatcattcgaaaaacagacagattcttgtttacatttggctagtataaactctgtcggaatacatcctcaggatcactttgagctcgggaaacatgcaaactagagagaattactgtaattgagagggaactgtgtaaacaagtagagtgcaaactttgactaagttgattatgatgtaaagaattccatgtcgtaatacaatttgttgttgaactatttttcagcatcaacagtacaaaataatactgtgagccaattttttctaaataaagctcaataattatgactaaaattgttacatttttttgcatctgttcatgctagaaacttgtttcagattgattatattaaaaaaaatattaacgaaaaattgagctcagggttctattttgtatcattttaaaatatacaagatccaatttatcatttaaaacaaaataaaggatttgatcaacaatttttttttaaaaacacatggtctaaaatggtatttgtccaatataaaaatcaacaaaactatcactatttaacactagcgacttaatattgccaaaaagttaaatgtttaggaaccaatttaccaaaagtaaagatcgggatgccaaaacttatatatttaggaaccaatttgtaaaaaagaagggtgttggccacccaaggaacgcgtcttgtgtccagccatttgcgcctcatcaacgatctctcattcttttggcaattgcattgacatttacacattcaatttcttcttttccaaaaagtcggtttaaatctccttgccttgctactgattatgctacagttttttttttcttcttgaggagtgacaagcttatctcttcagttaccattggaattaacaattgtagaatcacccataataattgttggactcttacccttacaaatcacctcgtggtccctcagtgagtcaaaagggtcgttccctcgcgacctaaatgaccccaacaagggtccctcatttctccactctcgtttgtccaatcgctcgcacccctcgaaaccccaggcgggggatcattcatctatccctctttggaagcctaaagaccatagcgagggtttgtcctcgcatcatcgagagagctaagacttcaccaacttaggtgagcctcattgaagtacgagaccctcggtctacactccatacatggagatgctacatttgagaagtgaccaacaccaccatatgaaagaaaaatataacaccctcatttattttaataaaaatattataaatgaacttgtatcaaaataataatgttatttttcttaaaaaataatttttaaagttgggtacccaatttaaaattccacgaaacatgtttaataagttaagaataactttcagtagaagatggtcaagaccacacgcagttacacaatccaacaagatacaccccacgttgcccgagctcaacttgccacaaaactgttgggttttatgcactaaataaaactcatttcaatataatcagatatacttattaatatagatcagaaataacatttaatgtt

SEQ ID NO: 301995 - DNA, 4675 bp, Cannabis indica
tttctttcctttccattccatttcattacctccaaccaaacactagtagggaatgttacaatgtttggaattacagaaactaaaaaagtttatgaaatgtttgaatttaatgtggttgaattcttgaccattcacatctttttcattgataccactgtgtttatctgatattgccagggtctctatagtgaagtcattctcacaaggggggtactggggctgtactaggactgtgttgtgggggcactggggcagaccatcattactgcaccagagccagagccacctatcatatgacaaatcttatctttttaaaaacttaatctgttaatgcataaccatttcaggtggaatgaagatgatgaagatcattttctttagccatgaacatggccatggccatgtcattgttatgttacttctgcttgtgtgtatggaattgggagtggtaccaccaaccacatccacatctcaaactacaactcttccccactatgaaggtacatacatacatacatacatagccaagttttgctagtgcaaaaattggtattattatttattttttattgaaatgattgatgcagtacaagccattaaagagatagctaaagagctgaataaaaatgactggaacttcagtgatccatgcagtaatgaaaccaccattgataggccgcggatcagtgataagtacagcaataccatcatctgcaattgctcaatctctgccaatttctgccatattcaaagcatgtaatacactttgttaattttctttgcctttgtttttgcttaattagccttctagacttgtcacaacacacacacactcatactttgttgtctttaatgttaattttctttgatggtttcaactgatctcttttctcatatttcgattttgcagctctttcatcggtcagtaccttgatggcgtgttgccaccctcattggcaaagctgccttatcttaagaaagtgtaaggagttatatatatgtcctactctttcttacttactacctcaaatcaacatgaaaaataacgagaaaaccaacttcatgacaactataaataaaatgaaacaaccaaaatagaatatcgagcagtttattttttttgaaaataagcataatcattcaataaataaagcagcagttagacttctcggtcattacaaaatagctcctccggtaaggaggagatcaaaatagagtcgtacaactagtgggtaaaagcccacttagccacattataggcaacaaaattacaagtcctattaacattagaaaaattataactaataaaagaaagatgacttaatacaaaaggagacatagttatcaagagcccaatggagccgtacaactaatatcgagcaatttattacttttactgaataacatatatttgtaaataaaaaagttcaaaccttaaaaattaacttttctccgcgcgtgttaacatatttttgtaattccattcaaattttcagtgtattatgtaaatttttttacttactatcttaaatctgtcactattatttcttacttgtttacagtattttggagcagaactacctcaccagtccaatacctcatgaatgggcttctacaaagtttgaacacttgtaatttttctttactcacttgattcatagtctaagctagcttaaaattctcatagcaaatgtgttaatggaaggaagcaatccaatgcagggtcatcagtgccaacaatttatcaggaccaatacctggatttttgggcaacataacaactctctatgatttgtattcccataaccaaacctctctcttatcatgttatttgttaatcatgaatgatcattttaagatattttttccatttaaggtctttggagagcaacatgttttctggagcagttcctagagagtttggaaaattggtgaacatggaaaaactgtcagtttttttttagttataattttcttcactaattgtcatcttacttatgttaatggctgttaaagaatgtctttgttgtgaataagtgcagctatcttagttctaatagtctcaatggagcattgccttggacactaagtaatctgaccaaattacaaattttgtaagtgcaaaatcatgggatttatgtctcactcaatatttcaatatgattgttaagaatcatgggatttgttttggtcatgtttaggaagattagcagcaacaaattcaccggaagaattcccgatttagtcaagagttggagacaacttaaagttttgtaagatatttttctcatacataatactttttaaggatatttggggcgaaattttcttaacatttgtaattgttacacataagaccctaataaaaaaagtggctgcaaaagtacttaatcttacgattttgttgcagtcgtacctttaagttctaactcaaaaacacatgacgacatattattggactacgtattaaataattattatttatcctattttttaatttaagaaaaatatacaaatatgaataaaaaagctaaatcactttttctttaattaaaaaaataaacgtttttttatagagaattataaaagaattttttatttaatacgtagtttaataatatgttaccacatgtttcttagttggtacttaacgagcttagttggaacttaaatgtataactgcaacaacgtaaaataagatacttttgtcgtcactttttttttttattaaagtcatatgtgtaacaactttaaatgttaaggagatttcgttgcaaatatccctactttttaggtctcttaaatgtaaaattcttgttgacattttgtatgaataaatgatttcattgacagagaaatgcaagcaagtggttttgaagggccaattccttcaaacctttttgtcttgaataacttaacacaattgtgagtaacaagagtagctaagctagttcatctcaaaatctttgtgtgctttttcataattcatgtgttgagatatttcaatttcaatttgtagaaggattagtgacttaaacggcggcgtttcagagtttccaaacttgaggaacatgaaaagcatggagagattgtgagacatcttgatgttttagcatgaaatctattttttatgatacgaaaccgtgacaatcgaaatatgttgagattgcaggatgttgagaagctgtaatataagaggaagaattccagactacttatctaacttgacagagctaaaaactctgtaattcttctttttccatcaatatttttgtgttgtataattcttattgatttgatggaatataatgtatacagcatagataactttgtacttaaaccgaaaaacaagcttcttctaggtagccctcatgtttcctttgaacaagtatttctttttctttctttctcttatgttgcagagatcttagctttaataggttggaaggcaccattccaaaccttgaagatctactgcacttggccggaatgtaagtaatgtatgttagataatcgtaaaacaacaggatacaactaagttttcgtctctagatctctaaaacagaatgtatttatagagttaaggaggggacatagcaacaaaaccctagttggtggactgagcttcctcatcaaagaattcagttaactagaaaaactcacacttttgactattgatgactatatgggctaaaatgacaaagagctattcatcaacccatattttgacaaaacatttaaaacaatttctaggtcatgttatggttggaggtaatgaaatggaatgaaaattatttttattccattcatttgtttgattgcatttccaatagaataatttttctatcattttggtggactgactattccattttgaaatggaaggaatgaccttctaatgtaagatgagaaaaataacttttttactaatttttttttatgcatttcaaatttaatttcattactattcttatgttttcatttatttcaataactatccgaatgtttcggatcagcaatgatccgtcgtcggatcggatcactgacccgacccgaatgaatggatctttttgccatgcctagttggactcaaattgtgtttgtagaaaatacaagtgaaaaagtaacattttttctattgttaatgttattacattttcctactaaacagatatctgacaagcaaccagctcattggacctattccatattggatcgaaatgagagataatcgctagtatgttttccatccaatcctatcagaaattattatttttcttgttttgatctcttttcatatttgttatcatcattatttttcttgtaaattacaagattttctatgattagaagtgaactttgtgaaatgtttatgctgctaattaatctaatcaagaagatatgactttgaaagtcaccaaaacataatcatggacaacattattgtcagctatttgaagtaagcaatttgagatcaaagaacacgaaatatgttagttgtgacagttaagtgacagttagagttagttatctctagttaacttcttttaattttagtaagtttcatgttaagttctagttaacttctttagttctagttaatttgatttcaaggtaccgaatcctattggactttaggtggcgtttggttggtaggtaatgaaatgaaatggaa

SEQ ID NO: 301996 - DNA, 1287 bp, Cannabis indica
aaaaaaaaaaaaaaacctcttctacattcactttttggcaaccaaacagaaaggaataactaaaaaaaagaaaagagagaacggcaacagacctgaagttcccttgaaatagaagaaagcaacaagattagggtttcttagcaaaaccctaaaatttgggggggaaattctgaagtgtacagaattggggaaaattagggaaatttgtggtttaagagaagagagttagataggaagatgaacaagaccaaaaattggttcaagggcaaaagcttttatatagtttggtagactactactgcagccgacaaaataataatatatattttctaaattagaggaatgaaattgaattgaattttagtttggtagttttttagtctctcttgttttctggttagagtgataaaggcgtgaacttgaaaatctccgtctaatttgtttgactaaagagtaaagagggagaaagaatggtgggaaaagggtggtaggtagttttcagttggaagtttgtcattttcttttattattataattctgaaaaatttattatcattattatttttattttattatgattattatgatatttttgggacggttcttaaatcccaaccactcaatatttcctatttctatttttttcatttttaactagcaaataaattccttcaaaaactaaactttggttcataagaaaaaaaaaatattcctacgaaaactatcaaataagcttctggtgttataaattgataaaataattaacagacctttgaattttttacacacctaataattgtatcatttattccaaaaaaaaaagtagttattcgcccaagtatacctattacaaaaagttgaagaatccttttgtttttacattaattaaatttactattaaataaaatttaattcatatatttttttataagtattatacccaaattatctttacatattcacatacataatttcaaatataataaattttttattttttttttgggagatggagctacagatttgtgagaaagttagagaaaattttaattagaaaagattagagactatcgtaaggtgattgaagtaaaactaggtagaataaataaaaaaaaaaggtaaaatataatagattttgaaagacaaggtaaaattaaagtgatcaatttaaaaaaagtacgtgtaatttttataatgggtcaagtcaccattcttattaggaataattacataaggcaccaaaatttgtaaaatatttacatttttacgttcaaagaatattttttt

SEQ ID NO: 301997 - DNA, 5352 bp, Cannabis indica
attgaacttacttttgttcaatcaagaacgacaaatcttggtttaaacgatttgtcgtgtgagtgaagaacgacaagttccattgtcgtgcaggagaaaacgaccaaagtttctttgtcgttgattgaggttttaaattgaattttctgggacaagtttgtccctgtcgttttgacatatttcttgagtggtgtaggtcaaacttggaatttcaccaagtaaaattcctacagttctgatcatatttttacttggagcaatgttccctagggctctcttgtctattgtattagcagatttaactatgtaataaaaaatttgacttttatttaaaaaggaaaaaataactacctcaaattacacttaaatttatttagaatttgtttgtcaaaacacaaaataacattttgatagcctaatagtttcacacatctcttcacaaaaaaagagatcacaagtcgaatttctcaaacctagtaaaaaaatgttaaagggtactcatgatgtctaacactcttattagttgtaatattatcattagtacaatttaatatgagattctacttattttaatttaataaaaattataaagaatcgcttactaattgtaagaggagtgttaatcacatgtcgaaatatttttttttcaaattttttatagcggtatttgttttagttacactatcattcttgtaaattttttaaaaaattccgaatagtttacaacacctaaaacaaagttcttgatattccagtttactacgcatgttcaaaaaacttcaaaacgtattttcggcactgtaaactatttgaaattttttaaaaatttacagggatgatattgtaagcataatgaataccgctgtaaataaaatatttcgatatgtattttcggatataaagattaattaaaagattgtaacagaaaattgacggtagcactccttataatgcgtgataggtagtcacaatgtatcatgttcttgatagggtcgaaagcccatagcttaaagagccgtagctgtttagcccaacacgtgtgacacgtgtagtttcgtgggtgaaatttaaaccactgcgactgagactgagagggtttatagcccccacttctagggttttagacgaagtattccaacgttattcacaagtctccggaaccatctttgcctgaagaaatgggattttggggtatgtcttatttctttttctcaatttcaatattcatcaaatttcccatttttaaaattctgtttaatcaatctttcaattttcttgcttcggtttctcagcttccaagcaagtacataaatattacacaatattttataagaagcattatgcttgtatatcttctatattcattgatttatgggttttcctttcaacaggtattgaagttaaaccgggaaagccatacccttatcactcggataatgtaccaggtcggcttcatgtaacccaggtttgattccattccactgttcaatctatgctctcattagaagtctgtaagtttatcaagtattacatggagctttggttttgccattgatatttgggtttgttttatcattttcatttagggattacttatgttagatgttaggagcacatgatttcgggttattaagttggatttctatgctttgaaatgttaaagttatactgagtttggtgtttaaaattgaagcatcttggtatcagatacactctgagttggttcttagatttgtgtgtgtttgattgtgttgtgtggtaaatcaggctactcttggtttgggctccactgcagagaggagtatagttcagtgtgctattggacatagaagtcctatctttctttgctctttattaccgaataaaaatgaatcatgttcattgaatcttgaatttgaggaagaagaattagttgctttctccgtcattggtccacggagtgtacatctctctggctactttgaggctgacgagggtgacaccatcagagatgattatgagtcgtatccttttatgttttctagtgtttgtttttctttcttgaatttctacaaacgttatataactatatgtatttcattacccattattcattattttgtattattaatgctgttgtggaattttgtatatagtttaaatcaatataaattggatatatgattttcaaaagttattatttctcttacatcatattaaagcgattcttttggagaggatatcgctgattcagagactgagtcatctgattttgacaatagtgatgatggtgatgaattcattgatgatgatcttgacatgtttcctgattcacctgttccaaacagtggaggtatgagcatattgacttattgattacatgtattttaaaattttactgacaagagctttaatatctttcttctgataattcatgatgattttctcaactaagaaatcatttggcgataagaaagattacttaagtagaattttttctttttataatgataataataataagaaagtagtaatgaattgatgctttacctcacaacactaacactattagttattccccaaaaaaaatcagtttttagttgtattatctttatttcatggatgatatattggtaatgactcctttgattttgttttaagttgtaattgaggagattgaggatgatgagaaacctacaagtaaaactgggcaatctaaaccacagaaaaagaaccaatcaaaaggctctgaggacagcaaaaactctcaacaccaagccattgttaaaaaggatagtgttccagttcttgaaagtgaagatgaagatggctttccagtttccaacaaacatgaaagcaattcaaatgttcaaaagcctgaactagaggtacagcaatcaaatgaaaaggttgagaaaaccaacaagaaaaagcaagatggagatggtgctactaacttgaagagaaaggtcgaaaatattgaccaggagacccgagcaagagaagtgagttagaataaaaaaaaacatttacttcaaatcttctaggaaatttctttttttttttaaaaaaaaaaaattgtttagctataacttatttatgtgaaacatttcattatatttgtataattatcttattacattactttagcgatttagggtgcgatagtttacatattctttttccttatttatttgtttatttccttctggtgttgcagctgcaaacttacagttattgctccttgttaaatgtttggccacttgaattctgatactgaagttgtttctgtaaatgttttaggaaaaagaagaataagaagaataagcagttaaaagaaaaagttggggaggagaattctgatgaaaaggagcacgtggagttgaagagttccaatgtgagtcaggttttaacaaaattggatgatcaggaaaagctggctaaggaaaagtgagtttggctatgtctaggattctctttctttgtttgtttgtttttcccttttcttttactttgcgatcaatcttgtgtctagtttattatcacattcccactgtttggatgaacccctaccccaaaagtaagaaataatgttgatgaggggctttaaggtttaaagatttatcttatatccaagtatgaatcaatatgtagtaatttgcataaccctctgatcatttacattgcaacaagataatcgtgttatcaattttgtcctcgctgctactttttatttccattagttaattctatgcaaatgcctgattagctttttcttgcatcaattttcggcgcatgtgccaggagccttgaaaatgaagagtcaaaaaagaagagaaagaagaacaaaaagaaaagccaggacaatgaaggtgaaactaatgtggatcaaactgtttctgctaaggaaggtcaaaaagtatcaacattggagtcagataagcaaactaaagcaaagtcatctaaagtgagaacatttgccaatggtttgttgaagaactgtcaatgggcaaaccagatggtaaaaaagctgctccaggaaaacaagtaagtcttcaagtcactaacatttattctgtgactttccacactgaagaaattatattcaattgtccaattccatgattatgaaatcctaaacaaagaattaggtttctgtagtttttgttctaaggcactttcacccacctctaaacaaaattaaatgaataacatttcaggtcagtgtccactacattggtaagctaaagaagaatggcaaacaattcgacgcaaatgtgggaagagcaccatttaagttccgcctaggtacaactatttttgagcgaaaacttacatataccttcctcactatttgtattaacactcgtctcttttggttttacaggtttaggacaagttattaaagggtgggatgttggacttgagggtaaaacaatgtcttccttcatttttttctttaaataaaaaaaaaaattgttaaatttatctgtttgtttcttaaaagttctttacatccttacatacattttgccaggcatgcgtgttggggacaagagaagacttactattccacctgagatggggtatgtatgcctaatgtcgagtttataaatttctattagtcgagtttgagcttgtttcttatttgggggcatacatttgttttatttatatatatgtttatgaatttggtgtaaacttttttcacgcagttatggacgtaagggagcaggtagtgcaattcctccaaattcgtggcttgtgtttgatgttgagttaaatgatgttcgttaaatctatcagagaaatttttggtgagaggagaccatttcttaacaggctaccaggcttgtaacaattttgctttgttgtgaaaatatattcaaaacttggattattgaaattctaaaattatatttgtgggagtgagttcaatttaagagcagttgtgactttagatgagggaaattgcactcaatttttgtttgcataaagaacatacattgacttttgttgagagaaattatttgcttacataatggagcaagccttgattattatgtcgaaatataaggaattgcaacttcaaaagtaaagtattaggacattaacaaagatattgaaacaagttataatttttatgagcaatttgtaacttcggattttttttccttatttatttgattttataaatagagttttgttgaggatcatagccaagaaaaaggtcacgttgaagtcagtttttatttttccgagttaaagttttattaattcattttagagatttttacacctgatgtcatatttcatcatttttttacttttttggcattacacggttttctaaacttttttaccttttaaatt

SEQ ID NO: 301998 - DNA, 5268 bp, Cannabis indica
ctcaaagctcatttaatggggtcggagaatcttggttgcaaaagagcaagaagagaaaaaactcaccaagaacattctctgtatttaagagaaaaacattctctcaagtgtagaatctgtattaaatacatccattaatagcagtggctcgtggactaaggctcattaacgccccaaccacgtaaaaagtcttcatctcactttcttacagctcattattataattatattttaatagttgccgaaaacctcggtcaacagttctcaaattcacccttgcttagtaaaatttataaataagatagagtattatttagaatcctaattgattaattaaactcaaaaccaattaattgagtctacaagggaatatgatctcagctagtgtagggaccatgagcctatgtaaccaaagtagttctagaatttaccgagtaaatttttatctttttaattcctcttgactcaactatagattcgaaattacactcttgattacatatatagaacactatatacaccaagtatagatacgctatgaatttatctattatttcaatcacaataagcattgatcttctatagatggtttacattgaatagggacaaaatgaccgttttacccttaaatatatttatccttaaaacacttagctacttttaaatgatatttcatgaaactaatataattactgaaatgagcactctctcatttattgtgttaaacaagctctaagaaaactattgtttcatttctaatagacatagaagttatagatgtccatatttatgattaacactcccactcaattgcactactgagttctcaagatgtaagtatgggctagtctcgtagttaagctggtaaggaacaagtcaaagaactcgtgcaatacatttaagccagagctatatctcaggattgagatcaaataatctatgatcaattaagtgatattgactatatgatggtaagtttatgatatatttttcactgtcaatatcagtccagtctgatgtatagccgacacatccgatcttggtttattttgctaatgccttgaaaaatacattccactcaccctagtgtaagtaaatcttatcgttgattatcacattagtgtaaatattcagtgcattgacaaattgtggaactaaataattttaagcatataatcaaaattactttctactatgatgacatcactattattgtgagtaattatagatttggtatttaatagaacttatacattaaacctataatcatgcaacaaacatatgaacaaagcatatgactaagtcatggtatgatttctgattttcattgaaagtatatatgattgcattaaattgaattttatgtagggtataaaattctaacatattattcctaagcgtcattttattggctggctcgctacccccaacaacctttatactcgaggacatattgctgaatatggggatcatacctctcataatagatgcctcttttgtgattgtttttcgaaatcagttgatcaccttcgattcagtgttgctatggtgaatattgtttgtctcagttgatatcttggttgggttggaatattattacataatccttatacatgttgattcaatagatcacttgaagcaaaataatgacattctacaaagtagttttttcagctaccattctagttgttgtgtatgtgatttggtgagctaaaaatatagttctttgaaagaatagagtcattggaagagaaatcattgctagggatatcaaatatattgttcataataacaggataagcaagttcattcccattaaaactaaaattattgatattgattagttttggactttgaacaatgtatagataaatcttgattggttttgttgtcacctactgcgacttttgttggtggctgccttttgttgttatttggtagatttttgaggggttgttaccctttttatagttgcatagtttgatttttaataaaaattttataaacttacttaaaaaaaatatcattatacaattagaagtaaaataattataaaaacataaaatccagctaaaaataataatatattatgctgctacactggcagcattaacatacaatgtctggtagacccgaaatgatcatttttggaatgataaccatgtacaaagcagtcaaatagtagatagaacaaaaagagacgtgattcatagaatcaaaagtgtatgacttaaaaaaagtagtgtaaaaatagaatatagtttgagaatttgtaataggagtatacatggtgtaattgctgtataaatattttcaagtctctttgttggagatgctgattaagttgtatttgattatttggaataatgataaccttgctgctgattcattaaaaagaataataatataacataaatagatatttgtggagaaaattgatgatatataaaaaatgctatatttagtgacaaccttttagtcacaatataaattttttgtgattaaatatgatttttagtcacaacaaaacgttacttgtgattaaaacttactatttaaatataaattgtcattaatttagttctagtcgcaacaagtattgtgcctaacatatttaatcacaataaattataattttgtgattaacacttttaatcacataccttttagtcacaatataagaataatgatttataagtacacaattttttaacttttagccacaaattaaaaatttttaaagtgacaattaagtgtttatgtatttttttaattcaatcttattattgacattggcgttatgttaacgactaattaaaggccaaccacgcactaaaatagtaatggttcaccaaaaatattacataagcatttaattagtacgtatatcaaaatctaaatgacaatctcattatatagtgtggttaataatattatgtgcctatttgatacatatgcatgatacaatgacaaataacttgatgtttgggctcgaggtcgtagtggttttcttttgtattcccttattgtgtcagttattttctgttttgttttgagttgtttcctcatttctgtctttaattttttgaataatgacctctttctctctatggcaagttataatcatgcctaatttgtatatatggtgacattattatttatagtgtcaccttgtgtgggtggcggttcattaaatctatcatgttagtctttgtcattcttctctattgaggagattctagctactgccctaacactacgataaagttaagtgcaacatattttaagctttaagatcaaatatattacgatatactatatatgcatttgaatatagttgagagattttacctttgtatattaatagaattctttctgttctttcaggaaaaagaaaaaaaacatatatatatatatattatacgatggttataccgtgtgttgtgtatatagtgtttactaattatatatacaaatacatttaatatattatgtgttataaattaataactctagtgtaaatccgtatcattagttgaaggtataataaaataaatgataacaaaacagatcaaagatgaatgtttacgatcagagattccatctaaccaataaaatagtgacacaacaaaatcacaaataaagttaaaaggaaattaatatataaaggaaaaaaatgggagcaaaaggtaattaagagtatgcacagtatagtcttccttatcaaatatatatatatatatatttattacttgagccaggaggagagggggtgtggtaccacagaaacattacattatatattgcatgctcaattggaagtacatatagccaaatatatgtatatatatatatatatgtatgtatgtatatatcaaacaaagacaaaagttacaattgtaatcactccatacacactgttgacactactagtgggggaccttcaaactttgatatttgccatccatttctggtatccccacactctacatatttatatagcaataattttcccaattaaaaatcatttattataaatatatatacttgtatatttacttacatataaaaacaaaactaaaatagttctaccatgtttttagtttaataatatatagacttggaatttttacaatagttggttgataattaaaaccaaaagatataagaatttattgtgacatactacaacatcagtgatgtcctcgatcaagcccctactcagggccatttcagtaatttactagaaatataggtggaataaaactgaaaagaaacttatcctattccgccgagcactagtgatcaattcaatctaaatatatatagaagaagtaaaattaataatttcactagggttggcagaaattgatccttggacggttcaaataagagccttgatatataggttatccttttgtcactatttgatactacaaagacttattatttaccaattaactattaaactatagtacattattatcacatgacacattcaacatgtatgtatattaatatatgctcttgggagtgcatttatgatggttccatacacatttttctctctcgaaaggtctctgccatatgattcacatggtccaaaatggtccataccatatctctcccaccgtgtctcataaaaacaaaacttatatatatacacatatatatatgatgtcacataagtaaatagtaggaagataaaatctcatagagcagaggaaagctagctaggtagagtactacataggcatgcaatgaaggtataacaatgaaaaggaaataataataataataataataacaaaatagaagtgggctatataaattaactaattaataatcaacacatatacatataggtatctagctaggtagctatatgttaaaacaaaatatgtgggggagagaaataagagacgaaaaaagaagggtaagagagtaggtagtactatatttataagtatataaaaacaaactacaatgatgtacatatatattttatatatagagagtggggaatggcaccatataaatgtgactgtgaagttttgattccttggcatataagatatagttctgttgggttactgtactcagcattgaatgagggaggccatgaaagtggctgaaccaatgggctagcatagtttctcaaatatccctaaatctcatcccccatccatttccaggtgggtcagaaaattttcctatacatattgtttgtttgttagcccccaaacaccttctctctctctctctctc

SEQ ID NO: 301999 - DNA, 1677 bp, Cannabis indica
aacatcatgaaaataaatacactaaacaatcaagggttacaaattcaacataaaaaaaatctaataaaaatataataaatatttattattatataaataattttttaatatatataaatgtaattggattggatcggtttttaattggattttgagattgacctccaataaccgatccaatccaattagaatctaacttttagcatctaatcctatctaattgtaattggatatctaactttttgtaattggatcggttcggttcaattgaatttgattggatgatacccacccctagtttttaacttttattttggagggggattctgtcactcgtgtgaaaagtttgaagttgcatgggtgtcacaaaatgacaatagaagggagataagaatcaatcaaacaataaaaaaagaaacacttgagctagcacttgaggctagctcaagtggctatagaaagatgcgtgtgtgttggaggtattggattcaagtccttgtaatatataaactcttaattcaaaagaaaaaaaaaacaataaaaagagaatctttgtgtaacaaaatcgaaatatgaaaatctcccattaagtggattacacctgtcaccagttaaatcctgatcgtctatttcttgcatctaatcttaaatgtgactgcccatctctgagaagactacagttttctgttccaagatttagattacacctcaccttttcaccgataatatccattttgcataattacttgtacagttgagcaaatttacgaaaataacgcaaataattggaaaacatggcatcaaaaaaattaggaaggacaataactaacccataatattagaacaacttatgtgtatgtattcttttgataaacacaaaactctgcatatatatacattcgaataaataatagaataatcttcacagatgggatccagatgaaaatgccaaacttttcttcgtggttaagtgttaactataatggtaatgtttgtaattaacgcggaaagtggacccatttacgaatgaaaatcgagtttaaatctgaaactacctcacttcgttccctctcatataagcacactcggtttacttatctctctctgtaatattttgagctctatcactcgcttccatggcggatctaaaggccaagttcttgaatgtctactccgttttgaaatcagagctccttcaagatccagctttcgaattcactgatatttctcgtcaatgggtggagcgggtactaatcttaaaacttttactttctattttttgagcttttcttagctgattagattatgtcactactgattttctttttctttcttatcataatgaggtacggatatagttttacgttataattagtagtggagtggattgagttataattggtttcaaagctttgtgatgagttagaatagttatgctttcttgttgtatgtatttgtttctatagctcttttagttgtttgtttgttgattattgtcaaaataagaaaatctaatagaagaaaaatttagatataacgcatggaaagtgctagtggaattttgattagggtgtcaaaacgtgtcatcgtgttcgtgtcatattttatgtgacccgcttttatatttcgtgtcaagtgtttcaacctattttttgactcgtgtctaattatctcaac

SEQ ID NO: 302000 - DNA, 1178 bp, Cannabis indica
tgagattagaaacactatacctactattattcttatttaatagttgaaacataataataaaattctgtaacaaaaacatatataccatggtttaatatgactgttctgttctgttctctgtgtgtgtgttagaatagaagaagaatgcaaaacagagaaagaaagaaaagggttatgttgtgtgttgtgtgttgtgtgaatgtgaaaagtcttgagtttaacaccaaaaatctttaaaaatatatatatagtaggtgaataaggcggtgtacactcaagatagaagctatcttatggccgtacgattgtcttgtaaacattacacgtgtcttctattccttaattccttatacatataactagaagagaatcaaataaacaataaacaaatagaatacaactaaatatgtattgggacatgctctttaaaaattattacattaaattatatataatttgagcttttaaaaaattatatataatttgatatttaattagactaataactctactaattcattttagcatttctcgaactaaataaaaatatactaacaaaaaatcaaaacactaaaaaatatcaaatgtaacaatagtaacaataaataatctttaatattatatcataataaaatataatatttatacatgtattacaatttaaaataaaattatatgagtatgtattcattccacaacttattatggacaacctaacaacactacttgggcctaaatatatttctaattatgcttacaaatgagcaatctattctcgatcgtctaaagcagataattgttttgacaactgaaagtgaactctacttctaacctcgtactcaatttgcctaataattacatgaacacattgtacacgtggaaccaaaatacttgatttctgcttctccaaatgtgataaacaacacatgtaatgtccccgcttcaagcatctattggactcttacacccacggactaatggctcttatacacaggttcgtcactttagctgcttcctagattgacgactgaccctacagaccaacacgagtgcttccagcatgctttgtcctcactcgcactcttcctgggaaaacttctcaggaggtcacccatcctgaaattaccccaggtcaagcacgcttaaccgtggagttctttcgtgatgggctaccaaaa

SEQ ID NO: 302001 - DNA, 3098 bp, Cannabis indica
aaattcttagtttttgacttaaaacattttttgagatatgttttataaaatatgagtgtaaaaggatttagagttgtttaaaacttagagtttttgttaagaaattggttgatagaaaaaaaattctcatggaaaaaatagtcaactagggacatttatgagctaaaaatcatctaaaaatactatgaaaaataattgggacatatttaaattacacattttttacgcacaatgataagtaattaatctcaactatacaactaaaagtattataatcccactcaaaaatataaagggctaatatttattacatttaataagaatgtatagctagatgcagatatatatatatatatgtataatggtgagaatggctccatttatttcattgttgtaacaaaaatttcacattattattcactataataacactttgcaaaattgcactgttggagcttgaattgtggtaaagtgttgctttctattagttgagataatattcatgatgtgaacaaagttgaaatagggctattcttcaaaatgatgaaaatgagaggcattgcatatattgagttagttcatatgatgtagtgattttggatttgatcctatgattagccaagagattcatgccacgtgtagggttgagattgaggagccaagactaccccgccaagtaataataataaaatatgataccctcgtaaaagaaagcctcaatcataaagtcctagaaataatgagaaaagctcattagaaatctccctctcctttataaaaagttggaagaaaaaaaaaaggcaatgcaaatatttgagagagtgagtgactcttaccaaaaaaaatatatgtatatattaaagctgaaaacttgttcacaaaaacagctggctaagtaaggaagagatatgaaatttgagattaaacgacatcattattggaccctcttccatacacatatgttctcacaccaacaataaatatagatatacacacacatacagtactactaactatcattatagatatattttttttaaaaaaaatgtagggatagaaattgagaaatattaatgggcaccagtgatgtttagtacccttttatgtgttaatattgctattagtctaactaagtatcgggtctcatataatttaatataatagcttttagggagtaccgctagccaatcgcaacgcgatatgtcgcaaaaattctaggcaccactggtgcctaattgcaatgctcataaaaattagataggtaatgagtaagtaatgtacttccaattctgttcctattcttcatttatgtcactcatttcccttcccaccccgtttaatccccaacgaatttggaataagagaaattcccattaagtatgaagaccaattaagtacctataaaatataataataataataataataataataataataataataataataataataatagttcttgaatttaaattaatattgtatccaacatatattatttactttatatctacaaattataaaaaaataaataaactagaaacataactaaacatatatatatatattaaaattgtaagtaataacaaattcaattagttattgaaaatcaaaattaagaagaaagattaattataaacttcatatagttatcagtgttttttcgaagaaggttggtcgggtagggggaagaattgagtgcagtgcacggtaaaactaaacctcctattactctatcggagatagctcaagccgataatgaagaaagatatatagaaagtatgattataccaataaatatttataaaattatatgaaatctatatcggggtcatatatagagtgagtagtattacccctgacgatattctaaattcgctttaggtatataaaatttttctctacccccacactattacccattaaagcggataatctccaccccatccaaagtgagtacccgttgataactatccccacgggtgaaattctaatctctaaagaaactattattatatatatatgataataaataattaataattactcgggtttcatttcaatacttactcatcatccaccccatgcatttagagtttggataaaacaatcatagtaaatgttgtatttctcaaatattttttagtttttttttggagatgagcatttgagtagagctatctggttcattcatgaaagaagcaccatctagtaccactacttatatttgaaaaaaatacatttttgaaataaaactgtaagaaaaaaaaaaaaaaaaattgtatttacagatgggccagatactagtgggccatgtagaagggagcccgtgaaattaaaatgggccagttgaaatgcatggggagactgacccatcttaattttttttcggttaataatgtaggtgtagtttatcatcaatgttctgatatatgaagcatatttttattgaattcaaacatttattaaagtataataatgaaacacagacacttttgaaaaagtcaagtatcaacaaacaaacttccaacctaatttatttaaatctaatattgtggtagatgactagattgaagagtatctgtttgtttttaagaaggtgagaatactattaagtcttactaactttactggattcacttatagtataagttagattatatttatatgtatgtataaggagtaggtttactaagaattatttcttcctatggcaaaaaatatatatttaataccaaccttacaaaaaaataatatttaatatgcactactacaaaagagtttatttccattggtccttaaattggttcttttttttttttcgaaaaccgtcactaataaaattacgtgactatttaaaaccgtcaaaaataatatactattgagcatgatttttgaaaaaattgagtgaaattttttaactaggtatctctgacggtttaaaaccgccgggaatactattgtcgatggattaaaaccgtcgattaatagtataactaacagttttaaaccatcaggaacactcgtgatatatatatatatataaaactccaaatatttttagatttcatttcactctctctctctctctaaaa

SEQ ID NO: 302002 - DNA, 4109 bp, Cannabis indica
ttaatattaaagtgtatttataaacttttagggataaatataatttttcgttcaatattatgttaagagtttatgtattgtcaaaaaggcccttgaaacaatttaatttataaatatgctctccaaagtcaactctttattactagagttgggtggagaagaactctagagtattgagaaggcgtggcacacagaagaagctccatagagaacccacgctcagcctgtgcctgccatgctgattacatttactttactacatggcaagcctgtcacttgccaaatgagtagtagctagtattggaatctacaatcccccttacgtggcatcaattccagctttgataacaaaatattttcttttcttttctcccattatgtgagacagcttatatatgataagttttctcttttcttttcttttcttctcccaaagaatttcccttccttttccttttgtttcccctcctcttgttctacttttctaaggaatacttcacacctaataatgtatgtatgagtgagttctttcgttggagatggaatgaaatacaaacaaaaaataccttattcttcttcgagaaaaaaaaaaaaaccttttcattgtttattgacctattgcaagaaaggatgaagtataaaactaattaggctaagtttaaaaattaattaattaggatcactacattcttattttgtcttataaatcataattaacactgaaaaattactattccaatgaaaatacttttcatctgatttagttcatgattttcataaatattaaaaagaaaaatattattattattattctttttatttatatattacatatttcaccttttttttatcctccactttttcttctttatttacttttcttcatatgtcctttctcttctactagcttaggttgttcctctctaataatagattgatgaaaagttttaaaaaatgaggagtacaagggatataagagatggctaattaacatttttatccttcgaattttgacatgtattaaattatactttctggactttttaaactgttaaaaatttctctcgaattattgaaattatttaattgaaggactttcttccaattttactaaatgaaagtctgacgtgaaagaaaatttagggacatgatttagtacatgtcaaaatttaaaggtagaatatggtaaatatcaaagttcagaggttacgatttggtaaaagacaatcatcacattagtgaaattgaacgaaactggatagatgtctttgagtccaataatctcagtagttctaggagaatttttaacggtctgaaaaattcgtaagtatgattgaggatgtaatttagtacatgtcaaaatttaagtggcaaaactctaattagccataagagaatagcatcaatttatcttaactggcaaaaaagaaagtgaaaatgatggttataaatttaaatacaaaattaatattagtgattacattttaatattttaagattaacagtttaatttaatataattatattttttttaatttgatcttgtcccgtcttaatttggtggattaggaaggccccatctcttctccccctctgataatgtcctttggtgccttaaccttccttccaaaaactcatcatgcaaaattatctttaaataaataaaatcagcagtgtcaaagaattttatcaaaatcaaaataatttatttcattttattcgaaaggtaatctaccctctattagatattctattaaaggacattgttaatttacttcttaattattcttaagcattcttaattcatgttggacttaagtgtacacagagggtgggtttcgatctatttaatttctattttatttgttcttggtggattataactattaattaagtcaagcatgaaacataaattataaatattaaaatttatttatctatttattttcttacaaacatgaaaactatataacttgtcatttatttcttaccaaacaacacatcaatgagcaaatgccaaacttgaagggtaaaaccaaattttcttttgttttatacaactggttttgttataagttttgcaaaataccagtgaataagtagaagctttgtgattcccgcaaacaattattatatatgcaaaagcagcattaacgcttgtgaaatacgaaaaagaatgtaatacgagcaacagtcaacagagtatgccaatatatatttggtaaaatatttcaaagatgagttctccataaattgtagaacgttatgcatatggagactaggaaatggaatatatgaattaggaaatacatttaggccataaagtcttattagtaacagtcgattgatatacaatgcttcttgatacaagcaagaccaacatattacataagtttgttgcatatataatttcttacccccactacgaccaaaggaatgaagcatttttgttctgatgtttttctcttcttactggacagtaaattgtactcctttattatatgaagtgcaaatttgagctagaatgcagtaaccaaaagatgctaaaaaggacagaaaacagtaaaaacaatatctcattatggtaccaaaaaaatgagaatattaccctactgagcagagagaattctcatatgtccttctccgacttcacatttgtctttaaaaatccttacaaaaggagagaaagaggagtagatgggtgctcactttattctcttgccacatacttgagagagagaacaaatatatgtaacaaattaataggcattgaaatctctctctctctctctctctctctctctctgctagtttctggagatgcgtggtcacatctcctcttttgtaaaaggaataaaagctgtatgaagatggaacaggatgagaatattaatttatgtttttattcaatcattggaaggattaatattctcacttcctatccactttctcttcttatgttgatgataagattaagaatcccacaacagacatatatgtattgtatatatgatgataactcctacatattatatctaacatttttatttatatgtgtgtgtccaaccacagacgattctcctcctagtatccttaggatagcatggcaaaatcatttgaaatgaaaccacatcatgagtgactcactacatgattcctcacgatcatcgtactacaattgagaaaaagaaaaaaagaaaaaaccatatcaaaatggcattttaatggttaaaaaaatcattgccacctcactagggaacctgtatgtgtctgacaacttgtataaaacagaacaagagtcgattttcattcactagctaggtccaggacaggacagaataccttgatttagattccacccacccaggacagatgttttcataatacattatgttttatatatgaagatcgatcaacaaaaataggaaaatagtataaatttcttaacttactaataaaaaagagagaaagaaatatatatatgtcaaaggcttcactctcttaagaccgagatcacaccttcaaattattaatttcttgcgaattcgtataagaaaaaaaaactaatagtgaaacaggcatatttcgaaagtaatagaaaaacatacaacatttatgaaatgatacatatgtgtaactataaaagggatacgaaaacataccaagagagcagtagtaacaataaggaataaatactgcatcaattgagatttgtgttgtgggccttccaacatttatatacttttcttctccaaaggaatgttcttaattaatttatgttccaaaaattggtgggggttatgatggatatatacacaccaatataaaattgttattgggcagtgaaccatccatatagtcataataatagttaataatatttcaaaaagattggtaatatagccgcgctaacggctaatttaattttttttaatacaataaaaaaatataatttcaatatatagtaaaagtaaaaattatatttatctaattctatattattattttttatcttttattaaaagtttaaaaatttatacgattaatctatatatatatagaattttaaattgtttttaattttttttaaaaaaattattattataaaa

SEQ ID NO: 302003 - DNA, 1991 bp, Cannabis indica
aatattatttttttatttttaagtttgtggccaaccttacctttttctctcatgtctttcttcattcatggtttgataatctcgtgtcctagacttaaccataccaatccatgttgacaacacatatttttcctttcactccatcaccacaacctggattatattatacaattatatatatccttcttaatcataaatgatgataccacttctaaatttaatgccatttattcatataatcaaattttgcttaagaaagaagggaataaatgaacaataaaagtcaggaaactaatccatctctgttcaatccaaacacaatactacttttattgtgtatattttgggttataaatattcttaactttgaggggtaactagaatagtttagcaatcaaaattcccaagtgggtttaggaataaacagaaaaggaaaggactttttaacttaaaaaagcataaatgtttcagttgcaaaaaataaaaataaaaaataataatagaaatgaaaagttgaagttggaaatgacaataaaattccaagggtgtgagtaagtaaaatagaagccccacaacacacaagcacttctgataatggctgcacaaaaggttaaaagacacaatcccaggatggacaagaaattaagggcccataactcacactatggcccctcctttactgttctaatcactattattctacatgtaaaagggccctatgggttcatagcagaataaccaagctcagctcagggagtggaccacaacttatggatttacaatgcttcactgccattgaattagagtgcacattcccatgaatagggtagaggataaaatccccaaaaaccagaagaatatgaaagcccatacttctcacctggttaacaataatctcatcaataacttgtgttgtgtatgtgagtggatagtacttatggtcattttgtgttgtttactaccatagccacatggcaagagacacctgtatggattgatcttctcttgaatgtgtttgatgtgaatttatgtataaaatgagtgtgtaacttcccttatcaattgccatcaaaaaaacaccttctagctctacatggtaggaagatggagcaatctgtcccaacattgcaactacccactcgaaggaacaaacaaagctattaattttagcgaaatttgaggcaaaagtcctacaaaagttcactttgatgcagattagtccctaacctttaaaaatagtgacaataatcctaagctcatcttttctgtaagtatgttaatctttattttaacaagtccgttaagttagtcaaaactaccacatgtctaagtattattggtctaaataataattaaaatttaaaaaaaaacaaaacaaatattttaaaatctttttgtttttattttaatttttctccttgtcttcttcctttagccacacccgacccccacctattcttcttcctccagccacaccactctcacccaccaccatcttcagccatagaaatcaaaatcaaatccctaaagttctttttttattaaaaacttagcaagcactaacccaatataagtccatcacctttatatataaacgataccaactattagaaacccaaaataatggtctccattttgcactgtcggccagctcaagaataacaataaacttctcacagcaacagaatgaccacgagatctgacaaggagtaaataaaagaagatgataacaacgacaaaggttgacaaggacaaaaggacgatcacagaggtggacgacgagatttgggtttgttaaaataacttcagatctgaaaccaccttctcttatctgaaaaaaaaatgggttctcaaatgtcagatactcgatgaaaaatgttgtacactcttctcgatgtcaaatatttacccgatgttaggtcataattagcctatgttacgggtctaataagtaagcattttctcggtcattggtgtcttttggagcagtt

SEQ ID NO: 302004 - DNA, 1506 bp, Cannabis indica
acagatttctgcattaacacccgacattaagctcacattgatccgacccgtatacgagactgagtcttgtcactcacctaatgatctcaaaaggggccagtcaaactaaccacacagataacaatcttcctcataaagtgtgaggagagcaattctataagggaatgatgggtcgtgagtaacgtctttccacatgcacctataagaaccactctcagtcactaagagatgcagataaatttcaatcatctcaacacttttgacttatcattcactctttcatcctctctaaaactacatacttatttccgcaattaagatatatgataacttagttcaattatttattctccttttttttaattaacaatttattctataggttgtcggtgcctacatacgatcatctttgattgattattgattttagcatctacaaatatatatagcattaagagtacttaagtatcttcaaattttgaatgagaggtgggatgcgtaaattagttctggtttttgacagaatttttagaatcttaaaaattcattaaatgtccatcatgtattatggagatcttgctcaggtaattttccccacatctatgcatctttgaaaaaaatgtgtggatgttttgttgatttgtcaaatgtgccgtggatgagctgaatctattattcatatcatgattgaatgtctgtttgtttcactttgctggcagcagtttgatgctttgattctagggacactgtatcttgattttttagctaattttctaatgttatgattgttttctcgaaggccaaagcaagacaggtgccaatgatttattgggctttgtggcgtgctcgtaatgtgttaattttgtacggtaacaattctgttactaatgtagttgttttattttctattacatatcttaattaatggaaagatgctagaaaagatgacactaatgtaagagagtacttcttcctctactgttagtagtgagcattagattttacctgttgagaacatgattaagatcaatgtagatgcttctattgttagtgggaatgataattttgggattagttaggtagcacgtgaccatagagaaaatgtcattgaagttgattcaaagttgttgcttctatggcataagctgtggaaatcatagaggttcttagctaaatcagatatcatatttttttctcaaattgttattgaaattgattgtcaagtagttgttcatgcaatcaatcatactctccaaatattttctccatttggactgattatttctcattctaaatgtctattttcttctttaaataatgtctccattatctttgctaaacaacatgtaaacaaggcgactaattattttactaataagaagtttgctcccactaatcttgatggtattttgttagcagaattacactttaaaagttaatggaaatcatattctgggaataaatattaggaaattgcttcatatattgatttttttaacttttttt

SEQ ID NO: 302005 - DNA, 2201 bp, Cannabis indica
gaagcatctgtcatttctgacctttctgaattagttgtcagggtgggactgtccactggtgcatattcttgctgagacttaagaacagataaacctcttgacattaaattatgtgggatggcacctgtgatgtcccccaaaaagtccaactgattctgcttttcctggaaattctgttgttcaagcataaagccatgtgtatttagctcttgattgatggattcacttctataaaagtcaggtctttgagttgattgtccatagttttggtcaaaaggactcaaaggttcactaccatgacctctgaaagaatctgcaagcattaacaccaataaattataggtttagtggaagcaacaaggcatttgaaagcaccacaaacctcagaaaaagaccaactgagattctgttttccagccattacaaaaaatacggcaaaacacttaaccccaccaaccccattttcctttaatttatttataatttacaaaacagcttaaactctcatgcagtttatgaattttttactagaggaaataaaagaaaaccaaaagcaaaacgttggtttaccaaattgttccacagtagaattcttcagattgaagctttgtctctgtttttcaagccattgatcataaataagcactgaatggctgtcatctacagattgggaacgatgctgacccagggaaacgtttcctagctcgtaaaggatgcggatcttgtcttcaatttcgttaccaggcattaaatatgcaatgacaaatttacttgttaattatgttctatatgaaaatagtgatgtccccagaagaaatcatgatggactggaccacttcattgtcccaactcttcttaaacacaaacttgatgcgcttagaaggcaattcgtagttcaagtgtacctcaaactgaaactcactcacaatcggagcattttatttttgcaatcacctgcataaaagtgttataatacaaaaattagattcaaactaatgctgaccgatagacaaacaccaatacaacctatacctgaaataagattcaactaagacagaaacattgtataatcagtcgttgacacaaaaatgaacactccaacaaaataatgaactacaagtagttatatgtgaaaaatacaaggacatgttaatgtgtctaaattaaagtgggtcttaaaattggacaactgcagagaggattccacacaaagtgaaaaacatcccaattttcgaggccgtgaatggaaagtcggcactttggaacatagattgcactgtcaggatgtcaaaatgactctccattaacttcgtgttcgtgaccaaattgacatagcccagaaaatatgttcctcaattttccatttccagatattatatatgcatgaataaggtatattgtaaaaaccaaaggaacaaaatttggaaagcttgagctaatgtgagctcaaggttcagacgaagagtaaaaagaaacagaaaaatttgcactcaaaactataattcagctatagaaaagcacaatttaagcaacaaatcaaaccctaaaacttccaccatacctttgacctcaattcaacaaactaacaaagcaaacactacaatttaacacttacgaagctaatttaaccataattaaagccaaaaatgctcaaccgtttccacttaaattactcattcttacaccacaaggaagctcgagcatgaaaaccagctagcttcaaacaaaaattacagagacccagaagacaaaacaagctgaaggtacagttgggaagctcagtaatatagtgatctgagagaagagtgttagggttattcaagagcgtgtgacttacggcgttgtttccactttccttcacgatcaaactgtctctctctctttcacacacagacacgtacaaatatatatatacaaattcttcaaatcttcaaaacgacgacgcagaatgcttctcacaatacaaagctctgaaactctcactctctctttctctctccgaagagtgatgaaaatcactttatgtaattgtgaacagccgagaaagtttgagagagaaatacaaaactgatttttcagacaagggagccgaagataatgggatcgaaaaccaaacagtgttgtttaaaattaaaagttaaaattaaattaatgaaatttttacaggaaaaatcacatttgcacaatttattacctaaata

SEQ ID NO: 302006 - DNA, 3138 bp, Cannabis indica
aaaggtatccacgaaatagaaggttcagctggacaatatcagggttcacctggaccctagtgtcctacttttcttcaataagagatttttaaggcaaattaagttgtttacattttcacaaaacacctcaacatgtcaacacagaaaaatgatttcttgttttcttaaagtgagctagtgatgcaaattaatttaaattcacaacttagcaaaagtgttgtaagcaaaagaagtggaaactatctttgtatgcttgcctaatgatgcatctctcaagccctttatagaaattagaacccacatgctaagaataattgaccaaaggtggagcacaaattatccagggtaaagttgaaaagctgccaagttgttcatgtgatgtaacatttttttcctcagtggtataatattttattttaagagagtaagaaagagcagagatgcatacacatgctaaaacacctcccattgtatggacaatgtgataaaaatcataaaccagctaataaaggatacaagctttgagagcagccgcagtgtctccaaatcttccagaatattgctctgtttgtttgtgacaagtagcaagtacaaagcttcaataggctggtaaacatagcgaacattttctgtctcaaaatatgtatgttgttttccagtgcctatcaactttgggaaagcagcaagaagaccttctattcttatgcgagacatgtccacatattgcctagagacaagtactgtcaaagcaagaaataaaacagccaattagaactcctaacttaacaacaatttacttatttacagactaaaagaaataaggtactcaaggacagattataaaatgatatgtaaattgtgcttgcccataacatcaaagaaattacttgaaggattttatatgcaagaaagaataaaggagacaatgcaaaaataaataaaacaaatgttgtgacaatgccagtaggtgcaccatattctgaaagctttaatcacattcctatccaaaagaaaatatcacacccatcccaaattgttgctacaaaataactttactatgtgagaaaacaagagtataaagacttaagaacctaccccacagatcaatgaccaacatactttaccagttccagtcaatcaatcttctgatcaggcaatgaaatatagcttaaatacagacaaattctttccacaattgcaatcttttaggtagctaacattaaataataaaaatccaagcagaacttcaacataaattcagttttacatcgaggtggttgtttcattaccatcatcttaagttataacatagcattcctagggtgtttaaacattaacttcttagcaattcaattgtacacaagacagcactatagcaactgaacaagacatgagttctgcaattacaataaaagtattatctcttgtttggccctatgtaataatacatgacattttgaatgagtgctttgttctatattatcaaatagtactgataaataaatgtaagacaattcgcacctttcccagatttggttacaatggaagcagcaagaacaacctacgcagcaagtgaagatgattgataagcattataacataaacatataataccaatatagcatcaaaattctgaaatagcaaaatgcttgggaaaagttataagcatgtggccatctcaattactcaaaattgtgagagtgcgtttacttcattacatgtctctaaacaacaaatggacgacttaccaatggatagctcaatccatataataataatgataaggaaaaacaaaaaaaaaatcaaaacatgactgtgacaaaaggattaatggagagcgcaaattcttaccatcttgttatgtcgagattagaaaccaaacatgaacgaccaaaatgaagaatccagcacctaaaatgcagaaatgcagtgaacataagaaaacaatacaatttccaaaatcaacaaaatatggagtatcatcatgcaactcaatgtcgtcattagactgtaacatacattgttataagcacaccaatgcttgctaatttgactaaaatcgtgatcaaatttaactttcaaccatgtctcactgaaattcgtatatactattaccaccgaccccaagcagtacaacaaaattccgagagaaaaaaacagggctgacaagaatggggatttgaattgaatattttacgaaactagatccaattcactcctacattcaaatattcgaagcagtaattttgctatgatctaagcaaaaaaaaaatgaggtggatcacgttgggaaaaccagagtaataaatcaagaatctcacaaactaaaaaccaaaaacttcctacggaggctcctaaaaaaatattgcaggaattaaaaaagaaaacataataccaatagatctacgaatcaaagagcaacccacttagacatttccatagacataatgaattatatgttttttgaactctaccttctcagtattggtatttcataaaaacatatgtacttaaatacataatattaaaggaaaaaaaacaccacaaaatgttctataattccgatggcgaggggttgcgagaagaatcagtaaattaagaataatatgaatcacagagaaatcaattgaagaaaaataagtaagagaagtaggaaatcaaggaccatatccatcaaaattgaagcaatataagaatcagatctacaacatttcccacccaagaggaatagatctctatgagactgatatcaaaatcaaaatcgaaatcaaaccttgagttgaaagaaaggagcaaagatccagagattagaaatcacttacagagaagctgtattagagcagaacgatctgaagctcggagatccaaaccaaatttgggactactctctccagcgctactctactaatcttctcagagccaaatcattattttgggcttcagtgggccaggattaggcccataaaatgtccaattaagtttaaggtttttatttgggaaacttacaaaaatactggaatttgagttaatttttacaaaaatactgttacacgaaaaaattttcaaaaatactgtgttttataaaacaccagtaaaacacaaaacagaacaactcaaaacaacagtagaataactaaa

SEQ ID NO: 302007 - DNA, 1272 bp, Cannabis indica
ttttttccattcttaactattaagaaatctctaaccctagggaattcggtcaacatgaataccaccaaaatacctggtaattctaaaactaccttagctgaacaatctcactaatatgactaactaaaagtgttgtgatatattaggcctccgatctggtctctaaggaagccaaaaaaaaaatattattccacaaataacatacatcatacccacatagtccaataaaatctctgtaattaataaattacgcttatttatccacttatggcaaaatttcttaattcacgctgaattagattagtaggatcataatcctactcatcataccctaattaacttttgattataataagtccttattattcataattaggtttttgggatattacaactatcatctccttatcgaaattctgtcctcaaaatttacctgaacaactcaaaacactgcttctgcatctgccactctaactcctaagttgcttctttgaccttgatgtttctccacaatactctaactagtggaattgtcttgttccggagtactttctcttctcagtccaaaacctagacatgttattcctcatatgataagtctatctaaagctcaatatcaccataactcaaaatatgtgtaggatatgacacgtacttcctaagcatagagatattaaataggttatgcactctaaataacgtaggaggtaaggctagccaataacctacctagcctacccattccagtatctcaaaatgaccaattaatctagggcttagttcccctttcatcttgaatctacatatccctttcatatgcaatactcagaaatattgaatatcctagggctccacatttagacccgcgaacccaaaaaacacgaccacccgccccgacccgttgccaaaaaaattgatccccttaaaacccgtgtaattgggtcaggttcaacccaaaaaagactccaaacgggtttcaggttcgggttttgttaattggttttttttttttttgggttataacccgtaacccgatactgtaatctctttaatatttatctctactttttttttatatatatgatacatatacttaattattaatttaatattatttcaaaaagtaagcctataatattaatgcctaacctattacctattcgtattctttccaagaggcttccatgaccaatcagtgaatagtaataatatttaatattactttttgaagttgacgtgagtaaatagtaatactatgttgggttttatgcc

SEQ ID NO: 302008 - DNA, 2358 bp, Cannabis indica
acatcaaagcagtataagatttattttctttcgttctatgttcagttgtcaaaattagcaacacttagatgttatgtttcttgatgctacaacttttgttgataagtaaaattgagcatgaaaaaatgattttttggtttctgaggctattctgtgagagttctgatttatttatttaaaacaggcgagacttgtttatttactttcttcttagaaagagaaatataacgccaatatcagcccagatatttaaaaggcatgttgtcgatgttctgtgttgctgtatctttactagactgtgactatgtgcttgcagtatattgtactgataaaagtatttactgatgtctgatgattaaattaataatacttatttattgcagatggtaagaatgttggatatactggctgaatatatgtcacatagagggtttcaatttcaaaggctagatggaagcactaaggctgaactgcgtcagcaagcgatggatcattttaatgcacctggtagtgatgatttctgctttctactttcaacccgggcaggtggcctaggtatcaaccttgcaacagcagatacggttatcatatttgattcggactggaatcctcaaaatgacctacaggttttgcttgaaatgaaatctccatctaaatttttaatttctttgctattttatgttctttgttatggtgtttttcattgcagaataaaatcagagaaaatggttttacttaattattttgctcattttcaggcaatgagtagagctcatagaatcggccaacaagaagttgtgaacatctacagatttgtcacaagcaaaagtgttgaggaagatatcttggaacgagctaagaaaaaaatggttgatggcattctcttcaaaatcatgacaaatcatgtgctttatatgtatttgcatttgtttgaggccatatagagtctaagggattttgttttctctcaaaagtttcacttacatctctgcatgtattattaggttcttgaccacctggtgatccagaaattaaatgcagaaggcagattggaaaagaaagaagcaaagaaggggagttattttgacaaggtatgggtcctgtgggagtgtgtaaattgctgtttattttcctaaattgattgggggtagctcaaatggagcatggggtttgctgccagagtttgcgtctctcttgggtaccacaattgctatagttttctggtccccagctattgttgggttaggcagggaagatagttttacaaaaaatgtaatgtagagtctctatactattcttctctccatgtcttctgaaaatttcattttctataaccattgtagaatgagctttcagctattttgagatttggggcagaggaactttttaaagaagagaagaatgaagaagaaagtaagaaaaggctcttgagtatggatattgatgagattcttgaaagagcagagaaggtggaagagaaggaagctgaaggagaacagggcaatgaattattgagtgcttttaaggcaagatgattctatgctaattcgtcatcatttttctcctaacttcctcattgttattttccatgtgttctttttcttggttacgtagttgatgatctaatacttttacgtagttgcttctgcttatattttgcaccgacttacagatttttgtgttccatatggaagtttttcatttcttgattatataatttttcaggttgccaattttggcaccactgaagatgatggaagtttctggagtcggtggataaagcctgatgctgtagcccaagcagaagtatgaatctctttgctttcttatattgtttaatcattgtagtttgtttggaggtttaagttgcttacttttagattttatttgtttgtttatttttatttcttatgaagttgttttgttgtgaatgattttactaattaatcaattatcaaaatttaggaagctattgttccacgtgctgcaagaaacactaagagttatgcagaagctcctcaacctgagcgaagtagtaaacgaaagaagaaagaatccgagccactggagagatcccagaaacggcgcaaagcagactattcagctcctgcagcgcctatgattgagggagcatctgctcaatcaaaaagatggtcctgtgggaatctgtcgaagagggatgcattacgtttttcacgtgcggtaatgctctgttgaattttgtagtattgtcattttcaaacttcgataagaatgatggcttttctgaatctgctaattgtgatgacttgtcctggaattttttctcataaacaaaatgttgtccgttagtgccatttggttctctctctctctctc

SEQ ID NO: 302009 - DNA, 2948 bp, Cannabis indica
atttaagttggtttaaaattaaataaataattaattttgaactcaaaattaattttatatatatacttgattaaatttgaaattcaatgtatgtaaaatatattttgaaattactcattaaaataaaataaaataaatttcaaaaaaatattctaatttatattgatctaaaattaattaaataattttcaacataaatataatttttctatttaattaaatctcttaacaaaaatatctaatatttaagtatcttgaacaaatcaacttaaatattaattttcaatttaatcaatacatttagaaaaattttaaaagtctacttaaaaaataactattgttaacgcagatttttgttaacaattttgagcctatttttgtaataaagttaacataggaattaaaagaaatttaagaaaactaatagaaataaaaatcacacgaggcttttatgtggtttgtagttaactctgcatagtccatgagactatcttatttagatatttctaggtacaaaattagggtttttagagtcagttaactccttttttctttaagatttttctctccctttttttcgtataatatgcccctatttatagtaatataggttcgcagttaattacatttgaattcgaatcccataacaatattcctcgaagttgtgggctttaaatacgctccattttagtacgtgtaaatatcattagaaaatcacccagctatgatttaaaccatctttaaggcagtcaatgctgacatggataggaactccctttcagaggtatcatgttggaagtatgttgccttgtatatagatgacttgattcattcatataccttccagcaatggcatgagcaccagcgtactgagcaaacttaagaactactttttgactataaggccttgtaaactggacaatcatgtccttcaagttattacactttattattattactacgctaagtgttctaataaccaatttacctggttaattcctctttacctacaccaaggtagatgcctcgctatgcgttatttatagctccttcggtattatgccttccaagacaagatgatttctcatcaatacatgaattgatagtttgtatatccttctcttgcttaatactatacattcaacgagttacaaatatactctattaattatgcatttaatgagttattccattttggatttaatgatataattaccattatatttgttgatacatattctgtgaaattgacacgtgtgacctttttaattatagccgaattttgggtataacaatttccccttaaaatgtccttttcaatgaaaagtgctttttaaataattaccgtgggtatttccgtcataatccaatttgaaaatatacatgcttttgaatttgtcgattttatggttttgaggcacatcatttgcattacttaacaatcttttccacttctttcccatttctactcgttggatcttctaccccttaatcctacggtaattgagttcaaagtataaaacgacaaaggagctatttttccaccatttttcccttttcaaaaagttcaatcttttctaagaaatttccatcctgattttctgaaactttgcatgccctcattgtcgttgacatactttctacaaatttcctcaaattcaatctccaatctcaggcgtccccagatttcattctgtcgttcgtctcgaacccaaatacagagttctcccctacacaggcgtagttctttaacaagtaagtatctattctcttccttattggtatatttttagtcgtaactaattgcacaattgtttctcttttgctgggttctggtaaaaaatttatttttttggttaactttttgggtttagaaggagttaaaacttagctttaccatatttataagtttctcgctttaacaaatttcctccaagaattgggattgctctttctataaaaatattccaattttattttgaaatttgttctccagaattcttagaaatagagtgtcctaagaaattggcccttccattcaaaactaaaacacggaaacctcaatctttacttgaaggaaatgatgcaaagattagggaccatataataaaaaccaaccaagacgaagttgctagtccccataggaaatttttgcaagagatatccgagggtaaacattgttttttagcgagacgcagcctagcctgaacctccctttttatcttcaattcctctcccgaaaccaatatttttacgcaaagtcactgttgttttttccccaagtcaccttgaatttgatatcatatcttctaagcctcgtaaatcaaagacctttaacgatcctaatgtcacattcgaggttgaactcatcgaatccaagattaggtctatgtaggcttatgtcgggggcatacttaagtccttccatatcaagcagagaaagggctgtatggtaaggtccgttgctctttgggaattcaattttttcctcctcaaagggtaatttgtgacgagtgcagtggacctaacactagcaattcctcgggcattgttgcttggaggctcaaacaaatcaaggctagggcagtccttccactaagggattacatcaaggaattctgcaaccatctcgaagtttccccctttctgttgaaccccatttcgtataggattctcgcaagtttgaaggtcatatacaacattttaggatgggagtgccccactcctttgcagatagtatatttttactcaattaaggagcttcttacaaggaagcgggctgcaagaggcttttactacctcgacacccacacgaatgattgtaggatcatcgtaaggttgccaaagaagacttcttctagatgacgggcctctctccaataaatacaaccgtcgttcgcatcattcgtaagtaccacttctttttaaatcttaactttgaattgtct

SEQ ID NO: 302010 - DNA, 4372 bp, Cannabis indica
tttttgattttttttagacaattttttgtatgtgcagttatttgagtttctgctgaccattgtgggtagcaaaaaatttgtaaaggtagggcaatatgaatggtatttcttcttacttctttcttgatccactagtttttcactgtattaaaatttcgcccttgtaggttgttatgaaccacattaaagaattggtgtactatactattgcttttctgcaaatgacagaacaacaggtagttttgtcgtttgtttttcttatggatcgttgtatcttacatgtaaatatatgaagtggctatctcatctgcagttgattagatttagattttggattccgattaaacttcaattccatttgtttcccctaccaactaatagagtcccattaccttagtcttggtaaaaacatttaatacctagttttaaacttactacttcacattgttttaagctttagaagtctaggatattatctttgtttcaattcttgttgaattcttgttgcacttttgttttgtcccatttggccattttccatggtgggattcttttatgtccatccatcttttttgtagctttatcttttatctttatttttttccatcttaaattttggttgtatttgaaagaaacaagaatgcttatttatatcctatttatgtttaccaattgtgactattttcatttagttgtaatgatttccatttatgcaacaaacacactgggattgcatgattgtatatgcatcagtatatgtttcagtttatcttttattatctggcacatgagttttatggtaaatacctgcagtttcacagtgaaatagaatagacatctgtactaatgatagttttttgtttacctttcaccaattaattaatttgaatgtgcctatgctgtttcggggaagttctgtaaaatttagggactgaactcatggccaagccttctttggacccaaaccagtgagacgctcaccagagcaatagaaggaggcaacagtcccaagccgtttttctttttataacattcgcctccctttttgcattccatggactaggttcttaacaaggagtagggaataacactaggcaaaacaaaatagtttttgcaagcctataataagacaatataagctaattgaacataaaactgagtagttcttaatcttgatgtaaaagaaataacaatgacaagttcaattcaaccactgtgtcagtttttatgtcattctagctcttgtcattttcttgtggtttgtttcttaattttcactgttctctaggtccacacatggttaatggatgccaatcagtttgttgctgatgaggatgaggccacttacagctctcgtgtttctggtgagtctatcaattccctcgggcacccgaaccatatttttctcattttctatgattagtgcatatgttcatttgtcactactgcaacttctttaaactactttttaagaaaagaaagcaaattaaagagctgaaatgtccatatatgtcacttagccatttttatgacttcgttccaaaggaattttacaaaaaattgtcttttcagttgtattttgttgatctacaccatatcattgtgccggaactttttgggtctgttctaacttcctgtcacgcaatctcatctagatcatgaactttgggactttaatgaagattttgattacttatattcgaggatttatctacagttaagctccattctcactgaaaaattatattgaaaggtgcacttttacttgaagaagtggcaaatgtagctggaatggaaggggttaatgccatcatagaagctgctaaagaacgatttagtgattctcaaaaggaaaaagcagcaggttctgcagtctggtggagagtaagtggagaatattatatttatttggtgtaggcatcattgaaggcttgttccacccaccatgttacattgcattttttggcagctaaaggaggctactttatttgcattggcgtctgtgtcagaacaattgcttgaagcagaggttttatgactttcatctttctaatttggtttcctatttttattttagctttatttttgtgaggtgtttctttaaataaattgagatgaatcttatgatgtttgctatatttcctagctctctccaattgatcatttaataaatttacccttatatatataacaggattcagcactagtgagagttggtttgagggatcttctggaacaaataattgttgaagattctgaatctggtgggtaattgcctctatctcatgtccaaaaaatatgaaaacaattagaagaggaaggaaaaaccaaaattcggtgttctatttaaatttgttcagcagtgaacttcttgctgctgttgtgcaggagtacacgaacatccctttctatatgctcgaattttcacatccattgctaagttctcctctttggtaagtgatgtcctagcttctcatcccttttaatttcatttcctattaagtgtcttaggtgtattttcctgcttccagatcagccgtgaagttcttgagcattttattcatgctgctacaaaagcaattggcatggacgtgtaagttcctctttattttgacattccaataaatccttctggcccctctctcttacacagaagtttggtgaagttaaactgtcattgacattttgttttcaggcctcctcctgtgaaagtaggtgcgtgcagggcactgtctcagctcttacctgaagcaaacaaaggaatcattcaatcccaaatgatgaatttattttcatctcttattaatcttcttaatcaggtaatttaaagctaatgaatttgtagttttaattgcatttgctgggttaaattcctaatgttttgctgcacaggcatcagatgaaaccttggacttggtacttgaaacactgcaagcagtcattaagtcaggtaatgttaatcttttacacacgtaaatacatgcttccttgcaataagtgcacacaccgtctttatctgctcatcaaaataaaaacttaccagtcttcttcgagaacaaaatgaaacctcacaagtttgctatagattgtcacttagatttaagatggtccagattcttttgatttttcgtagtaacatcttctatggtctgtattgtgctaatttgcaggtcatgaattatcagcttcagtagagcctctaatctctcctgtgatccttaatatgtgggtatcacatgtttcagatccctttatcagtattggggcaattgaggttctggaggtaataatgtgtttcttggttgccattttaatattgctatattgttttttttaatgctttgtttgtttcagtacatggattgatgttttaattttataaagtcattgtttttctttttgttttcttccccttctactacattgcgaggcctgcggaaagcacttaaatattattacaattttggatatttatatagacagggtttattttaactagaataattgaaaagttagtttactagtctattatttgctgaatattgacaaggtaacacattcaagaaaaaacttgtataaacaatttttttttctctttccaaaacataaagggtattagttttattaatatcggttacccttaaggattacaggcaatgtttttgaacatcaatttttgttttgggtttaaaagacaacaacgaaaaagaggataaacatccttaattttgttcataggggacttaaatgttaaatctatgccttctacaaatcaattactttcttttgtttaatatatatgctctgatgaactgtccaatatatattgaaaaaagatttatagtaatatatctctcgggccttgatgtctaagcaacggtaagggttaaagtttagctttgttgttggcatgaaaatgaccattgttctaaatagccgcacacgatacaacaattatgagttttcaagttcatgtcgagaagaatgactgtcaaatttaactgaatgtcatattgcttgaaacctcaagcttcattagtcatttttcatatacattttgacagtctattgctttaacatacttgattttgatagtaggatttaatctgtacatattttggccaacactaaagtaaccttgttcctatttttatttatttatatatctggtgattttaggagtatatctttttacaacataatgacttattattattattgatattgcatattggtttacgtatgttctttttttttcttgtgttagaatattagctgtatattaggtgtaaaagaattagggtaacgttgtatttagtagtttcctatttgttggtagttcctattcctagtctcctagctttgtatataa

SEQ ID NO: 302011 - DNA, 2323 bp, Cannabis indica
cctcttgagaacatcaacaagtcatcaataaaacataaatgatttaacttcaaattcttacacctatgatgatgcttagactcactcctcttcgaaactttggttaacagatgagaaaggtactctattcccagtacgaataacaaatgaggcatgagatccctgcctaagacctttttttgaactaaagtagagattttaatgagtcaataactataagagagaatttttgggtagtgaaacattccataaccaattcgatgaacaaattaggataatgcaaggttgtcaacatttctcttatgaatcctcattaataagtatcataagacttcttcatatccatcttaatcatgcaagaatgactatcatttttcctcccatagtgtttcaaaagatcctgaaaaattagaatattattgccaatatacttcccataaacaaatccaccttgattagccacaatgagacttggtgacacctgcctcagccaagaacaaagaaatttcataattattttatagaacacattgtaacatagtgtgcctaaaatcacaaacaatgtttgggtattttacctttagaataagggtaagattagtagcatttatctccttaagaatcttccttcaattcaaagttgaaagcacaattgtagtaaaatcagttcttgtataggtccatgtcttcttcaaaaaaccacaactaaacccatctgcgcctaaagatttattatctggaatggagaataaagcatttttaacatcctcctcaatatcggaaagcattagcatcatatcttggtcctcattcatctcttgttcttcctgaaaaatttcacaactccctacttttttgatgctcacaatatgttcactgctttcccaacacttatattatatattttagtttgtaattatatatattttctttcatggatatatatattgatttattatatatgaaatgtatatttgcatgtacatctactaataagtaatatacaaatatatatataaacataggttattggattgagtgtgacgggtgcgcttaatgtgatcttaccacatgagcaccgacaggaggcatgtcgctacctctacaatcatcaggtaataataaatacccatggtttgtctattactttatattaaattagtatattatgttagagcatataagcaaataatatattatgatatacataaaaaaaaagacatatagtccgtattacaatatttataaactatgtttgaattgtggtaacatcaaaattggagtcagacccaggcccgagctaggtttagagcccgaggtcaggatcagggcaggggtcaaggctggagtctaggatccggggttgaggtcgaagtcaaggctggatctaggtctgtggcttgaggttgaggttgagggtggggttcaaatacaaccatggagctagagttttgggtcggggtccaaggcttgagatcaaggtccagatcgaggtcgaggttagggacaaggccgaggtttggggcccggccccaagtggagattgaggtcatgaggcatgaggctggagtgggggctaaggacgagtctaggtttagggcttggaacgcgaggccagggtccatgtctgagttggatttggggccaacgccgaagtttaaggtccagtcatcatgtccttgggataatatgtttatgataagtattaggagtcaaagtcgaggggttgggtcggggttagtatcgctatcacatgtgatataattaataatatatattttattattttttaagaaaaaaattaatacaatactatactattgtgcaccaaatataatataacacatacactattaatataaatcaataccataatgatatgtattataatattatacaatacaattcaacacaatataataaatcaccaaataacaaaagccctcatcttattattattattattaatatgtacatatataaaataatttaagtacagaacgaagatggaggatggggactacacatagaagggaaaagcaccatgttctgcactggcctatgctacgtagcactgcggttgctgggagaacacatggacctccacccgatccataaagccagatcatggatcctcacccgtggtggccttacctatattccttcttgggggaaaatgtggctcgcggtaggtacaatatatcaagtattaaacttttatgatcgatgagtgcataagactacaaaataaaactgaatgaagaagattgaataatgtaatatagatatgattgatgatcaggtacttggggtatatgaatgg

SEQ ID NO: 302012 - DNA, 4096 bp, Cannabis indica
caaaaaaatgttacttttgctagctacatatcatttaagattgtaactcctacgagaagctttgtagtgcatgactgattggtcaaataattatgtagatgtggaattcattctgataatataagtgtcgttgatactaaatgaacaagtatactgatgatgtattctttctttaaccactttacacaaactgatatgaaatatatgttatacacataaatgttgatgtcataatcataaataagtgaaatgtatcttaatgtttggctaacaaattcaagtgctattaggataattatgttcggtgttggatttggagcaatgatgttctatctgaagtaccacttccttccaacactcctcgcttgagaagcccatcagaagtatgctaccatccttacgttcccctttttccttcttttctgtgaaactctttatttggtttacaagtgtgaaaatgcagttgcagctttcacatacatatgcgtcatgctttggtgttgcagtctctccctcaaatctagtgattgctatggtatgacataaaccttgtgccctttacttgtgttataactaagtaggatggtaatgctgttatgtttcactttttttttttttgagtaatgctgttatgtttcagttaattattggaatggagtataatgacatctacagtgccactacttattataataatttccagcagtttacattttttttttctcaaatgttaagttgtagacagaaaagaacactaaaatgtttattcttaaaccttgtagattcgcaatttcgatgaagatttattggatccaatgtaccagaaaaggtaaaaaaaaacactttgaaggcataataatgctatctatatctgtaaattttgttggtgtagaaatataggaacttaaacttaagaatcagcttgagaaataatggaaatcatttaattcagtaaaaactgaaacaaagatataaagggtcaagctttctggtttgtttcggaaattaagtgtcaaggaagatagggaatgttgattagctaatatttacctaagtaaaaaatgaaataataaattgcagggagtgagagaatgcaatttcgacttaaagctgctattcagcaaaagccttgatcatgactgcaagaggacaaagagtcagcttgctatggaaatgatcaggaaagataacaaactaaaactaaaataacaacattcatactggaaaataaagctgcaggtttccttttatctgccttagctaatttcttgaaaaaacatgccaggactcaaaaggctgctgttgagttcttctggattggtgcacaagaagtatctgttttgtcaaataactcctcaaccttcgctcttcctggtattcccgtaaaggaattgagttcttgggaggtcaatattctgtggtctttgaaacagtatgaatgtccaagcaaacctatcattgtttgggatatagtagcagggttactggcttttaagcgctttgcagcaaagtatgtagaacatatactgatcaagtggctctcaatttcttatatcggatctaataagtaccattctactgaaaagattttgttgcatatcccgaggatcttttcaaagctttcttctcgccagctacacctgctgaatattatttgtagaagggttatgctatcagagctgaaagctgaccaaattaatagcaaattagagaaccttaaagaactagattgctcagatgagaaactgattatttggattaagctgcttttgagcagcgaaagagaactccgtgagagacttataggtttgaacttttctacttgtgttagtctgctctctaatccatcaacctcactttcatctcctggaaatcggtttcctgttgggttagcacaaatgcagcaatgggttgcgcttaatcgcgattatgtacatgatccgttaatagtcctagcatcagaggttcaaaagcatgaaaagaggtacttattattttctttaaactgcttgattttactatgtctaaatttctcactgccttaaaaatgtgtgatacatttataggcttcaatcaagcaaaattgcaacgggggagcagtgttgctattgttcagctccagttccatttaaatctccagaattcgcacattgcgaaagtatcggtcagggacacaaactagctcgttgttctgtttctatggaggtttgtcttacaatcccaacatggttttgcatatgttgtcacagaagaacttccacactaccacccgaaactcttttcacattgcccggatacccttcattcgatttaaagtcttcaacggcctcaaacaatgcatctccaaagccattgtgtccattttgtggaatactactacaaagacaactgccagattttctgctatctgcatctcctgtgtaagttatcatgttccctaactttgtttcaagtgggctccaacccatgctttgggttagaaaagaaataatatatagtaataccaaattaattccctttatgcaagaaaagataaaataataaaatagggtgaaaaaatgagagaacaacaaataatgattaatgagttcacaaatcagcaccaaaaaaaaaggatatgacttgtggacaattgtagtaggtaagatctatatgatctatctgtctttattatattttatttatttattaaattaattatttaaggtcctaattatgtcacgtgttgtatatgcttaataaccaggctgtgtaacatatgccctttcattattgtaatctctgtattaattacaaaaataataaacaattgatcatattttaattgatgacaaagatatataatatagataatatcaaacaactcttaataattgtgaaaacctatattagaaaacatttgttttttcataaagtctcctattaataatactctatagatttaaatataaatgctttctttaatactatagctactaatactgaaaatgctccatgatttggttttagatttagatttagatttgttttagtttactcttcttcttcttctttgtttgtttattaagtcattgcttcaaactttgacttaaaattgtattaaaaaaaattaacattgaagatattctatttctatatttctatttcgattgtttttcattttctttcgtttaagtcgttgaaaatgatggaagctctcactcttggaattttggttattatgagctaagaatttccgttgtgatttgtgatatttttagctttatataggaagtaacttgcttgccgtgagggttgggcagttttgaccacgcttttatatctttatttttctctttctttttcacttatttacattgatatgtacattgatatgaattcaattgtacaaatgatttcaaaagaaaaataaaaatcaattggaatttggacacatatttaggggtggcaatcggtgggttcgatacgaacacgagttgatattttatgagttcaggacaacatgaaaattattcaggtcgtgtttgtgtttataaattattcgtgtcatggattgtgtttgtgttagacatctaaaataaatttaagagctccacacaaatataatttgatgacactaaaaataacaatttagcttacaatttgccaacacgacatatgattttgtagtttcgacatgacacaaaattcatttgaattgtgttcgtgtttgtgttttataaattttttgtgtcacaaattatgttcgggttagtaattttttagtaaatttaaaatctcaacacgaattgttattactaataatatgcaatgtataaataacatttagggtagacatgttatttaagtatccaaaatttaaaacggaaaaaaaataaagagaatttgttttttttatttgaagctatgtttatgtaatataattattaaatatatgatattgattcaatttttatttgtcaattgttccaaaaaaaagtaatttttaatttaggtatttttatcgttcatttagtatctcttgtattttaaaagggaaatttgattttttatgcttacatattcttgaaattttttccttaaacttataatattt

SEQ ID NO: 302013 - DNA, 2082 bp, Cannabis indica
agatcctggtaaaataaattccaacatggatgggttttcgctctttcattcactttaatcaagccctccttgcaagataagcttggcgtcttgtggaaaaacccaattctctacttggaaagctgctgaaatgcagatatttctcgcacaactctttccttgaagctaatgtcggtcattccccttccttgacttggcaaggtattcattgcgggagagaactttcaattgaaggattgagatggaagatagatgggggaagatcagttagatgtgggatatcacttggctgccttaattgaagaaaccactcacagttcaagctccacatcagcagcctcttggtgtaaattattctggtcactccaactccaccaaaagttaagatctttgcgtggcgagttgtccatgattctttaccagttgccactgcccttgttcgaaggaaattgatcacgaattaaacatgttccatctgcagacatgcttgggaaacattggccacacccttttcgaatgcaaatatgctaagagagtttggagatcattgaatatccaatttgattggcaagctagttcctctatgaggaaaggtgactacttaatttttctttcaaccgttcactctacaatagaaatggaacaaatctttttcacattgtggtctatttggacggaaagaaataaggtagttcatggacaacatgccaaaccagctgaagttactgcctcttttggagtgaatatgctgcaaaattttcgtgctgcaaaccccaaacactagtagcctattctagttgtcaaaaatagtcattttgctgctgctgctcttcaaaatccacctacctctgctgcacatatccatcgctggcaacctcctgctgctggtcgcttcaaattgaatgtcgattcagctgttcaagcctccaccaacactactggtatagccacgcttattcggaatgaatatggtgaagtagtggctgcactttcgatgccgatgaggggtgatttattatcccatgaaatggaagcaaaggcactatttttttggcctaaacatggctcttcagcaacaactgccaattcattatgtggaaactgatgcactcttagtatcaaatgcattacaagctcccttcaattcaatttcatctttttctgatttaattgtagatgttgttagtgttttgtcctttttttcctaatattgtggtttctcatgtcaaacgtgatgccaacatggctgctcacgggttggctaaacatgaaataggggtggatgagacttgtttatggttggagaatatccctccacctatttactctattattgtaaatgaatctctttgttaagtttataataacaagtatttttccctcaaaaaaattacagtttttgttttgaagggtgaaaattgaatgtcagtttgtatgtaaataatatgtaattatatagttttggagtgccaattgactactcgaagattaatgttagttatcacaacaagaatgtaacaaaattatttcaaaaatcattgtaagttgtcactataagaatgcagtaaaattatttgcggtaaaatatactcaccgcaaaaagtatttttatttgcatgggtggacatcaaatagtaagaatttggaaagactatatattattatcgctctttgcgctggtgtacttatgttcatcaatttataatcttttttcaagttatttcacagtagagcggctattattattattttgtggaagttgcgaatatagtaaaatggttgttgttgttatttcgtaaaaaataaggttagtttatatattgactattaaattttgagagattttttataaatcatattttatttttagactatatcatatattatgagaccttaaatttttatgtagaaatttaaactatagacattaatgtatatactctttaaaaagtgagagaaaccgagagagaaagagagattgtatttctcagattaattaattaatgattacagagtaaagtgcttttatagcattggtttacaagaatcaagttggtcaagactaactaaccaattagttag

SEQ ID NO: 302014 - DNA, 1068 bp, Cannabis indica
aaagccattgattaagaaccgtacgtgccaaaattacaacatccgtgacttcaacatgtttttgattccacaccagatcattcctactctccaaagtgcccaacacaacataaccacaagctgtctactcattccactccacctgtcaaagatcgaacttagccagttcgagaaagtccccaccacgtctgttgaaacacctggttctaaagttgcccatcatacttgagagaacgaacaggtgactaaaatgtggctgatggtttcactctccaggttgcagaaagggcacaaagcattaacaaccacatgcgttgtttgaagttgcacttttggggatacaatcggttgaggcatgccataggaaattcttgaattttgggggaacttttaagtgccaaaactttttccaaaaacccgagttatcggatgtagcaaactgttgcttgccttcttgaatgagagcataagcacttttcacaatataatttcccaaattctcttttctccaataccaagtatctgcctctgcaacttgaatggggatactaacaattaagttaatatctctctcttcaaagatgtcatacaatatatccatatctcattgatcatgctccatagacatcagttgggaaacctttttatcaacaagagagacactaactgtgtgcacataagggtctgaaccgtctgaaaaccaaggattattcagaatactaacattggcacctgatcccacacgaattgcagctccttttttaagcagcgattgtgctttcatgatacttctccacgcaaaatttggactcccacccatctcagctgaaaggaaaaaaccatcgggataatacttagctttatatatacggaaattactaatgagtgtggctgtagcattaacctccatccttgtttgcctacagttacaaaaaattaactacagttaaatatacagtaatacaaaaaattaactacagttacattttgttttccaaaaatatgggattgggcttcgactcttctcttttcacgacaactacaatttaatattattaatattttttt

SEQ ID NO: 302015 - DNA, 2169 bp, Cannabis indica
gtccattttatgccaaatgaatgtcaaattttatgttttgtcgttagtgagaaattgggtttatagtatacaaaagaaagagctcggcctaccgtagaataaccctatatatatactagatagatgttacgtgtcaagtcacgtatgttaattttattttagtttttaatttttttaatatcataattttaaaattaataatattcaatgtagtgataatcattgaaatttgaaagcataatagtgatttaaataaaaacaaaaattactattatactttgtaatagtaattaaaaaaattattattcgtcctaaatttatcttcgaaattaatgaaaatactcatctggttaaactatcaaaacattcaaatttaatttaaaataatatttaaaatttaactaattctaaatatcaaaatttgaaaataatattatactacattcaaatttaatttaaaataatatttaaaatttaactaattctaaatatcaaaatttgaaaataatattatactttgtcctctttctctatttttgtattttctaattatctatctttttttacaataagtgtaaaaataacaaaaaaaatatatatacattatttttagttattacattaattaatcttgattataataataacaatttcataaaaaaatatatatagggttgaatatgtacaattctatatattaaatataacataactttattatgaaattgttattattataaaataatgtaattgatcgatatatgtgatcagaatatttatacgtatttctcaattttggtaatgattatcacgtaaataaagtttgaggaaatcaaacatataaattttggctaagacatgaatttatgagactaggtttaatttacaatatatatacattttaaaataattgaaaaaaatatatgttgcattagaaaaaggattgcaatcttctttaaatataattttttatttttattgtatttttactgatattaggaattttgtggctaattttctaaaagtgaagatcttttgtgtattttagatctgcaaatattaatactcataaattagcaaaatatatttttttggttgacataaattgtgtatttagttagatgatactccctctcccttgtttactattgtataataattacttctttcgtttttacataatatataatctcaccatatgtagtacctaattaaccacataataattaaattataatttactagaaataataaaaaaattatataatataatttaaataattaattaaaatttatatatatgtggggttgtgaaggaaggaataggggcctataaagaggggcatgggaagtgctccaaaaagctgaaatttttagtgactttttctttttcttaattgaattaattaatttaatttttcatttatttatttttaagactaataatattaatttatataagggccccaaaaacccttctttttcacaaaaacacacccaacatgaccaaacgtgccttaataaaatcatttattctctctctttgctcaattatgagttttaattattacttatatatatacatcacctttatatttttcatgttcgaaactcatgataagaaaagactttttaaataataatatatatgtatatatatatatatgatcgtaatcttcctggtaaagtagtagctagtatatatagtacttgtactacaacacttcaaattttttttatgtataattgtattagtatcactaaatccatgactgtaaagtaaagtagatcatatacaattgtatttataatataaataatttttatatatatatatatcttttaatctgtaacctacccatctctccaatatatattttttagatattatgtatcttatatgcatgaatttgctctctctatataaatgaaaaagtatatgcacttttttaaaatacacaataattccaactaattacactgtaaacattaacagaaagattcaaaatttacattaactaataatattaatacatatatatcaatatacattcattcatatattaaataattatttttgtaagcagtacatgaattcaattcaataatcttgtgcttttaaatgtttcccataatcataccaagatcattttcaagttagttttaaaa

SEQ ID NO: 302016 - DNA, 4042 bp, Cannabis indica
atttttaacgaccttcaaaattcaaaggacatgatttgatacatgtcaaaattcaggggtaaaaatcttaattaattaactttctttaaatgctcatttaagaacaattgtaattcaattataggttattatagcattattctactctattattttttgtgaccattaattaatatatattatattttacaattatgcctagatataggatataattattattatggggcctgcatgaaaatgacaacaaatactaatgcattactcctttctttccaaatataaatatataatatgtatatatttatacataaacattttagatttaaactatttttgcacatgtacatatttacagtgcatggattatcagtgcttgtgttcattattaattaaaattatacatttatggtttatggaaaacaagatggattcctatatttaaatataaaacatatacttttttttcctaagtgacaaaaaattcatgtaataaacaccttttatttaattaggtgatttttatttaatcaataattgtttggattcttgttagcaataatgtcattattccaagcataaagacaagttgacattaatataaataaattgacatgagatagatttttttttatatatatttttacaaatatttcattcacatgaatttgcaggcttttaatgattattattattaattgaatagcaaaactaattattatttcatttgctcactttgtaagtttcattcataaatagctccgaggagtgttgttagtaaggatatgattcatcattataatttggatatggaaaatgcaattattatatgaagaagaaacaaatcattattttctgcctaactaattaaattatttagattataaccaatttgatatttgccataattttgggcctttttctcctagttaaggttttgatttgttcatctaaataatgaatattctttaagaaaaaacaaactaatattataaaaattggaaaagacggaaaagaactaaaatttatttatattcgtttacaatttgagaaatgctatatgatactagccaaggtatcatatcgctattagtacaatatcatatgaatgatgctaggcacaagaccgagctaggctcgcacctaaagcccaccaaactcagaccccaaaaaataattttctaagagattaatatttttgaaaatagcacatatttttcaataaagggactaatatttttttttttaagttccacccaatttcaggaccgactttaattacactactaagtactaatagcaatgcccttacaattttccaccttttccacctaactttttttttttttttcttaaattttgagtaatattaattccgggaaaaaactaataaaaataagtaaacccggattattaatatattatatttacaggagctgaaaataaaattaaaaataatataaacagtggttgatgagtttttttttttttgtttgagtaatctctaattatgatttatgactaatataaccttaattagttaccggtgaccgactgttccggttgacaaaccaaatcttcaagtttaggtctcagcttatttttccaaatttttaagccaagtattccaacttctctttccctcaacttaaactcaaccaaaaccagttcttccgttaaccggtgtacctccaatctcgctacgaaattaccattatacccttctaatttagcccaccaatcatcatcattattattcctcttcacactcaaatttgcccctctagccacctcttccactctctccaccactctccggggagtctccgccgacacgaaacgctcctcgctttccgatacatcgtcggaatcactgaacaaaccggagagattgaaaccggaggaaagtgatattatatcaaaagcattaaagctcttaatattattgatgttattctctccggttcccataaaataatcttttgctgataagtcctccatgtgaaattttctttctctatagccctttttgaaccaagggtccttgattatttcatctacggttattctcgtcttcgggtttatatcaagtaaccgagaaataaaccgttttaaatcgggtggggtccacttcgggtaccgaaattctcccttgtaaattttccggtacatcaccattaagttaggatcgttaaacggcaaataacccgaggtgagaacgaataggattatgccacatgtccaaacgtccaccttggcaccatcgtaacctttctttgagagaatctctggtgccacgtaagcaggtgtaccgcaaagcgtgtggagcaacccatcggattggatcgaatccgaaaccgcacttaacccgaaatccgagactttaagttcccaattctcgtcgaggaggagattctcgggtttcagatcgcggtggaatacgccacgcgagtggcagtaaccgacggctgagatcaattgttggaaatacctacggctgagatcttcgctgaatcttcctttcgctaccttcgtgaaaagctctcctcctttagcgaactccataacgaaatagatcttcgtcttcgaagccataacttctagaagcttcacgatgttagggtggtgaagctggcgcatgatagagatttctctcttaacgtgcgccgtgcagctcgctttctcaaccttcgtcttgctcaccgatttgatcgccacgctctgtcccgtatgaatatttctcgcatggtaaaccttcgcgaaggctccaacgccgagaagctttccgagctcgtatttcccgaacaacaccttttccgatgatgaaacatcgccgttgccggtaatatcaaatccacttaattccggcataataataataataataataaattcttctcaaagcatatggaaaatctcggattcaaataatctgaaattcgaatatggattggaagaaggagcagtcaatccaattaatccaaatttcttttctttttctcttttttggggaaatgttggaactctgctactctacgccaaacccataaagcttgtatttaaaggagagtggggaatttggttttaacgccgttaaataagcttaacggcgttacacgtaatcgtttttgatttatacttaaaaaaataccgttatgacggtggtaatgtaagccacgtgtttaggtgtacattgaaaacaagatacggttattattaatattcgtatttaatttaagctatctttttgggagaaggaaaatataatacagttgagtttataaatatatgtattttgactgtatttatttttttgtttaattacgaaaatagcccttgagtttttttttataagtttacgtaggttgaaatagtggacaaagtttgaaggaaaattcaacgtgatttcccgccatattttctagaagattttaattaattacatattaaatcattagtttagtagttaaataaacttagataagctaaaaataataaaccatcccccaaaatagggagaccaaccatatgtatgagaattatgatgaatgatggatttataaaatagaggcaaataataatttagaaatttctaccattcatctcaaaatgcctcactcattttccatatggagcttgtagttaaaacactaattaaacataatttaatattaacacatgatatctattttaagcttatttggcaattgaatgccattttttttattgtaaagatgatatttttatattattatcattaatgttataattccattaattactatatataaaaaacataaaatacaacaaatataagttactaaggacttagtacgcgggtcgtattgtattaaataataaataatattgtttttaaataatttaatgtattatattaattattagggaaatttgcagcaaaagtctccaaaaagttcacgttgatgctgattagtccccaaggtccaaaaatagcggcaatagtcctcaaggtcacactttttatttgtccgttggtctccaagttaacagatctgttaaa

SEQ ID NO: 302017 - DNA, 1136 bp, Cannabis indica
tttctttttttttttcaaattgaattgtaatgagaagaccctttaaaaaaggcttgttcaatccaaacatgatgatgttttacttgccatgttataagaaactagaacagtcaattacttttcttattgtctttgtcatttggtaccaagttcatgtcttgcatttggctttcaatcgaaaccaaaccagtctccgcaagaaacctgcagacaaaaaatgaaaactatttttcagagatactcaaatcataaactgaaaccagcttctatcaacttacgagaaaagtataattctatagctctaaggcattaaaagacactattcataaatccataaacactaacccaaatcagcactcaaggactcaagtgcattattcaataaacccgtaaaactttaaatgataatgctatgagcatttcattaagcataatctttcaccattcaatttcacccaacaaatttaaaataagccttaactagcacaatttcttgtcaaaaataggaaaagaaaatatatttgaagagataaacaataagcaaaacccacaaaataaaatcacaaaattcaaacaatagccagagctaattatcaaagcataaacgtagaaacttaccagctgagaagagcgaagagagtggcagtgataataacaagtaaggcgacatgaagcgccatgaaagaatcactagaggtgattgccaaaaccatcatcacaataagagagagacccaacatcacaaatgctgattttagggcattccatgtaggagcctgaaaattgcaggtgaaacccaatcagtcaaaaatagatgttaggaaaactttgtgagaaagaagaactttacggacgttaacaccaggggctaaagctccaagtaagacagctgtagccggtgatactttttcttctccgcctgattgcgaatcggccattttcggtagcttctattcgatctcagcaaccggagcttcttcactcaaaccaataacaagaattttccaaagagatatttacagaaattaattaaattgggctgccatttatttgggcccagcccaacatctattctagaagggaaacttacaaaaatactgttttttccccaagttttacaataatactgccacacg

SEQ ID NO: 302018 - DNA, 2053 bp, Cannabis indica
acgttactgtgtccagtgcaacttgccacaccttttggacctttaccttgacaagcacatgctggttctagatactggttcactttctttgctactggatgctgctgtaagttcttaaatcttgttcttcaagttttttttttcttcttatctgctctctcttgcttatgcttctatgttgattttatatggtaagggtatatttgattacgttttgtttgcagttacatcctagtgatgaatgatagtgtaatcaatctctttaactcttccccaaaatatgacaccaaccttcttgtccaaagtacttttcacaccaaaatagaaaatgtgctgtgttagtttatgcccagacaagtgtatgctggagctgcctttaaaatttgcttaattatattagttaataggaatttgggaggcacattgagtttgattttagcttatacaaggtgttttaacatggtcttccaagcccaaggcctgtttgctgctgtatacaagttgctggtatatatgactttttttttccttcttgtatatgtttttacacagggagattgtgaatgggcaaaatggttgatgttgtctagagtcaggggtgtgagtatgatgcatcattttctaatgctcgttcagtaatgtcacgtggcttagttccttctactgatcttcttgaggtggaggaagtaatttgtactgtagatgatattgccgaaggagggggagaactggcagctttggcaacacttatgtatgcccctgtccctattcagaattgtttgagtagtggtggagtaaaaaggcatagtaactcctcattccagtgcacattagagaacctaaagcccaccttgcaaaatttccccacattgtggcgtgcacttgtgtcagcatgttatggacaagattcaacttctagttttgtgggttctagaggaaagaatggttagcttttttgtcctagctttttaatttttatgagtgtgtcttagtcttattagggttttcagtttgctttttcttaaattcttttactgttgcttaatatgtacaacacgatgattcagctttatcagactacttaagttggcgcgacagcgtattcttctcttctgcaaaagacacttcacttctccaaatgctcccttgctggcttcctaaggccgtgcgaagattagttcagctttatgttcaggttttctgttgtggctctttttcttcttgctacatggaattatgatatttatgtgtgtgcacatgcattttacatacgcaattatatatatataaaaaaaaattgtaacttgtgtttgtcatatgcacgctaagtgagtcgtttatgaaaaacatactttaaagtagtagaataatcgttcatgttttatttgtgttgattgccatagtaaatttgtctgcttggatatagggtccgctcggatggcaatcaatgtctggcttaccacttggagaaactttgcggcacagggagattgatttttttgtaaatattgatgagaatgctgagatcaatccaatctcatgggaagcaactatccaaaagcatgttgaacaggaactctgtgatcctacccttgaggtcggattatatttcatttttaacgaaaatatatgacctatatatttcttattgttcaccaagttttttttttttttttttttttctcaagtttcaattttaatgcttaaaacttatgcacttatagttaacattttatagtttcatgaacaaccttagtgagctaacttctgttgatttcggtgctacttcacttactgtgtgcttttaaacggagtttcctgcttgattaatattttgcctgtttgttgatggtaaaagattttgctacttcatgatgaactggtgggatatgggtgcatggataattaaacaacataagcatataggcagctttctgttatgccttgatataagtatcaatgatataattgataagtattttagaggctgagttatcaagtccttagtggctgagatgattatttaagtgtgtctaatactatattgctattg

SEQ ID NO: 302019 - DNA, 6197 bp, Cannabis indica
tgatatgctctcttctctctcctctttttgagatttgtgcccatgcatacgaggggtgtccatggtccttctggccatggaagtcaccagaccctactgttttgggaagaacatggccatcacccactggttttggctggaaaaatctttctgctccttctatggatcagaacatccaaaaatattggagttttagaactaaatacaaagtgtttatgctcactttgtctaacgatggggggtctgttcgcatttgcgaaagaacaaggctgtttggatatgaagttgctgtaactatcgatgctgtcgtctggatcttagatactttggaggagctttttcagaaaacagggacacatagaattagtctcaaacgctctttcaggaatagtactatcagttgtttcatggaatgttttgcaaacattaaaggatccttcttgaaaatttcagtattaaggaacaacaagttaaagatgataattgttccagaagaagaaaacgagaaaggatggtcagaattaagagaatgcctcaacgggattgtgaaaagaaagaggacgagattgtttgatccaagctgccaaacgaaagaacttcagaagactggggggtccacgaaccttcgttcatgggcaaatgttgtgaagcagggggcaagaccagtgaggaacgatcaacacaacaaggtgaaagctcaaggaccagcagctactcgtgacagaggcaaaattgaatggaaagacctttacccagaagttaatctcggattcaaaccaaaaaatctctatccagtgaagagattcactcagcctcaattctacgaatatatgagatccaaggctttgcctagagattggaacttggcaattattcttactaggaataatactcatgcggattggtgtactatattctacaatctatctagagagttagggaggaagctgatggttagccaactttttgatgatagatgcatcatttggtgcaaggatgagaaggacagagaggaacttattatgattaatagtatgaatgtccctggggctcagtccttagtcactttttcagcgtggactttggaaaaccaaaaggattatgttaaggtagaatgtagagggtcctggataggggttcaaggtctgcctttgaacctatggaacatgaaaaccttcaagaaaataggggaaagatgcggtggtctactggacgtggataaggtcactgctgaagctagcttgttgtctcatatgagattacagttgatgggcgacgaattcggtttcattcctgaaaccataaccttgagccacggtaacctaaggtttgaactaaaattttttaagcttaatgacctaagctataggttccatggcagctttaacacttgttggtatcaagattttgaccacgggaaggtgttcggcgaaggggaaacgaatgaagaactagaaaaagaagatgcaggaaaacacggggctgaggaagtatactcaagggagtcgagcacgatgggagagtctttatcggcaccggagaagatggaggttgcaggaaaacagcagccggttatggaagttgtacagtctaagactcttctccccaaaaaatctttattgtcctttgatgagggtgcggcggccgagattgagtgtagtcatatcagcagcaattctcgagaaggtatggctccatattcaggcgtacgtgagatgggaaaggtggtgagcctccatactgtgtttaaccgcctattgagaagcttgagggtgccacgtgtgtgcagaaatcctaatttaaatgtgttggtctcttccaatgacagctgtcaattaggtaaaaagtgcttatttaaaatgggcatgggtgagttgggccgattttttagggccccaattaaggtgggctggcacaattctgggcccgttaagctctctcctacttatgatggagtatcgggctgggaggttaaccctgggggtgggccgattaatcacaagcaatggagggtctcagcatattttcaaaaaggcctttttaacatttccttggaccagaattttggtctccaagattttttaattaaaagggctaggaattctgtgataaccgacttctttgggcttagcagagagctgaatgttgtggtcaagaagttgagcccagatcaattattacaaattttttccatggaagtcttcgatcgatcaacccgaaaggccgagagaatttcaagaaggcgatcattcatttgtgggaagactttgccctgcataaaagaaaagcaacagaatcagtactccattacaagggggagatggaaccaaaggagggaaggagacctgaggttaagcgagtttactgtagaaaaagaaaatcaatcagccgtgattgtgtgtcccaattctatgaagaaaactcagcttttgattttgaggaggctgacgtggatccaaaggggtttgagttccttgaattgagctcggatgatgaggactctgagggggaagcagaagttgtaacgcaagaagaatgggaagaaaccgatgatattatatgtaatattcatgagctgtggagagtggagaatgaagaatctccaagacagggactaggggagatgatgttggatggtgttagtgatgttaagaacgatgaactagagatggtgaaattggatgaagcaaatgagaacttgaacgatgcattctcttggtcaaatattgttgaatccgtggctgagatgggcttggaaattacactagaaaatgaagaaggtgatgagaagatagaagaggtcaagaaggcaaggaagaagttcagagaattaaacaaactgactttcaatgtaaattatgagaaaagttataataaaccaggggcaccaaacggttcattatgaagatcctaacgtggaacattagaggcagcggggacaaaggaaaaagagcagctatcaaagctaccatttgtaaagctaatccagatatggtaatattacaagaagtgaaaagagctacggtggatagaaggttcattggaagcatatggagatccagattcaaagcatggattcttcttccagctatagggagatcaggggggacgttactaatttgggatactaggatcatctcggtactagactctttggttggtgaattctcaatctcagttctgattaatgccgaaggtaaagagccttggtggttttcgggagtgtacggaccatgctcgtataaaatcagacatgtgttctgggatgaattagcggggttaagctcaatatgtggagagtcgtggtgtgtggggggagacttcaatgtgactagaagagtgggggaaaagttgaacagcagctcaagtacaaggagtatgaagctttttgatggtttgattcgggaattacagctgatcgaccccaaacttgagaacggaagctttacttggtcgaacttcagagcaatccctatatgcagcagattggatagatttcttttctcaaacaactggaacgtcgtctttccatttgtgagacaagaaatgttggtaaggctagtttcggaccatagccctgttgtgatcgactcaaagcctccaaagtggggacctggccccttcaggtttgataatcattggctagaacataagtcgttttccaagtgtttcgaaagttggtggcaggaggaaattattgacgggtggccaggcacaaagttcatgaagaaactgaaaacacttcaagggaaggcgaaggagtggagtagatttacctatggacaaaataaagccacaaaaaatgcgttggaaggaagattgggggtgttagacagacaagaaggaactccatcttggaatcaatctctgtatgatgaaagaaggaaattaaaagaggaatggcagcggctgacttttgaagaagaaagaagtatttggctgaaatctaaatgcaaatgggcaaaagaaggagatgccaactcaagattctttcataacttattaaatgcaaggaaggccaggaacaccatatctaggattgaaagagataatggagatattatagatagcgagaaggaaattgttgaggagctaatagcctttttctcaaaactctacacttcggagacgagaatggggactggggttgaaggtattgagtggcaacatatcgcggaaccctcagccaggcaactagaatgcccttttgaagaagacgaggtcagaaacattgtctttagttgtgaaggaagcaaagctccggggccggacggctttagcctggcggtcttccaaaataattgggaggttatcaagaacgaacttatggaagtgtttcgggcttttcatagtgagggaagaattgaaggaagtatcaatgacacttttatctgcctgatccctaaaagattaaacagttgcaaagtcaaagacttcagaccaattagcctcatcacaagtgtgtataaaatcattgccaagactcttgccactagactccgcggtgtcttaggagaaactatttctgaaacccaatcggctttcgtggaagggagacagatattggattcggtattattggcaaatgaagcagttgaggactacagaagtcgtggtaaaaaaggattcgtgctcaagatcgactttgagaaagcttatgaccgtgttgattgggggttcttagatttggttttgaggaaaaaagggtttggggaacggtggagaaaatggattcggggatgtgtttcatcaacttcattttctatattcgttaatggtagggtcagaggcaagttccatggttctagggggctacgacaaggagatcccctatcaccgtttctttttacattggtagctgatgttcttgggagaatggtggacaaggcagtagaaacagaagctttttcggggttccagataggtaaagataatattcggctcagtcacttacagtttgcggatgatactcttttctttgttaaagatgaggactctctccaaaagctggttaagattgttgaagcattctgcggtatttcgggactaaaagccaacttgaataaaagtcaactgttaggaatctgtctgagtgacgaagcagtggcccaaggcgcgaacctaattgggtgtgaggtgggtaagtggcctatgacttatttgggaatgccccttggaggctctccaaggaagaagactttttgggagccggtcttggataagtgtgctaaaagaatggacgggtggaagtgttctttcctttctagagggggtaggttgactctcattcagtctgtcctatcctcacttccaatctactatctgtctttattcaaagccccaaagatggtcttaaaggaacttgaaaaaatgatgagagacttcttttgggaaggaggagatttagcaggtggggatgtggcttgggatgaggtgtgtaaacctagagctgaggggggcttagcgatcggaagactagagatgaggaataaaggattgcttatgaaatggctatggagattccccttagaatcaaactccctgtggcacaaagttattaaaagtcgctatggcaaagcagacaatttctgggatactaaacagggggttagaatgtccccaagaggaccttggatggatattgcagacctttaccatgaatacggtaagatggtaaagtttaaagtaggaaatggggcaagtattcggttctgggaagacgagtggattgggggaccttcactaagggatcagtttccaactttagctgtgttatcaagggctaagaatgcgagtattcaggagatgattggcgatgcgggagaagtcggagattgtgtggcgagctgggattttaaattcagaaggaacattatggacagagagattccgagcttgacacaactgatacaaaagttggaacatgttagagtactaagcattcttgacgacagtcgtatatggttaccagattcttgtgggattttctcttctaaatcagcgttcagttggtttaccgcaaccaaggactcgaatgagatgtcctggactaagatcctttggaaaaatagaggcccttccaaagtcaaagtttttggctggttggtggctctagacaaactgaatctacacgctagattgcaaaaaaaacgtccattcctgtgcatatcacctgggtggtgtgtttgttgtaagat

SEQ ID NO: 302020 - DNA, 2253 bp, Cannabis indica
cataattagctcattccgagtttaaataaatttccataaatacgttaatcatggttaataacttaatttcataattaaactctaattatctaataatccattatattaaaatttagtggtctttacaccgagtatcgctaagtgttgtaccacatgcactacatacctactgctgcttattggaccaagtgtagtaacatccagttgcccttacatcttccagatgacaatgttgaacacagtgtgtaaaatctgtgtcaacatggtacttcactctatgacccactctttcttcttttgctaaaataacattaaaatctcccatgagaagccattttccattagtcactagattgcacaagtcatcccatagactttccttccttcactttcatttaccacatatacaatagtaagaaaaaatcaaatctccgatctgttgcagcaattttcaagtgcattagctgactggtgcacttgagaatatctacaacaaatttaatagggtcccatgctatcacaatcttgcctccttgatgccatgctatatttgacgaaaaacaccatccattaaacacattaaggtacaaggttccaagtttttgaaccttgacccttgtttcgagaagcccaacaaaattagcattttggcccctaataaattactttattagttgttgtttttgctggctgttggctcccccaacattccaaacaatgagcttatccatgaccaagagagggtccccccctctcttgtattaccagtatcagaacaagcattatgcacatttgcatcctgtaaatctgctgctgtttccatgtcagcacaatcagataagacctggaatccattaataatcttggtacccaaaggctgcccctgctctctaatcttttttaccattagtaactgcctaaaaaccttctacatcaacaacaacagtaggtttttgttgccttttgtcctccttgataatccactcttgcttagatttagtggacttcctgcaatctgctgttgcatgccccatgcccaagcaattggaacatattattggcttccattcatagtttatacgcacatgattgttcattccaaattcatcttcaaattccagcatatcgggaagagcttgattcatctgcacttcaattgaaactcttggatagttcagcctctccctttctttcgccacactatccaccatgattggcttccatacctgtccaacaatcttaaagagggacttttggccccaatacttgagctcaagctcctcaagctgcacccaaataggaacctattttacatcctctcttctgaaattcgtgttagggtcctagggtttaattattacaggccttttattaagaaagatatatctcccattcaatacttcatccctattttccaatgagtgaaatctaatgagaaatataccatatgtgagcaatttgaccttatctaccttatccttccaaattctattagcaaagccttccaaaatatgcagagggggattcgaacccaatacataacaaacaatagaaggattccaataggtaatctcctcttcaatgtcttccaattcaatcttaactttcgtaggcttctcagatttcttaaacgattgatctaagttcctaacaacagaatcagatctgagaatagggggaatcgagtgcttaccttgattcaggttactgttacattagtgattagcttgaacaaagtgcaggaaattagatcttgcatcctcagcacgttctatctctctcaaggatgcccacgatgatagaggagcttggaaaagatcctaaagctcaggagaattccgatctctaatcgcagcaggttcctcatcatcttcagataactccagaggagtaatccctacaacaacatccatcggttgtgtgcatataacataagatacagagttaggccccttcttcttctgttttgaaattgaattcttcgactttccttggtatttcgacttagttttggccatggcgccaacttcagctgctagagagaaaaaccagagaaaattgtttttttttttaaattgaaataaatttgaatttattgtcaaaagccccctgtcagatcttattacaaagacaatacaacatactacacttgatctggacatcaagatattgagattaactgaaatgcacttttagttttatattagtgcaagtgagagtttattgggttttgtgccctaaataaaattcatt

SEQ ID NO: 302021 - DNA, 2782 bp, Cannabis indica
tgtgtgtgtgagagagaagaagagtgaattgtgaaaagagaagtgtgagagagcgaagaaaaaaagcaaagagtgtattgagatttggatggagaaattaagataatgagtgtatgtaatttaaagttataagtgtaatatatctgtggacttggtagttttacccgaccgaataaatttctttagatagttgtttctttaaaagaagctttagatagatatttaacaatagcttgaataaggtaagactttgagagttgatttatgaatcagttgaatagaaatttcaaaatagataggtgtcacaaatgatgaattgatttcttacatgttatttcttgttcaagtcctaatgtgtttgctaaacaaaaattgtgatgtgtaatcatatacagaagaaatggttaaaaaagtttggttgcacactcttaaaaatgataaaaagaaaagaaattgtttgacctgccaagtcattttcacccaaaaaaccaggacacaagtagcccaacttgttgggtcatgcaaactgagagagattctcatgaaaaaaagtgcaaaaaacacaaaagagaaacactatgtatttgttggtgtgtcatgcatagagagagagagagagataaaggtacatgctctcagtttgttaggtcacactctatacaggtgagagagatcattggctgactgaaagcctccaaattgcaaaatcacataatctaatagaaatgccatgacaaacctgcctgtatgattaagcttaaccacacctcaatgaaggaaataaatttgaaagcagtctattgattttcatgcaatttactcatctcccatagtttctctctgaaagtctactaagtaggaatggatgaaaaagaagatgtaacggtgaagaagatcgatcaagatgtcacaatttttcgcctgacacctataagaatagcagtatccctcctctctgttttcctgctcttctgcatcattcgtttaggtttccaagttgcaacaggggtggaaccagaaagtagtcgaaagaactggggttttcgtattggtgtagtgactttaatcgttggtgtcctgtttgtcgctcttggccttcccatactgataaatctgtttctcaaaatgtctgaacagttgcagaggcatgaagtatcaggcatctatacaggtattagaaataaagcacattgtttcactatagtttgagcagtacattcagaaatttttatcctagtacctgatgcctttagaattgaactatcgggtttcgatggaaaggatatctagttcttctggcagccattttctcaagtagttttgtacaatttattgtttttaattctaaatcaattaaatctaattccacaatcagaaacctatagaagaaaggttggttggtgggaaactaaaaaattgtcagttgtaactgtttcaaagctaagaattgggagggtccaaaactagtggtggtgtaccttaatctatcattgttgcataagatcagttaagcaataattgaccaaatacacagatgatatacattgaatcttatagctatgatttgaccaaatatgtagaatcttatgctataaaaaaacccttttaactatatgttcatgcaccagcaatttcctctcttcaataaatatataacactatttttctgttacttcaaaatgagatttttttcaataaatatcaccagtctcacttagcttatgtaataatgaagcagatggagaagagatgaagccactacgtacaatcattattcgaatcttggtgaccttgatgacaatgttcatgctcgcatgggcctcttacactggttataggcttacaacagagccaaggagagatgacaagtactatcccctaatatttccaattggcatagtaactattgtgtttggtgcagtctacattatcattggtctagccataattgcagatttatcactatctctaacagtgaagttaatgctgagacgcaagaaaggatccatagttcatgaagacaacacgacagagacaaaaatttccgtttgaaaactattatgacccgttacataggtgtccgtagttatgtttttcctgattagtatgagatcttaactctatctaaggctgttctaagcaaaaaagaaaataataaaccatttgtaccacttattctaagatttcttcatccctttgtcagacatctaagactcatacttctattaacgaattgttctcctttgaggaacaaatacttataagcataatatgaatcagaaatcacaaacatcctgcagaattggtataaaattaataaaaagccggacaaagacagttatgaactagggtcactaactaaaggggctaaacactaccataattaattaaattatgcacacaataaatgataagagtttgcaaacctataaggatttgttcttctacactttaagcctgaaattgtactttgtacttatgaaacaatatcatggtaatatacagggctctaatgagcaaaagcaatgaaagctctcctattcttcatctactcagctcatcaacattccccctattattacactaagttgtacaaatttcttatatgtatctaacatataatttgaagaagaagaagatcataacactatgtactcattcaaattacaatgcagcaatgataacaatattttcttcttcattttctctttcaatactcaaaaatgaagctcacaatgtcaattcaaaattgtgaatgccaacatgggattttcaccaataa

SEQ ID NO: 302022 - DNA, 7871 bp, Cannabis indica
ttttttttattattaatctaatttttttagcttttacatatattttattagtttttgaaaatctcagtaaacatttaccgtttagttaactattatatgaagatcttttctaatgaaaaatatttttcaaagagtttgtatatcattaaaaaagatttttatgagtaaattaaaaattatgtaaataattatacttttaaatatattttgttttatacaatttgttaccaaagtactaattaaaatatcaaatattattttcacaaatattttatattatctgctagagtttctcattccgaaattgttaactgcgagaagttgtcttttttctccgactctcccttagcttaggcatgtcttggttgggatatgtgattttgctacttgtgtctgtaacattattttgagtatcttttgtttaggttattacaaaaattacatatgcagtttggtttgaaaaaaaaattacaactcgcactacccacaccgggaacacccctagaaccgctgcaacaatttttacaattatgtcttttggatgatgaaaacaattgaatatagatatttttaaaataaactatgatactgcaatttttttaagctaattttattttagtttattttgtcaaacgatccgagaatcatgagactgattagttgtcttgtttttttattctaattctagtgatgtttccaagagacgtctcgattgggttacaacttacaatatattattttaactaattactagattacttttttttttaaaaaaaaaatatcaaatattgtttaatataacaaaattgatttttttttaacaaaattgattttttttttaattttttaaataaaaaaaagtaactaaaaaccttatcacattgactgtgcctcacaaacgagtcagctgcatttcctttcaaattcaaaccaattccacgaacacagtcaccggaaacctctcccctgctcacgccgtcgccgggagaaatttgatcgacccctttcttcctcaacaccggccaggtgagtttcctagtttgaattttctgtttgttcttcattttcattatatacacaataaactaaacttgtttgtgctgtattgaattgaatgttgcatgagcctttattatatgaagagttgtaaggtatttatcatatttgtttgtatgcttcctaccatttactgcattttcctctgataaatgttcatattacttgtgtgtttgtgtatgaaaagtttgattattaactgtaaaacaaaatttcacaatcattcttttcttttattgaacttctcatattactacttctgaaactctgtgaccgtatagaaattatcaatatagagtgctaagaggaacttagggaaaccattagagtagctgagagctattatagattgtcattacaaatgtgtctctttctaggtcacaacaaggaaagaaatttccttagagaaaagttttaaagtgagcttttgttttgggtcaatcatgatgaatggaaccaccatatcaagtggtgtttctgtggattctcttcttcttgcttgaaggaattcagttaattgtctctttagtcttcacaatctcaagtttcaaagctttaccttttttgagacttccaagatgcaagtgcaaactagtgctggtgcccattttcgaagaaccaatgtcctttgaccagtctagaatccatgtaaaagatgaaggttctttctttaaacttgggttattttgtgatttgatttggatttaatttgaataggaaaatacatgaagaaaaaacagcactccttgtctcactattagttgtttgtggtttttgttattttttggagctttctcttgtgcttggctccctttgtttgcttgcgttttattgttttgaaactcgcaaattattactaattgaaatgctttcaaagtgtttgttgaaatttgtgataggatacttagactcataaaaacttctttgactgaaccataaaaacttgttgttccaaaagctaagttaaagcagttaaagtttcagacaccgaaatgcaattccaagagtcaaatttcaaaagccttacaacattatgatgataatattactacatttacgctgaaaataagttctcttaatttgaaacaaccaaatatttttctaatgatcctatataaattaattatggataaaaaacaaaattttaatttgctagaactataattgtcaatcttttacattttttgtgattatgtattgagattattatatattctggatttttgtttgtatttataggcttagataatggctggtagggtactattgacaatgtctgctaataagagattttgatcattttatggggggaatactgataaggaatacacttactatatgacattgacaaatggaatttttaaaatgtagttagaaactttctgtgttgaatattggaatttgatgctaatgattagtaaggttaatgttataattttagttaaatgtttgttccttaattgttgtaaaaacgtttttcatacagttttatattattcatataaaaatgatattttcaagtaatggttgaatggatttctattaggaggagcagaatggtaagcctcggagtctttggcatgaccaaccctattagtggtgcatcttcgtctccatctctagcttccccattgcaccgcctcaattcctgctcttccatgtctgagctcaagcagtttcactctcaaatcattcgttgtggcctctctacagacaactacacaatgggtcgccttatcaagttttgtgcactgtctgattctggcgatatcacttacgccatccacctgtacaacactcttcctcatccagatgccttcatttacaataccataatcagaggctacttccagtctgagtcacctataaattcttttcttttctactcccagatgttgcacgactctgtcatccccaataggtatacttcccttctcttgttagagcttgtggcctcaataatcggtgttcgagaaggcaaacaagttcatgcccatgttgcaaatttggatttcagttgatggattttgtcagaacagtctaattcatatgtatctcaattttcaatctccagaggaagcaaggagggtcttcgatagcatgccattgcgggatgtggtatcttggaccatgttgattgctggctactctcagtgtggatttgttgatgaggcatttcaactcttcgagttgatgcctgagaggaatgctgtttcttggaatgccatgattgcatcttatgttcagaataaccgtttccacgaagcctttgctttgtttcgtaggatgcaggaagaaaaggtgaccttagataaatatttggctgctagtgtgttaaaagcctgcacaggaataggtgctctccatcaagggaagtggatacatgactatatcgagaaaagctgcattgaattagactccaaacttgttacaacaatcattgacatgtattgtaaatgtggttgtttggacaaggcttttcaagtttttaacaagtggcccgataaaggaatttcctcgtggaactgcatgattggagggcttgctattcatggaaaaggagaggctgccattgaactctttgaagagatgcagaggaggatggtagcacctgaccatatcacttttgtcaaccttcttagtgcttgtgctcattcggggctagtggagaagggtcgtcattactttcaatgcatgactcgggtttatggtattgagcccagaagggagcattttggctgcatggtggatctgcttggaagagctgggatgcttgacgaagcaagagagcttatacacgagatgcctataagcccagatgctggtgtgttgggtgctcttcttggggcatgtaaaatccatggaaacatcaaattgggtgaggaaatttgggaagaagtaataagactggaccctgaaaacagcggacgctatgtgctattagctaatctatatgccagagctggtagatcagaagatgtagccaaagtaaggaagttgatgaatgacaggggagtgaagaaagttgctggattttccatgattgaattggagggtgatgttcatgagttcattgcaggagaaagaactcatcccgagtctaaagccatatatggtaaagttaatgagatgttggaagccataagatgtgtcggctatgttcccgagtctgatggaggactattgcatgatgttgaagaggaggaaatggagaatccagtctatcatcacagtgagaagcttgcaattgcctttgggttactgaagactaaaccaggggagacaattcggatctcaaagaacttgcgagtgtgcaaagactgtcacaatgcaagtaaactgatctcaaaagtttttaatcgcgagataattgtaagggatagaaatcgatttcaccattttaaaaatgggttgtgttcttgtaaagattactggtagaagaggtgactatctttttcgaaattagtaactggttaccaagcaagcactatgaagctggaaaaagttgctgcaaaatgttttaattacactcttgtctatacttttttcttaagcatatttacttgtaaattgtaaaacaaatagaatagattctctttggttgtaaacttttttttttcttgtgaatattatatgaggtattcaattattggtaatttctcagagtttctttcacaagtaataagatacaagattccatatcaactagtagtgctactcttcttttgttttttcttcaatcatattgcctccaattaggggtgttcataaaatagtcgattcaattcaatctgcacgatccaatccaattcaatctgcaaaatgcagatatccacacttgtgcggattagatattgattgatatgtaaaagtaaccgatccaatccaatccacgcatctttataaaaaaattaaaaaatatacatataagtaatattttaatgtaaagaaaataataatttaaaaatctaatacaattatatttcaaaacttaatagatcaaatgtacattctattctaaacttaaatcgcaattcaaatttacatagcaacccacatagaaactaccaaaacaatcactgaagcatcttaaaccataaaaataaaaataaagttaaaaaaatagtgtacaaaaaaacgacatgtcgtagtattttcaaaaaagaaaaaaacaaacaaacgacatgtcgtaatattttcagtagcaaattagcaatttggtcattcgcctaaaccttggcttttcacacagaaaatccctcccgacctgtgaaaaaccccaaaaccctagtttcagtaacttaagaagcaacaatggcggcaaatgataattccaagaggaagaagcccaacatactcatcaccggaacacccggcacgggaaagacaacgacctcctctgctctagcagacgccacacagtttcgccacatcaacatcggagatctcgtcaaagaaaagaatctccacgacggttgggatgacgacctcgattgttacgtcatcaatgaagacttggtacgcctccaaaaacctaatccttttccatttaattttgaatcgaaagctcatttaatctgttcaagtataaaaaattcaggtgtgtgatgaattagaggatttgatggaaggaggaggtaacatcgtggattaccatggctgcgatttcttccctgaacgatggttcgatcttgtgattgtgcttcaaactgaaaactctgtattgtacgatcgcttgcataacaggtaaatcaatttggggataaagaatagattttgaaattaggttttgatacccaattcttgatatttggtttttctttgataggggttattcagagactaagcttaagaataatattgagtgtgagattttccaagtgttgcttgaggaagcaaaggaaagttactcagagaacatagtaatggcgttgaagagtgataccattgatgatatttcaagaaatgtggcaactttgactgattggattagagcttggtaaccctcccaccttctaattctatatattacaatcaaatattataaaaccctaattttcatttgggtttttgagtgtgtgattgattgtatgaaattattgatctctgttttggaggcttttctatcagtagttactgctcttattttggcttcagagttcagatagatatatttttggtgtgaaatgaaaatgtttataatatatttatgtgatgatgttcatagaagtaggggcaattcattcattatatggattttgttagaactttgaacctttcattttatgaccaaagctctactgtaatggcttttttggaattggattcagttgtcttaatctctcttctatgatctctaatcaatcaatataacttttgtatggattagtatatttaagtttcaggctattattaagtaattttaaggctattatacacaaggaccccactgattttctaatcgattagattatacttttgaatcccaatttaaatgaaacctgtaaattaatactggattaattaataacttcgataaattatccagtctgattaatttatagaggtttcactgttatgtgtgtatcttcgagaaaatcaaagagggacatggaccattttattaaagttgactaaccatgtgatgattctactaaataaatattcatgtgaatgttattttttgaaaaatacatcaataaaggaggtttatggaatattgtaggtgcattttatttaaatataatttttgattttgtattttaaacattttcataatgatttttgcaacaaaaacaattattgttagaaatatgtatggataatgtttttaggaaatttagtgataaactattttttgttgaaagaagtatgacaagtgacaactctacacaaattctcttttcacttgcaagaacaagtcaacaccatctttctcatttcacattgcaagaacatattttcgctacaacactaaattctgcagattctataatgaacacgatcacaactgtaaatcccaagtgaacgcccaagaagataggtgcctgaggtcaacactgaactgaacaatggcggctgctgctcgccgtacaatttcgataattgctcggttgacagtaaatgcttttttaactctttatccttgtgcataaaatgagtttgatcctcacttttttgaaaataaaatactgccctaaagcctatgtcattctaatttatgcttatccaagtttattgctatgctttattattgaatgggacgtgggaactagagaaaataacaattgagtaagtagacacacaaggccgccacagccaagttgagaagtagctattgtgtttaagaatcttatctattctcttacatcaaacaaaaataatattcccttgtattgtaattaagcttcccattcaattttaaacactaaaatgacttaatcatgtgttacttggaaataacatagatatttatatattgggtaatcatcacttaatacaattgttagctctaattttcaaattgttgaggccaagttggctatttagtgagaagttttaaatagatgtatatatttttcaaataaaccggccataagtcaattttgttttgagtcaataatgatgaatagcaccacatatcaagtggtagtgttactttttgtgggtatccttattgttagacccaatttaattgaatgtctcttttgtcttaaccattcattccccatacaaattggtataactctcctacattttatatttttcatatatatactcataagaatattagcttctcaagtatccaaagcttc

SEQ ID NO: 302023 - DNA, 3740 bp, Cannabis indica
atttaaaacttaataatccaacacagataataaaataatatataaaatattaaataaaataattaaatatataaaattataaatattaaatatgattggatggacattggatgatattggattggatcggttcagttatccattggatcggatgtctcatctaacttccgatccgatccaattggatttttaaaatttgcatctgatccgatccaattatgattggatatccgattctattagatcggttgggattggatcggacgattgggattggattggatgattttctacaacccctacctaatgtattgtttggcaaaataattaataattatataagaaaataataattttaaatacttaatatttgaaataaaaagctttgagtaattacacctaattctcatgggggaaatgtaatggagacctctcaattatctgtaattacgcagttacaacgtaattatatggtcagacaaatacggaaaactgtgtatctgattgggtttttataccctaaataaaagtcaatttcaatgcgattatcaataaagttttgaaattatattttgacatagtctatgctttgttcacatgtttatttcatgattatatgtctaatatataaaatctattaaatcccaaacatatagttatttacgattatagtgttgtcactacaatggaaaataatcgtaattatatgcttcaaactatttagtctcatgatttatcaatgcactggatttacattgacgtgataatttgcgatatggtttacttacacttggctaagtggaatgtctttttcaagatattagtaaagtaaactttttttagatgtatatggttacatcggattggattaatattgatagtggaaaagatatcataaacttaccattatatcttttctaagtcaatatcacttagttgatcatagatcaattgatcttattcctgagatgactaagcttttgtcagttgtagtagtggagttccttgacttgttcgttaccggcttaactgttagactaacccatacttacatattgggaactcgatagtgcagttaagtgagagtattaatcatagataagaatatctataacttttatgtttgcttagaagtgaaacgattgtttcctttgagcttggctaacgacaataaatagtaggcgctcattttggtaattatattagtttactaaaatatcatatacaaagagctacatattttaaggataaaatacattgaagggtaaaacgataattttattcttattcaatgtagactatctatagaagatcatttatttatttgattgaaacaatggataatttatagtgtatttataatgtatatataaagcaatgtaatcaagagtacaattctgagtctatagtggagttctgaggaattaataagttaaaagtttactcgccaatttcagatcaatttattgggagcttgattgtataggcccatagggtcctcaaattacctgggaaatttgagaatttttcactaaattaggctaaattgagaagataagagagatatagatttatttattaattatgacaaattggtgtcaaattaataaattattatatttaaaatttcaatttataattattaagaattgaataaggatttaaatataatatataaaaggtttaattattaattaattaagattatagataattatttacctaaattttgactagagttatgtggcaagtatgatgacatgtggcacgagattcttgagactaaattaatgaaaaatatgaaaagtcactggatacaaggacataattctaaagggaagaagtatggggatgagattgagtaactaccccatgggtattttctatgtatggggatgaagttgagtaactaccctaggggtatattttatttatggggatgagatagagtgactacccctcgagagtgagataagaactacccccctaggtgggttagacaatcacccccagaggtaagttatccacccgagagtgataacttagtcaggggattaagctactcaccctctacactcttatggtcggtcgctcaggttgcaccctagggaataccctcacagtaattaccttcaattacacccaaatctaattctttattggttttcaaacttgcccttagtgaattttaactataatttttgagtgtattaagtaaataatgtaagaagttattttaattcaaatatcttaaatgtcatattatttattttgattcaatgatttaatatgaaaaagtaaggattttgtcaaattgtaacctgtgatatgaaattacaaaatataacctataggctgagacttaatcttgtagaaatacaagatctctctcgtgttggtgctgctttcttgtgttgagcttaaaggatataccacccagataaaaggcaatacacctgagggatgaactggaaactccagctactacgtagaaattagcaaaataacaccttagcggaaggtgtgcacctatctccacatgggcccaactctagatgccaaacccttcgtctgcacacttgcatggattctctctgcgacaggagagcctattccagtacagtcttggaacacactcaagccctcataaggtttcatatttcctaagattgttataaatcctaaatttattcacatattggctcatctcccatggactatcattcagcatcaatcttgaagcattctcatgctctagaactcttccaattcaatctcttcttgttgaatcttcgtagacatagtttttgtaaaaagaaagaaaactaagcagttagctacccaaactacctaatgtagagagggagcagggaagtccccctcccccataaacagcttggacaggtccgtattagacttactatctagaaacaaaaaccttcaggagtcattcgttctatatggaaagccagaaacattgagagggagaatgaaaaataaatcaagaaggtaccatgaacttcaaggcatctggacacgaaaaaaaatttccagcacttctgcagtaaaacagtcattcccataaatttctaatactaaaacctaaaggcaatatagtccactatgcctaatactaccaacagtatcaataacaagcccaagaaactccaatttcatttagaaaattacatgaaaatcctacatgcagcaatatatccaaagaatacagttaaaaggcaaaaaggtaaacaaatgcatacctgataatagaaacaaaggcaccaaactgattgtcattgtgtctagttcaggtagttgacaacacctttcaaaaagatgaatggcgaaggtgatcaacgaatcaatttttgtgttgaaatccaaagtcttaattcttcaagcgtagaactcatgatcactagggtggaaagtttgaaaattctcgagccctaatccttaaaagaagatggatgcaaagctcaatgtcacgctccaaatcggtttgggttatttcagttctaggtttggttttaacttttgaagttgtagagaaattcaaattttaaatcaaaaattgggggaaaattggtaaatagagttttctaatggtatttatacctgagatggctatccgcgtgaaaaggaatggacgatctacgattgtatctccaaaagcacaaatgcatctgatggatggagagtccagcagtcaagcatgtcaagtctattactgtaaacac

SEQ ID NO: 302024 - DNA, 2955 bp, Cannabis indica
atcgtaaaaatattgaaaattcctaattttttgtgtgtgtgttttaataaatttgttagtcaaaattataattaattacgataactggtatcaaaatttcctttaaaaaatgaaacgaaatgaaccaaacagaccttgaaactgatgtaagaagaatccaaatacaatagtgtttgtcaaaaggcccaaatacagacataaggcctatcttagttcccctccacacaaaaaagccatatcatagtgtttctaggccatatcttctacagcttaatccagctcaattaccttaatccaactcaattggaccaagattgttaactctaaactaaacaatctctttcacagcacagacaatttatttttgaaatatcggtatctaataatttgtatactaaatcttaaaatttcaagtcaaaaaaatcccacaagaacaattgaagcacttaccttttccagcatattagaatatgagaatcaatccaacccaaaatctcacaataacaattgaacaaacacagcatattaacattatgttattgccaatttatctcatatattggtactttccttatcattattatagatcttaaatctctttcgtgcaaggaactaaattccttttcaccacgatatacttaaaccgaacaatatgtaagaaagctcattaacgtaattgaattgactaataaacaaattagaagaactaaaaacacataatatataacaaatatacaatgtaaattgaaaatagaacaacaggaatagtaatatctatatttacatataatatatacaaattttcgatagcgagatcataatcatcatgtcatagtacccacatgggcaaatgaatcaattcccaatttttaaagattaagcgttgaatttgagaattaaaactatttttggaattcagaatcaacaaactgaagtcagtctcaatggcaccttttcccgatcggcatcgccgattccatcagcagcgattcgaaaaactttctggaacgcaaaatgaacgcaattcgaaagcactatccaagaaattacctcataaacgaaatcgaaagctggatcagatggcgaagaagaccacgattcatcccaattatgccctccatatctatcgaaattccaacccccaccaccgctacctccaaaacctccgccgcctccgccgaaaaaaggtccatcgccaccgaacaacccatcgtccccttcgctgccttcgtcggagtctccaccgctgaaggatttcctcctaatacgcctcttcttacggagaagcgtacgcgaggtggttctgaacgaattggatttcactggcggaggagcaagggcgtcaacggggcaaattacggcggagatttggagagttccggtggatggtgaggattgatcggaggaggaatccgaaaggaaaattgatgattggaggtggaaaaattgaggggaatcggaaaccctagatactgagacgtggcgattgaggcggtatcggtgattatggtaatgtccatgatcgggaaaatttaagatcggaataaattgaataattaggtcttgggagaaataaaaataagaagagaaaatggaacgtagaataaaaaatagaggaaaattcaagaaatagctgaatactggatagagagagagagagaataaacaaaaaaaatctagaagtcacgtgttttgcacgcctaatattttgaccgctgaatagtcagcccacacattggaaagtttcattcattttggggtacatacttaggggtgtttattggactacattaatgtttttaggcttatccagatacaatctaattatatattagatgttagattttattatctgattcgatccaattcattttagtcatccaatcgatcctgcatctgtttggatgttggattagattggttatttcatgtatatttattgcagtaatttgggtttatcaaatattttagatttaatattttttagatcggatccgttttaattttcatatatacatatattttttttttatgtataacaatataaaatcaaattactcattcaaactaaataaaaatattaagtaatttgattgaatgttggatatattggatttttgaacaccccatccaatcacaattggacatccaatcttttgcggtcggttgtaattgaatcgatcgattgttattggattggattgatttatgcacaccctttaaaatactcatttggtacttcatattttattaaaatacacatttggtacctctactaattggatatccaatgctcaggttgacatgtgacgtcaaccttgatgctggaccaaggaaaaatagtgtgtgggatgtactttttgaagaaaaagtgatatattgacatcacttagccaattttggtgttttgataaagttggtcatcagttttctgagatgttgttttatgaaaatggaagacttgaaagtacccgatttttaaataagtcactttactagaaaagtgaaaatatgaagttgtgaatttaatttttctaactttatagctctcagtcactatgcaaaactagacgaatggtccagacaaaatcagaattggataaacaaagcttagcgcaccaagccatatgtaaacctcggtggttggtgctcttttataagctttcatgttgtcttttagatacttccaaggttctttaaatcaaggatgaggtctcctatcccgttctcgaccatttcagagagaatgcccacaacacatattaaagaaagatagagagaacttgaggaagcaaagagtgaaaaaaagaaaaagaagatgatgaataggaagagagaataatggggacgtaagagtaaagtgaaatgaaagggtattaatatttatggtatcaaattttttatcatcaattttttttaaagaaaaataaaaaaaaatctgtcaaagtcaaatca

SEQ ID NO: 302025 - DNA, 2813 bp, Cannabis indica
acaaaaaaaaaaaaaatcatagagaacctagaaaaagtagatttcaataaaactcaaattttaccaaaaaattagcaaaagatacaaagaaaccatagatcgaacatctaaacaatagtagtaaaaatggtcttagtttctttggtttataggtctcagtctcatcgatgtgtcagagtggtaacggttgttggtcgatggtcgtcaggtgtgggtgggattggttgtgttgtgggattcatgagaggagacaagagttgtgcaaagacgagagagggaaagagagaagacatagaaagagggagatgatttttggttagggaggggtaatttggggatcaaatgaaaattagacactaatttcttagagtgagtatctatggtttaattttaaaattttggggtaatgtaagtatgattaaccaaaatttctttttaaaattatttaataagtacttttattaaacatatgattggaccactaatatattgacatgtgtcaacttagtccattttaataggatttaatagattggtagtgacagtgagaactcgtcaatagttacttaaactcgaaataagatggagatgatgataaagtgtaaattcaaatgacaataagattttagagtagagagaaaaaattttgtctattactttcaagttgatgattacaaatttgacattccaaatccctctcacgtttgagaatggaatatttataggatctagtgtcctaagatacatggggtcccaaagagataagttgtcgctttcacgctgcaaatcgcaggtgcaggaggtgggcttatgcctcgtaccattgtctggtgccaggtggtcctagattgcatgggtagtacttacagtgtacccttgatcaggtccccagtccttgcaggtgcggtgcctccactactcatacctccttacttttagagctttgcagaaagtgtggttgtacgttcttctatttcatgacttatccttgcgactgtatgttgctcacagattcctttactttggataatttcagtaagtttaatcaagttgagtggcatgctcaatgagtgacttttgcatgcatgttttcgagtgacttttgcatgcatgtggccgagtgaactttgcatgcatgttgtcgagtgacttttgcatgcatgttgccgtgtgactttgcatgcaagtggcagagtgactattgcatgcacgtggccgagtggcttttgcatgcaagtggccaagtgacttttgcatgcatatttctgagtgacttttacatgcattttgtcgagtgacttttgcatgcatgtggcagagtgacttttggaagcatgtggccgagtgacttttgcattcatgttgccaagtgacttttgaatgcatgtgaccgagtgacttccaaagatgtatgtcgagtgatatttaaaactatgcatgtcgagtgacttccaaagtgtgcatgctgagtgactcggcaatgcacatgtcgagtgactctcttgccaatcctttgacccttagccaactatcctcaagaattaggagtgctaatttttaggattaacagtaatggaaatataactttaagtatttaattcatctaaaaaaacaaggagcatatataaaaatgtatgaaactaaatatattaggtgtttatgccgcaaatacttttatgtttgaatagaatttaacgtattggtagtgacagaagtaatagaaatatagcgtataagtatttaatccgtcaaaaaaatattatataaatttataaaactgaaaacataaattgtttatgttgtaaatatgtcaacatttgcctaatgattttgagctatttcttgtaagagcaatacttaacgaaggtgtttaacactacaaattaagtatcatattaatatcaaattccatatatatttatataataaataacatatacaatctgtaatcactagaaaagacactatcttttctgagagcactataacaactttttttaaatagagaaaatttaaaaatatttaaagaactgtactaaaaataaaataaaacaaaaaacccaaagtcttttttctttttaatatttttttttaaaatacactattcgtgctctatatttatagaatactttctattattctaaatatattttattaattgatttagattttaataattatttttttatgggtatgtgtatgtatcaatattatatatttgaaataaattaataaaatataataaaattttaaaagagtttggtaatgtattgtaaagaaattaatgtaatgtgtaatgtaaagtgtaaaataaataaaataaagttttaatagtgtatgtaaagaagctgctgagagtaatatcgtgtacttgcctaatagcaatctccctaagtcattttttttttcgaaggcttttcttactctttttcacacacaaaatacaaattggttgagtatgtacttttgtgttcattgacccgtcttttttatataactttacatgtaagtcatctcatcaaattttaacatataactcaaatttgtcaaagtcagtcaacaggtttgacgcgttcaaattattggttcttaaaaagcatataaaagtggaaatagtaactttcgaggacataactagtaaatggcaacaatattttgttaaaataataagaaaaaagtaattaactttttttttggaagaaaaaaaggtaaataattattacaagattatagtttctaaattttacttcttttcctctccaaaaaaaaaattaaaaaatattacttctctttaagaataaagctttttctaa

SEQ ID NO: 302026 - DNA, 2659 bp, Cannabis indica
caatcacaacctagcacttgtatcaaaaccttctaaatataaacaaaaccacagactagcttttttccttcttttttttttataaatttgaatcacacataatccaattaccaaaacttatcatgggttcgttaacccttggtagctatgacctttgagtgttcacatgcttcatatttttgaaattgcagggaaagctttacatgattatggaaatctgtcgtacttttgatcagatatttaaagaacatcttgatggcgtgtacgttttctcttgctattaaaatcactttgattttagagtcaatttttacatttatgattataataaatataatgaccacaggcgacctgggggcgataaaatctacggtgtttttgataatcagtttccagctgctttgaagaggttgcaattcgataaacacctttcaatggacaatgttcgcaagattattactgaagcagatggatatcaaccacatttaattgctcctgaacaaggataccgacgactcgttgaatcctctttaatatgcatcaggggtcccgctgaggcagctgttgatgcggtatatattcataaacagtagacttgttgtggcaatttaaaccatgaaaaactatctcttaagtcttaactaaccaccttcatactaataaataatgtccttgttttttagcaatatacattattactttattacagtagatttgttgtgttgtgcgtatttgcttttgatttgcatgtgctgcttttgtttgtgttttgtctgatttcatgtatatcttgttggtttaggtacacgggatacttaaggatctggttcacaagtctctcggtgagaccatggcaagtctctcactcaacttcatgcttgcatttattatttaataatttcttatatttatatcctgtgtaatttatggtcatcaaaactttggttgacttcagtgagcttagttggacaaattaatgtctcgtctcgtgagaaaggactagctggaaacctgaaaaaacactaacattatggaaaactttccaataattattttgtatgtggacttaatggaacaattcttacccaaagtaggctaactgatttaactaattgagtcttattatacagtttattgggttgcatttataggaactaaagcaatatcccacattaagagttgaagttggaaatgcagcaattgaatcacttgacagattgagagaagaaagcaagaaagcaacccttttgttggtcgatatggagtgtggttacctaactgttgaattctttcgtaaacttcctcaagatgttgaaaagggtggaaaccccacacactcaattttcgatagatacaacgatgcatatctccgacgggttggtaagttgctatatatttaattacttctatacggaaacaaacgtgaaccaaagacatttttataattgtaacggtatattgtaacactttaggtattttattctaattatttgaaacaggaagtgtagtattatcctacgtcaacatggtttgtggaagcttaaggaattccataccaaagtccgttgtctattgccaagtacgggaggccaaacgtagcttacttgattattttttcgccgagttgggtaaaaaggaggtgagaaaatttatgcaccttggatttttcagagaaaagaaaataaatatactaaagaaaattcaataaaaccattcatataatattattaattaatatttcttggtttgcagacaagacagttggcttcattactggatgaggatccagcagtaatgcaacggcgtacctccctagcaaagaggctggagttatacagaagtgctcaagcagagattgatgcagttgcttggtccaagtgatcatgaataataagaaacgacatccattttttctcattttaaattatttgcctatatgatatatagtattatttcattcttttattcatggtttacagctctttttttgacattaattatgagagaagatgggtaggttagtttgttactagcttcgttaaattctttgctgttattgttttcattaactattgtcacactccaaaatatctgaaaacttccatatttacacagtaacaataatagaagagcccatgtgaacagagttgagtgttcatgtgattataatgtagtgttaacatgatatttacaacaattatttatgtaacgtagtgaatttacttatatgtgacacctgaagcataataacagtcacactggtaaagtagcctctttggaaccctcattactaatttgaggatgaagagctattattctttaattgattcaaaagtataaatgtaatagctcactaatccggcttcaaaagtattaatttggttcggacttttttttttatccaaacaaatatatatacatatacatatatatttaggggtattaggatttttgtcctttgaactttgacatgtactaaatcatgcatcttgaacttttaaaatcgttaaaaatgtcttatgaactattgagattattaaatttaaagatttttgtctaatttcattcaattgtactatttctgattgtttatgtactaaaccatgctctccagactttgatatttaccaaatcacgttcctcgaattttgacatgtac

SEQ ID NO: 302027 - DNA, 920 bp, Cannabis indica
aatagattttatttagggcacaaaacccaacaaaattcacactataacagttgtgattaatttagaaattaaataaaattaattaatataagtaataacactatctttaaattttcgaataaagaatatttataaattattaattatagaaaaggtcatattaattattataattaaaaattaatttattttaattatattaattaattttaatataaatataaaattttacttattaataacttattatagtaggtcataacaaaatgtaagcatgatattgaatagtttttgattgctatttgtttactttcttgttgcgttgacaaaattaaactgtctaagattacgaatagaatagaattgtattgtaagcattgaataatctaattaataattacttccatttcatccaacgatgtcaaggaataattcttttgagatgtgcaactcattcattatagcaccctatagctactaaaagcttttctattgtcatttgtcttcttttcttcatttggtttcctttcatgctagaaaatctccaaaggagccaacaatttccaatgtacagctaattagttcgaacaatctctcaatgtacatatggaattcataatcaaggaatgaagctaagacgaataagaaaagttaaaagggaacataattaatggggcctggcccttggagacatgttaagtgtatgttgtaagttacacattatagattggaaaaaatacttttgcaacacattctgacaaatgagttatcacaatgtccatatgtatagccttcaattatagaataagagtgaggcccatgtgatgtggtttttcattcctgctcttattaggcctactgactctcagtgttcggttagaaagtagtccatattagttcatctaaaattaagctcttta

SEQ ID NO: 302028 - DNA, 1457 bp, Cannabis indica
atgtgaaactataattgctataaatattacactaaactatgtaaagtaatagttttgagtatataatttgctaaagatgttataacatgcatgaataataagaataaaattaggtcattattaattatatatctacaaaatgaaacagaagaatttcaacaaattaattagttgtatcacattataattatatacatatatatactggatctgatcatatatatgattgacaattagtatgctaatcattataaattaaaaaacaacttgtaaattaatgtatatatcattgcctaattagacctctctgaaaatctctagctctattagctatataggtatatagatacatacatatatatatagagagagagaaatatatataatgagaaacacaatatattaactaataataatgagcccaatcagagaaagagatcttatactctgaagttgtcagagaattacaatatatttattggtctttctccaaagatcactatagtacctagctagggtttccagtagtacttctatatatacaaacattataatttctagggttcttattgagagctaatttactttatatagtaaccaaaaaaagtgcatatatatattatatatattaaattcatcagagcattttcattgatatgaatagcattataatatatatatatatattattattaatcatcaaaaattaatggaagaaataaaagtgacttcttcacaacaatcatctcatgatgataatcttgattatgatgcattctggaccattgattgaagctgatcatgatcatctgaataataatattccccccatattggctgcctcatcatattattattataattctgttgcatttgatcaaaacaagacatggaaaagttggaattattattattagtagtcatctcttgatcatgatcatcaaatctcccataactcatcatattattatgattatcatcataattaatatttgggatattaatattatcattagggttttgaattttatactccatatttgaccctgctcctgagtagtttgaagcactactaccactctgtgccatttgatcaaaccaaccatattgatggtgaccatgatgatcgtatcgatgatcgttagtgttgtcgtcgtcttcttgagattcaacctttctgcaaaacttttcgttattagggttttctgttcctattcctgttcctgttcccgatccatgagatgatgatgatgatgcttgtaattcttttaaggtagctaattgtgcttgtaaactaaccaccttccataagagaaaaactttattagtcattgaaattcaaatactaaattaggataagtaacacaattattatttagggtttcaaatatatatatagtattataaaatttaatcaagtatatttatatatatatatatatatatctttttattct

SEQ ID NO: 302029 - DNA, 3400 bp, Cannabis indica
agctttcaagaggatttcttggattgatggctgagattcagtttgcttgagcagaaggaacttgcggatttgtggatcgaactttagaaatggacaaattgatcatcattcaacattattgagctgagctagagacgaagactccaaggaacctagaaacaccaggatgagaagaagaacaaagaagaacacaaattgagaacaccacctttgtcatagaagaagacacaacaaggaaggaagaagaagaacaggtgctttaaggaaaagcttatctttttcgctctgatactatattgcggaatgaattaagagaagaatgaaggaaggaaaaaactttcattgcagaaaataaagaagttgtatacagaattggcacaagacaattacatgtatactaacagacttgagctaactagagtaatctaactaatcaagaaccaataatgaatataattaaagttagacaaactaagtctatctaatttaactgaactaactaaagctaaagaccaataaaccaactaacagtattaacagtacaaattgcattaactgaactactcactaactgagcactaaatctgttactaatcaatgtgttaacctttgctaatcaaagggttttaaacataaaagtgtgattattaaaattttcataacaactaaaactttaataaatttaaataattagtcaattttcgtgcctgaaaatatatgtcagaatattattttagtaaaaaaaaaaaaaaaatcatggttaagatactataataggagattgtaataaggagttttcatttataaagaagaaaagaaagttgattaatcaaccaaccatgcaaccttaacaaattttcaccaagggaaagccaaacaaacccttagttacaacttatcctgctaatatataagcctttgttcctgtaaagttccttttcagaaaattataaatttttattctattacgtataaatgacaaaaggtatatttatggaagggaacatgccttcataaaaaaatgttgcaaatacctaaaagttgcttattaaaacttaatataagtataaatatattttatgttacaaaaaaaaaaagtacaaatatattttatgaatatttgttgctacaaaaatttaacttttaaaaactaattatcaatatgtaaaatatatataattatgataaaacctataattaattaattattatttatttaaataaatatcaacatagttagtgtaatattatttattgtaattaatttgcaacatatataattcaacgtacgtatataaattagataattaatatttcacaaattatgtatataacaacactatactaaaataagtttgaaaataaataactacataaagacacataattaaaataaaataaaaagaagccaattaatagtactagtctactagctagaatgaagattattatgaaatctaaacatcaattgactgatcccttccaactactagacacactacattgatcggagttagccacagaggaggcggcgccgccgttaccacacttggccaccgtccgtacactctcaataagagcctcagtccgagcctcctgggacagaatctcagaaagctgctcagggcttatgaccagcttcactttccaaaccccactgctgttgtacctcggaaccacctcggcatccggtgcagccgcggcggccctacccttcctcatcatcattgtcatcatcagattcgaattcccttgtccttgatgatcaccgccgcacgacgacatccgatacggggttgcaacgacactattaacgacgtcgtttgcggcggacgacgtcgttttgtagttattataattattgtaagggttgagaggcaagagatagtagagctcaccagggttgagctcctcgctgtggaggagtggatcggagaagaggtcccggctacggaatatggcgtggcccgggaactcgtcggtgatggagctgaccgttatgggagcatagagctccattatgccgccgcttgaggttacaactttgactttgaccgcatctatttctgactctcctaaccctgctttgaacacacaatttcccattattatgtgttaataataattttaatgatcatatatgggaggttaatgggtttctttggtcataatctttagtgtagggagtttcttgagggtttcatgttgatcgattcgatagctgtgttgggccgacacaagaattccttttctttttaatccaaaattgtgtgtgtaaatatatatgccgttttgaatagcactaatatgggtcccacttttccttgatcatgataaattattgatcactacgctatacgaatatttatggaaagtttaatccaaaaaaagcttttaacagggaaaaaaaattaagaaagaatcttaattttatatagatttagtcacatcccttaccaattatccaattgtttattaattgatatcaaagaaaatcatagtataattaaatttaaatatgcaaaaaaaaaatttgtgtatgcgttattttttttatataacaatgaaaataagcagactaaacttcaactaaaaaaaatacgaaaaggtatccatcaaaactaattaccaaatatgaattggggacataaaaaaatagttataataataatttacgttcatttgatatttaaggaaagttatatagagtcaatgaatagtagttatagaaaatgatgagttgtcattgtgatatagagtgagacacacacagcagatcaccctcgggccatttgctatatcttccggagctagtatttgtgtgtggggcctagtgagttgctcacgtgcgttacagaaaatatatatggtgacagagaattagagaacaattagtttgatttgatcaatgatttaaggactaaataacgatggtatacgaagctgcacattttgtgccctagtcaacgattaattagctaaatagtacttgaaatgtgactaagtaggtggacaatgatgatcgtccaggctcaccactctattacatgctcttcatctttgaattacttattttatttttatatatgatctaaaatgtggtcccacgtgtcggttcgacagagtatcatacatgaaacaagaccaataatatataatagaacaaaaagggtgcccacctcaaaaatcaatacttttcacgacccaaaaatggtgtcgttttttgatcatggagactttttcattgagcttcggctaattacttaggtagcgtttggttggaaggaatgaaaatagaagaataacaatagaaatgagaattgaaataagaataaaatggaataaaatttaaaatacataaaaaaaaattattaaattttttcaaatcttgcattggaat

SEQ ID NO: 302030 - DNA, 6203 bp, Cannabis indica
atatattgatctattcataagaataagttacaagctctcttacctttcttaagaatgcagtcagttcagttattacttgctccaaaacacacgaaaggtcatttgcaacggagaagcagcaatcacagcaaatgcctggaagtaaaacgatgagcaaatgtgtactaacataaagctagtgggaatttggtgtttccctaaaaaaaaaaaaataaagccaaagaacttgtgggtattgcataaaacaaataaacatacacccaccttcacagcagttagtctggttatctcattacccatcctatcaacaagcacaggaaggcatgaaggtaattctgctttcaggttatcaccaaatgttgaaacaacgagtcccatgcaagtgatagcacactccttgacctcctggataagcacaaaatgtgagtcgcagtaaatcctctgaaatatttcttaaacaggaatactactgacctgatcttgatcttgattagtcaaacgtgacattatggcatcatagagtgggcgaacataaggtttaaagtcaaaaccattcccctacatcaaaacatcatgtacacaattaaacaacagacgcacaagatcctggagtcttacagagtaccaattaaactcacttcaatgttagggcgaacaacacgaacgagttccccgcatactcttaatgcttcagctgtcactttgtaataacgctcacctacagctgataaaacaggactagaaagagcctgcaaaataaaataaaatagaaaaacatcactgaagtaaacaaaattgcaaaataaagcaaattccttaaacagagtatttatagcattccactgtaaaataaaagagagaagaaaaatgacaataaacaatattcttaaagagtgcaacatcccattacaaaaaagaaagcaaagatacaagaagcaagaaaataacatgtcttatatgaaaaatatttaagatcaaaatttaatatggacaaaaccatagttgaatgtaattcatgcacagaagggaagaaaaaacagtaatattttgtacagtaaataagttagtcctttaaaagaaaatttgaaaaatctctttgacacatcaaccaagttagtttactgaggttttgcaaccaaagatcataaaaaatgacaacacataacaatatatatatatatatatatatttatatactgatttaaaaggaaaaaataagaacatctacttttctaggtttcatgcatatctatatccatacatcaaattctgctgattgtgttctccaccctgcactaactaagaagggcactgatgtttaccttgacatgaggatggaaaacagacggaaaatgtgaagccaagaccaatcttgtgaaaataagagcttctatcttcaagtttgaggtagaagatttgtcctgtatatgatcattgaaaacaacataggggatgggaaaaaatattaacaccagatgtaatattataaatatcagaagatagattgaaatctctgcttcaacattgtacttacattcaaagccttttcaattcctggaatgagggatccaatgtgatctgccaggcaatctggcaagacaacaacaagttctttcaaaacagaaaatgcaccaacctgccaaggtaaaatgtaatgcttaaaaaacaggtctgaaacaaatgcataaaaaatcgacatgagaaatctctacctttgttttaatagacttttcacgcagttgcctgtttatagacttgataatctttggcacctcttgcttcagcaaccatcttggactgcacataaatgaatttaagcattgatactagtccatcaataggaaaccaatgagaggtaactgaagaaaccgatgaaatgtgccaaaagaatacatctttttccacagcttattacatttacaagcaatattatgaatggggcctactgagagggggtcaagagtggggagagagtatatgtgggtagcttgttataaacactgcgctttgcaccatgaaaatctcatgttatggcttgttagtgttgctatgtttaaaaaagatatatgtgagtagaattagatgtgcaaaattcaaatatatgatattattcaatttgaccaaaaaaacattagtcccccataatttgccaaaaaacaacacaaacccatgcacatatcaaaaaggataaggaaaagagctaaaagtaaggttgcggaattttgaggatatgtagaaacaataataataaataaatacatacatacatacaatctgggtcaagtacaaacatataaataaataaagaagcttgccttaattcattgatgtcaatctgcccttttgtaacatttccagtttgacgcaacagttcaatgaatgtattaaatacgtccatctgcagcagagaaatataagataaccagcccacaaacacactacaaaaaggtaaaaaaatgaaaaacaattatgcacatagagaacaatgggacttgccttgacattttcctccctctccttaaatctctcaatcaattttgggcaggcctgacgaagcatagataaaatatttaatgcaagatccatgaagcaaaattaaaaggaataaataaataaataaaatctatattacaactttatagaaatacaggtatcaaaagcaagcacaacaatacctcctcatacaattttgcaagcatctcaggacgagatacaattaatgccgctaagcatttagcagcagctcttctaactttccagctgacatcttcatcatcagtatactcgtttgcactctcactacaaaatattaaacaccaaccgttaaaaagatatattgattaagagtcgtgaattaccctcaaagacagatttaggacatactcgtcttcttcttcttcaagactatcgttatctgtatcctcttccatgttatcagtgaagttaggatcataacttaagtagtccagattaagatgaagaatttcatcacagtaggatgaaatatccctggggcacctcagaagaaaactttcaagtgcctgcagtcaaaatagtccagaataaataatacaacgaatgttcagcattggcatgtaaaaatattcagcaaaaaaaaaaaaagtgcaaagtgtaaacattaacaataaaacaaaagagcaccaaaagaaaaataaaggaaaaataattcatgtacctgcaagctgtactcccgaagttcctcatcattctctgatgcactcgtgcagtaattgatcagaacagggacagtgtcagaaagatggggtccaaaccgatacccaacagcccgactgaagcacatacaagaactcatcagcaaaagaaaattttgaattttaaacaataagaaacacggaacgtgaaaagatatttagaagacagaaaataaacattttgacactcaccttagagcaccaatcatctgaatgtttgtgcgggtcatttctgattttgcacctttatttctcaagttctgaacaacttgaactgttgccttcgctaacaaatcatcggacaagcttgaagcaagagatgctgaaagaaaaagatcataagttaaaactcttttttggaaaagaaactaagggggcgtttgttatggaaataagtgttaggatgtgggggcatttgaattaaatcctttgtttagtgtatttttttaggtggggatgtagtggggcccacaaacatttagtgggtaaagtgaataattttgtaaacttgagtttcacatgcccccacatgtgattcccttgctcacattcccgtgtaaacaaaaaccaacaccaaacaccccctgagtttattgtatattataattccattacaaccagtggagcttctagtcaaaacaagacttagaaaaacaaacttcaaatgagaaaacaaacaacacttagcaaatattattaaatgaagagttcagaaaacaatcaactatagcataaagtattacattgatcttaccaatacatgcaacagttttttttctgacactggcttgattagagctcaactgggacaaaagtgcccctaacagcagctcatggtcagttgccataagatttccaaatttatgcaggacatcgcataaaatgtcaagacattcacattttatctctgtgcttgtaccctgtacaaaataagtgcagtaagtgattagtaagaagccttaacaagcatttctttttagtcgggaaaaagaaaacacgatagaattaacaagagaagatgtgtaaaggatgaactaagtaaataatagcccagtaatcatacaaaacatctactacagaatgactttataaactaaattcccatatagaagaatgagtaagaaagctcacagtgccagtaatccctttaatcaactgtcgcaaaattgaaactagaatagattgtgcaagagattgagtagcaatttcggcaacaatagtctttaaagctatgcttgcaatgtcacgatgttgatcctttccattcaacaatttctcacaaagtttattggtcatttccacaactcgtgcttcgctgaccttcttcaccaatggagcaagactacaagaacacacgaaaatgtgagcaaatttagatagcattttccatttagtttcaaataattcaataacagctacaacaatgtaaagtggatatacagagaaaacattgtaccacttcacagccaacccagatacatcgccggcaacatcatcaagctgctgaatgatgatgtttgacaacttaacctctaaatcagtatcagctttgaaattatctctgttcaattcattcaagagatcagaagttgccatgtatctgtaatctttatctttgcccgtcatctgtatacaagtttaaaactcaatcatctatcacaaaagacaacatggtaattgcacaaaatcattgttcacaactcaaaaatataccttttccagtatactggttaaagccaaactcgccatagctgcacaactatacaactacgtgctgcccgccaaattcagcaaatgtcaatatctcaatataacaagctggagaaaaaagaaagaagtgtaccaatcaataacaacagctctcattatatattctttacataaaatataaaggctctgtttgtttaaacttttacttttccttatagccagaagtataaaataagtataagcttagaattattatatggaaatcttttttctaataaaaattacttttcaaattgtttgaatatcattataaagaaaaaaaaattattaaaaattatgtaaattattttattaaaaaatgattcttcattctttatccaaacagccctaaggcttatagaagctaaaccaaacgggactatgactgaatccaaatttgataatacacctaagtttatgcaccatagcaccacattgtgttatatagaacaaatcaaaaagaaacaactccatcaatttcgaaagaaaaaacaaaacaatcagccgatcccaatgtcattatcaaaccaaccctacccttaacaaaaatcaacaatgccaagtgaaacacgtacgaagaatcaaaacaattaaaacttcagaaaccgaataaattcaatgaaaattatcttaatagaattataaaatgcaagaaacttagggtgaactcttgatctgcgtttaattgatgagaaaatcaaattaaaataaaacatcaaaaaaaaaccagaaatcaagaagtaaagaaagaaagactcaccagaaattagagaccgtcggaggtgggaaatgaactgagtcagtgtaaggaaaaagctcacgagttcactcactctctcttctctatcgctctcggtctgggtaacagtgtagggctgaggagttgaaagtgttgaactttgctcttatatatttggggatttacaactgagttgtgtctcaacttggataatggtattctagccaaacactgaacgaggttacttctattccaatccggggtagtgttaacctcgcattttgccaaacatgaaaataattattttattatgagtattgttattgggcactagtaatgtctaacatttttatagatgttgcttcacgattagttaacaatatttcttaagggctcgtttggaacgccgtattaggtcgtattgtattgtattatattgaattgtatttaatacaatattttaatgtaaaactatatgtggt

SEQ ID NO: 302031 - DNA, 2342 bp, Cannabis indica
gagtcgagtcgagcgagttgtttgttggttgtttttgatggaattattttactcaaaatcaaaaaagaagccttgccatggctgccttttatcctaacttaaaaaagtttctctcttttacaaaatggccctctttttcaatttaatttcttctgcttctttacaattttaatcaaaataattacattctaatttattttattttatttaatgaatgtaaagtgttatttgggataaatttcctctccaattcaagaagggagaccgcgtaccaaagaaggacctcgtgatattatggaaaattgggattggtagaacgggccaaacacgataatacaactcgaaattcgcatgagagttaataaatttaagtttgccttaaatgaattcgggccgtgtttgggttgactcgtctaacctgtttaataaacgagttgtgttcggattaacacggctaccaagaaactgacccgtaaatgacttatttaaagttactttagtactttaaaaggttataaacgtgttaaatacttcataaacatgttattagttgacaagtttaaacaaaacatgcttataaacgggttacaacaatccattttataaatgagtcgcgttcgaattttattttctgacataattattaatgggttgtgttcgcaccgagcatatatctgttatacatgagtctcaacacgatacgaataatacttgcaaagacgaattgtcaccattatataaaactcattgtataaactatcaaaagaaaaggtagaaacacacaacaacagcaaaaataatagttaagcattcaagtatcgttaattcgagaattttacaattgttataacgattgtaataagtaataatctcgttatgaccgtattttgtaatgattacctactacctaataagttagtgaatccacatctattcaaaaagggtccattagaaataaaatataagagtatcctttcaaagtggactaattaaattgagtgaatcactataatctctctcagtgttatttgagtactcgtcattttaggtgaatacttattattccgccataaatgtttttttttttgaaagaaagcatgttattaactcaaatcaaatcaactgttacaggagcaccaataaatctaagacaagcatctgtccacaaatgaacccctatagaactaataacagacttagctagtgcatgggccacaccattcgcatcacgcgaaatggcacaacaagaaccaccaccaacagccgctaaaagagaaataatctcctcaacaattggcttaaacataagaatattatccggacaattaatccaagaactcacaacagaagtgtctgcctccacacgcaccaaagtgaaccccaatctgttagcccacacaaggcccgctcggagagctaaaagctccgccaccgccacttgaaagcccccaacgacacccataacccaggccgccataaatgtttttgtgtaactcaaatgctcccatatttttagtgttgtttatttttctctcacaatatgaagaattattttttttaaaaaaaataaaataaataaacatagaaaatatgtgactgtgagttggaaatattaatttgtatagtacaataaagtttgtggtatgaagtaaggcatattagattggtacctacaaattagtatttaatacaatatcatattaaaaatgactcttggtgtagagtagtaattaacaacttagactttgacattaattaggattttgatcaccatctacaaaatacaaatacaattattatggaatgatatcaataagtattgtgaaaaagtttagaagaattagggttaggtccatttggttgtggtgtgtgataattaagatgggactttttatgtttgtgtttgttgttccactcaatttctatatgatttagtttaagaaaaaacttgtgacaagttgtttcacgcgacacaatacaagtcacacgtttttatttatagataaaaataattaaagaaaaatgactaagttttattttattggaatatatgtgttagtggtgacgtcaaccttaggcttatagagatagagaagagagggtaacgaagtgaggtgagttttgttcatatgtcatgtttaattaattctttaaattatgttaattacccttttgctaattttcaagaagaaagttgataatgataaattaattatgaggatttgatatctactttacaaatttaaagtatatgaaatcaataatttaggggtgttcacaaagtatccgatccaatctaatccaatccgcaaaatgcggacatccgcacttgtgcggattgg

SEQ ID NO: 302032 - DNA, 1403 bp, Cannabis indica
atttaaaaaaaatatattatatttttaatagcttttaattattataaataactttattcgaaatgtgcttttattttattgtattatgattaaaatttgtgctaatcacaaataaaagaaattttacataaatatatattatataattttatattattcataaaaaatataaaatagtattagactgaattgagattttattcgtaactaaaaattaatttctttaatgtaaaattttaaaaaattattaaaaccgcgcgaagcgcggatctattccctagttaaaatatatatgagactcgatattaaattgcatgattaaggatatgacacctcataatagtattagatacgataggtactctttagcattactcttataaattatagaattgttatgggatatcttaattaagatgccaagtactacaagatgtgtatatattgttatggtacattttaatatcggtcccacacatttattttgtattattttaagttttttttttgaatgaaaatacgtattatattaaatcaggcattcataatacaataaccatttaaggggagaaacattttctcccaccaagaacaagtagaattaagttgtattaacatgccgtgttatgaattgtcagccctactactttattattattaaatcggtgtacaatcacagtatctagatagaggctagtagtactgtcgaaattccttccagctggctcatgatatatactagctacatgatctcataattaagtgattattattaaactggtcgactataattaagttaatgattatcagcaccaacacacacacatcccatttctgttttttacatatagtttgaattttatttttagtactagtatattatactatttaatttttttaaaaaagttacatgtaatcataaataattataatatatataatcaacaatcgtcgtcaaaataaactggactaaaaaagctatcgtggatgttaaaacaaatagaggaatactataacactcatttagaggggttgcttttttctaaaagtactatttgttgtaaagttgtgcaccataaattattattgaatttatagttgtattccttaaactatttgaattattaaacattccctcaaattttaagtagaggaggacgatacaacaagtgttaataatttgagataacgtagtgtggtgtagtggtaggaaaatttttactgtctcctcctttacttgtgagggattacgtttggtccttataggttgacttattgtatagtgggctatctttgggatctttgggatgcactataaaaaattattatctttggtgataattttgtagtcacaacataattttttttgtgattaaatattataatttttagtcacaacaaaa

SEQ ID NO: 302033 - DNA, 3975 bp, Cannabis indica
ttttttttctcacattattttgtattaatttcaatacttattttaattttattttcatattttggtaaattatgtataattttttttagtataatttcatattttttttattataatatttaaaatatgatttattttttatagatatattttttaagaatatgaactggaagaaagataaaaattaatataattaaagatacatattttaggatgcttctataatgcatcctcttaaaaagaatctactgatgcaccctacctgttttggtttctagaagaattttttaatcaatttttttttttatatttatgtatgttatagttgtttaagacatgcaagatttttagaaattatttacaaataaaattcaaacagtctattttacatgcgtataaaataaaagagttatctgtataacagacaatttgaatcttattttcaacgtgttaaatttttttaaacttttttaaaattttacaagatatcttaaataactataatgtaaataattatgaaaataaattaggctaaattttttttttcttaatgtcgaaataaataagagtgattagtgcattacttctaaaaggatgtattgtaaaattttctatattgaaatgaggggtatttataaatttttagagtgaaataatattttttacccattaatttataaatttaaaactaacaagaataattggacatctctccattcactattgttgtcgttgactctgattctaatctcttctctctctacttagtcaataaacccttcaaagttcaaactcactcctttctttcaatgttcaatctctgaagaaagcgaaaaagtttattcagctaagctaagctaatctacatcatcatgtaagtatgaactaatccatttattttcataatatcctaaacgaaatttaatttattatttgaatgatttctcttgtactgtgtttgttgtaattggtttttttttttttttttttttattattattttactgttcttacagtcaacaatgtcattttcaacattttaacaacccgcctgaaaaaaaatcaaaactttcatcaatgggtgaggacagaatttcgaaactacctgatggagtgatcattcacatgttgtcgtttctcccaactaaagatgtcgttcgaacatgtcttctttcaaagcgttggaaactcatttggtattcagttcccacactttttttctccaatgttactagtcctgatctcacatggtgtttggatatagaaatgttttacaattttgttgataattgtttggaacacctcaaaaagggttttgttgttgattcaatcataactagttttaagcttaagatgtttgattgttatcatagaagtaaggctggtcttttagataaatggttagcttttgttgttgagagtaaagttagggaaatacatcttaggttaaacctagatatggatctagaaaatttcgatgagtattactattgtttacctaaaatattgcagagtgcaacatatttgactgttttggagttgaattgtgtagagttggatacttcttgttcatttagttttccttgtttgaaaacattgtcattggaagatgttcggaatttagagactgctgaggatgatggggtagttaagtttttgttgggttgttcttctcttgagaaattgttgttacttgattatgttttcttagttactgatcatgatgttcagtttcgattgcatagtttaagcctcaagtttatggaacttaaacgtacatacgattattataagttaaacattcaagttgaagctgtaaatcttgaatctttggttctacatggtgttatattggatgaaatgaatctctcttcttgcaagaaaattagaaatctctcattagttgactgtccagaaagtcttcggccttcaatacaagctcttatttctgatgttcctcttcttgagagtttgactttgagcaaatgcgatgcagatttggaccatcttaaaatcactagtcaatacttgaaaagtttcaattttaagtactcggatataatcaatgttgttacaattgaatcagctctagatctagattacttttcttatgaaggatatatcaattgtagaatatcaatagattcatttaatttattgaatgggaagatagtgatttttgagcagcaggagaattatgacacaaactggtttaccaatatgatgaaatttctttcgaatctcaattgctcttggaatattgtaagcctacatgttcgtaaagataaggtaaattggtttattttcatttaattcttttctttatttgaagttcatattgtcaatattataacatatattaatttacatgtttatacatttgcatgaaggcccttatcttgccagaaaacttcaaaacgatatgtccttctccgttgcttaactggaagcatctcagagtagttatttccgaatatcgtaagccttatatgaaagtgttagatttgaaggactccttgatgtggatgtcatcttctttagaaacattatctattaacggaaaggacatgttttagtggttttgtagcatcgtaatgttgattatgagtatggatgagtgtttttgtttagttttctatgaaaaatggtactgcagttctttcttaccattctattgcaaactagtttattaattatattgtagatttctttttccacatattgttgcgattcttacaaatcgacacacttgacatcacagaacctttcctttgttataaatatgatatattgttgggatttgcctcattcaacaggtgccacatcagcacctttaatcctagttagctaaggggttagttaagtcagttagttcctactctactcggcctaactaacaacttatgcctaaccgacacacaactctccctagcataattttgtccaagaaaattgagtgatgggttgtaaatagggctcttgtgtgtttgatcaaatgtttatcaccacggtcttcttttgtgtgttgtaatcttggattggattggtgttgattatattcaataaagttcatcattttgagctaagtttttctttcaatttatgattgatttgaatgtggtgttcttagttgttattgttcatgacaacaaaattagtttgaagtttttactacacatatatacgtatctaatttgccgaatggaaacttcaaacttcatgatgagcagcctaagaattgctctttgaaaaattcaaaggctgcatactttgctgatataaggcatgcccattataatatttcaaggctgcattacgatcaaagtgttggaagcttgcaaattattgaaattttagtttgcagaaagatgaaagtgttgatattgaattatttaacttaattcttcttaatggcttgtgttgaattgaaccccatcgtaagcaaggacagcttacaataatcctccccacacttgatcactcggaacaaaccaagactcaattaaagacactacagttggatccaaaataacttaacagatcctatgtggcataactaacccttgctgccactcactttccctcaaatgacttcaactgaagcctatgaatacatctgatctcattgataagagtagagcaagaagttctcttcaagttagtgagagaagctctaacaatccagagaaagtgagttagtcaagtggttttctgcaagaaaggagagaaaccaaactagattgtaattgagaagatcattgagactatctgtcaaagagtgtgacaagaaatctccaccattattgtaactgtccaagtttggattatagtggaaaagagcttatctggatgtagtccaaagtttagggtgaactttggcaaaattcttgcgtttgatctctatttttctagcttattcatcttttaatttctgttttgattgcattacatgtttatgtcaaagattgattgttt

SEQ ID NO: 302034 - DNA, 1895 bp, Cannabis indica
tatttcccatctgtcaacaaaaagttaaatttagcacacacaataaatatacttaaatgatttaatcatatgaagttgcaaaaatgacaaacctcccaagacaatggctcaagccatagattatctacaacatcaaagtttggaagtagaacagtaattaggctgcgcccagcagcccaaacagcatgcggaaatttggcttctctcgtccactgtcattatgaaaccataataatttaaaaaaaaaaaagaattaatctagaacaaggagcatatactatgatcctgaggaaaataatagtatcttacatcaataggggggctgagaaattctattccattgcttatctgaccatatggttccattagatcaaccacattttgcagatcttctttagtcaatgtaagcccaagatgattcaccagcattttgcttagcatctttgaaagtttggttcttcgcacccaattaggaataataccactgaaagtctggaaacatactaattttattcaacagatccagccctctataaatatcttcttcaaatgatgtataataaaaataaataaataataaacatatacaaaacaaaacaataagaaaaagagtaaaatatgaagagagagctgcataatgcaaatatatctagaaggcttcacattcaagtttagatcaatcaagtaaatcaaactctcaaaggaacaatgagacgaaaattttgttcgtaccgcaaaccatccacagtagctcataagttcatctgtatcaagaaatttgctccggaaagcacttccttccaatgccactgggacaagttttagttctataggtcgtaaaagagctgtcttttcagcaacctgaaggcaaaatatgttcaggtatcaagagaaaattaccaactcattctatcaaccatggaataagatagagaaaaccgagcagcactccaaaaatccattagcaatatgccaaaataaatactgtatgatcatccctagaaaccatgggattaagaattcaatgaaagtcaaacaaacaaaagtcatttaagagattgaaactacctttttccagtctacaaagtcaatcagctcagtgtccatactctcttttgcagcaatctgtaatattctctctctttctgcttgcgttggtctttgaagatgaaatattctatccatccgaccaggccgctgcaaggcctcatcaacttgttgcagatttctagtcgtggccatcaaaacaaccccatcttgtttttcaaacctgcaaaaaggaaaataatgagaagctgcagagattgcatagggagagcaaacaatgcaggttgctccattactattaataataaagaggcaagcacagacacggactgaaagtgtggataaaataaagtaagggcatgactaagtggcaagacttagacgccacagatcggattacggtaaacaagaagttacccatcaagctccacaagaagttgattgatgaaagcctcatgatcctgatttttagtgtgaatatatgtgccacgaactccagcaaaaaggtcgaaatcctccacaaatatgattactggggcctggaaatgaaatcatagtacttaagaaaagatagagcacaaaacaacctgtctcttatcaaatttaacaataaaataatttttttttttggaacaaacaaaagcagttccataagcaatggcagaacttttttttttttggatagatttcaattacagcgatggcgaaattcagttccatatatattccacatcatcatttagactcagtttttcagtttctctccatcgttcatacattcattgatgctcaacttcttgtaaaataagctgagagagagagagagagagagagagagagacgagtat

SEQ ID NO: 302035 - DNA, 6115 bp, Cannabis indica
aacattaaatgttatttctgatctatatcaataagtaaatctgattatattgaaatgagttttatttagggcataaaatccaacaaatcaccatgctcgggaccaaactagcagagagggaacggttttgcatacttcctagaagactccagagagagaaaagctacaacctactcccattttacttgtattaactcgtgggaaaaagcaagagtccaaaattcacaaagcagttcaagataacacatgtatttaaagaaaataaaaagaagaaagaagacttactcatgactttgaagatttcgaatgtgcttggacaactcctacaaattaagctttgagcaatgaactcttcgaagattttaggaaaaaaaattttatgctatgatgtctttgagagtaaaaatggctaaatgagtataaaagaatttttgacccattatataggtagttaaagaggtagtgtaatccaaagttcaaattttggttttccccccaaaaggtgtactcatcacaaatgttggggactacgtacgacatcacacatttccaatcgaggctcaaatttcaagacaacattaaatgccccagataccgaagagatattcagatcttcacattttcattcagtcacatcagattaagactagtgcgagaaccaaacacgtgtcacccatctgaccagcttggtggccgaataagtccacgtgcgagaaaagagttcccacgaggacttgagaggcaaatgctatcccaatttctgcacaggatgatgtggcgtccatctgattgaaacgtgaagaatatctcacaacttggatgggaagtatgctccatggtgtaccgtccaaagtaatatggcatttgtaaataattgatttgaagagaaatctagaatatccagacaaggtatgttataccatccgaccaacatctacctcgtcatcattctgcatatgtcgcccaggataaatgtagaagtgaaagccttaaaaatatttttcccttttatttatcaattaaattcctattctcctgggatttctacacacaatttttgtattatgaaagtaattactttccctttttatttcttatttaatttggaaaactaaattgatgtaatccctataaatagtagagccattttactatttagggatccaaatttattcattcaagagagcacttacgttgctaaaatctctgtaaaagcttcaagaaagatcaaaaacttcttgcttttgttctcatgagtcaatataagtaaagtgggagtaggctattaccactatcacggggccgagcctttataataaattcatgtttttattgtttaattattatcattaattgtttctaatcgttataattgactcattgtcattgactaaaagtgagatcaacactacttatattgattatatcaatggactgttgactaggaaattcgccaactaactcagagtctaataaacgctaattaatcaccagtaaaaagttaagaataatatataaataggaagaacacacaatgattatagagattcggcccctttatatatgggtaatgacctactccacttttagttgtattaattatgagataatgccattcagatcactaacaaagacaaagtgaattctagctacaactctcaagatgtttatagagagtattcaacaaagtgctcttagtgggaggttatgatttcagttccttttccttgttaattcatccactttttataggggaaaggttattacaattggctccgtaaaaggagtgattagaaagtaaatatctttatattctagggtgcagttacaatgtctagaaactcctacaatcacggagagatcagttagatccatatttgtaggatacaattagagatatttgtggaagctgtttgagggagaaaccaaggctagtatagctttgtccaacattcctggcaccgtttctcctggccgacatattgactgcccgattaggctcttttctagatttgtctttcttgtgggattacttatgaaacattcttacaaggtgtcaatcttttcttatctagccgacatgctgatggtctagccagatacttccttaaaggaaatcttcagcccatggatgccagcctcatatgggatatgctaggcacatttttgcccaaaagtcccttgcaatatttagagctggctagattatgccttgcgttagtgacatgtcagatgtgtaaaattttgggataacatttttcccctaagttctcgtgcaaccacttgtccggatggggactttcgatacttgtacggatgctgacaggtacatgtgctacacatgatcgatattttggcaattgttccatgtagaagtgaacggtcaactttcaatctcttcgactatccattaggtgtcagctatcataatgatagtttcaaatcacgctttatgggaggatcgtggtgacagctgcattcccccataaatgcattttttgctcttcccgcttccccgtagcgattttataggaatgcactttccatttaatttttggagggaaattaaacatgagaaccctatataaagccttccttctcaaacctcttcactttcatttttttttactcttagaaaagttccaaagagaaaaacttaagaaaaacttcaagaaaactcaaggtttttagctgtattcttcagtcaaccgtccttcgtgtagcaagaaaacattagccatccttccaccgtccaggccttgcctaggatccgtccagtgagaaatcttcttaaaaccattatttttctttcaaagttctttatttttgttattacgccattattggaggtaaaaacctccatgcaaagaacttaggaacacccatcctccatgggttgtatgggcgtgttagggtagataaatgtagggattctaccttaaaaatgttgaatatttcccctatttttcatatctttgaatcatgggttttgaagaacacaaaaaacctaattttcatggcttcttttgtagaataggttatttagatgcggtaacaatcctggtcggcctatgcgaggtgtttttgctctggccaactaattagatattgctcatgtggtttttatgctgttcggatgttcacctccctcttccctttttagcacatatgaactcgcacgactactagggaggtgaacactgaatagacacaaatctcctcagcattctcttcgaggattagcccgcactccggcaagtagttcattatctagtaattctctggccaggtcttcgggtagtttttctgacttggaagttagtagtggttctcttaaacctgtaatacacaaccaccaacattttgaacaagttagaggagagatttatgattggttcattagggaaatgaactgaggttggaggaaatgtcttctaacttcttggacatatattatctggccaggtgtcctggacaccttgccagagggacgtagaacatccttagtgaaagaagcctctcaggctaaggtttctgtcactcttgcacgacatactggtcaggatccaaatctggccaggacaaagcaagcttaccgtgcagcaccttcgactggtccctacattattgaactgatagcaaagggacgggctgctcaggcaggtcaggctgagagacctgctgagcctgaagaaagggtaacctacacagaggccggtcaaagactatgatgtcaatcacagacaatcccctaggggtgtaatgaggctagggagcctttgaatgataatggggaattgtcccatgtagagattgatcatattgaggaagagctcgcagtttcaaagcctttgcctcaaaaaagggagccagaggtagcttgggtgtcttctccttccacactcactcatgcaaggttcaagaaccttgtagttaaaaagttggtcaggagtctcgatactgacctgccaggtaaggaatacctgacccatgcccctcctaagaattggatggcgtggtttggtccccacgcaggacatgaggatattttgttgctccattcatactttcaggatataaccaactatttcaggatctgtccagcatagttgtcttcgaaggggatcaaatacttgtcttccctcttcatcttatatgcccagatgggctagccgcaaccttctctttttgaaatcagttggtattttgatctgaaataccttctctagaaccaatgggggtttcggaaaagaatcccaagccaaagatgcttagaaattaggatccagctctatctgcgcaagtcttccgctgccttctccttactcccctttggccaactagcccatggtgggcaacttggtagggtatcctcctcctgccaccagaagtcaagcaaagaccgctagacatctagtcggacatctcccccggctagggcagagaaaactatggaggtggttcataactacatgaagaggtgtcttacccaggtgggggaataactttaagactcggacaacaagtctgtcgaggtcctagattttggacttttgaaggagctttcctcagcaagtgatgcctttctactaggagcatttttatataccgtactgccttatctaacttgaatttcttcattgtttcaagtgactatgaagtttgggcatacttatgctcgcctcaaagggtttggcgtcgccaccaagaagaaaattgaagacttggagactcagcttagtgagatgaacaaatatttgtttgctgccaacaatcaggtcaaagaacttaagcagcatattgaagacacgccatctaccacaaagttggagaaggacttggaagagtgaaagaggcaggtgagggagctgcaggaccaaagagaaagcttaagcaggctactaactgcctggaatagtgagatttctgaactcaaggaggaggtggaagctgggaagacaaaggtgacagaatcagagcacacccgggctatagagacctagccattgaaaccttctacgagttctggaagcaaaatcacaaggatgactatggatacatggaccatgaactgcttgaatccttgatagcttaaggcaaggaattggaaggatctaaaccccctaaggagaatacttccttccaagatactgccacttttgaccagcgtactaaagatgctgccacactattgatcaaatcgactctcctaccgggccagcctctgaacctgctgttaaggactaggctggtgaaaatttgaacacacctattccttttgatatttcagagctttgaagctcttattttgtttttcttttattttctgcacgaccttaaatagctagtcaggcgactttttttttttgttaagacatatggttggtcgagtagcctttaatcccaccaattcttattattaatggagttgaacatttttatatatgcatgaatattaaattatgaacatttattattgaataatttatatacaaatatcagaaaatttcttattcatatgtgaggttgtgtcttgtagttgtacagagaactaggaccacttagctatgaataaaacagtcagcaacatattaaagtatgggaatctttaatcaatggttgctactatggttcactaatgtctgttcttcagtgcaagtaatcttggttcagattacagatgtagtatgacgtcaaagtgaaggtcctgcatatagtaaagattatatatgacaaggtccaatatgattaaagctctctttatctaacatgtcgtttactataaaaacttaattcatatcataacaatgatcaatactagatcagcctaaattctgattaatcatgaagtcttgctcatgctaatagtttctttgattcatttgttaaagtttctcagagaagatgattcttacaaattatgttttgggaagttaataatgtagatggtgttgggttttgtgccctaaataaaacccatttcaatataatcagatttactattagtaaagatcagaaatcattttatgttgcatggttcacatgatttatttcatgattataaattctgttaagtccagaacatatgtatttgttaacgattatagtgttgtca

SEQ ID NO: 302036 - DNA, 1447 bp, Cannabis indica
atatatatatatatatatatatctttctccttccttttgcaatgtaaccaattcactcaacttttttgtcattctttcctgaaaatcttggtgtgatagtgactatattcaatctatatatatatatatatcaccacttatatatataaataatcattagaaaatgctattattagtattatttcttttggggtcgataaatctagtatttatcaacctaaataattgatctaacaaattattatataatatatatagtttcatatatatccgaccagttaccttaaatatgtatatatatgctcattaattaccttaaatattatagattaataattagctagattttaataatgattattacataaatgttcaaaccacgtactaattataattgttttagtcgttgtatatttagcgttagttaattattaggttaatttgaattaattttgtgttgtaataacctagctaatttgtgttggctaaagtgaaattattaattaattaataatgcacatatttatatatattatatacgtaagtacacatgttcatcatatagtaactaaacacgtgttgcatgtaaaatataagaatatattttctttgagcattgctattgggcactagtggtgcctagcactttctaaatgtgtcgacttgcaattggttagcgatactctataaaaattattatattaaactatatgggacccgatacttaattgcaccaatagcgatattaacacgtaggagggtgctaggcaccagtggtgccctttagtatttctcattttctttttatttcaattgtgtctttacaaaaagttcaaagaatagtagtaaattttcatataaaatagttgtacaaactaaaacaaattcaaaacatacaaaaagattttaaaagttttttgtcaaaataataataataaattttatatcaaaagaggtaataattcattattattattgattttccccacaattaaggtaaagtgtaaaccgcatttgttggtagctagtggtaataatttacatatattatttgatgaaaaaagtgcttaattaaattcataaattaggatacatttatctaagacaattaatcaattaaatgttggacattacagcataatttcttcctaaaagtaggaaaaaataaattaagaacattctttctcatcaagctatatatatatagcaaatatatatatatatggtcaaagaaagcatgtattgggttattgaaagtggagaagcaacaatcaatgcatgtgccctaaaagcacaaccacatatgttcttggtcggtgtctcatcttctctaaaactttattcatcatatatataaatatctatacatatatatatatttgggtgactattcaatggttacatttttattgtaaccatatggttacatttttctttaacctgtaat

SEQ ID NO: 302037 - DNA, 2239 bp, Cannabis indica
taaaatatgaaattcgcacttaatacagatcagatacactgtgagcaaaataatacgaattaaattgaatgaacacccctaggctagggtttcgcagtgtttcactcaatttccttcaaaccagagtaaataaaagtgtttcaacatcgattgggatatcaagtgtattcatccagctcccaggtagctcatgccttgagcaaccaacacctaggtagacacctagtgaacacctgggctcatacgctttatttctcgacacatatgtgcaaggcaatgataaaatccaattctaacttaagatgggattgcggatactcaaaataccgcctgaagctatgtacccacctagtgcccaatgggtgcccaggtgagcagtcacttggagcatgtggtcccgtgcatcgattgtttcactagcatcaatgacaacctagagaagctatggcaagtgaatcaacatcaggccctaagtgatcccagtgcatcacttggtgcatgcagagcgtttctccactagaacaggtgaacatcttcggttgatccttagaattgtcaccaaaattagccaattcattatcttatgagaattggagaggtctggcattgaatcaacctcagaatgcaacatccatcacctggtgtctaggttgtgctggcatccatcaccaatcgagtgttcaatatccttattctctaaaagatgatacacaacaaatatatttaaattagtgatgcaccaatatcacattggccatctaaagtatgccaaaactagtattttggatgacccctcgtccaggtgagcaaaaccacttaccttatcgattgctctagattgctcaggaggcaattgtacaccttgctgtgttttgggcatatatcactataaaaacttctgattgacactattttggttgcattgaaaagtgctttcaattctctttctattgatgtttcacgatgaaattcgaattcgaatttcttctaatcgaaattcaggttgcaatgggagggtactaatttggatattagagcttcaaatctcgatcaatggacctcatttgatctcaaaatcatccatcataattccaactgagatgagtgaatcttaaccattattaggagacaagatcaatagacgagatcaagtctcaaagatctacaattaagactaaaatactacatttagtttcaagtgtccgaatttgcctagaaggaatactgctagaatatactttttatttgatttatttattattattttaattgtaaatatgtaatcacccattcttataaataggaggtttattcgattcattttgcacatttttagttttttgaaaaacaaaggactttttttgacttcacaccaaatgctttaagtcaacaaatcgtaagtatttttgcaatcatgacttagacatagtgttctaagtgttgaacaaccaattactattaaatatcattaatcatttatttgttcactctatttaacaactatttcttatgagacgatattgtcattgacacttttcagatcataaatgtttacaaatgtttaccagtttttcaaaaattaaattaaaagaagattaagctaaagaaagtgtatttaataattaaatgagatgagacttttatatagttgggtcgttagtaagttttaagccacgagttaatattattgagctctttagaggtgtgccaccgttgacaacagctaggctacgctgtcgatcgtgaatagtggatgttagagtagtgggcattggacaaaaagtagtttgcttttttgttgtttgccttttttaggtttggcaaataggataaatccgtgatctctcaggattcggtgtaagagttgtgtcacgtaggattgctctcggacccccgcctattcccggatgtccctttgactactctcactggatgacttctgagggcatccaattatattcctttgagtatttatttatttatttgaacaagtatcatttttctggatcctagaggtctgactttgtgatgatagagtgatagttaaaattgaagttatagtctaattgtgctcataggttgggttactggcttgcttaggccgtcttaattaatttgaaatacttgaatgagcatacattatctatccgaaaacatgaacaacaataagtattctcaatttgaggagtgctaattacaactttttagtcaacctttatgttcgaaatcacatgccgga

SEQ ID NO: 302038 - DNA, 1434 bp, Cannabis indica
ggagaatctgtacgattttttgttgcaatttaggctgcagcgctagttgcaatatgggtttctatgtagaattccgtaaaaatgcaaaaaaaaaaaaaaaaaaaactgtttagaagtgtaaaatgaaaagccctttattttttaatatcacattgctcttgtacactagcctcatgccattaccactgccacatacttaatcaacataactccttctatgttactcaataaaaagacttcatttgaggtatttcaccaccaacccccatcatatgaccatttaaaggtctttggctgccttgcttatgcatccacttctgacagaacacgacacaagttttctccgagagttaaggattgtgtttttttttggctatccattaggggtaaaggtctacaccctcttagatttagaatcaaattctattttcattcaagagatgtcatatttcatgaggatatattccctttccctaaaaacctctgtcaggatgaaaatagatactttttttccaactacgatacttccaactatgacacctatagtcccatctacaataactgtagatccatatgccattttccccaaaacacaaactcctccctctacaacacaccctgtgtatacagaccacaaaggcaagtagaaaaatttccaaaccagcatacttcaatgactaatccttttctgtttccaacagtgcaacctctacatctcatcccatccaaaattacctttgttgcaaaaacattttcaaaattcttgatacttatgcccctgttgtaaaattcaacactatcaaaattcttcttgcacttgcaccaatacacaaatgggaattacaccaaatgggcataaacaatgcattttttcacgacgatttgcatgaaacatgaaacttcccaaaggaaacaaatatgccactaaactctctcccaaacgtgtttccaaactccaaaagagcctatatggcctaaaacaagcatctatgcaatgttatgccaagcttagctccacactcatatcctgtggtttcaaacaatcaacatcagatcattctctaatcattagatccaacaacaacacttttatggcaattttcatatatgtggaggacatagtaattgctagcaacaatgcagctaccacttaagctttcaaaataacacttgacaaacaatttatactcaaagatcttagccttctaaaactttttcttgggattaaaattgctcgatcatcaaaaaggatttatatttcccaaaaaccatgactctgtaattacttacagatataaagtatcttggagttaaaatatcctcatcacccatggaacttaacttaaagttaagttccaatgaatgcgtacttattctttctaatcctaaaacttatagaagtgtcattggcaagttgttgttggaaattatttt

SEQ ID NO: 302039 - DNA, 2149 bp, Cannabis indica
gtctaattttaccaataaaagcaccaagtcaaagtttcgggaggcacgatttgttacatggacaatcgccacgtttactaaaattgaacaaaattagacaaaaatctttgaatccaataatttcttgggaaaattttaacggcataataaatttggggagaatgatttgatatatatcaaaaaccataattactcttcaatctacatttcctttttattttccataagaataattacctaaatgaattatcaatccttggccttaaaatagatgaaggactactttgaggagattccaaacttgattctgaagctgtaaaatgatcttgaataatctttatcttcccaagaccatcgtccattaagcttgatttcactagcctatataattattaaacatgaacaccaactgtttgtgttatgatcccaaagaacatttcttgaaaattgaagtttttatcataaaaataccaagaaaatatatttaataaaactaaaaaaaacacaaacaaaaacccagaaaacattgcacacaacaacataaaaaaatatatatattttattagaacttcaagaaccaaactttaactgaaaccaattgcaaaaaataaaaatttaaccataaactcaaaagggttttcttcaaaatcaaaactatgcacaaaaaaacagatcaaactgtaaaattccaagaaatgaaacttagttcaaaataattacataaagacaatcaataaagctgatcattttgtatgcaaacaactcagaaaaaatcatagaaatctattaaagtgaaaaagaaaagaaattaagacaaaaatgaaaagggaagatgtgatcgtacctgtagaaagagactttgtttttgcagaagataattttaaacaaagggtccttttgatcatggaaaaggctttgactgttcggtataatatagttgtgattaatatgaaaagacctttatgcccccactgtgtaaaaggtacatggaaagtgctcttagtgttagttaggggcatatttgtgatttcaagttataaaatttaataaagaaagtaaaaatgaaaactttatccagagtaattaaagtaaaaaacttatattttattttaatagcttgtgaaataaaaatagaggattgtaataaaaaattagtagtgtttaatattttttttatgcagtgttttatgattagttagtgatattttttaaaaattattttttaaaattatataaaatttaatattcaattagacaccgaagaagatattaagtatcaatagtgtcttttaacaattttcataaaaaaatatttaagatgatgatgatgatgtgttgaggtaatttagcttagtctataagaaacaaagatagttggttagaagttagaactaatacttaataattatgataattattacttaactaaataaatggagtaaatattaaatcattaaagatggtaaatgtattcattaaacgtgtaacaatatgacacttagttacaatggcaacatttttttataataattaaaaaaaaagtcaagtcacaccaattaatgtcttttataaaaagttcatcatgtcaatgatctttttggaatcttatacacacaacacaaatacttagatataattatttatgaaaaatttgattacttgtcatgaacattatctaattaattatcatcccatatcatatttatattgggtacacttggacacccacaagctatctttttcaatattaagaaaataaaataaaaggatatatttcactttaatgaataatataactaaaaaaagaaggtgaataatctattggaattttgagctaataaacaaatattaggtctgtttaaaaaaaaaaagccaattagaatttttaccttcgaacttaaatttgtactaaatcataactcctgaatttttaaggtcattaaaaatgccccatgaactattgaaattattgaatttaaggacttttattcaattttagtaaaaaaagtctaacatagatgaaagtttaatggacataatttagtacatgtcaaagtttgaggggcgtgatttgatagataccaaagtctagggagcatgatttagtacataaataatcactgaaatagtaaaattaaatgaaattaga

SEQ ID NO: 302040 - DNA, 1424 bp, Cannabis indica
taaaaaattatcactaaatataattatttttgtaatgaaaaacgagcttggctaactactagcccgaccacataaccaagtgccacgtattttattctattctaaaatttaatacatgaaatttaatattaaattgaattaataatgataccagtagtcaaataatggtatataccttaaatttataaaaattaagtattataataaataaattttatttaattgaatgtgaatttacaatgtagttattggtttattaacaaatttcatgaaatttaattgtcatgtttgtaatgtccatgcaaaattttaacaatctagaacaagtagctatttttttttcttaattattattttataaattctaataaatttaatgtactacaaatgccaaaaaccatataattttttttgaaatccccaaaaccctaatttagaatcgttactatgcattatttttattcataaaagaaaaataaaaattctgggaaatttacaccattataaattattattatcattttgaaaaaaaagtgacgtaaagctatagatcaggcacaagagctacttcagtaccactttcaagaatttttctatttgagttttgaaacattactaacgtcttagaataatttgattctctccaactcagactctccccttaatctacgccaagtttgatttttgtgactatatatatatatatatatttatatatacgttccttgagagggacatcaaaagaatattgacattgaaatatatgttatgatacctataacacataatacatagtttttatgatgctaatcctttgcctcttcaaacagtcaagggtttacatgactcatgactgtgctctttaaagaattaagaagacaatggagtaggaatatattcaagattctcatgctatttgtttatttatttatttatccttttgcttacttagtataagatttaattaacaaaatcaaaggacggctttaaaagcagttggtaatagttagtattattattagtacttgactaatgacagagttgctcagttaccaacagagatgtttctcgtccaaattatattttaagatcgtttttgtggtgtagttcctcctaatgaaaaagtttccgcgctcgtcatttctaggaagttactcactcgcaattactagtcccggaaggagtcttgtggaataataatcgaatccagaagggagttctcgaatgactatcatgtccactccgggtccatgttctcaagattgctagttgtcactcttgaaatggtagatcctgatagtcgactccagcagactatatcctattcggatgcgtcttcagttggtgtccttggtccgcgagtctgagagctcgtttatgctcccggaggctctgtgtaacgccctaatgctaaggcacgctac

SEQ ID NO: 302041 - DNA, 3622 bp, Cannabis indica
gcatgtgcagcggagagagagaaattagcatggactttgatgagcatgagaatggaatgaggtagttgttatgcatttatatacaattaatttaagctttaacgtactacacatgggatgtacagtcaagtgtacaaaaataaagagtatctcttttcttttctcttgttcttctacatatgaaatgaaaaggtcatactacctacctcccacaccaggagagaaaagaggctcatacatatgtgctgcattgaagtagaaaacatttattcattaaacggaccaccacgccccacctcatacatcctcataacaacccttattttttttgtttttttttttttttgaattggattttttcctccttttttaatttcaaaatttaaaactttatcactatttcgtctcataattaaataaaagtaccccacatgcgggctacatgtatagcttttggcagagggcatagaatagaatatagatgagatgatccaataacatataaacaaaaaggtgattgagatttttcaaattctctttttaacctttggaagagtcagtcaatcagcccatcccttcctcaagtctcccccacccacatggccacatactctctaatcatattcatttcatgactcatgggcccttaagaagattgagacaatcaagcaagtcactattcctcaatctttaagatgactcaattcttcattccaagtcctaactctaaagtcatcgtattgtggttttgttgtttgaaatttgcaagcacattttagtcatataattaatgttgataaacctattcagaattcttttgacaattattcttataactatgctcttcaattaacataaacaggaattatgacttatgatggccttgaaaattgcattcgcaacaatcaaacatatgaaaatgaaactgactcttttgaggatgatggtgatgatgacatgagttgttcttccacaaaagatgcttttggattattccattccaaatgggagatgtcatcagagaggcccaatcatatctctctcaaagagaagaatcctgattattccattaatttgtcagaggtggatgccatgaaagaaaaatttgcaaatctcttgttgggtgaagacgttacaggaggctgcaagggcctcacctctgctttagctttgtctaatgctattacaaatctagcaggtgttccattgattaaaacacaaatatcttatcttttaaattcatttatacattttacatattgaaaaaagggaagagagagaacaagtagtcagtgatattatataatagtacaataccatctgaaataagtaaaattatgtgtgcagctagagtgtttggagagttgtggaaattagaacctctaacagatgaaaggaagagcatgtggagaagggaaatggactggttgctatctcctaccaaatatatggttgagttagttccagctaaacaaaatggtgccaacggtcggatgctagaggtattattattattagtttgaatatttggaatatccagttgaattttccattcaaaagagtattttattttatattctgtattttgttggcgcagataatgaccccaaaagctcgtgcagacatccacatgaatcttcctgcacttcagaagttagactccatgcttattgtaggtgatccttcacttgcatgatatttttgaacattggtattcattgttcaatcaaagctgttttagcttaacatattagttttgtatcatacaggaggctcttgattcaatggtgagtactgagttctggtatgccgaatgtggtagcagggcagaaggaaggagcaaaagtgcaccaaagggcagcaaacgatggtggctccccacaccccaagtgccagactctggcctgtctgattcagcaaggaacaagttaattaagcagggaggggtggtgcatcaagtattcaaagcagcaaaattaatcaatcaaagtgttttgtttgaaatgcctgttcccgacattataggggatgcacttcccaaggtaaaccaaaacttcctaacaacattgtgaataagaaaagttaaacaaacaaagttgagtgactaaatcataggcggctgtgtatacttgttgcagtcaggaaaagcaagcttaaacgaagatctgtacaagctgttgacagcagaatcaaagtcagcagaggaaatgctcaagtccctcaatttgaaatccgaacacaatgcccttgaggtgattaacaggttggaggctgctgtgttttcatggaatgagagaattcgggaacaaggaagtgttgattcgcctctacgagcatcatggtcgaccttcataaaggatcccatgtctgaggttgataggatggaattactattggaccaagcagaattccttatacagcagctcaaggccaaatatccgaacctaccccaaacatttcttgatgttacaaaaatcaagtatggcaaggtgagttccatgcttatatcctatagatcaagcatttaagaagctgtacacatacatgcagattagtttgaatatggtttttgattgaagagctgtgtgtgtaatgtaggatattgggcattcaatcctagaagcatattcccgagttcttggaaacttggcattcagcatactttgtagaattggagatgttatgagggaagatgctgcaagcaatcctaatgcatcaacaagttgctttgcagggatattactcaatgtcactaacaactactcatcaataagatttgatggtggtgtaaaatgcagtccacattccaattcttcttcatcaacagctactagtgctactagtaacagtagtagaagtagtagcagtagcatgagtattagcagtggtacctgtgaatcagaatttaactcctactgtgatacaaaaccaagcccatctgtgagctccacaccaagtcgacgtcgagtttggtgcattggtagagaagcttgtgtcagtgtgtcccctcctaaactctccttgattacttggtctgggtttgccagttacaatatttatattttatatatataatatagttatttatatatgttgattatgtgaaaatgtaaataaagtattttgggccacgtgcttgattcatgcacgtctttttctcagaattggcacatccaaattccaattggaacaacgaaatatagcctttgataattgatatgcaatgccacatcattgtgagacaaaattatgttaaattgttctaataggccataacagcgaaaaaagtcttcttggtaaggttgttatgttattttgcgatctactcggtcttggtgagaggttctatctaatgttaaatttatgtgtaaatattattttgaaatttatgttttgtaaaaattattagagaaaattacgttccacaacgtaattattaaattatttgtataattactgctgcaaattttattcatgaaatgtggctaatagttttgaaacgtgtaccgatattaaattcccatgctcattactattcaatcaagtttatatatttttacatgttctcaattttttttaagggttatactattagccattcactttaattttttttaggcac

SEQ ID NO: 302042 - DNA, 2424 bp, Cannabis indica
ttaattattgggtttatttatttgttaacgtttaacgttaacagtctgttaagttaatcgtgtaaggcttaataaaaaaagaatcgttaaaccaagaatcgttaaaccaagaattgccgttagatagacacttttaatatataaagatatatataattaattcttcttatcacggtcctaaccaaatccaaaaacggctaaaaaaagagtataagttttgggtatggtacgataaaaaaaatgattgttattaggtattagtagtatctaacattctttataggtatcgtgttatgattagttagagatatttcttaaaagttattatcttaagttgtatgagatccgatacttaattacaccaataacagtataatatcgatggatgtgccagatactaatggtattttttaatatctctcaacaaaaaaaaaaaactagagtttagaatcatgaaaaatttaagtttaaagattgcacaatatttatataaagataacaacacaaaaacacaaatatatagtataaaataaaaattaaaaccataaatataaaacttttaattagtaattcatatatattattctttaaaaaaatattttaaaatttcataaatattctttaaataaaaattaaactatttcaaaaatataaagtactaatttcgtcataggcctatatcattggggggatataaaatataaataattttcaaaaaaaaaaaaaactatagctaaagttacaattagggcttctcttacaatgtctacactggtgccatggtcgggagggattgttcgaggaattcatgcaaatcaacaagaacaagaaagaaggttggcctacctctttagatcttcctaaaaaagctaaatccatggctgaaattcttggagtggaggccatggattttctgttagaataggaaggtgatgaggatgggcgaggagagaaatctaatgaacttactgaattaggcgatggaaatacagtgataagtgcgagaatagcagagacggtcactaatgattcgattattgagaaggagattcaagaatggaattcaaagaatggtgatatgaaatgcttcactctagaggaatcgattgagagattgaaacgaaaagaagatattattaggattttatgctctaaataagatcaattttaatataatcttatttactatcaatagaatattagaaattatttaagtttgcatatagtttttatgattatggtttttataataccctaacattaggaaatcgaattagcaaccttaactagtttaattatgtattaatgtggaattatattattatataatttaatatatggaattatattaataaattgtattttaagaccccgttggtgtaccagggacattttcataattctgaccaaagaggggtaaaatcgtaatttatatgatatatcgtgcttatggactatattattatatagtatgtttatttagtctatttgcgggtgttttctgacaagtcggggcggtatagtcacaatcgggtgttttggaccgaaccggattccgggctcgaaatatattttcgggattttatgttgacatttatttgataaatgaataatttgaaaattattatgtgtgtgatttatgataattttgcccttgatatgtgtatgtgtggttttattggccatagaggcattttggtcatttgaccatttaaacatatttgcaacaaaatgaatttttaaaaattgaggagctaatttttctggattccgctagcctagccgaacctctttctcccttttctcatctttattttcaaaatctcaaccaattgtaattaaagcttgaattggtgaagaattgtgtggaattttcatagttggagcttgtgtactctaattcctcttttataatattaatttttgatattagaaatgattgctttagttgtgtttgatgttcttgcttgatgatgttgcatgtggttgagaaaagcatgttttttagtgatttttgtgttgtttgagctagtagtagggttgagaattgtatttaatttttgattttatactctgatttttctgggcttttcttgttgatttaaaatctttgtgttcaagcttgtgtaatggaagaattatgttggttttggttcaaagcttgttgcttgtagtgattcttgaaaagcttggtcaaattacatatattggtgttatttagagcttgaatttatgctttgactcactgttattgttggctttagtttgtgagttatgaatttggttgtatgcatgttttggttgggatttggtatgtaattggggtcatgttcgagttggttgaaaattggtattttttagaatttttaacccaggtactgttgcatgggttttgcatgtcgcggctgttggaaattattttac

SEQ ID NO: 302043 - DNA, 5281 bp, Cannabis indica
atatacagtgtagttcgaactgcagttattaaatttaaaaccataaaactgtaatcacaccctataattacgacaaaaaatacaaattacaaatcacactataaaaaaatttcaaatcatattattttttttatgaaatatgataccctataaacaatttatacaatatgagcagtttgattaatgccaaaatatagcacccgtatcaacataataaatatgtacttcttttaaaacaaatttttttcttttaagagagtttttaagtctagttttttatataattatgtattttataattaattaaaattatatgtaatttttttaaaattataaacaatttacgataattaaaatattttattatgtcaaaaaaaatatttttttttagttttgaaacaattggggtataatggacaaaaatttgttctgccatataattgtttcaactttcaaacacgtgtgtatatattaatataataaatagttaatgtattgcagtatattattacttacatttttcagtcttatcttgtctttataaatcatatatatttatgtttttattctctgtttgacatagtccctctacgtgtacaaattactagttaaaaaagaaataagtactttaatttcgatcaatttaatcctttttcttaattcttattatttctaatattaaaaaaaaaaaaaaatcaatttcttcaactctcttatggcactagaaaataatctaaaaatatattaatgtatttataattttatacttcacataaaatatttcctttttgatttatatatttttttctcattttttctacattctcatatatattaaaaatatatttataaataaaatatattttgaatattaaaattagaatataaaataagaataagagtaaattttattttttatataataattaaatatataaattgtttattacatatatgaaataattattctatttaatttaaagaaaattattaatcaagaaaatacatgcaagctaattaacattataaaaaataatatttttcaatttttcaaaaattaaaacttatctcatcatcattatggtaaagtaacaaaaataacgtgataaaacattaacgtgatgattatcttcattaatttataaaaatattagaagcaaagaaaaagtcactgattaattagtatatatatacatgatgacttttacagcacacacactataatatatacacaagaatttattattctctatatatgattaaaaccacaactagctagacatgatacattatgatgacaattataaatattattattattattatactaattaacacaaataatatttactaattaataataataataataataattaagcttacatagatctgcgtttttccatgaagctgacaggttgagaagtgaagccagaagcaataaactcaatggtttctccaagaacaggccaacccttatttcctttaggaacttttattattattattaatatgattatgatgaagaagtagtacttgcttattattattattattataatattattataccaaaccaacacaaccaaacgacgtcgttgcaataattagtcctattattattgaccaccaagctgatgaacaagtagtgctactacaattcctaataataataataataaccttccataagtattctaattcctcacccatcttaataattaaatcaactacttatatataatgacctttcttttttctttcttcacttcaaaccctaatatataaccaagaacttgagaagaagaaactcagagaaataatgagagcaagtgatgatatgtataggagttttctcactccttcatgcaaagctaagctaggaataggcatatttatgaatatataaagagattattaagagagaaattagctatagagagaagaagagatgggatacatatatatattgggatgaggtgaagggggaattgaatgtgtagagagaagtggcaaatgaatgtgttggtggctcataaaaagaaaaaggaaatatggtaattaattaattaataaaataataaataaatagaaaaaataaatgttgaatatgaaagagaaaagagaaaagagaaaagagagagattgaggagatattgtaggtatagctagctagctagctagggctttggtagtatcatttaatgagttggccatgtttgggtgtactaataccacacgcttgcttactttgtctccactccattttggataataactcaaaaccaaaatatacttatattcattcatttccaatctctccctctctctctcactctctcactcttacctctttacttagagcatctctaatggtagcatctttacagatgttaaaattttacacattatttaaaaatataatattttattttatttctcttctatattatttttggcactcttacttttaaaattacttcaatatatagcactcttaaaaatactataattatgatcttatacattattatttaatatataatttgatttttagctataataaatttttagattcacttttttattaaaaaaataaatagcatcaatgacacaacataacattcatgcaaatttctagaatgatctttttctctccaatagtatagcatcttaatattttgtcacataatatgtccacctcaccaagcatttttcaaaaattttaccattagagatgctcttaaaacactcacatttgacgctttaatttttttaaaaaaatatttaaagaactaaattaaaaacatgctacatcatgttttatactcttctattttaaagttttcttttaaaaatttactattcaaactctacattatataatactattcatttctttaaatatattttattaattgtttggaactttaatttagaatatgaataaatattaatattatatgtttgaaatgaataaaatatattaaaatttttgaaaaagtaaaattttagtgatttattttaaagaaaataatgtatagtataatgtaaaagtttgaagtaaaatagaaaaaataaatttttagtgatatattttgaaagatagagtaaaaaagttgatgagagcgctttaagttaattattcaattctattttttttcttgaaaatgtaaaagatgagttttaatgagtacaataaatatcaccatatgaaaaaaaagagaaatactaagaggtattttaataaggtgttaagtaccacaagagataatatattattattggtgcattttagtattgggtttaaaaaaaaaataaaaaaaattgctaattaattaattataagacgtcgccacatcggtatgatgttgggcatcttaatgtgtcaaataataatactccaaaaaataatttattgggaaaatcgggtatagtttttctacataaaataatgctattgaaatttctaaaaaaaataggaattattttataaatacacaaaaataacaaaaaaaaattataaaaatatagttgtataaaattttaaatatttttacgattttatttacagaaaatacagtcttttttatgcagggtcggtcctgagaatgtatgggcttaaggcgaattagaatttggagccctcagaaatatatataaaaaatatttttttttaaaaaaaagtattattagatttgaaccccatgacattgtataatattttacacacctcaattaactaagctatgaatatttagatcaacaatgccatagccaattcaggctttcaaaatattaatcaaatctaaaaattgtctgaatttgaatttgaattttgtcacaaaattagtcattatattcggaagattattagtttttcaatcttcaacaatttattcccacacaaaatgataaaagacatttatatgttcttgcatgaacgatcgatttggttatttgctaaatgttgcattgtgattatcacaatacactttgatgagtgcttttggtctaaaacccaaatcttcaagtaaacttttatagtcaaatagcttactttcacaacctctataattgccatatatatatataaatattggttgcaaattagtgccttttatcagaattatgcatatatatattgatagctccaactgtattagcatacaaacttttgacatgtattctcattcttgatgagtccataaagacaatttaacattgagctgttcatttttaccagaacgtcgtagtaatttttttaaatattgactttgtacttaacaaaacttgcctttctttcatttttgatctaactaactaaacccttctgttattaataatatcatgtttgactagctagatggatttgtgcaggttcgggtggccagagttgggtttaggcccactcatggatttacaaaaattccacttacattcaaaatttcacttaataaataatactcaaactagattatttatatatatagggataagattttgtcatgtattttcacggaatgtattctgtggtatattagatgggtcgaggtacgttactattttttaaccttaattacccctagattaatctcaaccctcagatcaaatgactccctcatctaacggttgccgtatatcacggaatacattccgtgaaagtacaatcacgagacaaaatcatgtccctatatatattcatgacattagtgtgttaaaatgagaactcgagacctgctaaaatagtaatcgggtgacacccaaaacttttgtatcttgagtttcagacttctaaatttttcgggtctgggtcgagggggtccattggataagttaagtttgtgtccaaatctcaaaccctaaccatgaacattgtcttgttaaataaatataaaaatgtataattcacattggtagtgcaaaaaaaaaagtatgtatttaatagagatccaaaatataattgaaataatggatccttttaaaataattatttgatgaaactaaagtatttaactttaacataataatttagataaacgattaataaatcaatgtccaacaacctaataaattataaggactaagcactataaaagataaaatggaaaatcgtcccaccaaactaattgtttatttattcaaaaattgtgtacatctaggtggcatttggttagaaaaagtgaaaacattcttgtgaatgagaataggaataagaatagaaattaaatgaaataaaatttaaaatgcagaaacccttattgcaactagcggtgcaacc

SEQ ID NO: 302044 - DNA, 3288 bp, Cannabis indica
gagagagagagagagaaataagagatgttcattttgggtgtttagctagtattattagtagaaggaaagaaattaaaacatatataatccaagtttgttgggtttcttattatatatgatccatggctttcgcagttgagagtaataacattatgagatgtagtgaagagaacatggtatttacagtggagtcgcagaaggctgtaccagctccattcctgacgaagacataccaacttgttgatgatcctgtcacagacgacattgtgtcttggggtgatgatcaaaccacttttgtcgtttggaggccacctgagtttgctagagaccttcttcctaactacttcaagcacaacaatttttcaagctttgtcagacagctcaatacctatgtaagaatactcttataacttattattcattacttacattattacactaaaacataagtatatacatctttctagctagttaataaagctttattattcttattactttccgagatattttttcttcagttaactttgattagtgttgactaaataagttgacttctattacttactattgactcctaataacaatcttttaagaactggattttcatttctgttttacaacaaatcttgaagaggatgaaatatttcactttctatacacttctttttcctttagttaattaatggttgtttattgctgaaagtagatcgatcagtaactcgaagtactattaattataaattcaaaataaagtatataaaggaatatgcatattattgtgtatcatgtaataattaggtacgcaacataaatttctttttttttttaaaaaaggaaatttaaaaatgtgaatatttgcaattgttttcgttcatggagttataatggtacgcctgaaataatgataatcattatttaatgaacagagtcgaataatattaacttttcgatcttcacgcaagattctagatctcatttataagttttgtctttatgctgtttaacggcaatttcatgactattttaattcattgtatagtcatacgagatcaactccttctacacattacatatttgtgttttaatttcttccccactaaagaatagaatccatggtgatcattatttttttaactaaaaaaaaaagaagttatatatatatcattatatctccatcctcgctcacatttctttatttggagatttttcattaataatcagtctcattcatgacaatatgtacaagaatttgtacagatatatatactatataaatatatatttattatatgaacatggaccttttcatttgtctttcactagaagttagcattattgagattaattttggggtccattagcttgatcataaaagtgtaacccaaaaagtaaagttcccctgcaacaattcatggtgctttcttttttcattttctcctctttcaaatcatttctttgcataaaccctaaaaccatcatgattggcatttactattattaaagttagaacttttttctctattaaacatatatttatttaacatagataagtgaggaggtccaaaacccaataagttggaatcttaataattttaatgaatatattaaatcattaaaaaatataattaattaataattattgataccatatatagacatatatatttcttttttttaagccctatttctatccatacaaattattttaacaaaaattcattgttccttcaatcaatttaatgataacattaatttacacaatgcagggatttaagaagattgtagcagatagatgggagtttgcaaacgagtactttaaaaaaggagcaaaacacttattatcagaaatccatagaagaaaagcttcccaacaacaacaacaacaatattaccaaaccatcaataatcaccatcttcatcttggcgatcaacaacaacaacaacagcgtacccattttccccacttaacattccaacaacctgattatcacgacaccacttttggttggagcaatattagtcctactactattactactactaataaattttcagaaatcccttcaccgttactagaatctgatcatcataataataatccaaaaccttacgttgatgatcataatattctaacggttctaacccaagataaccaaaggcttcggagaaaaaacttcatgctcttgtctgagctcactcacatgaagaccctttacaatgacattatctacttcatccaaaaccatgtggaaccagttgtgcccaatgcagtgggtacttctggttcaggtattctgaagattatggagctgggttcttcgtctctttctcctgttcgaataaataatcatggttttgatggtaaaggcaagtgtagtggtagcatggattttggtaaaagctgtggggcattaactactcatgaggagaaaaatgggagtagtggagttaagctttttggggtttctttattaagtggaagaaagagagtgcaccctgaaacgacgacggatttatccatttaaggagatatatgtaattgactagtctaattcattgtatcaaatcactactcatcgctagcttagctagctactacttgatcatatgccaatatatattataacattttcatcattttatatgttgaaagaaagatcaagattaatcgttagcatatatgaattttaaatggtaattaaatcttcattgtttgttgatgattttgaaatacctgtgacattcatattttagttatttccatgtaattataaattaataatgatattaaaataatgttgttacaattgaacaatttcttagaatattttgtataaaattaattaattgattttatatataaaaaaatattatatatttattatccctaaaaaaaatccaatataattgtacatgaattttttttctagatataaaagtgctatcaagggagcacattgcgcccacatttcacctcaagtcgaaggagcacattgccccatttcctactaatggagcacattgcacctcctgccaaaggagtacattgcacttccaaccgaataagcacattgcaccacctcctaccagtggagcacattgcacctccaaccgaaggagcaaattgcacgacctcctaccagaggagcacattgcgcgtactaagctcactgctccatcagctactaaggcataaagagctcctcagctaccaaattacctcaaggacctaattggcactactacaaaaatatttttttctgacgtttttaaacattcgtttaa

SEQ ID NO: 302045 - DNA, 2737 bp, Cannabis indica
caaatcgccaccctttaactgtgattgtaattcatttacatagttcagatcatgacaaattcatagaaattatttaatgtgctgttatttgcaactggtatttgttatatgtttattttaaataaataagagtgggttgggttagaatatcctattgttgacttactacttttttactcttaccttctgaaggacttctgcatttagcacaccagcattcacgtctgaagatgtttatttggagttgtttaatctgcaagacgaaggtactagtactactgctaattctttggttaattaagtgtgcagctttacatgtgcgtgccattgttttgtatgtgatattctcatttatacatgcttggtcttttgtgcaggttctcagtgttagtaggattccaaagccaaagcctaagatccagaaacctgctaagaacgaaacagacaacaacgaggaggaagctaagtcttcaaacacaacatctgaagagaaacctgccggaagtaacgaatcagcatcagaatcagaaccagaacaagagggatctgaaaatgaaaatgttgacacggagcctaagtcgcacgatgagttatgatctgactgaactgaccttttttacgttttgagttgagcatctgcctttcgaaccagaagaggtagattgacaatatggtagagattgtggaggagatgatctctctgcatggtaggtgagtaatagagagtggagaatacctttgtttcaaagggtgtttcttatcaatggttttccgggaagtaagtaaaaaagaatagttgctataaggactttttatccgtgttagttataattctatatatacatagttaagcttaagaggcaacatgcagctatttgccattttgtctctccctggaaattttggttgttatttattcagaatacatcgatcatagggatttttgcattttgtattaatcattttttttttggatattttattataaagtacacttaaaggagttcctattgaggttctttctattttcgagatttaccacttttacctatcatgtgacgtgagaatagatttaagctcttttaaacctggaaatgaaacgtagacatacgcttgacaattggcatgtaacagcatatagtagatttccagctagctggcaacagaaggatttacaccatgttttaatttcatattatagattcagataacattttcttctgattttatagaactttttgaatgaaatgagaatagtctttaataataataagaagggatatttgtgttggagattcaaagctcaatctcacacactatgggagttcatcgcacactcaagaagacttctctaaagcatttaaccgacaacaaacaacaaagtcaatgaaccacacttaaggaacttcgatagaaatgaataatactttctttattactaagaatctgaattttacaagtgaaagaagttaactactcattacaagtgtataggtatttatagggactaatatccgagtatagctattaactaaacctatatgtataacagttttaactaacatgaaaagttagttaaaaccggtaacttatgtggcatattataaagtcacttgaattctaacaaatttccaccttgacaagtaatatacacacacatacaaagcaacactaagacatattgtacactgcctacatttccattacattaactttagacagtggtaaaacttggatgtaggtaggggctttagtaaggatgtctgctgcattgttctcagtggccaccttctccagtttcacttttcccccaattaaaacatctctgataaattgcagccttacatttatatgttttgttctcttatggaaaacctggttcttgctcaagtgcaaagcactttgactgtcacattgtatagttatgcatctctggtctaagccaagttccatggaaatgcccttaggccacaatgcttctttcactgcttcattacatgcaatgtactttgcttttgttgtagacaaggcaacaatggattgtaggtttaatttccagcaaattaagcatccacttgactgaaaaacataccctgattgagatcttctagtgtcaaggtctcctgcatagtcagaatccacaaaccctgctatgttgactgtcgctgaacttaatccataaaccagtccaagttgttttgtgccttgtagatacctcatgatccacttactacattccaatgttccttgccaggttgtcccataaacctgctcaccatgcttacaacataactgatatcagtcctggtgcagatcatgagatacatgaaactccccaccacaatagagtaaggcatcctatccatgtaatttgcttcttcatcatctgtaggggcctatgatttagacaatttgaaaagtggtgtgtagggagctttgacaggtttagcttggttgaaaccaaacctgtaaggattttagatatgtaaccaccttgagacagtttgagaattctcttggatatgtctctaatgatgtcaatacctagaatcctttttgctgaaccaagatctttcattttgaattccttgtttagcatagctttgattttgtttatctcttgaatatcgttgcatgcaataagcatgtcatcaacatacaataagagataaacagtagctttgttgtttttgacataaacacagctgtcataagagctccttttgaaaccatttct

SEQ ID NO: 302046 - DNA, 1422 bp, Cannabis indica
ataatttttttttgttttttatattgttttaaaatttttcaattgaaattattatttggaccaataaaaaattgacacgtggtatttcatttggtttaacagagcagttaaaaagagggaccaacagactcacaaaaaatgtgatttggggactattaccgctaatttttgaggttggggactaatctgcatcaaccttaaatttttggggacttttgccgcaattatccctaacttaaaaattattttcactttagaaaattattatgtttttgaaaacaattggaggtgtctcgttatattttttaaaaacaattttttgaaatctaagttaaaaaaatagaaaacatattgcaaaatgttggggtcacttttgcaacaaaaaaaaaatcctaatttctctcacatcactttttttctctctatggttgggtccaggtcgagatcagtgttgagcttaagtctgtagtagttaagtttgaagttgatgtgggcgtcaatgacatacatcaagaatgggtttgggtttgggtttcggtctaggctgggtaggaatttttcgtggtatggaatattccactacatttttgtttttgttttatattataaaaaaaaactacaaaatatttttagaaaatattaaccaaactcggtcttatgttttaaaaactacaaaactatttctattcttattttttaaaacacaattttcaaaacaaaaaatagaaaacaatcaaacaagctcatattgtgttcgcaaaataatttatagattttagaataattttttttgttatggtgttaaatactcttttagttttttcccttcctctactactagaaaagggggtataggcgttcatttttaactaacactcagacggttcctaagactgacatcaatgccaccaacacaaagtatgtgctcaatatcttcagttatagacagaagcaattgaacgagatatgtctattcactgctacaaaaatacctattttcgtcgattttaaattaatatttacacttatatcattggttcctataaccaacgtataaacgatagatgcaaaatagtattttttttacgtcaattataaaccattagtatagaaaaatagcatcttcttagaaccaattgaaatagtgtaaaagataaattttacacaatttttgtcggtttataacagacgcataaaagaaaaaaaaagagattaacaacattattttccagattcaaaataaccacaacaccacaaccaaacccccactacaccaccaccaaacctccatcgcaacaccattgtaccagcagaccccataacaatccttaccgcaccaccaccataccccaataacaacaccaccagtccactgaactaccaaagacaaaacaaaattagaggaaaagagagagagagaga

SEQ ID NO: 302047 - DNA, 903 bp, Cannabis indica
gataactaatttgattgtaaagagttttatttagggcataaaacccaacaaaaaacccagacctttttggaaaaattagacattacctccatgagttgaagtcttttctggcccccaaaagtcagagtgaacatactctagtatatattcttagttttgcgtattccagttttgaacatgagtctatgatgtttacctaggatacaagattcttagaaattcactttgctcaccctgtcctttcctagccgcttctaatcactcatgacctgtaagtctttttcactaatcactaatatatataccctagtcttatgtgccatagtacaactttttggtcttttagagtactagtaattgtgttgtggcattgagttattgattctccttcttcgattctcatgaattaattagtactaaattaagaatttacagtgttgtaacattaggttgtaactttcccatacttagaagtgcatagtagctcatccaaagacttaaatttgaaaggtcatgaagtttatctgtccataacccatttcaaaaattataaaaaaacatacattgtgtacttaattaaaaatatatatatatatatatatatatataagtattgtacttaatattacttaattaaatttaactgaaaagattaaaattactattatatatatacgtgcaccaaactattatatatatagatattgatgctttttgtaacattttattgttggtagatattattaaaattattactattattgtctttcttactagtttcctttggtttgtttagtaacaagaacaagacaagagtagagtcttggtcaagtagttaaattaatacataaataaataaatatagggtaaatactattttggaccttgtgttttgtaaaagtt

SEQ ID NO: 302048 - DNA, 2354 bp, Cannabis indica
taataattataataatgcacaaaaattgggataaaatatcccattaaaaaatgtaaggatgcgttcggcaaaaaccaaataactatgggaaaaaatattgtttttaagttcaactaaacaagtcccttcttctaattagaaaagtgtgataaaagattggaagatatattttatcccaatttttattttctcaagtataaaaagtgggataaaatgttccttttctagtagtgccaagtggatgccacgtcaccttgtgaagaaatttggataaccaaagtaaataagtttcccattttattcttttaagctttgggaagccaatttgatgtaatccttccctataaattatggagttatctcactattcatggacacaaaaaatacacaagagtactcacagaaaacacaagtgagaaatcatagcaaatgattatagattcaagagtgtgaaactcagagatcattgtaagagctttcaagagatcaagcactttttgcttctcttctcacaagtcaatacaagtaaaaggggagtaggctagtaccatcatcacatgagcgaacatctataacaattctggtgtttttcttacttaatctttatttgttgttgttattcacttattcttaatagctttaatttgacccacgattgttggctataaacgaggtcaataatatttaaatcttgtacttcattcaccggcaaaacacattggacttgacctatactttatttataaaagaatttttaattatcaacttcatgtcaaacaccctccagcgcaagaccaatagttgatatcttatcaaaaatattatatacacctcaatttgtattgttaagaggcaaattgagcctggcttctctatcccagctcaatttgcaaggggtgttaattagtaggttagttatttttttagttcatacaaatttagttaggaatctattaattatgttacaacttttataattgatttttttcttggctctctattttgcctttactttatttgatcttatatatattgagggatcgctcacttgaattagtaatgagactacaattgtatcatttttattctatcttttattttctcttcccaacaagagaagcccgcatgatctttcgagtgtaggagtgtcaatgggtcaggttgaatctgatccggctatgatccgacctgatccaaatcatataagaatctgtcccgccccggcccgctagatcagatactcgaatcggatcagatccgacctgacttattcggatcggatctgatccaatccaactattttttttaagaattttaatattaatttataattataaatccattttaattgtgtattattgttaaatacaatattatatttggtattgacatgtattaatagattgtgtaaagattcgggtccgggtccaggttcggatcccggtcccagtcccgggtccgagtttgggtccgagtccaggtcgaggtccgggtccaggtcaaggtccgggttcgggtcctggtcctgggtcccagtcgcaggttcggatctcaagttcgggtccgggtcccgggtgtcgggtcgcggtcccggtcccaggtgtcgggtcctagtcccggtcgcggtctcggtccagattcaggtccgcgtctcgggtccaggtcccgggttcgggtcttggtcctaggtccgggtccagagtgttgagttcgggtccggggtgccgggtctgggtccgggtctgggtcttggtctgggtgcaggtcctgggttcaggtccgggtttgggtctcgggtacgagtcccagtctgggtctgggtccgagtctgggtccaggtctcgggtcccggtttgggtttgggtccgagtctaggtccgggtccgagtccaagtcccaagggatccgagtcttgaattaagtttttttaaaataaatttaaattgggtcggatcagaaccgatccagaaaaaaattagacagggcagagcggatctgatccaagatccaataagtatccaaatgtttcggatcagaggtgatccgttgggtcggagctccaaccaactccaactaaatggatctttttgacatgcctattcgagtggtcatgtgactggtggtggagctcatttgtccatttggaggtcagatataacccattcttcttctagcagacacctgcgcagaaagattcatagagagttgttggtggtagaaaaaatttaagtggcgtttggttggaggtaatgaaatagaatggaatggaaaggaaaacaatttcattccattcttctgtttggttgtattttaatgtataggaatgacattccaatggaatgctctttccacca

SEQ ID NO: 302049 - DNA, 3438 bp, Cannabis indica
gagagagagagagtgagtgagttacacaaacaaactgacagctcactcaacaactcactcaagctcataatagaaagtaacaacttgaacaacaaccagttaaatacaactaatgctaactaacttaactgacttaagctaactaactttaactatcttaacatccaccctcaatcttatcattgaagcatattcgattgttagattggttctaaaagtagcaaattgattactttaaatatctttagtaagtccatctgttagcttatcaaaggaaggaacatgcttcactttaataagatactgttgaaccttttctctaacaaaatagagatctaactcaatgtgcttggtttgagcatgtatagtaggattttgagtgagcattatagtgctcaagctgtcacaccagataactggtggtcgaggcaaattaagattcaattctgagaatagggattgaagccaaaatattttagcaaccatattttctagactcctatattcagcttcagtactcgatcgtgatacaatgtgctacttttggctttgccaattaatccgatttgagcgtaaaaaaacagcaaaaccagaggtactccttctatcatcgcaatctatggcccaatctgcattacagaaggccttaagattaagtgatcaattccataggcgtagaccatgatgttgagtttcactaacatatcttaaaattcttttaactgccaaccagtgactttatagaggcttgtgcatgaactgacacactttattcacactaaaggcaatttttggtcttgtgatggttaaatactgtaaggcaccaacaactgatctatatagttgagcatcttcaatgggatcacttccataggcatagagtctttggccacttgtcatcggagttgaattaggtttggcttcctgtatattagccttttagataagatcctttatgtatttaatttgagtgagaagcaccccttgatctgtgtataggacttccatgccaaggaaatagttcaacacacccaaatccttaggagagaactcttgatttagttttgatataagagagtcaatgacagtttgatcactacatgtgattaaaatgtcatcaacatataccaaaataattatagttgaatgtgttgtatgatgaatgaacattgagtgatctaccttggattagaggaagccaaacttggtcaagcacttttgtagcctctctaaccatgctcttggtgattgctttagaccataaagagccttgtgaagtttacaaactagatgaggagctgtaggatcttcaaactaggaggttggagcatgtagacttcttcttgtagatcaccattcaaaaatgcattatttacatccaattgtctaacacaccaaactctgctcaaagcaagagttaacacaactcttattgtgactggtttgaccactgcactaaatatttctgtgaaatcaaacttaggttgttgaaagctcttggcaacaagacttgccttaaacttattaactgaaccatacatattttctttgattctctaaacccacttgcaccctctagcctgtccctgcagaaagtctaacaagagtccaagtcctatttttctttagagaaaacatctcttctaagattacattattccaatgaccatacaataatgcttgttgaattaactcaaggattttggaaacaatgaatgtttttggcttgtatatgcctgacttggatcgagtttgcattttgtgtttggcttgttgatttgttgcattagtaggaagattagattgtaagtgactatgttcaacttgtgtagatgaagcattggaagtttgaacttctgattaaccagatagttgtgctggtgcaatattaatagtagtgactgggatctctgtggacgcataagtagtttgaacatgtttcacattgccagaaacctgttcaaagaaattatgctacaaatcaacaggtttgttagcatgagaggttgagcatgagggatcagcttgtggtacagttggttcataagtaattggatttgtttgtacaggaacagatgggaacatggaaatgtggacaaagggcaaggtttcaggagcaggacagtgtttatggatgttggaacaacttgattgagcatatgggaattgaagctcatcaaagataacatctctagagatgtagagtctaccattagagctaaggcacttgtagcctttgtgattaaggttgtaccctagaaagtgcagggtgtggatctaaattggagtttatattttttgtatggtcttatattagagtaacaagtgcatccacagatttttagccagctctagtcaggcttgatgttaaacaagacttctataggagatttgttccctaatactagtctgggaagtctgttatgaaggtagactgaagttccaaaagcctcatcctagaatttaaggggtaagtttgcttgagcaagcaaagctagaccatttttaacaatgtgtctatgctttcttttagcaatgctattctgctcatgagtggttggacaagggtggatatgacttattcccatttctagtaagtgactaacgaatgacctatgttcccctccccaatctatttgaagacattttaatttgaatcctagttgtaacttagcctcacttttaaagctaagaaagatcttccaggcctcaaatttgttctttaacatgtatatccaagtgaacctagaatacatatcaacaaaataaacataatatttgtatccattaagggagtcagtatgtgagggaccccatagatcagatacaacaagctgtaaaagttcagtgtacagagtgtgtgaggcctttggaaaaggcagcttgtgaattttcccaagacatcaagcttcacatacaaaatggtgatcttcatttatggaaatgttacaagattgtaagacagtgtttacaattttcttagatggatgacctaatctattgtgccatacatcaaaaattgtaaagttatttgagttgtgattacaacttgtacatttattgagaggaataggttcatttgagctagattgggcagacaccacaaaggtgttgacaggagactgaggaacactagactgagagcattaagtttgaggctgggaagatgtgttaagttggagatcatttgaatcaaatgaatataagccattcttgtgcttccccatgataagaacaacatgtgtcatgtgatctttcagtttacaatgattgggatgaaactgaaaataacaccattatcttcagcaaacttagaaacactaacaagattttttgtaatattaggaaaatgcattaaatgtttgagaagtaagggatgagattgacatgagttttgagaaatgaaagtatgaccaacatgctgttgggttttatgcc

SEQ ID NO: 302050 - DNA, 5857 bp, Cannabis indica
aaaaataaaatcagattagtatcaagttataagtaatttattaaatatttttagtaattttttaaattaatcacaatcgtctaatgatgatctaacagttaaaaacaaatgtaatcatcatcgttacatatttgttgtgaccattgaaacttcattcatatatatatatatatacaaatcaataatcacaatcaagatgcacaaccctaatcatccaacataagcaaggctagactcatcttctctctatgggttctcactcaattgaagggaatggaggagaagagtggttgagattagccttggggaccaaactcttatgttctttatatgctaaactaattagaatcccataaaccctaattaggtttgcaattggatattatatattacaaaactcatacaaaataaaatttttattgggctcatttaattagatcacttatttagctcaattaagaagatcaacttaaatataactctaataaattgtcctaatttattagattactaaaaataacccaacaccatagacaatcaacgtcgcacttaactctcaaagatggatcaaaatggctaaatgctaacagaacatgagttttgggggttctaccgccaatatttgaattcgcagagttaattgctagcgaagttaagctattagaagtttttccccaatttactcttaattaaataataagttagtaattataaaatacaaaatttcaatataatatatcatttattttagatcatatttagtttctattttattatatataaaggtggtatataattttacgggtgtgctatataattttgttagtatattattattcgtgtttctgtatagaagaaaagtgccacaaggttcaacaagtttttgggctactattggtcccaaaaaggcctacatggtagtctttctcgtttataaagataataatcatgggtcatgtatcttgatcccatgcaacgctccaaattagtcagcttgctggagacaataattatgacaactttcgttactagtctttagtaatcttgaagcagaacccctaatagtcatctagaaatagaagttcaaaaggcatttgggacagcctattgtcccaaagaatacttatgtggcacttctctaacaaaattcgaggaatctggcaacctatcccctctatcagattctagaagcgctcactaaaattggtggttaccttcttatgcaatgcaccaccactttgacattctcatttccaataacggcgcacgacaccagctgtcactatcaatagtaccatgaaccgtatggtagattgctttatggaattgggcctcacctactcgacccaatagcttaagaaaaagctaatttaatgtattttatgccatcagtgggttcttttctacacaaaacgctaaatatggacccaataggcatgactgtctataaatatggcattatcttctccatgcaaagtgttgacaatctaaaaaatacagctttaagctggaaatattccatagctaaaagcttataaaatacctcgtggactaaggctaattaacaccttaaccacgtaaaaaaatttcatcttctttaaatttatttttctttagctttatttctctaaatatttagttttcgaaaaatctcagttaatattttagtgctttcattcagggctttaaaaatattttcaccattgtttgtcatcaacaaaaatagtggccacgaggaacacggttacacacgtagggttggaaatttgtgacacgacacgatgacacaactcgaaaacaatatgaaataaatgagtttgagtgacacttaatttttgtgtcaaaatctggtcaacacatttattaaatgtgtcatttttgggttaaccgtgcattttcgggtcaacacgcttaactcaaaatgacacgattataacacgtataagaatatatatgtatttttaaatttttatataatgaaaatagaataaaaactctaaaaaacctcataaaaatatttttcttttaattttctttatcaaaataataattataaaataaaactatgaattttgtgagcaatatttgtgtttatatacataattatgttaatcgtgtcaaattcatgtcatgtagtaacatatttaatcgtgtgttaaatgtgtcaattttgagtttgtatcatgacacgtctattaaatgtgatcgtatcgtatcgtatcgtatcgtgcattctgctaagaaattatgtcgtgttcgtatttaggatcttgacacgatcaataatcatgtcgtgtttgtattcatcataaacgtgtcgtgtcataaactttttgacacgaatacaacacgataacacgaattgataggcctagttacacggccaatcggctagatgatcaaaaatgttgcagaaatctccagtattgacactttgaacccttctcctctggctgacgctcaggaagaagttgtaggagaggacgaagcatcggtcgtgggaggtgaccccctctaaaatgtcaatcagcccaaagagcttcgtgaagatgacccaaatgggtattataaagatgagccagaggagtattatgacgtagatgaggaagaagactacactccctttaaggacctagaggtgacgtgtctaaaacaactaccaagaagccaagatggtagaacaagaggaagccacacgttaaataaaacaaattgatgtttcagttgcaaactctgatttcaacaagggttcataacgaggaggttcctccaacaaaccaaaatctaggtcttggaatttagatcaacaccaatctgccagtggctatgggaaagttcgaccatcccagagctgaaccatcaagagcagttaatgataaaggaaaggccatagatgatggtctcaaaagaaaactcatctgtcaaggcctgcacaagtgaatcctaaaagcaaagtggagccaaatctaatttcgaggaagaagatttggaactttatgtcaggagaatttaaccttgttagagcacttctgaatgtcattgattgatctacacgagggaaaaacagaccccacttttcacttgtcctagtacaactgacttatgaaggtcgtgcacgtgaatgatgacgatatatgtttaagtttttcccccactttggctaaatctgctaaagaatgttggaagcagtttcgaccatactcagttcaaaattggcaagaactacaagccatgtttaagaaacagtttgtttccacaagggacttcgatatagagtttattcccctcaagaacatcaagcaatattagaatgaggccctcaaagcttatatcaaacgcttcacgaaagcaacatcgatgacgaaagttagggacgaatagaagataacggcccttcaggcagggatcatagtcggatccctactttggaatgaaatgcagaggaagacatctaattcactttctgacttcctggtaagggcccatatggtatcattaatttggaagcaatcagattttccttgttatgatttctgtctctaactatcactataataaatataggttttaggggcgacaaaaatcgcccctaaagtacagaaattcactcctaataggtattagaggcgaaaagtcacccttaaaatgtcgtctctaaaagtatgcgcataaaagtactattaggggcgacaaaaatgtcgcttctaattaggagcaacaaaagtcatccctaaaaataatcgacaaaaactgacgattacttttagaagtcacccctaaaaaagagagtcagacagtgattttgacttttaaaagttgctcctaatataattaatattataaaaaattatttcaaaatgtttaaatatattttattaataataattaaaatggtataatagtatacttggattgtttttctactcttagccatatgttatttaggaaaaacttaatctatacataccaaaagcaacacacaatatcatttaatttcaaacttaatctatcaagggaaaattaattaaaaatttgctaagttgaataaccattattcaccagcatttcaagaagaaaagaaaaataaacattcagtaccaaaaataaaaacccaaatgggaacttagatttaaaattgaaaataagaacttgaaatctagaaataataagagaaaaaagtagaagagtacgtataacaagtcaatgacatcaatggcctcatgacgcttggcgttcccaactgccaccatcacaggtaatgaagaagccttggactcttggccataatgggttgaaccattctacttcaccaaatttacaagttgagatatataatctatcattccaaaactccccaaaaatagcagaactacgttctatgctaataaacacaacccatgaaccaaaaagatgtcatttaaaaatatgagtaatagattgtttcaatatgtatatatttatatacataaatatatatatatttatatgagtagtagacaaagagagatgccttgccttcccttcttcaacttggaggtgttgtcgatattggactgagttgttcacggcggccgttagaggttgaaaaaaagagagagaacaaagggggatgagggtcatgggattgagactggtggagggccgttcatgggatgggtggctggttttgatgctggatttcaattttttttgttcatggcagagaatgaaaatgagagaaaaagaagaaaagaagagaatgggggctcgaagggaaggctaggtttttttttaaacaaactttgttgctcttaaaagttgttcctaataaataaagtttgtcaaatcacacgtttagagacgacatttgtcgcccctaatgctaatagcgagaaaaattctgccaaaacatttttttttatgaatcaagttatttcattactccaagaaaatttttacaaaactataccaccctccatctagagtatctaaataatctctattatttacaaagtttcaaaccatattctatctctattggtcacttttttgggccaaatacaagaaattcgactctttgtaacattcttgacttgtgctatgattatatcactatttacaactttttttccccaaaaaattgagtttcaggagcaccacaatgcatacaccaaagctgccagtgcagcagccaacactctccttcgaaacttgcttatttaaattttattatgcccctattaattataaaatcgttcctacttgtatacaaattaaataaaattaaattttgttaggcgcgacattgttttctcacccctaatattcctattattagaagcggctttttgttacttctaaatgtgtcgcccttaaaacctaaatatgttttagtgtatcagtctttcaccattggcatttgattccttgtaggatttttcttggtgaatttccaagaatgccctacaccaactcaagtattcagtcaaaaacgacacggacaaaactgtcccagaaaattcaacttaaaccaataccaaacgacaaagaaacactgttgtattcacctgcacgacaaatcgttttaaccaaacgatttgtcgttctgccttgaacaaaactcagtgaaatcagagctaaccctagctcatttcactcattcaaacattcgagagtgtctcaaactctctcactttctctctgccttctctctggttctcgaaccctagaaccagagattcttctcgatctcttgatcgatctcacccagaaatcatcccagaaacaccatacaacacacatacacaaagatcaaacaaaacacagtaggttagagtgaaaaaaaaaacaaacaccagagattatagaggttcgccct

SEQ ID NO: 302051 - DNA, 3521 bp, Cannabis indica
aaatcacgtaatacgcctaaggtagttagggtgttacagtatcattgaatttcactatagtaaagcctccattcatcctcacaatctattgtatactaagcttaccccattctagtttaaggaatccctcaaacacggaaaacggagggttagcccctaacaccatacaaacaacagcagtgttccatatagcagcttggtctttcacctcttccaaatcaacttgagctattttcttcccattttcagaataggttcagtataggaaagcttaggttcagaaatcgaaaacttacattctgtaaactgtttccatttttgttgcgaattcgtttacaaatcatccttctcgacttcatctgcccaggagccctgcccttcgttctgcttctccgtcttcgagccaggtttcagatccgattgaatgatgtcctccatttgcaacgccatctccaccaagttagactcagtcggttcatcctcttgctcaatcagattgtcttggattgaaggaggatctgttaggttcagtgtgattgcaggcttccgtaccactctcttctttttcgccatggaagagaagagctgatactcacgcctcttctaatttttaattagggtatactgttttttttttctcactttttcactctctcaaaaaaatttattttattattatttaaaaaatacaaaaaattattttttttctttttctctgttttacattttcttactatattcacactcaaactatttcatactatttttcattaatcaatcatatttcataaaaaaaaattaattaatttcttttaacttttcataaaatatgattcttttactcgcatttttttcatatattttttaatactctttatattacacaaaaattaagcatgcttcatatatctttctctcttatacatgattaataaaaataatttgtatatgtgagtccatgctctctcctttatgtagttgaaaacctatcattttggtcggctgaaacattgagggagactaagatactttttgaattcagagcgaataggcatttacaaatagtctgaaataagggtacgatctctaagagtagtgttgggggaaggtagagagaggatttttacaaattaacacattggcctgtggccagctcatactgatgaagaatctctttgatcacattacaaagctggatgttggcttgacagaaaagaatgctatcatcaacaaagaagaaatgcaagattgcaggagtatttttagatatattaagctcggacaagagacttaagtgctcatgatgacgaataagagaagagaagccttcacatcataagaggaatatatagggagagaggggatccccttggtgaattcctgtagaaggacagactgaacctaagacacgaccatttaagttgaattggtaagtgacggtggaaaagcatttggatattagatggatgaacggattaggaaagccaaaacttttccacaatacactagatgaattttcgctcaactctatcaaaggcttttgccatgtcaagctttaaggccatccagcctttcctacctttagtcgtaagctttatggcatgagccactttctgggcaacaataatgtttttcgaaattagacagtttgggagaaaagcactttggttggggctcatggtattattaagtgttgatttaagcctaatttcaagagttttagatatgatcttataaactatgttgcaaagactaatagggctgaagtctttgatagtctttgagggtttaacctgagggtgataagtattttgtttagattgcctatctctttaccatgattgagaaagctaagaacagctttaaagacatcctgctttagaatgttaaagccatcaatgtcaggagctttttcaagaggtaactagaaaaaagctttttgaatttcatcttctataaaaacttccaggagaggggctttataaagggaggagagctccttatcaatgccaataagagttctggagatatccttagaagaagggtttgaggaagagaaaagactcttgaagtaattctctatttccttgataatttcctcgtcagaggaaagaaccttcccctcatcatcagtgagctccttgatctggttaaaggtctccctttgggaggcaaatttatgaaagaattttgtgttttgatctccatgctttaaccaattcaccttagatcgttgtttctaataaagctcttcttgatggagcgatttgtcaagatgttgttgaagtgatttagctcgatccctcgtacgttcatctcaatgtgaattgcaactgaccaactcgagctcttttgaagtcacttcaatctgccttttgaatttgaaattagatttatggtttcatttttgaagattgataggacagtgctcttgaagtcgcattaagttgcttatgggatcgaaatcgctagacgaagacctccaataatcaacaatgcgcttgtcccagttaagctcctcaagccaaacatttttgaagagaaaatgcttgggtttagagaataatgaaaggttggggttgggtgtgagatggactttaagagccctatgattagagccaacaaagcccccgtgggtgagagtggcatttggaaaaaggccagtccaattattattagttgtacaccaatctagcatctcttggatgttaccatggttagagtgattattattcaaagtgtaagtgggaccgtctaactctaaaggaccgaggttaaatatgtcaattaaattacgaaaattatttgagggacttttgtcgaggttgccctgatgtttatcattgatactaagataagcattaaagtcaccaatgatcatctatgagcttcaaacattattttgaccaacgtaatggaaaagtttccatatgtttggccctatccaaaatgttggggacaccataaatataggtcaaatgaaaagagggaacatgaagagaggaagaacaaatataactgtcaaaatgatttatagatttgtgcaatgaactttctgattcatcaaaaaacaaatgatttatagattgattcaataaagttatagttacattagaagttcaaagaaacaaaaggccaccccatacctattttacctacttccaaactattagaaaagctaagcctatttttaacaatgtcaataaaactcaaggattacaagacttagctaaatgggagaggtttcacaattctcatggttgtgagcaggcctgctcaagggcagcacctgcctctgtgatggtagatattgttgctagagttggagtggacttgacatgcttgactatggagcgggagactccatcgaccacgagagactgcttcttgaaactatttttgtaatatccaacacaagtatattatttttggtaaattattgtgtgttttgatattttattgttgcattaaataaaatatgaatattattggtatttgctaagtacaattatatagttaat

SEQ ID NO: 302052 - DNA, 6481 bp, Cannabis indica
ataggaaaataatatctaaacagcaacaaaaaataacaaaaaatcaataacaaattaattaacaagagtacaatataaaaatacattaaaagaccgtattttctgtaaataaaatcataaatttcgtaaaaatatttaaaattttgtacaactgtatttttgtaattttgttattgtttttgtgtatttatgaaataatcccatatatatgactatttgtatctaataaaataaattttacaattaattacctaatttttccattaattatctaatttaattaaatgggtttaaaggactaaaaattaaatttttttatgtgaagatttttatcgcataaattttgaatttttatattatgtgttttgacttttatattgttattatatagacttattacttatcatgttaaatataaaactttaaaaaataaaagtaaaaatttggtaaaaattacaattaacttaaaaaaaaattataaattttacttaaattgtagtttcgaactaaatcaaatcgtttttaatagtttggtttaaaaaatttattagtctaattgagtttctaatattttaaaaatcgttatactgatttagtttaaaaagaattcgaccaagctaattcctcaacacccaaaggaggcagcttggtccagtgtagtgtgaattttataatatggtcagaaactgactattgaatattgattgaaagaccaacttagatgtataatccattattccatgtaacgtaacataactaataactttaacttatcttttattattataaaatactaataattgttattaatttcatttgaacgtgaagaaggtgcatgcatgcttaaataaatttctctaccgaccataattatatataatataatataccgaccattatttaaagaaatgtgagtattgtaatggttctaaatacaaaaaaaaagatataaatataggcttgccttattgacttgacggacatgataattattataatgattttattattcttttttaaggaaactttacatgagattcatatgtgatatttatttaatattatgaccatattgaaagaaaagaaaatatatatgtaggtgtgtgttgttttaaggtagactagctagggtaggacaacgcgtgttgttggcccaaaagagatagtgcaaaatccacttaatgtgtatcctttgaggctaaatatcattttcaattttgtattttgtaaaagttattatttggactttatattttgttaaataacaaaatgaactttgtatttttcaaaataataaaaataagaccttaagcttaagttttgacaacttttttttttaaaaaaataaccaatttgaagagaattcctaacacaaacagatttagaaaatgtaaacagttttatcacaacacctttagatcggattaatattaaattttattttgacaaaaaatcagttcaagatcctatttgtacaattttagaaaatacaggatccattttgtcatttaaaaaaacaataagtctaattaataacttttgcaaaacacaaatacaaaataatatttatctcattttaatttaattatcacgtttaaaaatggaaaaaaaaaatctaactaatttgcataaatattttaattttatttttataatttcttgagtgcatgtttattaattaataactattattgtaactaacatattttattcatcataattcatatattgtataaggtaatgcttcaatagaggtattcaaaatagttttatgtagtgtcatttttttaataggtgctattgtttcattttatgttcatatttaattttatttatttattttttataattatttgtcaaaaatacttatatcaaaaagaaaattattttttggtggttatgatcttagagtagagatatgtacaaattaattagataatgttaactacaaatagatgtatattttttttaattagataatatatattttttttataatttttgaaataggatttaagattttggtcttttgagaatttttttttagttattgtagttaggttggtgtgttatttgggtgtgattatatatatagtattttatatgcacaataaaaattcaagtaagatattatggtgaattgttgtgtgcctgattgagtgaaattatctcttcttttaattcaaagttcaaccaacaaaattaaaaatgtggttaaaaatatatacaatattttaagtattttaaattaaaattaaattttttttatataaaatatttacataattttttatttttaaatatatataataatattataaaactaataaagaatattttattaagtaatatattctgttaaaattaacataaaaaattaaaaaataccgttaaaccaaaaattttactacatagccatattttatatagaatagatattaatatgatctagttcaattttttttttagaagatccagttcaattttattctatcataattttggaacaatatattaatacttaaggtaaatagccgcataagtacccaaagttaagtttgtaagcgacataaattcaatgtttatttttaacaatataggtacctaatgtttgtaaaactgtaatttttctccagtttcgtcagtacaaaccaacatattttcttataccatattgtacctaaatctatatttttttttctttttttgtgttgtactatgtcgtgtttaggtacattttttttttttatgtcgggttgtgctagtgctaatttcgtgtgtatcaaaaaacctaaaatggtcttgcttgagagagtattagatccaacttgacccaatctctcaaatcttttgattagacaaaaaaaatggttaacttatgggagtcaccgacctctaaatccaacactattggatcaccatttttcaacttactctaaagaaacaagtcaatgaccacaaacacaagaagttgagccaaatttcacactagaaaaagaaacacatatgaatcatacaccaaataaaatcaaacccatcctatataaataccaaacgacttccacaacaacaacaacaaaccatacttcaaaattcaaagttttttctgttaaaaaattttagtcttctcttttctttattcaagagtcgaatagtgaaaactgaaaaggtctagtctttattgttaggcaaatgtgaaaccgtttaataataaataataattaaaaaatattcactttttttcttttataaatattcttaagatattttacattgcaaacctattttcttatatatatatattatttggattcttcttcttcttctctgaagttttttgccgtctaagattttgaggtgacacccaggaactgaaatcctggtgtgttcttctttttcttctccaatggcgagttgggttttgtcagaatgtggattaaagccactccctcaaaattttcctcgacccagaacagggattacctcaaccaacccaacaacaaagactcggtttttgagttctaacaagagctcggcggatcttagattcccaaaggtgaatttctcaactgggtttttgaaaaggaggagttttgaggtgagagtgagcgccccattgaaggttgcttttgtagaagaggaagacagaggagagagagtagaggaaatcgttaatggagttgaagaagaagaagaagagggaatcaaatttgatcctggctcggctccacctttcaaattggctgatattcgggctgctattccaaaacattgttgggttaaggatccatggaagtctatgagctatgtggtgagagatgtggctatcatatttgggttggctgcggctgctgcttctattaacaactgggttgtttggcctttgtactgggctgctcaggggactatgttttgggctctatttgttcttggtcatgactggtaatattctctaccttcactttcatcttcttctttctctttctcttttaacaattggatggatcatggttttggctattgtttgaattggtattgtttttgtttttgattttacagtggccatggaagcttttcaaacgatcataagctaaacagtgtagttgggcatctcttgcattcctcaattcttgtaccttatcatggatggtatgctctttaaccaaaaatatctctatatatgtatgtatgtatatatgtcttttaattatgttaatgttcatttttcaggagaattagccataggactcatcaccaaaaccatggacatgttgagaatgatgaatcatggcatccggttagattttgttttcacctcttgtttgtttcaattttcattgcttgcttctttgcccatttcataaatattttccttattgcttttgcagttgcctgaaagaatttacaggaaactggataacatcacaaaaagtttgagatttactctaccatttccaatgcttgcttatcctttctaccttgtaagtttatattataatagtcttggttgatcaatttagccatgagattgattatcattatttgtgttgttaattgatcattttctttgcacagtggggaagaagtccaggaaaggctggttctcattttcatccaaatagtgacttgtttgttccaagtgagaagaaagatgtgatcacttccactttatgttggacagctatggctgctatacttgttggtttgggctttgtgatgggtcctattcaattgcttaagctctatggcattccttattgggtaaatataatcttaaatcatagagttttgattgaacaaaactctcaaagggatttgtatcttactttgttttaatgtttaggtttttgtcatgtggctggatttagtgacatacttgcatcaccatggccatgaagaaaaattaccatggtaccgcggaaaggtatggttaagtagttagatatgttgttttcagaggggtcaaatcaagatattggttatttccttaataggccaaaaaacataagaaaatcttatctaagaaagtctttcatcttcacatgaaatgttttgttttcaaagatgttaatttcttgtgatatattgattgtgtggattaggaatggagttacttaagaggagggctcacgacacttgatcgcgattatggagtgattaacaacattcatcatgatattggaactcatgtaatccaccatcttttccctcaaattcctcactaccacttggtggaagcagtaagtatttttgcttatgattttgtaacaattatgctactcatgatattcaaagcaatattccctaaataccaacagagccctgattgtttatctgttttcgttttggcttttcttgcagaccgaggcagctaaaccagtgatagggaaatactacagagagccgaagaaatcgggtcctctaccgtttcacttgataggtactttgattagaagcttgaaacaagatcactatgttagtgacactggtgatgttgtgtactacaaaactgatcctgatcttaagtgatctttcaagctcaagtaaagtttcaatttcatacaagttctccttcaaataactacagcaaaagctaagctaagctaaccattgtctgagcttttggtaccacttggggagatgacacaaaatttatcatcttaaattattgttgctctgcttatttcttaaaaatcagctagaaaaataagtagagtgtaaggttattatttatcttagtgcagctattaatagtgaagagaaatttgtatatcatagaagaaaaataattttccatttttatacaacctgaacaatatttattcctttttattaatattattatgttaaataattatattctatttaagggatattttgatcatttaaaaataaaatgtgcacttggcacttgccattcttttttcatttttttttttttttttgcaaaacattctttttcattttatggttataaaattgtgtttttcaaggtgaaaatagtaagtatgtagttgtattattctgatattatgagaataataggttaaaattggtatttaaataaattgtataataagaaattttatttatactctaaatttttaaaggcttaaggcaccccattttaataattattattttatataaaatttatattttaattctttctaattcatattcttaaaaaatatacttatcaaataaaaataaattattttttaaatattatgacaaaaaaataaaaataaaaaattatataaaattttcttagaaaaaaaaaaaaaaaaaaaaaaaaattatgaaaataaaatcaaaataagtattgaacttaacataaaataatgcgaggaaaatatttaaaaaaatattaagagtaatttttaaaaattaggggaattattccatatactattttttaaattttttttctaaatttacggtttgggtttttaaagtggttgcagcgctagttgcaata

SEQ ID NO: 302053 - DNA, 4490 bp, Cannabis indica
ttaaaatattctacaattttttttcttaataatttataattcccaaaatacaaaagaaacttctaaaaaattgtagtatataaaataccctctaccgaagttaaaaagttatgtctatgcatataaactaaaatatataatataagatggaaaatgagagattgtttaatattaggtacctgggccatacgaggtcgttttggggcagaatggcgaacacaggcagcggctgcctcaaccattctgatcatttcactctcaacataatgcctttcaagcctaggatccactaattcactcaagtcaccactttgaagggcttcaatcagcagtggacgagcctatatatgcatatattaacatgttaacagtacatattattaaccaatacaaattttatcttatcttaattgttacgtacccattccaccaaactctcatccccaaggggttgagttgggtcaacaggtttacgacctgtaataagctctaaaagcaccactccaaatgagaacacatctgatctatctgttaattttccacttgatgcatactctggtgccatatacctattacacacacccacaccccaaccccaattcaaattcaacattaaaaaaactggcccagttaattggaaactgatattgaaccaaattatgaaacttgttaattacccaaatgtccccataactctagtggatacatgggtgtgagtgtcatttgatggcttggctaggccaaaatcagcaacctgtacaaaaatcaattctattttttagtatatacatatagaatttagaatggacaatcacaagattagtttatcttatatgtggtattttacttctaaacattaggaatgtaagactaactctaatacactttcttcacgttggacttagaaaatataagtataacgaacgatctttaaaaaactacaatgtcgatgtgatatttgaaagaatctcataaaaccaaattagaaaatttgtagggtaaatttgtggctttttgaaataggttaaaaatctcaaacgaacacacatttgccgaaaattctcaaatagaagttaaaaagagacaacagacatttctaatttgactctaatattatgttataacttaataaggtgtgattttagatgcatagaattctatcattagagatcttaaaggagattggctatattagtttgcaccaatagtatgtccccttaataaatagtattgaataattaaaagactccacgttaaaacttgcctgtgcctcaaaagcatcatcaatcaaaatgtttgcagactttatatctctatgaataatttttggatggcctgtaaaattatggatcacaaaatcaaaagtaagaaggcattaaaaaccaagactataatatgcaaagagagagagatacatacaatcttcatgtaaatatgccaaaccctttgcagcccccaaagcaattctcaatcttttggcccaatccaataccggaagtccagcagctgataacaaagacattattataacaaactaaaagaataacccttaaggcttaaatgaatgaacaattcaattagttaataccatgcaaatgatgctctaaagtttgattaggaacaaattcatagacaagcaatctatgatgctcatctatgcaatatcccactaaagacaccaaatgacgatgatgaactctgctgatgatttcaacttctgctttgaactctctttcaccttgtccacttccagccttgagctctttcacagccacaattctcccatctggtaaccaacccttgtaaacacacccaaacccgccttcaccgagcacattttgacgcgaaaacgaattcgttatctccattaaatcttcatagctgaaatatgcattagaaccacctatgtccaagccacctcctccatagcttactgcattgcctctctgactcccatggctattggaaatgtatgaattgggaccttgtgagccatagaagctgtctgctggtccagagtgattgttgccaaaattactttgttgttgttgttgttgtacttgactcccataatacccttctggttcacattatacccaaaaatcaattgaattgaaaaattaaatcccacctactaaaaatcattagaaaaatctacactacacctgctaaaagggtgtacatctccattcctaaataattataaaatatatttccataattaatttaaactataaaaaaattgttatccctctaagaagggtgtttctagtacacccaattttttttcttatacacttatgtttactcgacttttctagccgttaaaaattttcctgaattactgagattgttaaatttaaaatttttaatccaatttcattcaattttactaattcggtgattgtccatgtactaaatcatgcttcccgaattttgatatttaccaaattatgttcctcaaactttaacatgtgctcgattatcctccctgaacttttattcatattagacgaaagtcattaaatccatttatttcaatagtacatgtacatgtaaaaattcttagggctaaaattctaaaagccaattatttataaaaagttctccaaggaccaaagtagttacccttaaatcatttagtttcaccaaattatagataggtacacacctgattttacagagagaggaccgttgggcatgtaatgttggttaggatagagctgatcttttcttcttctttttctccttgagctgaggaagagtaacgctattaacccaatgatgatgattccagctacggcaccccctataacagctccatgatttccattcgattctgatgatgatgatgatgatcttgagttttctgaagaagatgatgatgatgaagaagaagaccctgttttcgaaccagatgtgggtgatgacaagcttggtccgccattgttaccatcattatttgaaaaactgctgggagttggaggagaatgtggtggtgtcaatccattatttggtgaattacttgaggttgggcctttggtgtcggccggtggcgaaacaggggtaggtggggatccagattccgccggtggcggtggagatatttgatcagaacccggtggagtagacgaatccggtgatggaggagattgggtttccgatatcggcgatggtggttggttatttgagtggtttggaggaggagaaggaggattaggcggcggaggaggtgagtctgtcggattattatccgatggtggcgggtctaaaacaggtgtcgacgacggcggtggcggtgttggagttggcgaacccgaaggtggaggagaacccgaattcgatggaggcgatggcggctgaggtggcggagaatcgggagctgacggcggcggtggtgatgatgatactacttcaggtggtgggggagagagagtagcaggtgaagaaggtggtggagtttgtgtgtcgccggtggatgtggtggccggcggtgatgacgtggaggattccggtggtggtgatgatgaagaagaagtagtatcggaaggtggtggggtggtggtggagttggaatttattggaggaagaatgtcattcaatcctgacatcttcttcttcttcaattttttctttctataattctcttttcattacagagctctattataattatagataataacaaatttaataataattacgtaaaacaaagatggtcaaaagaaaaaacccatgcaaaagggtcgtaataaaaaaaaaaaaaactgacaaataactatagcattaatggctatgggtgcctttgaaatttaatcaattatgtttttttaaaaaaaaaacgcgtattgatgaagaaagagaaaagagaaagaagtggtcttgtgttgttgaattagaatagaaaaccaaaattcatgagtgccatgatcatcaacattaaacaaacgacaaccaaaaattctctctttttttagattaacaaaatgaacaaaatatatttatttatataaaaaataaagaaattataatgttatgattgtgaggagagagtatattgtgtaaatctaataatgtattatggctacttgggtgcacgatcttcattgaattagttcaaagtctctcaactgtctcaccttcttttctttgttttgttttaatataataccatgattttttctctcctttaatttcgggttaccgtgcaattctaatttcgtaatgggcttgggacaaatctcatgaataattgagaaaacattgtcagaattttttcacaaattcatttctttgcccaattttaatatagagataattaaataggaaaacttacaaaaaaatattagaattttagttaatttttacaaaaatactgtcacacagaaaacattttaaaaatactatttttttgtaaaattttttacattttttttaaagattttattttatatttttacaaaaataataaaaaaaatacataaaataac

SEQ ID NO: 302054 - DNA, 1559 bp, Cannabis indica
agattaacaataatttttttttgttaggagattaacaataaactttgattctcgattcaaatgatatttttcaattctattttcatatatttaaaattctaattccataaactttctattaatatttttcaattaatgaaacgaaaagaaaaactttaattctatatgaaaaatcaaactttcaatcctaataatcaatagaaacaacatcaaatttcaagttctcaaaatctaagaaaataaataaataaaaacagatctcataaacacaaactcaaacattagaacctcagtaaaacactaaaactcagacattgaaaacacacacaataaaattcgaactcagaacttataacacacacatctgaataaaaattaaaccataaatgaagattatatgttagtatttttttgaatttcggtatttatcagcaacaaatttaatattttaagtatttactagtacatatataaatgtttaagaaacaaacaaataaatcaagaacccaagcaaggaaagacagtttgctaagctaacaatggggttatatttccaataaggatagtaattctactaagatccaagctcaaacaatcttaattaacacttaacatggcctaatagttgttgtgacatcaggtttaagaacactgccttggatagaacagttgaaggagccagcaagccatcgataacaccaacatttcacctgaattaatgaagatactttgatagagtttgctctctttcatctacacacaaatcttcatataacaatctatacttgtatcatcatccaggtgtcttggtaagcctcacaagatgtaagagaggaaggcaatctggtctggagtggttaaagagtgaattccgctgatggggtgtttagaatcttgttgtgtttagctgagggattggagttgagaatacaagaaccatatctttcttaaattcaactccttaccacagttgggaatcttcatttattgactgatttttatagccaggttctcctttttacctgaaagtgagaagattaatatgaatgaaccataaaatatacttttcctcacaaattatacagaaaagggttcttagcattaaactcctcttaagccttttggcaatttggcactggtaatatagtccacgagggaagaaaattgacaatcaagtccttgagttttaaaaacaataacaattatttctttcttgttaattccttaacaaaatattaagttttaaggaacaattttgacatttctctatatattatacacctccaatttattttccagtcttgggtattcaactctaaaatttgattgtcaaatttgttttctcagggattaaattgtcagacatttatgctaaaactcctattcaaaacacatgagagattaataagagaatttagagaaaataaaataagctcacattagacccactaattgtacagtctcattatgaaaataaaacttgtaacttataaaatcaggatcgaccaattatacggtctcacagtagaatatttggtcttaatttacctcggaatttt

SEQ ID NO: 302055 - DNA, 889 bp, Cannabis indica
actatataaatatatattgctgcatatggtttccatatttctttttcactaacaagattgatacacaaaatgaagagaaatacagcaagaactcttacactaaaaatattactgacatacatggaaattaatttaaataaatatatgtgattttataattattttttgttacatattattttctttgagcatatatattaatgagggtggtgcaaacaccattaattgaaacaaaattatttagaaaaatttatggaatacaagaatatatatgttacttgtttatactatagtctcctgggaaatagtaaggaatatataaaaagttgaagtgatgattaagaagaggaaaaacaaaaaatgatggtgtagtgggtaaaggggacatgttgaagctagcagtagttgttttgttgtaaatcttgacttgtaataagatgtcatgatgatgatgatgatgatcatggagatatatagtaaggttacgtggagttacgtatatatagtatactaatttatgtgtgtatgtatagcgtagtttaaaggctatgaattaggtagagagaaatgatacatcgccgtctgcagaagatattcaagaaaaaagacaaagtttctctggccaccaacattaattaccagagatacgatgtgatatccatctctactcttttcttcctcattcaaattatatatttaatacattaattaataatctcaacaatatcaaaaatcatgaccctacacccttttctacccatttcttatttaaaattacacattcaatacaatttattgaacagaagctaatatatattagtcaagtcttgcccgcctttttcaatatattaaaaaataaaatagttaatatttcaccttttattactct

SEQ ID NO: 302056 - DNA, 2127 bp, Cannabis indica
ttaaaaactaggactacgacgagtaccaactactaaagcattactctgtacaagaaagatttacattacgaaaagaaaaaaaagaaaaactgcagataaactaggatcctttttttcctcgtagtgatatctgactgtaatcttttagctgctttacaaaagaaagggattaaaagtttttatgaaaatatttgattgtaatccccagtaccacatggagaaaggttgattaaattctttttccatgttagccatttggtactaatctattgaactaaatagttggaatgatatataagttactgtggaatggctactgtcagcttacaacctaaattaaatcatgtcttctttactgtttgatgtttcacacatagcataactttgatgttaaagtctttcattgggatatttttccctatcattgcacaatcctttctccctctattcccatcacgacaaaacatatggatatgtagatttttatcatgttggcatccaagttgctgaacatgacaagtcagctcttttataacgagttaaattaggacaactgccaatgatgtcgttgatttatggagcttgaatgatgccaaatatatagtaaaaatagttttaaaagctcaagtttaacagtaatgtctagaaccaagataaaattaatccttaacttcattactaataatctttgtctttgctcagaaatcacagtgaaagcaattgaagatgcatccaaagagttcaccacaaaggaggacgtcaccattgtcttaattagccaatatgtaagtttgctgagcaacaatctcaatggccctaatgtaatctaatatagaaaccattatatcatgtttgcagcggttatataaatttgagagtctgctatcccttaaaacattatcctgagtatgataaggttcctaatgtacaccttcaacacacccatcccagccatactggagatcccatcgaaggatctaacataagaccctgctcacaattcagttctttcttgagtcaagtacctcttttctgctgaatttgtggcctcggatagacagtgagaactgctcataatctcttagtggaatggcaaacactacagtcctcaggttgatatgtattttatgcatatgaagtgagttgcacctctgcatctatcaaattctttttgtgcctattttgaattttagttaccttgatttttgtaagaataataaatcatgacaacataaaagaacatgatcatcattgagcaagttggcgtgattcttttcatttaatttttggccttgtttagaatcttgtagctttttgtaagcacacatatgaatttcccaatttggttttgttttatgctgccccaattgggtgggggtttgaacttttagatatttactcctgaagaatattcaattcctcaaatgcagctctctcataaagttgaaaaaaaaaaatcttgaataacttgtctctttctctggaaattacttgaacgcgacccctttctctcgaatatatgagaacatgtctgatataatatctataaagaattatgaattaaaatctaaaggtgcatatgatatttgcattcatcccaaggagctttcaactctgcttatgtggtaaaataccatgatgattatacttatgtaagtagtgtattcgattcaatctatattattttaacttatagtgcattcaattcatattattttatattttggatttaatttaatttgtatgataactcaaataccaattattttagattggttaatttttaatatgaaattatttaatattaattaaaatgtatattttttacactaccaatatctcgaacataaaaaagtccttttagatttttcaacaacaaaataaaataagttgttaaatgtcttcaacaaattaaaataaataaaccaaaaataataagggaagattaaaaaaaatgtatgcagaaagtaaatgattagctttacttagattttgttttctcttgaatataaatatatgcatttgatatatttagttttgaaaaatttatgtatggtatattaattttatttaattactttaaaatattaagaataattatcttttttaccccctgtacttatgaca

SEQ ID NO: 302057 - DNA, 4441 bp, Cannabis indica
ttatcattttgtggggtgtaaatagaactcccctaaaaaaaatcctaataaaatattattaaaaagaatcctaataaatatagaaatattaataaatcttcccgatataattaatatcaccccatatatttactttaaaattaccagtttcatttctacaactcacaacagcccattttaaatgatttaacctaattaaaataggaaactaataaatttatcctatttcgagtcataataaataaataaataaaaccagtaatatatatatatatatatttatatatatatatacttgaggatcacgaaatcaaaacccaacacctataaatatataatttatatcgttactctacaattatagtaacgatactctctctctatatatatatatatgcttctgctttttcttttctctttcttactcttactcgctctcttcaatggtcaccatgttaatcaattcaatcaatcaacaatctccggtacgggtagtggttccaccagttccaatcaatgaagaatctccagtacgggtagtgattcgacaagtatggaaaggaaatcttctcgaagagttcaatcatatcggaaaattgattcatgatgagggttttcgttacgtctcattggatactgagtttcctggttgtatatttcatcctcatccaaaccccaatactcactacaaagttcatccaatttatcagtataatgtgatcaaaaagaatgtcgatttgctcaatcttatccaattgggtctcactctcagtgactctgacggtaatttgccaaatctcgacggcgaaacttttgtggtttggcaatttaatttcaacgatttcaacataaactacgatcgtcgtgcacaaaattcaatcgatttgttgaagaaacaggggacagattttcagagaaacctttcggagggaatcaattctgcccactttgctgccctaatgtaccattacaagctcgtcctcaacaatgacattacatggattaccttccacagtgcctatgattttgggtatttggtaaagattcttactggttgtttacttcctcacgctttgcctgattttctatatctggtgagccacttttttggtcaaaatgtttatgacatgaagtacttgatgggtttctttcctggtctgtatgggggtttggaaagtttggctagttcgttgcagatcgtaagagaagttgggttgagccatcagtctggttcggatagtttgctgacattgaggacttttcagaagatgagattgacttattttgagtctgatgaaaaggagttgagaaaatttgttggtgttttgtatggcttagagttagaaatttgctgtgattcaccctagtttcttgattctgatcataatactattttgtttagcttaatttgtgattatgactaatgcaaaacaaaaattcggttactccttttggataatacttgtagttttagattaactaaatctttttgagaagaaaaaggtttcaagagtacgtttaattatattaagaataaattttaagtgaggttgaatttgataataataaaagtaatgttggtttattaacaataacgatggtattttgtactttttatttgctttggttttgttgaggttttctagcatacaatctctaaaataattattgatctgtcaactacaaaatatatagagattgaaatgaaaagaaaaggaatacacatgattttatgattttatgtggtttattatgctaataatgaagttttagtcttaatataagatatataacaacctatattttatttatatgtggttgaagaatgtggttatgatgtgactatacattgagctttccgagtattaataaaatcataataaatattgtaattaaaaatagtcacaataaattataatttttgtgattaatatatttgaatataatatgggttcacctaacaattcaaaatattggccacctaataaaggagctcgtgagacttgctacatgaccaataacgtaaaggaggatatgaagccgtattttggcatcaagatgagttatgaaaaaagtaagaaatgcaaagataaggcgtcaatagaagaaataaaacaaaaatgagtatttagaaacaatggaaattgttttcagttagtaggagttgtttggcaaatatttttaaaaacaatcttttaaaaactgagtttcaaaaattaaaaatagaaaatattaaatattattttaatttttaaaataatttttttgtctacatattatattttatatttttgctcacatactcggatcctagatccgtacacgaatgggtttagattatggtatggtgaaaatattgatttttagtaagaaaaaaatcaaatatagttttaaaaaacttgtacaaactttttaaaatgacaaaaattattttatattctcacttttaaagacataattctaaaaactgaaaacacaaccaaacaaactcaatattattaagagccccatcttgtcatccctaataacagttgctaataattgccttctaaaattttactctttttaaaaacttaggggccacatttactattattaggggtgatatgttgtccctagagcatatgatagattaatgtgtctaatactattattataaagtggtgttttataattagtgagtaattttctttttttttttttttttttttttttgaataaagtgagtaattttctttaatatttattaaaataaaataagtaagatttaatattaaattacaccataaatagtatactttagactaatttgtattatatataaaataaacacaaataataataatatatatctcttatattaaatgtgactatctaaatgaacactatataaaatcttacttttaatcacaataaaacttatgattaaagataaaaaagttatggttaattataaaatatcattattgtgttgtggctaaaatgctaaaaaatattagtcacaaaattataatttgttgtgactaaatgtgtttttagtcacaatacttgttgtattaaaactaaattagtggcaacttgtatctaaatattatattttagtcataagtaactttttgttgtggctaaaagttatatttagtcacaaaaaaattatgttgtgactagaagattgtcactaaaggtagcttttttttaccagtagaaattattgaaaattattggtttaatcacaatattttttctctttgtatgtcaaaaatgagatacttatcaaacaacacaataaacaatatcaaatatcaatcaaagcaccacaagcaatataaaatacacaacccaatttttacgtttaaacccaatgcgagaaaaatcacgggaccgtaatccgctcaaatcatccactattactaaagttcaataatggtattataaagttcttctctagtaaaactagaggctcacaacaacattaagattaaacaatcttggatcactaatacaatcatcatcatctcaaaaagatggatacacaaagaaaaagtttggatctcaccaaatgagtattgtagattgaacaattgccaaatcgaaaccggtaaatttgaagagaccttgtaaggtttcaccatccaaaattttagcgaaaatagatgagaatcaactacttgatcttcaatgcaaaatgacaaaaacctctttctctctctagctttctttctcttctttccctttcttttttttttctttttctacaccctcatattctttctcttttttttttggagatttttacaacacatactaaaattttcaattttttccctttttaccgtggggtgaattttttttcaaaattattgtgctttttttcaaaaatactatgtttggcttaatttgtgattttgacttattgtgatcagtgtttttttaaggcatgcaaaacaaaattactgttactatagtctatatgttatgcttttggataatacttggtacttttagattatgggctgtagttctgatagtttgctgatatgaagaacattttagaaggtgaggttgacttgatttgactctgatgaaaaggacaggagttgacaaagtatgttggtgttttttttttttgaatgagatgttggtgttttctatggctagaaatttgttgtgcttctctctagtttcttttgtatattcagacaattttaatttctgattataaatactattttggattatggtaaatgtttcatgccaaaaatgttatctagtgtgaatcaaaggtgtttgattggagagtgaggaaagggataacaacactcgtgacccttccaccattggagaacttgaaaggaattgaagcacttactcagctcaagtggccataggaaggtgcgtgtgtgttgaaggtcttgggttcgagtcccaaattatgcattgt

SEQ ID NO: 302058 - DNA, 2590 bp, Cannabis indica
atagtggctatttttacaaaacactctatacacgatgaaaaaatgtaatttagaaaaagtaattttttttttgaaagcattttatgaaaatctgcttgactaaagaaaaattataactgatatcaaatctacgtttaaaatagtttcacatatgtattaatcattttcataggcatcggtccagaagttccaaagatttatgatttatgtccatgccaaaggaatgattgttgatgatgaatatgtaatcttgggatcggcaaacatcaaccaaagatctttggatggttcaagagacacagaaatcgctatgggtgcctaccaaccaacacatacatgggcagcaaccactaattctcatcctcgtggacaggtttgaaaatacttcactggttcccattcctcaattcaatgatatacaacaatatacctgatagttttacccaatttctatctttaatgattgcccatatttatatatgattcttaacttctttttttttttttaaaaaaataataaataacaaagaggaaagtttccagtaactcttaacttgcatcccttaatgttgttatgatattattattggattcaggtgtatggttatagaatgtctctgtgggctgaacaccttggagagctcgaagattgttttcgtgaaccacagagcctagaatgcattaagcgtgttaataagattgcaaaaagtaattggaaagcttatgttgctgaaaaatacaagaagaagatgattggtcatttgatgcaataccccattgagattaataaggatggcaatgttagttcattgcaacattatgaatcattcccagatgttggaggcaaagttttgggaacacctaccaatcttcctgatgctttaaccacataaccaatcaatatttgtatactacaaaccataattctcctgtttcttgatatgagtttgagtatgagcatatactcttctataaatatatatatatgtaaatgtactgaaaaattatcgggtactattagtgattacttttaaatatttcctataaatttttaagaaattttctatagtttaaattgtggaaaccagaattccaccaacttgttgcacgtatacttatttgcatatttatattgccgcactggcgtgaaacacacttctagtgtttaaaactttatttcgacatcctaaattttcctctcttttttctttagtttaaaccgtatttaaaaaaagtagttacaaatatatggaggtagaaattatcatatagctattagctaatcttattgctgcactagtgattaaaaatagaattaatacattgtcaaatttattgtacttcatattgttattagctaatcctatagttctattattgatagcaatgttcaagctcattattcttcaatctttttgtcacatctcaaagcttaggtcatggcatatttgtaatattcataattagaaagtcaaaaatttatggggtttgactgaaattaatttatttatctatatttattaagttgcaatttatttttaagtaattattaattgtgagaaaatgagttttggtggccaagttttgagagtcttggtgactaagttttaaagagtctttgtgtccaagttttgggactctataaatatgttttgtgtgtttgagagaggtgtgtctggagaaaaaaagtgagttgtgaaaggaaaagtgaatgtgagtttgttgtgtggtgcgattgagtacaaagcaaatggtatattgggatttgagtagagagtatatataattttgacgtgataagagaaatatatatctctttacgggtttggtagtattggccttacttttaaccaacgacaatgatcaaattaaagcgatttaaggataattaaaatatataatgaatatagataatatagagtaaagaaaataccagatttatagaggttcgaccttttattgttggtaatagcctactcccatttagttgtattgacttgtgaaaagatgaacaagaatgcttgatctctcttagctcttacaatgatctctgagtgtgtcactcttgaatctaagtctctctcctgcgttgtctctaaatgaattcctgtccctaattaattacatcaaattggtttccaaattcaataaggaatagaataggaaatctatctatattataattacaattagcataataggaaactaggtaagtttcctttcttcttcaatactacgagtctatctcatgaatttagggatagtgccatgtcttccaatcttgtagatatatgagatatatctctgaaattgtctaactcacattttctggtcaatgcatgcaaactacctgcttgatggaagctgcttggatgtctttacatgctttgtttgtatgtcacaactcctttcaatgaccttgagtatcaaatcttcttgtacgactcattaggaggagaatcttccgtctaggttatgaattctatcacgtgcaacccaagtagatcccatgtcactattggaacatattttacgaggacctacatttactaacatgtatcttgataatatgattatattctaacatcct

SEQ ID NO: 302059 - DNA, 3047 bp, Cannabis indica
aaggggttttatttagggcacaaaaccgaacactgtcatcttcgagtagagttagagcataaaccattgtggacaatgaaggccttaaacatagatttggcattagtaagagaaaagtgattattgcagttaaatgaattggaaaaattttgaaacaaggcttatgaaaacacaaagatctacaaagaaaggaccaggaagtggcatgacagaaacttggtcagaaaagagtttcaacccagacagcaagctctaatctttaattcaaggttgaagctttttcctagaaaattgaaatcatgatggtctggaccattcagagtggttcaagtattcccatatagagcggtggaactcaaaggagaaaaacatgagaccttcaaggtctatggtcaaagactaaagctttacttgggaggtcagattgatcaagccaaatctgtcatcctcttggtgcctctttgatgagagaaactgagtccaactaaatgatgtgaacgatagccctttgggtggcatcccaaaaaaattttatttttaatttctattgcaattttttagagacaattacaatttttattttcgttagtttttagtttttagtaaattttaattttgattttagaatttgttatagaaaaaaaatatgtagagccatgaaaatcgtaaaaactagttgatttttttttaaaaaaaaaaaaatagtagtgcccaggcattaaaattcaatgcctaggcatgcgagtggaaaaagaggcagtaagcaagaggagaagtcgattacacacgggcctaggcatagaatctctatgccgcggcacctgtagctttagaaagaaaaaaaaattgttaaaaaaatatcacagagaaaaaaccaacatgaatcgcgatatggaaaccttatgctgcgacacctatgttgaatcgcataaataaaggggaaattttttttacacgggccgcgacatatgattaccaagccacggcatacaccccctaaaaataggcaaagaggtattgaatcatgccattccaatttttttcaaaaacttctcattcctcatcttcttctacacgggcctacccctctcaaaccaaaaatttcaccattctcaaccttttcaacccaaatttcttcatccaatgtcaattctaatcacccataaataaaactcactcatcaatttattaatttatcacccacattcacccaaatcatccaaaaaatttcaaaaaatcacaaaacctaaaaatacctaatccattgtgttcatcacttaatttttgggaatacttggtggaggaggactacttcaaggtttacaaagcttttattctacaagtaagtgttctttctcactatattttggtgaattgaggaagattgattgtggattgtgtgatattagagataaatattgttgcggaatattggatagttgtgtttgatagtattggtgattaattaacataaattagtgattaaatcaagtttaggggaagtacaaaatacattggaggtgctccccaatttttttttgacaccgaaagtttgtgttattggctagtaaattggtatgtcgtctaggcctaagagaactgggacccgagcccaacgcaatgtataaggatcgtcatcaacagatcctaatctctaagaaaaacaaccccaacccattaatatatttatgaatgagaaagcgacaaagagatatcaaaaactcaaaaagaggggtgtactttgggagaggggctttgaatttcaggatgaaccttttccaaggaccggggctatgaaaatattaggggtgagattgaggagacaatggcaaaaattatgtgccggagagtatgtggaggaggagaactataatattctctatgaattctttgccaattatccctacaaaagcaattttagacgaagtgtatgttagaggagtacaagtgcccattagattgaatattatcaacagctttctttaaccttagcatagtaggggaatggatggatgagagaatactggcactgtggagagacacacttacagatgcagccattgcaacagttttggggcaagagggtacccaatttcacattaagggaaatcaaaatcagaagtctctatactggtggaaactcaatccagtggcaagagcgtgggccttttgtaaatgccagaattatgccaacatcacatattttaactttggattatgatcattttgtggtggtatctgctatcatgaaaaaactgaccttcgatataggatgggtaattctaaaaatactaactatgtttctcaaataaacaccattataggcacaacccatggtgctctgattatagctttatgcttaagtcagggagttccaattatagaaggagacattgtcaaagcaccaatgcaacccatctccagaaggtatttttatgaatttcttcaagcatccttgacaccactagaagatacaagaaaacaagaaaaagatgatgcgccacatgatggagatggtgataaggaagaggaacacgaagaagcgagcctaagtgagatggttctacctcttctccagattgagccacctttggacactaggactcggggcacttatgatagattggattatatcttcaggcaaaatcagtaaataatctagtctaaccaagcccaaactggctattataactcttatcttcaacagcagcatgattttgctcataggcaagtccaggagttatatttcgctttctccatgtggactatatatgaacctcgatgctccagatcacttttctccaccactgccatggtatccataccaactaccaccactgccgccgctgccatactgatatgacactcagataagttcccttcttattctctttaatctcacattggggacaatgtgtcaactaagtctagggggtgaacttaaaatttttagttttttgtttgttttagaaaattttagtccttaatttttagttgtttctttttagttgtaggtagatagctggtttggaaatttcatttatttt

SEQ ID NO: 302060 - DNA, 1215 bp, Cannabis indica
ttttgaagcaaaagaaatctaattttattccatctaccaaaaaaaacaatacaaaaacaagctgcaccaacagccaacaccccttacaaagctttaatcaaatccattacaatagactctctttcaaataaatttaacccaaaaccaatttaagctctagtcttaactatcatcttaacatgattactaatggacttagtagaagcacaagtaccttcaaaagatgcaacgatttctataatggacatagcaataataacaactgagttttttcaaccaatttttatcccaacacatcatttcttgtaaggtctaggccactcaaaagaaccaaatcagctagaaatctcagctaaaactcttctagagaaaatacagctaaaaaaagatgggaatgagtctcattctccacctggcaaaaagggtcagcagatgacactttaaagcttgccaagtgatgaaacaatgcttcggcacaacctctctattccacacaaagtgatcatagctgactttatctttgttaatgagggataagtagaatagattagctttgaacttacctaatttgccaccttctaacacaacttgtatatcaatactacctctgagtttaactaatttcttaaaataccaactagcaacagtacagggtcggttctgaattgaaatgggttgtaagcaaaaagaatttttgggcccttactataaaagaaaaagtatttttaaaaattattaaaaaaatatattatatttttaaaaggtaatttttttatttgggcccctaaaatgagtgggccctagcgcctatgcccaaggccgaccttgcatcagtattaatcttcacgttccaaaaattagttttgttcatataaacagagttaatacatacgcaatcttgcttagtagaaatagctcaaatgtaattagtcatcaaagctaaattccacttctacctttctttaaaacatagaccaccaaaatcctttggcaaacaaacttgatcccaagaacaccaatgaagcttgctcttatttccactacaaccccacaacaaattttcacatattttatcaatagttgttgtaactttttgaggcaaaataaagattctcatccaataattttttgggcttttttcataaatgtacaataaaaataacataattacaaaaaatgtgcaaaaaaaaattattttaaaaacttatatatttt

SEQ ID NO: 302061 - DNA, 4150 bp, Cannabis indica
aaaaaagcatggttgtcctgtcttctttctgacatgtttgagtggagcttgtatgagtggatcttctacgtgacactgaacggggttacaactcatcttgacttctttcgtgacctgtattggcatgctttaggaagcccttatccttcacagggcattcagcttcagtcctcaggactgggagagattactgattgtagatgctcctcgtgtccaaaagctttaaccaattgactataatctatgcttccttagtcagaatccatgtgtcaagcttgcaaaaatttggacaacatactcagaattgcactcttaaattaacagtaacactgtataaccaatatagatacattatccattgtaataaccattaccaccactcaatcctccataaatgatttgcaactgaggggttcaaattactgttccactctttattgtattttatccttcaaatatttcgctgcttgtaaaatttatttttgtaagctaataaaattacagaaatgagcactctgtcaattacctatcttgaaccaaactctaaggagatcatcgtttcacttcttagtgtggaagttatttatctccatatctataattaacacttccactaaattatactatcgagttctcaagatataagtatgagctagtccgtagggtaagctggtataaaaaatgtcaaagaactttaataggacaattagcttaagcattaatcatctcaagatctagaatgaattgacctatggtcagctattgtgaggtgactagattagcttaacctacattatactctgttatataatatgaagtttagattaatgctaatgtaacaaatacatgcaatcttatctactttgctaattttctaggaagaacataacacttgccaagtgtaagtagatcaaatcatagattagctagttagtgtaaatccaatgcatagactaatcttaggactacttattttgaacatacattgcttatataacactgtgactacatcactataattatgaattcattatcttgttcatatgatccagatttgatagatgaatatattaaataatgatatacaagaaacatggaattttatatgggtataaaaccctaacaaactcccacttgaacatataaaacaaatgatacatgtttcttaaactaataattatattgagctctctatcagtatcatttataataagattttttagcatactctgtcactatcttattaattttttaaataatacattgccacatattccatgaagatgtggtatttactatacatgtttttcatctcttgtagcttgaagaaagtctttcgcttctgtattttccaccaaacaaagacaattgagttattcatttatgatgtaggacacaaatcagaataaaacctttgatctaatctcgtacatagctatttaatacgagctatgtatttagctacttggtggactctgaagttgcatacaaattaacaatttttcatattgttgatccacccctaagagtagtcaccattctagaacatgactttttgttacaaccaactgtctataactagaaatgtacctctattgggtttagaaaatccaacctctttacccaaaaaaaatgatctgatgacactggcaacacttttgacatgtggtaagaaggaaataacctttgggccaaaccctcaggatgaaggtggtcgacttgagcattggaaacattgtcgatgccctagttacattagtggacacccatgtaggcaccaagatccaacaaagatgtttctatgctaacaactcctagtgaccctaaaatgatgaatcatgaagctgaggatgttatctggccatcctagggctcaaatcgggtccaacattggtgttgggttcccaagttgatatcatgtgcactgtctcgcatcattttttgtttctattaaaatattgtgggaaatgaactctgtcattttcctaagatacatgagagacatgccctagccaagtttaagactttggagataagtttatgacaaatgccacccaaacaccatgaagccctaatgggcacctaagttaacatctagacgggtagggtttaggtttcttaagaacttttaggacccgaattccttaaatttatcaaagaacaatgctaagacatgatatttcatcaaataccgaaggagcccattcacaactctgagcacccaggttgacattccaactagggcaccaattttttttcactgagtgatgcccatggaaatttgataaaactagaatcgttggagtacttttctccaaaaatagattgaacatcaacaagaccaattttggaaatgtcgcccaggttgacatatcttaacctacgacactccgtgacttctttctagataagtttcctagacatttcctttattttttgtccaagaggaaaatacaaattctcttgggaaacaaacaaagtcatctaaagaccagatgaaaagctgcgcacccagggtgaaaactccgcagtcaataagcagacaagttgacataataacacttctagttgatttgtcaacccaattgtgattctattatgtgaagtatcctcatttttctcccaaaacaagacatgagacttggaataggagaaatatcatctaagcatcacaaggtgcaagcatacaagcacattgagcgcccaggttgatatttggcctacggctcaatgttcagtccttcaaacattaatttttctctaggcatcagtcttatttttccccaaaataagatttcaacgattttgaaagtcaatatatcatgtaaatgtttctcgtgcaagtccaccgatacccacgtacactagtgatcactcgatcacaacctagttgtcattagtgattcactaagcatcacccgtacatatcaagttaaattgccatgagaacttaaccaaggtaaaataatgaactaaggatagcttacacatcatttaacatctcaaaatattcctaaagcccaaaaaaccatgttcttggcgcccagattaatgtttacggtaacttggtcgtcgacaagtaagtttgccaatttttaaatagtgcacaatgctcagactaataaccataactctctcaatttgtatcaaaattgcgtgattcaagtagcaagtgaaatatcttttcaagaccgatttaaaagtgtctcatacccccactgcatgtctaaagtatctagcctcaaaattgactcacgagttcctatagaatttctcagcaaatttcatgcaaaatttatattactttattgtaatttaattggacttacttccctataaaaggaaagctcccctagctcattttacacatttctcattctctctacaaggtaaaagcttctatatcttcacactttctctccctagaaattgtgaagtgaagctagatttaataatattttcttaagttctcttataaggcaatttgctttttgtgatagtaaaagctctagtagatgtagctccattacattcacatcaaggggagtgaactactataattgtggttttctcttttgactatttgttcatacattcaatggtcactgcttattagaaggtatatagttgttcacttttcaatgtctacattttggtgctctcaatgagtcccttggttgtcgttatgtttctagtgtctgagtaggtgctttaatccaaaaggaatttgcatgtacaagaacctaaggacttctagaaaaattgtgacaactagttctagcaatgtttattgtgatgcttttattggcaccacctttagtggtagatgaagagctcctgcctcgagaccaaaaaataagatgttgggaggagttggaaatgacactgatgttactacgaaactaggtgagttgcgtgtggaacttgacgaggagcatgtgggcctcaaaaagaaacatgtgaaacaatatgaggaccatgtgttcaatgttgggaatattttaccaaaatctagatttactaacaagtatgctgattaacatcctaaatatgaattctctaaaaaaaattaaaataaacacataagggtttaagaaaaccttacattgattatagcggaagatactgactccttccgttcaagatctct

SEQ ID NO: 302062 - DNA, 2007 bp, Cannabis indica
aggatgttaaacaacatacttggtagtaaatctagatcctggtaaaataattccaacatctcattcttgaaactggtttgataaactttgaaggaaaaaaacctgcgatccttagatcttggatgttggatatggattcaactaaaactgtgaaaccggtccctatgtgggtgagattaaacggtctatggttgcaatagtggggtaaaaataatcttagtgctttatttagcttaattggcatgccaattaaggtggacaaggttaccttgaatagattaatggttgaatattttagggttttagtggatatggagatatcagacaatccaccaaacataatggcatacatcaatgaaaggaagcaattggcagaacaacctattgaatacgaatggctcccttccaagtgtgggacttgcggcctgctgggacatacatttgctaacagcaataaagagaagagctttgtgtggagaataaagggtgatacaaatcagaagactaacgttggataactaaaacattattcgagtaaggatgataaagtgaaggaagtctcgaggataaaggagagaactggagtggaagatgtgtattctacagttcaggaaggtaggatttcaaatgagattcaagatgattagttggtaattaataaagactaacaattaggcatgaaggatgattcagctagttggttaattcctaaaaagaaagggtcaaaacaagttgtaattgctgatctaagggcttgaaccagcaacggatatgaggtttttcaagaacctggagatggggaactggtcacaaacaatagaaactattaatggaagtttgtaacgtctttagttggaatgttaggggcattaataaaaaggagaaacggaggtcgattttggatgtttgtagagagaataatgtgggtcttggtgctttatttgaaaccaagattaaacctgagaatgttagtgatatggtttctaataatatccctaactgggatcattattctagtactatagttattggttgtattttattaatttggtagtctaaatttgcccatgttgttatattgctcgaagatagccaattaatccatattaaggttaaagttgtggggattgttgatgggatcttcgttacaatagtttatgggagtaataatgctttagaaaggatagctctttttacgaagcttgttggttttggccagataaacaagccttaggttattgttggagacttcaatgcaatgtatggtttccaagatagaactggtggtaaactagtcttggctaaagacattgaagatgatcaaaattggatctcttttggccaagtagaggaattcaatttttgggggcccatttcacttagtctaacaagcatgatttggggaatagaattcattcaaagtttgatagggtatatttgaatgaaggatggctggattattttccaaatactgaagcatgttttaaatgggattgaattttttattattgttattgtgttatcaaaagtaacaagattggtagtgctggtattaaaccgttcaaatattgccaccattggtctttccacaatggcttcaaagattgagttttgacttgctagaacaggtctgttggaactataatgttaactgatataggcaaaaagttgttgagagttaaacaagctttgaagaggcttaacaaggaggagattgatgatgttgtgtcaatttcaagcaaagaaaataagcttttattaaagcccagaaggactggccttgaccgtaatgacatcagactacatcagaattaaaaagacaagaatcaagagtacatttcagctttgaaaaactatagctgttgtaataccctgaaattaaggaaatggattagcaaagccctaactagttaactgagtattattgtagaattatattattatataatttattatatgcgaattaatttgagaaatgacatgttaagacccccgttggtgagccag

SEQ ID NO: 302063 - DNA, 3906 bp, Cannabis indica
ttttctattgaatagagtcactagatgtgatttatagttgccttagtttcataccttaattttgacatgtgtatcaaatagctctttttgtgtcttgtttttgtgggagtcatatttgagttctttttagcttagagtatctgttcctaggaagagagactggagtagatccaacatcagatacaatgtggactttgacaatagggagatgaagacactgaaccaactaatgttttttgttagatgatggaaatcttgataacataagaactttacattagctaataatatttaatgagaaaatccaacacgcactttccaattaaactcctaaatctgcactgccaacgaaacatctacgagttctgttttggagcagaaataattcactttaaagatacataatttcagtttgttgtgtagaaagatgtaaaccaaattgatcctgtcctttctagctcaattagggaggagatttctgtatatatttatgatgtgtatcagtaggtgtttctatatattcttttatgttttattagaaaccactaatatcataatgaattgtttcataccagttgctcacccttttttttctagtatgatgccaagaaattgtacagaaggctcatatatctacggtcggatcctgctcaacacaagtatcaccgtagctgctgttttggactttgtggcaagaaggttgatcttgtagaccattatggaaagagattaaatagtgtagaggaaaatttaagactgcagcgaacaggggtctcattcacaggagaagtaagtgttagtctgataacttcttatcttataccacaaaacttgtttacttttgctgagatcagttgctgttcgtagaactttatgaaatgtatttgccataattttttcaaatatgttcaatggaacatgaatgagaactcctggattaaatttatgggcatgttggtattccattcatgtttctttcattagagtctcgacataaagttcgtgacaatcccagaaatcaagtcaatttttactatgctttactaacaaagatgtcttcctcacttttaaatttcaagtgtaagtaaggtaccatgccatgaaagagtggaaggaagtaaaactaaagatagaatcaataattatgattttccttataatgtgtcatggaaaaactcttctggatggagtaccatactacatgacaaagcgaacaacaatgatgtagctctatatactagtatttttttacagttaagctggattctgcaaatgttattgtaactggtgcatcttattgatgttctatctctcttcataacttattaggaagttcgggcagcttttgtgtcctttaagtctcggtatggtgctgctactgcttttcacatgcaacaatcaatcaatcccacacactgggtcacagaggaagctcctgagccccatgatgtttactggcctttcttttcatcatcattcatgcgaagatggatatctaagctggtgattattgttgcatgtattcttcttacaatcttatttcttataccagttgtacttgtgcaaggtcttactaacttgagtcagctggaaatgtggtttcccttcctcaaaagctttctgaccatgtaagtgtaatgggaagtgtatttggtttttgtctcatcttttttgcgggtaatatcattattagcaattcaattttgctggttgaagattgatttgttctgtaaaacatcctgtgtttagcctgacagttttagttagtaattcatctgagtgaatagagcaaaatattttggttaaaatgagtctctaggtaaatctgatacagaaaactaaacaaaaatgatgaacctagagatttctatgaggttgtttagttttccttgctcaaatattcttactttagcagtattgatctggttgttattgtgacaattgtgtggttgagtctgaaattttcagttattcacttataattttgttgatgccaaactaagttgatataacatttgtccctttatgcagaactatggttagtcaaattgtcacgggatatcttcctaatcttattcttctgttatttttaaaaatggtccccccaattatggagttcctttcatctattcaaggatatatctctcacagtgacatagaaaagagtgcatgcaataaagtactttggttcacaatatggaacatattttttgctactgtattttctggctcagccttatctcagcttaacatcttcctcgagcccaagaatattccttctaagttagctaaggctgtccctgcacaggtgagcatatttttgtaattgtgcctcaaccttccgaattgacactattgcatgtgataaagggcataggacacgtctgcatatgttcttcttcccgagcataaaaagtttgctgatagcttttcgtcttggaacaatatgaaatgctaatattctgtagaatcacgtaagaaagctagaagataagactgtttctttcttcagtattggtgcataatataaaaatatgaatgttacttgtgaagcttttgttcaactaaattttccttattcacttttctattgttatagcaactgttaatttggctgcaggcatcatttttcatagcatacgttgtaacatctggatggacaagtgcttcatcagaattgtttcgtgtaattcctttattttgcagtctgctaacgagaccatttaccgactgtaaagatgatgaacttgaagttccttctattgcattccacaaggacattccaagaattcttttctttggactgcttggaattacatacttctttctagctccgcttattctgccctttctcttggtgtacttctttcttggatacataatttttcgtaatcaggtcagttggcttttatattcccattttcaaaatctttggtacattttgtgactctgaccttgagtaaaagagtacctactaacttgttataccttgctttctttagtcattgcaatgagtagctgcaattcgcacttaataatttaacaagctagaggaagttcaattttcaattattgctggctttttccaaatcacttagtttcaaatagggacttttaaaactcttgtatgtaaattccatttgtttgggacagcactaaatacttttatgatattctaatgtggtaacgatgtacctaatatggaagctctgaatgtcattttgcagtttattaatgtttatgcacctaagtatgaaactgcgggcaagttttggcctattgtgcacaattcaatgatattttctctgctactcatgcacgccattgcagtgggaatatttacattgaagaagcttcctaaagcatcaacattaattattcctcttccaatcctcactcttcttttcaacgagtactgccgcaaacgcttccttccaaactttattgcctactctgccgaggtaatctgtaaaatcatgacaattttactttatcttgtaggttttacactcatactgagccagctttttcttttcattttccagagtttgattaaaagagataggcaagacgatggcgattctgcaatggctgagttttttgaaaaactggtcacgtcatatgaggaccctgctatgatgccaattcatttctcttctgatactgacagccttcacagtcccttaatccattcagttccagtttaagattggttttttcttttttcccttttttagataaaatctctagtgtatacaaccattttgtttttttttttgggcaaagtagtgtcatgtgtgttactggttaaaatacattgttattcaaacttttctatttgttaaaaaatgaaattgtttgagattcattaccattctgtccattcattgtagtgttatatatttt

SEQ ID NO: 302064 - DNA, 3916 bp, Cannabis indica
tctttttgtgagatttttttattttttttccattttattcctttgatttttttaaatcttcttctattttaaatctacaaaaataaagataaaaagcgtaaaataacttcaaacaagagtagaactaaattaaaaatatattaaacttaatctaaaattagtattaaaaataacctaacaagtatttaaccacaccagcaaatctaggtaagacactggccaaatagcattactaagtcaagacttaattacctacagaagttacttggaaaatgcatgggcactcaaagaaaagatgagtatggcaatcgtcaccaacatcactcattgggcaaagagtagaggaaatagttatacctcttgtcaacaagtgatctctcgtcaacaagttattatgagagacttgccaaaggataaatctatgttttgccaaatcattttacaattatcaactttagcaaaaggagcaagaaaggagttgtaaagtttactaactcgaaaatttcccccttaccaacatctaggattgtgtcccgtgtgaaaatattcctaaggttgagtagtttgcgctaataccaactcacatcccttttcttatcacccacccaaaaatcttgttattttaagtagattgcattgacccatttaaccgaaagaacatcttgctttgttgaaagatctcaaatatatcgagcaattgaagctttgttctatttagctccattctggaaacccaaccctccataattcttagggttgcagacaaggtcccacgaggctcagtgcaacttactggaattacctcgcaccccacaaaaagttcctacagagtttatcaacatccttgacaactttttgcggtagcataaagatactcatctaatagcaacaaatatccaataaaactgaatgaatcaattgcacttcctggaaaagagtggtgccgacttgcccaactatgtagtttcaattgaattttcttaagaaaataattacaattaactgccttccatttttgttggtgacattgtcacaccaagatagggaaatgaccctcttcaaaaggaactagatgcagaatggccagattaattgtatcatcaaccccaccaaaataaatatgagtttaggttagcatgaagacctgaacaactactaaaggtagtaaaaacttcttggattatatgaacatattttttcgtccctttataaaacagaactagatcatcagtgaagcatagactaattatctttaaagatttacacattgaatgatgcctgaaatctgaattaagagcagcaaagagtagtaaccgagtaagatattttatcaccaacacaaatagcaaaggagagatgggatctccttgccttaaccctttttccttgaaaatttcccctacacacgaccatctaagactaaagagtaagtagacccccttaagcacgtcatgatccaattaatgaatctgacaaaaaagaggtcaaacttcagaagctcttccaaaaaattccatttccttgcatttttaaatactagcataaaaataagttgtatttttatccctaaactgcaaccaaatgatcttgattttttgcctctggtagttttccatcattttacaacaagaattcaaggtagcctttatctccttctcttcattcaaaacctccaccgcttgagtgttattttgaatttgaagctgaagttgatcattcatattttattatactaaaagatatagtttgtatatttatggatgtcaaagcatgatgtgaagttttttggttatgtcattgttatctaagttttaattttatggtgtattaaagaagttttaactatatataagaccacacaagtttttgtactattatgatagatttgatgtcttttacaatttatgtaccttgtttggcttttgtgacatttattatggcttgttcctatttgtttaggctaattttatattatggtcaatgagtaagagaattgatccattttgtgctcataatttttacttcaacgatttttcacttttaatagataaatatttaagtctttttaagtccttatatttaaaatggatttttttaccatcttcattttacattatttagttgttttcattatattatgtggtaatagagttttatttttattatcttgtaggttattttgtggagagcctacacttatagagaatttattgataaatttaattttaaatataatgtgtttaatatttattttcaacatttttaaattagggtgttagtttgttgttactaaccaaaaggtaataccttttgctagttattcttaaaaattatgttggttttttaggcttttagtaatactgagctattgatatagattgggtgttaaattttaagtttgtatttaaattttattttgaaaatggtcattttaatataattgtatttttgtttggtgttgcgatattttttcagttttgttagctctggcgacaacttttaataatgggaaggtgttttttcaatgtgatagagtgttgtttgaagatgttatatctttattgtctaaattttccagggacacttttgatctatgtggcttgcaattagaattctacagctcatggttagcaaaacatgtccaattagacgatgaactatcctgattcgaggaagttctactaccgttttgttaattttgtgtaactctgttcaccacgtcaaaaataaaataaaaataggctacaaattttatatcaaaaaaatcatatttaattatttatacccaaaggagaaaaggtacacaccgataattcatttaaaatccaatagaaattcttaggccatttctctctccctttcaaaaaaaaacaaaaaatacttagttaggccacatgcatatgtcttctttatatatatatatatatataataaaaaccgtaattaagaatttactattattggacatgcctgttagagcaaccaaccaacaatataactaaactaatacgaaagataataaggaaaaactcagatctctatatttatatacaggtggggagttgctgggaaattgatgacacttgagaggagtactatatatacaaacgattttattatggagcatggtatggtcagagagagaacgagatctagagagagaaagagagatgaatatccacatatatatatatatggggacaaaaagcccaacacacaggacttatgatgatgatgataatgatgatgatcaaagaagaaggaaacctccaactggaccaaagtctctctcttttgcttcatatatgtctatatatgtatatgcctctttctggtgaaactggtttggttgcctcttctctctttctctttctttgtactcatctctctaggtttgtggtcctaaaccctacttctctagctagacctatagctagagccctctctcaattaccccatttatattctgtcgtctacatattcataattaataaataataaagtactacatatatatatatatatatatatcttttattagaaaatttaattaaatataaattggggattggcacgagtgatggttgccctcaatatctgaatacataaaataaatgatatagatcaaagacaatgacgagagaaaaggatatatagaactagaggtccccaattgataactcatatttataaatataattaaaatatatttatatgatcaagatagttgaatatatattatgatatatatgaatcattaagatgtgatcatgtgaatatgacctccttagctagctggctgtttagtatacaactatgaatacacaaaggtatactaaaaaaatcacataagataacaaactagaactggtacggaactgaagctatatacatatatatatatttatgtattata

SEQ ID NO: 302065 - DNA, 1478 bp, Cannabis indica
agttttgttctcatttatgatccgagtttcaatttagtaacataattggatctgacacagaaaataaattttctaaatcttttgtttgtaatgaaaacataaaatcatcagtctcgggcacttattcattgaatggtattgtgtttttacatgaagtgcagcctcacactatccggttaaatcacaagactctgaagcaattgaaacattggacatggcagtttgtagtcatcaggccggtttgctccatcttgatgataacgtttcaacttattggaatttacccaagctggctcagctggacattcaccatcattcttaacatatcagtttcactggccttgtactcactcgtggtgttttaccatgtgtttgctaaggagttggcaccacacaagccactttcaaaattcatgtgcatcaaggggattgttttcttctgcttttggcaggtacaacatataagtttttgggtctataacgtttgtttcttcgcataaattgaatttaatagtacttgaaaatactctggaaatatacaccatattgttgcaaaaggattttgacataaagaatgaatacttaaatgtagctttttggcatgagaccgagaagacatcttaatgacactttaacttttaattaactggctattctcaactaaattttgttatcagcttggaattaaagtagagttttagattcaatcattatagcaccggaggtacctgactatccttttgccagcaacatactttatgccattaatcagttcctaaataactatgtaattttcattacatccttgtcctatattgatagaatactttctaacaaaatttattgattttggctccttgcagggactagtgcttagtggactagttgcccttggcgtcattcgatctcaccatttctggttggatgttgaacacattgaggaagctattcagaatgtgttggtatgtctggagatggttgtcttctctgttattcagcaatatgcttatcatgtttacccttacagtggagatgttgaagcaaagatgaaattaagtaagaagaacgaatgatgtaatgatcgaaaccagccatgtattttgtctagcagcgtagtcaaacatgaacttctgttaattttgtatcaaaactttttaatggatggcgtaaactgtatgagatggtttttattttatgaacatccccacattggtgttattaggtgtatactatttcttactgtattcaacttggctttgataataaagacattttactaaagccacctcgtgtgggtatgaattgaagttgatgtctatgattttgatatcaataaagttgtttctagtgggaagcattcaaataatagtggtcgtgacaatatgaatgaagcatgggaacttgaacagtgaggaaggtaaaaagtactttttttttatttggactcctaaaatgagtaggccctagacgcgggccta

SEQ ID NO: 302066 - DNA, 4670 bp, Cannabis indica
ggactcgaacgctgcaatgctcacatttacccacctaaccacttaaatatttttcagtgtaaactaaaaattctgcaaaattatttggcaaaacattcattaaaaaaattacaaggatacaaaaacattcataaatcagtataattgtatgctataaaaacttccaacacatttactaataaatttgctctattcacacacccaaaaaaagtaaatatataacctgttgcacaacagcatcacggtaaaacctataggagtggagaagcattgcaaccctatcgacttgaagacagtatattcttccatacctgtaagattgacaaagttgtgtaagccttgacattggcaagcatcctgaacttagcaacagaaactaaacaatgtaaccctacacagtgacgatgaatatatcttcagcagcgaggactggcttgttgttagcctcagatttagctattaccatctcaaactttggcaagcgaataatcccagcagatgaaagcttaagagaaaaaataaaagctgcatcagatgaataaaataacaaaaagtccaatcatctgttatcaggacacaacacatgtttaaaattaaccatgtaaaagaatcacatagaagctgcatgaagttttattttgaataacaagatatacacccattaaaatcacaaaattcaatgttcttaaaataaaataataaaaagccaaaatataataataaaggtaaagatgaaatcccctcaaaaaaaaataataaggtgaagatgaaggagaagactgtccaccagtgggatacgtttcattgacatagttatctgatttaagttgtaagcggacatcaaatttgtgcactactgtttacatttaggcacagcaccacctataataacaacaactccgaaatgattcctaatcatactctgatttattaaatccccttacagaaacagcctagaataacagcaagatcaaaagagaaaaagagcagtaatacacaaatggcatacctgaaatccattgaaggtcttgcactgcattccagaagcaagaagaagcaagcgactttcatgagtataaacataccaactcacattcaatctccttgtttccaccaactggagtgattttgactccgaattgtaagaaagcaagtccagtccactgttatcaagctcattagcaaaagataaatagggaaatacctttagtacaataaagtcaaacaccatcaacccatagacagggatacttttccatttaaaatcaaacctttttgcagcagtttgaaacagatgaccatatgactaatgtgcacatctaacttatccacagaacaaaactaacaaaaatttcttctagaacattatatgcggcacttgcatacttctagaaattcataaagcataaaactacatggtccaacagtaagctattacttaaagaaatttgcttctatttttttcaccctctagtagaagacatttattccgagttaactagaaaaacacacagatatcaaatataatgtagatcaagatggtttgttctcttacctcgtctttactagtacaatatcacacaatggacaatctgtccaaaagaatcccaaaatactctcagagtctggccgacacctctgactaaaagtttcattactttctctatgccaaaactctatctcatgagaagaccgtaggattgctataaattttccgtctaatgaataccgaatagataaaatgggcccttcactaattgaatcacttgttggagaaatactaggagcaaagggaaccgttttccatgagaaaacctgaatgagtataagagacaaggaaactgaattaattttgataaaatcaagaagctcaaaacttaaaatatctaatgattattagaagaaaatgttgtccaagatattatatctacctgatctgatgtcggtgatataagaagtttacttccatcatcatagaataaacccctcacacctgaaatactgcttcttaggggtggatattggatataaacatgtgataatgcgccagatccatttaaaccaacattagaatgagaactcgatgctttcccagacatctctttggagtcaatcttttaattagagaagttgaagagtagcaacactacttgtttacatgcactgtaaaattacagttagaaggaatcaggtgatgccagtttgtgaataaatattgtacatatacatccacacatatatatttatagacagggaggtaaagtaaaattctcgcccataacaatacacacacatatataaatatatttatatacatagtttgatgaatcatgtctagcttttgaataaaagaccttttttaattgtgttcttctaactactgaactagatacttgaaatggcacttgctgtatttacactgtccacagagcaatgaaagattagtgcacttcaagcctttccccgcagcttcacggaaagaaaaagaaattgaattaatgtttgttgggaagtaagatgttagaaggtgcaaaatatttcttcttaatgatgaaatacagtaccacattctgcatgcaactcttcaaagcaagaaattctttcagacacatatcccgttcaacctctggaacttttgctgcaacacaactcccatattcttttgcctaaagaaaggaactctggtaattcaatgctagcaaataactggtacaacaaaatttctaaagcactataaggcatttgatactatcctaaacaaaataagtacatggtttttagttttacatagcaagaacacccatttccagatcttgagttacttttgggtagaccaaatccaactatcaatagttaacgagtgttttgtaaaaatagtcttaatgaaaaagtttattagcaaaataaccacgttcgtgcgaccataaatttacattgtacgactataatgtgtgcaaccattatagtcgcaaagtgtaaattcaatatggttattttgtaaattttacaatttcatgttgttagtttgccaaatttcgcatagttaacaaaaactttcccaaatatttagcatttggagactgaaaggaactcactacaccaacttcttacaatatataagaaatgatactactgtatcattatatattcctaataatatcacagccaaaagaattgtgatgaacaagacagcacaaacgccatcagaaactcagctaaaattaaagtatctgaaaactgaaaacacggcaatgacaaacttcaaacagaaatatgttaaatcaaaacctccaagtctctcaaaaacagagaagtaaaaaggtttgttaattctctcatgcttataagccaaactgcaacccaaaaatttgttatcccacatacaatctagaaaattctccaggtcctgaaaatttctatgatttctttccagccaaatcagacatacgtgcataaggtcattgtgcataacaacatcttggagtaacccaacttttacttaatgactttcttgtaccaaaattgtgtgcatgacgttaacaactatgacagatcccttctttaaaaaaaaaaaaaaaaacagctataacagatcagatcaagtcacgtttggataatggaatgaatagaaatcaaataaattaaactaaaacatatcagagaaaaaaatgcagaaaaataaatgtgttgatcattggccaacaataatttagaagaaactaggttggaaacaacgcaacaattcttttttcctccacgaaaattatcaaatagggattggattggataaaattgtcctaaatctttcagagggattacgctatcccaaactagggattatttagattgttggaaaaatgttttcaatatccactctaatttgaaaacaaaaacacaatccactccaatctcactttccaaacatgacctttttattattaatttaactgagagaaagaaaaaaaacctgagctccacagttaaccaaaatgcgcttaagtgtggaagtagttttcctttctttcatgtccactatacctgaaataattgttcaaaatccagtgcataatcaaaaacaagaaggaaaatcctttaatcattgactccaattcaccacttaatgaattcaagatcagtaaagctccccaaaatgataaccaccaaataaattatggaaaattaaaactggcatcaattcaacgcaaacgaacatagaaagtgagagaaaaggcattacaaaattcaccattggatgctgtgaagctccgtgagttatggatgattaggtttagtataagcgaatcaagtcgaaacgaaccacccgacctaacagtcgtctcctccagttgttctccctctctctctctctctgcgttttctttctttcttcttctttggtcgagactcacatcttagttatgcacgtggagcttagtaaattgccacgtcatgctactcctgccttgggcccaatgttatgtttaaaatacaaattaaagaaatatgcttttccttttttgtgttttgatttctacctgaatttaggtgacgtttggttggaggtaatgaaatggaatggaatggaaaggaaataattttcattccattcctttgtttggttgcattttaaagtattggaatggcattccaatggaatgctctttccacca

SEQ ID NO: 302067 - DNA, 1138 bp, Cannabis indica
agatgtcatagaacgatatccaacctcggcgaaagaacgagatattgtatgttgttttgtatttttcaatgaaatttgtgaatgccttaaaaacacaatccaactagtgagagatcgtcttgtaagaggacaagatgagtcacaccaacatgtcaaagataagtcactatcgaatcgcaacataatgccttaggctagagaattctttaaataacgaacaactcgcaatgcagcttcccaatgggtttgtctcggttcctgcataaattaggataagacatgaactgagtacgccaagtcaggatgagtaattgctaaaaaaaataaggcacccaagcaaacaatgataaggctttgaatccaaaaggcagggccctgtgtcacaagccaactcatgattttgttctattgggaataaaacaggctatgagcccaacaattcggcttctgaaatgatatcaagtgtgtattttctttgacataaaaataatctagaagtgcttctagccacctcaaacaccaagaaaatatttaagcacacctaaatgtttcatacgaaaacaactgcttaaatatactttaaaactttttacgcaacggaatcattaccagagatcaccaaataaccaacatacattaggacattcatttgtacaagccctttggtgtatgtaaataaagaataattagagtttgtatgtaaataaagaataattagagtaggattgaaggaaaccataccacttttaagctatgacaagctttgcaaaccaacatcgaggagactgtaggaaaccgtacaatgacaacgcaaacgacaaaccatggtggaatcattagattgaaaacccggagggagtttcatatatacctcctcatctaagtcaccatgaaggaaggcattatgaacatttatttgatgcgattcccaagtctttaaagctacaatggctatgaaaacaagaactatcactatttttgctactagaacaaacatctcattatagtcaatgcctacaatttgatggtttctgaacacaaccaatcgggcctgaaattctgtattttaatatttccagttttattatttaattaaatgcgaaataatgaaactagtactgaaaatagtttttccgta

SEQ ID NO: 302068 - DNA, 1491 bp, Cannabis indica
tgagctatcctaatagtcctaagggattagcttaaaccagtagggatgggagagtctaaatagggggctgattaatcctaaaagatcaggaattgatttttattgttaaagagtaaaattcactcagggagatatccaagtgactcaaaaagcctggaagaagtgtaatcctttctgtgatttcaatgagattcctattttctaattctttcaatattggaacggaacaatagtgtatcattgttgttgtagggcataaatttttcatgcatattttcattttacactagtggatattaacaccattatggaggaaactattgacccattgctttataaattgacatcttttcatatttcaaaggtggttctatagactaattcacccttgactgccattattttctttaaacggtcctgctcatcagttttatgcataatgacattgttgatcaagcttactgggttggctctttgctttaacttagttaaaattaaagaaactgtgcttgatgcggttttcatcagtttttttagttccatttaaatgagtaatttattgcttgcagatccatcttgtcaatttgttcctcatttaacttccttctatcaatatggatataataaaagaggaattcagacccaaaacgagccaatcaaacctgctagtgaagatttggtagcccaggattctatgaatgtgaagccctgcgatttgggaagtgctccttccctaatagaaagtagcagttctagctcttcagtaaaatattcagcggtatctaacttgaaaacatcagctaggcatgacctcgccatgatattcacttgcaaggtctgcgaaacaaggtcggtcaagacattttgccgggattcatacgagaaaggcgtggtggtggcacgctgtggcggatgtgataatctccacctgattgctgatcatcttgggtggtttggagaaccgggaaaggttgaggactttctcgctgctcgcggggaggaagttagaaagggaagtgttgatacattgagtttgactctagatgatttagctggcaagaaatcttgtaaagctgactgactagtgtagtcattatttagaacaatatttaaagaaattttatatatacacagaaaagttatttctgaaaggaggatttgctgcaagttatttgttaaactgaattatgtttaatatgatttatgaaatattacataaattaaatttaatttgcactaatctggtgttgtcacttgtactcaatacagccaacatcttcactaaaagggtaacattttttgcataggcattaaaatgcaacaaattaaattacacggtcactaatgctgcaaatgtttcttggttttttttttcatagttaataatatggtttaataagtttaggtgattaaggttatgtaagagttcagagtaggatggatggagaggttagagaggatagggagtaagagggatggagatgattgtta

SEQ ID NO: 302069 - DNA, 6824 bp, Cannabis indica
agatcctggtaaaataaattccaacattatcaatgattgactgattattatttgaaacgattattgatctcttttctacaggttctcgattatttatcaacactgcttcccattaatttttgttatttttgttatgcttattcagttgtttgtattttgtattgatatccaggattacttgtgtttttggttgtattgtatgatggagcctgaagtgttgagggattttattgggtgtataaaagcgaaagaagtttggcgttaatagttgaaactgacacaaccctataaaaaatgtgcaacattttgtatgaagagttggaggttgatacattggagtatgatttgaaattggagatttgttcgttgtacataaaagaccaatttgttccgccagaggttattaagaaacaatgtcaactaagagtgttcttagagatgacgacgaccatatcaaacatagactttatacctacaaaacaataagatcaaaaataaaattgtattagttgatgagcatttattcatatcaataataacaaaaatcttaacctttttttttacaaaactagttaagaactataacttgtcaagaacatttcgatattatgttgataatccattgataaacttagctaaaaaattctcaatcatatcaatagcctatcaacaactgtcgataattaatcgatatttaagttagaatcaataaaaaagaaaattacaatttccttgctatgattcaactgtcgagaatatttcaataagctaaacttaatgactatcacccttatcgacaaactgtcgataatcaatcgatattcacctgagaatcaattaaaaccaaaattacaattttttttcaatcctttatcgatagagaacctattgacaacatatcgataacttgtcgacaacagctaaccttaatgaccatcaccaaaagctaaatcttatcgataacctgtcgagaatctttcgataaatcatcgagaacatacatcattttctttttttttcagccaccaccacactagatcgaaaaaataccatatccaccatataaaaccgaccacaaattaaaaaaaaaatcatcaaaacgaagtgtatttcaacacaaataatatataatcgctctaaatcaaccacaaaaaaataactaacaaactttttttttttgaactatctttctaaagaatgagataggtccaacgagacgataggcgaattggacgagagacgggctctgacggcagaggaacgagcttggatgggtcctttgcgcgagtggacgagtccttcgtacaaggagaaggatcagcaaaggacggagaaagattttcgaaggagaaggatggagaatcttggactgataggaccttcgtgcatttgggtctttcgttctttgcgcaggtgggcagagtggggtcggatggtggtcgttctttgctcgggtgggcagtgggggctaaaaggtatggtggcagatgttagggctatagagagagattgaatttatttaggttcttttaagttttgaaaaaaaaataataaaaatattttagataaagttgaaagttaataggatggtattgtataaaatatttaagagaatattttttaaattaaaattatttttaaatatagtaaataaaatttcccttataacacgtgaataataattttaaatttaatgactaaatacctaaatttcaaaatatataacttaaagtattattatcatcacttacttatttacactacaaattactttttttttaaaactcctaaccaatcaagaattctcatgtggatcccacctttcaagttttcaaaaatataaaactgtgttttcaagttctaaaccagccccattttcaggactttcaacgcaaaaataaataaacagaaccattacatactatcatttacaattttcatattatttttttttattacttatgttaaaaagaaaaggcttatattagtcttaaaagaacaaatcgaattcttcattgaattgttcatctgtccctatccttgaatttgttgaatctttgagctactcactcttcttcaacagacttaaagccaccccagcactgagacttgtagctacaaaaccgagcgacatctcggtagatatatgaaaccctgtaagaaaagcttatgatagttcggttattggattaaatggaagattatagagtggaacaataatgagagtgactgctattactaaagtacccaccgaagaaatccaggatcattttacatccgataaagccgagaacaacaccaattgagggctgaaacagtgaaatcagggaattaaatagtaaaattcagtgaagaatatttctaaaacttattctaaatatagaaatctatgtcattgggtagtaaaaattgctatagctccgtaagttttgatgaaccctctttgacaccatccccagtctacactctaatctagtctacattgttctagctataatttccaaattgtctaagtcaatgatacgaagcatgtgtaatatatataacctattaataaaaatattctctagcacattctttcactagacaaagaagcaataggtctgtgtaatgcattatatgggggtgtaatgactagcagaaagaatcagcaactaacaaatttgggctaagaaatcaagtcatacctgtaaatacaccaaatctgacataccctcagatattagtgtgtagagcgaccttaaacctgtatttcccaaatatatcgttaattagattatctacagcacatagccatatgcatgtaatactcatattagaccaaaattatgcactttaatgccatagaatcagtttaggaacaactggcccgcatgatacaataacttcagaaaagaaatgtagatgagagcacatcagatcctagactttaatgctatagattcagtttttggaacaattggtccattgatgcaataacttcaaaaaagaaatgtagatgagagcacatcagatcctagtatctggtgcaatcaatcatcctatacatatattataatttacaaagaaataaacacatacatatacgcatctaggacagtttccatagcaagaattacctaggatggcaaaaatattagaagtgtacactatgaaaggatcccgtgtacaaccgaatacagctggtatagagtcaacctaaatgaaaataagacatgacatcaatagccataaatgtaaatttggtcataataaaaggtatactacatttctggaataattgttgggtgaagaacctactgcaaatgcaatatcactgagctcgattactgctactgtgagaagtaaaggtgtggcctgcccaaaatgtttgagacctgttagaaatgaaattgaaaataatataaagcgttaaatcttggttttatgagaggacgaaaatgcatctagttgatccatcagtcacatttcaagataacaaaactttcttttgagatgaagaacatagagatggatcaaaaaatttattattattgttattatttgctatgagagtcttaagagtttgaaataactgtattttctgcaagctaaacatgtaattaaagctttaattctaaatcttgacaagatctcataaaaagactaaccttccatacaccatcctgagcagtaaaaaatcgattaccatcataactagctgcaagagttcaataaaaaatatttatatatattagattacaacagattaagtagtcatctacaaaaaaaaaaaaagtagtcaaaataagttaaattctattaacacattcatttctttaatctaccattaaaagttaagaaacaactagctattacaagaaaggggaaaagatttggagaaaaacagaggaaagttttattgatctcaagagagaaaagtacaggaaagagccaatatatagctcgagaaatacaaaggaatgaaaaaccagtaacagaaaaatataacaaccttataacagaaaaccaactaactaatgacagctgacttttcctaactaacaaaacagaacaacaattaacactagctaaactgcaagtagcaaaagatcaattatatatgcttctagtttttatttttttttttcagaaaaataaaaataaaaaagccatctaatggtgcttttcaattctcattgaagtgtaaaataacaacacttttccatctaaattaatggaaagccagtgatatggaatgattcaacagaaggcaaacagacaatgagatacaataatacctgtaacagggataaccttctggcatgtcttcactataaagttgtcagataggtcagtgtcatcttcttcagtagcaaatagctatccaaacataataaaattgtgtcatcacactttagctagaatgatttgcataaaacatcatgagcagacattttacatcaagaggtatcacaaaatacacacacaagcgtgcacatttatatgtatatgtgtgtgtgagtgtgtgcatattagtgtgatgacaaataaaaccacctaacatgttgaaatcaggaatcagtttctctttcaaattgaaattgaaattggttttcaaacacagaactgggacggctatgaataattcttcccacagaactaactgaatgaatctaaaaaggtatatctactggtgtttacatgtggtggcatatccattctatgatcttgcctctaaagatatctgctatatttgtctgtgtgtccatttagaaaccccagagagaaacagaaggttactttggtggtttaaggttcaagttctttctaagtacttgcatagcgtttgctataataatctgttcctcaaatattataggattaggcgaagaaaccaaaacattcttcacccaaataaagataaattcaaatagttaactaacctccttaattcaaaattcaattataatccagtgatgaaaaataaaatcaataaagaacagctacatattttttaaagagaatttcaccttgaaagatgagaaaagtagtatgccagctagtagaaggtttactgcttcatacctctagaacaaaagcaaaggaaagagatttaggaaaagcacaaccacaaaagctactaaaccaatgcacaaaaaacatgatctttacctgaagtgttgctgtaccaagaagtattattgtcaaacgaaagaccactgcaccaacaatgccataagaaagtacctgattctgtattccaccatttaagcatattgttacctcacgatggcatagatacattaatgcaataataacacctaaacaatctgaatgtatggaacctatgtaggcctcccaataggatatcttgaataattagaagtatgagacacacctgatacatgcttggcactttgaagtacttgaaaatcagaacaaagacaaacagattatcaactgacaagctttgctctaatatatacctgagaacagtttggtcgtcagataatgaacatacaagaacagaacttgcagaaaccataaacaaaatcaacgaaagggcagctcaattagtagctgtttgacgtcctaatatggttacatactcttgttgatttaaacaaaaagtgatgaaatgattcagcatacccagtgaaaaactcggttgccttttctcctccttcctttaaccctaaagcaatgccaaatgctaccgccgcgctgacctaaagtaattaatgaaaactaaacgcatcttaatattgtaaggaaagaattaataaaagcttaagcaccacaattggaaacaaattggcaagtacttacccacaaggccacatttctaacagaagaaacaaatctttcatcttgcttagttttctctgaacaaattattgaaggagtagtgcgagagatatcaacatcgctaatatctgcataatcatgatagatagtccttacaatcaaataccatattattacaaaccgccaagatacgggaaaaaataaataaatgacactcaattaaactagtgaaacattcttagaaagcttagcttcaaggaaaacaccacatataaataaatcgccttaagataactaaaagtcaaatatcactacaaataatgaagaatacaatattttttatgcagaaatatcgctaaattaaagtatatttttagctctaacatcaaaatcaagctaagactgacctgaagctgaggtagacaaatcgtcttggtgctcagttcgtctggagcaagaaaccagtgaagattgaaaacgaacagtacgaaaatctgaaattcaaacaaatgttcagactcagctcaaagtctgccactaacagaaggagagagagaaagttcaaattgagagatggaaacctgtacggatgaggcgaggaatgtgaggaaaggcatagccataggagatgaagctcgaggattgagaaggcacaggaagcctaagaaggaaggtgggaatgggagaatagtggagtctgttgtagacgacggccatggatgctcggaattggtggaaaattcaaaagaagggatggccttcttctgatcttatgattcttatccttttttttttatatatgttttcttttctattttattctcggatttttatttatttatttttgtttgtttatcggtgcacaactcgttaagacatctccaaccgatctctaaaacacaaatatagtgtagtttcaccctatatttactatactaggacattaaaactatactcataaataattttatttaccgtgtcctaccaaatttagtgggacactgtaaacaacactattttttaaacaaaaaaaa

SEQ ID NO: 302070 - DNA, 1978 bp, Cannabis indica
catcttatacctttagacctgagagacctgttaaatattgattatacatatgagaaactagctaagagatgagatatactaatatcccaatcttcattcattaaggaatacagataaaacaatattgttttatctgataataagcatttgaaaccatttaaaaacataatgtgtgtaatctctgtttattgattctatgacatggtcacttgatggtgtttgtcttataatttaatattttcttacttgtaattaattggctggtcattgcagtaataaagaatgtctttttcttgaggtgaaagtgaaagtgggatttttatgaaaatgttgagtctttggggtgaaagtgaaagtgggatttttatgaaactccaacaaatgaggtatatgatatggtgttgaaagagtaattactaattaggcataaaattggatgccatgtcaacaagaataaatggtggtgatcaccaatatttatgatggattaaaaatgaattgaaatgaaatgaaagggtttttggttagtttatttgtttggttataacttatcagaattttgaatgataataaatgaatgaacgatatatctgttgttaatatgcttctctttttaaaggttgtcatgtggttaattgcttcagtgatacaatttttcttaccttctctgcaatctgaccaattttagttctgaaagtgtccagagggtttggtgctgtaatattagaatatcattatatacatgtagctaaatgttatctcagcaagtttacatagtgaattattttttttcttatcaggcaatgaaaccaagttgggtatgagtaaggggatacctgaaccaaagcttacagctatggatgctatgattgacaagttgactggagctatatttgtttttcaaattgtcgttgttatggttcttggtgtagctggtaatgtatggaaggatacggaagcaaggaaggcaagtcttttttcttcccctaaaaacttgacttgactgcggggtattatatctctgattccgcagtaccgaaaaaaaaaaagaagaagaagaagaagaaggaatcaccttattaatgatgaggagatttttattttctcccttgccttttccttttcagtatatccttttactttcaaaatttaactttattctcatttataccatttgcagcaatggtatgttgagtatcccgaggaaggtccatggtatgaactgctggtcattccacttcgttttgaacttctctgttcaatcatgatccccatatcaattaaggtatccttatgtataaaatgtgtgagaaactttggttcataaatcattgtaagaataaaaggcgtgggaattttgttaacaaaagttagcatttttctgtgtgaaggctttgatagtctctcatgtaaactgttatatctttggcaggtatctcttgaccttgtgaagagcttatatgcaaaatttattgattgggatgataaaatgattgaccatgagactgttactcgagcccatgcaacaaagtaagcgtaattcatattggagcaattgtcaatgcttccttattttatttattttgaaaatatgtatatgaggtttatataatgtggcagtacagcaatcagtgaggacttgggccaggttgagtacattttgactgacaaaactggtacgctaacagaaaataagatgatctttagaaggtgctgtatcaatggcattttctatggaaatgagacaggagatgccttgaaaggtatggtgtttttctgaataaacgtttctgttaaatttatgagttattaaattaatatggggttgtaagttggtgttaagtttttaaattcatccaacactcatagaaaagtaacatttaggctatggacaagctttcatagccttgtcaaacaagtccactaaaggttggtttggtacgtcgtattacaccgtattgtatggtatagtattata

SEQ ID NO: 302071 - DNA, 2280 bp, Cannabis indica
ccccgctgtcggttgatcactttttgaggctaatagtttggttctttgattgagagcatgaatgtcgtatctgatcaaatgccatggtgagcacaagaagaactcttatcgcaccatctgcatcttaaactcttcctcatgacccacagattgtagctctaggtacttaagttccagtcacaactagaacccccatgaacactgcagatgtggtgaatcctatcaccataacaggcgctaccagtctggccactatagctggccaaactaataaaggcatcccggtggatccaagtggcaggccccttcctctaagagaagacccttcattggcaccttatactgaatgaaggacccatgggcagtagcacccttaacaataactagatctcgactctagttttatgctggagggacaggaccaggagttggtgagccccatgttgatttaggagaagatcttaagtaggccatactcagggaagctgtaggtcgtgcaggctaaactgaagaaccacgcgcttctaattgtgatgtttttgctcaaaagagatgcaaattcttgagatggatagatggccatgagtacatccttcgatctcaccaagaaaagttagattgccgcaaccgagaggccagcaatctgataagacaattcaactagagaactgatagaaggggccaggatctcctcagagattcacttcaagaaagacttcaacccagttcctcaggaactaggacagatcttcccttgccagagggaggacagacctttcctcaaaggtcaaacagcgaaaatagccagatcctggcaactagcggcacggggcaccaaccagggatctttggctcagcaactctccctattgtgtagcgattggtcggccaaccatcaataggagtacccaaggggagcaaggtggccaaagatcaatcttcaactgacaaggaccgggagcaggtggaaacacccaaaacaacgatttaaggagtgaacccaaccgctttagacatctagatccaccaaactccagcaattgttgtgatctacccctctcaagacacaaccagcagtaatcgaccgtggagtcataggcagccagagccttccctttccaggtctggccggccatggaggaccattgggcagctagaccctgcgcaatataggtctggctggccaagcacaacaaccaagtgtaggcttgacaagcgaaggccagctcctgtacttaggaatggtcgaccagggtcagtagttcaacatgggtctggctgaacttcactatacactctcccaaggaatggccaaccagcccctatctctccagatctacaacctcaccgaggagggtcagtcagtcaagtccccacaacaatggattcaattgtgcaagcatagttagaccaattcagggacatgatcctaggaatagctggcctgaagccttcggaccttgaatttgatcggtcaaggcaatgaccattctccacatacattaatgcttacccttacccaagttcaaaatgtcaatatggaagatgtacactgggtaagaagacccactgactcacatcaagtactttgagatgcaaatcgatctcctgaaggttactggttatgtgcggtgccacatattcccatccacattgtcagagatagctcaacaatggtactttaaactcagcctagaaagatttaactcttgggctaatttctcatgagaaatctacacatgattctcgtcctcgagacatgtaccatcgcagctagaagaccttctcgaagtcaaataacgacaaggggaacctctgaaggattacgtctagaggtttatggccgaggctactaaagtcaaaggccttatagaagaaggctgatatacgaccatactggggggtatactcccattaagtgatttctggaaagatatccaaaggatctctaccaacaacatgaaggagttccttgatagagttgatagctttatcaaacttgaagaagccatatgacaagcccaggcggggcatgtcaacaacaggaagtcacgaggcatcgagcagcctcatgacccacgaggtgaacaggcagacacaagtaattttatctagacttctagtggcaagaacactaaaaacaagtgcgacactaacaactctacaaggaacaatggcaaaatggggaagttcaacacttctccatgccacaaaataataaggaggataagtacacctacttcaccctcctatcggagaagcctgaggccatcttcatgg

SEQ ID NO: 302072 - DNA, 3575 bp, Cannabis indica
aaaaaaattcgtaattcatatttaatcatcaattcacacataaacaaacatgaacacatacaaatgaacaaaattatcgttttgaatctatatttcatgaaagtaaatcattaccatgctctgaggctagttattggaagttattttaccaggatctagatttactaacatgtatgttaattataattctataatctaataccctaaatatgaattcctaaaaccataaaaataaacacatataaagtttagaaaaccttacattggtggaagcagaatgttatgacttattccattcagatctctaatccttgtaccattctgtcgcagagtaataactagatctgaacctcgatctccttcaggtgttgaattcttcaaaatcttccacactatgatttagtacttgacttgatatgagtgggtatatgtactctatcactataggtagaattaaatgaagacgaagaaggaatgaattttgaaattctatagaaggaggctttcaatttctagttgtttgacaaagaatgaaaactaggttataagagatggattagaatgagagccatcttatttaactagggtttaggatttaaattatatgcaataaaaaacagataaaataatagaaaaataaatttttagtggccggccatgcatagtggaccccactagttacaattttgccattttattgaacattttatctttactttcactaatgccatattttcgaattttaatcctataaatgtcaaaattatttattaataattataattaatcatcaaataaaattaccatttaacttatttatcaattagaccttacaaagtctttcaattaacaaataaaccctaaaatttcttttcttcacaattaagcccttgcttagggaaaattcataaataagacatagtttaattttataataattgattaattaaaagcaattaaccaaatctacaagtagtactatctcaagtagtgtggggaccatgagcctatctaatcaagcttctaataagcagttctagaatttaccaaaaaaattatctaacttattaattcttcctcactcagctatagattcaaaattgcactcttaattatatagaatgctttatatgtttcaagatataaacacactattaattatccattattataatctaaatagtaaaagatagtctatagatgatctacatcgaataaggacaaatttaccgttctacccttaatgtaatttattcttagaacacttagccaattataaatgatatttcagtaaactaatataattattgaaatgaggcctcaatcattcatcacgttaagccaagctaaaaagaaatcattatttcacttttaaatacttaaagaagctatagattccatatctataattcgtgctcccactcaattatactaccatgttcttaagatgtaagtattgagccgatccaattggtcaactttaacgaacaactcaaaaaacacaaataatatatttaaattagaacctaaccatctcaggattaagatctattgacctaagatcaactaagtgatattgacatagattgatataacagtaagtttatgatatcttatctaattgtcaatgtcgatcaagtccgatctatactctatacatccaatactagcatactttgccaataccctggaaagaacataacacttatccaagatgtaagtaaattttaccactgattatcatgtcagtataaatccagtgtacgacaaatcatgggatatacactttgaaacatataatcatgattacattcactgtgttgacaacactataatcatgaataaatatatgatctagatttaataaatctgattatattgaaatatgttttatttagggtataaaatccaaacaaagagatgtagaagtactcagcaagtgacacgtcagagtccttgccacaaaaagcttcatctccccaagatttgaaacgctcttcatggcctaaaaggactgaaactaaaggaatacatgacaatctaagagaaagactctattgaaaggccactgccaataagcaggcatcgtcgctaatttctcctcagaataaggaagcacatagctcacgctaccttgcgtccaggaaatgctgactaagaggaggtaggagcttgataaggaaatcacagattttcgacaaaggatatcgttggcggcttccaaagagtgaaagtgggatgaacacaattttgatgatgaatcacctttctcaagtgaaattcaggctgaatcatgccaccttgcaaaataataaagatgaagagggtcgctagataggcaaggtgcgaatgccttgcagtgacgctctgaggacaacatacaagtggttcaagcgactaacactctaatcgatttcctcatagaaccagttcaccgaagaattcttggctcaacaccatgcctccctcatctcccattcacttgcatggaacccatgcacacgtgaaaatttcatgtggctcacttttgaaactcatggcttgctactgtaaccctttggggttcgtggctcgtcattcaagggcaaaaactcatcagatcgatgaggccatgatttactctttaaattcaagctcactcatgaatgaaggtattgtggacttttgatgttacaatttttgacaaaaaaatttaaaataaaaaattacatcaaaacctataccaaaaatatggtgtatgagttttctagtaaaactataaaattcttaacacaaatttaccatataattaacgattaacattcatgcataaaaaaacttaattctatccattcgcattacatcaacatatatatataaatacataatcacccagcacagtatttaatttatatcattatgaagattgctctagtgccaattgttagtttttatagtccatatcaaagttataaaagtgaaagcagaattttgataaaataattttttatctaatatgaacaataagcccaagaatttcaagataatgaatatagattaaatctaattactataaaaaattcaattacttatttgacgcctagaagggtatctttgattcttttcatataacaatcgaacatccaatccaagaacttgattgaagaatccataccttgatctttcaagccatcctcaacacttggaaatagagtggaccattagatcttatcggatgaacaaatttaggtattatagggtatagttaactcatgagacactgtaatgagattagggtttagatctcacacacatttagaatagtgtgtggcgtgtgagactagagagagagagatggcgtgaggagagagagagaggtggcatgaggagagagagagaaagagaggagtgagtaaaatatcaatcatattttctctctatttgcctcttatttttttttctctctttattggttttcttaaagtttattattaactgttattatttatgacactataaatcctatatgtagtgttataaataaagtctttaatcttttatttaaaataaaagataaatatttaatttgatttgaa

SEQ ID NO: 302073 - DNA, 2456 bp, Cannabis indica
tttttatgtagaatttcgtaatagtgcaagaaaaactgttttgaagtgtaaaaatgaaaaatctcctaattattattattattagtattagtattagggtaatagtgtcataagtattaaaagtttaagtatgtaagtgacataaattcaatatttatttttagagacataagtatttattgtttgtaaaactataatttttctttaatttcgttagtacacactctgttattgtcttaaataaagcacatataaaacccagattctagatcattgagtttagacagaaatatgtagtattagttacttccaaattacacttttacaaatattgagtacttatgttactaaaataaatattaagtttatgtcaaactttaagtattattattatttgagtaaattggattcattttttaatttggttccgtgcttggaaaaattgcacttcaaattcgtacataataacaatgtgtacatatacatgtatgtgtatgtataggagtataatgctacaatcgaattttattgggcaccatttctggtggagtcgaattcagatttacacatagtagcagatccaaagaaaaggattctaaaagttgactcagtagaaaagcatgccaagaattgggtgggagttgatattcttctattcaatacttatgtttggtggatgagtggtctcaagatcaagtcattgtgagttgtttatttatgtaatttttttttctttttggttatatttaaataataaatacataaatattgatatgaatttcaattgagtgtgaaaatagatggggttcatttccaaatggtgaagaaggatatgaagaactggatgcaccagtggcttatagaatagctttgagaacttgggccaattgggttgacacaacaattaatccaaacaagactcgagtattctttaccacaatgtcccctacacaccaaaggtatatctctctctccaatccatataagactttaatcccaatttcatgatagaaaaaattatattttgataaaacacaaaataataataataaggttaattaggatttttgtttctgaactaatgacatgtactaaatcatattttttgaatttttaaagtcattaaataattgaaattgttggatttaaggacttttgtcaaagtttagtaaaaaaagtctaacatgaatcaaagttcaggaaacataatttgatacatttcaaagtttgaagaatataaattagtagaatcaaagtctgaggaacataatttagtatataaacaattattgaattagtaaaattgaatgaaattgaataaaaattcttaaatctaacaatctcaataatttatgagaaatttttaaaatatttaaaagacataatttcacacatgttaaatttcagaaataaaattctaattaacctactaattgtgcacctaaacaaacttgattaactataaattagacaacaactaataataataatcatatacaagttgttcaatgatttatttcttctaacataaagttttgatatttaatgacagaaatgcagattggagtgataaaggaggaataaagtgctacaatgacacaaaaccagtaaagaaaaaaggtcattggggaagtggttcagatagaagagtaatgaaagttgtatcagatgtaattggaagaatgaagacacctgtttctgtacttaatgttactcaaatctctgagtatcgagtcgatgcacacacctctgtctacacagaaacaggtggaaaactcttgactaaggaacaaaaagctgaccctcttcaccatgctgattgtattcattggtgtcttcctggtgttcctgatacttggaatcaaatcttcttagcacatctcttgtagccatatttttatatcatttcttcatctctttgaattttcatgatatgctgaattgcaaaggaaacaaaaaatttaattgaatataatgaattttgtcttcattttttgcctttttaaataatgattcgattaatcatgagtaaatattttgtattttacaaaaattattgattggactttgttaaatgataaaatagactatgtattttctaaaatgataaaaataggacattgagcttaattttcgatatttttttttctaatttaaccaacttgaagatgattcctaacacaaaccgatacaaaaaatgtaaatagttttatcataacacctctagattagattattgtctaattttattttgacaaaaaattagtcaatttcctacttgtaccattttaaaaaatgcaaggtctattttgttatttagcagaagattcacttagggtgcgtttggaaagccacaatgtaattggatttgtgcgtaattggaggtaattacacaatttggcatgtttgtctaaccatgtaattacactgtaactgtgtaattggaagtaattgag

SEQ ID NO: 302074 - DNA, 961 bp, Cannabis indica
aaatatagatttttctaccattatggcagaaacatctgttattttttttttttttttttacattcccgacagtttaaatttatcgcctatataaaccgtcgcctatagtatagggcactgtttaaaaccgtcgcctatacctagttataggcgacgattttaaaccgtcgggaaacccacattagcgacagttttgaactgtcgcctattatgcccgttttacgacggtcgtataggcgacgataatagaaactgacgggaatactttaaatgactatttaaaaatgcaggaaaatctatttttgtagtagtgacattaagtataagaatacttaccgtggtaacgtggtaaaataaagactccacccttcaaattttctaacccttgcatcatttatatacgagggtataatcaagaacttcaattgatcttcaagtctcttaaatgtaacttaattctttatagtcttcctcagtgtcttaggtatcaatgtacattagagtggacaatactcaattcacaagtgttgggcgaattttgagagaggaatagggttgaggtttttccctactatagagaaagctagggtttaagagacttttaattttctaacaaacaaaacataataaatgagtctattctcgaactctaattaatgttagatagattttgcccagattttatttactaacacgtatttcaataaataatctaattattgaactacctagaacatgttttctgaaaaataaattaaccacattgtgttattcgtgtttcagaagaggtgacacatggcccttgcggaggcccactaagagaattgggcctatcacgtagcccatgggagatgaacaaaccgacccactttctaaaaagtggataaacttggaagaatgttcatgaaatttctcaaacattttaaatttctttgcataaggtaaaatctagagtgatcgt

SEQ ID NO: 302075 - DNA, 777 bp, Cannabis indica
attgacttcaaacacactttatataatgaatgatcaagattatgagagtaatgggtggtatggctacatgataggggcaacatttcttttcttcatctctcttccaaacaatgtaaaaatatatgagtacattgattaaatagtggggagaagaacaatcacatgtgagtatgtaatgggagagcaaggagaatcataaaaagatttgtccacaaacattggtatccaattttatgggtaagataagaatgagataataaattgtacaacagaacaatcttactatatatgcaaacaatacaaggctaatatttaatgttgaattggttgttgcaacattatgaggcatgcatatatatatatatgtatatatatgttatcataaattacttttctttctcatctcacatcacatgctcacacacaactacccatcatcactattcacttcaatctttctgtttttgtaaccctccatgtgagacttctcacagctcccactccaaaaggtttgttatacatgtgtcttgccatctaattttctacaagtgtcaaattatgttttcaaaatgttacatttctttttttttttaaaaaaaatatatctaatgttttcaaagtaaaggtataagtattgtgtaatttaactaacaaatttgatattggatctcatatatatatatatataaatactagcaaaaaattacgtgcgagacacgtatactaaattttatgttaatttttttctatgttatttgaaagtgatacaattaaaaa

SEQ ID NO: 302076 - DNA, 1242 bp, Cannabis indica
actaaaacaccttccaaaaagcattaaaaaccctcctgtacaattttgcagaaccaaatcttaaacctattacagaacttttttgtatctacaaaacataatcttcctatcattataccattttgatttcttttataactttatgtatagtatatacaatttgattccaaaaagcctcatttcagacactccagatatggcattttgctgcatttagaacagcaacatacaccaatatcttcaatacttgcttctctttatccacttcaagattcctgcaagcttatattggtttgaaccaataccaagtcagcccaatataactctttgattaccctcctgctaaagtaacattggaagaaaaggtgttggtgactttctaacttagttgcacaaattacacacatgtcctcatttgttacccctaatctgaccagtctatccctagtcaagagtctctcccaagcagccatccagactatgaattgattttttggctcacttaacctgctgttccaaactatggcattctatctttgtcgctcttgaggccataactttgagtaaatcaaagtaactcataatcttatttgtattacttcggcttgactcatttttccttgataatatttttcactataattatctttttctaataccaactcccctttgtggagcctcatagctccactaatccttgtctttaatgtagatcgagtgtatacacctgacttaaagattgtctttcttcaaagccaagtcccaaacatatcggacaaatgctgctatgttcaacttttcaatgttagtaaagcccagcccactttcccttttagatttgcacacttcactccaagctatctgtcccaaaccaagggcttctgcagtgcctttctgtggaaaggcacgacagatacaatttattttataaagaataaacttctaaagaaaggtaatttgagcccaacaaaaatgtataaaatttatgagaatacttcagccagcatatatatataggatatgtttccagtgctccaagttttgatccgggttgtcattttatccacaatactatcacattctttcttagagatttttttaacttgaatcacaatgttaaaataataataataataataataataataatttggggcttttttatttttacacttcaaaactagttttttttttttttttattttgttcatttttacgaaattttatatagaaacttctatt

SEQ ID NO: 302077 - DNA, 3904 bp, Cannabis indica
tatttttgtaatattgttacattttttggttaaaactgaaaaaactctcattgaaaatccttagaatttaaaaaaaaggaaaataaaaagtgaatacaatgaggatcgaacattgcaccccatcaccaaaatatgtattttaattaaccaattttgctataattttttatgcaatatatactgaactaagatttatatgttatattttattttcatatatatatatatatttatataatatatataaattaaaatttttggagacctccaaaattgtagtgcatagggcgtaggccccaattgtcccatcctctagctagctattgcgatgtcgtgtcgttaatactcactgttattaatttagagattattggtgctatttctcgaaattaataattaatttgcatcaaattgaattttttagcgatttttgccgtaaatttcttttttaaattctttctaaaatttactttctaaagattttcatgaaatatgatgaaataaatacccatattattagaaattctatattgattttttttaaaataatgtatgtttaaatgaaataatttgattaatgaatttaactatatatttttgcttcacaacccttacatatacatttacaatcagtatctagtacttttttaagtctcatatctatgtttggtataattaagtatgagttaatgtataatttaatgtaataatttttaaaaggtctattaacaaactctaggaagtcaattctaaaaggtgctagataaaactcaataaaaatattcataaattatataaaccctaatatttaatatacaaataacaatatgttatccttcagaaaattgatgatattaatttttctttagatatcagaactatcatagtatttcacaaccaatggggcctccattataaacaatatatacataccattatataattgaacatttataaattaatttaaccaaacaacattaatgcacaataattgaacacttcagttgaagatcccaaaccatttcacaaacacttgaaattttggatcgaatgacttccaggagcgatgacaaaatccatactgcaactcagcttaggcgacttcttctttttaatgcctaaaactcgaacctttccttctaactcggcgtagcttgtcaacgtcaagactccggcttcaacatcccttccgagctgtgactcggctcgaccatccaagccagccgagttcagcaccacaacggcgttgattttctcggatgaccttcccctgactcggccatcatcgatgaaggctctgccaagcgcaaaacctctataagaaaacacaacagagcctggctcgtacttaaaacggccatagtttctgttgttgatggtgaattcagcgtcaaataacaagttaaccgaatacgtttctgtgttattgacagtgaaactgctggtgattgatgagcttttgatcaaggcttctctaagtctgaattttggtgttttgaatcggaaaacgacaacagtaaacaccaaaacgacaacgattagtaaaacgacaaaggctgcgaatgctatgtattgtatgatccgttttctcggcatttttcggcggagctcgtcctcggtcccctgtgacacttcgtgatgatcgttttggatggtgttgtggggtggagctaaggggaatttctctgtttccatagttttgtttaatttggtgataatgttggattttatgtgattgttctattaaagtggtcttatcatatttatatatgaaacttaaaaataaaaagtctgcttattgttacgtaagtaacgtacgtaaaaaatgttgggataatgtatatattttgagttcgatctgattaagttttcttccgaaacaatgtaaagcattttgactttgactttttgtgttatcctaataatgaatttttacgtgcgaaccaattaatcaaaaatttatatttaataagagaattttttatatatataaaatgtgctatatatagaatttttggtttaaattaatgggtaatttttttttaaaataaaaaaaatacttaaatgttgtctattatataatgagagaatttggtagccgactatagctagatttttaaattttttttgaacagattttgcgtttttatgataaaatttttgaataaatttcaaataaagtatattgtttcaaatttattacgtattattaccctaataaaataaatacaaataaaaaaatagtacgtataattatatatatatatatatatatatatatattatgttggggaagtcttaaatcagtttttaattagttgcttttgctttatgttttgaagaatatgtctaatttatcttatctatattaattcaaaaagaaaaaatatatcatatcaatatccatagtaattatttgaatgggaaatgctataattctattgagccaaggataatgagtactaaaataaatctcattctacatatagcaacaaaaattaatattatatatcccatgatcattagtttcacatgtagtatatattggcatgacaataacacatcatccactaaaaactcatgtacgcattttatttaatttaaatttttaatagaaaaaaaaatgaaaaagaacatgatttgatagtggttatatatatatagttcgaaggtaaatatcatataaatgttaagaaaagtaataaataaaataaaaagtgtaagaatatatataacaatagtagcaaaactaatattatgaatgttctccttaattaatgtgttttcatttgattatattccaggggtaaccaacatacagctcagggtgagtgtctgctcccttaaaataaaattaatagaatagttttttttttattattattattgattatagtatatataagttaaataaacaattattatcaaagtccaaatagagatcactttttaacattatttttacatatattatgtgtggtgaattaatcaccctccaaaaacataacaaacactgagaattagagaataataaagaaaatactaaaatgacaatgctatgaaaagcaaagacagagattacaaggttcaatgatcacaagcagtgagcttggatctactccttagataaaactaccttgaaattttgcctattgattgatgatgatgctcagagttagtacattatagggatatagttcttcatcagtaatggattcttactcctacaaaaataactctcttgacgggccagaattatacaaaatcttagaccctttacatcaattctctctcaactcaacaacttattattgagtaacaaaatggtatttatatagacagtacaatgagaactctagccactaacacgacagaaattaactaactattccctaactaacttaacagcctaacttgtacaagtgtataagccccacaaattcctgatttatatacttgtacaagtataaactctgagcaagaaataattaggcaaaatagttccattagcagggttttcctccatgagtagaggatcagcaatcttcttattcagcagctttagacatagcctaaacttctcagtagtaacacacttattaaacatatcaattggattttcatgtgtgttaatcttcttcactttatcgttattgctagcaagaatgtctttgacaaagtgtaacttgatatcaatacgtttggacctttcatgatgaaattctgtattttaatattatgcgagtttattatttaattaaatgcggaataataaaaccggtactaaaataatttttttctgtaggtacagaagataactctgtaactccaaaataaaccagaaaaataaatggtgtagaaaagtaaaaacatacaagatttttgtacgtggtttcaacaatcc

SEQ ID NO: 302078 - DNA, 1505 bp, Cannabis indica
aaaaaaaaaaatttataaaatatttataaaagtcgagcaagaccgcgcgaagcgcggtttagtttcctaataacatataaaaaaaaaaaatactatatactagtgccctctcaacttttctcctagcttaaagaatctaaaatttgaagtaaaataaaaaattaaattttgattataaattttgaaaaataaagtaaaaatgctgatttgatgtgagtgctttagttgtcctaacctatattacgtgtcatgagcaagctccacccaattcctaaagctacgagggtgcgtggcgtccacaagctgagacagctcctccaaccattattaataatcctctccagccattgtcttaccttccttagtactgtgcctaataattaagctccaatggcgtcgattgttgttacccttaccaccactctcggtttagtgtcgtcagggaacaagccaccagttccttttccgtcgctctcattttctaacagtaaaaataatgctcgacgacccagggttatggtggtcagagcaacagaggctgctgcagctcaagccataaacccagatatcaggaagactgaacccaaagttgtggactctgttgtcgcatctgaactctctaaacctctcactccttactgcaggtatttttttttttttctgcttgtcgtatttgcccaattaatatattatctaaacatttgaacgcattgaaattgatgaccattttttgagttctttattggaggattcctctttcagttttattatttatttatttatggtggtaaggtttttttataaatttgtctttatatttctaattgattgcacccatgcgctcaaaccaaactattaataattacaatgttgtctgtcccagagattccaatgatttttagtctattcacccatccaatgatccaaagcatgtgtaaatacactatacagatactatattctaagaacatattcaagccaccaacctaactttataaaaatgatttttaatgttatatatgtagtttacaactgctagaatgatgtcctgttcctaatataatatgttttgttaattaaaatttagatggggcctcataaataattaatcatcattctcttagtcgtacacatattttatttgtgatggtcatgtgtttgttaattgtaaagaaactatatgtatgtgggtaaccttttaatttgaacaggtgttggaggtcgggaacttttcctctgtgtgacgggagtcatgtgaagcacaacaaagcaaccggtgataatgtgggaccattgctactcaaaaaggagtaaagaatatgctcctctttttgttatcttttattcatgatagtatgtactgtttatgtatggtagcttattttctagtatgtcttcaacttaaactagcaatgtgatttcttggttcttctttaacattccatgaaataaatttctgggtgcttttgactttcccacatttaactatactaggtgattgttac

SEQ ID NO: 302079 - DNA, 5095 bp, Cannabis indica
attgaatgataattagatcgattttggtcgattatttattgaatttgtccgatcaaacaatcgatccgattgaattttcaaaatttacatccgatccaattcaattataattagatatccgattctattggatcaattaaaattaaatcggtctattgtgatcggatgactttttgcacactccaacttttttcaccttatattattttttcttttttaacaaacttttttattatcttctgttccatttttccccgcttcttttttttctttagcttcgttcacttgagaagtagcaatagcaagttaaagggattaaggggagaaaaataaagagcaatacctaaaaggtacttagctctagaagagggtagagactgattccacccaactaatacaaactagtatatcaagaaccaaccaacaaatgttttatttttcatttccactttcaagagaagactacaacagaacatattaagctttcttttcaatattattaaccaagtaaacctttctaagatgccaaaatactttgagccattcaatttgtctcttagcatctggtggaccccctctttctcactttacttgcccaaattattcttgctctgattgtgctcaaccacattactctgctgctgtactcttggttgctacataaacaaaacataacacataactaattaatacgagactcacaaagtgacaatccttcaacaagagattgaaaaagaaaatcatgacatcaatatcaaaacatggcttggaataaaggaaagaggagaaaaaatcaactagacaaaaaatactttgttctaatacatattatttatgttattccttaagatgttaagcgattatattcctctagatacacacgtcttccatagtaattcaatcttcctacgtcatgggatttttgaacaaagtagaactctcttatcttgatgagtaagtaaccaactttacacaccggccacaacaacagaaccaaaagcataaatgttaatccgagcatcaaagtatttcaaaagaaaaaggggattccatatatgtcaaaaaaggcctatgataaagttgacttaagactggctgcctctcatagtgctataaacaaagttaaataacatcacttgtgtatctttttagttccctgaatatcctcaaatttgtgtacgtgaccaactatttgagtggaagtgtaaggaaaaccaaacattaaatatgtatagagattctatacaaataaaatatagtgacaatgttttcaacaactttattatttccttataataatattactcggcatgcctttaaacagagcatatttcatacctttgatctgaaggtttttatcactttagtcaacaactcatctcctgctattgttctcacacgttgtattagttcattcctagctatcttcttgtcctgaaaaagaacaaagaaaaggttatgaataagatatcaagttcaagcacactaagcaaacaatgattactactaaaaagacatacaaatataacaaaataagcaaaagagtacttactttataatccctatggtacttggagattaaagcaataggccgtggaggtaagaacttggaaagtactgatatcaaagttgggaatggcatccaaggtgaagtgggtctcttaaaagactcttgggtcctatcagaaactacaaaaaataacagaagcccaattcagaaaaaccaaaataaacaccaacccacgtgaagtaatttaaagataatgacataatgtgaaactaccaacctttagaggaaatgggagctctgaaactaatgacatattcaggcaaaacacaagtgttcatgtgcgtattccatataatgtactttttaggtgaagagagattgtctacacccgagtcaaactcatcagaactcggaaggaactgttgagaacctaaacgcacctcctcagatttgccaagtattacacgacacaacaaaagatgtcgtatgccgtcttcatcaacgcatgaaccttccacactgtatcaaattacaacacgttcatacataatttcataactagttattaataaaaaaaatgtcaattgagacccaaaatggtcaacgcgataatgatattctctgccgaattagaccaaaataagttgacaaaatcaatcaaagcttatatttatattttatttattgttattaaacttagtctacaatgaaccacgcaataaacttgatgagcaagaatttttttttctttctgaaacatcatgaaaaagtttttttttaattgtttttaataaacaatagttacccatattttgttcatgaatttttaataagaatcaatttaaaaaatagaaataataataataattaaaagaattcgtaccattttaccaaaataataattaaaagaaaaaaggaaatagtgctttgctttcttgcttacctttccaatggataatcatctggagaaagatagagaccgtgaccgtacaatccatagttatgttgaggattgtggaattgagcgaagccatgtgagaagatcttcgagatttcatctttagaagaaggttggtaccaaccgaacttgacattggcattacctccacatttgcttgccatggctttcgagaatatctgaaacgaatgtagccgagcttctcccacaatgctcgaatgggtgtttctgtgaatcgctacgattgtagttttcgctccaatcgaacccaaactcgagacgaatctcttcttaatgataccatgtactctgtctccttctaataaccgaaccaacccatctccattgatgaacccggttcgctccgaatcaacaccggagacaccactttcgcaatcggaaagagacgatgactcgtgatcttgaattgtctccgatgctgaatctccactaccctcttcggaaaatcgatcatcaacgacaatctcatgttttgatgaattaaagtccataactaactaaaaagtatcgaaaaagctaatttgatttacagaagaaaaaaaaaagtatctattctatcagaatttaacaaaagaaaaaaacagtcagttgaattaaggtcgacgaattggtatacatcgaagaagaagaagaggagaatttacagggattatgatgaagatgatgatgaggctgagaatttgtaaagcaaaacattagttcaataatttgtgtatacgaaaatactaattattcatgcacattattgggtaactaagatttcctactttctataaagattgacaacgaaaaagctccaaatttcaaaaagaaaaaaactcaaaacagaaagggtgatgagagttagtagtatttttgtgtgtatatatgtatatatgcgtatatatgtatagagagttacttggagaagagggaggagagagagagagagagaggtgggtagaagaagaaagaagaagaagaaaaagcggttacaggtttacttaacaaaaaaactaacggaaccgcctcatgtaaatggcggtgcgggcgctaatagttttgaagggccagtcgttttgttcattgggctttactttaaataataaatttgggctgggatgggccggacagggcccagcgctgggccttcaaaggcggttacccaattcccaagaaaggtttcctgttgtgaaattactaaactagccttctgaaaaatgtcactgccgacctctcttgttttgttgttattattatagtataacgaggagtggtgtggtcggttgatatatatatatatattttttttttgctaattaataattttgctctgaacttttttttatttattttttattttttatttaagcgtttatatattacaacatgcatattttggactcgaacccaggacctccaacacacacgcaccctctatggccacttgagctagcctcaagtggttattttgctctgaactttgacatgtatcaaatcatatcccctgaacttttaaagttattgaaaatgccccctgaactattgagattattggatttaaggacgttctttttaattttagtaaaaaagtctaacatggatgaaagttcagaggacataatttaatacatgtcaaagttcgaagttcgaagaacataattcggtagatattagagtctggggacatagtttagtacataaataatcattgaaatagtaaaattgaataaaattagacaaaagtccttaaatctaacaatctcaataattcaggggcattttcaatggtcttaaaaattcagagggcatgatttggtacatgtcaacaaagatcagtggacaaaaatcttaattagttctttttttttttttttttgaaaacaggtgggttgatattaatagacagatcattacttatcgaaattatttttatgtttatttgttcatgggttgggtgattcactctaatttaaaagtgctttgattgtatcaccttactaattaaatatgagtttgtttagatctgaatggataagtaagaagtaaagggtaatttaatttaatttgttttgtttattattgatagtaaaaagtaataaaaatgactaggcataacatatgatctgagaagataagataaggacaagggcaaaacaggaggtgcccaaaacgtgtgctgtgagtggatgtataagcccgaaaattggtaaaagattattaagcatggtgggtaataataatagggtaatacacgtgacagagagagaaggaaaaagtaggagagagtcaaaggcaaggcaaacgtagcatggatgagcgtacttgtatgaagtatcaaatcttattctgtagtagtacacgttccgcgcttcgcagtgaatatataaaatattaagtgattatataatacacctcttaaaatgatatattaatgcacttttgatttgtttcaacattcaaaaaaaatttttagtttattttttttccatattcatgtacgttatacatatttaagataacttacaaaattttgagaaattcaaaataatttacaatatagaaaacaatgttcaaacagtctattttttacacgcatataaaataaaataatcacacgtgcaaca

SEQ ID NO: 302080 - DNA, 1190 bp, Cannabis indica
gttgaatcttttcatatgccaactatttaattttttttactaggagataactaattaattgctttttatcaaacaaatacacaatttaattattataaatcttttcatatatcacataattaggcattattgtgcattaaaataggctttttgtctgttgtgcattaatgtgggtgggtgggcacagttggaatttttctaacaaaattggtttgcccatttgggctttgttatagaaaaaaaaaattatgggcctattgggctgaggggcctggggcagtggcccctgctgccccacccttcagccggctgtgctggttagttatagatacctatcattgtaattgatcattacacttatatatattaagcttcatttttgaataataatttacctcaactctctctctctctctacattctgttatttcttagatggtatcaagagctactttttttctaatcaatcgttgctcttttgttctcttcatcttctccaaaaatgtcttattcaacctctgctcggcgacttctcacaccaatgccactacttcattcagtccaataatcttctctcacaagctctctgccaagcttgacaataaaaactttcttctctgccaagcttgacagtaacaactttcttctctggtgccctcaaattctttcagccattaaaggtcatcaggtattgaattttatctctaattctatcactgctccaccacgatttctcactgatcgtgataaagaaattggacttatcaatccataattttctcagtggaaaattcaagatcagcttctctatctatggctcctttcgtctatgaatgaaggtattctcacatgtgtggttgattgtgatacctttgctcaaatttggaaaattctcaaggtctattttgttacccaaacatccaccaaaattgatcagttcgtcgcttaacttcagaatctcaagataggctctctcttaatcaatcaatatctcctgcgtatcaagactatagttgatcatttgagctctgttggtcatgttgtgtctcttaaggaacatgtagttgcgatcttcaaaggtcttcctcttgattatgatgtaacaccccgatatttgccttactttacaaaaataccattttaaatgcataatttgaaaagaaaaaaaaaatcctttaaatacaacaatg

SEQ ID NO: 302081 - DNA, 1877 bp, Cannabis indica
attaatagtattagcggccaaaagtgtacgtacaaattattcgaaccgcatatatcattaataatttttttttgaacaatatcattattaatcatttctaaaataaaagatttactgtaaaattaaggtttaaatatatatattatatagatgtaatttttatttttaaatatatataataaaattatttttttatataaaatatatacataatttttataaaatatttacataatttttattattaaatatttatttatattataaaattaatgaagaatgttttgttaaagctattgtggaaaactaaaaaatatcattaaactaaaaattttgttacataaccacattttatataaaatagatattaatttatagtaagtcgagtttatttaataaaaataataaattttcattgaaagtaattagaagttaatacattataaagaaaagatgagaaatcatccatttaaattagttcattatccattgagtaaacgaactattaatttatgtgtacaataattatgaataagagatatctcaaaaaaattggatagcaaactaactagcaataaaacctaagaaagatcctacttcaaaataaaaaaaatgatctcctaaaaaatagtaaatgaagataatcaaccaaactcaaaagatttaattaataggtaatccaatgcaagagaccaatccaacgcaactactaaaacaacataagttcaacttctactataatttgtgaacttccctaaaaaccaaggaaaaaaaaactaaaaaaaaacatatcttgtacttatgacaaagaaaataatgtaataggtaaagaaaaaaaaaaaatctaacttgaatcaagaaacttatctctaatttgaatatttgaagagaaattttgttcggacttattaaatttttatcaattctaaaaaataaaattttaacataacaaattaaataaacattaacataacaaaataatattactgtacaaaataacacgctaagttgacggcaagttgagtgtttataacttaattagtcaatttctctccttgtgactgatttattttctctatagactataataagatgaactatttatgagtttataaacatatatatttatttatatgttcgtgaatcatgaccctccaactcctaaataataaagatagtgaacgagataatttccatatgcattatttatgaattggaaaataagttgaatacacatatatcgaaatgattaatttcaaatatatataaatatatgacagcgcaggtactagataacagtatgtggcattgatctaggtgccctatatatacatttataaatatgaaactattatttctaagatgactatatatggtctatatttgtggtggggctttaatgttttgttatatacctaactaacaaaaaggagctggtagtgcttcataattggaataatgaaaatatgatttcttaatagaattaccaaaaataagaaacataatattattgactctcatgatcttatgcatgtatatgtcttaagctagtctgactatatatgaatattaaagcttatcgattttcgttttcactacttttaattatattaaatggattaggttttaagtctacgtagtatttggtgttatatagtataacatgtataccataataatttcatataaaaaaactaattagtataataacatatataatgtaattacaaggatttttaaaatatttcaactaattatcaatagggaaataacgcttcaaatctcacttatatttattcttgtaaagtcctttttttggcaagttaggtgacaaaataatttttcatttttatggtaagattgctatgcattaattt

SEQ ID NO: 302082 - DNA, 3975 bp, Cannabis indica
tgtaatttttatgacgtgtaatttattttcctaatggtatataatttttcaactactatctatgtataatgccacattattaatttaacagtcaacttcagtcaattttaacaaaattagatagaaggattatactattccaactgatatattttagggggtatttttaactacacttataaattaaggggcatcatagtatagtgtcataagtacagggactaaaaaagctaattattctttaagttatccatgaaacctgtgttactgttagtagctctgcagaacaccagctgatgttgttaagaaaacattaaagttaggagactatctaaaggtcaaaaaggccaatgcaatagcttcatagttcataccatcattttatgttttcctataaggaaaaataaactgcatgtgtataaactgggcatggacccttccaacaaagtgaatcaaaatgccccatggacatggtaaactgccacttcatagtccatattctgccagactgaaatggtggcaaccaagggaagttttatgctacttaaaagtcaactgcaagacactaacaggaagtaatcccttccgaggttctatcgaagtgtgactagttagattatttcatttgatatttttttctcttcttgtaagagttctcattgacatagttcatttggtctcaaagtaatctcaatatttgtctgccatcacagtaccggatgcatgaaatgaaatccgacaggatcacatgacccctgtattggtatggtgaggttgagtgtagcaagaaagagaaataagaatgtatgattaagtgtattgaggttgaggagagttgggtggaaaataggatagtataaatcggcgagtaagagaatagaatgggcatgcagtgaattgagtatttctctgtaaccttgtttctctgtttcaatagcaattgcctatgatctctactctttggctactgttttattggttttcttgcgtttggagtttcggctcttatcacataaaacatcaaatagtatgccataacataatggataaagccaatgtggattttgtgggcaacaacagtagccaatgatattaataagaacctgattataatcatcatcgctaagctcttcttcagtgtcatgttcatctagctcttcatcttcatcctcattttcgccgtctttcttttccttttctcctttctcatttagagcctattattaacatgaacaaacaataaaatatatgagtttattggtgaaacacaatgattcatctgatctagccaagatttaatttaagtaaacaaagaaaaaatgatatttacctcacgttgttcaagcttctcaaatagatctaattttttaagctctgcaatgaaaacataatgagtttgattcaagtcatactaccaaacaaacaagaaacaaaacaactcatcttcaatgtacctgaatcaggattccatcgaactctctttcgactagactgtcgccaccccttcgaacctgaaattatacttcactaatgaacacagtggcagaagccagtgaaagatatagtatagaaaatacagtcttggatatcatttcctaaacaaaattcacagggcattgagaatgcaaaccttcagttagttccaatggaaattttttctggtctaagatttgtgaaagtgaatctctcataatggtggtattgattttcttcctgtcagaaaatcttcctatctctgagctttgatcctctggaaaaccaagattcaagtaaactttcaacttccataattgtattcatatgtattagaaaataaacaagaattattatacacctataaattattgaaaaattctgaatagggacatcacttttgtctctatcgatatagttatagcagacattctacataatcttgaaaaatttagaacatttacaataccaaaaaagaaattcaaacattcatttgttttttttatatgtgtgcaattgactattttgagttttattttcgacattgtaatttatttaaaaaaaaaaagaaaaactcaaaaacagtgaatttttgaaaaatttgccaaactaacaatttaaaatattaaaatttataaaataacctcacttaatttactttatgcgatcatgatagttgcacaatgtaaatctatgatcgcagagtgtaattcatgatcgtttttacaaccatacaaggttattttactgataatttttttttattttacttaatttttttttattttactaataaaaatttcacaaagactatttttacatagtcggattttttcgcatcttaatttatttataatgttttgaaaatagatagaatgcctactataacacgataatttaaaagaaagctaattaaaatttttgctctctaaaatcatatcctataaacttttaaggtcattaaaaatgctccctaaactattgagattattggatttaaggtcttttatctaatttcatttaattttactatttcaatgattgtttatatactaaactatgttccccatcatgtctttcaaactttaacatatactaaatcaagacctctgaactttcatccatgttagaccatttttaatattgaaaaaaagtccttaaatccaagaatctcaatagttcaattaacgaccttaaaagttcaggacatgatttggtacaagccaaagttcaggatcaaaaatcttaattaaccttgcaaaagaattataatttctccaaatatcgaaaacatagatgtccctaaactattaagacatactgtttgaagcattgtcctcaaggtagtaaggagaagctttccaatagttttgcaagatcatacttcgacggattaaatctttctcaaccaacacaccctttatatcaggcaatacaacatcctaacaaatcacaaaacacaaaactttcaatcttcaaaattggactaacaaatataatgaaatggtttgtaaacaccaacctcaggaaataggacaaagggttcctgcgtaccgaatcctccaaatccaccacgtcccctaccacgccctcctcctctataagccatttatttacctttataaacaaatgaacaaaacccacaaacataagcaactcaattttacaattacaataagataattggtcagtcacatgaacaaagtagtctgtcttaccttcagggtctgaattaatgtagaatgatgaaaagaaaatggaggagataaccagagagagagagagagagaagaggttataggcggcggcgagaggctgaggccggagaccaagacggagatgagttgtgtttgtatgcgtgaaagtgagaagtgttatattaatgggctgggcctcctatgttgggccttaatatttttagaaagtagaacttacatgccatacttttgtaaaaagaaaatggtaagaaaaactaccgtaagtttgctttgtttaacgtcgttacttcgactgcatgttgtgctcacgtggtcttcaagtcgggtcttttaacaaagactcaatccttatgtacctatcaatagaatctaatacattgaatttgagtgtttcaccatcaaattttattctaagaatctatgctttcgtatccaatttcttactcgcagtgagtaagaaggatctcccaaatggagttgatgtagtattggaatcaccctcatcttctatctcaattatataagaatcacttggagaaatgtccattagtccgattagtcaattgaatcaaaacctgagtttctcttaacaaatcaagatttaaagaagcaaaactagaataagacataatattaataattgctcctaaatctatcatgcaatgatcaaacctggttttactaattgtgcattgaattgtacttgtcttaggcaacaactttctttggagaactacagaaacattctcccccacacttattttctcacttccattcaattttt

SEQ ID NO: 302083 - DNA, 1911 bp, Cannabis indica
attttagcaacccgaactttagattggatgaaaaaatatataagataaaccgcccaaaccgaccgatgtacaaccctaattctacaggttatatgaatgtaccaaaagtatatactatttttattttccttctcattgtccaataatatatagaactacatatacatatatgttcatgtatatggtatattatatattgttgccttttctgaatttgatgaagagaggacatcgagtttggattcaaagaattggaatttactttcggaaattaaactagtagagatgttttagtagattctcttctataaaaagaaactccaccctagctacctttgctattactatacagataaaaaagaaaaaaaaaaaaaaccatgtgttggtattttgagtgaagaaacttcatagaagctctctctttatatatgataataatatataatgtgacatctatatttataaattatatttcaaaagtactgctttatgctagctatatacatgtaatactatacagatatatttatatatacgaacaaaagaagtatataccagtcaatttattaccacgtttggttgggaagatgatcccacttggccttaccatcactgcttctaaattctgtggattcctttttagtaccaattaatagtattcctcattacacactttaattaatatcttaatttttttattagtttatataaaagaaagctaaaaatatctttgtcctgtttcccaccccatcaaataggtcggaattatgtaaggaaaaaatgaatagatagaataaaaaaacataaagttaaaataatatattctgaatcaggttgaaagtgttgaaagtgttgaaggaaaaaaaaaacaaaataaaatgttatattccgaatagggttgaaagtgttgaaaaaaaaaaactccatctttagttctacttatctttcgtgccttatgtcaagttttaagaaacaaagagaaagagaatgagtaattttattgattgaatgaaatgattttaatgcttatatagactataagctacagctacaccataacaaagttagtcaagtaactaattaactaatcaacagaaaataacaactaactaattctagctaacatcatgagttgaggagaacaactcagctcgattattgtctctaacaaaccccctcaaacttagagtggtggagcaaattatatttgtctttcaaaaaaggaaacttggaattaaagactagcttggtgagagagtttgctagctgttgatttgctggaacatgctgaccaaaaatttcttttgaagtactttgtttctaacaaagtagagatcaatctctacgtgctttgttcatatatgaaaaattagattagctacagtaatatggggttgagattatcacactagattaaaggaggtgaagatatcgagacttgaagctgagtaagtaatgactgaatccaactcagtacaacaacaaaatctaagcctctaaacactgcatcggttgatgatcgagagatggtttcctatttcttggactgccaagctacaagatttctcccaaaaaagatgcaatatcctgtggtagacattctggtcattaggatcagctgcctaatccgcatcacaaaaaggttcaagatgcaactgaaaagattttttgaagtgtagcataatctaatgtgccaactagagaggattgtgcatgaaatggctgtaacaccctaactatttagacatgataacgtgattttgaatgtattgtgcagctcgttgttaatcaatgagattaatgaaaaacgtgattaattaaaaatttgcttatttaattaaatacataaacttatacaattttgaaatcctgggatctcgttacaaaatacatttacaaaaagtttgctat

SEQ ID NO: 302084 - DNA, 4307 bp, Cannabis indica
ataccatttttttctaaataagggcccaaaaataattttttccctatagcccactacatttcagggtcggccctggtaataagtatcagatgggacacaaagcaaggagtaaatggcgattagaaggttacatgttttggggaagacaaaggcattgaaggctttccatcatttgttgactgcaatccatgtcgtgaaattgtgagggagcatcacatagaaactgccaccagtagtaacgaccttggacggacaagaacgccaattgacgacgacaacaatggctggtagacgacaagaggaaacattaaaaccctagtactacccttcagagagagaactatccaaaacataacttaggaaaattatagaacacggtatcaattttatctagaactatcaacagtcattctcacagtatcagttttattcctatacttttgtaactgaatatttttttagtatactgaattggatttggagatataaaaagaaaagtgtggaaatcatatcactttcaatatcaaacttagtattagtaatagagatacaaaaatgacccccaattttagaattaaacttagtaatagagatccataaaaatgcaaaatccttttctatggaatcaatttatccatcttttttgaacaaattctatggaatcaattttaatcaacaactgacaataccatgataatgatctcctctgtcttcccaaccttctcacttataaccaaattaatctttccaactcaatctgcaattccgtgccttggtaaatatgggtttctttcctcgagaaaatttattttggaaaaagtaattcaacactaagcaaatagaaaaccaccacatagaaagtaaatctctaagaaaaaatggtaatgcatttgataaaatatggttgtacaaaaaaaatatgaaccaagcacataccgcttggtgacttgtctggatttcaataataaaaacaaattttatataactctggagcaatgatagcctatacatttgataaattattaaatgtcgactaaattaatcctctgtattatttcctcctcctcccggttgatgaagtaaatgtcactaaccaaaaatataaaaccttcaaagcggctactttcttctacagtttattctaaactggagacttatttatcttaacctcagtctataacaaagtaatggagtattggctcttattcaaaatcaggctgacctgtggaggtcaaacaacgatgccacattctactgttgcggtctactagccttggataagatatgacttcgggaatgggaaggtaaacatagtgagtgttgcatatccctacagtgatgccactgtatccagcaaatgccccatgaacctgcaaattttcatgaactcattttagtcaagaatcaacaataaggtctgtgtgtgtgtgtgtgagagagagagagagagagagagaaactcacagcattttgtcctagaacggtgcataaaatcccatctgatgcatttgcacggcatgcacgaatcatgtatgtgggatcgatgtacttcacgtcggctgtaataccaatttctttgaaatacttcttcgtctgacaaagggatagaaattaacattaatacatcaattacgacaagacaaccaaaataaatatgaagagaataactatgttggttatcagaaaaatttagtactaaattactggacaaaagaaattagaggtacctcttgctgaagatgtacaccaatatccccaagaatagcatttccagatgcatctttagcgttagtttgcttaagaaaatcctgcatgaaaaaaaaagtaacatacctaacttagagctttagaaagaaaaacatcaatttgttagttctttttagcaagttgaatctcaaacaagtctggcattttttttttttttgggagaggcttcataatatttagactgagaacacaaaaatatactggtcccaatgagtttttcttttttttttttgaaaggaaaaagaggtacaagcctatcgagcagatcctgttcaagtaaggttgtcccaatgagttgatcatgtttcaacagtgaaaaactgacattaaactaactaacctgccctgctccctcagcaacacagaccaccgctgatccttttgtctcaatgaggtatttcagatgccgcaaaacaccatgagggccatgtaaatggaaaggtaccttaaatgtattaaaccattatcagtacagattctgaaaaataactaaaccaattggtaagtcggacaagtacctctggtatcaagcatatgtcaatttgtccactagccaaggatgcatgcatggctataaatccactgctacgacccatcaactttacaattccaataccgtggaatgcactatgtgcctgtaataaggattgagaagttaacaaaaacttagctttctcctgctgagttatttaacaatgaaattattatacataaggcttgagcaatttaagtgaaatcgaacaagtcacaaattataatgaaaactcgtacctcaatatatgctgaatttatggctcgttgtgcttcctcaacagcagtatcaaaaccaaaagttttgtccatcagcaaaatatcattgtctatagttttggggacgccaacaacagccacctttacccctcttctgcagcactgaaataaaatgagaaaagtaggacatgagacttaaatagaaatggcaggcaaggtcaaggcaagataaagagaaacagcttcaaaatcataaatttagtaaaagtagtttaacatctccaataagatgattctagaggcatggtcatctatatggcagtaaattgctttctaatttctaccattgctgatggaaaacatggacaaataattatggttatgaatcctacactaaaagcataatgaatttaagtaaagcaggaatgcatcaacatcatcaagaaatttaaaagcaacttgtaccaaagcaatttatattcctaaaggttactgctttcagtaatctcttcaaaagtgaccttacttatgaatgcatgataaattatgaaacagtgaaacacaaaaaattagtaaacggatacacgcaaaacaacctctttgtgaattatgtttgccccagcatgagttccattcccacccagcacaaaaagcatgttgattcctctttcctgatatcagattaataaatgttgtcaggctaagaaccatgtgtgtcctcaaaattattaactcttaagaaaactgaaattacaaacctccatgctgtccacaatttcacttattcctggtcctccacgtgaaactcctaacaagcttccaccggacaggtgaacgttttgtaccacttttctggtaagctgataatcacaattcaacagaatatatttacataaacatagagcaccataaaaagttcagcactttctttttgggggtaaaacttcattaacaattatatgcacatctggaagatagaaacaaaaacttacaggcatttcggctaattctttgtcagaaaatccacgataaccatatggaatccccacaatcttctttactccataaatttcaagtgtaatcacaatctgcagcagataattttatagactcgcaataaatctttaatgatttcaaatcatatgcatgttaagaaatatcagtatattctgtagctactataaacattgagatctatttatttcattttagttactgcctgatgaaaccgacctgtctgatcacatcgttaagaccagggcagaggcctccacatgtgacaatcgctgctttcacttcttctggtttgaaatatattttttcccgagggccagcacggtgaaccctgcattaattaaatactacaccatcaataagagatatatttgtctaatttaacattacatgcaaaacaaactcaactataaatgtgttgaagaattaataacagttaaataatgttaattttcaaactgcaatatttcatggagtatggttttttatggtacaagattcaatcatgcattatgttttaaacaaacaaaaatctgttcttttttaagttatatgtaaaaatctgtgctttttaagttctagagaccaataaaaaagcttcaaacacaatgccttcagcggctcaatacaaggaatttgaaacatcaatatgatagtgaaaccagtgaaaaaaaagactcaccattgttctacccaagtacagtcaggatcaatgcattcagcaccagccgaggtaggagaagagtagtaaatggtctgagagagagagagagaga

SEQ ID NO: 302085 - DNA, 1799 bp, Cannabis indica
gggaatgttttcgtattagattttttcgaattaggtctaagtttgtatagtgacataatttgacgaactttttggacaacgcaatttgaacctatttcccatcacaaagccctatagagatgttgatattagtattaaagggaactagaaataaaattaggagatttttcacaaatatgaaaaaaaaaactatatagcataaaaaaaataatataaatagatatagaaattaggtggttaatgtacggggacggggagtgcaagccccgtccctatcctccgctgagcagatacggggtagaaaaatacccatcgataatgggaaacctatcgagtattcattaaaacaaaacaaaaaaaaaaatgcaataattaaaaataattaaatttaaattaaactaatattctcacaaatatttattatatgccttcatcattcatagaagattacaaaaaatataacccaatagaacataaaaaataaatttgtctcaaaatttgatagtcacatatatagtaaccatatatatggtacgaaaaaatcagagtattacgtaaacacttgcatcatatatctgaataatttcttgataatactatgtacgtaattaataattttcattatgaatgatatatatattatataaacgttaaaaattaaaaataaattatacatatgttgggattggatatggtgcgggtacgggtagtattaaaattgtctcccaatacaccgccccattaaccgccaagtcgaggaatccccaccacattaggggcgggtccccatgattactcattctcgcggtataaatttctatccctaaatgcaaatgataataaattttatgattttttatttcatttcctagattatgtgttattcgtttacttaactaaaaataaataatacacaataactcaaaaaccgattataattaaaaaaaaaagtatttttatttttacactgtaaaacttctttttttgtgttttttccagaaatccacatagcaacagacataacaaccaacgatgcaacttaaatcacaatcaaaaattcacatagcaacccacatagaaactaccggagtaactcacaccgtaaattttaaaaatatagttaaaaaataatatataaaataatttcctaaaaaaaataagagagaattagttccaaaaatattgatacataaataaaaggaaaatttacattatggtacgttaatagcaatttatttacttaattaaactttgtgatctaatttaatataaaatattaccttttattatactgtttgaattttaattattttgcttttataataaaataggtgttaggtgctgacatcatgtatattacaattttagtggctttaattttatttattttttatttttaaaaatagggattgtagaatatagtcttactttagataattctttcttactgaatttttaaaaaatatttctggcaacaccataagtattttgggctaaacagtaatatcattagggttgtgcagaaagtcatccaatccaattctaactgatcgatccaatcccaaccgatccaatacaatcggatatccaatcataattggatcggatcggatgcaaattttaaaaatccaattggatcggatcggatattggattagacatccgatccaatggataaccgatccaatccaatccaatatcatccaatgtccatccaatcatatttaatatttatatttttatatatttaattattttatttaatattttatatattattttattatctatgttagatt

SEQ ID NO: 302086 - DNA, 969 bp, Cannabis indica
aaaaatattatgtaactttatatattgtatatgtattttcaacatcagttttaaactcgggatcccgacttatgagattttataaatataataaaataagtttaaattcgaattagtcaattttcaaatacgggcgttacaaaaaacttccatttgtattgtacttcttcttctagacccacttattacctaccatattgtagttaggagaaggtggtacaaggacatatgttctgtttctgagcaatgcaagatgttcagtggacattgcattattccaccctttatatttcaaatccctatggaaagaacttggctcatcatccttttcttcccattttgtcttgctgagcttgaaaaaaacagcttttgatcgagtgaccatagggtgtgttggtttaggctcactttcttaagtgtcttgttcttgtataggttgttgcagttgtggtgaagacactgaacactcagcatgcattgtgtcaacaggattaaaatccaggtcaacaaacaagtggccaatcaaatcaatcttagagtgatgagatgagtcgggagtcttttctgatggtgatgttgtaggtgtagctaaatttttacttgtatcaacaagatgagtattgtttgactcattttgggagaatctgcctgagttttgttcttcgaaaattggaaaagacaaccaggtactaggagttgacacattagcagtctgttcatgttggtgagtattgataaagccagatttgaatgggaagtctatctcattggaaacaacatttctagagatataaagtctcccagttgaacttaggcacttataacctttatggaactcactataccctaggttgacacatctagttaagtggaattagaacttatgactttgatagggcctttgtaacaccctaactagcataggcgtgttagcgtgatttttaacgtactgtgcggcttgttgctaat

SEQ ID NO: 302087 - DNA, 1211 bp, Cannabis indica
ataataataataataatgtgtaagtggatagtacacttatgaacataatgagatttgaataagaaaaacatattaaacttaccgaaaatctttccaaacaattccagaaaaattggatgcagtagtcaaagcattagtccatccatcaactctgttatcatctttatatcgctgtctgtggttagcaagatcagtttcataagtccctttttgccaccgagcttgagaaggatctattttataaaaaaagggtataattgaattttcacatttcactttacaaatgtgctcaagttcttgtaaacaccatgccgaagaagtataatgttcagagaaaataataattgcgagttttgattcctcaatggctttgagaagattaggcgaaatctcatctcctggcttaagttttttatctgtataggcacgtattttttcacgatctaaacgatccacgagatgactgagtatgttgtttcgagtatcatcgcctctaaaactgatgaatacgtcgtactcataactttcatggtgatccatatataatcacggacaaaaataccaataccagaaataatttacacctacttactcagctcttagaagtgaaaatatacacatttttctcagggaaaatactcggtgaagatgatgaagcaaagaaggcctggtcaggtcaacgctctaatagaccccattctactaagcatgtgctttcctccatatggtggggaccatgttttttttttttttcttcacctaattaaatgggaattttgcctagggagaaaattggttccttagggcaatattaagagaataagtcaacattaaataggaagtcaacattatatgttattcccataatactcctctagccttaactcacatctcttctcttctatcctctcttttttgttctctcttcattaattctcactaccctactcacaaacctcattctcttcactcattttctaaccaaataatactaaattttcatacaaactacactagaacctcataataggtactttggtagttgtttttttttttgtggatggaacatcaaactcggatttaatgagtaatgattttactttgtttaatcttgttattggttattatatttaatttataatgttgttttgatgctcaatttgttagttgttgctgtttttgtgtggaaatagttgttcttcaagtttttt

SEQ ID NO: 302088 - DNA, 2831 bp, Cannabis indica
ttgacgagattgaagaaaaatgagcctcagcaaacctaaagcaagtagctcatcagcaaaagctggctcggtacttcaacaagcaagtgagggcaagaaatttttttgtgggagatatgttcctcagaagagtgttcccaaacacaaaagacaacatgattggcatactcagaccaaactgggaaggaccatatcaagtagtgaagtcacagaatctagagcatacaaactggaacattatgacaaaaacatggaacttattctagtaccaaggtattggaatgggaaaatttgagaaaatacttccagtaagtgtacaaggcctgatgacccgcatcaaatgcacgatgcttgaacatctactcttaagtagatggccttctcagcggacatcgctcaagggtttaaataaaatgactggcactcaggttggatgaccatctctaaagtacagtctaaaaaatacaattattttaagttttaattagataaagattagttagatcatgtaatagctttcataattcaataaatgtaagttactacgataacaaaattattcagatcaataaatgaacaaagatattaattatcattctaattgtgtcaattattttttactatagcaagttatgaaactagcattaaaatatgtacaaagggtctgctcgaacccaaaagtcgatcggacaaaaaataaacttgtgcaatacaagtgaccaagagcataagtttgctccgtcacttggggggcaactatacccgtacaaagcataggtaaataacaagcttgaaaaaatagaacaatttacacgtgcaattattaaaacttaagggaaaatattcatttcaaaagatgacaaagcacgatataaactcgggattaaaggctgcctggtcagctagttgtcttaaaataaaatgaagtattaccaagtttaaaggtcgcttggccgaccgcattgtatgacaataggcccatgggttgaactaaataaaaatgagaggaaaaaagaaggtttcatacggccggagtccttggctctttatacagatcaatttgttgtcagtggccgaaggatcaatgttttggtcagttgaagctaggaggctggccgcctcgaattcttccttgtctttctgggcagcacaaaaaccaagatatgcctccttgttttcattgaggtaatcaaagttagcatttgggttggccttccaaaattcagagaaaacctccagggcagccgtctccaagttgtccacctccttttagagtgcttcccactctatctgcccagacctaacgctctcttccaaatccatcttctcctgagttaacttagaaaaaagagtttggagaccttccttctcatccttcaaggcattaacatctttggtcagagcatcaatattgcttcaagttgggcggtggacgacatgtcctaaatctccttctccagttcctcaactggcttgttggtggccaaaagttgtttattcacctcgcccagcttttcatccttgtcctcaccctccttcttggctgcctctacctccttctagaagttggtggtggtggttatagttcttaaggctatagactttgctcgtgaataagtttaggccatcttcaagttagctgcacgaagaaaagtcaaaacttgcactagtaaaagaatgaaataaaaacccaaggaaaagtacttactcgggttgcctccttcagtagcccacccatcagtaactccacggacatatcatctcctcaagacacctgatcattcacctcaaggagaaactgatcctggtaaaaattagcatctccttacccttcttggtttcagaattcagcacgacagaagctcttaaagatttgggcagttcggatccgttcgtgcttccccctttggcactcttggttttcaagcttttcttggccagcggctccacttctgacaccgcctcctcagagatctcacttggagactaggttgtacttttctcctcgggcgcaactgcttcatgccttaaccatttggttggagacttctggctgaaaccatcacccaaccttttattcagagcttgcagcaccttttaagacatatcttcacatgaataaaatgagaagatcaaaacaagtacggtataagaaaatgccaaagatttggatacaagttaaagtaccatgcacgtgggcatgagcattttcccaaacaatcaaagaaggagcatcatcgtatgaggaatcctcccgttcctattccccttggatgaattttccctttcctaccactagggcggatggttgagctacccttttaggatcatccctgatcctgatggactgctcaattggtatttggctactcgaaggagccttccttttcttcttcttcttacttggagtcttcggtccgagatcaatctctcctactgccttcacagcctttggtaaaaaattagctagatatagcttgtacttgataaagttagtgtcggtagccaagagagaaatgtttcgttcagtaagaggaaggttgagaattttttaagccctcttcttgagctccaatgtgaacgggggatggcagtaggacaaaatttgttgaaaaccggtgtaagtggtgtccatccccttgaaaaaataatactcatcaacgaagcctcctatcttcatcacctcggtggacgtggtgcccgtcaaccatgactactcaatctgagagaaatagaagtaccctgacctattctgcttggacttgactttaggtcgaacaaccagttggtgtcatggggggacgactcaccccatccttgtgaggcgtata

SEQ ID NO: 302089 - DNA, 1386 bp, Cannabis indica
atttattttttagttaaacagattaagagtttttttatgtaattttgtaatttattgtatttgcatgatttaatgtgagtttttccaattttctgtaacaataactcatcagtacaaactgacgaatttcgctaccccccccccccacaacaaaaaaaaaaaaaaaaaaagaaaaacagaggaaaaaaacaactgaaggagtttgtcagcaaacaagttgtgggagaagatcaaattttgggtagcaacttgcgtataaccagagactttgttaaaagggacctgctgctttcttgtctctcatcttttctgggccgcgtgttctctgtattttatttatttaaaagattaaattacgttgtttgtttggattattcttaattgggttgtttttatcattttaggttacttgcacatgcaaaggttgagtctgcaaaatcaaaggaagcagctgaacagaggagattaaaaaagaaaggctggctttcatttacatggtttgtcaacactccctttttttctacctatttcttgaaataaatcactgttctctctgctggtttgtttgttagggctattgcacggcttggtattaataagctgctatgttcagtataacaattgtttaaagttttgcctggtcatttttctgtggttttatatgttgactatggcaggggcaccccctctgaagaaccccctgttggagattctcctgagggaccacaattattggaggaaacactgactaaagaagaatggcaggcaatcaacaagttgctaagttgtcagccagacgatgagttgacttcactctcagggaaggaggcacaaaatatgatccattttttggtaactgtacatgttagtcgtgctgctgccaggatcataagcataaatcatactgagattatttgtggtagattcgagcaacttgaggtggtaaccaagttcagacatcgtagcactcactgtaatgtgttgctgaaattttatggtttatctgcaccggagggctcacttgctgaggtttgtttgcttcacctataattttgggctgtggtatccatcatgataggttttatgacctccttttaagggtcgtaatctttttggaaattgtaatttaaatgtaggttctctttgcttatgttgtgtcgaaaataccaagtgaactgactttttactattgtacaaggggggagggaggtctatctattctaatagagacatcacaaaacagggaaaaactaaaattgaacaattaaactacattgtgccagttttggacaatcagaatgaattaaagaatcctttattttcttagctgaattcaaagccacacacacatgcatgtgcaaaatggatgctctctctctctctctc

SEQ ID NO: 302090 - DNA, 2524 bp, Cannabis indica
atataaatataaatataaatattatttattttaagttaattgaacttatatcaattttaatatattatttgcgacattattatttttttattattatttttaataatgagaaaatgttcaatttaatatttttaaactatatatttattttcctcaatttttttatactttaaatattatttttaaaaaaattaaaaaaaactaataaatggcttcttttaatttataaaattaaaaaaatacatataacagaaataaaaactaaaaaaatataagtaagtataactaagtatacgttaacaatattgaatttttattgaaaaaaaaaaactactgcagtttaattaattagtttaaaaaaaattactgggtttaattatcattataattattattatttaaaaagcagtttaatttttattttagtttttcaaaaaaaaaacaatttatcttaaaaaaaaaaatctagttgattcactctctcttacactacgtatcaaaattaaaaaagaagcatttcagtcctaatttaaaaaaagcaatgtatatatacattggtactttgtcatttattatagttttatttttatttcaaaattctttatatcaattatattgaaattcacaaaggatagatatatattaaattacttttttcaaaatatagagaaaaaataactatttcaaataaataaaatgaatataaacataaaacaacaggtccatgcatgcatagagttacgagctagacccacatgcacccatatgtaattatgtacttgttatttatttatttattttttaatagaaatacttgatagttaattcattgataaacacaaacagtttgttgttctatagtcatagtgtagtggtccattggtttcgtgattactgaatattgtactacttatatctatatgcacacatatatagtctgataaataagtagtgcaaaccaaattctgacacgtgtcatacacgtgaaatatggccctcactaaatccatggattggaacttggaatttccactctttttattgtatttaatttttgctcattgacaataatggagtatattcctcaagatgctcacccttttattggtgatcatcatattactgagtatactgtatatatatatatataaatattaattactaaactatggccattatattaatattaattactttatttcattaattaaaggtcattttaagtgtttatccatatatatactcgatgttaaactatttgatttatgcttaacttatctttggagactttgggcaaattatattgcttattagactttgatcgatgctatgctatatattagttaatgatcaattaagaaaatagaaaaaaaaaattgtagaaaagcaaccaatgaacatggtaacttaatttggtgaaaataaagaaaccaataatagtaaaatactgaaataagtgaaaagtcatattcaaagtaagttattggtttggtgaaaaaacaaatgaggtaaatgaagaagttgagctaactaagggtagctcgaagaatcaaatggcaatgggcaatttttttttaaaaaataaataaataaaatttggaaaatggaatgtggaaatggtgagtgggagggggacctcccaacagcaaggaatccgacaagtctatttattgatttcatcttcaaattcagagtacgtgtcgtagactagagtatcccacatttaattagggaaatttttttatttaagaaaatagcttcaaaaaacaacactaaatagcaaagagttgtaagctaaaggttgagaattaagagatatcattaatagatggtctcaattataaataaaaatttaaatttagtgttatatatatcaacactaaaaaattactatttcaatagaattttttttttcaattttaatcacctaacactaaaattataccaaattttatattatttattattcaattattttattaatataataaaaatattttaatactaaatatatataattatttaattttttttttcttaaaagtattatttaattattgaaaatttaaaaagaaaaaatagtatagtctacaataccccactaaatttagtgggacactgtagacaaagttatttataagtataggtttagtgtcctattagagtaaatataatgtgaaactacattatatttagtgttttgaagtgttagatatgccctaaagatatccaagtcactagaatgtactaaatgttgttattaagaaatttttactatgcataatacattagtaattaagtgtttttatatcttgcatttccattttaatttgtatggattaagcatatttttgaactaaaataacataaactttaatatattactccttactaattcattctcgatgtctctcaagaaaaatctcgaatcagattctaaattaatgggttatggtatgagcttatttatgcggttatgtatgcataaattattaatattgtggacattgtcccacatgaaata

SEQ ID NO: 302091 - DNA, 1638 bp, Cannabis indica
gtcgtgtacggtacctagtcagtcgaacaccgatgtgccaaggggtctttgtgtctgaccagcttggttgagaggttggcctgatacctccgtttgagtatgattgtttaggtgactatttactcttaaggggtagtctagtaagatcttcctatctaccatttggcccacagtttaaacctgtggccttagattggacagttggtcgatataagtctgtagagtatgatcagcgacatactcttctaacccattctaagatctgaagcggatactggaatcagtcattggttgctaactagtaacatgataggcccttttgatcagtacgatggcctgcctagaatggttgtcaatggctgcctgttgggctctcatgaattccatctcttagtcgctccactaactatatcaaccgacatctttgttcatcaaaggaaagattgatagctactcagatatctcgcttgtcacggtgaaagatgttattgtggcattgcattaatttaacgcagctcgcaagtgctgaagttatgtatcatctccaactagcctttgagtgtttgtgatggatgggacttcagtgccaggagtggtctgcttggctgccatactggtatttctagtttcttgtacacctggagtgaccccagccagaggggaagtcactccatggcctactgttggtggttatgtattaacttgttcaagagttatccctagtggatctcttgcgtttccagatgtctgcaagcttggatctgtcaccattgggttaactggatcagttttatctccccttcgagtatgtatatccatcttgtatcctataaaattacttaagacaaaaacttatttcattgctctaaatgaaagtaccaaaatattgacctcttttctagccaacgacaatgagtcttaattaaagcgagaagataaaataaataatggaagcaaagaactgtacgtaaagaaaacaccagagtttctaggttcggccccatgatagtggtaatagtctacttctcttttggttatattgacttatgagacaaagaacaaaaaattctctctcaaaagcttttacaaaagatccctgagtaattctctcttatatcgctatttctctttagtgttctctctgaagaaattcgtgtcccctaataaagagatgaagcgactattttgtaggggctcattacataggaatggtttcccttaatcaataagaaataaaaataagaaattaatatgtttccaaaattacaatgaaggaattctgcaagtataggctgattgcttgtattctttgaaggtatgaacaatcctacaaaagtagggattacttcatgtcatgcaagctaggagatatcaatgatcactactgaaattgccaactcacatttcctggctggtgcatgcgagttgattacacaatcgaactggtcagatgtcccttgatgactttgtccgaacatcctgctatgtatgtacaacttggaccttcatatcattccttgtgggtgctatgtgtaaaattatccacccagattgaagaatgcaatacacgtgtcatcaagctagatgacacgttattgtgcaaaaaataaaataacatattgtattgtatatgtaaaa

SEQ ID NO: 302092 - DNA, 1242 bp, Cannabis indica
aactaaccaactaacttttcacaggggtgcctgaaattgcagtgagtttggttgcggaacacattggagttgattgtgacttggactcaaggagttaagtcctggaaagaagatcccttttatatttttgttaagttaaatggatgcctgattgtatccttttaacctcaaagccaaagaaataagtgataggtccaggaactttgagggcaaaggttttgtgaagatcagaaattagatgttgtattgattggaatttgtccctgtaatcaatatatcattaacataaacaagaataaggatcaaatgtccatgaattatattgaagaacaagcttcttgtatccccactgaagtaatgtgtttttgagagtgctaaaccaggcccttggagcttatttcagaccataaattgccttgtgcagcttgcaaacatggtttggatgtttgagtgctaacaaatccttgaggttgtgccatgaaacaaaactcgttaaaaatacttaaaaacaagactaaaaaataacataaactaacaatatgcttatcaatcataaaaaaatataattaaaattagtatatacattttttgtaaggtgcaatgattttctttaattatgaatactctagaattttttttcccattcaaattttcacaatttttatgttgagtttgcttcataaattcttttttttttttctaatataattagtaaattggtttcaatatatagatatgtttttaatgggtattacctataaatatatattttattattggtcattaaatatgaatcaaacgattggtatttataattattaattatttaatttttaagaattaatatttaaatttgttttaacttatgatttgatgacatgacaatattttcttcttttctttctcttattactattccttcctaaatgaatcagatttagctaaacatttttgtgtcccaataataattaggcgagactgaggaagacttacattatcatagatttagctcaatattttttggcctcccaatatattgattgccatgttggctttgaaaaattgaaatcccttttaactagtgcacctattattcgccctcccgattagaatgttccttttgaaataatgtgtgatgcttctgattatgcaattggtactgttttaggacaaagaattaacaagttacctcgtgtaatatactatgctagcaaaactttaaatgaaactcaattgaattac

SEQ ID NO: 302093 - DNA, 2047 bp, Cannabis indica
gtttaggacttgtacgactaactattaactatattatgttacaacaccaaaaaacacaaaataaaccaaaacaatgtaaagtgactattcattgtatgaaagatagcttttcttactcaacacccatccttactctaccaaaacatcccatttacaaaatctgtacccaaccttaaaaaaatattatcaatatattattatagaagaatattttagtaagataatattttggaattttatataaagtagtatagtagtaataagtagtatactagtacaaatatcctaaatcaattaattaattagtagaggggtcaattcgaaagtgtacacatgttttagcattatttatttaggtgttcaattttaatttaagcctctccataataataataagatttctttctatttatcaatatatatctatacacataaatttatgctctattccaatttttatggatgcatggaccacatcattgaatctctcatgcaccaaaaagtagtagacatatatattggtgtaaagtttcatataaaatctgatatttatcttcttttgtagtgttatataatatatatacatatatatagatttaaaatgcttaattatgattggccatagtgcttgtgtagagatggaaaactcatcagaaaatatttcatcatccaactccaaaccaatcaatgttccaccattaccaagagactcccggggctccttagaggtcttcaacccatccactttctcagccaccgcagccgcctctgcctcggcctccacccgccccacgaacccgccgtttcgcccccaatcctcatggcacaactgggccgacccgcatccaatttcagagcccgacccaatacccaaacccgcccgaggcgacgaaataatcacttcatggatggctctcaaggacccggcggctccgccttcaccgaacatgcaaccttcaccggcgccgccgcttgcggcggcgacggcagctgctccgatcatccaacgaacattctcggcaatcctcaacgacaaatcagagagctccggaagcaataaggaagtcggagcagttgcggcgcagagagccgccgagtggggtttggtgctgaagaccgattccgagaccgggaagccgcagggtgtcggcgtgaggacttctggcggggatgagccggcgagtagtaacgtactgaagggtaattctcgtcggagctcgaataattcagttagaacttccggtgaatcttccgacgacggtggaggagggaaggagagagggtttccgagagtgtctgaggatttgaaggacgcgctttcggcttttcaacagacttttgtggtttcggatgctaccaaacccgattacccgattctttatgctagtgccgggtttttcaagatgacgggttacacttctaaagaggttattggtagaaactggtacgtaactaaaataaaagcagttattatttaattatttaaaattaactgtaataccggtcagatcaattgtttaattattattattattatgtattattaagtgagttaatgatttgtttaattaaattaataaataatgtggtgtgggtccagtcggttcttacaagggtcgggtactgacccggaagagttggcaaagattagagaatcattggaagcaggatccagttattgtgggcggatgttgaattacaagaaagatgggacccctttttggaatttattgactattgctccaattaaggatgaaactggcaaaattctcaaatttattgggtaagtttttattttcataatatatatttgccatttctacttggagtaaaattaaggactcatctacaattaaaaaaaaaaaaattgattgacgtaatcagaagttctacagtacataggtacacatattttttgtttctaacagttgagcatcctctacaaaattataatcaaatataatttaattgtatttgtattttagttagtttgttttttatattatttctatgtaattgattattttatttttagtattataaatta

SEQ ID NO: 302094 - DNA, 3791 bp, Cannabis indica
tcttcttctttcttctcatctactttatattattttatattattttataacaaattattaatttttatatatatataaatctttgaacattgacatgccaacaggacctcatgttgtcaatttttattctcctttttgtctttggggaccataacatatggtggaatacaatcacccaaagataaggatgggtcacagagttaaaccccacactgccaccctatgcaaaacctcaatcccaatcagtggaggtcacttcatctaaaaataaaataaaataaaattacgataataataaaaagaaagaaagatatttggtgagtaacataaacttataagaaataatcgcattttgttttatgttgcacgatctaccttctttctaagggaaatgttcttacatgatggtatagctcaagtgacaaatcatacgtctaaacgtttccttgaacaaattgttcatttgaacagaaattaaaaattgagctgtcaatcacctactttccctaatcccaattaagcagcatatcccttgttattcatcataaatacaagtacgtacctcttacctaattaattgagatttattgcaccctgctgattctttccttgttctctcacaggagcaaaacctaagtccattaccttttcttcttgaaattcaccaagaaaggaagtttccagttttatgttaccaccattaatttcagtggtggaataatttttgttgttgttggtggtggtggtggggttgttatctggtgcaggcactgcagtgtcattatttgcttctgtgaaattatagtttgggaatacagaaggtagtttggacaaaagggctccaagactgcatgacatggaaggtagtagaggtggaactggccagagagtgcttgatcccgatatgccattttgtggagtattccaacccaagttgatggacttagtaggaaaatcgtctgatatctcattaaacaatctttttagcccagttgattggcgcttctcatggattgataaaggtgatgaatcttgatgcgtttcgattgtttgtgtatttggttttagtgagtaatggtgttggattgataggtatggcctttgcatggaaaatacccctggtatgctttggagataggtgaatttcctctgtatgttgataactagattaagatcctccacaatctgtacaacaagatgtaaattagcccagcaagaacattgataaacaacttgtagataagagtgagagcaagagagagaccttatcaaatgacccgagttgaattatgccttctctaactgaaatgagtgctatagtctgataaatttggaattaatagacaaaccaattaactggagagcttgtaactttgtattaattatgtatgttttcagagatcttaataagttctaacctgaatgcctgacttgaattgagactcccatgctcttggttgctgtggataaagataacacaacaaaataaagtctatagataaacaaaggtgaacagatacttgattgaggactttttggtcagcaaaaaggaaattggcttaccggttctactgatagattccatgaagagatgaagctaggatcaccttcatttgatggatctctgaaaatccatttgtgactattgtctgctgccacttttcccactaacctgaaatcattaaccattctgattccttctctgtatattattatatatattctttcagtggcaaaaaaaacaaaaaaaaaagtactgatatctcacccttctccataattatatacttcatgggacaatttgaagaaaacatcagctccaaacctccctttaacgtatccactgccagcttgctcacactcataaaagtcacagaacccatcttcccaaacgagaatcctacacaccccaatattattattacacaaactttttacattattcttaatcctcataatccgcttaaaaggtattgtgaaaaattattataatggcttaaaataaaaagggaaaggggaaaatcccttttaccagttccttttgttcccttttgatcgctcaagagcaccacctccataatcccacctaatacaaataaagaaacagcaatgagtgtttaacacccaacttgtattcattaattaatatggaactagcaagtaacgtatatttatatatggcctaattaagaatgtttattattatttaattaattagcttacttgggaggaggataattccgaggcgaggtcctccaaaagactgcgtagacccatttggaagaagttgaagaatcagaatatgcacaaagatttctgagtgtgtgctgtaagagacaattaagcatgggaagtcgactttccattgttgtcgacactgagagagaaaaggaaaacagaaaacgacaccaaaacacagtgagagaacaagctgtaagctatagtctacgtagattaatcttaatgtagtactcccaatttaaaactggtccaattaaattatatgagatgtataaagatggagatgaagcaaacatatatctgtatggccacgcgtacccggacaacccaactatggaatatggccccctgcaacttgtattttttttaggtgggggaccctgcctggcctgatattttcgacacaaacacaaaattgtggtttaattaagatgacaattctttaacgaccagaactggtggtcgtgttcgataagccagcctgccttcctgcactgcaccttaattcgctgtacgtacatcgtttttcaaacacagctttttctctttttccattatgctgagttggcctgttgcctcctaccatgtctcactaggacgaggtctaggaaatttgtggtacggagtaacgacaggttctacttataattaatatataaaatactgcttagtgcttacccaaacagaaaaacactttatacttcaagacaaagccttaaataataataataatacaatgttgattattgtttactttgtaattgggactatagatgctctatatgaaattagaatttaaatgcaacactcccttaattttgtacacaaatcacatcgttttgaactgttattatttagcagccaagtcactataattgtctacttgctgctgtgtggggtccttaagtataatagtatggatggttcccacttcccatcactagctataataataataagccacacaaaactttgtccatatagatatacaaattattttgcattaagcccctctcaccaatactctcttttcttctagtgtatataggctggcagtggaagtagagcacatatataatgtgtactcggctaaactaatactctcttttcttctatgggggtgtgtatatagacatgcattggaagtatagcagataatagtgtgtactcggctaaactaaagttgaaagccatgtaatttattgtgtacagtaacctaagttaatagcctgtgttcaaaattagattagtacagtagtatactataatttgttagttgttggttttatctaaatatataaaaggttactgttcaactacaaacacaaactactataatttatgagattctacaaaaatggctatattttttttgttatttttatatttctactggttttatgttttatgtatgtatatttacatttgttgaccgaggttttcggcaactagtaaaatatgaatgtaatgatgagctgtaagaaagcgagatgaagactttttacgtggttggggcgttaatgagccttagtccacgagccactgctatt

SEQ ID NO: 302095 - DNA, 5152 bp, Cannabis indica
tatttttagtcacaatacttgttgtggctaaaactaaattagtgacaatttgtatttaaatactatgtgttagcaataagtaatattttgttgtgactaaaagtcacatttaatcataaaaaaattatattatgactaaaaagttatcactaaatgtataactgttttttatagtgagtatagctaggatttagggttgatcatatctttagattgacttaattggatttagatacaattagagataattataccatttattatgcttgtatatggccaaagcaattgagtatagttatactctacaaatttatatttaactaaaaaaatattatttgtctgtttaaattattttgtaaaacaagctatattactatcattagactgcatattgtagccatcccaaaaatttaattgtatatgcattttaattagtatatatatttttaatttatttagtaattatcaatagataatattcattaaaaaatgttaatttcaatttaaaaaactttcaaatatacgtgtatgattttctcgtaaacttttatatagtaataagcaatgtccatgtgtaattaaatgtaattcattgagatggatctcccttgctaaactttccaagtttaagaagaagttgatggcagctactgtacgtgtatcaaatctggatatgaataaaaatgattgttactggaatcaaaaattacaaactgtagagagatgtgtacagacaagtaaaaagcaatataaaaaatacagctacaaatttacaagttgtaaaatcacaatatagaggattaagaatattggttccttcttagtctgtgaatgtgattgcaattagattgtgaattacatgccataattttgtttatggtgatgaatataggttgtaaaattttggtttgaaagaaatactaattgggctatagtttatcaaagtaaataaataaataaaatgtccatgtatgtaaatagattttttttttctcccaaatatttgctcggactattaagaattaatggtaataaatgttctaagttctttttcaatattgctgccactatccgaaaaaagcgaaatagtttggagagtatcttgaataagaaagacactagaaaggagttatcggctttcctgagagacattttcactaatccagtccaaggtccgctggagatcagtttggaccatttgatttcagaatacattttcactcttgatcaagttgagctagaattaatactagggcatgaggaaattagacaaatacttgtttctataaggattttgaaagtctcggggtcagatggtatgtctgtcctatttttttaagcaatactggaattcagtgggtgcggatccttgtgaggctgttgtggatttcttgcaatcgggaactatgcataagggtctcaacaaaatgaatgtagtcctgatccctaaggtttctaacctgaagaaagtgtcgtagttcagacatatctctctttgcaatgtggtttacaaggttatcttaaaaatttttgcaataagaagaccgattctttctaggttgatttgtcccacccaagcagcttttgtcccagggcaaaatatccaagacaataattactggtccaaaagatcatccattcatttaagctcaaaaaaggaaaagagaatttttttgctttaagaattaatcatgttaaagcctatatgataagctaagctggcaattttttgaccatgtgctctgaagctttaaggtccctgataagttttgtaattgggtctgtcagtgcatctatgacttccttcaatatttaccttagtggaggaactgttggcaagattacttttaagtgtgacataattagataaggggatcccctttccccttatcctctcgcatattcttgagaatgtcctaaataccagaacaatgaaaggcatcaaatttagcaggaatggaccctgactttttcatcttttctttgtccatgatctaatcttagtaggtagggctaccatggaggaagcaaagagtttttggcaatgcctggacaaattctgtgattggtctggtcaaaaaataaataaacttaaaacatctattttcttcagcaacaataccagtgaagggattaaacggggtataaaataggaacttgagctcaataatgacattggcaacatttattatttggaatttctattgtttagaactcacaataaggatgtaaattttaattttattatggataaccttatctcgaagcttcacagttagaagttgaaattcttgtctaaggttggccgtgctactctgatcaagtcggttggcctttctttaccagttcacactatgcagaccacgaagctgtcgaagaaattaaccttgagaattgatggtatggttagggactttgtgtgggttgggcttcctaaagactttggaaatgaatcaagtcttattggataggttggactctcataacgaggatcaatctctgtgttgtaaggtcttaagtgccaagtacctaaggggtaggcctttcttaaattattcttttaagaactccgattcgtaattttggaagaatgttgcaaaatcttaagaaattcttaaacatgggacctgcaaacttatctcgaatgggaaagaaacatatatctgggatgatctatgagttttacatggccaaacattctatcctcaacctaataacaatctgcctgagagtttggagaaagttgtgaattttttttagacaataggaattgggactctcgaaactacatgctctttttgatccaaaaacaaccaataatatcatcaagggtggtaaaccctatggaaagggaagggataagtggatatggactaaagaaccaaatggtctatttctgactaaatctgcttacctaattcatactttacagtgtgccccattatgcaatgttgctccttctacgtagaataaacttttgaattctaaaattttaaagcgtcacaaagtcttctggtggagcatcctcccaaatgctttgcctatcgattctctcctcgctagaagattattacatattgaggatgttacctgtcctctttgtgcggagagagaggaaacaatggagcatctattcttttattgcaattttcactttcacctgtggaggtcgcccccttaggaagttatgtcagttttggactttggagctcaagtttaattgggattgtgtgcagtttctttagattctaaaatctagagggatggatgtacactactacaaaactcacatttagcgataaagaattttctttggttgtctaaactgacgctataaccacagacgcaaatattgagatttttgcttcattcattaacgatgccaaaagttttttgcttcagttcataaccgaagcaaaaagtaatgcactgacgccaaaaggcttttgcttcagttataaaccgaagcaaaaaaaaattagacccaccacaaaaacccatcaccaacaacaaatattgccaccaaaccttatcgaaccaccaccacaactcatagaatcacctaacgtaccacatcaaaccaccaccatcccatcggaccaccacaccacatgcctataccgcgcgcttgcagaaaaaaccaaatagaaaaagagagagatcagagagagagagagcatcgacagctaaaagagagagaggtcggaggagaaagagagatcgtaggagaaaaagagagacatcgaaggagaagagtgagagagagaaagaaattaccttcaaacggttgtggcggcaacgtgtctgggtggttgggggtctccactacgtgcgacgacgaattggcttcgatttgggctgagcggtttgggacttacaaaaataaagagagaaaatgagagttgatggagaaagaaagaatgttagaaatgggagagacagctggggtgatgtgagtattaaatctttagggttagggttttcttaaataggcctaaagcctgttattatgtctgatttttttaaaaaaaaaattaggaagtttgcgtcggttgtgcactgaggcaaaaagtgagatttttgcgtcggttcacaaccgacgctaattctctaaaaaaaaccgatgctaattacctacgtctgcccataattgacgctaaatttgaccactgattatgtgcatcgattatgtaattttcctgatgtcataaccgacccaaaatgtaatatttgtagtagtgacaagagttgttcctttatgctttgattgtagtagacgtaatatggaaagtccgcaatgacaaggtacacactaattctatgagtcaccttaaacattgcattgaatcaatctctatttgttacgcagattatggtttcttgtctgtttgactcgtcgaaggatgttgtgtcttcttctcctctccttctctgcagattgggtcaaaattaaccgtgatgtgaaagttggttgcagttcaatgtgtgtggcggctttggctagagaccatacgaagtctattttgtgggtggctaccaatagacttaatttttctaatcctcttattgaaaaagctgcagcttgtgtgttagctatggagacaacagtttctttgaatcaccaatttgtgatgattgaaagtgactctgagacagttatcaggatgccgaaagaaacatgttctagttggggtcttgctaactatgtgacttaatgtaaaaatctctctaatcatttgttaagttgtaattttttgttgtttaaagatcgtgtaattttgcagcccataatgtagctaagtaggcttttgccatgaatatttttggtatggtggaactttcttctatagaaaatgacattatatgtaatgaatgactaggggcggagccagggccagccctgaaatttagtgggtcataagaaaaaaaaattatttttggacctttatttagaaaaaagtagcattttccaaaatcagcacaaaattgtgtaattttaaaaggtgaagattttttttggggccctaggcacaggcctagcccgcctatgcccaggaccggagttagaataaagttcttggggggcaattattaaaagataaatatcgataaaaaaataatatttatttcaacaataaaagttaatacttat

SEQ ID NO: 302096 - DNA, 1098 bp, Cannabis indica
tatatatatatatgtatacatatgtatattctttttctaaggaagctgctctattagtccctttggagattagtcttaaaaatgccttgtagccacatgccaaaaggaataggaagaagaggagtttgatgctagacaacactcaattcttctagatgaacacattgagaaaaagaacactggaaaaagctgaaggtgtttgagggactgtggtgacatcaatttaactttaattgctttgcttattcctcagtagtagtccttgtttaaccttcttccacaatcttgtcacaacttcccttgtgaccacccaggcccctctactatacctagatttactgccatcaagtattgaagcagaagaaagattagaaagagtaagtttctttgaagattccttgttctctttataaatctgattctgtcgtttccggtagaagggtgagttcggattgtaaatgtaaggaggagagaaagctttggaaccttgaatggctttgttcagttggtgaactactgcatggagttcataggagtcgtacaaggtgctgcctttgtagttgggacttagaccgcacatggggctcatggtgtggattgaagttgagatagtagtagtagtgtctttgacttctgagatttgtaaagatccatgtgtgtatacttgatttgaaacttctgtttccattgcttgaagggattcaaatgtgggtttttctttttattcttgtgttaggacttgggatggtgtattgtttgagtccgaagatggtttgccttggaaataatgtttggtagaaagatgctcaacaagaaagttgcattgttttatacgtcttttgctttgacccgcataacataaatataatctataaaattggttctaagtgggtttgtatctgtttttttgctattactataaagtgggtttgatttttcgattgaactaatcaatttagtacttttgatattactttattattctcaaactagtacggtattttactgttctagatcagttatataatattcttttcctaatgaaatatcaaagatttttattttatttatttttactttttttctttttgaaaaaaa

SEQ ID NO: 302097 - DNA, 2904 bp, Cannabis indica
tacaaaaagatagtaatagagatataaaagaatagtacttggaatcgaaacttttcaaaaagttaaaataatatatataggtttagagttatatgtattttaaaagttgaaaaagatttaaagttatatatttaagtttattttaaaaaatatatataaagaaaataaaaaatttgttaatttacatttataaaactaataaaaaaaaaaaaattatagaattaattagagaagaaaagaatagttttgaaaatattatagagtgtcatgtcaccggcctattcttttcctttctatatattgattgaatatatatgtgtttcaccaactcaggtcaaatcatattagtatataagaagtgtgtgtgagttaggggaaggggtttgatccccactcaaaaaaaaaaaaaataaaggctaattaggatttttggtccctcgaactttgtacatgtaccaaatacacgctccctcgaacttttaaggtcattaaaaatgccacttgaactattgagattgttagatttaaagacttttatataattttattcaattttactatttaagtgattgtttatgtactaaaccatgatccccatactttgatatctaccaaatcatggcgctcgaactttaacatgtactaaattatgggctcttaactttcatctatgttagacttttttactaaaattggaaaaaagttcttaaattcaataatcttaatagttcagggggcattttcaacgaccataaaagttcatggggcatgattttgtacatgtcaatgtttaaagggcaaaaatcctaattagccaaaaaataatgactcacataatttaatataataagttttatataatattaccaattatttttaagacgctattttataatagtgatagatgctattagtacttaataatagtgctcgttaattaatacatttatattatcaaacaatattattattatatgtatagatgtaaaacttttgtatatcaatattttaacacatttattaaactatatctagaatcagaacaatcaataagaaaaataataagttcaaaatataaaataattggaaacaatattttcttatgtaattaggaaataaatccgcacttcaagcgattttattaattttctaaatttttatataaaagaaattaatttttatataaatgaaatttaaagtgtaaagtttttttttaatgtatacataatatatttatgtaaaatctcacttttatatgtaattagcacatgttgtcctgttttttacccaatatacgtggtagtccaataattagccacgtggcaactaagtcttaagacccggaagtatttacgaatatctgaagtaaacttgtcacgaatttagtagacatgtccacgagatccctccgggagcaatagttgtgtccggagggatcggtgttttgttcctctctaggagctaggcaaagccgtcaagaccgggctcaaggattcagagatgaattataacaacacataaaaatcggcatggagaaaacaattgcaaatgaatctaaaaagacatgtgaggggcattaaacccattattcagcgattacactcttaccgagggggttagtgacgactacataatgaactgtcacgtcaatcaaggaagggtaaaggcttgtctcacctaataccttgagaaactctatgtaacctattatgtagacctgcatgccctatttgaattttgggaaattgtgcaaactaaaggtgaacacttacgacaatagagactttttggttctcttcataaggcaataaatacccccaaccacattcaacacatctttcataaattagtttctaaaaatcttggtcaacattttggtgctttcattgagagtcgtagaaggccctacgtctaaataacaaaataagaagattcccactacgatgtgttgaataagaagggcctatgatgatgtagagtatgatgagaaccaagaagagtacgaggtctatgatgatggcagttacaccgaactcatggccttaagatagaacggcgctgaccataaagctgagttgatagaacaaaaagaacaaaaaagaaagatgcaagaaataatagtcgccatgcaaaaggctatggaaacaatgaacatccacaggcatccaaatgctaggcccattgaccccaaaacctcttttcttcacaattaagcccttgcttactgaaaattcataaataagtcatagtctaattttaaaattatgactgatgaattaaaaccaattaactgagtctgcaagcagtattttctcaactagtgagagaaccatgggcctatataattgagctttcaataagtagatatagaatttaccaagtaaattctctaacttattagttctgccttgcgccactatagatttgtaattgaatagcactctcaattatatcggtcgctctatatgtaccacgatatagatacgttatgattattcattgttacaaccctaatagccaaagatcttttatagatgatctacattgaatagagacaaatttacaattctaccgttcaatgtattttatccttaaaacacttagctacctataaatgatacttcagtgaactaatataattattgaagtgaggcctcaatcatttatctctattcagccaagcccaaaggaaatcattgttttactaaataattattgaagttatagattccatatctatgatcagcgctcccactgaattgaactaccatgttctcaagatataaatatcggacagaaccataggttcgaatccacgaacaaattgaagaacataaataatacaaccaagatgaacctaaccatatcaggattaagatccatagacctaagatcaaccattga

SEQ ID NO: 302098 - DNA, 1562 bp, Cannabis indica
gacgtcaaaggaagtagaaatgtctgaaactacccctgaaaagaatgagctgcaagaaacagttccatcagatgtattaaaggaacctaccaattcagtagatgcgcaagtagatgaacctaatgattctttgcattcaaaaaataataaggatcagcatgtaactgccacttcagttggaaaaccttcttctgaggaaccaagagacatagatatggtgcctcattcggggaactcagaaaagaatgaaccttcacagccagctgaaccaaatgtaacaggtgaaaaaggtgctacgttctctcctcttcagatcaataaaacaagcgatattataactgtatttgctagatatttagttaaaaaatgtttaatattatattttgtttgggttatttgtgatgcgcaaggatgattgaggaagagaatttttagtgatgttttcttgctcagatgtaatatactaggactatagtatgtgtcattttagttggaaacataatatagatatctttgtcttggccataaagaattcaattgtaggtttctgaatactgactgattttgtctcatacctttttccagttgtggatcttactaaagatcgtgacaaaaagaatggtatgggtataaaagaagacaccaagattgataaaataaagtgtgcagctgtctctgctatctctgcagcagcagtgaaggccaaacttctagcagatgaggaagaagaccaaatccgacaactttccatgttactgatagagaagcaggtaatctatagatttacctctccatagttgttgtcttaaaaaagaatttaaattttatctactgaagggcctttatgttgcagttgctaaaactggaaaccaagttagggttttttaatgagatggaaaatgtactaatgagggttagggagcaattagatagatcaaggcaacgtctttaccatgaacgggcgcaaataattgcagccagacttggcttacccgcttcctcatctcgaggggcgtcttcatctttgcctgcgaatagggtgaacatcaacgttactaactcagttcaaaggcctccatttagcatggtttctcagaggcctcccttgtcaagacccatggggacagtggcgcctaccccttcaataccattgtccacaacaacagcaggtagctcaattggacctccgagccaggaaaagctttcctctgtttgaacaaagtaaaacttaatatatacatgttgaagtgcatccagttttatacaccacgatagtactttctacatccagtgagttcctgatatttatataattttttcatttggggtgcttttaagaaaattcaacatctatcccactgatactgattttggtagatactgtggaaggcaataactcgtaagttgatggcttgattctggctgagaagtattttgagacctagtttgttttcgtagagatgaaacaggaagaaagtcaaattttatgagatataagaaaattaaatatactatttttccaatcacctaggtggtgttcggttagaggtaatgaaatggaa

SEQ ID NO: 302099 - DNA, 1173 bp, Cannabis indica
ttcccctttagtaaacatgccataatgtgtatcgtttcttactaggtgataatgactagcattgtttccttcttcaaactcaaaactctcaagatcaataatctgtttatgagtacaatccggagtaagatgagtaataggatcagtactagaattagtactactgaggaaagtgtgcattttctcctgtaaatttttctgttctttataaactttgtgaaattcgatctttattgatatggtagagttgagcctcgtacatggccacctcatctctaaggcagttaagaataccgtagcagccttacaccggatctttcctcctagcgcaggcctcagccatgatcgaattagcagtggtcactcgaacgtgtggctccacagagctcatgatcctcaaaatgttgttgtaaccgtaaagcttatgagcactttggtgctcaacgaatttgttggatgggaagtatggagccatttcgcaaataaggctgcattttctcctacaaggcctaaaattgccatcgtcatgagtacttctcatggatcttaacatttttattttttgaggggatgtgtgtgtctgtgtgtgtgctaggtttgaagaaacgattgtgtagagaaaattgtgaatgtatttataagctaattagagagaggtgctttttttggtaacgtatatatagtaacctttttaagagaagggattatagaagaaatgaattggatatatagtatgtgatttttttccttcttttttcttaaggacctagcaaaatgttatttaggcctacgtgtttccaataataattacctaaatctcattttgtactattgttgtttttgtttatcaaatatatttgaagatacactcaaatctctatagttggactaaattcaattatttgtcatgtatgtatattgtaaatatggaagcattaatttgactagtttacaagccaacagtatcgtttatatatacttattagtcactccatatgtaataccctaagattaagagaatggattagcgaaccctaactagctaaatgtatactattatggaagtatattattatataatttattgtatgcgagttaatatgataaatgtagtgttaagacccccgttggtgagctaggggcattttgtaattttgacccgagaagggtaaa

SEQ ID NO: 302100 - DNA, 2500 bp, Cannabis indica
ctctcttcaactgtgtagtcccatacctacacagtctcagaatcatcacacttgaccttccccacgcgatgtgggattgcacaacttacccaatatttcctcttacgaatcataagactactgactgtcacagataacacctaggagaaggcacatcactagtgtcttttattatttctcatacttataatgggtattttgttagttttcaaaaaattctaataaatttacaatgctaaaaatatagtgtttaattaaatagttagtaacatgcatgttaaattaatttttttatatgtgtgaaacatactatatttaaactttgtttttgatgttataaattattcaaaatttcttaaaatcaggtaaaattactaacgtaacgattgtctatgcatgtatcaaattgtacctcccaaactttgacatgtacaaaataatttctttagaactttgacatataccaaatcgtatacccaaacttctatccacatcaagtgcacgctagtaaaattaaacaaaattggatagatattcttaaatctaacaatttcaataattcagaataaatttttaattagttagtcaaaaaatgctccacctcatacgaaacttccaataaatattaatatattaatttatataattactacaaaaatttctataaatcactatatattcgtatgttatcatgttattagttacaaaatttatgttttgttgtcattaaatctgtttttagtcacaatatttattataattaaaatttataaattttatcaaaatactatattttaataataaattaatttttgctgtgactaaagtgaatttagtaatttataaaaaaaaaagtaatatttagttacaaaaaatatgttgtaactaaaatgttgttacataaaaatacatgaattgagataattctaagtaattaattagtaagataataataattaattaattaggacaacacaagtactgttattggcatctaacggtacgtataattattatttttactaattaattaattaattaaaaatataaataatacatcatctttcttttaattaattaattttttttaaagaaagggagaatcttgatcttcacaaggtttaattatactatattatatggttttagaaaataaacaagaaaggctcatgagggcttgtagtccagctctaagcacgccttttatttaattaattaaaatattaattatatatctttagctttttgattaatatattcatatgatcaaataataacttgtttaactaaaccctagattggtaattaattattaattgagtaactattatagtagttaataattattttagtgagtagtagtactgtttccttaaaagacatacattaatatttttgggttttggagaatataattagtgcatgcttgctaagcttgttataattattactttccccataaaacaattaataattaatattaataataaaatataaaacccaaaaacttctttgcttactttgggttaaggattaatattaactggtctctaattacactatcaataacataaaacacttcttcttcttcttctttttaattttctgtttttattttttttggaacaacactataaagaaatatttattacaaaatagaagaattttcaacatatataataattaatatgaagaatttatttttaaggaaaaacataggttagaaagaaatagaaattaatatatatttgcattattcccttgccctaattgttattattttgatgtaatttatttatgtcattgccacaaaaaaaaaaaaacccaaaaatattaataataacattacaattattttcattttattaggaaagagagagagagagagagaaatacctcattaaggggtagagttcgtagaagactattagccggaaaaaacctttgaagaaagccttgtaaaaagcgagtggcggcaccaccggcaccaccaacaccaccgccgccaccgccgccatctccaccgccctcaacgacgaatggtctcatatttattccattttgtttaggtaacaaaggttcatcaagagacccatttataattgtttgagattcatcactactattagggcacatgatatgattatatatatatatctcactctctctctctttctttatctgtatagttttcacaaaaagcaaaagaagagtttcatgagctaacaaaagagaaaaaaaataaccaaacaaagtacactactttgggtccatgtttgagatttaaaaaaaaaaactcatacacaacatatatttatatatatatatatataaatattatatgtgttttacgtaccaatttgatataaaaaaagtgtcatgtatttacataacaaattgtgcccaaagtgaatgttgttataatttatatataaaagtacattttgatatcgttaactccaaagtatatatatatatatatatatatatatagtactaa

SEQ ID NO: 302101 - DNA, 1905 bp, Cannabis indica
ggatggatgaggaaaaaaaggttggattggatcggatgcacacccctaacgtctaccctttatgacttcatttaagaatcgcttatagtaggtggatacctcttcttagttggtcataataatgttttctctaatttttttatcattgattttgtgtatggacttaggtttatgaatttgtggtttaaaaactacgacttgaaattggggataatgtaattctaaagggtctgggtatgcaagttctcgattgaaattggatatggtgttgtcacaaagtatagtgccccaaaaaaactcttaaaaaatagtgcacagttaaaacccaagacctggaaatcacataaccctaagattagtgacagagaagccacttactggtttggcgtaaaaatttgggtttcaaaaaatttcttgatgaaaactcatgatgttgaggacccgaactcacttgattctgggcgtgagagatgaaatcactcgaaactcggaggaaaaatgtaagagatagtgagggaatgcaattttagggagaaaattggtttgaggtttttttgaattctaagagcttcggggatgataatgtcgaaatagaagggattttggtttttatacccaaatgatgaaaaccattcaatcataataattgttgatcgaacgaatgggaatattggaaaaagagaggtcaccataataaatgaacaaatgatataccttgaagtcttgaactaccaaaataaaatatgtagttcttaaattggaaaaatacgatcgtaccctaagcaaattaaaaattcatttttattttaaaaagtaatttttaggggacaattgtcatacccatatttcaagtagcaatatagtgctaacaagtgtagtatagctagaatatgaaccaactcgaattatgtaataataaatgcatttagacaacttacctcgggaagtatagttggtagaaatattcaaactcaccctcctaaagataatggcgagacacgaataataactaccaattgatgagaccagcgagacgaacaaataaagtccatctcgagatacacaaaatacacaacttaattgtttggaaagggtagataatgaattatccaaagagcttgcagctcattgacccacatacacgtgactatgttgaaagactaaagactacacattcaacatggtccacctcataattggcatgttgtgatagttatctcacgtatgcctcactcaatattaatagaagaacgcgagaaatattacaaaatatactaagatgctgatttacaataaaatgtgtaaaagagtattgttgtagtgcgagaaggatgaagtatagtcaacataacacgtgtagataaagttaaaagagcagttatgagaagttacttgtaattatcttatgtgcgtaaatataaaatgcgggtattgtccatgttttacgaacaattacaagttataagaatctaaagaaataattgtcatcctagacatttataaatagggacagaatccaaggaacaagggatggtaaatttgagaagaaggaaggaattatatctatcgttcattttgtaaaacaatttattgtattctatatataatttatcaaacccacaataagatggacttggggattatgaagagttaatttcgaaaccacgttgaaaatcctcttgtcatttattactattactattattattaattactatacatttagttcctgagtatattaattattaaaaaaaaaattatttattagttaacaaaaatttgcattaataattagattaaaaaattcttctagatggtgacatagagggtgccattagtgcattccctttaaggtggtgtattgtagatgtaccctataatattttattattatgctattataaa

SEQ ID NO: 302102 - DNA, 1970 bp, Cannabis indica
tgagaaataaaactcaaagtagacatatctccattactgttgtgatacagggagtgaattgctataaatttgttgtgtctctttatttttacttaacaaatatttcattcttgccaatctggcaagcgatggcttagaagtctaatctagatttttgagtcaacaccaaccttgagaagctttttctcctacattttcatttttcttattaataccatgagcaatattaaccttaaaagagtgtaatgtcaacttgaatgattctctaccccaacaatactcatcccatctcccactgtcaatgatgtcaatttcaaccccactaatctctttttctttcgtgctactcagaagaaaacaatgaataaaatacaacacaacaaccttcaaacttaaggcatcatcattaccccatacaaaacccgacaccgcatcttttatagatttttgtgtaatctatttaacaccgcaaaaataggtgtcaataattaggtttaaatcctgagaaaaatcagttttgttgcaatctcccatacaatcaaaactaaaaattaaggagaactcttcaacactaaaacgaccacaacgactaggaatgtttgcccgaaattccttcacattgggttgttggacctctcttaacagaagcccatgaacaattttcaagtagaatttaaaagatggaatgtacaaatatttatcaaattgggtagcacagaacattgccttgacatttgccgaaatattggcattaagattctcaataattctataactacaagttgatacaactttagatttataatgaatagatgaaatgaatttgcattctcattcttgaaatcaaactaaaaaagtgtaatgagcaaagaaaattaaaaaaacaacgagaacaactggaacacacctagtattaaactataaataaacaacaaaatatcaaaccacaatatatgttaaaaatcagccaaagaacaccgataaacataaaaatacatagacaaagattcattacaaaaaaaatgacaaatatgaatataaatatataagataataaacaatagtttataaggaaaaaataaaaaaaactaacctaaatctaacaaatattccaaacgataataatatatctaatcaaacattacaacaactaaaaaatataaaacctagaaaaaatcaaatgaaaaaacacaatccaaaacaaatataatatttctatgttaggacaaaacgaaaatgaagccctaagaatttcatatggttgcttcttcagcttcttagtctcagggaaagaactcttttcaacaacattactctttgatttcttctgaagagggcaacgatcatgtttcgttacaggtggagcaaaatcataatcatcatcttcattaatgggacattttcctgtagttttgttggcttgagatttaagacccgttttttttcttttcagatttttcaacaatggagaagagaaagatgaagaccaagtcacaaccatcgatatagcagtgcatagaagaaaaaagaaagggaaaaatgtgggcatttgctaaaatgaaagttcaagatgatggaggaaaatagttcttttggaacgaaaataggatttcgatcatggagagaaatattttcagcaaacgaaaataaaaaatagaaatagaaaccaaaaataaaaaagaaaatgataagaaaagagtggaaaaattagttgagtgtcaatctaaacacatgatatcatcaatgtatacaatgtgtgtaagaaatatattggtaaataaaataatgataaaggtaaaatattgtccaattcgtatgtagttaaaagggtaatagaagtgttattttgtattttttatgtaattttttttaaaaaataatcaatatataattagattgaatctagatatatttaagggatatttacataaatgtagaaaaaataaagctagtttacataaatatggtaa

SEQ ID NO: 302103 - DNA, 2530 bp, Cannabis indica
aacaaaacaaaacaaaacaacccgaaaaatcgattgattacctgtggcttctaatgatggggagacagaagcagctgacttagcagcattgaactcatacataaacagtaacaaattgtaccaaatcaagctttgtaaggcgactatttgagcaagcatcttagcagcctcatcaccatacatggctttcaacagaggaattccaaggatcaatgtattaggaagaatagatacagagagacctgtaataataaaattcaacccacctttggacctaactctagtcacaactgttaatactagaaaagcaagtagtttttgaacaaagtctgagagaataagctttaggttcatcttgtaaggattattctcagataaaatttgaaaagataataaagggatagagaattttgccacaaacttgttaatcccagaacattgttctggtgtaaaaagcttccaccatctaacagatacataagctaaaatcatagcaacatataaaggtacagttgctgtaacaacatgataaacatcaactaaagaaatcatggtcttctttgaaacttcagaagaagaagaagaagaagaaagaagaaaagtgttaagtgggaaaatggggtggggtttttattagaagattcttcaaaaaaaatgaacataataagttgtgattgtttgtgtgagggtacaatttgtaactatgttaaaatattctgatttccatccatgttgcctacttggtatggtaatgtaataataatatttagtttgcttttttgtttgtgtattttggctctctgttgttgtaatggttaggtatctatgaatgggagatatatagtcagattacaactagaacaaaatttgagatattaatcagaaaaaagtcagggtataattgtcatcataagtcttaaagttagattctgagttttcttgtggctatgttctttagagaaaggaaggctatgtaggctgacatggtaagtctaaaaccttttctaggctcttttcttttgaataattattattaagttaattcacggtaaaattttcttatatttaatttttatacacttaatttttttcatttttttgtgggaatatttttttagttttgcttttatttgtaaatttgatgcgctaatgtacacgtgatactaaaattttaaagttaataaaattatgtcacatatatataaagtgtacattgtaacaatttaattgatatttaacaataaaatttaactgacggttgaaaatttacaaataaaaataaaattaagggatattacaaaacaaaaaaaaagaattaagtatatttttttttaaggaaaagaattaagtatataaaatcaaaagatagtagaactttgtcgccaattatctttattattattagtattagtattaagaactattttcctaggtagaagttgttttatttttctccaaaaattcacatttaattttgctattacatgtttaacaataataataacagataaaccagaaactaaagtaattttcaaagtcagtaaatctaattaaatttttatttttaaaaaaataataattttatatatgtggtttccaatagtgggaaggaagaataaagaagaaaattgcaaaggaagtaagtgatttgatgagtttgtattttgtaacagtgttgttaagggaagaattttttgccaattaaggtcaaaagtgtcagaataagtgttatagggaatttgctttttagactgtgaaatttggaaacctaaacatgtctctttcttcttcaacaaaataaagagattaagtgaaaaaaaaaaatcaaagcataaaagagtttcaccataaataactaactcaaaagtatctagttgcaactccttaaaatttaggtggaaaattcaatgaacacatgtaatgaaaaaaggttcaaacccttttccaagttttacaagtgttgatttttgccatgttttagttcttggtagtccttattatgcaatattcaaagcttcacatgttcaaaaaaaaaaaaaaagaaataagtaatttaatcaaagaaaagaatgaataaaagtagtttagttttaacaaacatgtgacatgatagtgttagctagtaataggatacatggaaaatcttatatcaagtgatatcattgttatgattcaaagaatagttttggcaaaagtataataattaaaaggaatagtttgacaagcatataaaagagtagaaactgttgtattctgtgatcaaatgaagaaacgaatgttgttatatagtatgctttctcatgacttgacagaaagtagggctagctagtattagtattaaagctatatggtggcgtttggttggaggtaataaaatggaatggaatggaaaggaaacaattttcattccattcctttgtttggttgcattttaaagtattggaatggcattccaatggaatgctctttccaccattttggtggaatggctattccattttaaaaaggaaggaatgaccattccaatgta

SEQ ID NO: 302104 - DNA, 2547 bp, Cannabis indica
aaggcaaacttgtaatatgtatattaattgacaattcaaaaacgggtgtttggaaggaaaaagccaaaagttgaataatagaagagtgcaagcaagtacatgtactccagaagctgaacaaaattgacccaattgagagaatcaaacagagcaatagtcatttcacattatatattcttttctatattatttaataattagtgtcattttcaccatcaccatacttaaatctaattctacgttataagactagttaaataataatgataataataaataatagaaattggagatagagaaagagaagaaatataaacacattctctattttttcttttttttccctttttcattaatatataatatcattccttggctttcctttgatgagggaccaacacatactactgacactgagatcaaaagatttgctaacaaaaggtaagaaaaaaaggctccacaataagattctgtacttcccattcccaaatcccaacttctaaacaactcaatgtggctagtggctttacatgaataattccataataaacccaagttatatatatgtagtatgtacaacactcttctactaaggttgcttatcatgtctcaattacaatattaggaaaccagaccttgtgaaaaatgaaaactttgattctctgcttcctgctttccataaaattaaccaaataacttggccaagtttttttctttttgtgtaactaatatatgttcttgtctatcatttacctaatcaatttctccctcctctatacagtcatctatggtattagtaccgcaagctggctcggcttcttcctcatcatccaccttcatgaacaaaccaagctgttccaaggcattactactccctaacttgaagctacctaagccatctagtacattattagggctagtatcgtctactgagataggtaacagttctgcaggggcattcttcctaagcatttctaaatcttcaaagaactttgcggtatcaacaatttcaacagacttttcgatctgcaaaaaatgtattaaatgtttgaataagaatacaaaactgaccaactctgggcaacaaggtttgaacagttacctgtagcaatgcctgccgtgctgcctctctctcaatatccctcttccgtttaatttcggctgcagcttctaattcagctcgtcttcgagcatcttcagcagcctgggcttcagctcgtaaccgtgctttttctgctcagacattaacaaagtaaaaataaataaaatgcatacatcgttctcgacttatttgatcactgtacttagtctgtcctcacatgatacaaaaagcatatgcttattttgtgaacaaaacacaaaaccagacagaaattaataagcagttgcaaccttttctacgcagcaattcaagtgcctccctttcccggcgcaatttctcaggatcccctttatcaccctgatttcagacaaaaatcacacatgatcacgtacagaggagaataaagccataacatgaacagcttaaaaagaaaactgaaacccacatcattcagagttttctcgcgtgctcttaaaatggtatcagcgaaccgatcctttaaaacagctaccctatactgcttgtcaggggagaccagcctcccagttggaccactatccactatattttgcaaggagtgatcagtaaaataataccccaaaaccaatagcagaaccgttttctttcttaatctcatgcttaccatcttggcagatatctggttcaaaagagcctggcttttgctcaccaggttgctcaacgtggttcaagcaactatcagtcactgcataacccagagatatatcaaatttacaaaatatgcaattagaaatcaaaataaaaccaaaaaaaaaaacgtatgttacatgagactaatggcaacagttgggagacagccaaactgttcttaaaatcaactcaaatggaaacaaaccaatttgatgctatgacaggccaaaatgtttgaaaacactgatatttaattagtagaaatacgattttcatcgaattgcaatttcctatcaaattaattctgtcaatctcgattgatgagattagaaataagaaccggattccagaagacaaagaaacttacgatgtctttctttgagatcactaatggttgtctttttgtctaattcggttccagagtccacattttctggcacctgaaaattacagcagtactatcattcactattacccccaacaactcattgagtggccaaaaaaagcttgatcactcaccaatcatccagcatgagagaaaaagaaatatttaatttgaaacaaaatcaagtgcccaataccttagattcgttaactaaagttaacgccttagcaccattacactcactctcaggacagctagagtcacctgtgaattatcaatagtacacgtgaaactcggtcgctaggttttgtgaatagcttttcaaaacaaagaccaaatagcttcttaaattaaagaaagattaagagtaggtccaaaattttcaggtaaa

SEQ ID NO: 302105 - DNA, 2784 bp, Cannabis indica
aaaaactggtttgaagtgtaaaaatgaaaaaacccctaaaaaaaattacaaaaagacgattgtaccgaattttaaatattttttacagtttttaaaattttatttacataaaatatgatttttttatgttgtactattgttattttttttatatatatatatttttgtcatttgtatattattttttatgttgttttgatgatgtttttctgttatttttatttagttttcttgttgttttcttatgtctttataaaatattgtaaaacaaaactttgaacgtaaaagtgtaaagaatttattaaaaatatcagtttatgtaaattttttttgtttgtatattgattaaagaaattgtgaggatttaattaattaaaattaaatggacagaactaagatcagatgacagataaacttgttattaaaatttaaatatttaataaatattttgaagaatatatcatgttactcgtgtgtataaaaactttactaatcaaattattttttgagcaatatttttttttaatacacaccaaaaaattaaaaaaaatataatcttttagtaataattttttaatcaaaagataataggaaagaaagataaactaataaaaatcaagttttgatgaaagataaatactttcaagatttttatattatatagaagtcaaggtcggctcaagtatatgactgcttgaacttttgcagaaagtcccttatattaaaaagcattttttattattttatatatattaatataataaatacacataattctaaaacttttaaaatttatgaagtatttttattttttaaaaaactgaatttataaagtattgattggtatttctttttaataaaagactcaattttaatttttcgtccaaaacctccaaatcacttgtgccaaccttgatataagcaatagataagcaaggatcttctcatttatgaggaatgagtttgttgaagaagtggttttggtacttttactaaggttgtgggctcaaatctcactaaaattagccatttatgtatgtgtatatatattatatacttagatatattgttgccctaaatgtggttattggtcttcttgttcatcttaattataaagtatcactgatgtctaattatcacgagatagtgtaatgcatagttcacgatattctataataattacactctggataatgttaagtggtgctagtagtattagtggtgttttttagtatttctcctaaagaaataatagttgagctagttgctaaggcatatcaattttgctcttaccttatcttttatcatgaagtttgtcaaactcaaatttccttactaataattcgcaaaaagattagtaataataaaatcagaacattgattacttttagaatcaaaataacaatgaggagtattttttgtttgtagtatctaaagaaattatattctaatttttttttatatcaaggcgtacagtagaattattagtaaacatgtatcttatacatttttgagaaattttaaattatttacgacataaaaaataaagttaaaaatagttaattgcacgtgtgtaaaatataaaaaagtacgcgtataactgattatttgaaacatattttttgcacattaagttactcataatttatcgaaaacacacatattatttactatataactataatgtataccattaattatataaaatgatttataattttttatatactgaaaataaaagtatccctaccaaataaaagtgatgttttaacctaaaatttttcctatatattttaaggaagagaaatattaaaagatattagtagtgtctaatacttttttaattgttatatcgctatatatattaagtatcgagtcataggaccgatcctgaattaaaaatgggtcttaagaaaaaaaatcgagcccttattataagaaaaaaaaatttttttttttatttgagcccctaagataggtgggccttaaacgcgagtttagcccgccttagcctagccctgctctcatgtaatttaatttaataattttttaaaaaatataactaaccaattatacctaagattctacataaatggtgttaggtactactggtgtccaacaaaaatactctataaagaattattattataaaattgagaagttaacaagtggtatatgtacttatctgataaggtgagtggctctcatgattcatgcactaacttatcatgacttttgtttagtcaaaagtgctcttatatcgagatttggtcttttcctctccaaatttgggcgcaaatttaggatcaatttaattaaatacactaaaattaatgtttgaaaaaactctcaatggagacttaccaaaaacatttctccataaaaaaataattattttttgaagagaactattaaaaggtattagtggtgtttagtattttttatgtgttcgtattgttattggtttaattaagtatcggattccatataatttaatgtaataattgttaggggtatcgctaatcaattgcaaagcaacacatctaaaaggtactaggcaccactagtacctaattacaatgctcattttctaattggttaatgttgctcctaaaatcgcccaatgtacgtggaccaatcaagaagggacacgtggatcaaattacttgggaagaactgctaagtctttgtatggcaccaggaagcattattcgcatgagtcccggatgatgctcccggagtacaaggtactcccggaagcgagcatagcttaaaggcactccg

SEQ ID NO: 302106 - DNA, 3553 bp, Cannabis indica
taactgcaaaagcacgtaaaaaattttttgtgttcatacttttttctttactgtctttattttttttttgtgtaagtttacaactgtttaggctcatatctggttaacgaaaatttacgttaacagttagccaagcaacaatcttagctaaagaataagcaacgtttacgtgttaatttagaaaactatatattttgtgaaaaattaattaccaaaataaaattaactaattaatatacaaaatactttgtcccaataacacctcttcaaactatataacgtggtcaatcattataatttttaatgaaaattcaagtttgagaccagaggggtatatataaaattatatatatatatatatacatatacatgtacatgtagcttttgtgttaaaatgaattggatccttttcaaaaagaaacaagaaaaatgtcatgatcattcaaataaaagctatctctctcatgcatgtattaattatttgaactaaattcctggagttatgacccctagaaaatgtaacatcaatactccctcatatatatgcaaactctaagtagagtaaatccaactaccaaaatgctatttattactcaatccaacaagatttttatataatttcgatacataaaaattaaagtaccaagaagttctgatacgatccacttcaactccaatattaccaaaactacgtattaaatcccttatactttagttcattttgctttccaaaatttcggctcaatagtatgaaatcatgcattcaaatatatatgaacaacttatatgtatatattataaaatgaactgtaaactttgactacatgatgatgatgtaattttctatcttggaaaagtatgatttacgtgaattaataaagaagaatgaacaaaacaatgactttcaaagtgtaaagccaaagcaattaattaagttccaaatattgaggtaatttttttcctttttttcttctcccaaacaaaaaaatctttacgtgttcctgcacacatggtacgtgtcccattcttagatatcatcaaaatcaaatcacagttatatttctagtgtttacagagcttagagaacaagcataactatataatcataaacttaataattattaaaatattcattaattagaagatttcgaaaatcaatgtgattaaaaagaaagtcaaatctaacaaaaataattttaccaacctcgaaatgctacatgtgtgacaagttggtttttttgcactaatttattttttatttatttttgttataagtacttattatcaatatttgtataatttattattttaaaaggaatttcatgaaaacgacacaatccacggcagcaccgccgttaagataatttgtctatactataattaatttcattatcaataaaatttaattttttctatattaaatactaataataattaattaattgggtactgtaaaatagaccctatatttatctaaaaaaagaaaattatgcgtcactttatattattctttatcctcaatccatgcttttctgcaatacatgatgttaccgtacatgaagatttgagcatatctaaagaatttattgtacctttcctttatgggtaggttttcaaatttatttatgtaaattaattagtataattcattctacgattccttttatattgcttatattttgattttcattcacctaatttaataacgtgtgtgatgttttcataacacgttatattttaaatggcgctgtcttatgaatagtaatggttttctttatttttatgtaaatgatcccaaatgagcttcatataaaaatttgatgaccattcatgaccggattcatcgtcaaattatattatatatttaatagttagaaaattaaatatataagaatatatatataatcacaaactatataaatataaaaaaccatgcagagtagctagggacataactttgtagttggtaactagattaactttaaggtgcctcaaagttggaataataattttctttttatttttatatattttctttagagaataacataatttataataatatataatcaaatgacatgactcgtacctacatatggtcatcttttttattttagtgtgttcaaacaaagtagctagaattaaagagatcataaatatacgaattgtctcgtcatcattagtattatacgaatttattacatatcactaactctgcagtatttaccagctgccattattttttttacaatcacttgaatccaaggtcatttatataaatatatatatatatatatatattctttggtgatatagtgtccctcattagtggtagtagagtcaagctctccttctttaaggttgctttaggatagttctgcaagcagttacaatccagaaatacccttgtggtttaattgttgtaatatgagctattcagttttatagttcttagtgtctgtgtatatatgtgtactatagtgtacaacttagtattttttcatttaactttttctaaaattatagttattataaaagtattgttattgaatattagtagtgtctttacgatttattagtaatattttataaaaaaatatgacattaaattctgcattatagcacttaagagaatgctaaaaccagtggtgtctttagcattcattattattaataaatggtattggtagaattattctacacctagccagcaggacctaataggtaaaataagaagtagaccaaacaataaaataataataataagagtgattgggaagaaaagaaaaagagtgatatgataattttggagtcaaatgtatacactatgtagcatcctaaataaggcccaccaaaaaagtatgtatcgtccactaattgagaattgaggcatacattgactaattaacatcatgcatgaataatatattatcataaccacacacaaagaaacagtattaataatctaattcatgtttacatttaatctttacttcttaaatttattatcatcaaatgaaatatgcagcatatgtcacttaatttcctatatatagtaacaaatattaaacccaaacctgatttttatatttgttaattgtttcatcactaaaaaatccaaacttgaagtataatctgtttataaaataatatttatatttatgacatttaacataaatatgtatcctttaaaacatgtagttgttgagtcatttgtgcgtttggaaagtcgattggtaattaatgtgtttaataaacggtttaacatataatctaaaagtatacaaaataaatagtattagctagttagttagtcccgtatatggtttagttagattgttgaacattgtacattaagcagagaccgacccaagtattttcgtgcaaaaatttagaattaggctaacttaaaaaaaaaaaaaaaaaaaacaaaacaaaacaaaacaaaacgtgtacattaaaactacaattctattactagcattttttttaagtattccttcataaatttcaattataaatttttatttatgtatatataataagaaaaaaa

SEQ ID NO: 302107 - DNA, 3064 bp, Cannabis indica
tctaaattggaaatgagctattgagataccaccacttcatattttagttgagttgggaaaactccaacaaccattaattttaatttttcttcatgtaaaaatttggtgtttgtaattcaaaggcactaatggtagtgaactttctttaaggtaataaatagtaacacaaaatcaaaacatgagctttgccacggtcagatgaaacatggccatccatcaatgtagacctcatgtggaatctcaaccacaatagccctgatttactttggacgtgataatcaaactgcagtaactcctgtgaacaattaacgatgagtgtgaattgtacagtcctaatgttactaaaacaaattacatcaatcccagttaataaacctaatagttgatgctaatcgaactgctgccgaagatgcatttcggtttcgcttttccaagtagcgtgagatgattgacccttcatcctcttattcttctctttatctttgaccatattaaccttcttcttggtctctgtgcccggttcagctggagggcgatcaccgcatactgggcaaaccattccacgagcgctagagtaggtttttggaataccacattgtaaacacatcctgtaaaacatctcaattttagtccatcacagagatcaatgaaacagctatgattacgagcacatgcacatgattttttgtcccatgaggatgccacacaaccatgatgcaaaatactaggaaataattgaaaggaaaaaaccaaggattcaaaatttatgatgtctacagtcggggcttgtagaaactcaaataaatcaaccagtcattacagccttgtataatcaaagtaacctgagtacctaacaagtaacttcataacctattccaaaatgtcgaactttagtagagagcatggttataattaggtgggggagtgggacacaactcaaaaaataaaatcataatgttaccttagcagttctgcagcatcctctgcatttggattggctgcagttgccacacgcttgcctccctctgttgtgcccggtactgttggtggaggttgcttaccctcaatatcacttcttactcgctcatggattcccacaagttgaggtttagcttccactaccacacctataaatccgagtaaagatgttcgaatagttttcattagtaaataaaaacttaagaaaggcactaatcaatcaaaggatcttatagtcactgctcaacactgaagctgacaaaacaaattaaaaagaataaccacagaagaaaacaaagttcaatgcagttactcctagccctaatttctcggggaaaagaagaaaggaacaagaaataaaagtaaaaccaaatttactacatatgctgcaatgtgcaagcaagttcagaagagaaaaaaaaaacaagaaatcaggttccagaacaaaaactgatccaatataacagtgagagtcaaaaaaaaatcttgtaacacaacttcctaaccttgcaaagtctttcaaaattgcacatcctagtgtcatatctaatcattcacttctacaccaacgatagcagtggcggttgttcgattctaaaataagatggtcaagttaagtttttatgggtatcctttcacatcttcgaaaactagtgagcgaataaataaccaacagtacttaattcatatgactggttgttttaatttaaattctttaggtgccaacatcttgctctcctcttttccttttctgtttttttttcctaagctttttagcaatcaagttctttgtttgtagtctagattaaaagaaaaggctttcagaattgtaagactccaacaacaacaacgactagttttgtttcagattcaagtgagtggactatgaatcgatgcccgcatcatatgtttatgtatgtagagagaagaaaacataaacacaatcaccaacattctgcacacatccaaagaaatttccttggaattcatagatttacagcatatccaatgtctcatgacacactaacacaacccattacccatcctatgtcacaaaatttccaagcatagcatataatgttgctagtatcaaggtctctgattccttcaactttcaaattttcaagtatgtaccttttttcaaaaataaaacataaaaactcacaaaatccataacccaaaagaaggaaggaagtattacttaccagcaggcaaatctttcttgtctctacgattcctgcgtctaccatgtctcacatactgctgatgatccacttccttggctacaccaaactcttcaacagagttgtttagaaactgaggcggccctgcaacctccattaaaacacaaaaagaacaaaaaccctccattaaaaaaccagacccatattctttctttctttctttccctgtttctccacaaacaagtaactaactagggcaaacaaaatctacctcagaaaaggcgtcgaaagcagaagggagcccggagacactgggttgagggagatcaaaaagggatctgtcgcgaatagaacggttgattgcggcagattcatcatcttcgtcaacatcgttgagattgtggtcgtcatcgtcgtcggatgaggagttgtaacggaggtcttgtttttgatgggttaagccattttgtgcttcttcttcttcttcttcttcggcagaagaataggcttgaattagtgacaagctcatagctcactcccacacaaacgctataattttcaactttacaacactctactttgttatcctcttctcctctcctctcctcggtttagcctaaattaagttccttctcaattatcactctactttgacttaacttaaatttcgacggtaaaatcctccaaattagacaattatttacaaatttaaaatgttattcattttttttacggttaattactaatatagcttatgtatacattttttgtacatgagtcaaatttatattgatacatataatattattaatttaaaagtatatcaattatttcaaaatttataatatttttattttttaaaaaaaaactttaatttttaatttttataattttatttaatt

SEQ ID NO: 302108 - DNA, 766 bp, Cannabis indica
tatatatatttgtttggtgaagttgttttatatggacccattttgattatcagtacatgagaagcttgagataaataatttaattttctcgtttagagaaaaagggaatttttccttcaaaaaggttgatacttgcttatgattaataatatcgatcctaattttaggttttggtatatatttaattttattatatatatatatgacaattggtccctcctaagtataggaacatattccccattatactataatactacaagaaattactcattggttttggaaaagggtagttaatatacttattggtttatttatattattatttggaatttttcttctcagagtccacattaagaaggggatttcatattaatatatatatatatacatatatatataaatatatatttagggaataaaatataataacagcacaaaaattatagagaatgattttgcttatccataattagattatgcttaactttgattaaagaaaagacgcaatgaggccatttacattgatttctagaataaggtactaaacacttggaatttaggatcaattccatcataagaacaagagtttccatatcataattattaattatacatctattaatattaacattagttaattagggatgatcagggccagccctagatataggcgggctaggcccgtgcctaggacgccccacacttttcgggagcccaaaataaaaaaaataaaaatttattaagcttttatttaagtaaaatt

SEQ ID NO: 302109 - DNA, 7809 bp, Cannabis indica
aaaatttaaaacttttagaagaatgaaaaatagacaaaaaatatcatttaatataaattttttatttaagattaattttaattttatgagttaaattaaaaattaatttaaatttatataaataatttaaattttaaataataatattttaaaaaatctgttaatttatatttattttattttaaaaaaataatgttagtaatctgttatttttttaataaattaaaaatgaatatcttacatatttaaaattaagaaaataaataagaagaactttatctatttttttaaatttaataatatgttaattaaatgcataaaaaatttatcttaatttttaaaaaatgatttgtttacattatttttatattatttaaaataataaaattagttaaattagtaagattgattttatttacttaataataataaaagataatttattttttttaaaattatatataaataaattaaatgtaattaataataaatattttcattaatattttttaaataccgagcattaaaatatcaccaaatatgatcatctttcataaattattgttattattttacaaatatagttattaaaaaaattttaaaaagaatataccagaattttagtatacttacaaatataccatagctttgttatatttacaagtatactatagcttttgtatatttataaataaagtctcgaacaaagttgttctgcactttatttacaatatacaagagctatggttttacctttaactgttgactccaaagtaatcaaaacaaagttttacgattattgtcatacataaaatatgaaataatatgatcatcttttataaaatattcataatattttacaaatgtaattaatataaaaatagttgaaaataatatattatagctttggtatcaaatatatcgtaactttggtatacttaaaaataaagtctagaatcaaataaaatttataacaaggttggtctacactttgtttgcaatataccgaagttatggatttaccttagctatggactccaaagtaatcaaaatcaagaaattcattaaataataaattaactaataaataatttaatttataaataaaatttcataaaatagcataagattttaattattgtatccacgttgctaaaactcataaaattttaaaatacttttagatgacaattgataagtcttggacttcttgaagaaaatgtggtaaaaatattaggagtgtgtacaagccttttggcgatggcttcagcttataaagattctggtagaaaaattaagtgtccgtgtgttaaatgcttaaatactcaatttgaacctttatatattgttgaagcgcatatatttgattggggttttgatagtggttatcaaaagtggatttaccacaggaagctagaaacaggatttgttgcacaaacagaagttgttgagccaattttagatgatgaagatgacgagatgattcccattgttgaagatttcatttgaccaacaactgaagaagttcaaaacaaccctaactcttttcaatattacgacgagttatttgaagagattgaagctgaattgtatcttggatgccattggatatcttcacttaactttctagcaaagttactgcatttgaaagttcgaggaaaaatttctatcagcgtatatgatgaattattaaaattgttgaatcttcctttttcgaagagaaataaaattccatcaacgtactacgaggcaaaaaagagacgaaagaaattagggttgggctatgagtgaattcatgtgtgtgagcatgattgctgcttattttataaagagcatgcaaccaaagatgtttgtccaatttgtggaagtagtcgatggataactttagagaaatctaatggaaaaagggtgtctcgtaaggtgttgcgttattttccgttgacacttcggttgaaaagattatatcgttaaagacatacatctaaacacatggtatggcaccatattgaaaaatcaaaggatgaacgagtgatgcgtcacctggtggatgggttagcttgcaaggactttgatgcctgaaagagatgcttattaatacaattcctaaactggaacaattttaaactggacgcaaagaattgtaaaagctctgaaaaactcatgagctgaaccttttgtttatatagaggaaagattacaagaaaagctcataacagtctgtaacaaactctgtcaaaacagagtgtacgtggacaagaaaataacaaactatactaacagtaaaaatagcgaaatacaactgaaaggtaaaagagtttgttatttatcatccctcctcaagcgaaagggagtggagcacactttgagcttggcttgagatagaggaatcgatctgtggtgagagctttggtgagaatatcaactgcttggtcaatagaaggaacatatttaacttcaatctctttagctaggatttggtctctcacaaagtgaagaccaatctctatatgttttgatctagcatggaacacaagatttgctgctagagaggctgctccttggttgtcaacccatatgataggaggagctagaagatgcacctaaagttcgtgtaaaatagagtgtagccatttaatcccagctgatgtgttagctaaggctcgaaactcactttctgtgcttgatcgagcaaccacttgttgcttctttgctgaccataaaatgaggttccctcctaggaaaatagcatagcctccgttgatttccgatcatctggacagcttgcccaatcagcatccgagtatgcttgtaaacacaatcttggaacatgtcgaattagaaggccttcatgaatggtacctttgagatatatgaacaatctcttgcaagcatcccagtgtacagtagtaggagcatgaataaattaactcaatttattcacaatgaaggcaaaatctgttctagtcaatgttaaatactgcaaagcccccaatgtacttctatataatgtatgatcagtataaggttctccatttttaagggagagaacatgagatgcactaattggactaggacagggtttagtaccatccattttgagcttggtaaggaggtctgcaatgtattttgattgtgagagataaaggccagatgttgttctgtgaacttctaccctgagaaaatagtgtaaagctccgaagtctttgacatcaaattcttgattgagagctgtagtaatagcagaaatagaagttggatttggacctgtgattagtatatcatccacatatactaataacacaattaagttttgtccagatcctttaatgaacaaggagttgtctgatttagacaactgaaaaccattattgtacatggtagacttgagcttgtggttctaagctcttggagcttgcttgaggccatataatgccttgttcaatttgcagacataattggggtatttcgagtcaataaaacctggtggttgtggcatatacacagtttcttcaagggtgccatgaagaaaggcattaaagacatcaagttgagtgatttgccaattcaaagagactgtaagagtgagaaaaatttgaacagtggctggcttaaccagtggactaaaggtctctttgaaatcaataccaagagtctaagaatagccttttgcaactaactttgatttgtatttgtcaagagaaccgtcaactttgagtttgattctatgaacctacttgttgcctaccaaagtcattgagggatgatagggaactatattccatgttttattcttaatgagaacaagattttctgtttgcattgaagcaaaccatttaggatcagcaagtgcttgtttcaatgatgttggttcttttggcaaaagtgattctggtaagggatatgaggtggcattgtaggcttttggtttatgtataccaaacttagatcgtgtttgcatggaatgagagttgatggtgttttatgtaagaggggatatgtttggtaaaggcttagtgggaatggtcattgtgggaacatgttgtgttggaatattaagaggggtaattataggagcctcagttgatgatgagagaggttcaccaagtttttgagaggtagttgcagtaggcaagggagggatagtagtattagcagtttgaactcagtgctctagttcatgcatagcagtagtagtaggtgctggtggatgcatagtgctgatctttggtgcatgttgaacttcaggaattgttgaattggacacctcagtaaatgtagtatgagtattagtatgttgtataggtgtagaaaaggtagcagtaggtataggtaaggattgggaggaatgtacctgagagatagatgctgatagagaaccagggaagtcctcctcattgaattccacatttcgagcaacatacaccctgccatctttactttcacagagataacctttgggattaagagaatatccaacaaagatgcatttgtcagacctgaagcttaatttatgagcattatatggtctgaggtaggggaagcatgcacaaccaaatggtttgagaaaattattgtctagtgctttatgaaacaagcattcaaatggagatatgtctcctacaacatatgtaggcattctattaataacatatgttgttgtgtgaaaagcatacaaccagtaggataagtcaagagcagcttgtgctagcaatgtcaaaccagttttagttatatgtcgatgctttctttcaacacgtccattttgttcatgatcatgtggacaaggatgctaaaagtgaaccccatgttggttaagaaacttggccaaagatctatattcacctccccagtcagattggacactttttatggaaaaattgaactgtttctcagcaagtattttaaactgaaggaaggttggataagcttgagactttagggtaagtggaaaaatccatgtatacctactaaaatcatctagaaaatgtatataatatctatatccttccttagatggtgtgtgagaggggccccataaatcagtatgaactaattcgagggctgagatgctctagactcaaagagagaataaggtaacctataactcttcctttatttgcatgcctcacaaaactgtaagtcttttaaatttggtgaaatatgcaaatgagttaagatttttgcaagtgttcttggggcaggatgcccaagtttgacattccacaaattaacattagacttttggatagtaagagccttagtagagacaagaaatgtagactaaaaattgttttttttattaataaaagagtcattacaagaattgataattgatgagacagttattttattacaatttggttcttgatctgatctagaactagtaacagaagctataggtggcctaggtgtggatgtggcaacatgacagtggagttgaacctctggtgtgacaaaggaacaatgagacaatatgtataggccatttttaatcctccacttgagtaagacagtccatgtgaccttgtccttgacaaaacaacaggtagagtgaaattttaaaaacacatgattatctttagtgagttgtagaacactaataagattcttagtaatattagggactttaaggacataattcgattttaaaggaagattggagtgtaaagaagtattaccaacatgagagatgcaaagtttcttgctattgcctacagtgagagcatctgttcttgagtatggtgtttcagaatcaaggtgttccattccttgagcaacatgattggtagctcttgtgtcagcataccaatcatagtcatcaacaaactctggtagtgagttagatgagtaggcctgaggagagtcttgatcctcaattttagtgagaaaggccttcaaatctccaattttgggggtgacaaaattcttgtcaaatctataatgatagacaccagcagtatggtcggatttattacaaacttggcaaagaaatctaggaatcgagggaggactagatcttggatttctggcaggggcctattcatgttaccatacgaccctctgttctgagaaccatagaatcgattaggagcaccaatgctatttcttgaattattaatgctgagattagcagagattttttagaaaagatcattgacattgtagtgtctttcaatcctactttcatgggttagcaataacaactgaatggactcaaaagaaagattatctacaaggcttgtgacatgaaccactacaggatcatattcaggtgccaagccatttagtaaatgcataatcaaatcacttaatcttccattggatgcccagcagtggaaagagaatcagctaacaacttagctttatcatagtaatcagatatggagagattacccttttgaattgttgatagctgagatttgaactaaagaaggcgagccttggactgactggaaaatctttgagccagggcacaccaagcctcatacgacgattcatgatgagccaaggaaccaagaatcatctctgtcattgaggagcgtagccaactgagaagtagctgatcttttcttttccaagcagtgaattctgggttgatttctccggtgacaagtcgctagacaggggcaacgccagtgagtaatatatcgtcgagtccatggctaataacagtgggaatcacttgagatttccacgcaaggtagtttgttcgatcaagatgaactgtgagagcagagttgagagagttttggaacggattccattgatgcagaggagtaggtggtggttgagcagtggtggagggagtagctgaggtgtgctctaggtgtcaaggatccatgatcgacgcgagtcaatggcttcttgataccatgaaagagatgcttattaatacaattcctaactatagcaattttgaactcgacacaaagaattgtaaaagctctgaaaaactcatgagttgaacctttcatttatataaaggaaagattacaagaaaagctcattacaatttgtaagaaactatgtcaaaacagagtacaagtggacaagaaaataacaaactatactaacagtaaaaataacgaaatacagatgaaaggtaaaagagtttgttatttatcaatgccaaacatcctgattttgccagtgaacctagaaatattggcttaggtttagctaccgatggttttaatccatttggcaacatgagcctagcatacagtatgtggcctatcttgttagcgaactataatctttcaccttattgtgtatggaagacaataattttcatgttggcactatttattcctagacccaaatcaccaggtaaagatatggatgtatttctaagaccattggtggataagctgaaagagttgtgggttgatggagtgatacgagagattataggataaacactatgttcaagttttgtgcagcccttttatggacaattaatgattttcctgctttatgtagtttgtctggatggagtggtcaaggagacaaagcttgtccaacatgtaatgaagacacttcttcgatacgagagattggtaagacaactcatgtaggtcatagaagactcttgcccagtacccatcgatttagaagggacaccaactttgatggagaaatagaaagaagacatcctccaagacgttttacttgtgaggaaatattagaataagtaaacaaacttgtatcgcaagttcctggaaaacatgaccagtttggaggcgtaaaacatagacgggttgcaaaagatcaaaattggaggaaaaaaagtatcttctatgagcttga

SEQ ID NO: 302110 - DNA, 1810 bp, Cannabis indica
gcatttaaactctccacgtgtccatatttataatttaagataaggtatttaagtgtataaaatctaaaacattatgtatttataatgcaatttaccaaaaaaaaaatcacttcatgtgtaacttagagcaacactcgagattaaagggctgaagtttttttatttattgtttaattttcttctgagtattttgtggggaaaaatcaatgagactattcaatgatatagacgaaggattgactattcatcacaaatggaaattaaacaagatgacatgacaatgtcctaatcagaggcctcattagtagttttacaatcaacatggcctcgaaaataaaattacaaatgaacactagtttgctttgcaatcaaatataattaccccacaaacaatttcaatgagcttataaagacacagcaatggcaattggcaattggcaatggggggttgtatgtaatgtatgtacacaacacaaatgaaatgtatgaattgatcaaatttcaaatgtaggaacttcagttgtaaaaccatgagtggcctggtaaactaaccgaggcaataggtttctgtaaggatctttttctcttttttctttcaaataacctatgcatctctcaacctctgatttcacatgtaaataaagttcatgagatttttccctgtcttttagctccttcttcctccctaatcacatcatttatatatttatcgttaattaaattatccaaatcagttagttcattatatattatgattatagaaaaatatcccttctctattctaccttcagtttcgattggtttcccaaaataatagtagaaccggccagggattttcggtagaattcctgggaggtgtacttgttggtttgctacctctccagttgcgtcattcctgtatttacaagatcatcactagtgtatttcacaaagaaaactagtaaagaaatacttaatttgttgaaattaaaacattcaatatctgtgtgtacctcaacttggcaacttgatttgtcaattcttcaatctgggcccttagatatggtattttcatttggtcttcgtaatcaaaaaagagctgagcacaaggaaggtgcttatgttaaaataatggtcactgaattgtcattcattcacatcactaattatatagcaaacatcaaatccataccaccataccactcatgatacattacattgggatattcgtttcttttcctagaaatatcatgtatgtaaatatgatattcttataaacaattaatgagaaaacccatggacgtccttgtatggaaaaagaaaacatttataatatcgtacatatatatatagatagatagattgtattatagaaatatgaggtttggttacttacttctccaatatcatcttcccaacgactccaaatggtactattttggctccaaatctagctgccattcttacaaactccgactgttcaggccagaataacttgtactcttcaccctaaaaattagtacaagtccagcatcaaactgattgaaccactgtgggttagttttcaggactaatccaatgtttgatacatatgggtaacaaggaaacagtacttctcatcataaattaaagatggatttccaaattattgaatctcttcgccattgttgaacaacaatcaaacacagtagcaggacatgaagaagagaacagaacaaagagaaagaaacgaaagagaaagaggaagaaagacagagaaagaaggattgaaacaaagagcaatcatcactattcagattagagaattggcattatatagccaagcattaca

SEQ ID NO: 302111 - DNA, 3936 bp, Cannabis indica
tagggtcagtcatcaatccaggaagcagccacaatggcgtactcgtgtataagagccatgagtctgtgggtgtaagggctcaatggaggcttgaagcggggacgttacagtagtattctttcaactgctgtcatgtggctggctttgggggtcactaggaattggcttaacttttttgctgcataagacaaaccaggtctagttatggttagatattggagctttccaattattttcctatacaatgtggggttagccagaggatcatcttttgtttcttggctaagctttaagttagcctccataggggtattaaccagttttgttccaagatgtccaagttcttcaagaagttgaagagcataacgcctttgtgaaacaaaaatccctttagcagacctaacaatttccaatccaaggaaatactttaaatcacctaggtctttgagtttgaatctgttgttcaaccttattttcaatgcttctagctgtggtagatcattagaggctagaataacaccatcaacatagatcaacaagatgatgaaaccacttccagagtgtctaataaaaagagagtgatctgtggatgaatgatgaaaaccctcttcaattagagcacttgagaacttctcaaatcattgcctatatgcttgtttcaagccatacaaagacttttttagcttgcaaacaacattaggtggcaactctcccttaggactatacccaggttgtaaagtcataaagacatcctcatgtaaatccccatgtaggaaatcattattgacatcaagttggtgtagaaaccaaccattgatagttgttaaggccaaaacaagcttgacaatgaccaatttggtgactggagcaaatgtctcagaataatcagtgccttcttgttggttgtacccctttgcaactaatcgagctttaaacctctctacactgtcatcaacattgaatttgattttgtaaacccacttacatccgattgcatgttgatgagcaggaagagaaacaattacccaggtgtcactggcttaaagagttatgatttcattatccatggcattatcccattcaggttttccatgagcttgatcataagaggtaggtttagtgagcctgtaaatggataaaacaagagcttgatatgttggagagagcctagagtaatcaatgaccttggagaggggatagacagctccctgatcaagatcctgagaaaaaatagcattagtgcaattagtcaaaaaacaatggttatcattcaagtaggaaggcttatgagaatttctaataggtcttgtagtagaggaaggggcagatttggtagttggtgtaagactagtaggaagcttgtaaaaagctgtcataatctgcaggtggagaagtgtttaagaaaggataaatatgctcatgaaattgaacatctctacaacaaaaaaaatctattagtattgagatcaagaagtttataagccttcatacctggtgaatatccaatgaaaacacatggggctgatcttggtgagaacttagacctagaaacagcaagagtagaaccatatgccaaataaccaaaagcttttaaatgatcataatgtggttgtttatgatacaatattcataagggcatttatttttcaggttaggtgttggggttctatttatgaggtatgttgcagtagcaacacagtcactccaatatgcgagaggaatataagattgaaaaagtaaagctctagcaacattaagaagatgttggtgttttctttccacaacagaattttgttatggtctatgaacacaagagtgatgatgaatgatgcctaggtctttaaacaaagttggaaactaaagttcctttgcattatctgatcggacactcttaacagtgatgttgaattaatttttaatgagtttaatgaactgtggtattactatttgagcatcagatttatgcttaatgaaatgcacccatgtaaacctagagctatcatccacaatagtaatgaaatatttaaaaccctcaacagataagacattaaagggtccctaaatatcaacatggatgagatcaaaacaatgcttgataatgttatgattagaaataaaaggcaattttctttgtttggcataatggcaaatagaacaatagaaatgattgctagggtgatgactgaattttaattttttattcaaaggatgagacttgatacaagaggggtggcctaatctatagtgccacaccaattcatcataaatcttagaatctgaaattgaaaaaacagcagtaggaggattagtttcctgaggccgtatcaagtagtagaggtttcctatcctttcacccatcccaatctgttgagtcttcatagtgtcatggatagtacaatgattaggataaaaaaaaaaagaaagagcaggaagcaaacttggttagggcaatagcagacatgagataggtttcaaaagtaggaacacacaacacatttttagcacaattttatcaatcaaatggattgaaccaatgcaagtaacaaccacatttctaccatctggtaacttaacataagactgagagggatttttaacaatatcaacaaacaatgagatatcagggcacacatggtgtgtagcacatgtgtcaataatccatttcttactttgaataaaattggtcttaccagagaaatgagaaacaattggctgatcaacattagattgaggaggagactgatctgaatttttctgagacaacatgctcattaatttttgacattgcacagtaaggctagagatgagatcttgatcattctctccatgctgatcaacttgattactctggctttgttaagatcctgagaaatttgcagcagctttcccagtttgtgatgcaccaggatctcgagctgaaaaccttgtacagtatttatgtcctcgtggatatccatgaatcttataacattttgatatggtatgactagggattccacagtgagaacaagtgactttggatctattgaaattggagcttccaacaaactgatcattagaagttccagcagtaggagtattagtattttcgatggttttagagttagtagaacaaatctctctttgtctttcttcttgtttaactgaagcataagctctgttgatcataggaagtggttcttgcatcaggacctgagatcttacattgctataagattcattcaatcctatcaaaaactcaagaaccttatcttcctcttgaattaagtcccatagggcctttcttcgagtgaaataggttgtaacatcattagcaccctgattcagtaactgcatcaatcttttagcttgaaaaatccttggagcatttttttgtttgaacctttcttgaagatcatcctagatatcagctacaacatccatatacattatactttcacaaatttcttgtgatatggaatgaagtaaccaagagacaacaaggttgttgcatcgattccaggcattgtaatcttcatcatcttcatcaggttgactaagctttctattgacgaatcgcatcttgttcctcgcaagcagagcaactgtcatcatacgcttccacgagtgataattatcacttccagtaaggattttaggaacaagattggaactaggatgatcactgttggacaaataatatggatcacgattagggtcattatgagatctggaattaggttcgagaatagagaaaggattcgaatcctcagaagtggtcccttgagtggtctggctttgagtgttaattcttcctcgcgccatggacaacaacaacaagatattcaagtgaaatgacagtaatcataaacggatcaaaaaatagagcactatgatcatcatggctctaataccattttaggaagaagaatatgaaacagagagagagagagagag

SEQ ID NO: 302112 - DNA, 1235 bp, Cannabis indica
tttcttatttactatctttcttctattaatttttttgcaaatctagaaagatatttttggccaatttttcagcgtcaacattttggcttcattgataggcataactcaagttcccagttactgttcaagttctttgctaggagttttattccaaaatattcataagttcaagaaagccatcatccatgaacacgtaaagcaacactacctctcttggtagtcgcaccactattcagtgagcagcagacaccgaggtttctaatagagaagcaagtgtccaaaaggactcaagctaaggaacgcagacctataagcccttcatctatcgtggagcgatcacctagtagagaagcagatcctgagaaagcatccaaaaggactgaaattaaggatcattggcttgggccctccaccttccactggtaggaccaactgcaattctgctcaaagcaatttgaacaatgtgggtaactaatctcctctgcgggattctcttcataggtccaatgactctaggccacctcatgactctacaaagggtaagagacatgcaatcaatcttaggggagggacttggaagatcttcgatgaaagtggaaagtatgagatttaaagggtgaagaccaacaaactactccacactcagaaatatttccatgatgaaagaggtgcttggtgtaggtactttgcccgaggtcctgatgaccaacattacggatacttcccttgggtgcatagagatgtgttgaacttgagcaattacttcaatcccctccacacatgtcactttaaggaagactattttgaaggaaatatttagtatagtactacaagcaaccactcatgaagcaaacgctcaagagattttgttgtacgggacaaatccccatagttgccaacatgaccaggcaacaaccacaaggcccaaggaaatcaacgtatttgatcgacttggaaaataaaagaacttgcaaagtaacgtcagccagaaatggccaacggatatgcacatcaccacttgtggtgtctataggactaaatttgatactcttgccgccttggtaaggagtatcacagttaaaagccaactaagtttgagctaaaacgggagtgatgttcacctccctgagatcgaatcaaggctttggagatccccaccaaattcaaaaaatctaatgtagcatctaggggtgagaaaaaaaatccaagaaaccgaccaaactgagtacaccgac

SEQ ID NO: 302113 - DNA, 3831 bp, Cannabis indica
atataatagataaattcaacttcgttgatagccttgaaactaagcataatactttgaaaaattaagagacattagcgagaagtccaaaagcaattttgacatagaattcccgtgctgggtaccaatttgaataaatggaactattatatgaacatataataataaaattgggaataatagaaacaaacagagaatttgtcaaaatattgtcctacgtttattagagttagtcttatgttgaaataaaatattatacataagataaataagttactcattccattatcaattagttttgatggaattctatgtaccttatgtcatattctaacaaagtattagagccgcttgtgatctgttgtgagctcaaagtatcgccgattacaaaaaaataaatcacaaatgagtcgtttgtgtccgttgtgagtccctgtgagtgtgccagttttcagcatttatcttattccaaattctaaaccctaccagtaaggtattttagagatgtcccacacactatacatataaatatccaccagtgggtattaaagtaaatttccactaggttttttgtgtcgatcaataattaagcttcctgaattataatcaatgtcataaggatacttgcctccaaattaataaaattctttgatctacttttcaaatacataaacaatttacatattgattccaaaattcaatattttaaataatgatataacatttataaaaatgttgttataaatattttaagagaaacttataaatatcataattaatgtatatttaataacaattttattataacactaatataataattatgaatgtcattagttatttttaatgacagttcttagcaacttttcaaaacaaatgtcatcttaactttctaatgacattatataaaaaaatgttataaatattattttgtcatgaaaaatacatttttcttgtagccattgtatttttctgaatcctgtaatgaaatattttatgatggcttctatatttaaggaatagatattagttgtgatcatttttttcgttgccactttcttctacttttatttgaaccagggtgatccatactctttagtagttaatacaaattttttatcatctaaaggctatctaatgttcgataagtatggatatgctttacaactaatatatctaacaatgcagatagcagcaaacgtaggtacataactgaagagataagcaagattggtaaaggaaatataactgcacagatctttgcctttcgcgagttatgtgttgcaaccaaaaactttcaccctgacaatcttcttggtgaaggcggctttggaagggtctacaaaggaaatattgaaagcaaaaatcaagtaaattctctttggttgttgactctctcttttgttatcttatgtaagttttacttaccgaatcctcttatgtcattctatttctcaggtagttgctgttaagcaacttgacaggaatggattccaaggaaatagggaatttctagtagaggttctaattttaagtcttcttcatcatcctaacctagtaagtttggttggctattgtgcggatggcgatcagagaattttggtttatgaatacatgcctaatggatcgctcgaggatcatcttcttggtatgctaaaaaaacttgtctcattgattccaacaacttatgtttatttctctagtaataaagcatctagttctatcaatttttttctacatgattcttaaacaggtcgtaaaaatcaagttttagcttgaatcaaattcgtaattatcttatagtttgttttgtagtttgcaagctctcaagttagtttattctataaatacttgtgcccatttagtatttgaattagtcccacatttataatgtgtgaaaataaaataccagttgattttgagatgaaactctatgcatcttatcctacacacgcccttgttaaaaattaaaaagaaaattcacaaatttcccgtgatacaccttaccatccactcccctttcatatctcaaattctaacatctagtaatattatttttcaagtataaatactatggaaagagtttctaattgtgttcctatacagaactagctccagatagcactgctttggattggaatacacgaatgaaaattgcagcaggcgcagcaaaaggacttgaatacttgcatgaacaagccaatccccctgtgatataccgtgattttaaggcatccaacatactattggacaaggagtttaatccaaaactttctgattttggactagcaaagttgggtccaactggagataaatcttatgtatcaacaagggtcatggggacctacggctactgcgcaccagaatatgctttaactggccaattgacaacaaaatctgatgtttatagctttggagtggtattcttggagataatcacaggaagaagagtgatagaccatacaagaccagttgatgagcaaaatctagttgtttgggtatgtttaaaggcctttgtaacatcttatagcagaaccatcttaaagcttgatcaatcttcacaacctattttcgccaaggcactagttgaacaataataagtcttgttaagtttttttctttttttttaattaacaaaaataaaatttaagactccaaacttgtcgttttctctttttgtaggcacaaccactattcaaagacagaaggaagtttactataatggctgatccattgcttaaagggaactatcctgtgaaggctctataccaagcacttgctgttgcagcaatgtgtctacaagaggaagccgctactcgaccgctcatcagtgatgttgtgacagcccttgaatttttagcaacaagcaaaagtgaggaagaagtagtggaatcaacttctcctaataaagatattgatggagattctgatattgatactgatagatcagaagatagcataagggaaagaaatagtatatgatggaagttttattgcaacttagatgaagttctacccaattgttgttgattcaaagatcgacttgtttaatgtgtggtgagatgagaatcttggtgattgtaattgattggttgtggttgtgttggttaaatttatgaaaaaagaaaccaaaatgagtgtcatgatattgaatgagtttgtgaaattattaatcaagataactaggactatgacatattaagtgtgattgcaattcctaagaagagagttcattgtatgtttgtaactaagtgtgagagagagagagagtacgatacttgttacaataccacattgaaaacactcatgtatgaaaaatcgacctattagaaattggatataaataaaaggcttcttaacctcctcctcatcctattttttttcacaagtttttgtagcttcttgaaataatcctgatttgctatgtgttattccaatttttgcactctgacgtggcatcacatgatggtgacacgtggaatcaactccgggtatctgctcgcaagatatagtctgaacaggatacctcatatgcatgctcgaggcaaagcaattaacaattcacacagagcgacaaacacttagcgaatttagctttcgcatcgtgagtcattaaggaaatccctataacttggggatcagattacagaaatatggcaagctttccaaatcccataatcagtgtattctgtatttactatgcgatctttcttcttatatctattgtaacgagaagggaaatactattcctcttcaagctcatagccctataaatagtgtgttggaaatattttaccaggatctagatttactaccaagtatgtttcattaaca

SEQ ID NO: 302114 - DNA, 3287 bp, Cannabis indica
aagttttaattttccgaaattagtttaaatttccaattcagcccccctcttagaaacatatcttgggctaacaccgtccaagtggggtttggagcggtaacttccatctggcacttgtgcataaagtttccttgtgataacgagagcattgggacagtaatgggtgatcataaaagtgcgtggaagtgctacaatgtctcgatcaggtcaatttttagagtaagagaataaattgaataggaaattcccgaggcaccagctagctagcacaaggggtggcttgggaagaagatgagttagatccccgcgtaagggtagagcaaatgatagagtcgcagaaggatgtggaagaagcatgcatcaacgagatagatgccacaaaagttataaaagtgggttggaccctgcctccaacaaccaaagagaagattgtatccatagttatacggatccaagacatcctagcatggagccatgttgatatgatgggagtcaatccccatataatttatcatgccttgaacattgactcggacgctgattcggtcagaaagaagctgaggccactcgattcagtacgttcagaagccatcaaggtagaagtcaaaaagctgacgaccatagagttccttagggaaactctttacccagtatggctggccaatgtagtacttgaccataagccaaataggacatggataatgtgtatcgacttcaccgacataaacaaagcatgtctaaaggattatttcccacttttgcagatagattagatggtggatatcacattcgaataggagctcctcaatttcatagatgcctactctggctacaaccaaattaagatgcacgtgacgaaccaagaatacactagtttccaaatttaaaaaggtgtgtactactgcctagtcatgccctttggactgaagaatgtcaaagcaacctatcagcgattggtcaacaaaatgttcaaggatgtttcaggaaaaaatatggaagtatatgtggatgacatgttagtcaagtccaagactattggggagcacaacattgatctagaagaagccttctccatcatctaaaaatatggcatgaagttgaatccacaaaagtgtactttcagagttttcttagggaagttcctaggcttcatcatcagcttctgatgaatcgaatcaaatctggagaagattcaagctttaatatacatgccatacccaaagaaacataaagatgtgcaaagtttaattgaaaggattgccgctctcaccagatttgtgtccaaagccacaaacaagtgtattccattttttaacatattatgtggaagtaagaagtttgaatgaattactaaatgtgaagaggccttccaaaagttgaaagaacatttggctaaagttcctgtgttgtcaaaatcggtagacggggagccgttgtacctgtatatggtcgtatctgattaagccatcagtgcttccttagtacgagaaaaaggaagagtacaacttctgatttattatgtaagcaagagattgcaagatgcggagtccaggtatctgatgatagaaaagatgtcttattgcttactgatagcctcaaggaagttaagaccgtacttttaggcccatgccatcaaggtactcacgaaccattcccaacgccaagtcctacaaaaactagaatccttagggagagtgcttaagtgggcaatggagctcaaccaatttgatatacattatcaaccgagaatctcaatcaagggttaagacctgacatatttcattgtataatgcaccgaaataaatgacaattcagaagaactagttccaggataggaggtttggaaagtttatgttaacggagcctcgaatgaaaaatgtgccagagatggagtaatgctagtttcccctcaagtgctccagctacaaagtgtcctccgcttcgagttcattgcctccaataatgaggcggagcataaagcaatgattgtcggtttacacctggctaaggaagttaaagtcgagaacatagaagtttacagcaactcctagctggttataaactaaatatctagagaatatcaaacgaatggagagaacatggttgcatatgtctccaaggctcgagagctcctctagaacttcaaaagatacaccatctggcaggtccctaaagatcaaaatgcctttgtagatataatatccatcattaatggttattattaatttaatttaatttttcataaataataaccattattatttttccattttaacaaataattttgtgttatcaagctagttcagggatagataataaattaatttattaatcatgatattagccgactaataaattataattgcactctcaaaacataccgtgtatatattatttacaagcaattaatcacattaatttaggtccattaatttaatcatttcatgagttatgatcctccactaaagattcataattagagtaagatatgttccttccttaacctctttaattatatgtttatcaatcaatactcttgatactctaatgaacatttctttaagtcatatacaaataaaatttctattctctaatagaaattgagcacagtactgctctcatactaaaaggaatatttagtttgcaaccaatcaaggaaggagtggattccgtatttgtgcaatatgttcttggctacctataatcatataactgcaagatatcaagaattggatctatgttctcttccataaactttactcgataagtcaaaagctataagcctatatatatgagttcataagtcatttcaagtttaagatcaagtctcatatggtcatcatgtgatgaatgtcgacttatagattttaacagagattgttagaagttctaatatttcattgtctccctagtcttatgcaatcatgtattgtatacgaatacgacacccctatctcattgtgtcaactacacttaacaacttaggtagattgttctgtgtctaacactgtagataaactgtgctcataatataaattaatatcaaagctcccacttttaatattaacgattaaaaacattaatttgtgttattctctccaaattaaatccttgtgtatttgtacaatcttatatatacatatttaagttaagattataatgaataacaaatgatttaatttgcggcgaaacccccttatgttttgatttttatacacttaaaccccttatctttatttttggtggcaaaaccccttatgttttaatttttatacacttaaccccct

SEQ ID NO: 302115 - DNA, 2262 bp, Cannabis indica
atatatatatatatttatacactcatctcctatcaactttaactaaactaatatcaaaaggatcttgcttaaaatgaatcaaaatctctttgtttaataggataagatggcaaatatatataacatatatatgtaagaagtattctgtagttattgaacccattaagcaaagccattatgtaccatataagtaagttctttttttttttttttggaaaggctcatagaataattaaatttttgtcaagtatatatatctttttaattaccaaattaataaataaaaatatttaaaatcatactccaataattggtggtcacctcagtggtgatcatgtaacgaaaagccctacatttccaaattaattgccaactctctctcatgcatactccacttggcccttttaattttttattttcttattataggtagttataatatatataaatttgtacttttattctaaaatattattttctactttttctttataccttcaatgcaaagttgacacagcataatttcgtctgacatggggtgtcaaaaggaagaaaaataaaacgaaggaaggaaggaaagaatatactgtcacaatattctatatattatgtttttgcatggcaactttattagtttatttatatgaagaaaaaaaatatattgtagaaaagaaaataaatttataatgcactaataaatctagttaataaggggatttaaaattgattagagatataaaattaaatttaccacttcagctttataatttaattaattaaattgattggtatataaattataggcagaatctaataattaattaattaatgatctattatgtaatcaaatttcatgggtgttttggttggatatatatttatatatatatatgtctcgagtatatagcttttataaattggatgggaattaaaaaggagaccatgcacactttttatcaattattttcttttgttcacattatataattaagattattgtctcatcgatcgatctttaattatttgagataatgcatcactaaaaatgatcattatgtcaaaagtgaggtacatgttctagatacctaaagaaatttgtcactacttttttgggtcttctactgacaattatatatatatatatatatcctatttgaaatatttaaccctagtttaacttgttatctagagtctatacactaaacaaagtgctttcactgaacaatactaataataaaaacaaattctaacagataaaccaaccaatattttgtttaggagtaaaaagttacctcattttaggtttgattcagtagtactaaattaaatggatactatgtaacatgaaaggattgtgtttacattacagccaaaagaaaaagaaaaagaaaattaaaatatgctctcctttaaaaaaaaaaataagtgtattgtacctccctttttaggaaagcacccgaaactttctataaagcaagagtctgttatacacttaggtaaagtttagttgagaggaataaaaatgaagaatataaataataaatacgaataagaaatgaaaaaaattaattaaattttttactttttattttcatttcattacctctaactaaacgctaactaagtacgtgcatgtttggttagagaggatcaaagttatatgaaatttcatagtatgatttgtctttgaattttttgtattaattacctatccatgctaattattattacactacgaaatatagtcttacaatcttataccatgtaataagttttacattattaggaaaatatggaactgaacttgtatcctttatttcttttcaaatatttcattctaatatattacacatttcattagtttttatacaatttatgtaagctatgtttcttttaaaaaaatatatattttatagaaaaaatttaagaaaataaaaaatatgggaaaaaattataagataattggttacccatctagttatcttaaactttttcttattttgaattttcctataaaatatttttttttgaaaaaaataaccatatttttattaaagcagcatctctaaccatgtttcctaaatacactctttatctaaaataaagaatagactttaaaagaataagctccaaccatacaaaaagtgattcagaatggataaaaaaattctctaattttttttgctaattttttaaatagtattttaattaaaaacattatttttttttatttttttattaaattaatttatatttaataaa

SEQ ID NO: 302116 - DNA, 2117 bp, Cannabis indica
aaaattaaagttaccaaaagtatttttattttaaattaaaaataattatcaaatacattttaatttttaaaaacaaaagataaaaatcaaaaattgtattttctacttttatttttgatttaaaaagtgaaaaagaaaaatcacgcctatatatagttatgtgtataaaaataaggaatgttttaggattattcaccaaatatttttggcttattagagatttttaatttaaaaaataaaaatgttaaacgacacaaatagtgcctattgcttagcaccacctaaacgtatcataatgttattagtataattaaggatttagtcctatataattgaatttaatgactattatagaatattaaagcatctccggtagggatgctatatagaatgtttgatgacatgtatatatatttttgacatcttttaattaatgcttaccattgaagtgaaaaagaaagctcataaagaatgtcatacaatgacatcctgtatatcttctctttcttatttttttttttaattattgttaagaatattggtctgatattgtccgctttggacctgaaagtccttgcgaaattatttttgggtatcttcccaaaaggtctcataccaatagagatattgttcatccttatatacccgtgattcttcatatttctaaccaatgtgagactttagttacatacccaataattattttatcataaagtaagaaaatataattgtttaatatatatatattaaataataatatatattataatattattttaagaattttagacgtgcttaatataggaacattttagaacaaaaagtgctgagaatgatgtataatatagataaaataaaatgttatatttttaggtgatgtggaggtttttgacacctaaaagaatgaaaaaaaaaatactaaaagacatcactggtgcttagcaccttcctcggatttatttttgggcaccttcccaaaaggtctcataccaattaagatggccatccttatatacccatgatcctttttatttctagccaatgtgggactttgattgcacactcaacaattgtcatctcaaacaaaggaccaccttgtctcccctcaaatgatcttctattcgtccgttctccaccaactagtgtacttccctccaatgctttggagcacacgccttacatggagcaccaccactacctcgagagttcttgctcttttctcaggccaactcttccaaagcacacgacctgtctaattgagcacatccacagatcccatcaagagattaacgaggctcatctcctttatttgacattctaagcattcattcacgtgactaattttgaaatccagctctaataccacttattgggatgtcagacactatttatctctatattggtatgatattatccgctttgagtctaggtccgcacgaatttatttgggcacctttccaaaaggcctcataccaatagagatatttcccacccttatataccaatgacccttcccatttttagccattgtgggactttgataccacttgttgggatgtcgaacactatttatctcaatattggtatgatattgtccgctttgagtctaggccctcacaaatctatttttaggcaccttcccaaaaagtctcatactaatagagatattttccatccttatataccaatgatccttcccatttttagccattgtgggactttgattccaaacctaacaattactttatcataaagtaagaaagttatttatttaatatatattaaataataatataatattattttaattatttttagaaatgcttactattgcaacattttagaacaaaaaatgtcaaaaattatgtggaagagagataaaataaaagagatattagtggcaaaactacctgaacaacattttttaacacttaaccacataaccaaaaatactcagttaagtgccacatcagactgtccacgtgtccataagtatacacgtggaaatttttagtggtccacgtaatattaatattaaatattataaaaataatttatttcattttattattttcttttctttttcttttttctttttcttttttcttctttttatt

SEQ ID NO: 302117 - DNA, 3049 bp, Cannabis indica
ttgacaactaaattgccaaaaaatgactttacagtatattagtatgacaaatatgatactcatactgttaggacttaggactcttaggtagttggttagttattagttaacttaattctattattatacggatatattttctgttttaactaactgtgtatttatcaacaatacttgcatagtatttaaagagcaatttctcaaatgataaatgacatattcacattcactcttatttctcgttctctttgttctctcgtttgatttaacatggtatcaagccattgatctattttttctttcacttcagtctaatcttcttgatcgtttaaaatcgctgttcttgagtttttatccatggcaactgattcaactaattcttctactgcaacttcgacgatgcctatttttatatttactctggttgttttctcgcataaagtttccatcaagcttgatgataacaatttcttgttataggagcctcaatttctctctaccattaaaagacactgccttcttagttatgtctctgattctgttcagcctccttctaaatttctcatagatgatgatcgtgcaacaggttaaatcaatccacgattcttagaatgggaagtttaggatcaacttctctacttctggttgttatcctccatgttcgaatgcattcttactcaaatttgtggatcagagacctctgcttaggtatggaaaacattggaggtatactttgttactcaaacttatgctaagatcgataactttactaatcaacttcaaaactacaagaaatgaggtcccttcattgaggaatatctctttgtactaaagctttggttgataaccttagttgcgctagtcatcgtgtttctattaaaaaagaatgtggcagtattcttcaaaggttcccctctgattacgatacctttatagttttttttttttttacttcaagaaatccagattatactgttgctgagattgaatctctactcttgtctcaagaacatcgtatggatagtagcaccaaagatcttaattcgatcaatcttgctactaatcgtggttatcgtggtagaggtaattcctcctccaatttttctcaaacatttgataacaagtctattccttcctctagtagtctcgctgatcgaggacaatggaatctctatattgttcctccttgatttggtggtgtgaacactacttcccctccaatttgaactagttctggtcatggattccctcccaatccctcatctgtatactctcctagtactagacaagtttgtcagttgtgctcttgaatcgatcatattacctcaaggtgttatcaacgttttaatgtggagttccccagagatggtgctggtaagtcagctctccatctttcagcattgccacctttgatagcttacttgataaagcttggtatccaaattctagtgccacctctcattggactgctgatatttctaactttatacacaaagagccttatcttggtcctaatcaaatacacatgggtgatagagctagtgttcctatatggaatgtcggtaatactatctttcacacacctttctcttccaaaccccttaccctaaatagaattttttatgttcctaatatcattacaaatctcatacatgtgtctcagttttttgcaaataataatgcctattttgtgttttatcctaatcattgtcttgtgaaagacaaagcttccaaggtagtactaatggaaggtcaacttagccatggactatatttcattcaaccctcttagattaagctttaagagtctatatcatccttttcctctcatgtagtatattccctcaatactgctattgtagaatctcctcatgtatttgttgtttcacactttagtaatttttcttcatgacataaaaggatttttcacccctctgctagaattgtaacacaaataatgaactcttgtaaaattccaaatagcaataaaatgcctattgattttttcaaagcttgttgcaagggtaaaatacataagtttctttttctcaaatctgacacaatttataccaaatctttacagcttgtgtgcaatgatttgtggggtccttctccttctctatcatctattagttataagtattaaatctatttattgatacttattccagatacaactggatctttttgctaaaagccaaatttgaggcacttcccacattcattaactttagaactcaagttgaaatagaatctaactgtcctattcttgttgttcaataagtttgggggaaaatatcaaagttttgaaccatatttgttgctacatgccattagtcacaaactatcttgcccaactacataccaacaaaatggtgtggctaagaggaaacatagcatctagttgagtcttctcttactccacttgtccaagcttccatgcccctttcttattgggataaagttgctagagcctcaacttatgtcattaataggttgcctacaactgcccttaacaataaaaccccttttcaagtttcattttcaaaataactagattattctactcttaaatttttggatgtgcttgttatccaaacactagaccttataactgtaataagcttgagttaagatttgctaagtgcacttttctagggtatagtcttaagcataaatggtacaagcgcttagttgaaaagtataatatacatatctcaagatgctatttttgatgaagtttcttttctatttgctcaatctatttctcaaactacaagtcctgtctcattcttatacataccccactgtcttctgtcatccagtgagttaagttccatctctcctttcccttctccccctccatctatttcttctcccactaaaaattcttctttgtttactaataattaatgggaatcaatagtaaggtaatcattcccttacatttgtttacttgcattattaaaattaggaaatggagaagttgattaaataagggagaaaagaaagggagaacttctcccaccaattttgtaaggaatgccat

SEQ ID NO: 302118 - DNA, 2806 bp, Cannabis indica
aaatggttaccgaacggggcctacattttttaagagaaagaaatggaaagagaaatactagtcagtactgatgagaaggaataaaaaatagtatataaaattcatcatccatgtgatttttttgtaatcctataaatataataatcttttgaataatgttagatatacattacttaatggttggggtgagcataaaaattcagaaaattaaaaaaaattgtttaaattgacctatcgaacattgttggaaccgaaattgatgaaaccgaaaactaaaaaaatcgctaacggttaaaaccgtcattgaacagtcagtttttgttttgataataaaccaaccgaaaaaaccgaaagccgatcgttatacatatatattaatttattaagtttttttttacatgtgttataattattaataatatataaaaataatatattatttttttattaatattaaagttaaaagaataagataattagtttttgaacaactaatttatatgtttgtagttgtaaaatgtaaaataatgtaattatagaataaattgaattattattttttttaaaaaaaaaaaatcagtttgggcagtttaaactgaccaaaccgagtttcaaaacggtcggttttaagataggttctagattggtcggtcggttttcggattgcaccaatccaaatcgaaaaccaaattttggatttttatataggaaaaaacgaccaaaccgaccgatgctcagccctacttaatggatacattaattacaccatattaaatagggtgtttttacaatatacattattaaaattagagtactaatgcaattcctaattcttttaaatccataaaaaaaaaaattaatctaaattttttatagacgttttttttaagatatattttgtaaaattttaagaaattccaaataatttacaatatataaattaatgtttaaactgactttttgaaccctatttttgacatatgttttagataactataacgtatacgaccataaaaaaattggactaaatattttttagataccgaaacatattagagtgcattggtgcatttatttcacggggtgtattgtagacttttagttacttatatttttaagtaggggaccatattacttgttttttcattgtgtaattttattttttagcaaccaattaaaataataggttgtaatataattgggatatctctcttgttagagacacgaccggtattataattaaaaattgagtcctataatcaacagtctaattcctaaattttttgaccaaaaaattaaagtaaaatcacatgaaaaagattgcaacatcacagttaactataagaacacatatattcaatttcatccactgttcaaaagacacaacagtaaaaactgctacagcaggttcattcaacatcgtagcttgagcactcaactatcgtgcaagatatgtaactgcactactaacaatcccttaaattgcaaataactttatttccaaccactaataacgatttgatgacgagtcattgaagaataaaaaagaaccaatagtgaaacaaaacaatgtcacacagacaagactaaaacactcataaccatgccacaaaaacaaaactaaaatatttaaaatcatgtcataaatgtaaaactgattggagtagcaaaattcgaatcacaataactaaacacaacccctaccaagtcgtaagggaaggccatcggtcctggccaaagaaaaaaaagacaacttccagttccaataactataaatttaggaacaagaaccttaattttctttgctataattcataggtatcatattacttttaatcgtatagttaagatattttttttaatatatttaatcacatcaaattagtatttactaaattactaaagctctatcatagagttatggctgggtagtgtaatataatttatgttccacacattattgtgggtagaaagtgtgtccaaatcattaaatttatttataattcaccttaaaagtatcaaacaatatattattagtgaatttaatattaattctcacatatttcaatttaataaataatattaaaaactattaactaattattagatgacatgtgagtatgatattttttttctaagcacaaatcatcattatggagaaacgttttatgaataattagcaattttttataataattattaattaaatatataaaacttaatattaaattatacacaaagctatataacttaatatttaatgatctaaccctaatatgccatggttcttagaattagacaactagtataggatggctatgcatctaaataattaaataaggcagccctagatcttgtcaaaagtggctttatagttatattattcttcttctttttttggttctttcaaaaggagctaggtgattcctattgatatgataaaatattgttaaatttaattatcatttataactaattactacaattatacagtatattagattgtacatattttaatttaaaatatttgtatttaattgtatcatatttatatatattaaatagtactgttggatgttatacattatccctttacatatactttttaatttaatttatggtgcgtttggaaagccacattgtaattgaatttgtgtgtaatttgatgtaattacacaatttgacatgtttgtctgaccatgtaattacactgtaactgtgtaattggaagtaattgagggcttccaattacactttctaattctcatggcccccatgagaattgaatgtaattacactgtgtaat

SEQ ID NO: 302119 - DNA, 1819 bp, Cannabis indica
tttcagtaccagtttcattattatacattaattaatcacttaattaaataattaaactaggaatattaaaatacggaatttcactaatgttagaaaaaaatgatgttgtacaggtttttgtaaataataaatttttagtgcatatattaaatacacttattgcatataattaaatataattgaaatgtgcataaataaaattaaataaagtatagcttttttgacagattgcaattaacatattatgtaatataattaattaattgaaaaatgattaccgatattatatactgttattattcgcgtttttgtaaagtatgacatgtcacatttaacaagaaaaatcagtgtaatctttcctttatcaaagtcttttgatactactctgtcactgaaaggcttcttggaactgtgaactatcctgaatggaaggcacacaaaagcctactcatatctgccttaacttttcggaggcaaaaggcggaatacttctcctagattcaaaagggcataatagggaagcttgcttagatgatatctagataggcattcgaaaggtctaaagaggatattgaccgtcgtgaagtatcacggacgtcaaccttttatgcacgccaggtgaccaaagtgacagtacttatactttttctgataaatatcagatcttgtctcctacattcgagcattacagtgcgcgtaccaccaccacttttttgccaggcggatgttacagacttcctctcgtaaaggagcaagcattgagcaacacatgtcctctaattttaaaggttgaatctttgcataccctatgtccctatggttcaaaatggtccccattatctagctgctacatgcacgggcataatgtttctcacgggattattcaaatagctctaatgttgtatgtaacttaccccaatagtagaatttgagcaaaaatcttaggcgggtcatgggcctcttcattccagccacatagcttataaacaccccttgattctcatacaaagggggcatcacaatttacgtagctaaaattttatcaagattactctaggtcttcttcttgttcaagagaaacttaggataaagagatagggtttcctgcttaaatattgtaaacacattaaacctgccctaagagggtaatagactgactcgtggactaagatttactaatacctaaaccatgtaaaaaaatttcatctcatcaattcggcaatatactatttttttagttcttaaatatttaatgttcaaaaatctcggtaaatattttggtgctttcattaagagctgaggaaagaaataaaccactgggactgtcatggtgttcacatgagagatggttccgaagaagacttttgaaggtggcctcgagacagtcatggaggaagtaaaccccctcttgctagagcacgaccagccgaaggatgcaaggggcagggatacgtccaacatgaacgaccaaagggatgatccttcggtggaatgcgtcggaggaaacactagggaaatcttactgacgctagaacctcttctccaccttaggacaagggaaggaaaaagtatacagccctatgaacacacatactcctcatgtaaagcccgcttagttaatttggaaattatcagttaattatgattaattatgaaattatttatagctatttaaataatttattatgctgatatttatggaattcagaaatgcatatttatgttatttagtagttttcatattttgcatttccggtgtccggtattttggaactcggcgtttggctcagtagaaatcacaacttagtatgttagtggt

SEQ ID NO: 302120 - DNA, 2946 bp, Cannabis indica
aaataataaaatagttcagtccattcttaaaccaatacaggattactttcaacataatctaatcttgtccagtccagtccaatccttttcagtccaatccagtccaatcctgcataccaaacgggcccctaatatacataaactatatatgtataataagaaaaggttattcattccacctatcattttttttgaacaatttttttcgcaccctattctatcgaattgaataactttggtatcctcaatgatgaaagatattaaagagagtactattaaactactaagtcgactgagattgacacctgcaactattttttttaagaacttttttttattaagattaagaatagcaaatttaaacaaccaccgcgaagagcggcttgtttcctaattaagaaaaaagaaaagataaaacaaatttaaagaaagaatatgacaagctatttgaaagtctgggcaaaatgactggagatcaaaacaagaatatatgtataatatttggctacatctgccaacattctttttctaaataattatttgcattacatcaagtatccagtaattgaaaggattcaccatataatatttatagattatagaatcatatgatatcaattggtacatggacatgatagggcttcctagtaacttgggaatgtgacgattattgtgtacacttgtactactatattcttgtctagcattggaattttaaggaaagaaaagataataaatgaataggacttatttgaacaagtatattacttaaatacagtaatcgatattgctgaatgagaatgaatgattagttataaggagagcacggcaacaaggattttaagagcatggaattattttctgaacaacgctgcaggtaacacatttctgagcttcttcctggacagtactcgcacggcagaacctaacaatggccagctcgtaactatagcaatataagcaagcagccatattgagaacctgttctgcctacgcaacaaatccaagcatctctttattggagttgtatcaggtggctttgcatcctggatgctagtagcttgcccggagatctcttttatgactgacacaaaaccagactctggttgggagcccggttcatcttggtctgcaacagaaacagtgtcagtattttcacaatgactcttctgagtttttgaaaattcttccaccaaattatcgcgtgtttgttcatttcccactgcagccaccataccatcctccacaacacttacaaagggcccctgatcaattgtagagtccaatggagacttggggccactattcatgatctaaatatacacgggaaagagaagtgttagtttgcatatttagttgcatctaagagtcggcattggtgctgtctctgattaatgatagcactattacaaaggaagataagaatccatagtaacagtaatacaagcttatcagcaatgtagactgatttaactgcaccttgttttgtacatgcatatattggctagaatgtagaacccttaaaaattcaccagttgcccttacccacctgcaaaaagtaaaggaatatagcaaaccacattagaatgaataattcagagtcaggtaattttgaaggcaaaatactgcctaaaaatgcacgtgggttgacatccacttgtaaaccttgatagcatttagaaaattccttccatatctaagcacaccaaaattgaaagtaaaggacagctgaaccaaatgtttcgtcgcacccagtccattagtaaaattggacctagtggataaaaaatgatgtgaagttcataatcctatctaggttgctaggctagctgactaaagtcgcaagtaatcccccatactaattaatgcctagcaaaagactcacaaagttggatcatttccatgaactctagcatatcctgtaaccaaagtgaagaaaaattattctcccaactcaacaaccttaattccagttaggcccaaatatgaaacatgaaaatatgaagtaccacaagcgagttgcagttatcccttcaaaaaatgcaagatgtcctccatgctttgttgtagccaataccacatttttatttgtcctataaaagacagagatatcaatacatgttgtcaaatcaataaagcaggtgtatcttcacatactaagagcagtttaacctgcattcatcccatggaatggcctccctggtacagacaggatcatccaaagcactgacacagagaagtgggattgaaacattgcccacataaccagcactgctacagcgccggtagtatgtatctacagtctgagaaaaccaaataatttggtaattgatatacatttaccgatttacatatatacatatatttatatggacaaaataatgaaatttcaagccatacggacctcaaattttccaacaaggcgggtagcgtggtcatcaaaatctcgaatagtccgtgactattgaatgaaaagggcaggatatacaaacaattagttgaagacagcaaagaactaataagttgaaaaaacaaaattgatatgcaatgccactgtaggacatgataatgaagtctgaatcacgaaaaaaatagattccaaaataagattggtttaacataaaaccaaaccaaaaaatgtcatttttgggtacaacttacaagcattcttgacttaatgcaagggctagaagttgcaggacagtatcaccatatcctataggaactatggcaatacttcgtttcagtttggttgggttatagcatatttcaaccaagccaatgtaaacataacaaatatctaattataatctaccaaatgaaagaaggaaagaaaagacacccaaaatctatttcagtggtttggtaaggttaatttattcaaatcgatctttgctttcttatttattattattgttgggaaatttgattttctatacttagaaa

SEQ ID NO: 302121 - DNA, 1091 bp, Cannabis indica
taggtaagagcaaggctaaggttgagcagccgtgagagcaggtagatgaagattgtacatgtcagagcggttaggcttggagcgtacagtctttgggacagctggtcttattttgtatagtcgctaggcgataacttttgtactatgtactatgaaacttttgtaaatattttgtaaaatgggatcccggttttatataagtatgttattttaatatttataaatagttaaataaagttttaattatttacgattttcaataaactcgttgattagcaacgagctgcacaattaagttaaaaattacgttaacacgcctaaactagtagggtgttacaaagcgtcatcttgttccttttaaagtatttcacctagggtttaggatttaaattaaatggattgaaaaagataaaacaatggctaaaattttatttagtggccagccatacatagtgggcctcccaagttataattttgccattttatttcatagttcattttttctttcactaatgtcatattttcgaattcaaaccttcaccacaaacccttatttgttatttcttctactattaccaccactccgctaatcataaatctgaacaaaactcaaactccaaatcaaaatcaaactaatcctccatacaaattattaattaaatcaaacgaaaaaatagttttatttttctaattagagatgattataaatcttttttgccagaaaaaaaagagctccatgttacctatcttaagattactccgggtcaaatgcgttaattttagagttcttaagtgatgaactatcaaaggaaaacatcttactggacataggtagtacccatcaatcaatttaagtacttttcaattgtgtagtcctatacttacacaacattgaaatcatcatatttgatttttctttaagtgatgtaggattgtatatcttaccctgtcatttctcttaggaatcacaagaatttgactgtcacatttaatttgctaaaagaaatgaagtatgataagtttttctactaaaatttttaattcaagggttaagtgtaacaaatataaaaaaatatggagagtttggctgc

SEQ ID NO: 302122 - DNA, 3027 bp, Cannabis indica
ataacacattaaactcttcatatattttcttaaatgtcataaagtaactcataagagacttatcttatttcttcgcacgataaaaggctttgcaaacatcatatatgtgagatatgttgtctttgacagaatacaaaaactccaagtaatccattagttctttaactaattcacactgattaatcaaactaattaccttaagcaagcatccttacggagccatatttttcttgaatcgtctgtttcttttgggggatcgtcagtcaagtaatcatctttgtcaatactcctcaaatacaatcaaattgtcttactccattccaaataattcaaaccaatcaatttatggtctgtgattttagacattacaggaaccacatcagaatcaacgactgatttcgaatctaattttatctctgccatattctcaaaagcaaaaacaattgacagagaaaaagaagaaaaataacaccaataaatgagcacacaaacacgaataaggaagaaaaaaataccaaattacaaccttagactgatgcaagtgggcttagaagaactaagtaaagaaccgacaaaagaacgtcgttgaagatgttttcacacacgcctccacgtgctggtgcgtgggaatgtacatagaaaatttaggtggcgcgtgagccccacgcgcgaggaatttggcaaccgaacttcgggattcagaagatcagcggttgggcaaccctcctgagtgggcagtgagaataaattcacactccaaataggatttttaaaaaagaaccctaaactcaaaacctaatctctttttttatgaaccctaattttgaatttcgaatcacaattctaactatggctctgataccatgtagagaatagtgaatcgaattgtgtgttgtacttcatagaataatatatatttatatacaaagttatgagactaaatgaaaaattactaaacacaaataagaaactactaaatacgagttatccaaatttctttacaactaatattctaacaatttcgattacgccatataccatacactgaggttgcagtgattgcatccattatagaagccaaaggtcttaatcttgtgctattaatctagtttttccaaccatcaaagcacaatgcccaagcttgaaaacccaaccaattaataatggaactcactactttatttgagaaagagtggtcaaagaaaagatgagtggctcccattcaccatgcctcagactggacaatcaagagtctttaggaatatgaaatctagaaaataaatctactgtcaaaagatgggagtttaaagcttgccaaataaatctatgcttagggatgctcatacgatcccaaactgcctgcttataattcacttgaccttgttgcaaaaggctattgtaaagtttacctgctctaaatttacgtctatagccagctgcaaaaacactttgcttgttgaaaatcttcctcaagtggcaaagcttttgccaataccaacttgagtctggattgaggttgtaatcctagaaatttgatccttctaaacgcattgatccatttgacccacaacaagtcatgtttttccattatggcccacatatttggcaagagatgccctattccaattcgatccatccctgaagccaatcccaccataagccttagggagacataccttctcccaagactctatatgtatcttactcttgttaccattctacccccaaagaaatccttttcaaaatctctcaacgtccttcacaacactttgaggtaaaataaagatattcatccagtaattttggagcccaagcaaaacttaatgaattaattgagtcttaccaacaaggatagatgtctagtagcccaagttacctctgctttatcttgtttattatagggtcacaatcctccattcgccatttagtaagtctcatagggacctgttaggctagttttagcctatgtttcggatcacaattatgttttcttttcgatgttttaggacagaattacgcttgtttcctatattttcaggtttctcaaagctaaggaagctccgggccacaaaagtgcagcaaaagacaagtggagctaagaaaaacgaaaaatttacgtttggtgcacttttggccgcggcgaccttatactacaaaaaaccctttttatgtcccttttttatgtctaataaaaatgatgttggacatgaaaaatattttggtagttttctagtccagcattattggacataaaaaaaaattatcatgtccaacaatattggactagaaaataagtaatggacacgaaatatattttttattttttaaacaaattgtctattttttatgtccaactatgttggactaagaaaatatttttaaaagttttctagtccaaatatgctggactagaaaaatatttagaaaaattttctaatctaattatgttagacttgacattatctaaaaaaaaaattagtatgcctatcaaatataaaatctatttataggcttaaagaaaggtgttatatttttttaaatatatatatatatatatactcatcaatatttttaacaaaacaaaacccaacttttttcacacggtccgaatttcaagaatgaattaacatatacattttcaattttcaagattgtaatttattttattctttattaaataattattatttatcatttaataaaagttgaaaatcctaaaaacatatctctctctcttttcctctacctaccagccgcataacccatagtcatatccctcattctcttctctctataccatctttgaatcacttctgcacaaccatatcacagccatggtggctctatttcttaggccctgcggcgtttccccacagatcgaacgtcctcctttctctcactttgtaggagctgaagttgagatctgaagccgagatctgaagtcgaagttgaaagagacaatgatgatgatagaggacgagaatgatgatggttgtgctacaaagaaccgaaagagagagagagaga

SEQ ID NO: 302123 - DNA, 3573 bp, Cannabis indica
atatacattatacatatgtgcccagataatatttttaatccaacattatatgtatacacatgctaaaccacgatgtgcgcaaggtgccctttgacataattattacacacatatgtaacatatcatatcaccacaattatcacaagtactataaaccagttttactacaacaattataacatttgttaatcgtgatcttgaagcatctttactacttggctcatacttggtcttgcatctttcttttcctctacacatttaagtgctactcccaatagaactcccattttttccaagtcgtactcactttccatcaatggatccataatgtttcctagccatgttgctactttagaactttcgtaaaccttttctctcacccatttaacgagccctgatctattctcctgatcattacatgttgctgagttctttcctgttaacatctccagcactacaattccatagctatagacgtccactttggatgtaatgatttggttcgtaacccactcgggagccatgtagcctcttgttcctctaatcctagaaaattggtgatcttctagctctcctgatcgatttagtaacttagatagcccaaagtctgccacctttggtgtaaaatcagatcccaagagtatgttttgaggcttgacatcacaatgtagaacccactccaagcactcctcatgcaaataagcaaggcctttggctgtccccaatgcaatttcaaaccttgttttccaactaagagcataatcatttctagatagattttctgtgagggaaccatgttccagatattcatacactaaaagcctatgccttccttctacgcagtaccccaacatcgctatcaagttcatgtggttcactctcccaatgatgttgacttctgttagaaactcagcttctccttggcaattagcttcattattgagtcttttgatcgctgcgactcgagaatccgataggacacctttgaaaacaattccactggaacctcttccaatctcttttgaaaagttctgagttgccttcttaagctcaggaaagctaaatcgtttaaacctagccgctgctaggaggtattctcttgtatgtgtacttgaatttttctggcttctagtgaacaagaagtaccacaccaacaaaacacacatgatctcaaatattccaactccacatataaaccaaagtatgaatgtcgccaactcattctcttgtctttgaaaatacttagttggcataagtatagtactattaagtttgttggagcaagtcaaaccaaatctaggcaatgcagagaaggagtagtttctaggaaacctcaagtagaagtctccaaaaaacatgggtgttttgtatccattaaccagtaacacctttgggtaacagttgaagccaaccttatctttagcaaaaaaatatgagtactgaaatccaacacaattacacaattgcaagcataaatctcggcatgccgagaatgtgtaattgggaaaaaatccatagtcatacccgtagaactctgtattcaatagcttcataaaattggactcatttttcaggcaagtgagtttgaattctggttcacacccataagaccaatcagaagaatttctcattttatgtcctggaatgcaagagcacaccataccagaaacaatatcatagctacataggctattaagtccacagtggccatgaatcttgcaaggatctgaaaatacttgccacgagacaacccaacgtttctcgctcgaattacgtcgagtgtgttaccttagatttccatcataatcgatctttaatcttctttgagcgctgccaccatagtctgctcatataaatgtaaaatcatcagatgaactgaaattgcccaaggaatcagcacagcgattttactgttgttatacgaagacctcccagcttcccagcttaccagccaaggtggtggccagtaaacactagaaagctgaaacccattataagccaaacgaagaaggttgtcattatcaaagaaaagcctataaaaaccagacgagaaatttccctggcttcttgaagaaacaagcttagtgtctttagcgagtgcttgctcctgaagaatggtgtcagttgggtgatcgaagctttgccataaaacgacaccgtcagaagcaattaaaacaaggttgccagagttaaagagcttcaacttggtttgtgaacttgacgtagtatctgtattccaaactgtgatcaaactagcgtctgttagtataagattaccagttttcaaaaggctcaacttggagcgttttccattgacgggtcgatcacggttcgctatccaaactatggtgcgattaagctgatcagagttgggctcattaaaccatatactgaaggaataggagttcacaccaacagggaagaagccagctgcgaaaactttgtttaatgaagttaaaacttggtctggtctctctactgagagagatgacccttcatttagagtatctgatgagtatgaagacgaaatttgagacatgaagagaaaatagatgatgaacaaagtggccatggtatggatatgaacaaaccgttttgggattcacgaaaaggctactaactacgcatagattttaataattttcttattggtttcaataaaagggtataaagggtagaagaatgaatatataggaattgaattgaagaggaaaaatgataaagattaaataaataacatgaaatacaatgaatgacattggatttaattattcatatgcttttgttttgttgttttcttctaagggtatgctatttgtgatctcacctatatataattctgatcaatagtattacagcagccttaataacaaatattatctccttaaaacaaataattagcatcgccatcacataatgaattatttatctattggtagagcatttcatatgttgttttgtttctactataattggtttattatttatgaacttttattagaagattatttattgattagttactggtaagattatttattgatagtcattggttatgtcatatttgcttgatatatagccagtagattataaaatctttagtttagttggagttgttgttacggggttatttttttattctaaagacttggtatgagtatatttgtatatttttttctacggctatttttaaaagtatggaaaaaattattaatgttatgataaatatggcataaaaagtaaatgccactaaatatggcattatctaactaatcaaactaaaaaaatggtttttttttcttaaaaaaaatcatataaaacattaaaaataaatctaaatttaaaattcataaaaataaaaacttaattaaattaccataaaaatattaaaattcccttcctattattttttttaaaaattaaaacaaataaaactatagtgatcgccgaagttgtcactcgtgccggaaaagtcaacgaaagttaacgaccgcaaccaaaaagtcgtcggagtagtcgccggtgccggaaaagtcgtcggagtttctgtcgccgccgaaaaagtcgtcagaa

SEQ ID NO: 302124 - DNA, 1281 bp, Cannabis indica
taaaattataattaacaacaaataatgaatattattatattttatttttataaataatacttaaattaaatatatttttttaataaatactactgaaaaattgagtttttttagctgttttaaacagtcagataaagtatttttatttctctctaagactaacgcctattcgactgttgcaacactgggtagaatatgcatctgtagaaaacatcgagaaaagttttctcaattgtgcaaaaccatcgataatataaagtagcattgttgaaagtttttcacgacctataatataggtgacggtaaaaaatcgtcggctatacttaggactaattttaagagtaagcatagtaggcctttatctagggcccccaccccacgagggtcccgaaaaaataaattattttatgtaaatataataaataaattttatgttaatataagtcacaaagttcagccaatgtaatagaatttgtattcgctagttgtttaatttttggcattctttttaaataaataagtttatttagtaggactcttactactacgctacctcacgtaattatttttataatgtattattattatatttatatatattattaacaatatgtaattacttaaaactttgttaaaattaggttatcatgtaaatatatagatattcatatcaccattcttaaactttctactccccaagcgatttttgactactatttttttattttactttgtgatttatcactcattcacaagatggattaagtaatttcgttatgttatctattgaaaaagactaaatggaaaaacttgattataaattttaaattaatacatttgcataaaaaaatacatagaagttacattttatgtaattaatttatgtagattttttaaggtaaattttctattttcttttcaaagaaaaaaaaattaaggggcctcatacttttagtttgccttggaccccattttcccatggctacacccatcaaaagaattgaggaattataacttataggtaatgaatcctctaacgaatccatcattttcaatggtcctatataccactactataaatatgggctttggaggcagtttttaagacattttaacgtcgattttggcaaaattagctatcgatgctgatccaagtgatgttgtaagatctaaaacaaccaacgttgaatagtaccctatgacgtcagttattttatagtaaccgacgccataatgtacatatggcgtcggttcatagtgaataaccgacgccatataccc

SEQ ID NO: 302125 - DNA, 1591 bp, Cannabis indica
aaaaaaaaaaaaaaagtaatcaattttgtcataacatctctatatcagattattattaagttttattttgacaaaaaatcaatttagggtcttatttgtataattttagaaaatacagggtctattttgtcatttaacgaaacagatggtccaattaataacttttgtaaaatacatggtctaaaatgatatttacccatataaaaatatattacaaaaatatggcatatttttaaaccataaaaatgtaaatacttgtaaaaactcataacataaatgcattaaaaaatgtcataaaaaataaaagctttaaatcttttcatacttgtgtaatttttactattgattttcttatgtataattaaagttaaccgtgttcttgaatagaatggttggaacttaagaaagggtagaccagttaaagcctatctttattgggttacaagagaacaaagctcatttgattggtttagagatgtactgaaggagatatcaaactctgaccagaatcaggtaaatgacacaccaacaataaatattctactttcattaaggtttgccaaaattttgatgagatgaacccttttggtgactctacagtccgttgtagaggtacataatttcctgactagcatatatcaggaaggagatgtacgatcaaccttaataaatgctattcaggcccttcatcatgccaaacatggcatagatatagtctccaggactccagtaagcacaaatactacataactaaagtcttggactaaaccagtgtgtttaaaattagaacatctttaacactaaaattaagctattttcaggtacgcacacatttttctagaccaaattggttcaacatcttttcaaaactagcttggagacatagaggagccaggattggtaaagatttcaacactcaaaaacacctcagttaattgttatataagagtctagttgttgattatctagtgcttcatcccaactttgcaggggtattttactgtggtccatctgctttagcaaaagagttagagggattatgtaccaaattctctaccaagaccactaccagattcgtatttcacaaggagcactactagaactatttttgtacacttttcattgtcttgtaccaattccacaataggaattgttcaacaacaataaaggtctaaatgtacatagctatattattttattatatacatacatatatacatatatctctatctctttccctcatacagatcaacaagatggaaaagtgactcctctctattaattccatagtttgttttgtattgattttaaagtgaataaatgtgagaattatacatcaagatctatggtagtctgccttccttttagttgcattgaacttggaaacaaaatatgaacaataaaaattgggaacgaattaagggttgatacaggctaaagcaacaatacagcacaacagacattctgttgaaactcactgatccaaagcaactcaaacataaaagagagaaggagaccagttatattaaccagtccggacctatccatttgtttacaaggtgatctttcctatgaaagatgattatgatga

SEQ ID NO: 302126 - DNA, 965 bp, Cannabis indica
aggaggagagcatcggcgaggagatggtgagctgtcaaaaacataaaatagtacgaggaggcacctccactactctgattcggttgacaatcagagtacagagaatgaacgtgttttggtgtcgaatggaattatggaaggtacgattgacacgaggcaaaatgtggaaaacgtggttaatggatagatggaaattttgaataatgatcgtgggcctcattatttagatttaccaacaccagacttttctttgtgaatgataaagtggatccctgacattgggccttcaattgcacaaagtttagaaataccacattcttggttgtgcagatcacaaaggccacatgagtttcctaaacctacccctattaaatggcccaacaatgatcctgaagcccaaaagatgtttctacaactttatggatcggattacacagatctctacaatgcccaagcttctttaatttcgaattcactagatttgtccatgatgattcttcacttatggggaagcaagaaacgaaagccacatacatggtttgatcctgtaccagcagtgattgacttccccctaccaagttgtcctacttccgtggagaaagataagggaagcagtcgcccagtggaggaggtcaatgaggaaccgagattttgtatcagaatggaagaaagtccagagggatgacgatggaagggatcacgaaagagactcaatggcgttgataaaggcatgacttcgactaaaagggcttcgcgagtcaagacaagaagaggaagaaaaagggaagaaattcagaagtttgcctccaaggaatttttaggtaatttggaagtagttctggataattgtgttgaaattccaatccaagtcgttcaaaattttggcaattgcgaggaggcagccacatgcatgcccccacctgttggaaattattttaccaggatcttagatttactcacaagta

SEQ ID NO: 302127 - DNA, 1067 bp, Cannabis indica
tctctcagtcgacctccgtgtctagaaaaatacatgctgaaagttttagtttttttttacaaatttcttttagtggcagttgtttattatagttacaacatacaacctattaagtttttttagtaaaaatttcgaattaatttacagtgctagaaattaagttttaaagttttttaacgtatgtgatagactggaatatcaagaagtttttttttttttcagtattataaactatttaaaattttttaaaaatttataaagatgatgttataactataacgaatatcactataataaaaatttagaaaaaaaatttatagtatataattttgggcatagaaattaattaagattgtaataggagtaattaacactcctccaatcctcctatatatatatataaatatatacttctaacaacttaagatatgcataatattattacaatttattttttaattaattagatgattcactgattttgttctcaattctatgattttattatatatcactaaatgaatatattcatatacaatgatcacagtcatgaatttttcagtatgcgcgtatacacagtaacacaggagtgaactcaaaaaattttgttagttggggcataaaattagagcattgttaggaaatggaaatgctatggcggcatcaacaatgatgcctagcagttttagagcatctttcatggggataatttaaaaaacacttgatgacatatcttttaatagatgcttactattgaagaggaaaaaaatactattgataataagaactcatcaactatgttaaggccgaaaaatcaaatgtagaatagatgatagatatgattaactaaagaagttctagtaaaataaacaataattgtgaaaagtgcctcttgtattagtttttagagcatgggattacaaaacttgattttttaacccatttacaagtgttcaaaaggggcttttatacttgagctctaatggctctgaaatataagtagtttcaaaaataaggggataaatgtaacgccctaatgctaaggcacgctacagtgctttttcaat

SEQ ID NO: 302128 - DNA, 2777 bp, Cannabis indica
tagtcaaattaattagattgtgaacaatagaaacaattacacaatgctcatttatctgatcttttaaattttaatatatatactacatcaccaaacatacaaatttttacatttatgtttttctgtatatcaaatattatattttagaaaaagaatattaaggcaagagaaaaggaaaactaactaaaaatgtttagagttatgataattgatgagttctgttttttttataaatgtggggaaatgcagtagcaaaatagtaaaaagaaaaggttcactttcactcaacataagaatcttgcagatttttggagagtttgatgagcgtggaggccaattatacagtggcaataactgcattttgggccattgaagctgtgtaccaagagagctttgccttgtgtttgggagatgagtcaagaaccccacctgaactgaaagagacttgccaaaggtggggcagtgaagcctttgctaagtactgttcttctctcaaacacatcgccaaccggcgtttgaaacaggcttcggatgatgagctcaagaaagctgaagtagcactcttgactgttcttgagcatgaagttgaattctggaacatgagccgtagtggttcttgaacacaaaacagaacagaagagaagagaacaccccatctttttgatcttaaacaacaatggaactgaacttagttgtgttagagttgaattggtttgaacagtatgagcatcttattatgtgtaatgtaatgtagtagtgttgtttgtttctgttatagttaagcctctgtgtctctgaatacagtaaccgatggaatgtcgttttggttaccaattgtgagtaaaacgacttgtcgtgtgtattttgaaccgtacagtattatatatgtctccctatgtataaaagaacatctcgagagtgagtgtaaaaaaaataacagagtaagaataataaaaataattttctattttaatttctcttttaatattttagctaaaagagtcaagtgagaaagaaaaaaaaaacagtagaataatgggttttcaacatacatattgaagataaaaacataacacaaactaaagctttgtagagtacgatgtagtctaatactaatgaatctaaatctaaatctccacagaaaaaaaaagaaagaatctaaatctaaaaagggtaaaattgaaaagaaaaagtgggctaagtaactagtaatgaagtgatctcaatgattagcttggatgattatcgttgactctttactaaatctttgacttctttggccttcatctttaaatactctccaaccttggaaggtaagctagatacactgtaaaaaagaatccaatagctaatataagttcatatcaaataggaacgaatataggatttagattgagagagaccaaaaagtaaaaaaatatcaactctattttacatattttaatttttactttcataatcttcaagatatatctatttttataaatgatattctcgttaactcgttaagttaatataaattatatgctaaacttaagtaaaaagtaatggtatgagcaacctacttataaaaataaataaattttaataaaatttaatatgaaagtattatttttttagataaattataaaaaaaaattagattaatgaataaaaaaaatatttctcaaattaaaataagcaagacccacccaactaaaagttaaaaccttttcgtatatgaacaaaaatctaatatatttttttaaaaaatacaatattataggcttttaccattatttactataacaaatacaattatttacttaaaaattacctaatttgtttttattttttgaaagactatattaaaaaaaggggcacttttcatttttaacataattctacatagaaattcctattgcaactagcaaaacaatttaaattgcaacaaaaaatcgtatagcaacccaatagaaactaccagagaaactactttagaaactcaaaccgtaaatttataaaaaaaaataatatatagagtaatttattttttttgttgtaagattcttattaggtatgttaaagtagttagttaagattatgaacacatgcacataccgtattctatcgagataagttccttcaattgatgtccaataaattatatgattacgttgattgaatctaatctcagaattgcctaaaaagcttacggatgatataacttgccactctagatttatatcttccctgaaaacagttaccattaccccataatcacaagcatcctcgtacgacaagtctgcataagtactaggtttgatttcaaccacatcataaccacctgtttttcttccaattttaacttcaagtctatactgagagcaatcattataacacctcaccacctctcctatcttattcccaattaacatgttcatggctttaattattcacaaaataccaaataataataataatattttcttttctgagaaattagctgagattattcttcacccacgattttgctgcgtacgtatatatatttataatctataaccaattcttatcctaattggaaaaggaatgatacttttaatttgttaaaattgtaaaaaagataatgatcttttcattatcttttaaatgtagtttacctgttataaaattagtattttatattttttaaaataaaaacttaaaaataaaaatttgaatattattcaaaaaaaaaaaacaaaaaaaaaactaacaaagaaagactacacgtaaatagtgtagtactatatata

SEQ ID NO: 302129 - DNA, 947 bp, Cannabis indica
gcataaaacccaacactttttgtgaggggtgaggcccttaccatctcagaggctcttgtcaaacaaaagtaggacatgacttgtagtttgtagtgcctactcaacactaggaacaaagagaataccatactttctgctaatgtctctagcctagaggcagaactcgggaggagtgatgattaactaaagcttgcccttgatggccagaagaccataaggaacgagtacgttggcttatcttcgaagatcatctatgagatcaagctgtgtaacaccaaggttgatctttcctacatgggagcttctttcctttagcacacattgatccagaggaaagagttatatgagaggaggatggagacggacaagaccaccgtcaagccaaaagaatcgtaattggggaaatttatgaggccatggctgacacacctactgaggaggtggatggcaagggcattgacaaggtggtcggctagcccactctttggcaatttggacaatacagcttctgattcagctccacctgcacctgcacacaagtagcataaaatgattattactacaaacttataattttattttcatagacattttgatttcatgttctacatggcctattggccttttacttttgaacagtactaatttttagccttagggctttcatgtttgtactttttgcctataggcactcttatttttaacattactattatttagccctaaagatttttatcatggattgattgaccaagcattctttaatcctgggtattttttatttttcttcacatgtaagtatctgaatttacttttcgttatgtgaagctaaagtatgcctccacttagaggcaggtttagtagcttttactaagctttaaaatttctttgcatatattttttatactagtttgatgcattgtacggtatgggtgccccccaagtga

SEQ ID NO: 302130 - DNA, 3806 bp, Cannabis indica
aataattttaatttttttaaaaaagaatgagtataagtaaattattttttttttaaaatccagtttatttataaattttgaaagtgtaaatcttataaacaaactccatttttttattaagtaattcactacattttacattggaattgaaaattatatatatatataaacaaaaaacctttaaccaatgagagagttttgagttgagttatttattttttttatatttttgagtagtgacagctgaaaggctctgatttactgaggttattttgttcagaatgaaaatgactaattaataaaaaaataaataaaaaaattgaagaaaatggttaatagagtgatatttccatatgattaatgtaaatatccattgtgtaataagtgagtttgaaaaaaaagacctgtttttatttcatatgactttctctacatttagttattaagccaatcaataatgaaactctgtccacgtggcaatcacagccaatcacagcctcgatgaaattaaggttatctgtaccattggaaactgtgatttaaaaatgtatctataaatatagatatttgaacagttgtaattttggcaattattaattaattaatatattttctttcaatgatcttctcataaaaatatgttactcatcatcgatctcaatgttgagagtgaccaatttatctgacattagagaaaaattagaaaaaaatggtcagattttttttgactcatttcattttgctttttagggtttcttttgttgttgcaaacctgtaagcctaggctttatatatgaaaattattaaaaagtataattgtttgtgcctagtaattttatcgctattaatattagtgtaattaagtattagtttcatataatttaacaaaataattttaaaaaatatcgttaattaaatatcgagcccgccccggccataggcataagcaggttaggcctgtgcctagagcccacctaaccgaggagcccaaattttttttccttttaaaattatatatatttttttagtaactttcaaaaataccgcattttctctaacataagggctcaaaaatattttttttttttgtggctcactttgcttcagagtcggccctgtatggagcactacttataaaaagtattggacactactggtgcccaataataatactctgatttatatatatttaaaattatttgttttaagtgaaatgaatgatacataggttggtaaaaactttattatgttttacgtttatatgtttaacctttgaatttttttacggtaaaactcttttattttactttttcttagtaaatttgaagcatttgttaagttttacggttaaatattaattagtttgttaccgtgtgccacttttctatacgtgacatatgtatttttattaatttcgagtattttactgttagtttcatataggtatacaaagtgaaaattacagttaacatttaacagtaaaatttaactaacgtgttaaatttgtaaagaaaattaaattaagttgaaaggaatattcaagctacctgaaaaaataaatgagattaagtatataaaaattaaaatatatataaaagaattttaccactaattaccaaaattaaacatagtgttggttggtatatttaatttcaccatttttgttttgttttggttcacttattttaatttctatataagcaataattattggttggttagatatcataatgattgttgtttccttaagtaaataattaatttaattatttgtttgataagtttttcatgaagaattgatttaattttgattattattatgttcatttaattaacattattatgtttattatatatatatagtgtgaaatcaacaattgataggtacaaaaaggcatcctctgatacttctaatactggatcagtttctgaagttaatgcccaggtaataattatttatttaattatttcatttcactacaattattgcactattaataaataattaaaattatcacattaatataagattaaaattaatgaaactttttgctagaaccaatgagctcagtgtgacacattaattatacatataaaaataaatattatatcattgttatatacaatattattattgtactatatattaattatatttatatgaattaatcaaattgatcttataaaaaaaaaaaatcagttctatcagcaagaagctgcaaaattacgtggtcaaattgagtctttgcagaaaggaatcaggtaaatatttatatgtataatataattattgtatatgtataaattaattatattattaattaatatatgactaattaatatttgttacagagagttgcttggtgagtgtatagacagtgcaaaaccaagagatcttaaaaatctggagagtaaattagagagaggaattagcagaattcgatccaaaaaggtcttaatcttctttcattaattcttaaatttacataataattattaattattttcatcactttaattaattaatattaacattacatatgtgtaattaattgttttatttttttttcacagaatgagctactctttgctgaaattgagtacatgcagaaaagggtaatttttataaatataaatatatatatatatatatcaattaattttttattattaattactggattttgtttcataattattggatcaaaattttttttttgaaaataaaaaaaaaaagttcattactaataacaaattgattgcaaaacacaacactttttaaaaagatctgaaaatgaaaactctttacaatgtcccaaattttcgggttataactgcgtaaactattacagtttatttttttctatattttcttgttgttttcttttttgactgaaatccaactttcaacatagccttatggcttcttaaacacctcttattgatgtagcaatctaaaaataaatcggctattgattcttcatgagagccgcacatcaaacagttaggtcaaaacaatcgttgcttcgttttcagacgttgcaaaattgctagccacaaaatgaagctatgtgggtgtgtttaacctctctcgaacttcaacataccaacgaactcgaggttgttgagaacacaagtgtatctatccttgatagtcacaactcttttccaataccaactactttatacgagggcaatatacaccccctaatacgagtctttgagatataatgtgtatcaatttcacccatagattatctttcttggaggaaaattgtccgacatattccacatgtatatctcaaaaactaagtcctcgtactcgtttaggagaacaagctattcgccgagcaacttgaccaggtcttatataatttgttgcctttttcacagaaaagcacgacaaattgcattaatttgcttcaataactttctaagaatgatcattatctgtgactaatatgtgtgaattgaaatgattaccgagtttattaatgtgactctacatatattccttgaactccaaaaacagattcttactaccatttcatcaatcaaaactctacactcctttcactaaaattcttttagcacaaatgatgagaatccctaaatatttaaaaagcattgaacgattatataaactaaaatacattaaattgaactagagtacattccaccttaatcaaagtacagtagaacctctattcaagaatacacttgagaccaagaaattaatattctaattgagaggttataactaaatagagttacacttgaaaaaaaaaatcaaaatatcaaaaaat

SEQ ID NO: 302131 - DNA, 6579 bp, Cannabis indica
ttttttttttttatataatttatgggcaagtagaattttaaacgacaaaaaggtcttttaagactttttatttatttatattctcacgatttgccttgtctttatagaatatatatatataatttgtttgcaatataagcaaaaccgaccttagctcagttggcagagcggaggactgtagttggctataaccaaatagatatccttaggtcactggttcgaatccggtaggtcggattttaattttttatttctttatatggtgctattttttaattctccctgctcgtttttagtaattattacaattaaatttatttttctcagaataaacaaggaaaatttcttataaaagaaaatgaatagtaccaaaataatccttctccaaagtagggcctcactcacttgtactgtacaggagcatccttcttggatgcatttagaacaagcctccccacttgggtcagtgttataaccaataaggcaataacgaattttatttccattttaaaatgactaattttattttatttttaaatggagagttattgcacacataatttaaggtgaatatatgtagttacaacacggctctacacaatacactcaccaaaagtttattttgcaatccaaagtttcacagggacaaaatttacttttctccttttacaaacatgcagtcacaaaaatggacctcataaccagcttcaacttttcttttcccataaaaaacatatatttatctataattatgaggtagtgatttatcacatgactgttatctgtatttgtatttttgtgattaactaaatataatttgtggaatacaatatgataaacttaaacttgtcaataaagttgtgaaccaaacaccttgtcattaagtgtcaaattatttaatttgagaattgaaagatctacttactttaaccaaccaaaaaaggacaagagttgcacaaaagaatgagtccaatcaaaccattaataaataataacatagtgagtgactaatgaaaagagagctataaatcgttaactaataaaattttcaggcccagacactggcagtaggcagtagcagactagtagcctcatgaaaaagaaatatatctacatatgtaaaataatagttatgaggacgaatagcacttattctacagtgaatggactctgattttgaaaaatcaaaattacccatgttaaatgtaaacagcacatttactaaatctacagcttaaagcaaagatttgatgaaagtaaatataaaagattacctttcttgatgacaactaagtactgaaaatttgcagtaaatcaccactcaaaccaccaagtaaaccatgacctacagcatttgtatacttgatgtctcggagtggatacctgtcagagttaagacgctgagaaacagaaaaggaaggcaattcttgcaaggttgtttcacaagctccttcttccctggatgcaaataatttcttatcttcgctaaagtctataatcgcacatttcggaagccggatctgattcatactagcataggtggaagccaacttttgaaagcaggagttaaaacctcctctcctatattgaacatgggaacccattattccttgtccggtaacattggaaggagtttgtgaaagttgagacgtagccatgtcattatgcatttcaactttaggacgatatgaagcgacaatgtcatcgctgctaggacaataagcaagtgatatacagactccttgtctctctgtgtctggaataaaagttggccttcatagaaattaattgactagttagaacatgccataacataatgaacttatagaaagaaaatgaagttagatacagctgtttaagtaactaaaattctaatgcatatgatatttgaacataatttaccaggaaatatattttgtatacacgttttcaagaattttgatttatgattatcaataagaaaatgtggctaatcgatgtgaagaaaaagacagaatatatatgtataacccacaacaaaaatttagtcaagaaacatataaaataaatgaatgttatacataaaaaaaattatacataataccagcttaaaatagaaataaatagagcaagtagagaagatacccacatttcatcagcaccttcaaagttccattgacacaagccagcggaagaagcagacaagacagatctagcaccagaaggaagagttgacttgtgtaagagagaatgtacagtatgaactggattgctggtcagtcccttgagaaatttcacagggcccatagtttggcgcatgtcaaacattaaaaccgagccattctgcatttataaaagaaagaaaaacagaaaatataagaattcataaacactggttatcgcaaaaaatacagcagacaactcatacctgtagtccagcatacatataacatgggctgttgagatcccatgaacaagtccaagcagcagcctggaagtacaaatgtcaatatggaatagagcacactggacaagaaaaccttcaacagcagtatttaggatcaataaatgattccttttcaaactatttgaatttcttaaaatgcaaaatagcaatggaagagatgtatgatggtaagaaggtagaagttcaggactcttgtgtctaggcatgaacatgcgcaagtacagaaaaatacatcaaaagttgaatattattcataaataaaattttaccggtaaatcataggtaaggatgacattgttgctctccgtactgtaacaaagcgctgactgtagtcagtacaaagatacatacattgtacacaaacaaatatttatataggcaagcatgaataagaaaaatgagaacagttttaggaagcaaatgtcacctgaaaagtgatactttcttccctagtgaagctaggagtgcaagacggctatccgtagggcaaatgtgtaagtccttgatgaaatttatagatggaggaagcaaaatatcttctctttcatgaggaggtatcaagctaatctgcaaaatcatatttttacacaagcctgctaattatttccaaattcaatgatacaaaggatactcaaatcctagatcttagttgaccaacaaaaatattactttggtaagtatatgttttgcgcccattccagatagatttcgagcaattaacaagatttgattagaagcatcaaaatcaaataattgagcgccatccacctgcagctccttctgtaaaaataaaataatgatattaatattcccatcaagaataccacaaaggtcctagtccctataattcctaaatgaataacagctcataaagccatgctataggccattaactataatccatttcaataaagcagaatacagaatatcaaggagaacctagcatcaaacctgtaaaataaaatgaggagatccttgtctgcataatattgaattagaattacgccctacaagaaatattaaaagaacaatgcaagatattaacttccatctaaataataacacaaaaaagatcattgatcgtaaaaacgcattgattttctagccaacatatttatgaagataatgctgcttatgtaaccattaacaaaactattaccaatcacagatctttgtagtaagtctccaccagaattgactgaattagatggtccctttgataaatctcctataaactgctccaattgagttgtcctctagatagccaaaaattagatttcatgggggttggagagagaggagagacagagagagagagagaaggaatgccttgcttactaatgtcatctacaagacatcccaagtacattaaaagtggcatatgaatacttcatcatacagctttcaagttatttttatttgattgtgataaatttgtagattttgtagttcttttcatctaatagcaacatattgctcgtcatgaccatcaaagaagaatgtatttttgtaggaattacccaagacagtgatttatatgtaagctacttgaaaggtcagtattacccaacacataaattttcacaatgcttcaattctttcgtggagccaaaaaaggggcagaaactataacttaaaattgattaaaaggttaaaatttgaaaccaaggggaagtttgaaagcttggaaaaaaacagacaatgtctgaattgcaaaaatgaatcaagacagcatggacatattttagagaacataaactcattaaattgttgtagtgtacagataaacttcagaattgttcacaaccagcatacctctgtaagctgttgaactttcaaacgcatcacagactccttctttttccatttctcttcttttttcctccaatcaactctctgtgcattaaaagtaaaataaaaaatatatatttacgaatgaagctagcagcaactaatgaaaattaactccttccaatataacagacttgtctcataagtatactacgtataaatcactccgttataaaattatataatgagaagatgaacgattttaacaaatcttagaagatcaaaaattaagacaaactcaaattataagaaatctgaactggcactcgtggaaataattcttacctccttctctaaagaagagcatttagtctctagtagtcggattctctacaaaggggtaaactcaatcatttactatgtatgtatgaaatcatattaattaaacatatctgaaagcagcaagtttagtgaagtaagataaccttttgtgaatcatcaacagtaacaagctgagatgcaaacagctttctaacatctttcagggtgcatttcttgttgcattggggacactaaagagaaaagaaaaaagaaaaaatttgagcaataagttccacaagaatgaataagttttccagatcttccaggaaacacgatatggttacataatcagtaccttcccttgatttttccgcatttgcaaccatttcttaatgcaagacataccatatatgtgcccacaaggaagacaactgtagtcaccaaacagaaaaaaaaaatggagagatgactaattagtgaaatgatttcccaacaaatcaatgacaatgtcacatcatgttatggtttgcaaacattaaacactgctcaaactacctacattcgctgttgtgcttattcttttgaaaaaaaaattaaaataaacaaatttcaacttttccttgaccccaaaaagaaccctatttcgaaggctgtcaactctaacaaattgctaagtctgtctctccaataaatgtttaacgacatagctatcactgtgagattaacagtaccaattcttccattgaatatctcgaagattatacaagatattttcccttttcctgaagagtactcaaataacaatagaatgcagaaaaagaaagagaaaaagaaaaattacataccagatgtgatgatcaccatcattacaccaagcttccatgcaaatagggcaaaatagaccatcaatttcactacgattccactctttctcttgagagccctcgcccaacgaagcggcttcctctgcttcattattaccctcttctttcagcaattctgcaacataagcgacatagtcgccatcttcttcagtttcgtcgtcttcttctgcttcttcattgtcctcttccgtttcgtcgtcgtcgtcttcttcttcttcgaccaaaatcagtggtggctcgctgagttcgtcattgtcctgattctggggaaattgaagggaatgagaatggttcgccattggagaagaaccaaggcaacaaaaaccccacacccggaaggagaaaaaaaaagcgcgcaacgttttttctttttcaattcaattggaaaatttgagagaaaaaaatgaattagccaaacagatttgtgaaatttgacacttttattctttctttttatataaatactacaaaacgacccgcgcgtgcggtggtcaaacaacattaaaaaagaatttcaatacatatatgttagggataacactattttaatcaattttttatttttaaaattataaaaagttaaaatattttcatgttctatcaaattatttttatttttttaattttttaattaaaaatctaaattaaaaaaaatatatatattttcaatattttttttaaaaatctatagaacacatatttttaaaaaaaataaaaattttatttttatttttgtaattaaaattttttaaacaaaaatgttacccaacgtcaccataataaatattttaagaaaaatataaaataaataaagaacaaattaatcaataaaattgaatgttgatttaactttaattataagaaaacagagagaaaaattaattggaacataagttaaaaattctaaaccgaatatgaagatcggattcaataataatgtatgatgatttttagttgttaattaattaattaatatttagaaaataaaatttagtggctaaaacaaaatatctataaatcttatttgataattttttagttagtttctaaatcgttttagaggattcgtataagaatgttgaattttattatgtatgaaaatttttaattgttaattaattaagggtaaataccatt

SEQ ID NO: 302132 - DNA, 3015 bp, Cannabis indica
aaatattggttttgtatataattaataaataaaattataaagacattattccattgtagagtaaaaatgaaattggaccatgatactaattactataaagaaaaaggaaattgtgattaataagtgtaagggaatattgttgtaattaatctttattatattggcatgattgaaatgttcaagtacacaaaggtatgattaaaataattgtttatatatatatgtatatatttatttatctattcaagaaaaaatgatttaaagtggaaatttgataggttttggaggttatctataccaattggagaaaccacagaccatccacttgtaaatccatttgggccatttagtagcagccttgagaaagtggaacttgatcctattttggttgtggttgggggaagtgacctactccaagaccgtgctaaagactatgcaatgaagctccaaaattggggcaaaaagattgagtatgtagaatttgaaggacaacaacatggtttcttcactattaatcctaattcacaaccctcgaatcatttgatgtctattatcaaaggctttatcgtccaaaattctacctgaattcgatgattcaaatttaagttaagtgcttttaatcagtctttctataaagagataaagagtatttgtgatgtgagttatgccttgaaagcaattatattgtgattttgctcaagtaataattaatatcatcttatttggttagtgttgttgctcattgtattattataatgatataatttattgagatttttgaaaaccgattaaaataaaagttgagagattaaataaaacaatagaaagtagagatagaaatttttacgtggtttgggtattagtgaatcttaatctacgagtcagacgtatttggttaagtagtcttaatatattatagtggagtaagaaccctggctttttgctatactgtttacaacaaatttttaaccctttgcatgagggtataatgtagtatttataggttaagatctgagctcgatcatacccatgacctgttaaggtttgcatgtaaacatgacccactaatagagtaaatatataaatacattgattgtgggcccatagaccgaggcccagctcgtggggtgagggtgatctgtatgcttggggaccatgtgatacttgacagatggcatgcgagtgtcgtctttgtgtattatagtgttagaataataatcgttagacaaaaatgaggtttcctgacacaagggacaatcccctgatttggtggattcagtgttagagggttgtcacgtcatcttggactaggttttcagggtgcctcttggaatgtccttctaaatgtatcccagatgctcatctagagggtcttaactacttctttttataagggcggaatgtcttttcagattcggagagatccagtctcagaggtaaatatcatgggccttggataggtgataggcacatccttccgtacattttctgtatctgtttgtagtagaatttgtcttaaagttagttatattaaaaaataaaattgttaaaaattgagcttagagtcttatttttactattttaaaaaaaaaaattattttctcatttaacaaaatagaaaatctaattaataacctttataaaatacaaggtccacaataatatttactgcttactttttatgtaatttttttatcttttgaaacattctatcagaatcaaattatatcggtcactaactattgtgaagaaagaatcgaatcatagtgagctaagtaagtgtcatcaaaatcaacaaagtttcatcatattgggtaacaaccaaagtccttagctgttattctcaatattagacgaatcatttggaaaatgattgcatttaatggtatgtttgctttggtgtaatcaagattagaatgaaatagatattacaattacaatgtttggttggggcttttaactttacattgtaatgagtattacactatttggatgaattctcattatatgagtatgacaaatgaatgaggattacaattaccaatatatattacaaaaaaacttttctacccttcttttattacttctttaccaaatgtagttggcaataaataaaataaggatattttggtcaatatattaattattcaattttatttttatactaaatcaaataaagaaaaatgattacaatgttcattacaaaataaaccaaacatggtaatagtaatcctattactattatcattatattccattactattcttattaccattacaatttcattccagtaaatcaaatgtcacataacttcttacttgttaattgaagaaacaatgatagaaagaaatttaggaaaagaaactgccgtagagcatgttagagaaaatacttgttgataagtatgcaaacacctcatctacattgattgtactttgtaaccaatctcgaagctaaacaaataggccaaaggttttcaagatcgttgattcattatattgatcttccatttccattccaaaccaaaaagtcttgtttttaattttaattttaactagttataaattgagttagaatttttgacataacaaaatatgtacacaaacttggcacaatacaatattacggtcgtgtagacctagatatcaagcataaagacatgccatgataaaaaaatatgagttagccaataatttgagagcatacttcaactccatagttaactgtattaataagagtaatttgcggcataaatacttaagtttatcttttagttgcagattaatatctaagttaaaattttgttggtaaaaataccttctgtcatacttttggaacttccgtaagagcctggctgttaaatgctaggtcagccctagatgttagtcactcattggtccaaattatttaatttttttttaaaagtaaaaatcatttttaatatttaaaaataataataataaaaaaaagctgaattaaataaaaaatatcaaaatcaaaacaaacctaaatct

SEQ ID NO: 302133 - DNA, 2106 bp, Cannabis indica
cttgaagcggggacgttacagccccggacccgaattctaacccaatcttgtacccaaacctgaccctaaacctagacccgatccacggacccaaactcggccaggaccttggaccttagaccctatacctggacctggacctccgaacacggccccgaacccagactcagactctagttctagccatggacccgacctcacccaaactcggaccccagatcagcccaaactcgaacctagacctagaacccagactgaacttggattggccctggacccggaaagcccaaaccgcaaactcggacttggacttagcccgactttgacccaaacttggactccaaaccccaaatcagacccagtcctaaccctagccccgaaccccatccctaatccacgaactcgaatccgaacccgaacttgaactcgaactctaacctaaaccaggttcataattcggatccagacccagactcaaccagcattttaggtcccgggcatctgggtccagagtcgtggtcgaggttggggttgagttaatggtaaatatattataattttaaacattttattaatacaagttaataccaaatataatattatactaaataatactaatactcacacaataaaaataacacaatctattaaacgagttcttagagaagtgaaatggcaatagcaccctaatgtggttaataccatattttgttagtgatgtaaatgaaaattgcatcatgcatatttatattcaaattaatatgagaatatgttatgtcttctaattaaggtatatagggtaccatattgtcttataagtagggattttcaccactgaaatggggtcatgtataggtaaccgccttgattgagactaggattagatagagacaaagataattttcatatcaatgggattctctttaatttttatttgtttgtggtagtatttttttttagctattataacatattggtaacttattttatatttatttattctgaaaattttttggctgtttaaagtattagcatagtatattatcattatttgtatgtaatttttttttagtatctttttagataaataaatctctttatggagattattcgtcccaatagagatttgccaccttacccccagtcgatgaagaatatgcgaggtatagggccaaggacgaagattaaaaaaacgctctatttccatccatactataataatactatttaaacattactaataacgccagtcaaataatgttattaatgtactttaatatcaaaatttatatattttaatttaataattattttattaattaaatacggtctcttagtggtattgaaaacaattgatgccttataacaatatttatgataaatgctacaagacactagtagtgcctatcctcagtacaaagtataatatcgctattaatgataattattcgtcaagtgccactttgtgctagtactagtcagtattagtacttaataacaatgttcaatatttactatttaccgatatatttagttgaattagacaaatttaaaaagattaattttaataagaattgttaaaaggtattgttggtacctagtatctttatatgtgttatatgattgttaatgcaattaagtatcgagtcttatataatttaacataataatatttagagaatattattaactaatcataaagtaatatagtacttttaaaaattattgggcaccactgataaataataataatgttcaattttaatatataattatttgtgtgacttagtatttgtattgaggtattgactattgttatggtatagaggagaagagcattaatgtcacctctctctctctctctcactaaaaaagcttaataagaacgttttttttaagtggagtagcaagagctttttgactacgtctctcattggtaccatttctttaatatctatttatgaattattaaaaacaaaagcttaataatatttattttaattatttacatacttagagcacttttattagtttctctattctatctttaaaatttgaggaaattataaattttgtaagtttttatatttttgtgtaaaaatatat

SEQ ID NO: 302134 - DNA, 3487 bp, Cannabis indica
taatgaatcttatctctgggcgtggccccgtggactagtaacaatctgaaaggattgttgaaaccacgtacaaaaatcttgtgtgtttttacttttatgcactgtttgtttttctgggtttctctggagttacggagttgcattctgtaactacagaaaactgttttcagtaccagttttattattccgcatttaattaatcatttaattaaataatcaaactgggaatattaaaatacggaatttcagtcttgaaataaacaaaaatttacaacttaacaaaaggttagagagatgtttatatagaagcacagagttaccaatagctcaactagaacaagttccctttagcatattgataattgtctcaaaatcactctcaatcagcacaaacgtatgcttcaacaagaccgctgattctagggctaacaaacaggccacaacttctctagtaaacaggtgagagaaattgagcatgttggtagccacccacaaaactgactccgtgtggtccctagccaaaaccaccactcacattgaaccacaaccaactttaacattacagttgattgacccattcttccgagaagagaccaaataggagacttaaccgtcatcggcgaagaaaacagacaagaattataatctgcatacacatagagatagattcaatacaatttgtaatgttacatatatatattttgaaccttgtcgttgcgggttttacagatcgtatccaccacaatcgaagcatataagaaataactcttggacatccactcctttagactacagactccaaagaaatttaacccaatcctaaacatggccctgaatttataactggtataactcctcaggggggagacctcgataggtgaatgacaaaattgcaataaaggaaagacatatatactcatgtataattctccatttatataaattaacatgctaaaattttttactaagtggccataaatggtatgggagggtgcatgcgttttagggattttgggttcgaattaatctcaagttgtgtaatataatatatatatatatatataaatattttaatagaaaatatatgttgaaaattcttgataataatcataaatgatgaagtactataatattttaaaatttaaattaataactaaattattatatagtttagcatacatatgctctttattgacatttcataacactttgaagatggtcttataagtttttgaataattctaccataaactcttcttctaaatagatatttcggtagactctctatttgtttcggcacctcgaagaactttttagttcaatttttttctaattgtgtatgtgatagttatttaggactaactataaatttttaaaaaaatttgtatagtatacaataccgataacatgatttacatattttattgtacttgtgactatttttttaaaaatttactggaggtcctaaatagcaactatgtacgcgaccattaaaaaaattaaattaaaaaaattctctaaatgccgaaacaaataggagattgaccaaaatgaccctttaacgagtttataaagaaattccttaaactttttcctcatctgcaaaactaaaccacctttattatgataagaaaataaaaaaaaaataactcacatattaacggtaagaatataatattttttttataaaaggtaagaatataataattaacatatgtagaatcataattataaaattattattttttattatatcttcataaatatatgtctattagatacatatttaacatttttttattcttgagttgagaaaaaagcacagtagtgatttgatcaaaatagccaaatcgtgattctcgcctttctaatgttcttctatctcttttgctaagcttggtcgggatttcaagattttcttacaaaaggctctccattacttaagttagacaaaaaaattgtgagaaggaaattaagagagtaacttagaaagagaatcgaccatttttctcactaaattatacctattaagatcatttagtaataaatgagggcaataatcaaaatcagttagcttaattgattcatcgacaatttgaatccagtcaaaatttcccgcttaaactcgttaggcttattgcttggattgatgatgttagttgaacccattctacgtccacctagtttgatgacattaatagagctaagccccaaccatcgattgatcccaggtattcttagtagttttggacgcacatgttcttggacattgttaagctttaccttccgttaatgtaccttgttgggatttaccttcattaatgagtaaggttcatggtccaaaatatctcgactccacaataaaccgagccacatgtctgccttagttcgaagattagagccctaatgaaatatttttgtcatgtgttacgacctttcatttcattattagcagccaccaatttcttacacttcaccccaattgagttggtggtgtttttattgtagtgtcctatagagcgtgcttggatgtgctttaagttttattgctttcttctgagagccaatgtttcccagtttgcaattcggttcggttttgcaaattttagtcatttcacttcaaagaaatcactcagctttcgagtttgccctttctctttcccaactatattttgaaccagatttctttgcttctattgaccttgtttatagctaatgacgtgtagtcaataaaacaataacatgaagtacaattatgaataaaaattgcaaaaactgtaaacgatacacaaaatctatagaggttcgacccctttcagcggtaatagtctactcccctttagttttatttctataggagaatatcaagatcacaaggactggctaggtgagttttttaatatctcttgaatgttacaaatattattgcagagcttttactctcttaagaatatagaattctccctatttagtgaaatgatttcactatttacaaggaaaatgatctagaatatttacatttaaaaattaataattacataaaatcatgagtatttgactaatcccacttttctctcatccttctaaattaatctcacaaaaatgttgggttcgttcaggattctcaaattctgatcatttcagttttaaaggctaaatatttactacacagcaaatgtctagaatttttagttgttgtgattgattttagcagacccgaaatatttagtcctgaggatgtatgaatctaagatattttctagatgttttcctgaagagttatcgtgatttccaccacattttatacttaacttgtcactttaggcagagcgtattttaaaggcattgtatcgaatggctctaatagagcttaaggagctaaaaattcaactttaggggatgttggatctagggtttacccaacccagtgttgttggaaattattttaccaggatcttggatctactcacaagtatgtttattaaca

SEQ ID NO: 302135 - DNA, 918 bp, Cannabis indica
atttccttaattagaaaataacttccatatataaaatattctaatatttactagataaagaagtttggttgaaaattagaagtgcataaccacagcatgaattttatttattttgaacgtaagattttattaaacataaaacactataaactagtagaaacaaatggttctacctccctaataaataagaaaccaatccgatttaaagaaacaatccaagcaacaagattatgagttgctcaatcttggctctcggcagccagacaatactaaaatccacataatcaacgaggttaagcaaattcataaatataaatttgtactctcagtaaggtgtttatctgttgtgggtgccatccaccagttgcttacagtccgtgaccaaaataaggtgaagccatctcctaataccacatagacttactacatagagcaaatattagagtctaggactcaaacacaaaagtcacctggtgtttaatagtaagtccctcagcaatcaatatcatttccttctaaatcaagtacaatgatggtgtctatattattttggaagtcaagaggaccctgtaagcaccattgctcgacgttaaagatatccttcagccacatcacattttccagccatctgccaatttcagcataggctttcttagagtaaacacaatcaatgaagaggtaattatgcaattctatatcagaatcgcacaccaggcaaagatcagaggggaggctcatgaatttgtataaacgatctcgagtaaggagctgttgattgcaaacatgccaaaaatatgaatttatgttttggaataataagcttattccaaataatctattgtacttcacatcttaagcttcaataagcgagttatagaaatgtttagcatgaaatttacctcccttttcagcttgaaa

SEQ ID NO: 302136 - DNA, 6429 bp, Cannabis indica
tttagaaaagttttttaatttcagtttttttttatctatcacgtatgttgtaattctttagaacctaactttaaaatttttaaaaagtttgaacatattacagtatcaaagtaaagtttaaatagttgtttactactaatataagaaataaaaacaatcacatatgtaacaaaatatttatactttatttttagcattgtaagttttttgaaattttttaaaatttactgaaaattataaataacaacacatgatcatgagaagaaaaaatgaaaaaaaaaaatgaaaaaaaaaaaagaaaaactctcctagatacccaaaaattatttgtgaaggtgtactataattttttttttaaggtgtactataaaattaacaatatgtaaaaggaaatcaaagtaaagcaaacatggtggatttttactgtagtgtttgtgtccatagatatgtcataataaaaagttgcttgttcatgcatccaaccagtgtgagtgaatgagttcgtttggtgttttatgcttaccaccaaaactccaccatgatatatatttgacttaaatcactagtaaattaattagtcaacttcatttaaaataaataaataaataaaaaaaaattaatcaaccaaactgactgatttatttttattttttgtaaggaattattatgacaattttaattcatttgctaatttcgaacccaaaatctccaccccaccttcctttcaccacttgaactaacatcaatcaattactcagtcgataaattaatcaactttttatttaacattttcaccattttagttaaaatgattatttacattactttcagtgaaaagcgtggttaccaatctattggtattctattcttaacatctttaactaaattctgcatcaacgcatatacgttttaacatgaataatgttctttgatcacatatattgctttgtagagcgagctagtttgggaggggatcttcaagatgtgtgtagcacattaacacgttcaccatagtggagtcggataggacatatattgttgtggaaggatttttgacaacaccaaataaaaatcgcaatataattatttaataaaaaaaattgtgagtactcaacctagaatggcgagtattcgaatgagactacactgacaaactggaaaaattgataaacacaatgaacacgcagaagtatggtggttcagtcagatcacggtctgcttagtccactattgcaaggatttctgtcatgttcttattcatactggatcactcatttatatacaaagcaagtgtccctttgattatatagaacttaattaattattgaaccgttttacattgaatatcattaaaattaaggaaaacgtaaatgaaataaatgaaagacagtttcaatctgttttactaaatacagcaacgtacgcaacatctatagtgcgagttgtctgttcagatcctcgcacaagctcgcgggcctagggtgtgtataggaataatgggtctcgtgctaagatatatgcgtcctagttgagtcgcatacacagatatcttattcttgtcgataactgaggatgtgtgagtctttaaacaggttatcaatcacgctgggtcatttggaccagctccctaagcaaagactcaatctttactaaatcgtaggagaagttttcgtagacatcgcatatatcttagtatatctgagacccgaacacatccttcttggtcctacctcatggacggtgtaataatacgactagactctatcagggtcgcatcatctcgctatgttttgttcatgcgaggtttatcctcgagcgatctccttctgatagctcagcaatcctcaaggagagtgaatccatgtgtcatccttatgggagcctgagctcgagtttctaggtgaaaaattcacactataacacatgcccctagtttcacaattgacagctatatcgtgagggaaactatgagagagaggcatgcgaatggttgtcacaagatggtgacttttggctgtcttgttgagggtttcgaaaagacaactataattattattttattcctttaagatgcaacgtcatcataatccttcggggtacgggcaggcgtgattattggtaaccattagattgagagaccttaggcattctttcgccacgtgtcttcatcccaataaatgaggaattctagtatttaaacttcttgatacaaaatgatccccattcatttccctctcattttccccattttccttacaacttcaaattttcaaagttcttttgaaaaatcttagttcctttcaactgagaacaatttcgaaggctgcaatacttacagaatcaccttggaagaactgcactccaaggttggtgtttaccttctctgtaatcgttttcttttttcctgagaatttgtatgtgttctatgctttttaggggtataaaatgcatgaaacaataggattcgccttttgatttttgtagtttaagcagaatactacattattctagaaaattcatgccagaaacttgaataatcgcgggtttcaggaagaatatttcgaatgtttgcaagtttttcgatgagcatcttgaatactcgcgggatttcctttgaatattcgaaggctcaaaataactttatttcactgatagctaaggtttttgatcccgcatattagagtctctaacccttaggccctttagtttttagattacttgtatttttattgtgaaaactatctaggttctcgaaatggtaggagtgtcacattaactcaatgttcatgcaattgttgcatgccccttgggatactcgatatgcccaaccatttcttgagacatacgattagttttcattttgctcgcattttattcattgttggaactgattagtttctcgaaatggtgggtgtttctctctgacttaatgttcatgtagcgacatgacccttgtgactctcagaaacacccagccatttttagagatacacggccagttctatgaacttttctgctttgatttttgtgtgggtgagggtacttaacttgtttaaattgcacttacaccacactaaaaagatcttctatctttcaaatgagtgacctgtcagatagccagagatatgactctgcaatgccttcctggatgaattaggaaggattgacagcttcatccccaccccgatgtttgaggatgaagttcttgtagccagaacccacgagggctcattatcgacgggcgagatagataggatggttcaagaattagctgaactagtgactatagaagtatgcgatagcgagtctacagtgtcagcccaaggttacctcgtccactcgaggcatgctccagataccgaggtcaaagagatgggtggcaccagctctacaggcaacctctcctcatagccataagctagagcgaatggggtttgctcagtggccatattctcagatatcttgtgagaccatagaacctctgagagtaattcaagccaattgccttttgccacttctaggtgcttcttcagggtgtccttgagggtcattttgatagcttctacctacccattttcttgaggattaatggtcacgataaagaagatttttatgatgccatgtcgtctacagtagaaatcagtcaaaatgtcactatcaaactgctttccattgtctaacacaatcttttcttgaagtttgaatttacatatgatgttcttaacaacaaagtcaaggaccttcttggaggtgatttttgttaggggttcagcttctacccacttagtaaagtagtctacaacaactatagtgaattgcacccctccttttgccttaggagttgaccgatcaggtctatcccccatattgtgaagggcctaggagactgcatcattgtgagctcgttgggtggagcactagggatttttgagaatctctatcacttgtcacattctttgacatagtccgtcgaatccttaatcattgttggctaaaagacccctactgaagtaattttttttttgataggctttgcctctagcatgattaccgcagaagccttcgtgcacttctatcatcaatcactcgacctcggccttggtgatgcaccttaagagaaacattaagaatatttgtgtctacattaatctgtctaggattagagacctagcaacttttcttctcatattttttgcctctttcttatttttaaccaaggctgcagtttagaggtaagctataataggtgtcatccaacatgccaaattcttttaatatagtaatgctttgttcctttaggaattgtatcgaaccaagtttgccttgtcaacaatgttgttgcttgctagatgggtaagtgcaatctgttttggcattttgttcccaagggatttgccttattgtatagccttcgagatgactttgaaagtcttggatcatgctcaagtaggccatcattcttccacctcgatctgtgtattcacctaggacttgtttcacgactagttaagagatgttgaatatgtccaggtggtcagtttgtacttcatgcgccagcttgaggctaacaattaaggcttcatattcagccttgttgtttgagcctttgaagccaaatttgattgctctgtgtagttgttgcccccaggtgttataagggcaatgcctgcactgaaaagcggtcagtgcaacttccataaacatggcgtatccatggttattctttcaagttttttgctactactctttgctctcgcttgttctctagctcttgctttatctcctgaatattgagagattttcaagagatgtgtttttacactcttccacaaatttttcaaggacttgaccctttatggccattcaagttgatatgtgatatggaattggccaagttcaatggcccaattgagtagtcggctagatgcttcaggttttgtaaaacctactgtaatggttggttggtgtacacctttatcgggtgtgcttggaagtatgacgttagcttttaggatgccaagagaaagttgtaggtcaacttctccatacgtgggtaccgacttttagtgttgatcagtttctggctaatgtagtatctagggtattgtacacaatcttcttgtcttgtcaggactacactcacaacattgtgactggtgggtacacgcctaggtcttcattgtctaggggttttgacaacacaagtggttgagccagttgttttttcatctcctagaatgctttcacattcctctatccaatcaaattttttgttgcctttgagaatgttgaagaagggtacacatttgtctgtagaattcgacgcaaagtagcttagtgcatcaatacgtcctattaagctttatacttccttgatggttatgggtgacttcatgtttgaaagggcatggatcttgtctgggtttgcttttattcccctggcattgactataaagccaagtaatttgcctatgcctactctaaaagaacacttgagtgagttaagcttcatgttgtacttgcgaaggaccttgaagtatttctctaggtcttccacatgcccccaacaattttggacttgacaatcatgtcatccacatacacctcaatgtttcattttgttcacaagcctctagtatgtggcccttgcattttttagcccaaagggcatgactttgttgcagtacaggcctaagtctaacatgaggtttgtatgcttctaatctagcaaatgcatcttaatctagttgtaacttaaacactcgtccatgaagcttaggacttcatggtcagctgtggcatccaccagctagtcaattcttagaagcatgaagcagtcctttggacatgctttgtttaggttggtgaagtcaatgcacactcaccaccttttttttttttggtttgggcaccaccacagggtttgatacccaaagtaattagaattattcagttatgaagtcattggcccacagcctctatacttcatctctgagcacttgggcatgttctttgtccaacaacttccttttttgttgtacatgtcagaagtttggattgatcttgagggcatgggtcatcacagaggggtcaattctgaccatttctccatgtgaccatggaaagaggtccaagttttccctaggaaattttattagcactgattttatttccagtgctaagcccttctcgatgtacagtcttctatttggagaagtgggatcaacctccacttcttcaagcttttctacaggtccaaatttttctgcaggttccccaaagcaacaatctatgtctacatccccgcattaggttggacttcattgccctttgctaggctcttcttcaaagctcttggcaggaatcttctctttcttggccttggacagggccaagttgttgggttttatgtcctaaataaaacccatt

SEQ ID NO: 302137 - DNA, 2959 bp, Cannabis indica
agtattcaaataattaaatttaagaaagtaaaagtatattatttatatatttaaactttaaaatactatagtttaaattaattttatgaactttaacattaattaacaaaaattaattgaataaatattcatcaaaatatagaaaaaggtaataataatataatatggtgtaaattacttcaatacttaaaagtaataaaaactattaactataaagtctaaatttcatgttaaatactataaaattcaaattttaaatacaaaataatttcactaataaacataatttatttaatatattacatatattttttataaaaatttatataaattgatttatttagattgagaagtttagaataatttttaatctactcaatatatttatattaaattatttggggttacattttattaggtttagtcggtttgatttaaatagtttattcggatgggatattttgtaagttttttttaacacccctaacattactttgtttaggggctttactttagattattattattttttttttgctggattgaaaaattatttatttatatattgtagagggaccggttgttggttggtgacgagttgtgatgacatgtcatcacaaacctttcaattaggatccaataatagaatagacagtgttgtggtgaggtgtggtccttttctttgtatagcaggaaaatcatggcacgccacgccaggccgaaccaaaaatatcaacccaaaccaatctcacttaaaaaacacagaaaaagtaagtaaaaataaagaaaggacactaaagggtcccaccataccagctttaagcacatcaacgacagcatcttcaggcgactttgcgaatccttggttgtcgtacatgatcgaaacggcgtcgcagtcggacgtaatgtacctaaatattatataattattatttttagtaataaaagagacaagagtagtcaaagataaaaaagaaaagcataaactaacataaatgcacatataatatacattacactattcttcatagttaaatagttaatattacccgtgaaatccccactgggctcgagcaatcttagataagaggttgaaatcggcacagtttgggaccccattgacacggttgtaagcgcacattatcccacttgcttttgctttctctatgcagctttggaacggaggctggtacgtgtcagctaggtcttgctgagtcacctgttttgttttaataatcaaaatcaaccaaccaaaattcacataatccgctcccaaccccatcatgatcttgtattattttttattaattaacaatataatttttgtcgaatgaagttacttcttggtgctctgttgaagaaaaagaatcccttaaatctcgttttatttttattgtaatgtagaataataccattgtctttgaccgagacaatgattctacttttatatagcctatagggtaaagtaaaacactaccaaccaagtaccaatgagttactctaaaacccatcattgtcgagtcatttctcaatctgggcacatagagcaatgaggaaaagaatgatctttgtttgaagaagttttccctaaatgcaaacatttttttatggtgataacaagattagaaagaagtaaaaatcttacatgagcatcgaagacaaaccgattaatgcctttccaattgtccaaatcataagctgtaaaatgcttacaacaagctgaagcaagaagatgagcaccaccaagcttgcctccttcaaatgagtccccttgtacacctcttacatacgacactgcatatttcccagtcaccaccggatcttctcccggcgtttcttgccctcttccccatcttggatctctaaaaatgtttatgtttggagcccaaaatgtcattccttttgcttctccaccattgtacacggctctcgcttcggttccaatcacctataataataactcaataatattcattcatcatcataaattaaaaaaagagagttgagttgagcattgactcacctggccgattcggtaccaaaggttggcatcaaaagaggcagcggtgagaatgacttgagggaagctggtggcagagtgaatggctccgtcaaaccttacgccgggaccggcatcggccacaccatgtaaggcttctgaccaccactcgtaagcggggataccgagtcggggaatggaaggggcggtgttaacgagttgggatatcttctcgtctagtgtgagacgggagacgaggtcctgaaccctgcgggtgatgggcaactctgttttgcagaaaggtaaggactttgtggtagggttggccgagtcgcaggcgtaaggaggccgagttgactcggtcaaaacaagggtagtagtactagtgatagtgataataatgaggataacattaacaacatagacataacaacaactggttggagtgggagagtgagtgaggaacctcatactagtcatggcgtaggaatgaattgaagaagactgagttagataagttcatacttatagtgaactcaatctactactactgctctgctaccatcgttttagttcaattacaataatgtcctctacttttgtttttattattttttatttttccttaaaaatatttttaaaatgaaacgaattaagtaataagaagagagagaagctatgaatttggtcgatcttttgattctataaaaaaagttttatttatgtatcatgaaaaaaatgcaataatgtataatctgaattataaattataaattatagtgattttgctttctccataatagccatctatatatttatcacttgccacttactaaattttgaatggaaaatttaattttttaatagggaaattattttatatactgtttttgtaattttttttttaaatttacggtttgagtttctaaaatgactgcaacactacttgcaataggggtt

SEQ ID NO: 302138 - DNA, 3109 bp, Cannabis indica
ttttattttaaagccaaaggtattcacatatgcaatttgggataagttgttgaaggcttaggactagaatataataattttttgtatatgtaattcttttcacgattactttacatctagaattagagctagaagagaaggaatacaaataaaactattatattcatggtttgtcttttagtgttgagattcttttaacacgatgaaattgatgatgactgagaaaaatgggtttttatttttaatgattaggacgaaaaatatttctatgtaccacattctcttgttcattggtcatcttattaatatgtgttcttgtgttgtaggttggactggactcttctgtccatgtgtcttgtttggtcgtaatgttgaaacattgagagatgacattccttggacgaatgcgtgtgtttgtcatgccatttgcgttgaaggtggaatagcacttgcagcagcaacaaccttccttcatggtatagatccacatacttcatttctcatttgtgagagcctggttttttcatggtggatgtgtggcatctacaccggtctttttcgacaatcgctacagaagaaataccatcttaaggtgaaaaaatttcatacgtaacacgtagaaaaattcttaaaggaaagttaggggatcattgatcattggtgattttaactgcaaacaaaaatctatgagatacaagtgtaaattttgtggtgaaattctatttatatttttgtgtggggccaaaatacttgttgtgtcctatcagttcataacatatattgaatagatacttttcctattggatgcttactcgttgtgctgattacttgtagaattcgccttgtgatccatgccttgtgcattgttgtatgcactggtgttccctttgtcaagagcacagggaaatgaagaaccatctctcagacagtgctgcttcacatatgaccatgattaacccgcctcagcttcaagagatggaatccaatgaaaacaatcactctgcagcttctgccccatcaaaacatggtgatcacaccaacatggagatacagtctttgtaggatttgtgttctgtcgtatagatttttcttctttctgttttccttctttcatatgttgattttattaggcgcgacaacatcaaactttatttttcttcaacaatgagagaacactcattccattccagggtaagaaggggtggagatacacataagcagttgggttcacacaaatttgcacagagcattttcagtagatagaatgttatttcaaaaaatctttttctttctacaatatattttttggtctgtaatacttgatcaaattcctataattagtttatacatttctatataactagatctcttcatgatcaacttatatgatacaatgtattatatgatgggagtgttattttacaaagaataaacaaataatcattggatatgcgtgcctaaaaccctacgtccactcatttcagttagattttcttattagttgcttgtatcctgaaccaaactaaagctaatatatgattcaagtaattaccttgtgttacttagtatcaatcaaatttcttcttagatgtttgattcttaatgtcacatacgggtagactaaattgtttggtgattacagtgtctgtcttctcaaaagaacgagattgttgatggaattccatagatagagttattaagcttgttattatttttcctatcctaatacattatgttgaaacaattgagacatagagaatttgagagtgaaaacaattctatttcactatgagagaaattgctctttatatacattgtacaatcaagtaattagcttaacttagctgaagagaatgtaaaatagttagcttacaacacaactggaaataatagaattgacaactcaacataaccaacttaacaaactaactacctaactgtcctaagtcctaacacctcctcatgttgagctaggataatgaaactagactcagtttgtctcgaagaagagtaaattgagtgttaaagaggggtttagtgagaacatttgcaatccaatcttgtgcatgaacatgtttgataagaagttgcttgttgagaatctattctagcacaaactaaaggtgtagctcaatgtgtttggttttggaatacagaactggattagcagacatgaggacagtgctttggttatcacactaaatgttagaaatatgtagctgagtgatgctgatttctcctagaagggattgtatccgaactagctcagttgttgcattggccagactcctatattcagcttctctactagatctagaaatgatcctttgtttctttaagctctaggaaatgatattgcgaccaaggtaaaagaaaaattgtaatgtagagtgcctatcataagagtctgacgcccaatcagcatcataaaatcctgtgggttggaaagtggaccaggcttgaagatgaagtccatggtctaaggtgcctttgagatgtttaagaatcttcttcaccatcttacaatgatgttccaaaggtttctacataaactgagatactttgttgacaacataggaaatttgaggccttataataacaacatattgtaaattgtactaggtaactccatattagagattccatactttaatacattacagtctagttttacttatatgatatgatcttaattctgtactcttaaaagatcatacactctttatatgaataagaaaattcatgatatttattaattattttttaataattaatatagttatttataatacatttgtattttatatattcaataataaattatccattaattacttactttgagggtataaatcccaacattactctctaacgctccaactcttggacaaggcaatagtgagaataattctgattattgtaggcttaactactggactgaaagtctcagtaaaatcaaacacatattgttaaagatagccctttgcaactaactttgctttatacttagcaatagaactatcaggttggtatttgatattgtaaacccatctacagcctatggctttcctctctttaggtaagtgaaaaagtgtccaagtcctatttt

SEQ ID NO: 302139 - DNA, 585 bp, Cannabis indica
aaaaaaaaaaattgatggatgcttattatattcttcataaaaaaaacaataataatgtagaccaacatataaaagaatttggattataatttcttttacaccatacaaatcaaacaaaaatcatgttaaaaaaatttcctaaatataggacaaataatattcttctcccaaattatgacccttgtgaagtttgcccataaacttattttttgaaaaagaatcttctgaactacaacaatcattgcaaatatgttccattcgattgcatttcgtttatttttttaaaacaattttttataagattaatgcgacgctaaaatttaacactattcaagagtttggaaaaataatacatatataaataataatctaacaataaaatttagtaatatatatctccaaatcttagagatattaatgtttgcatgtttagggtaaataaacataatttcaattagcctaaattagctacatcaatcctcttatcaggctcggccctgggcataggcgggctaggcctgtgcctagggcccacccagtccaggggcccaatttttttttcctcttttaaaattatacaatttt

SEQ ID NO: 302140 - DNA, 1479 bp, Cannabis indica
aatatataaagatatataattttttgtaaaatattttttctagtgaattattttctttttattattcataaaatgttattatttgacactttaagctgtttaatactatgcaaatatgagatttaataattagttagcagttccttatattattccctaaataaaattttataagatctaatattgaattgttgtcgccatttatagtgtttaggacatcctttaacatttttttttatcatctctaataaatagtgtatattttgagttaagaaaataaattattttcttatgaatgactcatccctatttatgatggtgacactattatgatgtttaacacatagtattttcttatgactgacaattatttttttacaacagagagcgccacctcattatagttctaaacactatggtgcttaataaaaatattttttttttatatatataaaaacgcagaaaatcattaataactcaaagggactagacttggtcagtacaaatgaccgcagttggaataacatctagttctaaatctccgctggtgaggctagcccatcttgcaagattatgggcagagtaatttaacgacctagacacaaaattaaagttacaacccaaaataagcttccacaaatatttaacgtccagaatgagattactaatctcctaaagatgattttctccattcaaagccttgctcaccaattgggcatcaccttcaatgatgatgaatttatggagtttggtgacaataaaagagagtgttgttagcactgccttagcctctccaactgtggcattaggggttgagaacaggcaaaagtgagcccacaaaattacttttgaattggttcttacaattgcaaaggcaacccaaagcttatggtgttttgctacgtcaaagttcactttaatctaccccactgaaggaggttgccaagtggtcagaataggggagagtcttggagggctgagagcttggttgaaatcattgaaagataaaagacaatggctgggaacttgttcaacatttggaatcacttgctcgtgaataagtttgttcatgcaacacctaatgttatccagaaccacagaagcataaaccagaaattcattagcacaaggaagggtcaggatataattgaacaaggccggacaattagggtgagcactgtgcttggggtgatattccaaggtcccgcaaaccaaagacaacatgcaaactcacaaaagaggaacaagtggttcaaattgaaattaacaaacaatttaattaatgcagaactgttgtaaaattatttgaatagaattgaaatctgatctatcagaaaccgaacctgatagattagaattatactgtagaaagtaaaattgtagaaattaaaataacacacgatattttgtatgtggtatcagcaatccttgcagattgctactagtccacggggccacgcccagagataagattcatta

SEQ ID NO: 302141 - DNA, 1458 bp, Cannabis indica
aataaagaaagaaagaaaaagaacccctttagctagctatacacattaattaatcaatattagtactataaaagagagatgaagagtggtagtagtttgatcataggccatccaatcatggcatcattagaaacccaaaagccttatattgctatgattttttgtacaagttgtttatgcaggcatggctttgttttccaaggctgcaattgctcaaggaatgaatccttttgtttttgttgtttatcgtcaagcctttgcagctttcgccttggctccttttgctttcttctttgaaaggtaattttttttgtattacgacataatactaataaatattatttgagtctcgggttcgaacccatgcactttccttttgtcccatctctctcttaccactgagctatagctcagtggtaagaattataatttttataatatatatttatgtatatattaattaattaattattgcagtgggaaagtgactcctttgtcatggggtttggtctgcaaaattttcttcatttccttgatggggtaatataaatataatcattcatgaattattaatatatgtaaatatataatttttatttatttaatattgttttaattttattttgaataggataactttgagcttaaatctctactatgttgcaattaatttcacttcagcaacatttgctgcagccaccactaacgccatcccagccattacttttgttatggcagtattactaaggttaattagttataattaattaattaattaattttgattaatttaatttaattttgatgagatgtgatgtgatgatcagaattgagagtgtatgcataaaaaatgtggatggtgtggcaaaggtgatggggtcaattgtgagtctatctggggcattggtgtatgcttttgtaaagggtccacagttgaagttgatgaagaataattggtatttatcatcaaataataatgatcatgatcaaaaacccattaattaccacagacatgaatgggttaaaggttctcttatgatgctatcagccaacactgcttggtctttatggctcattttgcaggttcaatatcatatctcttattaatatatattatatatgtttgttacttattattatcacttgagtgttattatatttgatacatatattacataaggtgttggattcaatggattctatcataaatgtgttgtacaaaatagtagtgatctgtgtgtcaagtcaagttaataactatttgttttttcagaaaaaatgttacaatttgttaaaatatataaggtgttaagcacttttaatgacattattaagaaaatttaaatttttatacttaaccctcacttttatattatttaagttggaattattcgtacctaaaagaaataataacaaaaaaaagttaattcagaaaacaaataaaaaaaaaataaagtt

SEQ ID NO: 302142 - DNA, 3276 bp, Cannabis indica
cgacttgctctatatgctcagtttgaagacgaggtttcagtttcacaaagcaggcaataattgctatttacagcttatttatgaagtagttggatgttctagtaattggcatatgtagtatagttgccttaattatttcttcttcttctagttataacaactaatagcgcctcttttctttccttctttcatactgtagctgaggtgttgcaatatattaatgatgccatttctttttactatttgttacattttcttcttgtttgagtctcttcttgctgtttagtattaaacccaataggtactcacagatgcacatatgcattcattatgttgttaatggtgtccagacatgattgatttctgtaatgtgtttccaaatgtttcttgttatgtttttcatcaactgcatatgactcgtttgatgtgtatatgggtatagaggtacaggcatggtcatgctactgattttaaggatgaaaactgtaaggtctatggtacttcctgtatggtgtgtacctcatcctaatttgaaatgaacattggggtttcgattcatttgtattatgttgtgtttccttttttctagtggattacccgcgcttcttctatggaatctgatggtgattatgtatttgattaattttgatacttcatcttgtttgattctttgttgcttttttccgcctcggttgggaggacagggcatgttttctacaaggacatgcatatgtactttaattccccattttttcttttatgtacatactataatgcgtaggttttgcttttgacagcaactattttaagtgtttgatttgagcatcagcatatcatatatctttattgtattatgtcaaggatttaaatttaatccatttttttttctttttcgtcttattttgtgatatttgcattgtttttttaagggaatttgggtaaaaggtttctttctctgtagttagttacttgtaattgttcacacacactttttcatgttcagtgatagacttagacatatcttatatattttatttttggaattcttctaacttattcctgctttttgttccctaagaatttgtttgacaagtttgttttttcttttcactgcaacagagagctgatgcatcaactgtttggaaggaatatagttctccagatggaagaaagttagtatagcatgtcactatcacaacttagtctcttgtttgttttgtgtaaatctaatatattagaaggttagaatcccaatgaaaatgaaaagcccaaaacaatctgaatataacaccgatcatttgaaaccatcctcgctgggtttcaaaacatagagctctgaaacctacacctcagtagattgaggtgtaggtttagaatcaaacattcgaaacttaagactcaatactttttttggccacctcaaacgaaactggttttgaggtgtaagttttaaaattttttaaaccatggttactatatctaatattttgtatgttaatttttttcttcttatatcattaagctgtatttttttttttttttcttttagagcatgtttggtagaagggaatggaataaaaatttgtattccattgtttggattttaagctctagtaatgcctttccattagaaatacaaatatctattccactcttcaacctattgatagaaatattcattactaaataatttttaaaatccaatgaaaattactattttagcctttctcactcttaaatttaagatatatgtatgttgaattttaaattatatacatacaatttagtagttaaggtattcatccatattattgttattattttgcttaattcaatatgcaagatcatttttattaatattttagacaaatatttctgttaatacatctaaaaagatttacagaatttatgagaagttatttttagtctattataatttaaataattacttttattatacaaaaataataattcaaagtgtctaatattgttaaagtcataattctctctttttttttctatttaaatttctaaataattttaaaaatatatataaaaaatgatgatgtaaagatatttttgtcaatatactatttatccgttccatttcaaataaaccaaccgtcatgttttaatttcgattctttttccattgcatttctattttcattaccattccaattccattatgctaaaccaaacacaccaccacagtattatttagtttttccatatggcagaatacattgatcagatctaatttgataatcaggtattattacaacaaggttacaaagcaatctaagtggacaataccagaggaactaaaggtatttctcatggctcagtattcattatgtgtgtgtttaagtatgtatatagattctctaatgagaaacactcgctttttagctggctcgtgagctagctgagaaagaggtagtcatggatctcagttggaaactagtataatctctcatggttctgcggctgcggcttcagctgaaacaccccgccagttactccggtggccttaactacctcttttgcactaactgggattgcattgagcccagttgctgttacacctgttgcttccttgcctaattcttcagtggatgtttctggatcttcagccacccctacttcacagtctactgtaacaggtagtgttggagttcatcctcctatggtaactgcggtttcctcgactcctgtaatttcaagaagtacaggagtttcatcttttttgaccaatgccaatgctacatcaatgtatgtatttgtttttatgcttttcacttccactttgtgatgattttccagatcttaagtagagttttagtttgaatgctcttcctaatgaaacttgctaaatttaggagcacatatgagaatcaagcatcacaagatattgcaagttcagtggatggagcttctatgcaggatattgaggtgttgtagattcacaattggaatttctaaagttgaacagttcattgaagtttaagatggcccatatgtctgaataatatgaaaactcctgagagcagtctactatctgatagtgattattcatttatttgttgataaaaaattatttgtttttggttaagatacatttatgtgggggcttgaatccttaagtaccacttatatggactcacgcacccaactactttagctatcccatggggcttaagaaattttctgatataagttagtaacaatatatgcgatattgaaattttctaatgtatatattattattattat

SEQ ID NO: 302143 - DNA, 2837 bp, Cannabis indica
aaaaaaaaaaaaaaacctaagaccacagtttaggaatagaaatccaaaagcataaatgccaaacttttaacgttaaagattttctaaaactctcaaaatggagggaatactctcccactgcaacaaccaattggggaccaactcgaattcattatctcggtaattttaggtaggacattacattcgtataaagaagtacaaaccattctcatctacttcattgatagcaataactacgttcgaaaccctcggcaaaaaagaaaaatcatcataaacaaaaagttgaaatttttcttagatattcaagtgtttctaagtacaattgaatcagattagaataagaccaagtttcaccgcatcgccataactgaatttagaaacaaaaactagttaatagagatgacgtaaaagtcgcgagatgcatacgtctccggttcgatcaggcaattcgagggaaatcatgtgggatttgttgtagaccgggaatgactctgatgctgcctcctcgtacagttcatcgtcatccaatatcgcttttacatctgccacagaacaaaacccgcacgaaaacagcaacacgagaaatttaaaatgtgtatctcgtagtattattcatcaaatcattccacaaagtaaatacatttgagagtgaattgtttagagaaaattgacctttcgcaacgtattggatttcaccaggaggtgagttgaggaggaaccatttggctatatctttcttttgcgtctcgtttagctctgattcttctacgtccgccatgttttctcaaactctcggtcgtttgagcgctctgatttgaacagaggagaggagagagagggagcaatgtaatatccgctctgttgtgaaatatttaaagcatcgcagccgttaaaactagtgggacccacttactgtcagtgaaccctccggaaatcaccgtaggggattttgttcttgccgtaactgatctgtaaaggtaaattggaatgattttgattggtggcccggtggtttacgtggaatttcgagtcaattcttcggatgatcttgaccgtttgtttctcggaccaaatcctaaatcttaattcactcgagattattagtattattattaggagtttttaattattattattattaaattattgctattaataaataggatgaaacgaaaggaaggtagtataacaatacttcgattaaatattggtaaaatgttcagcactttcttttattttattaagaacgtaagttacgcctcgtctttaaaccaaaatcttttaataagaaaaaagttaataaaacgacaacgtttgagtagtatatatttttatatttgctaaccaatataaatagcatatcttggcaaggaacctaccatatgcgaagggctgtttgcatatggcatttgcatcataaaaggcaaacatgttcttttatcagcatgctttttcatttactttttgagctaccgattgtacattactataagatatgaaaatgaatacatgtaagaataaaaaataagaagaaaaagaaaatgaatacatataagattttaaaaaccaacggatcccaaatcccagtctacctacttctcttgtttcacttttaccttgcttcatatatcgtcaatgggtatcaaaatttgaatcagctaaatgcagttatagataattagatatattttatatgattacgatgttgaacaagtttcaatatattctttaagtgggtcattgtctcttcacatgtgccaactactataacaattgacacattagtaaccacattgcagccttacgaaaagcatagaacaacttgcatagcagatgtgattgtttgaatgctttgtctcgaaacatatccacctgtcccaagtgcttattttccccccaaaacaaatttaaacatgtataatggtgtaataaaatatttaaagcctcgactatacttagtcttcatacctgactcatattttgtaaaatcttatttaccaacataaactctattttgtatcagttacgagtgcttcattggtttgtatgttagcagtattttagttgtcttagtacattagcttctaagaattgcttccatgcttgcaagggaccgacctcccgatgggtggtggaagaaatgttctgtgctttacgattcatgaataagcctctagctgcaaaacccatcagctctgatgggtccacaaaactccgcatccttgacccgataacaccatcataggagaacccaactctaaaataccgatcaggagttactacttcatcctgttgctgataacttgtatttggctttgctttagtttcttctatggatgatgcttcatagtcatcagaagtaaagctctccataccaaatgactcccaatcgacctgctgcaaaatcccagcagctcgttctgcactccttccatggtggttttgtaattcgagttgttgttggagagctaactggtcaacctgaactttcaactcatgtaattgacgaccaattcttgaagcaacagcgtcatatagttttcctgtagattcacttttggctacttcagcatcgagtaaatcatcaaaatggatagggtcaccgataagtactgttacctgcacattccaagtaatacatgcaatttaacttttcatgtacatcatgttccaataaacaactgacttgcagaaatttaggtgatgtttggttggaggtatgaaatggaatggaatttgtttcattccttcgtttagttgcactttaaaatattggaatgtcattttaatggatgacttttccatcactttgggggaatgactatttcattttaaaa

SEQ ID NO: 302144 - DNA, 1185 bp, Cannabis indica
tagtgggatcgtgtgtatgccatatccacgtaaattgatccttgagttataggtattgtgctgatgactcacgatgcaaaagctaaattcgctaagtgttggttgctctgcgcggattgctgaatactttgctctgggcatgccagcgaggcatcctgcttggactatgcttcccgagcagatgttccaagtggattccacgtgtcaccattcatgtgatgccacgtcagagtgcaaaaattagaataacacattcattgaattgtcattaagtgattacaagtaaagagctagctatatatagtagctgaaatcagttacaataataataaactgtaacaactataattaaccaactctaacaaactagttcactcaactaaactaactaatacactaaccaacctctaactcttagacactttgataatttgcaagtaccatatatgcaatagagtaaatgatgataagtgtaaaatatctcaaataaatatggttataactaataaatatagaagaaatatttactaaattaataatataaaaataaaaaagtgtgacaaataaaattttaattgtttagaaatgtttaattacttgttcgactaacatattttttttttctagttttcctaatgtgatgactatttcttccaataaattttctctccatttattcctatcaaatttatcttccacattctttgtttttttctatcttgtctagaccgaatctatggttttatttttattgtattattgtctcttcgtttacttaaatttattctaatacatatagtttgttttaaacaaaaaaagagagagtaaaaatagcaagtgaattaattttggggcttttcctacatatattcaaatactaggttgatgttacgtgcaatgcaggtatagttagtttttttttttctttttttttttaaaaaaaaaattaggttcaattagttgatgttaagtgcaatacctgtttaatttttttttaattaggtattatattttttttttaatttttaaatggaatttgaaattttgatctttaagaaaaaaaaagttatattgctgtgtcggtgtgtcatttggatttgattatgtatatacgtactcattacaaaaaatcttacttttagcttgtcacaacaaaatttgtgactagtagtaaaaatattgtga

SEQ ID NO: 302145 - DNA, 1558 bp, Cannabis indica
tttttttaaaaaaaaataaagtaatctattgtagcaccaaaaacataatttaaacaatcagatatacaagtgtaataactattataaaacatcgttaactatttataagatactacttctaggcagtgttagccacctttgatgcctaatagcaacgctcttttattttaacacttttataatctaattttttgtatatgattatataatttctcaattatcgaaaaatataaatataattacagaaatgaaaaaaaaaatgatacttctactataaatacttccaatattgtattactataaataattttttacgattaaatttttttatttacaaaattataattttaaagttttaaaattacaaaaaataatcggcaaaaataaagaaataacgaaaaatcaattccataacaattataaattaattataaataaactataaataaaaaaattattatctttacttaaattcataatttcataaatacaaaagtaaatattataatagtgaaattttttcccagttaacatattttagtaatatgtaattatgtatgtatatgcacatacatatagatatgtatgtatataataaagagattactattacttattgtggtgtgaagaagatagtagatgattggttaagatgggaatcttttttcttatattaattatattatatataactttgttttgtggaatgaaagagttttcacatttgcagactgtttttgctgtcttaatttgacagttggctttctttctcaattccacatgaaaacatttttcacaggccatggacactattcacaattcttcttcttatttctataataataactagtacaattttttaatcattcaacatataattttgaaagacaaaaattctcttagtttcttttggaatttttcataaaattatttgagcaagtgcatgtttggtaaatggaaagtaatcatttcaacacagctattgtgtaaatttaagaatgtgacaatttcattggaattatcttatcccattttattcctaaagtaaatttaaaaactgataaaataaaatattacaagtatgatctcgaaataaaaatttagacaaaaaaaaaatttacattttaattcatcttcaaaaatttaacagtatcgaacaagtatatacttagattagattaagatttaatgtactataaattatctttgatgtatttaagctttcaattactttatgaaccgtcgattcaatctaacaattaattcgactgaaatgaacataatgcatctcttaatccattttattagtaccttaattaccattctaaattatattctttaaaaactaacacgaaaaagaaaaagttgcattgcatgtaccaaaaaagttcttcataatcccaaagctaaatagcaacataaatacttaaaagcttcaagtttgtaagtgatataaacttatgtttatttttagtggcataaatatttaatatttataaaaatatagtttttctctaattttgtcagtacatgctctgttattgtcttaaacatgaca

SEQ ID NO: 302146 - DNA, 2716 bp, Cannabis indica
tttttatctattatttaagttacaaaaaaggataactaaattcctagaaaataggactaatatctcgatggaaaatctatattttcatgggctgttgggcctgtctcgcaaatttgcttagctgttcagagttgtctgcaaaagttggccgaccaaccctatttttagggcttggctagcgtatgttctcctatggccggctaggtattgttcttgcagcctcagtatgtaatgatatccttttaaaatagggatatttacatcttttaatctattatttaagttaaaaaaaaggataactaaatccctagaaaataggactaatatctcaagggaaaatccctatttttgtgggctgttgggcatctcacaatttttctcagttgttcaaagttgtctgtagaagttggtcgaccagccctatttttagggtctggccagcctatgctctcctatggctgaccagctatttttattgtagtctcggtatatgcctgctagctttttatgtgccagccagccttggtatgtgcctaccagcctttctatcttctttgtatagctttccttgcaaaggtcaagcttccttagtcaaataggcctttttgttctaattgtcactctttggctagccaacttattctcaagacctaaccgacctataactttcctttggtcgaccaaacatccttcctttggctgactagacatggttggcaaggatcctggcggtctgcttttgctcttttcgcaagtgttagtctcttagtaattgggggataagcgctaaaacttctatactaaagctatcttctagcagcgagatagaccattgccgaggtgcaatgtgttatagcttgtgcctatggcattcaagcataagtccaatccatagcaaaagcatgatgaatcactactaaaaagtagttttgaaaaactagccagaagagtgaaatcaaaggttattggaggacctttctcaatgatttcaactcatagaacctcgttatgaggcttaaaaaactctaaaggaggaaaaaggaaaaaagaaagattggagtgtaagtacaatgtcctgtacttaggaggaacttagtagccaaaggaagatcacaataggggcaacgtcccactcccagagggtttccttcaatcaagaagaaagtagcactttagatttataaacttagttacaacaatcacaagtgacctcaagtatttatgaaatcataaaagtgctaactcaggtgtgcaaaaagaactaggagagactgaagctacaatcgatggcatttttgacatagatagttgatagcttcttaggacttggttgttatcaattttcttgccatagttttttgttagttgacctaatttgggtggcttatattcccttagccatggtgacctctaacaattttctaggtgtagatataatctgtaatgcagtgtgatcaactcaattaactcaccaacacatgcactagcactttagatttatgaactcagttaccataatcgcgggtaacctttaacattcattaaaccatcgaagtaccactgagatgtgcaaaattcatgttcatatacgatggtgcctgcatgccctaagtgatcaaagaaatccttttctttggttgcctgccataccaaagtacaatttgaatttccgatcatgagccttattggcatttgtcaacatactgaacattaatgtcactcgttcagagacttgtgacttggcagtgttaaactcactatagagacatccaaggttatttcaagatcacatatccaggctggcctgtgaggtgaaaatgattgattaaaaatgaagcaccaaaaagagataatctagtgctttattcattatattaacaatcaagtgctatgagacgacaatcacaggtctctagataatctaaaaaaataaaatgagacaacaatcacaagtcttttttttcaaaaaaccttatatgctacactagtgtagggactatcacatattaatgatgtgaatcctatcaatcgatagagagagattgtactagatctcttcaaatcaataggtaacttctcatccatttgtaaagtggaaagtggaccacagttgaagaaaaatgtgattttatttatcgtctcaaatgctccttggcccagtgcatttgtactggtacgagaatcaagttggggcaattaacttgccaactttgcatgttttgagtactaacacttttgcgatgacatgaggttctcccttttgtcattaaaagtcttcagtgttgcttccttgctcaatatctccttgggacttataggaaacatctttgtcactacccttgtttttggtcatcgtgggaaatagagggagtatcttctataccgtccccctactttgagctgtcttgggaagtagagggtgattcttcatcgctgtccacctacccaaggtaatcaagggaaacatggggggaatgtaatttagtggaggtcctaggtgtcgatccttcctcttcttctagattactgtcaattcaagactcatgaatcagataagtagtataatatgctattgcttgtggatcaaaaccaccaacctttttggtggtcttaaagcttgataaatccattagctctatctagaaactctcaaattgtaacgtccccgcttcaagcctccattgggcccttacacccacggaatgaatggctctta

SEQ ID NO: 302147 - DNA, 1709 bp, Cannabis indica
tattaattatatggaatccgatacttagttggactaatagtgatattaacaaatagaagggtgttgagcactggtacctttagtatttctcctatataaatatacatgttacagatagactagggataaccgaaaagatttcatatattcagtatatgtaattatataataacccatcatgtcatcatgtagggcagtagatggttaaaatatataaatgcacataactcccccatctcatcccttcatttttttttttttaacaagtctcatattcaagcaaaagctttgatacctggtcattggcatattattgtttagggcaaagattccctcacttgggtttggatatgaccattatttatatattaattataattattttagaataagaaagtgaaaacattgtgttgcgttaacattattggctgaagtgggcctgagagaaagtaataagtaacattttgcatgcaatgtctcctctacccactaactcccaagaggatcatgtatacatatcatattcataatcacacatatattacatagtcatatatatatatatatgtgtgtgtttgcttatttaagtgggcttcctcttaggaaaatgacacccaattatttattggtcatcttagataatgcatctttgcttatattacaaacaaagcgaaagccttaaaataaacacaacaggatcataatattaataaatctctccttttcgtcgccacttaaattgttcattcttggatatgtcttcatttctaaacaaacaaaagttagggaacaaacaaggcttaaatatacgttattgttgtgctaaggcacatatatatatttattgaaattaaacattaaataggggtatcacttttatttttgttgtaagaatatttattgttttcgttatacacataaaaaaatataaattaatatttataaatgatggtgtatattagaattataacaaatatctaaataatgttttttgaaattttttgaataattttatatatctatttctaaaaaaagatacaaataattgggtgtttgttcttctttttcttttcaaatatgagtacaattaactattctaatttttgaccttataaattatttaaaattttaaaaaattggtcgaatgactacttacaactaatgtatatacggaaaaaaaaaaaaagataatttctccaaacaaaaacaaaaacaaaaattgtctttacaataaaactaaaagtgttccctacttgaaaagatccattgagatttatttgattaactcacataatgtttataatttttctttgttttaggaacatgagtattagggcataaacaagaatagaactccaaaatcaaaatattactttctttttggggttatatctccattggcaaggtacaaattaagaaagactaatatttttgtggtccttttgagaagtgggggaccatacttataggttatttaaccagcccactagtaagtagtgacaactcacaagtagcaaatattactatttacataacagataaaaaaaaaataaataaattaaatgttgttataaacataatttaggggtttcacctcaagtaagaatctcccctattatatataaaaaaaagggaaatttacacccattactgttttttccatttttttttcgtttgtactgtgacccggtggaatttacttttgtact

SEQ ID NO: 302148 - DNA, 3433 bp, Cannabis indica
aaagaaaaaaaaaagagagagaagtcgactaagaaaaaaaaaatcaatgaaaagaaaatacaaagagatataaggaagaaaaaaaaaatttatggaagttttaataaataaaaaagtttaaaaaagaaagaatataggtagagaaagtataaatgtaaaaattcccttgtcaaagtataaatgtaaactttgaagaaaagttagtataaggtgtaaatatccgaaaaaaggagtacaagctggttgttggtatcgtgagaagcaagcagtaggcaaagaaaaaatgagaaaaagatagggaaagaagagaagaaagctcgagagagaaattaagttttttgctaatttacattgacaatcaagtggttgattctcatctttttttgctcaaattttggatggtaaattatttcaatcggtgcaccacaaatctatcggttttcatttgaaaattgtcctatgtaaggtgctctcaactctatccatttggtgagactcaaactttttctttgtatatccatcttctgaggagatgattattatattggtgatccaagattgtttaatcttgatgttattgtgagcctctaatatttgatattgctaatttttatttttcttaagtatctcatttttgacataaaatgagagagatattgtgattaattacaataggtttttcaaacaagtggtattagagtcaaggttgattggtgttgaattcttgtgtgttgaaaaaaaagatgaatctaatataacgatgaaattgaacttatcaaattatttgcttggaaccaattgatggaagttttgctcaattgtaaagatttatataagcctattgaaggtagttagaagccatctaaattaaatgatgaggaatggatagttcaacatagaaaagttattgcctattataagacaatgaacggatatagatcttcatgagaatatctctactgaaatcagagctgatgttgtttaaaaacaacaataaaatctctttgtgaaaagaacgactgacattaaaatttatcgatttagaagacttgtaaatttgaagtataaggatggtgaatatggataatgagatggaagcatcattactcctcagttcactattagaaaaaatacctttgtcatcaatttttaactcagtttgtcttcgatttcttaaatgtatttgccaccgaagtcgtttgtggcgaagatataggtttcgataacattgtagacgtaagggaggcatatgtcgtaaattattttgtaataatcaaagacataggtccatcctattttcatatttgcgttgggggagagagaaattacctcttcggttattacatataaccaaggagataaattgtttttattcttggttattatgtaataattgaagagataagtgccgcctaatttttttttgtttttatttatttaaatttgaatattattttaattttaattgttttatatttgttaatgattatatcttatgaaataattataaattaattataagaataaacatttaatttgaaataaaaataaattttatcatataacaaagttaaggtttacaaaagaaaatttaattatattataacaaagttaaagtatactttacaatatgctaagtattaataaaaatacaaaataagtactattgcataaaaatagatgtctaaagctagctagtacaagtattgtgtcaatttaaataactatgttaaaatggtagcaactttgtcgccacaatgtatttttagttattttcaaactataaaattaaaatgtaaattaattatatattacttacttataaattagtatattagttatgcgtatacataaatgaattaattataatatatcttttcttttataagaacgaatgaatttagagatttcataattttattgatgtaccttagtacataaaaactatattcgtatctcaatatttattttggataggttgcaatggttactcctaaaaacattccaagtagctcgttggaacctccaagcatttcatatgtcgtaattaaatttaataatttatattagattcaattagctatagctagtataaatttaataaaagttaactttaaaatgaaaatagaaatgtacttttggagtatgtggtgaatagttttcttagggcgtttatgtcctgtccaagggtccaagtgaacgattttccctgcacaggcgatctctcgacacaagtaagtttaaaataacttaaataaacaatttatcataattctaccaaaattttgataccataatgactataaattggacgtttccaaaaaaattaaccatacaatttaaaacatagaaaattctagaacaataaaaaagtaatttctacccattctattgtagtacatgtattggcagaacctatttcactacgaataaatatttaagatattcaaactcctctaacatgcatatatatttcacccatccagccgcattacatttattcacagaacttacttcactacaaatgaatgtttaagatatttaaactcctctaacatgcttattcataattaactttaacaacaaaagttagaaaaagtttacctttagctaggtagcaaaccaatcaacacttgccaaaaatcgtgttcccccttgttatctatgcttccacttagggacacgtggacataatacagtaaattaaagctcatcagtggtctctaaatgccaagaattgggccaagcccaattccaagctacccttgcaggaaggcaatctcattgcacgtctagtagaacctctgcaaagcatactccatatctagagttcaagcttcgtgtaaccggaaagacccatcaacatgtatttgaaagacagtagtagttttccatttcccaacccacatagaataaggaagttaccttccacggatctcagacaaagaataatatcaagttaaaataggaaactacataattgataataaaaaaataaatacaaaattgattatccacaatcaaaggacatgacacgaataactagcactgtgatcaacctgccaagtcagcataaagtcaatgcctaatcagctgggcttcatataataagtcgaagtactatattatttgtgaggactcaattagagtgaaatacacaaggagttctttatgtaatgggttgaaaattcttaactcaaaaacttgagaatagaatagagcatatatactcattgtaatcctttttgcttttctggcctaatagataataaaatagactcgtggactaaagctctttaacgctccaaccacataaaaactttgagtgttctctttgatttgattcttttgattgttccttagttattatgttaagtaattcattttctaaaaatctcaataaatatttaggtactttcattgagagctgaag

SEQ ID NO: 302149 - DNA, 1527 bp, Cannabis indica
gaagaaaaaatgaagtaaagaacaaaagaaaagcaagctcaattacttcaacaaatgtgcatcccatttttgtggaaattgggtggttgcttgtgagattcataggggtgccatcttctattgtctcttgtttggtgagtctttatctgatcactttagcgatgcgattacgtttaaaattcacaagttgtctgagtggtacttagaattaagtttaatacaatcagttgtgcttcctttactgaggataatagtgtagactatgagcaaaggaactcctgttactcatatttcttatactaggcagatgagcaagtatattatgcttggaatgttagaaaataaaagtcgtcaccactgctttactgatgtgtcttatgaagctttaatggaaggttttattcgtggcttcttcaaatatctacttcgatcgttttcattgcgggaactcattaatctatttggaatagataatatagatatcaactttagacgaattcaatttaccctttctcccaaatctcgtggttgcaacttttaaaagttctttgcctccagctataaattcccttgggtcttcacttggttccaactgttctttcgactttgggatttgcatttctgtcttcttcttctattttaatggaactgtcttattttgttgatggctgcttttactctgaatagatctggcgtagatacatatcttcatccaacattctagtgaataggccatccgcatttcttatttttgcagcagggtcccaatattgagcctgtaattttgaaacggagtcccatgatttttgtctgggatattggagtatggtgtctctcataaaacaattataaaaatattgagttatttatccttgtcatttatcatacaaagagtccttagatcaagctttgatcatctcataattagttgatctcattcagacttgaattgcctgtatcttaagtagacattgagtgttttgcgtgtgcaacaatttggaacatatccatgactcacataccttatacaaacgatttacatttattgtgtttggattttccaatatgtggaaatgatcaagtatgattatgaggcgaagggtactttttaaatttggcaccaattctaattctcaattaggcaactgagttatattttttctcaaattcgtatgttgcataggtttctcaagggcatttctcatcatttttgaactagaaatgactgatgtgagattctgttataccataataagtaatagaacgaaattactgaatgaagactctagattgagtcatggataatgtcgttctctttatgacatttcgtggctctagcctcgttgtgcaagatagcctagcaaaaaaaattgtttctgtaaaagaatataatggggtcgtgggaggaacgttggtgatcacctttattattaaaatatactctaatggtaaacaactttagaaagttactaatatggttccacacactatttttttaatatatatttattttaaattcttactttt

SEQ ID NO: 302150 - DNA, 1496 bp, Cannabis indica
gaacggcatgagagcttccaaaaatacaaaccaaagttactccctgaaagagctttgtagatagaaaagagtcagctgaagtcgactattcgaaacttatttctaggaggaaaagctagtcatccggaactccttttcggaaaaaggctagctttcctactgatccggaaggacaagaaagccttccaagacttgctcccgcaagtcaaaaacttttcagaaatgataataacttttagaaatttttttatttgaaggaactattgctcccgttatttttttttaataatcacatttttagtaaaaacaagactgtcttatattagtagttattcatattaattaattacagtgtctttgccggttaggatctccctagttccaatatggttaagctaatggctatttttagaatctctttgctctctcataacaaaaattagtgttagaaaggattttgaaaacctttctgttgatgtaatcattgtgtttctcatctcattgaaatgtttttaatttgatattatatattgaggtatttttttttaaaaaaaaagttaaccttaatatatgaaatataatacatataagaagaagaggaatttcaattaatatatagtattattgaaaagcaaaacatcaaacagaaaaatctaagaaaagccactagatatacatatagataagcatacatgcatgcatgcatgcataaggtgatgataaggaggtcttttttacttttgttattttgtttctttcatcaaatctttatgggttgtcatgatggtagaatatatatattcaaattaagattatatacctatatataaataaaaaataaataaataatattctgatctcttttaaccactttctcccaattaaaatttcactatatactcttaaaaatatcttagtttcaagataaacttttatattatttgttagaggaccacttatatatgtatatatactttattataattatttaattttcaatgagtagtcttcatcaaacaaaaatatctccctcccaaggttaaaaaaaaaagctataaattcagacattgcctgtaaatttttttaatacaagttaagagttttcttgaatacatatatatctaaattaggcaaagaaagaaaaaagatcaagaaaaaagaattaatggagtactactctgtgtatagtatgttgatgagaagcaataagcgcatttacaaagaatcagagaatagttcatcatcatcaacatcatcagttcaacgttataataataataatagttcagcaaatcatgagaagggtagttcgaatgatgatgaagccattgatgccattgatgctaaagctgcaagctatatattaggtgttcaacaacgttttaaggttgaaagggttatgggagctgctaactaagctggatcatcatcacatatatataatattatatatatatattatattaggtctttttcttatttatatatatatatat

SEQ ID NO: 302151 - DNA, 1795 bp, Cannabis indica
attatgtttttttgcacattttttgtaattatttaagaaaatgtatacatttatgtaaaatgccccatatttacttgagtgatgtggcatcacacaaagcgacacataaattagacattataagtaaatgttaaattcaaattcaagccatttattagtcgtgttgaaaaataaaattaagactcaacgagctgacctcattcggtctgtgtaacccatttatattaaagatcatgttaaattttagttaacttatcaactcattcacatgtttatgaccattttataacacattgttattccaaaaattactcaggtgacgtggcattagaaaaagcgacatgaggtggtcagttgaaggaatggtcggactgtgacaattcgcagactggacggacaacatgggagactaagacgtacaatgcactaagttagagttattgagttagttaagtgcaagtccatctcatctttctaactctctactcgactagatgtatcatccgaccaaatgcattcgaccgacacaaatcagcagggttaattttttgcgaggcaatgcactggttgggacattcgatcaacttttttgacttattcaagatttgtgatccacaaaatcagctcctaaatctttgaggaacaggtcattatagttgcctacatttaaaggatcaagggaataatcaacattaatgaaataattttaattaatactatttattcatttgtaatcctataaatagtggctcatttcagagtttgagggattctatttcatactttcaagagagctactacgcttcaaaaactatcactcgtaattctttgagaaatattgagaaactcacttgactctgtttctagttatcttggtattccagtaagcaaatactaagaaaggggagtagtttattatcatataattagggtcgaacctctataaattcctagtgtcgtttatttatttactgtaaatccatattcaaataatgttgacgtagaaatttggccaactcgctcgtatgtatagatgagataaaatttgtatgtaactacgtaaagtaaagaacacacacgcacacacaagaatttatagtaattcactccttctgtcgtgacagtaatggagctatgactactttgagtatttattctcacgagattgattacaagaaaaattgttaagtctgcaaactctaattttcagagagagaaactagagagagattctcagaacttatgggtactttttctgaatgtggtaaatgagctagaagagctccctttttataggaaaagaggtactattaaaataataataaaatattttaacaaaactaaaaaataaatttggctatttttgatcgttagtgatgatctaacagtaaaattaacttcgaaggttggttgtcaatttttggaacttgagtcgcgttcgcggaacccacttcgagtaagttgtagcttaaattcgtaactctcttgaggaaaaaaaattggaattgataacttcagaattgagattttagtatggtatatgacttgatagagcattgaaacgcaagttgaatcgcatcaactagatgaatattgattgaatggttattttactaaaaagctcttctaggatcagtacctaggttaacatatgacgttaatctggatgctgggtgtaatatccagattaaaattggtattcaaaatttattgaggtaacaatcgtgttaaaataattgtcttattttttttttttataaagtgtgagtagtgataattattaaagtatagtggc

SEQ ID NO: 302152 - DNA, 1688 bp, Cannabis indica
acaaagaggagggggatttgatattttgtcaaattttgcctcttgtctaatatatcatagtacccaaggaaaatcccgatggtgtgtttattcaatgttaaaatggatagagaatgaaagtccataggagggaaaacaaattaccacaaacaagtagttgagatttatccaaccccagtctcagttgcaacaatacaaaatcacagcaagatacaactcttgtattgatcaatgcatgtcatgtcgcattatacaaaatatcactcatacaagactagacttggaaaaacaccaaatattggtaatatcactcactcatcttgtaccaagccactctttctttctttttttctttacagattttattatattgatgtacgaactgacagagattggaaatagatgttgagacctaaaaatggcaactaaaattagaacacaagtcaactgctccctatagtcaccaaaagagtcaacataacatgtccggcgactgggaaatgaatcaacctttgtttgctctataacttagaactcaagaaagaattcaataatgcttgaatccaattcttgtagctctttctctcgcagtctgcaaagatcaaagctccttgtacttcaaagtagatgcttatctcaacaagactgagatgaatactaggtagttttgtaccatacaatgggaatttggatacatctttttctgttaccagagtctaagttcagcatacggtcatgaactctacctcactgaacaattcaagcagaccaacaaaacatagtatggcttgtaagtgtaagtgtaacctcctcacttgatcagtagctaattatatcctaattgcaacgatttgtatgaatcgaaaatgaagattttagcttctaaagtgaggccaaattatcacattcacaaatttgaagagattgtaatgaggagagattgtcaattctcagttaggaattctacattttcgtcttcatttacttccgggtaccaaatgatcttgtgtttggttttggttggcactctctttccaccaccccttgaaattagaacaattgtaaattgaaattttagtgagtgaaggaaagaatgatgatgaagcagagcagaagaactcatctgatatgtactccaaactctttaactcatcaagacaaagttcttgccacagctacaaatgactttttgcttcagttgtaaaatgacacaaaaaatttttgtgtcggttgtgtaaaccgacgtaataacagcagacacaaatagtccagttatttgcttcatttttaaatcgacgcgaacttttttttgcttcggttgagaactgaagcagaaagtatgctctattggcgtcggttctaaactgaagcaaaaaacttagcttcaaactgaaaccgatgcaaattagttttttgcttcagttcataacagacacatacgtgtacgcaaaaacatttgctttttactttttgtgtcaattataaaacgacgcatagtcatatgtaagggaaaattgcagatttctttgcgattttctccacctacatttttaaattttagaaatcgctttgtgtaacaatatttttatgcactaaccataacatttgtaatataataacaataatattcttcatataaccaaacaattaatataactatgaagtgtgtcattaaatcttatataact

SEQ ID NO: 302153 - DNA, 3943 bp, Cannabis indica
actaaatagtctcaaagtttaagtttgaaaaaaaaaatcataacccaagtataggatcatagtctcatacctctcaagcctcccaacaaattaaaaagtaaacaaagatgaaattaagaatcgagaagaaaatatctttacacatgtaatccacaatgatcatcagtttactatcgtcattagatcttcataatttaagcatagaatatataattttgattatggatgataatcaaaataattttgattatcaatcatatatatactatatatatgttaagaataaaaaggaaattatatatatatatctatatcggggtcggatatggtgcggatagtattatccccgcccccgccccatccccgcttcgagtattgaaattgtcccccaccaccgtcccattaaccaccaagacggggaatccccaccccattaggggcgggtccccgcggttacccactccccgtcggtactaaatttccatctctaataggaatacaattctaatctaatttcattttaattaggattttagtgagatttaagctcaaccactcatatttatttatcttattattttaattaaataaatatttaaattaaacctattgaatacctatgtaaagaaagagatgctgctagaataaggttaacgatttcattatttctctagttgtgagaaaataagagagttaagtctcctttctctttcaccatgtatttcgaattctatatctctcgtcaaagatgtcagccacaaacaccagtcctagtaagttgagagatagctcacacttttcatttgtgatacctagggcactaaggaagactatgtagaacattagtcacatattcggagaaaagaatatttaattaggttcagtactttgtgatactctactatagaaaggattccagaattagagtactaaacagaaagagtatatatatttcgttgcgtttccaatgtaaaataattctagctttacgtatttatttcatcattttagaaaaacataatttaggttgtttgataattagaattaataatgaacatatatgttagtaaaaaaaattacggtgaaatatattccaacaattgggtttagagcctttggtaaagttaatatgtttaaaataatttgcatgtattttggatgtgtttacgttagttgcttacaatttgatgatttttttgtaaattttatgtatgcttctttgaaaaatatttttgttacactttaaaataacttaggaattgttaatggttgaaaaattgcatgaaaaaaaaaaaaaaatcaagattgactttggatcataaattgaccaaaagcacactttggtgcttgctcccagaaccccgcgctcgcacaagaggacccctggccaagatttctcagccagtcctggggtcctgtgttttttaagacttgatctggaccattagattcagaagcacacgaatctccacctttagtgtgaatgtagagaaaataaaccaattactatttttttttccattttaacttctgaaatcaaattttttttaagagaaagaaaaaacctccaaggcttttcttggtgaatgtcctacatcgcgactaagatccttaacattctacttcaaatttgatcaaggttagacccagatgtgacacccccgatcctcaccattgatccttcaaattcatctgggtcgtaggatttccaagtgggggttaatgaactatagttgagaactcgacaactcctcccaatctttatcagtcatactctcaggcttctttcaatacaatacttttaggagcccttattgtactaatacatctttcatcatgctctgtcataaactgcaattgttcttcccgtcaacaagttcaatcttaaattttgtggaagacaccatctttgacatttttgatgtagatctaaacctttgcttttgatacctcttgtcaggaaaaatgatcaactttaaacgcagtgaaataataaaggaacgaaggcaaagaaaattgactcaatttggtaaaatttccaagcccacaaagagagatatatttcacttatcactttaaaattatatatactctctatcccaatctcttcactcaaatctcaatacacatttgcttcttcgtgtcactctcaccacacaacaaactcacactcacttctctttttataactcactctttttcttcacacacaaaacacacacacatataggaaaactaaacttgggcaccaagacactctaaaacttagccatcaagactcaccgaaacttggtcaccaactccaagactttctttttcaaacaatttataattatcccaagaaaattacaactttataaatataaaaataaaataattttagtcaaactccaataaaatagaatctaccacactttgattgtgttgtgtgtttacaacataaaaaatttctaactatttaaaaggtgttacctcatgatagtgttaggcactactaatatctaataataatagtcttactataaaagtgtcagttatacctatagagacgcatttatttttaacacatgaaaaagtataaattataaactatctatactctaattattttggtactataaattattccattttttaaaaataaaattagagaacgtgtgttatagctacaaatacaataaatatcgggatatattaatttgtgaatttttcttacatgtataggatataacacaagaataatactgtaattttttcaataatttatagttattctatgccgttctcgatgtggtgaggattttgagatcccatgttttatttttctttgacatattcttattttggtttgggaacaagcaagattactatcttcttttcatagatatgttaatggtctgatatcgaacattcttaatgttctattttatgaatattcttgggatgagttcgaattgatggtgatgttactgtggtggatttggtatgatagaattttattttgttcggtaagacaaaatcaagagtcaaaattcttctcgaactagctcaacaggccttgtgggaatttcgagagcattgacgacttggtatgaggacgacaacaactagtagtgttggcagagccacgtcaaggcggtgtcctccaccaacggggcacttctctttaactattgatgcttcagtaaagtcgggcagggggtttgtggggttaggaggtgtgattcgggatagtgagggggtggtttgggcatgttgggcagtggggttggtaggggagtttgctgtgaatgtggcgaagttgcttgcggttagattgggattgcatattacttgacagtttggcttttctatttccattatagaaagtgatttgacaattgtcagaggctggattaatagtcctaatcccaataacgtatgtcagccaattattttttatgttatttctttattaataattgttagtgatggttcttgcaaggctattttatgctctgcgaatgatgttgcccgtatactggctacttttattactagttctttaagagaatttatttagatagatatttatccatgctttattagttctcttgaaacaattaatttactttaattaataagggtgcgtttggaaagccacaatgtaattggatttgtgtgtaattggaggtaattatacaatttggcatgtttgtctgaccatgtaattacattgtgttatattattttataatataataataaagtagattaaaatgtgataaatatatgtgaataatatatattaagtgtatggtaaataaatgtgtaacctatgattttataacctacacttttgtaacctacatgttgtaacttggagaggagttacaatttgttgtcacttgtaactcatgtgttgatcacacattattagtgtaataaaagggttgttacacaa

SEQ ID NO: 302154 - DNA, 3225 bp, Cannabis indica
agaagtactctcataaacttgaatgttatgtttgtttgattgatcttttatcatcatgtaatgattttgatgcaactcggagtgtttttgctgagctcaaaggaatgaactttcttatgactatttctgcagcaaattcctttattaagagttttggtaatcttggtatggttgaggagttgttgtgggtttggcgtcaaatgaaggagaatgggattgaaccaagtttgtatacttacaattttctaatgaatggtttagtgaattccatgttcattgaatcagctgaaagggtttttgaggttatggaaaatgggaaagttacaccagatattgtgacttataatactatcattaaagggtattgtagagctgggaatactcagaaagctttggagaagtttcgagctatggaggaaaagaatttgcagcctgataagattacttacatgagtttgatccaagtttgttactcaaaagaagattttgattcttgtttgagtctttaccaggaaatggaagagaagggagtagaaattccaccccatgcttatagtctagtgattagtgggttatgtaaacttgggaaatgtatggaagggtatgttgttttcaataatatggttcagaagggttgtagagcaaatgtagctatctatacagctctgattgattcttatgcaaaaagtgggagcatgagagaggcaatgaatctctttaagaggatggaaagtgatggttttgaaccagatgaggttacttatggggttgtcatcagtggattatgtaagaatgggagattagaggaagctttggagtattttgagttttgtaaagatcagggaatggcggtaaattcgatgttttattctagtctgattgatggtcttggaaaggcagggagagtagatgaagctgaaaggctttttgaagagatggttgataagggatgctcaagggattcatattgctacaatgcccttattgatgccttagccaagtctgggaacactgatgatgcattactcctttttgagagaatggaagatgagggttgtgatcagacagtttatacatacactatactcattgatggactttttaagaagcacaaaaatgaagatgctttgaaattatggaacatgatgattgacaagggtattacaccaactgcagcatcattcaggactctttctattgggctatgtttgtcaggaaaggttgccagggcttgtaagattttggatgagttagcaccaatgggcataattccagaaagtgcttttgaagatatgatcaacacattgtgcaaagctggtcgtgtcaaggaggcttgcaaattggctgatggcattgtcgataggggtagagaaataccgggcaaaattcgtacttgtttgatcaatgcattgagaaagacaggaaatgtggacttagccattaaattgatgcatagcaaaattggcattgggtatgatcgaatgggcagtgtgaaaaggcgagtgaagttccggcttctctttgataagtctttgtcctagattgtcattgcaagcaattggttttgcatcataaaacacatttatcaaccttgttgaggagtagtgatgatgagaaggataatctgtagaaaacagagtgactgttggagcttcacaaatttgatattcgttgctggcaaacttgagaactgaggtactaattcttgtttatgtagcttgagtgacttgataatataattctcaatttgcttcttaggctattgccctcaatcgatcttttccataggaatttggaacaagtcttttcatatgaatttttttcttaaagatctactggttaagaataaaattaattagaatttttgctcctttaattttacatgtatcaaattatgtcacctgaattattaaaattgttggatttaaagacttttgtccaatttcattcaattttactaatgtgaacattgttcatgtattaaaccgtgtcccgaactttgaaatctactaaatcgtatacttgaactttgacatgtaccaaatcgtatcctctgaactttcatccacgtcatacttttgtaagtaaaattggacaaaaaatttaaattcaacaatctcaatagttcgggaagatttttaaaggacataaaaattctgggacataaattggtacatgttaaagttcagggggcaagatattttcatcttgattgattgatcaatttggtatgttcatcatatttgtttttctctacctctaacgtgtttcatgaagaatttataaatcacacgtgttgacacagaaatttggtcaacatttgattgctagattgacaagaggaaatagtagttaagtaaataaataaagagacacaagagattgatagtacttcactcctcatgtcgtgacggtaatggagctacatctatttcgagtttttattgctcacgagaatcacaagaaaattgactaacgaaagagctctaatttttagatagagaaattaaagagagatgctctaaccttatcgattcttttctgaatgtgaaaaataaactagtggagctctcatttaatatgaaaggaggtcttattaaaaatattaaaatgataataaaataatacaaaaaataccaaaaaaatcactttaggatgatctacgcaattgatgatgatataatggctaaaattagctcttgatgaaaatcgtcaattttttcagagtttgaatctcgtctgttggatcattttcgggtgatttgcggaaaaaattgcacttgtcttggggacaaattttggagttgaaatcttcaaaaatgtgatatagttgtaacacatgattgaaatagctttaaaacgcaagttgaatcgcatcaatcagatcaatattgagggagttatgaccattttaatgaaggttgttcaggaaccaacgccctggttgacacccagcactcaggttgacattctggacgccgagttggtgaaaaaacgtctcaaacttatattttttgatgcctaagtgatatgttgacatcactttgttaatttcttagttttgaggaagtcgttcaccagttctcagagatgctgcttttttgtgaaatcgggtagactcaaaacttcatgatttgtcgatattccaccttgttgaaagagtgaaatatcaaagtgtgaatttgacttgtcacaagtcgtagctctcatttactacaaaaaata

SEQ ID NO: 302155 - DNA, 2924 bp, Cannabis indica
aagagaattccttctcttttgagaagtttttaacaaaggaaagttcagctggaagtgcaactttccaaacaaggaaaagtgcaactaaaatccgaatttataaggcaagaaatcgaatatgaatgcacaataatcttaccataaaaagaaaaattattttgtcaactaacttgccaaaaaatgactttacaggactcactatttgtctaagtagatgtacttaagacggtaattttctgatactcagccttgtacaatgtgattttcctagaaagtacccttgggtacggttgaccataactttatctgtggctttgccaagtttcacacctcccattgtctcttctatgaaggtgactttaagtgttgtcttggggaggtgacagtcgtcgtgtcataggtctcatcaacttttcttttgagagatagcctttagtctatccccctgctccttttgtgtgattttggattgatagtcatggccagaacaaaacgatcatgtcgtaatgcgccaccatatgatcctcatgttgccagggtggcaacgatgagcagagtcagagttgtagaggaggccacacaatctcgtgatgatgtagatccagaggtcgatcaggcagaggtgcttaaggtagtatcgtccaaactaggaactctaagtaaccgaaagtaagccactgccttactatacttaaaattaattaagtataataaataatcagctcagattaatttaaaaagaagtttaggcttcacaattaattcaagtttatttaaaaaagaagttcaagcttcacaattaactcaagttaatttaaaagagaagctgaggcttcatggataattaatttactcaggttaattagatttttagagctaaaagtttcaaactcctggaagtaagtagcacttactaaaattttcaaaaaacaaggttatctaaatcccaaggatctaggctattggaattaatttctaaggaattcaatgaaataacttattaaaaaaagtaaagtctaagcgttcagttgaaatcctaaaggttcaggttgttgttagaaccagaaccttagggatctgaaagtaaaactaacttagcaaaattcatgaggtatgtactaaatactatatgaatttaaaattaaaagtatgaaaatatccaaagaaaaattacattcttaaaagtcctacgattaaatcataaatagtgtctccgtattaatagaaaagggttaaaatttagttcataaaaatgaactatactttagctggatcattgggttctaaaccagagttgatagcttatcacccgagacctcggtgattggaacatcatcaattgaaacttggtctaaagatggaacctcgctagctagagtgtctctaaagatggaagagaagatcctcccagaatgtcctcatctgacgcaaccacttcaacatacttattattagtgtttactttagcaacatgctcttcagcttcaagttccaaaatctgagcatgagtgttgccttgtcgccctcagtcaaataattgaacacgtccttatttatttgtgataactactaaagattactcctcatgatgtttctcttctgtgatcataagtttctcctccaggctctcagcatagctttcaacttttacaacatcagcattggccttgtcaacttccttttgggcgagtttaggcttttccatctcctcttgggtgcacttctaagactcttccaaagcttatttttcctccttgagtttggatgaaacatcaccctcagtatgtttaagcttctccaaggtctcttattcagcaccttcaaccttctattggagattttggtgatgctttagtttcctctccaaggtggcataggcaatgatctggtcatttagggctcctgtttggatgtcatagtcttgggaagcagtgtctaaccgtttctctagatctttaactttattttgagtttcggttaccttttcctcaagagtagaaatgcaagaagtggcttgattgtaagaatccttgtatttatcagcatgctctttcttcgctttagcagaactcttgtagttggacacaacatcattgagagaagcttcaaccctttgtttgatcacagcttcggcctgagacttgtatcatttaaagctttaacggtttggtcatgtttagttgttaaagtctcaacctcataagataacttatcaaccaaggaagagcatctctccgccacaaaacttgcttgaaacaaaaaacacatgaaattaaacatacttcaaaaaatggacaaagaaatataatttaaccataatttaattaatttaccaaagttatttggttcttgaggttgttagccataatgaccggatctacactcaccattgcggcaaacttattagagcctagtctaccacatgtggtagcatttaggtccgagcctaaactgggttgaagcctctcaacaacctcttggcaattgtggaaggcaagaattggttcgttgaattttgtagcattagcaaatttactacttcgcctagttgaatgagggttggcctttttctccatctcttcgtattcaaagatgatccttttgtgaagagctttgtcaacatctagttcagcacaaaattcttctggtaatgaaaaaggacagattggaaaagaaatgttacaaggaggaaggggaggcaagtttgtcttttctctgggtaattgggtggaagaagagtgttcaacctagtaaatttttcacttccatcaacatcagcactcttttgctcatgaacctccgagctctatctgttgggttttatgccctaaataaaactctatttcaatgtaatccagattattcaatatccataaagtaacaaaagtatttttcattcatttgtgtatgttttggttcacctt

SEQ ID NO: 302156 - DNA, 4945 bp, Cannabis indica
ttttataattttttttttttgttattttagtgtctttgtgaaataatctaaaaaaaatgtgaattaatttagtcgaacccaactaatatggccctgtttattttaatatataatatctatatactattttatttaacatatataaacttaaattttaaaaaataaattatatttgttataacattttttttatattgaatttcaagatttttttttgtcaagaagaattgttagttctattgaaaattactggaaatttattttgattaaatatatgatattgttttttcttaataaataattaatttaataaaattataaattaatccaaaaaaattactttatacttcatctcgtaataaactataagaaaagaaatcatacgaaattgctaatagagtctactctaattcaatcttaagtacaacagacttgaagaattacttgacaatttaactttacttgatgattaaatctgttaagttatatcttaatttgtcaatgatatattttcctgccagacaatcattgttcaaaaggacaatcactcaaaaagtctgtcaatatagttcattgagcacaacaatgaaggttgcacttcacaattttaaacattattcataaataatattggtatgaagaatattagaataaccggtcaccggatcagagttcctcccatcaagacatcaagtcaaaaatgtcggacaccttgctggtataataatctggtaggatagtgtttgaaggatcttcaagggttgggagggttgtcacacctgtcatgataaattacaagcctcagcaacgaaaagtattaactccttgtggtcagagttacatgaaatagaaattggattacaaagaaaaaaacctgaaagaacaaggagagttttacagccagcattctgcccaaacaaaatatcagtgtctaatctgtcaccaaccatacacattctggagcagcttatattatatctgaagaaaaaaaataataacaagaaattattccagtgttttggacaataatcttgcagcagaaaacaaagctttgctgcagtgcaattctgctccctcttttagatgcatgacatgttcatgctttttgctatgacaaggagaagtgcagcaggggaaaaaggaacagatatgccttgcctacctttctagcaaaaagtccatcatgaaagtagagggcttcccaactacaattggctccttctgagttgatccacatatggctgcaaccatgcacccggcacctaaaacccaaacgcaaaccctgaaataactagaataaattgcttaatttcttcaaataaaatatcagaaacaaataaacgaacctggccattcctgtaaattagtcatgtgccccacagagtctcggttggtggcgatgaacaagcatcctggattctcacgaatgcatagagtgccatatctacagttcagataacattataaagacatcaatcaatacaggatagataacattttacttttaatagacgatgagaaagtttggaagtgtaaacaaaaatgatgtcttttaagaaaggaagaaaagtaacactcttactgaagcttgtaatagttgatacgtgggtccaatccaactacaactgctcctacctgaaaaacaactatcacatgtttaaatgctcttaattgctaacaaccaaacaactcaataaaatagtgaagctgttactttacactcttatcgtgttcaaagagagaatttggtttcagctctgctgtcttttcaccatcttcctgcaatacaacattgttttacgaacaattcaaatcaaaacaataaagtgaaaggaaaacaagtaactaccaacatatgggataggctgagtcctgtatttctctattggccagaatattgtgtatacatgatgacatttaattaaaaactataaaactaaggtctctttatttgttaatctagaaaggaataaaagattgacttactgggccaccaagacctgtaaagccagctagctgcaactcttctaatatcccttctccacctataacatagacctacaacacataatataaatatcagtattcagtttggacttgcaacatccataccctaatccattgccaatattccatgcttttataaagtaaattaaattccaaaccttcttatcttggggaaatttacggactttcaagaacatagcagctgcaaatgaggaagagaatatctcatcctacaattaaagaggggaaatatataattccgaaatcgcaaatcagaaactaactatattgaatatggactgataaatgatattccaaaacccatgttccatttatctttattattattattgttttgaaaaaaaaacctggttgactgaaatgccgagggattggaactttttggcgtattggcttcttgatttcgtggaattgttggtaacaaacacgagcttctttccctgcaattaaacccaaaatgagttcaatggataaaaaaagaatggaagacaaaactggaaaaataagaatgagaaagattgcctttgatcgaagccagtcaagtgtgtgtgggacgccatcgatgagggagtcgcccttccagatgacacctgagtattattaataattataaaaattaaaatcaatttaattttttaataaaaaaggactaagaaaaagttagtaggaaataggaccatcgcagtcgaagagaaaagcatcgacggaatcgatgaggtctccgatgttgtgagcggagagttggtgagttgaaggagacgaagagttcattttggattttattttcagaggagacttggtaaatttatatgcatgcttcctcttttaattatttatccagaaatgaatagaatatgctttgcttaaaaagtctttcaaaatcgaatatttttcgtccactgtcgtcaaaggccatcacacttccactactctaatatagagcatgttaatagtgatttgcgtgtgtgatatttgggtgcaattgaatgtgtgcatatatatatatactagacgccatcacacttccaatggttgcaaggaatcacgttggcaaggtgatttggatggttacttttaagatggatttttccaatgctctctgtggggaagtaatggcgtgctgtctggcctttcaggaagctaaagttcgaggtgtcaagtttcttattctggagagtgattcgagggtggtgatcaatgctcttaatgggaaggagtcccggtgggagcttgataacttcgtctccttttgtaaaatcacctcccctttctttattggttgtatgtttgaatatgttagtagacgatgtaattttatggcccataatgtggccaagtgggcgttttctcatcagaggttcggctttgtgcctctatcctctatgcccgaaactatactttgtaatgaccgcgaggtctgacagtatttttcaatctaatgcatgtacgcttttcttcaaaaaaaaaaaagactgccatcacacttccactagtctaatatagagtatgttacggtgttcgtcatgcggattgtagtctttttttttttttttttaaattaaactgtatatgtaatttttgtaatttctcaaccgtgatattttaaaactgtaaaaattacactgtaaaaatacggtacattactaggattatcgaaccttataataaaaatttaaataccaattttataaaattttaacagtacaaaaaaaacttattaaaattttaatatcataacatatatatatatatataatattcattaaattattatattaaattccctaccaaaaaaaaaattgttatattaaattatttttaaaatataatgtaatctatacatatatttgtaatggatggtgtattttattgaagttgctgctgtcaagaagtttgggcagctagatcctcttattgctgaagcaatatccttaaaagaggctctaagttgggtgaaaagaagttcggcagcggcggctgcttttgaaggtgtcagggcatcttcaatgttcaaacttaaatatagtgttaaaataacactaaaaaatataattttagcactaattttttttttattccaaaacactaaaatttacactaaaaaatattttttattattatattattttattaaactatctcacattataatatttatataaatataaaaatttaatcataaatatattattttaatattaagaactaaaaaacaaaaaaattagtgtagcatatagtgtcccactatttttagtgtgacactatagactcccacatatataggataatatttagagctccattagaataattttgtatctgaactccactatttttgaggttttagtgtcccattagagaagcctttaatcctactgctgtggtagtagaaactgattatctaatgttagttcaagctatttaaagtaacaactagattttgtctcctcctggtcttattatttcagatcgtattattaatcttctgcagtctatttttttgtttcttatttcagttaaatttgttaaacgatttaggaaccaagcggctaatggattaacttgttcttctagttcattatctgatcgtatttccaacggggctgtcctaaataatttgaaagctatcttaatagttgatttgctttaatgaaatttgttttttagttaaaaaaaaaaaagataaaaacagaaaatataatttcaactaatgaaataatcctctccaatactcaaacaaaactaatgtacaattaattgtaaaaatcctaccatagaatatcacactatgaaaatcgtcatcgcagaagaatttccagtcaaacaagctaattgtctagccaaagatatacatagtcagaatataaatcactacaaaaaagcgacttatataagaccaaattatctcaaaaattta

SEQ ID NO: 302157 - DNA, 2738 bp, Cannabis indica
gataattgacatatatccatttttaaacaatattgaaatgccctcttctttctcctctttctgagagacatttccatgcatacgagggggttccatgccctttatggccatgaagcagaacccactgttttggagaaaagggtcattaccctactgtcttggctggaaaatatttctgatccttttgacgattggggactccataagtattggagttttcacactgaacataaggtgttcatgatcacactgagcagagatggcggttcaattagaatctatgaaagaaccaggctttgtggttacaaagtttctatcaccattgatgcagcagattggattattgacacactagaggaattgcagaagaaagaagggcaacaaataattagttttaaaagatcatccaggaacagctctgccatttgtttcttggaatgttttttaaatactaagtgagcttttctaaagctttcagaattgaggaacaataagatgaacttggttttcataccagaagaagaaaaagcgagggggtggtcagactttatacgatgtctcaacggggttctaaggagaaagtctaggaggaatcatgacttcattaggcagcaaaaagaagagaagattgtagggggagtcatgaaacaaaaatcatgggccaacgtagtcaaaaattgatgaaactagctccaaaaccaggacaacctttcgtgaattttttcaaggatgtttaagttgaatttagcctaaaaatagagaaaagttcagggccgatgtcattaatttctagactaaaattccagattagagaatagagaaaggggtctcagtcttgcaaaatacagaggagatcgagttagaggaggtacaaatgggattcagtgtaaacgagcaacagtggaagatttataaaaggaagagaaaaccagttagcacaaacagtgaagaagcaataatttcaatgggggctctctagatagatgaaatggaaaaaatgaagatccaagagaggaggaaattagagaattgctgtcagaaagtgaggctttggaggaagatttttgagagtgatcaggatttggaaagtgaagaatatgatattcttttatgtaatatcaatgaactgtggtttgagggagacgagacgatgttttgaggattgaaggataatggttgcatttcaaagaaagatatgatgagtaaagaagatggagaaacacaattggaggggtcttcgttttcatctcgggctagatagttgacactgtggccaggatgggaatgaaactaatctttgatgaagactttctttctttaaaggaaatgaaagagttggcagcagaaaagagtgtagggagttaggaaatttgacttaacatcaattatgagaagagtctcaagaaatcagggtaggttcaaaataatcaatgaaggtgctctcatggaatataagaagtagcggggacaaggaaaagaggagagctatcaaggcaacattatgcaagtctaacccggacaaagcaattctacgagaggtcaagaaggtagcggtagatagaagcttcattggaagtatttggaggtctgagttcaaagcttggattttactaccctctattggaagatccggtgttcttgatatgagatactaaaagtatatcgattttggactcattggtgggtgaattaaaatgagtttatggcccttgctcttacaaagcaagatcagaatttcgggatgagttggctgaacttagctcaatatgtggagtcttgtggtgtttttttttcttaaaaaaaaaaaaagagaaagggaccacttgtcttagattggccccccgcgttatgtattaaaagcctcacttgtggtggaggaatcctatggtaaacaaaagccgatacaagataggaaatagtaaaatcacaaaaccaaagaaactagaaaattaggaggcgactttaacattgttagagaagtccaagagaagctaaacaataacttaaagtacaaaaatcattaagattttgattaacttattcgggaaatgtgcctaattgatccttaaataaacaacgagaaattcacttggtcaaactttagagtgaaacccatatgcagcaaattgggtagattcttattcactaacaaatggaacatggcttatccatttgtagggcaggagatgcttgtcaggttagtatctgatcatagtccaattactcttgattccaacccaccaaaatgggggccaagtcctttcggatttgatagccaatggttggaacataattcattctccaagtatttcgagtagtggtggaaagaggcaacgggttcaggttgggctagtattaaatatatgagcaaactgaagaagataaaacacaatatccaggagtggagtaagaagacctttggaaacaatctggtgattaaggttgcattaggaaaacgtttgggggtcttggcgattaaggtcgctattgcaaggaagcaatggttggaatctgttagaatattagctgtatattaggtgtaaaagaattagggtaacttgtatttagtagtttcctattttgttggtagtttcctatttcctagtctcctagctttgtatataaatatgtactattctatgaaatatacacacaattcgaatcactattttctacatggtatcagagcattgtgattcaaaattcgaaattcgaaattagggttctgaaaaaaaaaa

SEQ ID NO: 302158 - DNA, 5701 bp, Cannabis indica
tattattattattattttgaggaaaagcgctatatattaaattaaaggtaaaaaccaagagatccatgcaagagttcactagacccactggtcattacatcaaacaatcaactggaatttattactttttttaaaggtttattattatattttatgattcaattgttttaattatttagatttaaatttttattcatttatcattaaaatatattttaatttgactcgtttatttattttttaaatagtccggtttattcttaaatcaaacaaagaattacttttagcataattctatccaatctagtctaatcctgagttccaaacaggcgccaagtgcatgttagtctgctttgacgatgtcttgatttatagttccaccatggaattgcatcgagaacatttgacagcagtatttgattgcctacagcagcatgagctttatgctaatagaaaaaagtgcttattagctcaagtgaatgtcgaacatttgggccatatcatttttgctgaaggggtatctgccgaccctgccatggccgagtggcctttaccaccatgatcattgagggagctccgaggatttttgggtcttacggggtattaccacaacaagttcatcaaaggctatgtgtagatggcacgaccattgacggatcagttacgcaaatatgcctttgggtggacattagaagcacaagaaacctttgagcaactagaacaagcgatgtgttcggtacctgtgttggccctcccagatttttcacagcctttcctgttggaggctgatacttaaggcactagtttgggggctgtgttgatgcagcaacaatgcccaattgcatatttcagcccagtcttgtccccttggtcacataccaagtctgtttatgggcgagaacttatggccattgtgcgtgcaattcaaaaatggcatcttacttacttggatgtagattatcattgtgtttcgatctgcggtgtttgaagttcttattagagcagcagctggttgatttggagcatcaaaaattgctaagctgttagggtatgattttagcatccaatattctccgggattggagaacaaggcagttgatgctttgtcacgtgtttaccatgaagcttcatttagtgctttttcggtgcctactatcatttggattccagatttacgaaatcatgtggctgctgatctgtacctctttgagatcgtaagggagcttcaaataggtcagttgagctcggggtacacctacaatcaagggtgcctaaagttttgaggccagtttgtccttccattttcttctccgattattcccttatttctccaagaatatcattgcattaatgtcgggggagactcgggagtgtttcaaacgttccaatggctggttggggatttgtattggaaaggtatgagaaaggatattcaaaaatttgtggctggttgtgcgatttgtgagcaaagtaagtacacggctcaatctcttgctggccttttgcagacacttctgattccaaactgagtttgggaagacatttctatgggtttcattgaagaactccctaaatccaatggttttggctctatatttgtggtggtggtggtggatcgtttgactaagtattgctattttgttaatctttctcacccttattcagcaactacagtggcagcggctttcgttaggaaggtggataagttacatggtttcccttgctctattgtatcagaccgtgacaaaatctttcttagtttcttttgggaagaagggtttttcgtttgcaaagaacattgcttcagcgaagcacctcttatcatcctcaatccgctggccaaacggaagtggtgaatagtcttgagacatatctccgctgttttgtaagtgtcaaaccaactcagtgggcaaatggtaggccttaggacattaaataaaaagggcataagtgtaattgtaattaagattgaatggtgaaggaaaaggtgtgaagaatttgagtttattttgtaactgatttgggagagaaccaggctctcgaaatcctgggaatcaatgaaaggcattctagcatttttatccaaacactactgccctctctctattttctgctattgactaatcttgataggttgttcctatcagcaaagtggcttccttgggctgaatattggtataatacctcccatcactctttggtttggatgacaccattcaaggctctttatcatcacgatcctccattagttcgttttgaaccacaaagcaccattgttttagctgtggagctcagtgaatcttcaaagggcccaacaaaagatgaaggttcaggctgatgaaagagaagggatgtacattttgaggtaggtgatttggtttgtgtgctgctacaaacctatcgccaatgctcagtggctaagtgtaaaaatgagaagttaggttcgtgtttctttgggtcatttccattttccactgtcctacctgatacacctagtttttcatgtgttggtcttaagaccagctttgggacctcagcaggtggccactgccttacgaaaggatttatcagcagagcttgagtttgaaccaaagaagctgctcattatacaccctggcacgcagaaagtgcagcgacaagcgttaatttagtggtgtagcctgcctgaattttaagcgacttgggaggacttcaggacctttcatgagtacttcctcatttccaccttgaggacaaggtgcgtcttttgctgggggtaataataggccacctctcagtttgtttactcatggagagccaagggagggggttcaactaagggcagagatgtggcaggttagttatttgagttgtattagggataggggttgggggagagtgcagctggaagcctggtataatgcaccttagttaatataatagtttgttggaattagcggaacattttgataagttctttcttggataaaattaaaacctttgtaattacacaataggatagctgaaattcttgcagaaactttattgaattgatggacaaaattagaaatcagaagctttcgagaggcttgttctctcctatttcaatctgtttgagaggattgggctttccacaatgagtcaactcttgccaattttttccatacctttctaagagacccctccccttatatactttacattgcccaaaaataattgccacatcagcccctaaaactaatacaactcagccactaatacaaatcagcttttaattaaaacaaagagagttaacaactaagactaaagtctagtttaatctggtggcttatcacatttgtccaagttgtgtttgcttttttcttgtaaggagaggccaggtatctgaatctacggtttatcaatagtaatgagaatttttcccagaattccatctccttgctgtttgttgcagggataccctatcaaaacatttttaaccaataaaagattcattcgaagtattattacccatctttacggcaagcagtaacaaattttgtgactcgtaacaaagatctcagaaaaatcattttcgcaaatgaaaataaaaaaacacaatagattcgtgattagcttgtgttttacggaaagtgcctaaaagaatagggggggagtagaggactttgacgattaaagataatgtctgatctgggatttgtgaaaggatactaaagaatgcacttgttactttattattgtgaaatgtaaagatgtaacagattttaggtttagaaactacaatcaattttttttaattattttttattttttatggatcacttgttttacacatcacttgtatcctaataagttttctggctggtttttgaatcttcaggtaaatttagaggagagggtttccatgagaatttcaatgagcacgagacagtttttcgggcaacttttggaaacagatggtatacttggtcttttaatttaagaaatgagtctttcttcagagattcagcatctgaatttgagtggcaagaacggtcaaacgggaactatagaagtaaaacatttgggggcagtagtgactctgagtctgatgaagaatcctttactgtaggatcgtcttctgatagaagagttctcggtctgcccctaactggccctttgaaattagaagatgttaaaaaggcgtaagtgatttagatctctttgtttacataagaaaacacatacgagatcaatgtctacatctaatttccgcattcttacatgggttttgtcctctgcattgaccttgtcctgacagtttccgtttatctgctttaaaatggcatccggataagcatcaaggcccttcacaggtttgattcaactctatcttcattgattattcattatgatcatcttgatattgaagctaccagcacatggtaaacttacttggcattagaaccaagtaaattcgatcgaactcaacttctctcagataatgcagagttcaagaataaagtagagaattaccttgtatttgtgaaacccaaaatcacttatgatgatcactcacttgactccataattaagagttagtctcatgttatactttccttcgcaatgcatgttttgcaggcaatggctgaagagaaattcaagcattgcgctgacgcatacaaatctttgtgcaaggtgctatccccagcttgaagcagctgtagttttgagcttagtaatggatggacttctaacaaggtaatggatggacttctaacaaggtaatggatggacttctaacaaagaaggctggtgcaactaattttatatgtggtcttaacaaatcttcattctttttacaataaataatgaattattcatcagatggtcgaaatttcgtcggatagtttagtttagtttttatagagaaggaaagtgttatccgctgaaatctttactgcaagctaaactgttcaagtttatacctaccacatcattcactctctcattagagcttttccctcatatgattgtaaagaattacacaaataaagtgtatctatttggaaagtaaacttcatttcatcttgtagatattctacgtacttgcatcaatttcggttaaattttgtaaaagtatgcaaacttcaatatcttggcaacactccagtttgccttaaaagctatagaggcggagaaagatttagctgggagtagcctttcctgaccaggtgaaaggaaaactgtatttgcactatttagagtgttcattagatcacattcaatggactcaactaattcaatctaattgatattgaatattagattttgttattcgatccaatcaaatcgaattgagtcattcgatccgattcaatccaataaaggtattagattggatctgttccaacaattggatgcattaaccggttttctattggattagattggatagatctaatttattttaactaccatttaagttatttcattaaaaaaaaaatatatatgtaagaaatataatttagaacttaataatttaacatacatttttttaacttcaataatctaatatacataataacttggtttagtctaaattaattttcataataaaattgccgaaaaataaaacttattcaatatgattgataattttattagtatttaggtagatgaaaaataatattttagatttagatttttttttatctcatgtgttaaatatatattaatatat

SEQ ID NO: 302159 - DNA, 2013 bp, Cannabis indica
gtaaacgccacaaccaccactgcattaaaaaaatatgagtaatcagtacagaattatagagatttttattaagatatttaagatatttacctaattttttccttcaggacaatgtcatgacaagtttgggtgtaatgcattattagaatctagtggcagtcattcatatctactaccaatgtttggttgttaattgagaactcgccagatgcattcagtaaagaaggaagcaaatccttccatggtttcatgatggcatccagctcacttttagcacaaatgggagaatcacagtcatacactgttattttctacaaatttatgtcgatctcaaccgctatccaattctggtgttctcaaagattcaaaacaatttataggaagtcattctccccccatcttagatagaactcagtctgttcaaataaaacatcaacaaaaacatttaataaatgatcgacaaaatcataagttaccaaaagagaatcttaatcttagatatttaaaaaaaaaaattgtacctgtacacctttataatacatggatatcatcaccccaactaaaatcagccctcgaacccttatttacattccaacaatgtgcgtaatattggccacatatgtggaccgaatgctacgtctttgggagaatgtgttcgaaaagaagtggtgtcgcgtcctaagcatatgggtgctcacatctacatgctacaaataatgataaaagaaatatgttaggaaattaaattaaattaagaaaaatatgtagctgtaataaaattatataagttaacttacgcaatcttgaattcattcttgtagtgacaaaaacctcattcaccaagtaggaccttaatcattagttttcacctataaaaaatatgattgttggggatggccccaaacaacaacccacaaaagctatccaacaacctctcattcgataaactgacggtatcgaacggtgcaaaagaaggattaagttttttcttcatctcagtatagtccttgtgactaactgtcacctatggcaataatggtggcatccacgagaatacaaagtgcctcattaacataagaatcataactgtcagggtacacgtcatcatcttttttcatggaaggttctggtgttggatctattgttagtttactctacagtatagtcaagttatatctcatctactccatgagaaggttatgaccacccttcggttctaggtggctactatgtcaccttcaacttaatctaggaagcattaagaaccttttcctcatcctctatcttattaaccgtctcaaccaaatctctgttgttagcaccatggacacctgaagacgatatgtaggttgaggctctggcttgagaatagtagtagattcgatgtgttttacttctctttttacttagcttgctaaagaagaagggtcctcattgttatcgttaggttgcatctcataaacacccatctgtacttgaatctcaacatcattgtaagagatggtcctggtataggcctcttcatctgggtgagaatatagctccttcatgactacaaatttttgtgtaagatgaaaattaaaataactttttacaacaataaaaatgttatgtagaaaaaaaactatccaaaattatttataactaacctttaacaacataaaagaaatgctcatacctgttaatgatggatcgagttccttctacccaatctcacccttacatgtccatctaaatatccatggaaaattaattctctgaatcaaacgatacatcttcccaaagtatagaatggactcataagctgaatacttaaatgcaggtgcaaggccatagtctaatatcctaagattaacagaattgattagcaaaccctaactagttaactgtgtataataatggaattatattattatataatttattatacgtgaattattatgatttatgacatgttaagaccccattgggagacaggggcattttagtaattttgaccagagaagggtaaaa

SEQ ID NO: 302160 - DNA, 2450 bp, Cannabis indica
atcaagtatcaacaataaaattattttagttgaccttgtgtgtttgaagaactataaatatattttgacattgtaaactacttaaaatttttacaaaaaaaaaataaaataaaagataatgttataactataacaaataccactataaaaataaaaaaaactactattcaaatgaatcatccaactaaaacaaagttataaactaaaaacatattatggaggagaattataagagtaatgctagtttttttttaaaataataaaaaaaatgatgtgaagaataatgcaatgttatgttggctcatttgttttttttcctcttttttttttaactttttagaattaaaaaaaataatttgcgagtgctagtgttttttttttttggtgaaaggttcaagttagcttcacaaaaaaaaaaaaaaatgttttgagaggtgacaagtacaaacaaaaattatgtctaacgacaccattatattgtatcaaatttgtcgcattttaaatatcataaaaattgtattaaatttgatgtatagtgagggtacaaacagataatatgattatgaacaaaaaaaaaaccaataataagcaattttataatcatattacactaaactatataaattatttgccattagaaatagcatatggtacacagaacataacaataacatcagttaaaccagtaaaataacattattattcgttcaattttggtcaaaaacaaggtaactaagataagattaacaaaaatgatgatacattattttctaaaaaatatttgaaactaacatcttcaacctaaccctacaaatatttggggaccaggtatacccagaagggtactcgaacctcataccttgtgatgatacatggcacttagaatttaacattattgcttgcttcgattcgatgaagctattactatatgctgctgctgctgctgcatatcttagtgccactaagaatataaccaccaaatgcacacatctgcatgaaaggatgtgttctcgaaggaagtacctgatattctcgtaaccaaggctctgagatttgcaacccaattgccattttctcaagctgtagattatgcatacaagttgcaagtggctgcaagaactgatgataaattgcgaaaggagctgaatttgacaaaaggggcaagagatctttaactaaactccaggtatccaaatctggtgcagcaactattagactggaaaacccattttctttccacaatttaatcgcttctttaggtgctttctgcccagctttatttacagatttgttgcaacttctcattacttgagaagtcccatctggggtctggtcattttgatccaataagccaccttgaacacctttcatgttagaagaatcgtcaccaccagtaccattatcattttgatctaagctcccattctcggtcgaactggaactagtcatcaggtcttgaagagaagcctttagaatactcttgcaaatatcattgccaaagttgaatattctaactatctctatagaataaggggttttaccaaggtaggtactacaaacctgacctgtgccggtacctcccatcctttcagccacagcaccagtaagcagacctccaaccatatcaaccacaagggcttcagaatttgcagagatattagcaaatgacagtaaaagagataaagtatcaactctcaagaacccaattctggaaggatatttcttaaaataagcctcgcaaatactacgagtaactgggcgccttaaaatcactttgggtgcatatttcttttgctttttaatcctatatttctcttgggaaaacaatgttttattctcaaatgtagaactatttgcaataagagcttccactatatcatcacctgttacaccctctcttcgcattgcatctatatcttccccggttagggtctgagctttattgtcatcaaccaatgctcgattgtccttggacaaagactcgtctttcttcgattcacatccattattttcttgagcattgttcttaccttctaaggaagagggactggagcgagtcaaatatgagccttcacttccagtttcgacgctgaaaactgaaccaaatgggcaattgatcaagtgtttcagagaataattcttattcccaattttcaaagtcgcaccagcagatagacgagcaaaaaccaagcgatcaccatcattgatgtcaagcaagacgctgcaaccttcccatgtcactctagaattttcaaccaaaccgcttttggtattagcatcgtcagccatattatctgctattatttgagactgcaagcagaaaagaattaaggaattaaaccctaaacaaaatatatatatatattatataaattcttatgtatcagaatttgtggtgctttaacagattgttgtactcttaaagaaattttttttcaaaaaaaacaaaa

SEQ ID NO: 302161 - DNA, 3088 bp, Cannabis indica
cattcacatcttttccatcaagatgtgaatgaaattgtattattttaattaaaattcctaatgaaattatattatttcagtaatcatttattacttggactatatttacaattttaataatataatataaaactattattttcctaagtaggatagaagactttcttgcacaattcaaagggtacagtatcatgaaaatttcaatagaagaaaatgcaacagtagacgctcttgcacagttggcaagcagtacaatcacagacaagtcaaatttagtctcgattcagttcttcaaagatccaagcataacaagcactgaagatatcgagatggtggatataaccccaggctggatgacaccaattgcggcctacctaaatggtgaactaccgattgatagaaatgatgctcggaagatgagaagaaaagttgtgcggtacctaatagtgaatggagtaatgtacaaaagagtttttctattccattattaagatgtgtcactaaagaagagtttgtgcggctattatctaaacttcatgaagggttctgtgggaatcacgctaggggaaaagtttgtccaagaagatatgaggtaaggctacttttggctgaccataattgaggattccaaggcttatgtgcaaaagtgcaataaatgtcaaaggttttctaaagttcctcgagccctgcccaatgaactgatatagatgcaaagcccatggccatttgcaatttggggaatagacctaatcagacaactatctaaagaaaaggggagagtgcaatatgcaaatgtggcagtagagtactttacaaagtgggcagaggccgagcttttggcaataattacatccaaaaagtgttagactttatgatgaaaaacatcatattcaagtttggactcccccataagattgttttagacaacggaaaataatttgatagtcaaatgtttaccgatttttgtcttgaacaaaggattgttaagagtttctcgattgttgcacaccccaggctaacagccaagttgaggtcatcaataagacccttaaagacatgttgaagaaaaggcttggataagcaaaagttaattggcctgagcaattacctgaagtactctggtcgtacaaaaaaactgagaaaaatgccaccagacaaacctcattttccatggcatatggttatgaggccatgctgcctatggaattagatcccccttcccacaggaggataacatatgaccaggagataaaccatactctcttgacaaaatcactcaacaaaattagagaatgaatgggcgtggcagccctaaagttaaaagccaaccaacaaaaggtagcttgttaattcaacaaacaagtaaaacagagaaatttattcgtaggagatatgatgtagaggcgagtcttcttaaactccaaggacaatgcggtagatgtacttggacccaactgggagggcccatattaagtaactgaagtcagtgagtcaggagcctataagttgggttagtataatgaaaacatggaatttattctagtcccaaggtactagaacggtgaacacctaagaaggtattaccagtgaaacatcacttccaaatggtggccccttgtgtggatgtcgcataagggttgagtgaaactttttgtactaaggtctgttgaccactttcaaagtacttttaaaagtttaattttaatcaaggctaaagacccgctcaggtcatgtactagctttgatatttaataaatgtaagttacttaatagtgactgcacttattttccaataaatgaaacatgatttgattattaaaattatgtctttggtaaaaaaaaatgtgaattgtgttaagtcgcaataaacacaaaaaattgcttaagatgcgcacaggaaggtccgcccgatattgaatattgaaatagacaaaataaatgcaaagttaaaattgtaagtgaccgagagtcaaaattttgctcgatcacttgggggcacctatgtccaaatagcacaaatgtaagtaagcaagtaaaagtaaaaaaaatagttaagttaaaaaagcatgattgaagttcaggcttaaaggctgcttggccaaccacttatcttaaaagtaatccatgaataaaagctgcttggttgacatatgtctaaaagcaaaggcatgtgggctacaaaaaaaaaacaacaaaaaaatattagtccattagagtagctaggttgagcgggtcaaaggcattgtcttggtcagctacggagaaattggggtcggcaaaaatagacacaaaggaacttccaactttggttgtttcctttacaagtttggcaacctcctcttcaactcgtttgactttgatagcctctgcctgggtgaacatgacatctttgttctcctttagataattaaaatggtttcaggattggccacccagaactcgtaaaacacctcatttgcacacactaaaaaaggtcatcaatctctttctcagcttcagttaaaaggaccttgtgctcctcctcgttctacacaaccaggttttggagttcttccttctcccctttaagttggtttatagtcttggtagactcttcaagctctttctccaaatggggtaactccataacctttctcttatgcttagacaggtccccatcaacatgctccaaggactactccttttcatccaactccttaagtcactcaatcttggccttatcaatgacggtctgcttcaacaccaccttggttcaggaataaatatacccaacttgcaagtttagctaaggaaaaatggcaatcagttaaggtaaaagtcaaagctgatcggatgaaataaaaggacacaaatttaccttggtgaagtccctgagaaggttccccatcaagaagtcagttggaagcgcatttgcactgcccaacaactccccagcgtctacttggaacctatcttgataacggccacagacctcctcaccacacttcagcttagccaaatggatgaaggtttccttatccttgggcctctatgttggaaatattttactaggatctagatttactaccacgtatgtttcattaacatc

SEQ ID NO: 302162 - DNA, 2121 bp, Cannabis indica
gatatgatctcattagcttccttctttgttcatgcttattagaagaggttagtgaatcaagtaatcaagtgaagatgcatgatgtcattcgtgacatggcattgtggattgctagtgattgtgggaaaggagagagtaaatttttggtgaaaacaaatgctctattggttgatcccccgaaaactgaaaaatggaatgagtttgaaaggatctctttgatagggaacaagatcaagtatgtttctataagtcaagcatgtcataatctctcaactttattccttcattttaatgatttgaggcgaactcaatcctttcacttcatgcctgtgttaacagttttggatctatcaatgaatagaaaattaagtcacttaccaatggaaatttcaactttggtttccttgcaatatctcaacctgaagggtacagaattagaagaattgccaaaagagttgagtaacttggtaaagttgaaatacttgaacttagaggggttatcttgtctagatataatcccaaaaggattaatatcaagttttcctcaattgcaagttttaaacatgtttggatgtggagtgtccgaaaacatagtgatgggtcaagttcaatgtggaggtaataaattacttgtacaagaattgcagcacttgaaacatgtttcagcattgggtgtagccattaaatgtgtcactgcctttaagaggtttttgacttctgaaatgcttctaaactccactcaaagcttgttcctccaccagttaagcttaagcaccttacaggttaacactctttcatccatggcgaatttatgccgactttctattcgacactgtaagagcttggaagctttgcagattgacttgcatggaaaaagtaaagagcataaaagactgtttggaagccttcagaatgtgagtattcatcattgtccaaaactcaaggacttgagtggacttatttttgctagagaattgagtcatcttcttattttcagttgtgatgcacttgaagaaatcataagtggggacagtgttggtgatgctggtccaggcactaaagagacatttgttaaacttgaggctatgacattgtctgatttaccaaaactaaagaatatctgccctaagcccctgccttttcattgcctcaagttacttgatgtgttaaaatgtgaaaagttgaagaaactgccaatcagttctaaagacacaagagcaactaatctgactattagaggacaaaatcaatggtttgttgatatagaatgggaggatgagaccactaaagataaatttgctcactgtttctctggtgattatctagatgacatggactatttggatcttgattcatggtgagttgtattgtagctacaacatcacttaataattattattatttaacttttatttatgggtgattttagttttctcctcttaacttgtctttttttttttttttttcatttggttaggtatgattaatcttggttgtggaactgaaaggtgaaccaaggtatacacaggaaataaactacaaaatcagagttgaaccactggcaccaagcaattattataagatttactcttttccaacatgtatcttgttgttcattgtatcaattttaaggccttgctttttaataatttaattatctgtggcttaccttcatcaaagcttattaatctaagtttagttcatgtgcattgcaacatttacactcaaaatatcattctacgttttgacattatactttacgtgtactggcaagttgctcacaaagatgtgtcaagaagacaagaataagtaattgacatgtgtattctaatcagaaccgacctatccaattataatcgatcatcaaacattggatatccaattgtgatcggatcagattggatgttattgtcaaatatcaaattgatcggatcggatggtggatgtggggtccaaaaattcaatacatccaacatccaatcgaactaattagtattttcatttagcttagatgaataattagattttatattattatacgtaaaatttatatttatatattaaaattaacattaaaattttactctttttttcttggattggatggatccagtccaatcc

SEQ ID NO: 302163 - DNA, 2528 bp, Cannabis indica
aggtaggagacggagacactgaccactactgttggcaacgcccggaggacatgacaacatctcggcaagcttacaagatcgacgagaacaatcccgggtcggatctcgccggagaaacggctgcagccatggctgctgcttccatagtttttaagtccacaaacccacattactctcacctacttttacagcatgcccaacaggtaattttataattatggtggaccattttatgttaatgaggtattaaatgggttggttcaaattaaagctagctagtagtagttttaattttgattattaattggtaatttttgtgggcagttatttgaatttggagacaagtacaggggaaagtatgatggtagtgtgggagtagtgaagaattactatgcgtcggtgagtggatatatggatgaattgttatgggcagctctgtggctatacaaggccaccgacaatgaagtgtacttgaattatgttattgacaaggctcatttctttgggggtactggttgggccatatctgagttcagctgggatgttaagtatgctggccttcaattactagccaccaaggtaatctttttaaatttttaaaattttttcaaaattccaattcataacaaatagttaaaagtaaaaaacccttctactttgaggacaaggaaggaaggagtttgcatacatgggacctactactactattactacatttatttattttgggttcactctcactcgctactctcgataggtgtcttcttagttttggtctataaaaatcttattgagttttgctttttttcctatattcaaagaagaaataattacacaactttaggaataaagttcaaacaacaagtatgccccacttaataatagggttacattacatcgcgcatagacttaccatttcaacagagaaatgagaaggttctgttttgtacttttttttaatggtagaagtaatattttccagtttggagaaaaatacgtaccaaatttatttataataacatatatatacagggcataattgggattgtataaatggtcatatcgaacatctgtaattgcttcagcaatggctgagtttgtatcaataatgtttgatgattattgtctcacccattttagtggagcccgatgtttcattttaattaattccaactccaatgaatgtaatatttaattacaaatttaaagattttcatatttgacacataccctttctttgtgtgcagttattaatggaagaaaaacacagagatcatcagagtcgaacaattctagagcaatatcgatcaaaagcagaatactacatttgctcaagcctaaacaagaacaatgcgagcaacaacgtagaacgaaccccgggtggcttactctatatccgccaatggaacaatatgcagtacgtctcaacggcgtcgtttcttctcacaatctactctgaccttctcaagacctcaggtggtggtcaacagctcagctgccacgctggaatggtgggccccgatgaaatcttcagcttcgctaaatcacaagtggactacattttgggctcaaacccaatgaacatgagctatctagtgggctttggcccaaaatacccacaaagggttcaccatagaggggcttcgatagtgtcgtttagggagagcaaagggttcattgggtgtacccaaggctatgactactggtacggacgagaggagcccaacccgaatgtgctggtcggggccttagttggaggacccgattcacaggacaattttggtgatgaaaggaaaaattatatgcaaactgaggcctgcacttacaatacggcaccattagtaggagtttttgccaagttgtcacaattagaggaccaaaattggctactcatcaaagtttggatttgattgcttcttattaagaatagttttgggcttgggttcttttctaattgtgggtgaaccaaggttctcccctcgttttttatatcttaaattgttttttcttaaagtgttcataatactagaaagtttttttttttttcttttttgaaaaaaagttaaaagccaaaaaaaaaaagttagaaataaagatgcaaaatttgtccattgttatgatgaaatatacttatctatacgtcttatcataccaggctgcaaatgtaatggagaatatattttttttttatgatttagataattcgatatttgatgcaattgtgattttgttttaataaatttatattgtacatgttgaacgataaaaaaaaaaaataaataaataaatttattattatttcattattggtttttaaaataataataataataaaaaataaatatcagtcaaatagagagaaaataggatctcaactccccactctcctatttttactcgataaaaaaaaataataattttattggaaaaaatagggtctataaataggagaagttgagaacagaaaaaggatcgacactttaaaaaaaaaatactgagaaagagagaaaagaaacacagagaaaaaa

SEQ ID NO: 302164 - DNA, 7053 bp, Cannabis indica
acgataagccataagttggtttcatgtaaaaatgtgattctaactttgatacgtcattatagagagatagctttcgagtggattcttccccttctggtttatgtcattttgaatccatataagcagcttatagaattaagtttcattatattattctgatttggctgatgcggagattgtagaaaaagttgaattttttaatcttaatattctattcatgggaccctataaggaaactagttttactctacactgacctcaatgaaagtccttgagtttctaaattgaccattttgttcttttcttggcaaaactaaataagggtgattttcatcttttagttcgttcttgctggatcttcattctggtcttgaatgtttgtttattttactttcaatcagtcccgaggataatggtaaagttgcagacgaattgaagagagctgatgcagttgttcttacttatgcatgtgatcaacctcagacacttgatcgattgagtaccttctggcttcctaaacttcgtcaactagaggtttcattctttcttgcattggcatctatatatgtatatatatacatatatatatatatttattgtttcaccaatatctcaaaatagtagataaatgaacaaacattcttctggaaagagtggtgagaaaaggaggaataatttgattaacaaaatccttcagatattttacatagtagatggatggtttcatttcaatgatgttgctctcaattgaaactactctgtataagtttatggaactgcagtattgctcatatagagtaaaagttaaaggatagcttcacgtgcaggtgaaggtcccagtcatagtggtgggttgtaaactagatttgagagatgagaaccagcaggtgagcctggaacaagtgatgtctccaattatgcaacagtttcgggagattgaaacttgtattgaatgttcagcattaaaacatattcaggtatgtacgctttgttttggatatttgtttgttaaatcatgctagtcagtatgctctattttttgacgcttttaatatgccattctggctcactcttttattcattttttttttataatttccattctgattttactgtaccatcaaagtatattttttctcacaattagtagttggaatattttgcatgacttatactaattaattagtgaaaagggtctgttattcaataccgtagggctgaggtattttaggaacttgaagttctatcaattattttgttatcaggacattcacaatttaaacggcggactggattatttacttttgtagattcctgaagttttctactatgcacaaaaggccgtgcttcacccaacaggtccattatttgaccaggaatcacaaactttaaaacctcgatgtgtgcgagccttgaagcgaatttttattctctgtgatcatgacagggatggtgctctcagtgatgcagagctgaatgattttcaggttttatatttttgttgttcactttttaagtctaggtttcattctctgtatgacttgaaattaaatagttgttaaggaccgctattttagtgtaagtcgtgaattctaatttctaatctactctttttaacaggttaaatgttttaatgctccattacaaccgtctgaaatagtgggtgttaagagggttgtgcaagagaagattcctgaaggagtcaatgagcgcggacttactttgacaggattcctcttcctacatgcactatttatcgaaaaggggcgtctagaaacaacttggactgttctcaggaaatttggatacaataatgatataaaacttgcagatgaactcattccagctccatcaaaacgaactcctgatcaggtatatcattgacttaataatttggtagtcactatgggtgatggcctttgatgtgtttctattttggtatgatatcttttgtagaagtaaattggacaccaatatagttttgggagatccattgccaagaatcttactgccctatgtttgtttattttgatggtctatttgagatttgaaggcagttttatgtaaaacttgtgtctagttagctatatgtttttttttttcttttcttggaatgtaccagcaaggtgcataagccatttaaatgcttttttgggttgaattgggattgattttatgacactcatattcatggtgtatagcggagatgttgtgcaagcttcattaaattttactttatggtttttatatttcttttgtatctctacacttcacatgtattcattttacactttagcaaacattgctatatttaaattgaattatatggtatttgctaaaagtgctaacagttgatcatcatatctgcagagtgtggagctgactaatgaggccattgagttccttaaaggaatctttgaggcatatgacagtgacttggtataccttgctcatcttcttgtacacagcttttttcgagtttatttttctctctttcaatgtatgtgcattatgttgtgtgaagtaatctttttttttttttttttttctttttcattctactagtcaactaagctctttttgttttaatcatgacaatattgttactatcaggatggggcactccgacctcgtgaactcgaagaagtattttctactgctccagaatggtagtttacagtttttttctcttcaaaatatctattggctccatttcttgatttttcaatattaaatgtttttgaagaatttggtcttcagaagcaacatgcaattgtgaatttacaatggatattgttatttatgacgtgtttcaagtacctaatacctatcttctcagaatatgaacttttgcagactgcttcttgtctttggatgtttgataatgttcttcttttaaaatgccagtccattcagtgaggccccttataaggatgctgcagaggcaaatgcttttggaggcctatctcttgatggatttttatccaaggtaccatttttttggctcatgggtattgggaagagaaaaaagaggaggaggggggggggggggggttgggtgaggtttgtgggtactttggggttggttgagtgtgcttggtcgtgggatgctgtttagaactaattagatgtattatttaactacttccagggtagtgacttggtaccttttctacctatttgcattttaaaaacttttgatcatgagcagattggaagaacataatacatgtgttacaaaacatatttgtatgctttctctgttaatcgatgtctgaaactagtggaaacacttgatctgcagtgggctctcatgacactcctagatccaacttttagcatggaaaatctgatatacatcggttattctggtgatatttcatcaacaatacgcgtgactaggaagaggcgtttagatcgaaagaagcaacaatcagaaagaaatgttttccaatgttttgtctttggccctaagatggctggaaagtctgcaataattgattcttttcttggaaggtcatcttatgaatcatgttttttatatttttaccctccctttatttatttgtcaagaagatttgttgattattttctgaaaatgcaggcctttctctgatacctacaatccaaccacagaagatcggtatgcagtgaatgttgttgatcagcctggggtatgtttattacttgtgtgtgcaagtcttttatgattttattcagtgagcttttcctagttcacatttgtatacatatggatttatctctttcttttgaagtagtttttattgccagttgtttctggacattctttgttggctgttgattttaagaattcgcagtgcaactgattgaatggaatcagttagatttttattgaaattagaacttatatcacatgctttgttgctttgtttccagggcactaagaaaactcttgtgttgagagagattcctgaagatggagttggaaaactgctatcaagcaaagaatctttggctgcttgtgatgttgctgtgtttgttcatgacaggtaagatatcatcataatatttgtcttagggtgtgtttggaaagccacaatgttattggaatttagtgtaattctgagaaattacagagtttggcgtgtttgttcaagcaggaaactacactgtaactatgtaattggaagtaattgagaggtctctgttacactctctctctctatgagaattgagtataatcacaagtattatttttagataatttaatgttatttttctatgtaattaataactaatttgccaaacataaaaataagaattcaaatgtaactattacttgacatccaaacacactttgtattttaaagtattgtaattactatgttgtgtaattactatcctagtaattatactatctactatctagtgtttacacaattacttacaaacacacctttataagtcaaggtttttgtttacaagatacagcttctattaaaggctcatgtaatagcactgccatatttgtttacttattttgggtgtgggagttcgtaacctatgagaaattctcttcaaagtaaaagaaaatttctttctataagaatactatgcttttgttcctataacaaaatgtacttgttgaagtagtgaataaagatatccgggataccaaatatatgacttacatcccagtgtgaaatggtgcaagcacatgtctcgtcgtattaaattatttactgttggttaggttagttgtgatcatgctttgacatatttatatgttactagtgattgttttgctctgtaaatatttactgttgtattatgtttatgtattttaagtgttgtgtttttatgtctatatgtattaagtgtgtgtatatatatgtatatattaataaagccactaggtttgggagggggggttgggaattgggattaagaccaaggttcggacgttgggtctcttgtattggactcttcgtcccaatcaagcacaagtgtgcctatgataaaaatatgtaatgtgtatataatttttattttttctaatttgccagttctgatgagtcatcatggaagagggcgactgagttgttggttgaagttgctggtcacggtgaggatactggatatgaggtgccttgcctcattgttgcagctaaagatgaccaggattcatttcctttggccatacaacattctacgagggtataatattttgttttcatacgtttatgtgtcaattatattggataattatatttgattttctgtaccacttacctcttgctttaacctcaagtaatctactttaaaaactcatttttgcagattagtcaagatatgggagtagaagctcctatacctattagcacaaagttgggtgattttaataacgtattccgcaagattataaccgctgcggagcaccctcatttgagcattcctgaaactgaagctgggagaaccagaaagcaataccaccggcttattaaccgttctctgatgtttgtttcaggtatgaataggatgatggatttgaccttgactacctgtgggggctcttaaatcttgaatgactcatcaaaataatatttggctaattgggcttgcttttaattttttgtggcatttcctttgcagtgatttttgtatggtgattttttatttatcttagcacatgttgaacttatttactatttttgatacagttggagctgcagtggccattgttggattggcagcttaccgtgtctatgctgcaagaaagaactcgtcaagctaaaggagaagggccgattgtttacgcgacaataagctttctacgtttgttttcacgtgctttgtcaaatacaatagttgtgagaagctgcgtcatctccagaaatcccactttgatgggtcacttgagacagtttatatgcatagaataattctgaagtcccattctatatattttttttccatccttaatttttctttcctacactgtttgtattctttgtagtggtttatgaagatgactatatataaattgattggtgatcattgtttcaacagagacataagcgtgctttcattgttgtgatttaaggatttcttgtaggtggatttagctgataccaattttgctacaacttgatgccacatggttatataaagcacatatcaaattaaattggtagtgagtttcattttccttggcaatttgatcttagaactttctatctcttcctttacacatttaccctatcactatccttctccgatgacgggtactactatggtgatcggtccggtacttgccactgccgctgctgttccctcctttattttcaagatacttacagtacctctcaaagagttggataggtacctgaagtttaaagtctaggctgaacagaaactctatctctaactcgttcatttcctctgtgctcacaccacccactcgtgcatagtacgcattgttgtcgcagctgaataaacatgaaatttatctcaaatcaatcaatgacatataaaactcactccaaagtccaaaacaatcgggagacgaaaatagaaatagatttttttttttttacaaactaaaatttgaaaaaatttaatgctgaatttttttgaattttttatttataaaaatataaataataaattatcttttttagttattattttatagtttatttatgtttgatttttgattattttttactctttgctaagaaaaatataattttgtaattttataattttaaaaaatatttttataaataaaaaatttaggttataaaattgtaagaaaaatatataaaaaatatttttaaaaatttcccaaaataaaataggaatagggattatttcagaaatacaaataagggattgatggattagcgccacatggaaaaatgtcatttaattcctcaaacacaaataaataaggtgacgtttggtaacacttttttaatcagttttctgtttttaaaagtaaaaagtgaaaatatcttttaaaaacatgttctataaaactgtttttacttttcaattttataattagaa

SEQ ID NO: 302165 - DNA, 1474 bp, Cannabis indica
tccttgaatcatgaaatccttaatgacacggtggaatgcagagtttttgtacccaaagcctttctcgcctaatcaagatagataatcgagattaaaccagcaaataaataaacagccagtcaacatgaaaaaaagagaaaagcaataaataagatacccaaataaagcctcacctgtgcaaagggcacggaagttctcaaccgtctggggtacatcatcaccaaataatccaatgacaattcttccaacaagctttccaactggattcccaatgcttatgtcaaaatatactttgtgggtaacttttgattgtaaaggggctgcctgaaaaattgtcccctcaaaagaacaacatatgtgaataaacagtttacttcaaagtagttctatgagggtaatttgctaaaataactatatgcaagtttggaatcagcaaaataatctcattgattttacactaagctaccctactacctgctcagtgtagggtccttgaatgggttgttcagtgtatttttagttttgcttaaacggatattttgcaaataaatagttttgaaacgttagtttgctaataaattgttcaattaagtataaaagactcgttctatgatgtgagcttatcaaagtagtcattttcccaaataatccaaaaatttgacaatggcaacagaataagtgctaaagcaatcgaagaactattacaacattactgcaataactgaaatcccagctcaaaattctgataattttggttattggctctatgaatcaagctcaatacagaagagtggcgataaggaactgacctcagcactagctcgaattgagctacgaagaccaaatttcccccgagaatggaggtgagatgatgaggatttgagagataaaagacgagaggagtcagacgacgtcgttaaactcgaggatgaagaaaccctgctgggaagcttgattgaactgcatgttgggctcactattccaatctgtgaaacgcatttcgagcccggaaacgaggcgacaacattcgactgcgccaacacaacggaaatgaaatgaaaatgaggaacaaatgaaagagaaaattgtaactaaaatgctgaacaaaacaaaacaaaaagagagcttttttcccctatttccgatggagctttctcgttgacaaacacagatatatatatgtgtatatatacagagagagagggagagagtaaaggcgtattaccagaggtgaaaaggtagaagccattgacgatgaagatggagtctgctctaccgcacacgaatgcttcgttctttcgcagtgtgtacttttagttttagcgttgggttaggtgaaggctagggtaatttagtcatttactaggcgattaattcgaaaaacgtacttaaatatggaaatatgataaactaaagccgcttcggtaataattttattttttaatattttaattaccaaaataaaataaaattt

SEQ ID NO: 302166 - DNA, 1847 bp, Cannabis indica
attaaataataaaatatttttgtcaattgaatatgccaaaaatggaattaacatatgtgtcaatattgttattgatccaactaattatcgagtctcatatcatttaatgtaataacttttaaagagtatcgctagcaaatcgcaaagccacatgtctagaggtgctagacatcactggtgtccaataacaatgctcttaaagattatataaaatcatttcaaatgttttaaaatttaaataaattaataaaattattataaaatgaaacatattatacatttcctttctttatatttttcttatttttttctttcttcctcttcatcgacatcaaccccgaccatctccattactagcacaaccaccaccatctccagtcttgaacccctcgctttcttccttgttcaaatcgacacactaagcaagcttggccactaccctccaggacaattacagaactaggaagaacatggcaaaggggcactgcctcctggtttaggcaaacacgcgcgatcatgctagagcgagaacttcaacaattttttgtcttctaaactctttttcgatcaatggttgggtgcttaagacaataacatggacccatggttgagttttatgactctagatgacatgacagagtattgtactatagagaatcaaatcaaggtaaatgttgatgtaacaatttttgaaaatcgactctatcatagtttttgttgggtcttccctgggaacaaagcattgctgcttggggccatttcaagatgtcgcaatggattttgcaacttgaattggtggaagagctatgattcaaggaagcatttagttggatcaacggaaatgcttggcataacgtcaccattgagacgaattgtcttgttgtggtggaggttgttcgtatagttaggtgtcaatggagtcttattttggctaaataagttattgctcaatgttagtctttgattcttagagtggttgaggaattttcttaaatttttttgttaaaggttctcctaataaattggctcactttcttgttagtgtctcttatttttctctagtctagagttttacattatttattgctcggcatttaagaatatagtgatgattgatactatcaaatgaagtattttttttataataataataataaaaaaaattgtatccattgattaatgtattaaatatgttaattaaaccataattaagttttcctactatttggttatgtcttgacttttgtggggtctatatatcgatatgaacaacgccaataaattgagtgagttggcatggttctcactccatcattctcctcctactcctcctcaagtattttcaaattttaaaaaaaatgataacaattttttttagcataaattaataaaacaatgctaatgaatcaagttaaaaaataaatatatatttgttatggtgtcgtttgataacacttttgttttttaattttttaatcacaaaatgaaagtacaatttttatttttaaaaattttatttttgaaaaacaaaaatgcgttctataattacttttgtttttcaattttaaaaacagaaaaacaaaagtgtattctgtaaagttcatttttattttttattttatttaagtcgggtctaagtccagggtcgaatttgaattcaggtcagaggttgggtttaacgccaagggcctgggggggggggggggggagtttgggtccggagtctgattggagtcaaaatattgattaagaaaaacaactgtttaaaaaatattgaaagtgatttttttgtttttaaaattttgtattctcaattaaaaattaaaaagtgaaaacaattttagaga

SEQ ID NO: 302167 - DNA, 5400 bp, Cannabis indica
aaaactacatgcagtacttaatgaaacagaaaataataaagagctgtaactttgtatgctaaaagtagagaaatcaactactagacgacatagtgtatacagcttgataatgtagcttccataggtttaaaagaaaaaaaaggcttaccgttcatccaataaacaggtggctttgcaggtttctctgtttctttatcctccttagttgcatcactccctttgttttcaccaatatcaaaaataactgcagcttgatcgccactaacctcatatacctccccacgttggcccttctgcaacaccctgcataatgtaagcgctctgtcagaaaatgctgacagaatgacatacacacacgagagagagatatagagagaggagggtaatcttatttctagaagttcaacagttgtggtctttaatcacataagtaatggaagtgcaaggcttcacacagagcagaaataaacttaagggagtcggtcaatttttccagccaaatcatcattactgataatacaatcatatacaacaatggaaaaggtggctaactcagaaacaacgaaacccttatcactttaaccataaccatatcctcaagtaagggggaaaaaacgaacatcattgtccaaagaataccggaactctttgcttagagcgaacaatatgacccagggcaagcaagaaaataacaaatgtaacttccaaccaccatccattcacactccccacatcatcatctttattaggagtttttagcaagatccgaaaaattctttgcttcttttaaatcaattgcatttcttttaaaaatttatggtagcctgaaaccagttactgttatttggcttatgatctattagctaattctgtaagaaatgaaaattgttttgaggtcaagatcaaggtaaaccaaatgaaccactggtaacaagaatatggaagccggccgggtcaacttaagctctagagagaagaggacattcaattcaagcttttccctttcttccctatacatctggatgacttaccaacccacctgccacgaataatagtataagcatttgttggaccatcagatgttgatatcttccccaatatgatcctgtattgcattatgcatgtcaatgtcaggtgtgggttgaagctagagacactattggatgagatcaagctaaaggtttaagagagaccacaaatgacctcttcctctctcatgtaattagttttattttttcattcgagtttggtgagagaagtttttgtcaagggatagaaaagaatttctccaggaacgtaaaacaatgaagggataatttataaaaaataaataaataaatctccaaattacaatgtaaataaataaattcatacgagccttcacatttgacattacaatcttatttaaaggtctaatccattataatatcacaaaattttaagttaactcaaataaattatctcatgacaaattagcaattttccaaaaaagaaagaaaagaaatcaatttaagaagcaaacatggggtgatgcattacctcttatcagcttcactctgagtggaagatccaacatatttcacacggtcacctaaaagaaagtgacaagcaaaagagttattagtaattaaattgtgaatatattatttatgtgatatattatagcattaacaccttatacagttattggtgtaaatgaatatcaagtcctacatatttatatttaagttaattagaattaagtggagcacgttacttaattgtaccaataataacatgcctcgtcttctaggatgttgggcaccatggtgccatatagcaatgctcttagtttaatgaagcagttggtaaggtttggaatgcataattttaatgtatgtgcttataagtaatattcacactccttttttaagaatgctgaaattaaatatggctccttttaagttgaaatatcagcatctaaaaaacacacagcatggggatagtacgttcaaattctcacctctcttcaatggccgttgggatttagaagactcatcagcctcagcattggagtattcagtcgaatcaggttcaccagaaactctctgtaacggaagtgtttgtgaaggggaagaaaatcagactcgtaattgatgtcaactatttaaataatatattgaaaaactaggacacaaaaaacttaaggagccatgaagcaattaattgagcaacctacaataacaagaagctcgcaacctcagatacaatttgatcaaataagttatatatctgatttcaaccttctctacagtatctaagactgttcaaaaccatattaattataaccattagcacaaaacaccaagaggacatagattatgacaacatgcattggcttctcttccacacaatccaccaaaacaaatataaaagaacagcaccaccaatctggcctagcagtaacacataaaaggactaatcagattcctggagacaacaaaagcaccgacatggcacactagtacaaatcttctatgatcttcatattgtgagctaaataggcatgagacccaaggttaggacacttcaactcaatctctagttgatcgaatcaacttgaagataaacttttactaatatccacttatacacttcgaagtttaaagagacttatggtatagcttgttttctaaaattataacttgttagtaatgaatgttatatcatgttacaagaaacatttgatagtgtatgtagcttgctaattgaatattaatagctctgcaatgtttttataaatgttttcaaccttttggtggtaattatttatctaaactatagttttgatgcttataagccactgggatgatgattcctaggttagattttatacggagtatgatagacttctatatcaattaaaagaatttaatcattatatggttattatatgaataaagctaagaacaccacttcctctgtttctaaagtagtggctaggtttcaaaatctacaaagaaaatcagacgtgatataaaatcaccatccacgtgagtgcaataaacatggtaaacatggtactaaatcattaaatcatgttcgtctattataaacatattgcattgtattatagcataaaagttgaaagaacatgacttgatccattgaacctgcactctaactgtttaaagataaatagaaacggggaaaggggaaaatgtgagttgtatcataccttttcgaatttctcacaattgtgtggaacttcaacaagctttcggagggctgcttcagcagttgatacttcatcaatatcagtaccgtctgactttgcctcattactactagtccaatcttcttcattttcatcctccacctcagactccgaagtatagtcctccccgcgttcggtactatcatcatctgattcactctctgattggcaatcatcaccaaaatcctattgcaatattaattataactactttacttttagccatcaaacaaagcggaaaagtttcctcatgtgctaatatattaaattattacaatcttacataaggagcaagaacactgctgtcgagcaccagtaaaggaacttgtaagtcttgcgcaagcgctttaactagtctctcgcggtatagctcagtgcctgaagggggagtgttaatgcaaataattaaatcaaatattgtcactaagggaacaaccaatatacacaggtagacgataatcacttagtaggatcaacaccaacctggtgcactctggagcagaattctgccacttgaagacgacaaacgggcaccataagatgaagtgacctttttgtgattcaaatgagaagcagcacattccaccaaaagctttttggtatggtcactgcgatacaaaataagttaaaacactttagctattcctattattagtaaaaaaaacattgactgatacgaataagcaatgagcagtaattactgaatatagtaaggtagtgtttcccatgaaacagttatcttctcccatggaataaccctccgtaagaactcatttttgaacttatcacgtctggtcaagaaaggtgagtccttttttctactctccattgaaatcttctcattaatgagccattctttttgatcttgctctccgagccgagcatgagcatcacaattcctaatatcctccccaaccttttcttgcaaggtctttcctttagcaaaaccagccccatctttaacaggtacaagtttatcctcactagcatttctgccatcaccttcagagctataagctcggaactgaatagactttaaacacggattcgacttcacatctaaatcagtatagcaactagcagacgcaacagttctagaataaaacgaatgtaagaaactccttctgcctaaactaccatgagaacatttatttcctaaaactgttctacatatcaaagattgagaagaaccccgttcaacagagtatgtcctcttaacgtatttcgatggcaacaacactccccatatctgatttctacactgtattctccttgcatacattgcagcttcttacacacaattcccacaacactgcagagcatgatttcatttcattagtccaagtccaacattgcattcaattattgcaaaaccaacaaaatgaccatataaacagcataaagcataacaaactatacactacaaaatgcatcaatacagcaaaagacttccacaacacaattacctttaccaatctgctctcaaactcaaatttctcaatccaaatacacaaaataacgatttaaaagctttaaaaggaagattatttcgtaataattttccaacttcgaaatttgcagtccagattggggaaaaaacgattaaaaaaactaataaaagaaaaagctttgaagagagagagagagaggtcggtcatacctagaggtgattggaagcttcgtcaagaagaagactggttcgcggccattaaagagagagagaagggtggagagagaagcgggagaggagggaagagcgagataagatacggcttgatgcagctttgtttagagtttaaactaaactcaacaacaccattatacattcccgaagctttacgtaggtttcaactcggaataaacaactccagcccatgggccctctccgcatttatatttgggttgggcccgttatttcttaagaattttcaaatattgaaaataagaaagtggggttaagctaaggtggagaggtttttgcaactaatccctactctaaaattttggtggtaaaactacttaaactactagtcagttagctctttccatccattttttgctgtttagtgtcaggttggaatgtccacgtgtacacagtgtacacgtggcacaattttattagtccacgtaaataaatatttaaa

SEQ ID NO: 302168 - DNA, 1696 bp, Cannabis indica
agcagcagtgaatctagaagaagagtgaattgtattagtatgaagttgggcttttcctcaacagatccaaggctaatgctattccggccattctcagtgtatctcaactaactaaatatacaacataattagacccatacatgtaaatctaacataactaaatcattttaatatcgaagaggcaaataggaaattgaaattaggtgtaattaaagataattacacagttttgcctaattatactataactacataattagagataattgagaattatgtgtaattagttacactaagtagttactacaagtttttcattttaaatattaagtatttgtaattattaattgttttatcaaataagatattaaaaatttataaattattactatctcatatctaaacaaatgttgtattttaaaaatgcaccctaaaatacaatacaacaagttttttttgtacaatactacattgattaatcgtctcacacattatagatttgatataaactatgaattatatatgaattatatgaatgaaattaatttctatttatttatactaaaaactatggtctgaataaaaattaatgaatataattgaacatgattaacaaatcatgaccaccataccatggtttgaaaatttacaacagttgcagcattaggaaggaagatcccattgatcaacattcaacaacaacaaccagatcaaataaattaaacaaacaaaacatttcaaaaatgagaatgagaagattttccaatttaaagattggaattaccagcttattagatccagccaagaaattaatacaagatggtgatgaatctccaattaatgtcaatggcataaattatctacctgaagtgatcaacagttgaatatatatatactttaaacacagtacttagtgctggtgtgttatatatatattaaggcaaagtcaagctaattaagttgcaaattgcaatatcatataagagagcactgagtttagttgactctttaaaaaattgagaatgagacgactcaattgctgtcattttttttttcctcaactaattacaagcataatatgaatatatatatgcagggactgaaataagtatttataataataatgttagagattttattacaaaatttagatgttatgggcttgtttggtacgccatataagggtcgtattgtattaaataataaataacactatgtttggatgaagcaatgtattgtattaattattacgatcaaatttttaatacaatgtatgttgtattatttaatacataataaatggtccgtattagcttgtattataatatttacaaagaatttggggtcaacaccaatctccgacccagacccgaacccaaacccgggactccggaccctaaccggacctggactcggacccgaacgcgaacccggacaaggaccccggaccctggaccccagacccgggcccgaacttggacccggaccttgacccggacccggacctggacccggacttggactcggactcggaccccgaacctggacccagacccgggacgtggacctggacctgggacccagacacggacctggacctgggacccggacccagacccgaacccggacccggacccgtagttggtgttgggatcgagtgtattaaaataatattataactttacacaatcaatta

SEQ ID NO: 302169 - DNA, 2682 bp, Cannabis indica
atttttatatagaaaaaaatcgaccaaaccgaccgatgctcagccctaattacaacaagccttactcctccaacatcccaggtcggctcctccgtaggatttgcaaggatctccatcgcgaatctgtcagctttagccatgggggtaactggaataaaagaaggaaaaaccaagtagttagcacctaacactaatagacatagtaagggtacgggagagtcctctcttataactgcttggagaggtcctagtcggacccaacattcagaagtatgtcccttggagaacttcactcctagatggcaagatgaggaacacaaaaagatagaacaaagtttatagcaaagactgtccagcaccataagcgatctggacggtaaaatgtagaattcacaagagacattgaatcgccaatgcagactgaagttgctgagctaaattgtcataatcaacattagaactataccaaaacggtaaatcacccaccataatttttcacaaatcctacaactacatgatcggcaatctaacaactcaaaatcaattcaaaattttgtttgaagtaaagaaatacttatgtgtcaaagatggaggctcgaagatggggattcaaatgtcatgctatggtcgaatggaaggcaaagtggaatgaatttggtcgagatggttgaatctcaccttaaaagcgcaaacttttttgagcaactcgttgacgtcggcttgatatccctgcgactgtggtaacttcaaaggatctatattgagctttaggggtggtgcacctagattttctcttgaacgaattcgaaggaggcaaagtacttcgtcaaagtatttggacattcaccagaaataattttaggtttttcttctttcaaatgattttttactctgaggaaaatttgaaattaaaaactctaagtggcgaaaatagtgaatgggctattcaaaccatatatataaagtggctattcgcgtgtttttaatcctacggtttagatcgcatcctagaaaacacattcccactcagcgattcgggcaatggaagggtcagcagttaaagcgttactcacgatcgaggcaattcaaatgatgaaacacacctaagaaaatatcactaacataaaccagctgtcaacatgcatccctagatattatgtgcctttctaaggtgcctggtttgcacggactaatgatctctcaacatgtatcctcagttccaaacatacgaaagaaccacatgctttcacaacttatttcttgggaatttcaaaaggactttctagatcccagcttcgcatctatgaatgaatttggaaagagggttgcaagcctcttcagctcttgagtcccaaaggctcggggggtaaatgttatttgagtttccagcgtgtacaattctaaagcccaatatcagccaaggtcggcctaaacctgggtctaatgattaattcaagtcgtaattttgatccagacataagctcaacttgctaacctgccaaggtcaaactgccctactttggacgaagccatccagcctagaagcaaagagcctatcgagaccaatcctaatacctttaaaaggtgatcctagcgggtaatcaaatagtcactcagatggcttctgaattttgaccaacacggaaccctccaaacatggagccccacagtgtcagagcttgtcccctacattcgactggcggggtgtgtgcgctacctaaagaaggccacatttttgtccaacgctatattctctaatattctcaatacagacacaatttcacacgacacctgacatctttaaatagtcccgacttgtatggacaacccttacctcgtgaattgggcctcactcaattagcccaaagttagtaaatattgtattttatcccatcagatggcctcactcaatcagcttagttgacatgtgaaaaccctattgggtttgggtatgcccgtactcgattcttccctataaattaaatattaccctttcatgaaatgggacatttttgaattttttaggaagaagaactaagaatgagagttcttcaactaggggataaacacttgtaaaaaatactttaagtttttctagcttaataatatttactcatgtactagagttcattaacactcgaactacgtaaaaattttggtctcttcttctttaatttatttctttcttaagcttatctattttcatacttagttttcgaaaaaaattcggtaaacagttttgtataattttagttttataattagtattttttatgttattcaataaacaacactttttattattaaaaatatttaatttaagtgttgtttatatataaaaaacataataatatttaaatttattgttaattataattttagtttaactgtaatatttttaattttataatacttttcattttttcagaaatgtcctacacttaagctatgttattttaaaaaataataatagaaagatagttttttggtaactgcaataggtaacgacatcacaatagtaattttttaagaaacataaatacttttttattttattgtttaataagaaaataataatagaaagatattttttttagatatgtgcattgggtaaactaaatgataatatatagaaaaatattttttttgatatgtgcaatgagtttaaatttgaattgtaat

SEQ ID NO: 302170 - DNA, 1287 bp, Cannabis indica
ttagttttaatcacaacaagtattatgactaaaaatatatttagtcataacaaattgtagtttttgtgattaatattttttactacgggccttttagttacaacatattactaatttataattaatcataattttttttatttttaattacaagttttattgtgactaaaataaatattttatgtagtgtttgttcatatgatcataaaaactatatatactattgggatagtaattattaatttaaaagtaataaattaattaattgtaaagtgatgacatataattaatttaataatatggcagagtacttaacatatatcctacaccatttctatttaaggagggtattcattcctaagaatacatatccataaaaccacaaaaaattgagtcgatctaaatatactcatgatgatgctctcaatttcatgatccaacccaaacccgtacaacatatatatatatttatacatatcgatctatatatatctaatttattgtgttatagataggtacttatatattccttcttatgtatatctgcaacttgtaaatgcatcttttcaaactgacctaattaaattacttactaaggcctattgacaaggatttttcaaaagtatataataaaaattaatgtataacgaggctgatatcatatatatataagtgctaaacattctttgcccatgtgatgattagttacttttgatgttgcactggcatgtactttgttttcattcattataattgctgtcactcacatatataagcagccaatatatattctaatctgaatgcactaaaattcgtcaatataaaaatggtcaaatgatataatatatacatgtgtgcggttgatgatctaattatatagtaatacccaaattatgaggaatctcttgaggtgatccgaaagcccatatataagttttctctaggttttttttttcccctttaaaaaacattataaatgaccaactttaattttagagaaatgctaagaccatcataaagatgatataatattagtgtaattttgtattaaattttatatacattaattaaataaataatataaaaaaatcataaattattataaattattatgtcacattatgatgttgaacaccttaagatatgtatgcatgtaatccatgtgcttttttttgtacccatacacagagttgaaacttggagcatttttagtggagtgctaaaaaataatatattgctatattttagtacactataattaaaaaaaaaaaatgagttttttttttt

SEQ ID NO: 302171 - DNA, 2055 bp, Cannabis indica
caccaacttgatcatgaaagttttggcaataattttattctgtatagctgcaaaaaatattaaacacaacttggaatctcatcatgacacctcctttgaaactaattaagcttaaaatgtttgcaagattcgaattttgtcccaaaaatcatcttcagatcttgttaaatttgttccgattaagtttcttgccttttatgttagagctaccctgcctgcccttttgtaattttggagtctcttaataatattcttctacaaaatccaaattagctagaatcatttgttattcttgtttaagcatggtattgttcttggttcattggtgaagatgaatctttgtgatgaaatgatatagagaaaagagactaatatccaacatttcgagggatatttcgagcagtgaagggggaaagtaagaactttgcagcttatgctatagccaattggatcatctggatcactcactcatggtgacattatgttgtgattcttaacaaacaagggaaaagaaaccattactcattactgcattggtgatggagttttgactctagggtaataatatgtgcaccaaaattatgcacgctaaagtattatacacaagagtatattaattaatttatttcaatcaattatacttatatttaaaaaccaacgcaattgtgtataatattttggtgctaattttagtacacattattggttattattgatatttctaacatcatctccaatagttacactaatttagtatagaatctacactaatttggtataaaatctaaactaatttggtgtagaatattttactttttgatacaacaactctaataattcacataaactatcacactaaataatatatttttacttaaaaaatctcacattttatattattttcattaataattaaaaataattaatttatgatataattgtatcatgactactagtaagaatttaagatcttaaaataacttaataaaaaaaatatttatgaaatcaattaaatattacacttttttttttttaaaaaaaaaacacttaaataaaatcacacccaaatatttattaatttattaatttacttaatatttatttgttatttatgttgttctttttagttttataacttagtattatgttgtttttattttacttaatattagtatttttgttattgttattttgtatttttaatatgttagtgtgctttaaatcaactattactcttgtgataaattttaatttgaagactaaaatgtaagattaatttttgtggtatagttcctccaaatgaaaatgtctccgcaattgtcatttctggaaagttgttcattcacggttgtcaatccgggaaggggttgtgtggaatgatagtctagtccagaagggagttcccggatgactgtcatgtccactccgagtccaaatctcatgatagctagccctcccctggaaaggagttccagctggctagttgtccctcctggaatggtagttccggatagtcgactacagcaggctctatcctatttggaagcgtcttcaggaagtgtctgtggtccgcaaatttggaagcacatttatgtttccggaggccatagtacttaagctgacgtggagatttcactcaaagaggagttagttaagttagttatttctaactaacttaacaacctcatttcttacagccatcgactttaggatcttgatcctaagcctataaataccaccttaactttgtcatttgaaaaggaggagattcaaaactttagagatgagattgagaggcagagagagaggtgcagagaaacgagagagaatggatttggattttgtaagaagaatcttctgtagatgaagaggattcttgggtgtaaagtgtgagagctgaaacacttagaactcaacagagaatctcgtcttgactatattgtaccttttcttgctcaatcaataaagaaggatgacgctggtgttccagaactggagtagagccatagatcacatcgatctatcagagttgaaccaatatatatcttggtgcta

SEQ ID NO: 302172 - DNA, 1924 bp, Cannabis indica
cgattaatacagcagtgaaataactaaaaaataaccgtaaaacaacagtaaaaatttaacacaacacacgatataaaaattccaacccccattaaaaaaagagtaaaaaaagtttacaaatttggtgtaaaaacaccatataattttagattttggttgtaaatgagtgcactccacgttgcactatatatctaatgtcatattttctttttgtctttttgtgttagtttttctttttcttttttgtttgttcattgttattttgtctttagatgtctaatgtttgggacttttatgagttgttactattttcttctccaaaaattgctctcccaggtgtcgtgaatcagttaaaaacctgttgggttatgaggaaatggatggtggggaaagatgtctgggtaatcctttgcttctcaaaggcaatagaagtaaggatttcgagttcattattgataagattagttcccgctttgagggttggcgggcgaggctcctttctcaggcagctcgtttgactttcattaagagtgtcttggcggctatttcgatctactctatgtctgttttcaagctccctaagaaaacaaccaatcggattgatggtattattcgaaagttttggtggacgggtcaggctaaggaaggtcgctacctttctcttaaagcatgggattcgctttgtaagcctaaagcctgtggtggtctgggattcagaaggtcggaagatgttaatttctgtctgcttgcgaagcttggttggactatggcgtcggaacatacttgcctatggaaatcaattttgagtgatagatattaccctgagacagcctttggggactcgtatcttccttcaaatgcttcgccggtggctaaaagtatttgggcgacaaaggatttcattgttaagaatagtgtttggttgattggcagagaagctacagtcaagattgggaatctgcaatggtcgggttctgatggggttgtgattgacttgggatgtttgaatccgatgatgtgtggtgatttgtgtgtgagggatctgatgcttgaggatggtgggagatggaatattcctttagtcgctcttggtttcgccgtcttcagctgagtccattctcaagtttgctctcccctcttctcaacctagggatcagctttgttggaaggtgaatcatttggggcagtttactctaaagagtgcttattgggcgcttaataattcgcgctttgatcatgaggatgtggtttgtaagggtatctggaagaagcatgtccatgagagattgaaactgttcctttggaggtttgttcatgatgttctcccttttggttcaaaattggcttctatttttggctctaccatcgggcggtgtatgctttgtggtttagaggaaatggatgttgttgatcactttgtctcgggatgtgatgttactagatctctttggttctcctccccgtggggaatcagaatccagagcttcaatttggtgggaggtagagatttggttgcttggctcttagagccaagtttctttggtgattgtggtggaaaggtgttgaatgagttctttctttatggtgcgatattgtatcataaattgtggaatgttaggaatgatattttccataacaatggggtgttgtgtttggcggaggctcggaaggccattgatcggagttttgcggagcacaaacctcttttggaggttgcaggtgattccgaaagcaatgaaaggggttctagtgcggttcggtggggttctcctcggccagctagaatgcgatgctttgtggattttgcttctgccggtgatgatggtgcggttgcagctgttttctatgatggcgctggtgaaacttgctgcagctgcgtctaaggtgcgggttcacgtcggtgcgtggagggtgagcttggaag

SEQ ID NO: 302173 - DNA, 3698 bp, Cannabis indica
aaagaaaagaactttcccacatttagaatatgtcactcttctttatattctaatatatacataatacatactaaacacatcagccagccaccacaccacatggcgtgtcattattattttgtcttgaattaaattctcctctaaacaaatgggatgaatgtagttgcttattaggtagtaaacgattcaaaaggtcatcactttgtgtcgtccgtgttattgtacccttgaagtttctctcaaggtggttttaaacttttaatgcttcttcctagtattctcaattgaaattcgcatcagagtcaaataggaaacttaccatacaaaaacttttcgtcttactagtgcttgatgacaaaaagctcattcagaaacgaccattatattagtttttttctaataagaaatttgggtagtggaggaaattatggcatgatcgtagtcaaccaaaccaattgtgtgggttgggccaactactctagagaattatagggtaataacaatagattaagtagaatgatatctcaatgttttgacctgacccatgaagcattattttacgtggcttttgtagattaagaaagaattgcctttcaatcaattagaaaccgctttgtagatttccaggtgcatactactattgcctaacacagatactgtacgggtcttattagcgcgcgtggaatctactacttgagttgtagttgcaggttctattatgtaaagaaaaggagttttaatgagaattagagttaattcactccttatcttatcttcataaatatgttattattattagtgtaattatgtattgagtgtcatgtaataatttttataaaatatcatttactattcatacggcgccaatggtactgcagatgcatgttatatgctacacgagacatgctctctcatccttccacaatgtatgtatttataatgattttgtttagatactgacttttcaaattaattaatttttccttgcaacaatgaaatatatggattagtagaaccaaagcatttttttaaaaataaaaaaaaatactttataaaataaatatttattaaaaatagattaattacatctgtatttatttaaaatgagtcaaatttattataagaaattgtaagtaatggtaaagagaataatttacttgtatatttcattgagaaaataacatatatttacacacaacttaggcaatctattctaagaaactaaagtaacatttagttgggaggaataaaaatataaaaaataggaatgaaaatgagaattgaaatagaatggaataaaatttaaaaagcataaaaaaattgataaaaaaattgataaaattttctccttccttctattttaaaataaaatagtcattacaccaaaatggtgaaaagatcattttattgaaatgacattttaatactttaatatgaaaccaaataaaagaatagaatgaagattgtttcctttctatttcattccatttcattacctcaaaccaaacgccacctaagagaataaagtaaactgattaacctaatttctggctaattttacagctaatatatacatatctaacactctccctcaagctagagcatatatgttgatcatacccaatttgttacaaaaataatcgactcgcaccctattaagaggttttgtgaagaggttttgtaaatttttttatcggtgtaatgctcattgcatgtgagcttagtttcgaatttaaaacttgaccatgcatgacagccgccccattgcatggagctcgagcatttaatgctctgaccatgtacgaagaacaccaccatcgtaggtggcattcgggttatgtgcccacagtcgacgatgtcgaggtcgactgagaaggacgggtccttcataggattcaaacttggacccatcgtcaatcctccttctactaggtggttcgaccacaatgttaggcagcctctgcctaaaactgctcgttgcttgcattgcatgtatggaccactcgattcgattgcatacgaatgaaataagacctgtttaggtctttggggtctcgagtcgactgttttagcctcaccgtggtagccatggcaacccatttgggtctatctcgcacgactcactctctctctctctctctctctctctctctcgctctctctatctctctctattaagaggattggttttttcccaatctctattatagtgtcttatgagttgaaaagacactctaatcagaaagtctgttcatcttgtcaaatctataaccctactcttatcttgagtatcgaggctgatctagaagatctggtgtggattcttcatcaagcccataaagtcgtggattggatgttcaaatatttatacgaaaaaattcaaggatctcctaaatagcatcaagaggtaaaatccttattcgaagcagttagatctattttatgttatattatgttgagatctgagatttatggttcatatcgaattcaaaaaaaatttcaaaaaaaatattttttttttaaaaaaattgaatctgattttatacttctgctgcgactctaatatgaacactaaaaactaacaaatggtatcagagttatcttcacaattacataaagtaaatattatgttgagtattatgcatttatgtatatgtcgatatattatgaatggatggtttatttttgcatgaatgtgaattgttaattatatgataaatttgagataagaattttatatgttttttataagaaatatatgtacaccataatttggtgtaggaattttacattgcaatataaattttatttgtaatttttgttatacaatgtaatctcaaattcctcaaaacttccacttatgagtgagttcgagtttaaggtatatttttactaggagaagggagacatacaaaagtgaaatcatggagttcacaataacatagtgtgtaaaaaaaatattgatgttgctaggaagtgcattgtcacaagagaaaatgttatcttatttgaagtgaaaatgttatcttatttgaagtgaaaatgttagaagttagtgtttttatggttgattaggacaaatatgagtgtacttacagaaggtttcagctcacaaggattccttgtggccatgcattggctgccatacggttttatggccatgatgaatggggatacattcatagttactacaaaaaagaagtttatgcaactacatatgcatggaaatttctcccatgcctagccctaataatttgccaaacaaaggccttaatccaatcttctttccttgtgaaaataatcttcctggcaggccaatgaagaaaaagagaagggggttgatgaaaaggatcaacctgcagctgggacagttaaaaaagctagcagagtaggagcagtcatgcattgttccaaatgcaaaaacactagccacacaatcctaagatgcaaggaatctctactagagaagccaaaggaggactgatattcaaaactaatttgctaatttcttttagttttgcatttatattatgttttgacattgattatatgtgtgtgtaggctcaaaagaataaaggaataaaggaggtaggccaccaagtaaaactctaactgtgcaaacactaaagaggaggaagagaagggaaaagcagctggctaaagaggctagacagaggggggaaggttcaagttcacag

SEQ ID NO: 302174 - DNA, 1128 bp, Cannabis indica
ctgttactttgccgattacttttttaagtagttacacatttaaatttatactgaccattattaatgtagacatagacatggaattttataaattatggggttttctgcaccattttgatggttttgatccctttaaatgctttttgtgtcagttttttatagtttatctttaattatttaggataattttatagcatggttcatattaataagagaagtagtaatattaacaactttttaattttgacatattttaaatttttattatattataatttgaattgtttaactatttttttatattatttttttattaaattgtatagtaatagaatttatttattattattttgtaggttgattttgttaaatattattattaggggttattttgtctttcattatcttcttttattttgtgtagatagtttatggaatttttatgatatgttattgtgttggctgtactaattattgttcttataattgtattatcatttgttcacaatcttttgtttgagatttttatttcactaaatatatcctttagttagacaatcaattattctaatttcctattgtgtctaaaaaaacattatatacttatctatcaattacttatttaggtccttaaatatataaactagataactggaaaaaataattagtatccgcaatgtttcttccaaaaacaaaaattttatcattactagacgattgtttttttggtttaccaacctccctacgtatattgtgtctcacagcctacgtattggaactttgacctgccagttttgagtgaaggtacgttggctggtatagttttaccgaatacggtaatggcgggaattcgaataatagttagaagaaaaaggattggtgtaattgggtaatatttcatgtatgttgggagaaagaaaagtggattgtaccttctattacatccgttgaatatgcttttacatttgaatctctcttcacatataagacctattgggatagtagagggagaggtaaaagtaaaaaatactgattttatgatatatttgtattaggaagaggtttcaatggttacatttttattgtaaccatcatggttatatttttttaagtcattggattactatt

SEQ ID NO: 302175 - DNA, 1112 bp, Cannabis indica
gtttacagcgttgaaaatttaattcaaaaagtttgagattcggggctggggttaagtccaagtttaggccggaggcaaggggccaaggtcctagccaaacaacaagggtaggggttcgaactgggacttcgatcctagccaagataactggaggttagaacaatgatcttaagaagaatatttcacatggttttaaaaagtactgaggtagaatttgttgaaaattagtcctaaataaaattaactcaataatgatataacaaataaagacaaatgagacaaggacatttcaaggacttggacaaagttaaattagtttgtttgtattctttactacttttgtaatggctcaccggcttgtggtagcctagatagtcttagtcttttatcatttaatatatagaaaattagatagagagagaggagatattaagagatggcaagggtagatcacttggttgaggaaagaataatatgagagcttggaagaaccaaatcgagaagcaaaaggaaagaagaggaactgtcttcaaggtgctttcaagggggtttagcttcacatcaagactaattccaagggaagtttagcatcatttttaatcagtaaaactgtgtgattatccattgttttgtaatctttggcattgacatagtgaaagagagttcctaagggagttcaaaggggattaggctctccataattgtggaggaagttcaaatctctataaatttgtgtgttctttacattctgttattttcattatttaattttatgctagttgaggttgttggttaatcccaaacaaaatattaaccaacaaaatttatagcaatcaaacatgttcaataccacttgttcagctaaatatttgtcacttttctgctgaatattggacaaattagatattgttgagtaaactgctagtaaaataaaagagaaacgatattaccgaatgaagaattctgggttgagtcgcggactaagtcgctctctttaagacgttcgcggcactgcccaggagtgtgcaagcaatcgaaaatagccggtgtcccccaggataaaaccaagcccagtcgttgcactgtatccggaaccccactgcactgtagag

SEQ ID NO: 302176 - DNA, 3931 bp, Cannabis indica
ccctggaacagtctagtagtgcaacagttacagtttctaaaggacaactacaagaagagcgagaatctagtggtacctcaatcatagtgtggaagatcgtgaagcatccagtttcaacaaaaggacattcgggctcagatcttggtgatactctacgacagaaaggatacaagggttaaagatttgagtggaaggagacattatattccgctgcaaccactgtaaggtttctcatactttatatgtgtttatttaatatcgttttagaagttcatatttaggatgttaaacaacatacttgttagtaaatctaagatcctggtaaaatatttccaacagaaattggtctgcagccttctgtagaccttgatcgttgttggtgttgtgagggatgtactcttcaatgggagtggaatttgagatttcaaaggggttcttttaagcttgtttttgtggaggcacggaggcattcttgtatcccaattctggaggaatggggaagttatcacagcgcaagaggtattttccacatttgatataagtgtggttcaaaaggccacaaaaatagcagaaattttgaagaccttcaaactaaaaactaatccatttgggacgatcgattgagcgaaaacagatgtttattccccttctcaggggcttagtaacatcaagaaggaccccaatacggagataaggaccaaagctttcgagaagggacagcgagtggcttttgatgaggtctcccaattcgttagcgatgaattgagcagttggggggtcttgcgcccaaaaggaatatggtgagcttgcacctagaaaggaacataaatgagttgatcaggcatgggggtatcagtgacatcaggatgaggaaagaccatgaggaatttgtcgaaatgccacggctggtcctccaacactctgcgacggtctccgtcgcactgaaaagtggcgagaaataggccagaatgatactcagatatttcaacagggaaactgagggtccatgcctcagtcatggcctttttgatccaagcatgtttgacagattttatcttgaaaattataattatgttaattttgatatattttattaaatgtgtaattatatgaatattatagtaggattataatcttacttaagctaattatgagaaaattagtgatatggaataaatgaataattaagcgcaatttatcaattacagtgattttattggatcatggtattttatataaataaatatattttcgagttcagcgaccgtagaaactcaatgaattggtcaaagatagtcatgacagtaaatgatgagttatattggaaatataccagactagtttagaaagtgaagttgtcagtttaatcgtgatagttggtttgacaaaaattaccctaggttattaaataacttgactatttaaatgagggtgaaatagccatttactaagttttatcttattttgtattatttagttttctagtaagtaggctgaatattggagttattattagtttatttaattttttttgttagacaattaagaatcaaaattcaattaaatcaagaaaccacataactctttttctctctcctcttttcggctcaagaagaacccaaaaaagaaactcataaaagctcagcctaattctcaaatttcttgtcaatttcttcaatcctaggtgccatccaaagttgaggtaagtctttctttgtgttcttgaaggttttaaggcttcaaagctagatttaaagagggttttcgatgaattaggttctgtgtttgtttgatttgttagaacttatttttagatgttaaattaagattgtttaagtgtgattttcatgttcataagggttgttaagtttgattttagtgagttgagttcaagaactcaaaaactcacccaactatggtgaatttgtaattttaatgtatttcatagttttgaatgtttgggtatgttcattttgtgttattaacctgttttggatagtttcaacaagcttggaggagatttggttgggttttgaagtgaaatccaaggttttccacttctgcaacaagaatcggttaaccagttctatagggcactctggaactggtcaaccagttgaccagcaagggaaaccctctagttttctatttttcagttattcgttcgggatgtttttctagaacttagtttagggtgttttatcgatgtttaggttgtttccaaattcgtaatgattggggtttgttcgattgtgaatttaggacttatttcgggattagttaagttgcttacaaaattttcattatcgtgacataagactcgggattttcgagcattgttccactcaggtcggcccacacacctgattattggattgagataaagaaaagtcaattgcactatttagcatgtcaaataagatacgattattatcgtttgtgactctattataatcgaggtaaagatatggtagttaccgttatttagaaggagttattactacttttggaaacctctcacaggttacctaattaagtaacgatagtgacatatgaagctcgttggtaatgagttgtaagcatgctttattaagcatcaacgtttgaattgactacttagcatatatgatgcattattataagattatgttttatgtgttgaatatgttttatctactttttttgtcgattctttgtgactcacgggtgctctgtggtgctggtaaagaaaaaggaaaacttgaccagccatgagtcagaggtctttcgaaaatgtacatatcaaccgccatgtcttgactctcagtggataggatacctcttttgttgtgatctaaaaatgtaaccctatttttgtaacagttgttttgtaatatgttgtaaaagtttataaacaagtagatcctcgaatctagtagtattttgaatgaaaatttaaatttaatttaaataaattttactaaaagttttaattgcgccacacattttctaaaatgttagtttattgttataaactaattaatataagtacacacacatgttgcctttataggttagggcgttactgttagcttttttaaattctatcaatatttgttttattaaaagttctgcattgtattggtcgtggttcttgttcatattcagatcgtactttaagtgagaataacgcttctcctaaatttctatccattataatagttgatgctatttgattaataaaattctattctattaaaaaggaaaaaaaatgataccctattataaaaattttcaatataaaagttaaaagaacaaatgagagaaacctaaggactactcggactagaagccatgttaagaaagtgttgggcaagaaatatagaatataataataatttcctcaagttataataataataacttataataaattcttcaaataacatataataataaattttatatatgtgaatatttactagatggttcaccaattgacattgttaacattttatatgagaatagaggcttagaagttagaaggtgtagtgagggacgacttgagaaaatgtagataacgaaaagaaaattatttagttttgtaaccaccaacattccaacaaaattatttgaatgatttggcattgttgaattaatatatatggatggtaagcaatcctattcagtcaccaccaccatgacacccaatcaaatacatatatttataagatgaattattaaaaatattatattagtagtaattggttcctttctcggtgtcatatcttatataatttaaaaaaataacttttaaaaaatactgcaaattaattaaaaagtgctggtagatattattagtgcccataataatgcaatatataattatagggtaaattgcggcaaaaatacttaatattctagattttatacacttaaatacctaatgttt

SEQ ID NO: 302177 - DNA, 2635 bp, Cannabis indica
caaacttttcttgaacgtgagatgggaaatacagtaagtgaaaaagttaatggtttaatcagaaaaaattgtatatatgtatattaactccttatgttcacagcatcttttgttaatatttataatatacttaatgtaaaagtcatcaacacgcacgattaagcgttgagtgaagtctactagtgatgagaagtccgttgatagtgttggagcagttgaaatgatcacttctactaagaatgcaggagataaggtgaacatatttatatttatttttttatttgaaaaatcataaaatcttatgttttttttttcaaatgttaggagaagagaaaatgtctgatgaagtcttatttgggagcagagttgaagagggttgcgtttgatatgcaagagtttggttgtttaaaatttctatcccacattttggttccagttatgggccaatattagagtacatttttgataaaaatttagattcatagtatgttataattttaatttatcttttaaaattttattatttgttaaattttggctaaactcaaaattatgattttggggtgcactatttatttattattgcttaccttcattgatatcttgtgattttgaagtgaacccatagtggacacggactttcaatatcttaatcgacggttattgtcaacattagctcttgaagttatgctatttggcgaggtagatgttgtaactaaatctgttctaactgatttgggttcttatatggtgaacacgtttacaataataatttttttcctttaatttatagattttgaatgtcgtttgtgacatgctaagctgaaagattgggatcgaaaggagggcataagcggtggtttttgaatacatggatgagtgtaagtttatttatgaatgttatatttaatttcattattgtctaaattaatttaagttcattaatataggtgtcatttatcttgtttgggtgtttagtgttcaattagtattgataagctatttctaagtactgttaaagggaatcgtgatggaggaaaagagtctgcacggcaattctatattggagatcttgctatttgcaaggaagtgagattattataatatgaaagttctttttttgtgaggaatgtatttttagcgttatgattcatttggatatgttgcagatattaataccaatgcacaaggatatgcatttttttttctttttaacgtctctgtggagcatgaggaggttgagatttgggattctttacttaacaatggtaaatctagtggggaagacatggtgaaacctgtggttagttatgtttttgttttgatgattaatatgtgatttaatttgtcaacaaaattatatatttacttatttatttgattttttcgtatttttagttggcgaaattagactcattgttggctactgatattgcaactttgaagttgttctcggagaaaacgtcccaaagcaaatggcttaatttttcaattactgggttcaatgtcaagacaatcactatacctcgacaaactaattcttatgattgttgaatatttgtcattaagtggttggagcaccgcagtgttgttgattccaaggtaatttttaccaaataattataatagttgtatgttgtctattggtaccagtacttaaatgactatattcaaaattttaaatgaagatttgttaatatatatgttaatgagtgcacatttctcaaacttgtttcagtttcattcacacaatgagagggcacgtattgcagtgaaaatagttacatctgaaatgaacaaattaaaagatagagtgaacttcgcttccttcagagatcgcaagcccttcactcagtgtggtagtagctaaagacaaattcacccatgagatgccaggaaaatttagtctatcactttgacaagggattttagtttggatatgttttttcatttacgttttgattttaactcatcaacatcatcatgatcctaagaatttgtttcatttttgagtttcaaatattcaagttggagatgatgatgaagtttatccaaaggtttggttttgttttaatttttataagtgttgatgtttctcattctagtagtaaatgtatagtgttctttgttttagcacttgaaaatagtagacatgaatttgaattaacattgattttgtctttattttttaatctctttttggtttattataatatattgatttactagaaaatcagtggttccccatatcagagtagtagttctcaattcttggaagtggcttcaccaccctattgtttctactgtgattttgcaatagttattttttttatttctatttgatttactataatatattgattttgcttgtaaatacagttgtctacctcagctacaattgagttgagcatttcatatttgagcttccttcattttttcctctctttgtttttcaggttggagtaatagaaaataaaaataagttttaaactattggaatgtgaaagacttcaactattgaatccactcatgtctaacaaatactgtttgtcttgctgcagcaaaaagttaacaaaacttaagcaaaaatctcaggttaacaagaactccattaaagtgcataaaactcttccaa

SEQ ID NO: 302178 - DNA, 1689 bp, Cannabis indica
gaaaacataagaataggaatgagaatgagaataggtataagaatagaatggaataaaatttaaaatacattaaaaaattattaaattttttctcatcatgcattggaatagtctttccttccattttaaaatgaaatagtaattctactaaaatagtaaaaatatcattctatcggaataatattccaatattttaatatgcatccaaacaaaagaatgaaacaaaaattgtttcctttagactattttattctatttcattacctctaaccaaacggtacctaagaatttaaattgggagtgctttaagttttgtccatttgcttttgttttatttgaagaaattgtcaaggcctagctaccttcttcatgcttctgctacctctcataaccctctataacatcaattttatgtccttaatttcattgggaagtactctattctcatgctatttttaagttgtagtttagtttctcaatgggattataattattattttgaataatactaattataatgggttattataactttgtattttatgtaatagttttaaattctaacacttgtgtaatttgaaagtgatttttcaagagagatgaaatgcattattaagtaatcatcacatcatacagccaactacatcgagatcacactatcatcattcatcaactaatagaacaccataataaataaaaatagcaataaataaatatataaaattgactttgtggactgtcttaaaaggtgtcacattcaacactagagaaaaatacacttaaaacaaaggacatatatatatatcaaatggttcatttgattaacagtaactaataaattgttatcttttgaacatgtcttcttgcaaaaaacaaaaaaaaaagtaatttacacattgatatgtagctatacgaataaataatatgtgagcatagaaaattcatatggcacagtttctgatatacatatatttaatattgtaattgttagttggaaacacaatttccaaaccccaacgtgcattcaatgctttgcgttatcatcattaacaatgtatatgtacacaaccttctatactctttgtatcaaaatcaacattattgaacaaatatatatgtaattaataatattacttatcataacttcttcgtcatctagtgttgagcaagccagctaagtattagatcccccaccaaccactcaaaatttcacagttgaccttcaaaatatttcataaaaagtaaaataaataaataaagatatgcataaaaagaaatcgcccatcccacatgtatatatgtatatatgattgtgaatcgtgattattaatttgtatatgtaaaaaatgacatttttactcttgttctttacttgtaatagagcttagaagttaaaatctcttgaagaagaaacaaacaagattagacaatagagcaaggcagcaagaaaaaaaaaaactatgttggataagaccatctcctatattttaaattaaatttcgctcaaaatatactataaaataatatttaacttaatttttgtatttatactttaatgtacaatatataaattagttataaaagttactattaatactcattaaaaatatataaaacaattaattaattttatttatattattttaataacttataaatataatttttttattaatgaataatattaat

SEQ ID NO: 302179 - DNA, 1479 bp, Cannabis indica
ttaatattaaggtgcacttataactttatgtggtacaaataaaatttctcttaaattatcaattaatattttaaatgacaattttaacccagtcaagaataaatattttaaacaaaaatatacacgagttaaacaaatcccgctataactagtttctaatgagaaaaaaatgattttagagttgtttgtgggccactcacctacattagtttgagaatgatacatgttatctgaccatgttatcacgtaataaattaatattgtgttcagcattattatagttaaatatttgacgtgaccattaaaatctcctatatatacaattcttgctgctcaagaaaatatcaaaaaaactattatttattgattttttttaacaactttagtaggagggatgctgccaaaaagtcaagcaaacccaaaagtggtggagatctatgtagctcaacagagagacaagagaaggaagctcctgcaaaattacattgatgtatgctcagccgctaaggtagggggaaaatgttgtgtaggtgttcaaaaacatgcgtctatactatacatttaaaacaactatactactagtatgttctttgtttcttcattaaaaattatgtgtatttacatagctctgaccaggaagattaataataacaggtcaaggtagaaactctgcaaatagagagtgacattccttcagaggccatcctacaactaattccatctctcaaaataagaaagctagttcttggatccaccaaatccactctaaggtacaagatcactctgaattgtcagtgcactgttttattgtcatgtttttcttatcattaataaaataagtaaaactaatttggatttacaactattattaggaaagtgaagtctaaacgaggaactgcaagtcaaattcttgaaaacgcaccgcaaaactgtgagattaagatcatatacaaaggggaagaaatagatgatcaatcatttggatcaccttcttccatggacaacagtagaaattcctcatctacacaagagggagatcaagacccagtaagaagattatcagatatggttggccctgactcaccttctgttggtacaacagtgtcagaacatattaggagtgtttttaaatgggtaggaacacccacttcaagttttgggtctggcaagaaaactcagaccaatatttcaggtttacatgaaaatcttcttgactaataaattaaaatattatacaggcaatgtagcacttttcgattgagttaatggtattttgtttctgaaaattgacatagttccaagttcagggtagttctttaacttattttcgtgtcattcttagtctctaagtcaaaatctcaccatgaatttccgattactgtcaaattttcagtaagattttgccatagaaactcaaaagggaaatttgattttctatacttaaaatttaaaaaaaaaatttaaaaccaatacatttta

SEQ ID NO: 302180 - DNA, 5657 bp, Cannabis indica
atatttttaaaaattgataaaaaaaatatgtaatttaaaaatgagataatttttcttttttggcccctgagctaggtgggcactaggcacaagcctagtccgtctatgctcaggaccgaccctatatatgatccaatgaacacttcctaacaaaaaatccttatattttttttttgtaacttttcttaaattttttgactattatataaaaatttctgatttaaattaacgtcaaaaaaaaatataggggcgtaattttgttggtgcatattttactccaaaaagttactaaccaataaaaaacgacagcggacaacattttagtcaactatgactatgagcgaataataatatgtgaatacatgtgggcacaggttctcaccgtcggtccaatcatcttgttactttatagttatggtatatgccacgtggcttaaggacaaagcatatgttcagaatcgcgcggatgttaacggtagcttaaactagcctcttttcaaagctccccacattatccacgtcaccaaacattattatttttttttaaaaaaaaaattgaaaaacagtttatatattgttattcttacaattcacccaacggtcgaattttcatcgatctagagagagaaagagatgaggcagagaaaggtgcggcaagaggtctcagaaaccctagtaaaggaatctacagtaggcgatggagaaattaacaaagggttcttcgcttgctacctattggtctccctcaatcctcgtcacaaaagccacacctatattgggttagtagatgcaaagatttccttaaagtttttctggttttcttaatcttcaaatttcaagatcttttttttttttttttttagaaatgatgcagattcacagtgaatccacggcgtcgtatcaggcaacacaatggcgagatcggttgtggtgcattccgaaccaagaagaaacgtccttgggagatggtcttatgcatctatggtttcccaactaacgtttctgctttgcaggtttaattttttttttcttatcttctcttcttgattttaatttaactgtattggtgatgagggtagcttagtttgatttttctttttaatgtagtttagtagctctgaacccttaccagtaagtaagccttcttttatccattaagcctccattggagtaaatactgttcatggaaaattagtaatcattgagtgggtaatgaatctgtcattggtttctgtctagtcctttggatgaagttattattgagtgggtaagactgttcatggaaaatttgtaatcattgattgtttataggcattctactgatctgccaaatttggctgttaaaagagtatctctttacaattggttatttgctaatcatgagaaataaaccttgcagtttgagtgggcttggcagcacccgacagaatccttggcggtaaggaaggcggccgcaagctttaaatcactctctggaattgctaataagattaagcttgcatacacaatgcttacactcccatcttggcagaggtatgctttgaatgaatatcccaccttagtagtctagtcagtcatacattgcgccaattacactatttaatgttaaaaaatgaattgtttagtttaaatgatcagtatgaagaaaagatcatagttgaggaaattgttttttaatgaagaaaatgatttggtttgattctatttcagtatgaaactcactgtgaactttttctcgacaaagtacacaaaacattctgctggctgtccaagcttgccaggacacatgagggttaaggtttgccccatggatgagcttccttgctatgttgaatgggatggaagcttgaatggaaatgaagatgaatgggataatgaagaattggatggaggagcttgtgatgctactaaattttcagaggacacatcttcagattctatacaggaaaattcagaagaagataataataatgggtttgagaagattattagtgaactgtgtgaatctattaacgaaggagaaggtagtaaaaaacagtctagcttttcagaaatgactggaagaccatcctcaaatgttagcagtagctcatttacaagagaagatattggtgttgctgaagatacagtttcctctgggattaacaaacataagaattttgaactgaaacgaccagcaatggaacaatctgcacctgtagtgattgaggattatgatgaaccacctagaaagcgttacattgtgcccagcgaagtagaggtgatagatgtaaggactccgtctccagttgtgtgcagaagtagtttgtggggcagtaacttctgtcaaagagagaggaataaagaacgccatactactctacctagtgaaacagaggttatagatttaacgagtccatcacctctgtgtagaagtagtttatgggttagtttgattgactaagactttgccttaaagtaagtcattagattggaaacgaaaccttgtagaagagtaagataagagaaatccaacatatattcctttatgttgttatgggtgttgttgctgtcgtagaaaatgcttgttttctgtgtaataatataatgatgccttgtgtaataatatttattgaaaagtgccttacactttgatctatttatgtatgaaaggcaacatttcttatgtgaatactcgactattattgaatattgagagcaataagaaatgacaggttacactattcacattatgtccacttcactttgccaaaaaagaaacttgtagtggcaatcccgtggctaaatgccaatcgtccatagaccatcaacctctaaaaaaaaaagatcatgtttatagataagagttctttgtcacgagcaacatttctaaaatcgacaccaagaccaactgtgtttttggttttggtataccaaactgaattctgaattatcatgtcacgggttcaagtttaacaaagcaataataactagagaaaaaaaaaattgatggagaacatgcattgcaactgtatccttttattcaattaaactccacatttagcaccaaaagagtattttttgaagatgcagcccatggtgtttatataaagcttcagtttatgtcaaaaagctaccaaaataacaaagacatgtcaaaagataagagagccaagtaaaagtttattgctccttttgtacaacatgagtagttttgggaaccaagacacaaagaatgcttccatattagagtataatgtctcacatagaaaatatcgagtaacatgtataactccattcattactaattggactttatatagaatcccatgattcttgtcatagtatataatctatcgtagccatatatccctaataactcttgtcattccagaaattttcaagaaaataactatttgtaaactgtaactgaactatgcttacatatgtcaactacattgtttctttttactgtattttctttctttctttcttttttttattacaagaaagagacctcaaaaaatgaaaagaaaaaactttcaggaaaaatgatacaccaagtaagatgacagctgtacaataataaatttgagaaagaatggaaaggctagcaaagggttactgtaattgttactactgatcctgatgctgttcttgatggtcttctggttgtatttcttgttgctcctcttgtggctctagatgttgaagctgttggtctgcttgctgttgttggttatcttgagaaacccaaactatatcttggaaagcaggtctaatctcatcattcagtatcttctgatacaacactgtatctccatctgatttctttacctcaaccaaataaaaagatggagtgacctcaaagatctctgcatcaatggacaagaatccctttttatcttcgttcagaccctccaatctcaacaatcctgcatccctcttcttcactttcatccttagttgcttagcaatatcttctagtttggagatgacgagtgcagctggttttctgaaaataaaccttgcttctctccggtgaggattttcttcaaacaagccagagagatcaaagccagctgatagggagataatatcaaaagcattcaagtttgaaggtctgactggctcttgttttccaccagaagccatattcccactaccacatgcatcagaggtacctgtagatgatgaatccttgtttcctagttcaggtttgatactttttaatttcattccttttctaaaccaagaactttccttgattttgtctattgtaatcctagtgctggggtttggatcaaagattttggataacaatctccgcacttcaggagtgaaccaactggggaatctgaaatctgctttaccgattttcctataaagctccatcaaatttgaatcatgaaatggaagataacctgccaataacacatacaaaaccactccacaagaccaaatatcagcttttgcaccatcatagcctttcctgttaatgacttcaggagcaacataggcaggagttccacaagttgtgtggagcaggccatcttggcgctggcaattagcaagagcacttaatccaaaatctgaaaccttcagattatcattttcatccagtaataaattttctggctttatatcacggtgataaacccctttgttgtgacaaaaatcgactgcattgataagctgcataaagtatttcctggcaacatcctccttcagccttcctttggcaaccttgttaaaaagctcacctcctttagcatattccacaacaaagtatatcttagtttttgtagccatgacctcataaagctcaatgatgtttgggtgtttcaccagtctcataatcgaaatctctcgcttgatctgttcaatgagtccaaccttcattatcttttctttatctatgactttgatggccacactttgatttgttaccaagctcctagcatagtaaaccttcgcaaaggtaccttggccaagtaatctccccaactcatatcttcgcatcaaaatatttgatgtattttccatcccaatgcttcaaaatctattcaacaacaaactacagagtccccacaaatatacactatatatagcttacaggaactggggatgattttaatataagctattcaaactccaccgtctccatttagataattcatcaacccagacataaaatttataaatttatagctacttgggggtccatggagcttttcagagctgagactaaaggatctcagctctaataaattctcactctcaaggcttttgacgccaaagcttcgggcacagaggcacatccttcagcattccctcgaattttcacgttccaaataaatattaaagaatacttatagattgatatctgtaatggatcttcagcacaatgctttacgattcagggcaattttgaatccacaatctgaaactataaagatcgacaaataagaacaatcaatacaacttagcaatacaatttgagaccaataagataactaggtcacaattaattgataatcttcaaaaatgattgatgaacttgaagcaacatctccaatttctgttgattattacattaccatgtttttatgcatcaaaaacactacaaagatataatatttttttaagatcatatatatacatatatttataattat

SEQ ID NO: 302181 - DNA, 3926 bp, Cannabis indica
aatataaaaatcccaaattaataaccataattaacccacagtcaactaaaataaactgtggcctatttctaatggacctcacatctacattcttttttttttttttttgcttttactaataatatctacggtcatgattgatcattagtttttcatcaaactggatcaagtcaacgagaaatgtcaacctttgctgtgtatcccagttgctgctccatctcccaacttagcttaggggccacaccagaatgcttaggaacataatcctgttcaagacaacaaaaattgaacggctcagatgaaatcatagtcccctaaaccaaaacgagtgagattcggtacggccgtaactagacaacaagtatctcaacagatatgtggcaacgtacaattggcccagcaaaacaaggtactgaaagctccgttacaatgtataaaattagtggtagagatagatagagagctcttaaaaatgtacctcaagtttgcacatgagatcttgggcagtttgggcagacacaataatgtgacgggcagctggggcaatgaaaccttcatctacagctttgtctataaacgacagcaatgagttgtagtacccatctacgttcaacaatccaacctgcgtccaaacaccacccatttttaatttattttttatttttcatttttgtttgtttttgtattcacccccaaaaaaaaaatatttatgatttgtaaattcttactggcttttcatggattcccaactgagcccaagtgataacttccaaaagctcttccaaagttccatagccacctgcaacaaaaacacccccaatattatttaacatattaataaccactgctttgtcattagtgatctaaaacaataattacaattactattagtttacctatatttccttgtaactaataacagtatatttcgagttaactattttacgtgaatagtatacaaatatatatatatatttatataatacctggcagagcaataaaggcatcggcttgtttagccatttcagctttgcgttgatgcatgcctgagacagctcttacttctcccacagtctctcctgtaatctgaaaatatttaatttaaaccacaccactttttaagtatatttttatataaataattatgctaattaatttatcatttataattatgaaagaaaattcacctctcttggcatcagagtcttgggaattactctgcataattccaataacaaaaagggttaatataaatataccaaattaagaaaaaaaaaaagtatagaaataaccatagtgaaatttagaagaataaattaagagataccccaacacgtggcgaccaccttcatagacagcttgtgaaaccagacccatcaaaccaatgcttcctccaccataaaccaagtcaatgttcctttcgacctgatgaaaccatttttataataataaatacactagacgtgcttaaataaaactcaataaagaacactaatataaaattatgatttttttcttttttttttaaaaaaaaaaacaactcctctgtttggtttacatacatattatttagtttaattgatcaacaaatcctctgtttcttgatcattcatcatcaattaatttgttaatgtaaatgaactcgaaaaccaattaattaagcaagaaaacagtattgaaacccaaagaatagataatcacataacaaaaagaaaaagtacccaattggttaaacataatgaagaagtgaccaatcaaaatgaatgaatgaattaaattaattattaccagttctttgccgagttgagtagctgcaagttgatagtttggattctttccaggactgctgccacaaaaaacacagactcttgtgaatcttgatgtcatgggaagttgatgacattgttggaaaaggtctcctttattttccatgttgaaaattatatatggaaacagagagaagaagaagaagaagaagagagagagagaaagagagtgtttgtgtatattgagaggtgaatgagtgtgagtttgtttgatgagttcagacacagtcagcagcaatcgatggctatactctgagaattgatgagaaagaaacttaggtaggcaatgcacaaagatgagactaaatggtatgaaggggctctctttatattatcccgctaccacgtaagtaccacatctcaatttctcctctcctgatattttgaaattagtatataaggatttttctcataacgaatttcacctttgattgggacattcatttttgtctttcatttttggaacaaaactcttgtgctaattccattttaaattttaaaccaacccaaataaaattaaaaaaaaaattattaaaaaaaaaaaaaaaccttaatctagggaagatgaattcaggtcaatcagtttcctttattaatactaactattatttttttataagataccattatataaaaagcagtacttttttttttttttgtacaaagtaactctatcggttttattttattaatgtataaccaatattcacaaagtacctaaataatgtggccaatacacaatttctatggtacataaattcatgacattttatgctatattaatattattgaaaagaaaagatttatattgcaaattccaaataatatctaccaaagttagtccctttgtataggtggattctaaaggcatctttaatgtatttagcattcttgtgaggtataatcatgatcaactttgagggtataagtaaatcagacatgcacctcgaatccctgaacgctcataacccttaaattgtagaaaaaaaattaaatcaatatatagataaaacctaaaataataagataatataacaaatagtgtttagtgtagtagtataattaaaccaaaatttaattttgtcttagactctatatattttaggactgatcgtaggtgtaatattattattggtacaattcaatattaagtcccacttattttgttttattaaaaattataaaaaaaaaattgttaaataaattataagaggtcacctcatgatggtgctagacaccttgatgcctcatagatatctaaattaaacctttcttttatgtatgagaaaaatttaattttaatgaacacccttattcaaaatcccatagagatgctaaattaaacctgtcttttctctatggatcaattttacttttttttttttcttttttgatatggaggaagtttcttctcggtgtgagcacttaaaatctttactaatatcttccattgcatttttattagaggaattatatttcatctaaacaaaaatacagaaaataaatcgaaaccagtttcataatacaataacaatgaacattatgaaactaaacaaaaactagtttcgtcacacaacaacaataaagattatgaaaacaaaacataaatgatatacaataaaaataacttaaaccagttttatcattcaattaaatgaaaaaaaaaaagtacaaaaaaatactaacaaatataatcaaaacaacacacaatgcgtagcagtaatctaagaacaaaatataactgtgaaaacctgtttcaaacttagaaacaaaaataaaaataaaaagaaactaaaaataaaaaatatacaataacatcattaaatggagaaaccccattatagaacacttaaaacaagtgaaaccagttcgaatcctgtgaaaccagtttagacattatgtaatcataacaaaatataaatactaaacaataaagttaactgaaaccagtttcatcaagcaaccaaatgaaaatagaaaaacatacacacacaaaaatgtaaaaaaaaaaataactaatcacaaatataatcaaaacaacacaatgcatgataataattttaaaaaaaaaaataactgtgaaaactagtttcgaaccta

SEQ ID NO: 302182 - DNA, 2238 bp, Cannabis indica
gaatatcgttaactaatcgtaaagtgctatttataaaaagtattaaacattactagtacctaataacaatgctctaataatgattaatggataaattaaataataaatattttaatttatataaatatttactataataaaattgaagagagactttttgggtgtcattttaattctttggaagatatttgaattttaataattttgattaatcattttaaatatataattaagttaatagaagcaacattaattgaaaaccaagagtaaagcttgtcttttcttttctcattttgttggtgctattggtaacaaatcaatgtccaaagccaaaaatcactttcaaatctttttaattattcaaattatttatattatcttattatttcaatgagatttattgcacatataataaatcaatataattgaacccctcttctctcataattaagctaaataaatgtaggggctattttaaaacaaagtcattaggggcatttttgtaaaaaaaaacccaaaggtgggaactttggaaacttttctagcaattaagtggggagggggggacaaagggttattaaggataaattttgtatataaaaatcattaattttggtcttaattttttttgttagggcggctcatgacaatcactatcaagtcctttgtgatatggttaaaagagtttaatttaatcaaccttttcctctaatgtgtttagattatgacaagtcaaagatggttttttagtataagtgggactttaattgaaaaagtcaaaaccccaaaggaataataaagggtcaaaatccaaatctttcatttaagatttttataaatagcatttttattagatattagtagtgattaatatcaccaatggttagtattttgtgaatagatatggacttttttttaataattattcaattaaaatacataaatttaatatttaattataccattagtagtataaatagaattggagaccactaatattttttaacatttcacttttcatatataatattttatatactttgaatgtaattacttaagcaccattagtgttcttaaagaaacactattagagtgcatgcctaagtaattgaattgataatatatctatatggagacatgtgttgtgatattgtatacataataaatcaccctacacttttttcattccctttaattatttttattcaaagagatgaggctttttgtatatataacttgacaatatcattctttcttctttcatcataaaagaaactataatgactttccattaatgatgaaacttcattaatgctcaagaacataataataataataataataataataataataataataataatagtagtagtgctttggttagcttaagttgtaacttttccttgcaatatattaaattctcttaaataaaccaaaattattattattataaatatatttttatttctcaagattgaatttttacccaattttttttatttttctcatattttaatttaataaataatataggaaaccgctaatcattcataacacatcatattaatatagtattgagcaccttaaatacttaataacaatactatttttattaggatttttattcaaagtttgttttgtaatttaatctctcataagaaaaaggactaaacaaacaatcaagctctcacgttttttttattatatatatatttatatatatatatatatatgtatatattttaaagaattcttattaatttttccaacaacaaatttggcactccctcttaatatcatagtgtactaaaattttgtttgaattttgaaaaaaaaaaagttatggtataacccttttctataaagacaaattatatactaactagacacaattttgatagacatgtcacataaaatttctctttcttaaccaaatcaaatacatgcacacaatctttttaggggatagtacatagtattaggtgtattttgaatggctattatttatgaagggaaatttaaaattctatacttacaataccctaaaattttatccctaaatgcatacttattaaaattggtcatatatgaccatatttctaatttctcaaaaatacccctcacatttgaaatccctaatctcatcagcctctctcttcctctctcttcctctctctcaacacacggctcaacccaccccatcccaaccccaaccccaaccccagtcgacccacg

SEQ ID NO: 302183 - DNA, 1730 bp, Cannabis indica
aatttgagttgtaaattaatttaaattaattttgaaacaacttaaattgaatcttatctagattggcttctatccccgagcattgataataaaaataagaaacttacccgagctaaccccaaaggaacaattgaaggggttgagtttcatgttgtatgttctcaggattttgaagcaggcatctaggtcacctatgtgccctccaacctttctgtacttgacaagcatatcatccacataaacttccatattctatccaatttggtttataatattttgttgactaagctttgataggtagccccagtattttttaatttgaacgacataactttgtaatagtaagcccaacatctgtacaaaagcttgtgtgttcttagtcaagcggatgcattctaatctacttgtatcgcaaataaaactcaaaatttcgtgacgtatcgtagcatctacaagctggtcgactcttgggaggggaaagcaatcttttagacacgcttttttgagatcagtgaaattaatgcatactgccacttcttatttggttttggcactaggatggggtttgctatcccggtggggtaaaaagcttcaatgataaatcttttcattttaagtttattcacctcctcctttagtgtctgtgcgcgttctttatcaagtaatcttctttttactgcatgggctttacatcaagatcaatgtggaagacatgagtggatactgtggggtcaattcctaccatattgtcatgtgaccaggcaaatacatcaaggttcgctcttagaaattatatcagtgctgatttttttttagcaacaaaccttttctaaatttgactttcgtggactggttatttggatcgatctcaacctcttctaactcttccactggcccaacatttaaactttgctccccaaggcaaggatccacatcttcatccgcgccataggcggatccctatttagtcatggcctttcctttctctgaactaaaaccaaatttttcttcttttgccttggctgaggaaaaattataacattcctgcgtagtcctttgattgcctatcaagaaaccaaccccattttgcgttgggaatttaacacacaaatgataaacagaggtaactacttttaagtcatacaaggctagatgccccaacatgacgttaaaaaagcaaatagaatatccacaactagaaattgtgccatgactgttgtcatatttggcaattttcccactgtgagtggtaggcggcacgttcctagcgaagctatgctgtggctgaagaacttataaactagctgtgggcatagaattaaatctttgagatgaagctccattgtcgatcattgttcgagccagtaccattttatttgcaatctgtgcctccaccaccagaggatcgttatgcaggtaactcacaattttggaatcttcatcactaaaagttatagttggattttctattcgtgcttgcttaggcttcctcttccctacagccaagactacttctccttgctcgtactaaatagttcgagcgtatttttcccttacattcttgaaatctcatgctatgtgttagtcccctatgataacttgtagattcccatcatgggtagtggcatcagtgggttttgattatcatcttgtggtaggggtatttattggatcacatccaatggatttggacccatccgatccaatccaattatttattggatattgga

SEQ ID NO: 302184 - DNA, 2056 bp, Cannabis indica
ttttttgtatttttacagaatttaatagaaaaactcctatagcaactaacttaaatcgcaactaaaatatgtataacaacccacataaaaattattggagaaactaacggaacaactcaaactgtaaatttaaaaaaacaagttaaaaaataatatacgaaataattctatttaatttttttcatcttattttaaattatcgttctgttaaaatatttaattgtgtctatataaattcttttttaacaacacctaaaaataattttattatttttttagataaatttcaatcttatgtgtattacacatagcatttatccaaaaataaacattgtaccatgtattactataaaaaaaaatcctatacagaacagtatcttattttgttcatcgaaaaaatcatttacttattttaattttaaattcaataattttttaaatcctataaaaaaataatcaactaacacaaattcaaaagctttagcaaaaaaaaaaaatcgaagaaaaaagaaaactaacacaaacgacaatttttttcaccaacccgaaacaatccgtatacgtaagtgaaacgtgattatcacgtgcgacaaagaaagagctaacacaaacgacaatatatttcgtccgaaagaaactataaacgacaatatttcatttaccccgaaataatccgtacacgtgataatcacgtgcgacaaaatccttgacccacatctcaggtcaggtcaagcggcacaactcacgagacgcacggattccgtacacccgcccccaccgtaagactttatcagtcaataaacgcattgccacgtcatcacaattccactgccacgtgtgcgtttcagatacacccacgtgtgcccctaaatccccaacatgtcccttcctctcccacatttcttattcctctctctcattttattattatgcttataaaattccattaaaaaaaaaagctagtgtactctatccattattttatttgattcaattttttattttaaaaaaaattattttatggagtagaataggtaatgtgtcaatttctgcaccttagaatatgttattatttttccttacataatgtggttaaattaatagttaattttttaatttttattattaataatgttaatttatgaccaaagttgaatgagaataatatttaaatgtacacgtgtaaaaagctcacactgtagaatcatgttaagtatgtgaccaaatctaagttcaaatcttttatgttatttatttatttattttagtggattatttataaatagggaactataggcatgtggcggctcaattctctaaggaatatattgctaaagaaaaaaaaaaagtaaactaaacaaagaaaaacagaatctcttaagtaaagactttatttgatttaatttttaaaataataggaagaaaaataatagaagaattatttattaaaaataatggagtaatagaacaagtggaattaatgtactcaatagttggaatttgttttagtttattagctaggattttgttctcaatggcaagcacatggttttattcactgtgatctataccaatatttggggtctttttttttcctctaaaatcaataagcacattttgaatgactaaagtttttctttaactttaacctaattcttgaaaaagttaatatttacacatgcaataattaataatgttgtggttttgtttccctttaaaaaataataagcacattttaatcagtaaagtttttgtttaatacttaacctaatgttatagaaaaagtaacattgtacacaatgattatcttcatgaatctatcctaaagagaataattaacattttttcctcttaaactcagaattatttaattttgtcccctaaaatatatggcttgttaaaaataatagttacataattatgtccattctgttaagttatgttatccttattgttaaaaattagcattttttatccccaaaactttgactatataaaatgtgccctcttatattaaaaattattttaaaaattataatattctatttttaagcaa

SEQ ID NO: 302185 - DNA, 4201 bp, Cannabis indica
gttgtgtgaggagggattgccccttgttaatcttattttcctttcttaatttcatgattcgaggttctctttcaaaaagaaataaagttaaaagagaggtttgtttaaggttttttcatattaaataaagagaaaaaaacttgtattgatgatattaattagatggagagtttgagctcaagattttaattgagttctttctcttgatgtatttgagtttgtacacttaatgcttactgagtttactaaaaaaaaattaaaagaaaaggaaaaaatcatatacgcactacaaaattttttacttttagtcacaataaaatctgtgactaaaagtgaaaaaattttgactaattataaattatgattcttatgttgtgactaaaagatccgtggctaaaagtattagttacaaaaattacattttgttatgaccaaatgtattttttagtcacaatacttattagtgaagttaaaacaaaattaataacaacttgtaactaaatactatattttagtcacaagtaatattatgttgtgactaaaaatagttttcactaaaagtagcagttttttgtagtgacgtatggagtgataatcaaagacttatttatataaccaagatttgtatactttaatacaagagacactattataaacattcttaccatatatattagcttattattccttccttttttcttgtgcgggaaaaaaaaaaacagtttcaactagtttcaatacattcctctagctatcccataatagttaattttatcctcttttcatgataattacatagtgataaagatgcatagtcttatttaagtattaatttattacacatagaaagaagatggtaataaagaagccgtatgtatatataaagtttacaaaagctggtggatagagtagaggaagggaatcctctctgaccaaaaactctgtacatgtgtatatataatatatgtgtgagtgtgtgtgtgagagagagagagagaatcaaaatgctgtttaaggaaactactctttcccaaaaaccaaagctctctttattatttctctgcttttttacacttcattctccacctctctcagtactatagttactttctcgtaataaaacacatcaaccatatatataccagcaaaccaccccccatcgaatcttatataatctcttaaactatataatattaatgtgattcaagtaaaaagagaccgaaagctttagagccaacattattaattaattaactaattcacattcattataaatacttttttacttgatttggtttcacggttctctggtaaattttaacaaagaaaaggatatattatatattattctttttaaaccttagatatagattataaaaagactgaacactctcaaaagtagccatatatatgccactatgcgctgtatatatgttaagctttttaagttagtaatatatttgatatatgaaacataaagaatcattactcagaaaaaatataagtcagaaacgtctcaacacatatatattgcttaatttaattatcatatattagtctctgaacacaccaccataattaattaacctaatgaattaaacacacctcaaaacacacaactacatgatattaaggaagaagaagaagaagaagaagaagaagaagaagaagaagaagaagaagaaaaaagtgtcccgtgatattaatacaacccgaggtgaaaagagaaaagaaaaacagaaattgtaattaataataaaaccttacacaaccccaattaacctaatttttctaacatatatcttgatgaaaatgtagtagttccccatccccaaaaaaaaagaaagaaatttatatatatgaaagggtttttaagggtatgcaccattagtagtagtggaaagatcaggccatgaaaatggcggaggattaatattccagaaacccatttgatgatcacctggtcctccaactgaaataatgatgatgatgatgatgatgacattaattaatgaaaaagaagagatattattataacaggtaataatctatatatttatatatatatgttatagtatacctgatgagtgatgatcgttatagtaattattattattattagctggtgatgatgatgttgttgttgaagatgacgatcttaacctctgatacatctcttgaattccattattattattatcattattattatgatgaggaaggctagctgagcttatcaaaccgttgatttgttgataatgtggattttgactttgattattattgacttgattgttcctccaaaaagagctgcacagaccaagcgatggagcctgagacactggatccaaacccccctgctgcttcactactactgactcactactattattattaatattattattattctgtggagagctagggttagggttagggttttgaggagaagtagtagttgacctaagtaaggccaagagatgagaattctgaggagaaccccaaagtattgggctgttagaggagagttgatgatgatcatgaagatcgaataatccgccgccgccgaatcctgaccgtccaatattattaatctccgaactactcatcaccatcttcatctttccagtactattagcgactcctccgccgccagaagctgcactcttcccggagacaactgaggaagacacaatagtagtcttgtttttccggcaaccgccgcctatcggaacgttccttagggctccaccttttgtccagtaacggcggcatgtcttgcagaagtggcgaggctgagtgagattgtagttgttgtagtaacagaactttgtgttggccgaatcgcaccgcggacacctcagactctccggtgtagcggtagcccccgccccggagctggtggtagtagtgggaggagtagtagtagtagtaggagttgttattggtactgttgaagaattattatgaagtaaagtagtggtagtagtagtagtagtagcttctaaaagtcctcctccattaataatggaagatattttcctattttgattatcaccatgagttggagtacctaacagatgatgatgatgattatgttgatgatgatgatgaagattatgatgaccagaacctcctcctcctcctcctaacaattcttggatcatcttttggggactctttgatatatcctttaatctagatctacaacaataccaaaaaaaaaaaagaaaaggagaaaagaaagatgaaaaaagcagagaaaggagagagtgagtgagtggtgtctttttttagttagtgggaatgtgagaaaagcaaaagaaagtaggttttgttgtctatttattgtgtgtgtgtgagagagagaaagagatttgagatgggaatatatttttacatatacttgtctttgagagagctgttatatgttattgttatatatgaagctctttttcttattagctaaaatgatctttaatttgtggatataaaagattataaggattgtgactatactactatgggggacctatatatatttatatatatattggtatatccaatgtggacattattataatttataccaccaatatatagataggttaaaaatctctatatgtatgtgtccaatcacttgactagtgttgttagctactagctcatcatatcatttaataaacttattctcttctctatatatgtattatgtgaagtgaaaccactaaagtactctcataattacactaataattccaataatagtagtactaatttatcttcacaaaaacagttaccaaactaaatatatgattaagaaccttttttttgccctttgttgttcaccaattggatttttttcatatatcactatataaaaatatctccaataaaaatgcaaagaattataatgtataatctaaaatataatttactttgcaaaaaatatgcttcattattaatagtgtgccaaatgtggtgcaatttttttttttttttagtatacaagtactggtgcaaatttagtaaagagaaaattttatgatacaaaatttaaatcacggtaaatgcattattttttttatttacttccatactagttttattattttattaatacatttaattatcactatttaaaaaaacttacctttagtaataattttttagtcaaaataaaaagttatttgtagattaa

SEQ ID NO: 302186 - DNA, 4674 bp, Cannabis indica
agcttcaagtttgaatcataaaccaaaaaaataaaaactaaatttcgggaaaagaatcctttgaatagtaggactcctgttccagcaactgccagtgcggtgaaaacaagaggaactgtgaagctttcggtatcacaagttatatttttccttttagttcggatttggcgagtcttctctccagtgttctcgcggagaagattgctgatactgtctaactggtgaattatttgtctctgtcctcttgctatacttgatatctgcagcaaaaaattgttaagtgcaaattagaaggggtcaatgaattcatcaacaagagttatgcttgagtgtatgttgatgttggtaaccacataatatgattgaaaacacttaaaaaaaaatgcaaagccaatgatcaaaccatcgaaaagtaatgagatcccgtgtacaatctagcttcattagaaaacaaaacatcacagtacaagaattttataaaacctacttgactaaaagtggtttttgcaagaaacaagcacgatatttgataaaaatgatattaaaaaatgttgatgtagcttcattggctcttgtgagactgaacagaagtatccatgcaatgctcttcatgttgtgcaaatatttaaacactgattatgcttacagctaagaagaatatctgtttctaaagttgatttagttgttatcaagaaaagctcaaacatttaccttagtcctatatgtgcttcaaacaatactatagtgcatagaaaaactctctgaaatgctctcttctctctcctctttttgagaagtgtgcccatgcatacgagggttctacctggcccttctggccatggaaacaccagaaccccactggttttgggaagaaacaaggccactatcctactggttttggctggcaaaatccttctggtccttctgtggatcagtctctccaaaaatactggagtttcagaactaaacacaaagtgtttatgctaacattgtcgcatgatggggggtctatccgtatttgcgagagaacaaggctgttcggatatgaagtggctgttacgattgatgcagtggactggttcatagacattttggaagagcttcttcaaaaaacagggacacaaagagcctacctcaaacgctccttcaggaacagcactatttgttgtttcttggaatgttttgcaaatactaaaggatcttttttgaaaatctcagtgctaagaaacaacaagttaaagatgataattgtaccagaagaagaaaagaagggatggtctgaattaaaagaatgcctcaaagggattgtaaaaaggaagaggacaagacttattgagcgaagctaccaaacgaaggttggtcagaaggcagggggggtatcgactcatcgttcctgggccaatgtggtgaagcaagggttaagaccagtgatgaaagttcaacacaacagggtgaatactcaggtaacagttgcgaaccgtgacagaggaagtattgaatggaaagatctatatcctgaagttaatcttggcttcaaaccaagaacctctatccagtgaagagattcacccagcctaagttctatgaatatatgagatcgaaggcgctgcctagagactggagcttggctattgtccttacgaggataacactcatgcggattgggttacatatctacaatctctctagagagttagaagaggaaagctggtagttagccaattggtttgacgatagatgtatctatggggcaaggatgagaaggtataggaaaggagcttttgaagattcatagtatgaaagttcctggggctcagtcattagtcaccttttctgcttggagcttggcaaaccagatggacaacgtaaaggtagagtgcaggggctcctggataggggtccatgggctgcctttgaacctttggaacatgaaaatatttagaaaaattggtgaaaggtgcggaggattactggatgtggataaggacactgccgaggctagcatgttgtctcacttgagattacagttgcagggagatgaatttgggttcattcctgagaccataatcatgagtcaagataacacaagctttgaactgaaattttttaagcttaacgatttaagctatcgtttccatggcagttttaatacgtgttggtatcaagactttgatcatgggaaggttttcggtgatggggtagagactgaagggttagaagatgaagatgcaaaagagaaagaggggggggggaagaacagtctagggagtcgaccacggtgggaggacctgtatcgttgccggagaagacggtccattcaggaacccaggaggtggcaggggaagtcgtacagcctcgggctcttcgcccaaaagtagctttattgtccttggctgctggtgaggcggccgagaatgagtatggtcacttcagtatcaagtctcgagaagacatggctttatcttcatgcgtacgtgagcagggaatggtggtaagcctccataccgtgtataaccgcctcttgagaagtttgagggggccacgtgtatgtagaaatcccagtttgaatgtcttccttaattctcgtaccagctgtcaaataggggattattgtaggttcaagatgggtttgagtgagttgggccgaggagttagggttccagaaaaggtgggcctgcacataaatgggcccgttaagcattatcctacttatggaggagtttcgggctgggagtttattcctgggaatgggccggccttacatattaaattaagggagtttgggttttactgtaggggcctttttaatattaccttggaccagaatgttggtttccaagatctttttattaaaagggcaaagaactcggtgatgagtgattttattgggcctagaagagagcagaatgttgtggccaagaggatgagcccggaacagattatacaagagttttttcatggaagacttcgatcgattaatcctaaagcccgagagaatttcacaaaggctatcattcaattttggaaagattttgatgtacttaaaagaaacgtaacggagtctgttctccattacaagggggaaatggaatcagagaaggaaggcagacctaaggttgttcgggtttattgtagaaaaataaaagactttggtcatgactgcgtgagtcacttcaatgaagaaatttattcctctgagttcgaggaggctgatgaggatccgaaggagtttgagtttcgtgagttgagctccaatgatgaggagtctgaaggggaaggagacgtttcaatgacagaagaaggagaagaagctgatgatattatatgtaacattaatgagttgtggagagtggaggctgagcctttctcgaggcaggaactaggggaggtgaaactggatgatgttgctgatattaggaaagaaacactagtagaggaggaagtgggtgtagcggtcaagatcatgaatgaggcaacttcttggtcaaatattgttgattccatggctgagatgggcatgaaaattacacaagaaaaggaagataatgatcagaagatagaagaggttaagaaggcaaggaagaaatgcagagaattgaacaaactgtctttcaatgtaaattatgagaagagttatactaaaccaggggcacaaaacggttcattatgaagattctaacgtggaacattagaggcagcgggaacaaaggaaagagagcagctatcaaagctactatatgcaaagctaatccagacttggttatattacaagaagtgaaaagagcaacggtggatagaaggttcattgggagcatatggagatctagattcaaagcgtggattcttcttccagccttagggagatcggggggaacattactaatttgggacactaggaccatctcggtactagactccttggttggtgaattctcaatctctgttctgattaatgcagaaggtaaagagccttggtggttttcgggagtgtacggtccgtgttcgtataaacttagacctgagttctgggattaattagcagggttaagctcaatatgtggagagtcgtggtgtgtggggggagactttaatgtgaccagaagagtaggagagaaattaaacagcagctcgtgtactaggagtatgaagctttttgatggcttgatacgggaattacagttgatcgatcctaagcttgagaacggaagttttacttggtcgaatttcagagcatcccctgtatgcagcaggttggacagatttctcttctcaaacaattggaatgtcatttatccgtttgtgagacaagaaatgttggtaaggttagtttcggaccatagccctgttgtgatcgattcaaatcctccaaagtggggacccggacctttcaggtttgataaccattggctagaacataagtcgttctcaaagtgttttgaaagttggtggaaggaggaaatcaatgatgggtggccaggcacaaagtttatgaagaaactaaaactactccaagggaaggtgaaggagtggagcaaatccacttttggacaaaataaggccacaaagatcgcgctggaaggaagattgggggtgttagacagactagaaggaacctcgtcttggaatcaatctgttctcgacgaaagaaggaaattaaaaagaggaaatggcagc

SEQ ID NO: 302187 - DNA, 1694 bp, Cannabis indica
tggtatttaccctttaattaatgcaaattaacctccacaacccctagaagctatatatatttttctttgttttcttcttcggactttggtgtgttatgtttgtttaagtaattgtctgtttgtgaatgtgattttttggtatgtggtgttgttgatgccactttttgttgcagagccttttgtatttcatttgcccttttttttttttttttttttatggttttctttgtgcctctactctttgagttagggttacacaccattagaaagtgaataaaaagagaggtaaatgatcagaaaaaataacaagtttattatatttatagccatagagctaagcatggtttcttattagatacttttgtgtatgcatgtatatatatataataaatagttagatagtggcttatgccagtttttcattggatgattacatttataaatttatatataaaaatatgtgagaagcacaaaaggaataaatcctcattgattcggaataaagcaatagatgatattttggtattatatatatatatatatatagatatataagaggtcggccaccaccccacaatatgtttcttctttggtttaattaatttaattattatgtatttgtcctcaaacgaaaaagagtgcatgtctaattatctataaaacctactttaataataataatctcataaacgaaaacgatgtttggaaaatacaaaggtttaattaactttgagaagagaatgacttaaacggtggaccccctaattcttgtccactaccctaatcatgccaagtaatgccccaatatttttctaccttttttgtttggtgatacccaaaattcttaaaacttaatcataattttattatgctttatttgactgatttaacgcgttcttaagtgggatgttatacttattttttttttctttaaaaaaaaacttttatattaattatggggtgggggtaggggacattttcttatttattaatcataagggtttcactgaatcctaacccatttagacaaaagaaaaaaaaggaagaagaagatatagttcatgcttcatatagtgtaatgatgacgacaacaaaagaaaaagaagtatgaaactaatgttatttcaatgtatattagatatatgtatgaccatttaatcttaaatttaatattatatttgacacaacatttatagttgtggatcatcagaaaaagataaataaaaaacatttgtaattatgttccaatacacaatagtatttaagtaataacaacactgtaataaaaaaaaaatgtgtattaaagattatcatttataattattactattattattagataaaactataattaaaaaatagtatttattaatatattaaatttgttttttttttggaagaattatattaaatttgttactttattataccttgtactaaactttgcatagtatgtgtcaaaattcaaatttggtccaacctccattttgcacacaatttgagagttaatctataatctataactactataaaagtgagaatcttgttttgggctttcacatattaaattactagaaagtcctcacttctcacctttaatttattatgttgaggttaatcatatacaaaatttgtggtgattaattgtcttttttttttttttttttattaataactactataaaagtaacaat

SEQ ID NO: 302188 - DNA, 576 bp, Cannabis indica
catctattatgctaatattttagttatgaatgactttgctatgttcacttagttgttaatttgggttcatgtaaaacttgaaatagacttataatcattttttctataagaaaaattgaaactatctctaatttagtatggatttatggaaaaatttaaatagttgttatattcatttagttgttattttgattgtttatattttttgtttcctaaaagtatacaagcaatccaacataaaataactaattaacaatttttctctaatatataattccaaaatattttttgtttcctaaaagtacaagcattcatgtccaatttcacttcaattttttctttcttaaatgtacatcactatagagacaaaataaaaaggcaaagtgcaacatcaaatttagtggatttttctaggcctatgactatgaggacattcactatacatctccattagtttgacctttcatcaaaaatatccatcaacaaataaattacatattggctacctatagtgtgcaccaattctttctcaaaaaaatcatagtgttaatgttgggaattattttaccaggatct

SEQ ID NO: 302189 - DNA, 2028 bp, Cannabis indica
taaaactgtcgcctataagggtccgttaaaaaatcgcattttattaaaaaacatcgcctattttgtttactacgattttaaaccgtcaggaatactaaatttttcctgacggttttaaatagttacttaatttttttagcgacggtcctcgaaaaaattaattttaggaccatctcgaattctgatatttgtagtagtgaatcgtcattccgatgccacaaaatccatcaacaacatctaagacaatgtctacattaatctttcacaaaactcgcttgtggcaaaacccagcgaaggtcatacgtcaaaaaagaaggaagcaaatgtttccccgtcgtcctcgaaccaatcaccaccttgttatggtcagaggagttatgataatcacacaagaaatcttgggcctaatctagaacaaactcgagcttcaattttatgcatcaatttgtttcttctatacagaattctccacataacaactagacccaattccacttgttgaagtgttaaagtatcctaagataaggtgaataaaattaaaaaaaaaagtccaagaaaaaggccaagggatcactaagcaaaaaatcacacaattttcagcataaaagaagggaagaacatctccacaatgcatgatgagtagtttcctcttagcaatcacacaaagggaaaatcctatcaagaggccatgccaaaaagagttactcttagccacttttttgaaatttttcctgcaaatagtttcaccttaagattaatattaagaccccataatttttttcacaaccgaaataggcaatagaagaagaaactctatccactgactaaaagttttatgaccccaaatcaacttatcatgagcaaccaaatatggcaagaaagagataaatggcctccacttcatgaggcaaaaatagacagtgaataagaacaacatcccactcacttgaattcaaattgagttgacaaaccacactataaatacctagaaaattagggggataagatcaaaggcatcaacaataagggaatccaagaatcagattaacttgtaaaattcctactatcataaaccctctaaatagaaccagcttcaaataattccttctcccacacgatatgtttctaaataacagaacctcttaataaccaaactcacaattataaattttatttataaaattgagatcaatttttgttgggttttgtgccctaaataaaatttattttaatataatcatatttactaattaaaaatagattagaaactattttatgttgcatggttcacatgatttatttcatgattatatgtttaatgtgtaaattctattaaattcagaacatatagttattcatgattatagtgttgccaacacaatggaatataattgttgacctcacttttagccaacgacaatgagtctgataataagcgataaagaatacagtttacgtataatgtgaacaaataaataaagaacataaggtttttaaagtggttcgaccccgttcagatcgataatagcctactccccttgatttgtattaactcaaaaacaaagaacacagtgtttcctctctcaaagctcttacaatgaaatctctgagtatgctctcttagatctctctaaagtaattctttcgacctctttaccagtgagaatgaatcactatttatagggctacatgcttgagggaaggtttcccttttgcttacagtgtctataatcggtaagaatatagattacatatttagaatacacagattgtgggatttggacagcatgccatatcttggtgattcgatcccagatttatagggattgcttttgtgcttcacgatgtaaattctagaaatgctaagttttgatgcgctgcccggattatccactgctcgactgggaagacatcctccgtgcagttatgtgttgtatcctgctcggatcatatctcccaagcatatatgtgctgccacatcacagttcaaaaaatgggataatatttgccccccaagtctgtacggga

SEQ ID NO: 302190 - DNA, 1299 bp, Cannabis indica
aaaaataattaaaaattcaataaaaatataaaattattttaaaaaaaagttagaaattaaactaatttttttattatttacttaaacaaatctagatttttggaaagaaaaatagactcacacttgttcccttaaaatttagtttttacaaatattgaatttttaatataattttacatctaaatggattttttaataaaaaataaatagttttttaaatttgcttatgtaaatgtaaaatttcaaaaaacaatttaacaagctgtatattttaaatcggtagatagaattaatattattaaaagtactttaccatatagggtacataactgaaatatatattaggatttagaaagggtttggttgaaactaataattaattaattacttaattaagttgggtttttttttttgtttttttttttttttttttttgaagaaaggactaggatagctggtggagtttaccccctttctaatgtgggacaaattaagtatctgatcatgatatttctgtttttgttggaataaaataattccagcgcctaacacaacaattttagacatttatacgtactactgtactactatatactaaattcaaacaaactgcatatgtaatatataatattaacaaacatatatacgtatacgtacagaaattaaaagtaataaaaatatttaagtatttattttagataaattaaataaacacacaagtttttttttttttttgatagaatatgatataacggctgtggtatctagtgataccgcactatagttacaagtgatcaacatttaatcgagttgtgagcaatccaggtcagccattcaatcgtagctcaccgatttaatttgtctcaccaaaataaaatatatagtcgatattaaagagtagttttgttcctctaatataaaagtttattctgtttcaaaaaaaaatatataaaaatttatttgttatggtctattaggtttcaagatacttaatgtatcgcttcaaataattaattgaggtaatgtatttttcttatatatatggggtgtgtactgacttaattataacttagaaatggggtgtgctgtagggatgcacccggggcggggaattggcggggagtgctcccccgtccccatccccgttaaggattttaatccccatccccgcttattctccatcggggatggggcggggaatcccctaatgggagcggggacgggacggggaatcccctaatagaaaaataaagtttataataaaatttttaatattcaaaaatattaaaatatataaga

SEQ ID NO: 302191 - DNA, 1615 bp, Cannabis indica
taaacaactgctaatttccaaattaactaagcgggctttacatttaatgtctcattttgtggaacacatatttatgtctcatttcattggacacgaaaagtgagggacatgaaaagaaaatattagactcttaaagtgtactcctaattaatggtgtgtatattaaggtaaataatttaaaatatgatctataattaatcttttaactaggctaataaaaatatttgatccataatataagacatcatatcacaaagtagttttatatgttttggtactaaatagttcaatattagcattaacattttctatagttaatatataagacaaacttaagatcatcacatacaacttgttttcataatgtcatgtatgcatagatatccatacacattccaacatgtccacaaattaattaagattaattattaatgatcaaataattttatatcttgttagtttttttttatttaattatttaaaagtaaaacaatataaataaaaaccctaaaaggtagaagggagcttttatcataacaatgtgtacctacaagtcacttttggagatggtaaagtgagtacaacatgacccaaaagagcatagaggcttgaagttacagtaaaatgtggctattttcataaatattgggatagttcttatcatacaaaatttattggtgaggacaagtaacctttatttttttatttaaggaaaaatgctaaagatcttctttactacgaagtattatctagctatactagtgtaattaagtgttatgtttcatattttagagcattgctattgggcaccagtaattctttctaacactttttaaaaggtagcgttctatgattgattaacaatattacctaaaatctattatattaaattatatgagacccaataattaattacactaataaagacatgatacttgaaaaagatctacgcaatgccttttaccatagtgtgaacactacttgtttatatttacaagttttaatttgtatatttaatatgatttgtaattaattccaaaaatattttttttaaaaaaaatgaacatcataccatatttaattgtatatttaaattaattatattacacattataaaattaatttgattatataaacaaaaaacttcatatcattgctctttatttaaattaattgatttattttagtgtacaaattaattgctcatttgctattggtacactatgatttatcaaaatattaatttagtattttatatttttaataatttttatttggtattttataatttgaaattatatatttggtactttggagcttaagtttagtaaataaatatttttaatttactttcacttatatctaatttagtattcaatttgaatttgaaacttcataatcatatttataaaattttaataatcacatttgagtataaagtttcaagttgaaattaattaaaatgaactttattgatattttttagaaggattttcaatgagtttattgtaacgtcccgcgtcaagcctccattaggcccttacacccacagactcatgactattatacgcgagtacgtcactctggctgtttcctggattgatgactgacccta

SEQ ID NO: 302192 - DNA, 617 bp, Cannabis indica
aaaatgagcaggctctatgcgtggacctaatctgcctatgtctagagtcaatcatgtctacaatgtcccactaatattagtaaggcactgtaaataaacttatttataagattaaatttgtagtgtcattagactagttatagtgccaagcctcaacatatttagattttagaggcccatcagaatgggcctaaatagatgaccctttttttttttattaaatttattgtcaattgctaaaaaaaattattgtcacttaaatatttaggtttttttattttgaaattttatgtatttttaattaaagttttaaaataaaaaattgtcaaattatcgatgttaattaatacgtattttattaccttaaaataaaagacttacttatgtaagtataatagggaactacattgcgcttcgcgaaatttattgcaataattgtaatgtttttagctactaaatgtttatactaatctggttagattaaatttttttgtacttcaaatccaaatataaatactatttagactttttatgtattaatattaatgtagctggaagaaattgttagatttttttatttgaacttacattaatttttattagttttaataaaatat

SEQ ID NO: 302193 - DNA, 1980 bp, Cannabis indica
aattttggattttcttctcgattctttcgccatttcgcctcaattcttgtacatactttctttaaatgcccgaggacctgaaacaagagaatcaagcgtaatatagccctaaaactagaaacaaagagtgaaaactaaccgaaatatgacccgaatcttagactaattttagcctaacagctgtgattgaagatctatatggtgccttgtatcaaaagtatatacctgatagttgtcttgaatatatataagtgttctactctattagtatgtgtcttttggtaagatatcctaaaaataaaaaatcgagactcgaacttaagctcaaagcgaacaaaatcatactaatataagagtcaagatgtgaggtaacgatacttgacaaggtagaaaagtaggacccaccactttatgtaaatttatcaaccaaccaattatatctgtatgtataatttttttattaattaaactcttgaatatctcaatgataaatattgtttaagtctattcactatacgatcaagttaaagggccttatgatcagtgcttcattcagtaaattaatcgagaaatttaatcaccgagatgccaaatcatatataattatatattgagcattgctattaggcgttggtggtgcctagcaccttctcgacatgtcacattgcgattggctattaataatttaatacttcctaaaagctattatattaaattatatgggactcgatacttaattggaccaataacgatattaacacataagaaggtggtagacaccactagtatcctttagcatttctcttatatattatactacaataataaaacaattattataataaatgtgacttacctgtaaattaagctgtaaattatcaagctgtaaagtgtcataattataatgaactggttttagtgtatattttcaaatattatatatattcattcattcaactactcatgagaagtataattaagaagtaatgtaactaatcattatggcttctttaattgtattttctctacaattatgcatataattggttctgaatgcattaaataatcaattattatttttattttttcgaaagggacattaataatcaattaagataatgttaattaattaattattttttttgctgcgtatttaaattatttaattaaaattgttagatctaataataaaatctgaacaactcaaatgtaagtttgtccaaattttcccaatcggtaataagataattaattaataattaaaatgacattattcaactatatgttgataacactacattttcaataatttctttaaattaataataattttgatatttttaactgcttaatttatacgaagcatatctataagcatattcgttaattaattagctagacacgttcaaatatttgagacataatttaatatatttagaggatcatcttatttgttagcttaatatataaaggatcttgtctttagaaacaatatatagagggaggagatcgaggatcttgattaatttgtgtttgttatcaatataattaattatcaagatagatcaaagatcatacatatatttaaaacctaataataataataatatatattatgttttcattccggtttttcatgattaattagaatttttttaaaataaaaaaaaatcattttttttttaattttataaaattagctagataataaaggaaaaatctaaatatatataattattttaaattatgaaataaaatgtgtttaagccattaagactaaggttactagcttagtggtgacttgaacttaaaattcctaaattattagttgatatataatagtatagctatacactaaaaaacaatatgaacgtgttttggtatatttaaataagataacaattaaacaaaatgaaaaagtgggtatgtatgtcataatttgactccttaatttcagaaataatcaaaaaaaaaaaaaaa

SEQ ID NO: 302194 - DNA, 1190 bp, Cannabis indica
attggaacacaggattatcctggctcagtacaaattcaatgaagatcttgaacctacatcaagaactatcttggtagctttattggtcagcaacaaaggagtacaacaatcacagttgagaaaagctcacaaactcaaaagtgttttcctatcttacccaagctgtacacattcatctcacttgtgtagctcaataagaaatcccggaagccctaactttttctctgaagttctcaatctgatcatagaacagaaactttctcactctttgtgtgaagatgtttcttgcttctgctacctcctatagagaagaagctggacttcaatatataggcagcaatagttgagtagcagcctttcggttaggaaatttagacacaaaccacacaaccattaacagaaaattgctattaatgtatatatggtttagattatgaatttaactatagactatagtacttagcatgactactaaacaattgcaaaataaagatttgatagaagatagaattgtacttgtacttcttgcgtgtgggctgagactcccatgattcaattttcattattatattgatctattttgtagcatccggaggacaatcttagacagagggaccaaggctgtcttaacatatttgaaagacaaaattacagatctctagtttagttgcaaatctctccggacatctctcactctgttcacttgtcagaatttttaatttgaagattacgcacttctttacatggttggattgtgagtgtgacatttgtgaccttacgaattaatttaggattgttttttgtttcgtttcaaatatcccaatgtttgcctatgggattgtgtttcttgttgctgataataatgtattttatacatgttttgaaattacaaacattgtttcattttgtgctcgtatacagactaaacaataatgctatttaaatttttttgttctttttcctcaagtcttaccgcaacatcaatgctaatgttgtaaatttttaagtgagataaatggagatggtgtgttagattattattgtaatcactttgtgctttttaatttagactcttagagcagctattgagattgttgagtgttcagtgtaagagcttcacttgataggtttgtgatgagaaaggtagagactaaaaaaatctcaaactcaagtatttaaagagtttaaag

SEQ ID NO: 302195 - DNA, 917 bp, Cannabis indica
agatagaaaaatttatcataaaaattcaaattttccaaatattacctatttataagtaatactcactaacaataatgaaactttgaataatacatatattttagtagttgctggttcattaattgtgaagataaaatgtgaaaagtaaagcacgaattgaaatttaaatataaaataagctggcccatttaagaaaaatagctagcacaaattaaataccgcacaaatttaagtacgatacaaaaatatcaggtttaccctttaaaaatattcacacaataccgcatgacatgatgtatattttaaaaagcatgttataatatgaatggggctaatacatgtacaaatttccagcactaatatgaactatgaaaattagcaaattattgtagttttgagaatattttggtgtgacgtgctatgcatgtgcacccatgcctagagaactatgaaaaaccattgctagtactttataataaaatacacagataaaataaaataaaatatatgaaattcaatattaattaatacaacttacaagtcatataatatagtgttagaaacttataaagataccctttcaacatttatggagaaatttttgtttgcaataaaagtagaaatttgattaatagagttttaggtgtacgagagtaattttctttgcattaattgatgatgaagtttgtcatgatgatttactagatataattatatttttattgattattattgatgcatggtggtgccatgattacagtaatggaagattgatttttatatttttgtttcaggatataattgatgtcaaagctcaacagatatgtatcgaaaggaatgtataatagagtttttgggattatgaataaacaaggtaattatgttagtacttttaatttatttttatttaattaaaa

SEQ ID NO: 302196 - DNA, 1099 bp, Cannabis indica
aaactgaaaccctagttgggttgttaacttgggcgttgggtgcgccctggttaatttctaaggtattgtttcgtgtgtttttagctttcggggcctggacttgcatgcttcatgtcttcatagtacaaaatactgaaagatagtgagttaaagataatttggcgggatccaaacacccattccgaagtttccgaagtcaatctaggtgcagagctagaaacccctcccaggttgacttgctatgatctgggactactcaactccatgatatttttttgccacatgtcaaatattggtgtccatgttatcaggactatttttaatgtaaacagaaaacaattctccatttgtatgtaagaaagaaaacatggacgatttttttttttagtatttaaagaatttataattcaaatttatatatatgattgtcaatattatagttagaacttctgttataatgacatataatgagggacatcaaacttttattatagtttgttccccaatagatagacacattaaaaggggaataaggagccaaatagaaagagttaaaacaataaaaacaaagagcaatatattaattagtgaaaataatatcaatattatactagagtgaaaaacaaaacaaaacaaaattgggtatgaaaatcaagtatttatgaagagacagaaaatcagaaaacaaatatatgatagaattgatgtatagtaatttgcttaattttggtcaaaaaagtggatatgtcatttgagttccaaggtctcatagattagattccctcatgtgattttctttttgtctttctttcacatctttacagattctgattctcatttctctgcaatatatttgagcaaagtacacctttaaagttttgcattttattttattttaggttgagaaaaatttatatatgcacatacaaatttgaacacaaacatatgtgacatgttatttgttaagaacaaaattatatacataagtatgtgctaaacttttatgtataatttatgtgtgtgcatttggctggccttgaaactaattggatcttaggtaataataaaattatttagttattttcaaaaaaatatatat

SEQ ID NO: 302197 - DNA, 1509 bp, Cannabis indica
tctcacatggtatcagagcttctctcgttttaatggcgactgctacctctgccgattctactcttcgttcaaacggatccaactcttcatcaagatcttcatctctttcgttcaatcactcactgtccatcaaacttgacgaaaataatttccttccatggcgacaccagatctatgctgcgatcaaaggccacagactaatcaaatttctcgatccaaaggcagctccacctaaattcgtgacagcagcagatgaagctggaaatcgagtctctgaggagtttcttgaatgggacatccaagacagtcttcttgtatcatggcttctctcctcaatgacagaaaagatacttactcgcatggtgggatgcaatagtgcggctcagatctggactactcttgaggagtattactcagctcaaaatcgagccaaggttagtcaattcagaactcagcttcgtcgaatcaaactcactggtaatctgaatgactacttgctcaagatcaaacacgttgttgattctcttgcatccataggccacgttctttctcctcaagatcacatcgaagccatttttaatggtcttacacgagactactctgtttttgtaacatctttatccactcggaaagatgattattctgttgctgaggttgagtctttactcatggctcaagaggttcgaaatgagacgactgagtctgatcttgatatatcaaaaccagaagtgaatctggcaactcaaccaaatatgcctagaccatctgttactcgaggaggccatcaaaatttttccccaattcaatttggatctttcacaggcggccgtggttcttttcgtggcaattttcctccctacaacaccaccttccatccctatcctcattacaacacaagccctcatcaatatggtaattcctatactccatcatatccttccttcactaacaatcctcgtggctctcggggcagttttcgtggtggtttttcaggggttggaagagggtcctctactcctaaggttcaatgccaactatgtcacaaacaaggccacacagtcaagcaatgcttctaccgattcgataaatcattcactggccctgaatcctttcaatctttcagtggatcggctgctatggcagagatgcaagccttggttgctacacctgaatctgttactgaccaaagctggtacccggactcaggtgctaccaaccatctcaccccagatttgcacaatcttgtggctcctcaagactttcctggtttagatcaaatccaaatgggtaatggctcaggtttgaatatccttcacactggtcacaactcctttatttcaccttttacctctcaatctcttaaattgaataacttacttcatgtacccgatattactaaaaacttaatgagtgtatctcaatttgctaaagacaattctgtctattttgagtttcaccctcatttttgttttgtgaaagatcaggatactatgaagactttattggttg

SEQ ID NO: 302198 - DNA, 2652 bp, Cannabis indica
atttgtgaaattaaccctaaaataaattgtgttttctagtcttcaccctttttatgcttgtgaaacgtttgtgcgttgataattaatattagcttttaacatgatgaattgaaaatctttgtcaatttaatttctcaaataaatttagtatgcttagtaaaggtctttattactctttctagagaaccagaggcaagatgagttatgtgggtagttcttcgaatttgaatagtttacttttcattagcttactcgatgatgcgaatttaaaaattggattttagtgtttatcaagttttgcataaggaatgattcttgtggaaataaagttgtaaagtttattaaattttatgctgtaacatatagatatcatattttaagggtttgtcagcattaacttctgttttcttgatttaaaaacaaattattgacaaatttgctagcaacgatcataattgctcgtgaatttgtaaaactaaagatgtacatagcgtatctctacatatacacatttgcatacatacttataaatttaaatttaaaaaaaagaaggtaaaataaaatatgcatatttttttaatttgaaaactaaagacaataattttactttcattttcaatttatttaaacagcaaacttgtgtccaatccagcccttacaatatgaacgctttttttttcttttgataattacaattattttccttactttgtttcttgaatccttttgcctgccagtgccaacaatcataattgctcgcttcaccatttcatcaattttaggtatgatatttttcacatcttttggtcaaatacatttcactctataatcaatgtatgttgaatcaggaaattaatttttctgcatttacatgaaataaaggatcttttaaggcctgatttccttttctaataaatattgtaagtatctttccttattatttgatctagtcattagtatgctttcttctatgttaaagttatgtttctacaatttccatatcagtatgttgatcatatttgttgttatcttgttcgtgtctgatttttagctcttcttcagagggcttctcgagatggagtgagaaaatggttgatgttgcagaagattcaacgtaaggttttatacttttgacagaattaggctatttgctgatcaattttatcagtagagttatttgatacgcttaaatatcgattaggttttgttttgttctatctccacatcctacacccgcaactctctatctgacagaacgttacaaatgggcctcaaacattagctttactatttcaatgatcgatctctttaaactgttatagttgaattggtggacattcttttcttgttctctctaaatgctaacaaacattagctttacttataagtcgtaagatatataatgtttgtgttatgtttatgattgtaggtgtgttctctgactacagttatgagtgtggaggttagggttgaagctttcaataccttaagaaatatagaagtggtatttggggatattattttacaaaccctctcgtagaagcttcttgaaattgttaaaggaagaaattacttagtcggtggctttgtgagcaaattgaaatattggcatcaagtgttgctgaagctttaatgagaatgaatcttatgacgtaacattttcttatgttttccaaggcattaaatgttaacttcagattgattatgagttgtgatagtgacaatgggatcacatataaaatgaaccaaatatgttacgaccacctcaccaaaattaatggttcccatggtatgttatcattcttatttcttatagatcttcattgatcttataatgataaagttggtcgatttaagtatgtttttagggttttttgtcagttatgtaatagtatttgatgaaactgttttagttatatttttttgtttgcgtactaatttttaatttgttcactttaggtaattaatttttgtgttttgttgtaataggattactctattttttgtagtgttttgtctattttttattttaagtttgtcttattatttttttatatggtcgaaactggttttataggctttgttataattttgtatgagttcacaagttttgttatgattttttatacggtcaaacccaatttaatagggttctaaaatagttttcacaattatattttgttttaaattttttgttgtgcaatgtgtgttgttttgattatatttgtgagtattttttgagtgtatgtttttttttactaataaaactggtttcagttatctttgttgtttatcacttatgttttgttatgattttataaggtcgaaactggtttcatagggttcaccagtttgaaatagtttcacagggtttacaagttttgaggcttttgtaatgtagttgcttcaatttatgatgttattctatattttttattttgagcttttttattattttatgtctaagttcgaaactagttttcatacttaagcttatattttaagcttatattttatttttagatttttgttgtgcattgtgtgttgttttaattatggtgtcgtttggtaacacttttttaatcagttttctgtttttaaaattgaaaaagtgaaaatatttttcaaaaacatgttccataaaactgtttt

SEQ ID NO: 302199 - DNA, 2712 bp, Cannabis indica
aaaatgataaactttaaaaaagaggatctcgggtttgaatttgtgtgatttttctgtaaataaagttgggccggtatttttgaaaacagttggattttttggttgctacatgttatcattttgaaataaaaagcccaaactttgcaacagacccatgggctcttaagcattgacccatctatacatatatgtagatgataatattaagggattatttcataaatatacaacaataaaaaaaattacaaaaatacagttctacaaaaattttaaatattttttatactttttatgattttgtatacaaaaaatgaagtcttttaatgtacttatatgttgtactcgtgttattttattgttgattttcgttatttgtatgttattttgtatagtgttttaatattattttttgttatttttatgtatttttatgtatttttgtattatttttattaatataaaaaaatatttgaacataataaaaatgtaaaaaatttataaaaagtaatattttatgtaattatctataatattaattataacgtagcatagcatgtgtgttgataaaaaaagtccattgaaacaaaattaaaaataatttcttaaaaaaaaaactaaaaaatttaagaaaagaaaggttataattttattagtggatggtgacttgttttccttaatgaagtggctcctgacttggtccctctaaaaatgtctctatatatttgcaaattataatattgaaacaatcctttctgattctcaaaactttcttaaaatcttaaacttaattaaaattcaaaaaagtcatatgtataactaaaatactaaataatacattaattatatcttatcttatctaattctatgttttgttcttttttttttcttttccatttttgtaaattattctttgttttttcatttatctttatctctctctatataaatatatttatatggtagttttcgttttcgtacctaatcatctacctaacccttaattattttctttacaaatataattatttagaagaaattatactatatacttcttttaatttaatatttttaattttattttctctttcaaaatttattatttttacttttttgttaaataattttaccaattttacctctatcatattatgatagttttcatcattctctaatcaaaatcttaccccaatttttcctcaagcctacacatctatctacaaagaacacaactctattatgtttgaaattatatgttagttatatgagtgggtgagaataatttaagtacaatactaataaaaagaattatatttgaattaaattttatttacaaataaatttagttaatgtataaaaaagacactacaacattttttgttaataggcggacctattactggcggggaagatccgcccctaatactgaggttattactggcggatttagggagcccgccagtattagttttaaaataaatataaaaaattaaaaatatatattaaaatgattattactggtggataattaattaatatcgcgccagtattaatagagtggtttaatgctagaatttttttgcctatttattcaaattatttgtagcggcagatctttactagtggagattcgccgctcacaaataaaatattaaaataaatttattatattaccagcggagacctttattactggcagacctccactagtaatattcctctatataaacccttccgcccctggttttctcattttgtttctctttccattttttcccctcattgaaaattcataaaccacctccggccactcaaccttcgcctgtccgtgaagtgctccgtcttcgccagcgacgcttctaagaaggtaatcactaatatcggtcgaatttactcttattaccggcagatccctaatttttgtaattcttgtagagtgaggtgtatttttcaacttctccctactctacaatccatgttcctaagaagagtttatcaatgtatttctatttatttcgacatttgaaagaaatttttagcctaaatttttttatggttgtatacgttatagttatttaagatattctgcaaaattttaataaattttgaataatttacaacatacaatgttcaaataatttatttcacacgcgtataaaataaaagaatcacacgtgcagaagactgtttgaatcatatttttgacatgttaaattgtttcaaatatctcaaaatattgtaaactacaacctatatacacgaatataaaagaaattaaattataaaatttatccagatatcaaaataaataaaagtatatacatttttttttaaaaagagtacattctaaaatttccataaaatataaagggataattaggtctagttaaagtctactcaacaaacctttgtatatattaaataatggctaattagaaatttttctccccaaactttgatatgtactaaatcatgccccctaaacttttttggccgttaaaaattccccctgaactattgagattgttaaatttaaggatttttgtctaatttcattcaattttactgtttcagatactaaatcatgctccccagactttgatatctaccaaattatgtctatcaaacttttatatgtattaaatcatgccttctgaactttcatccatgttagaatttttttactaaaattagataaaagtccttaaatttaac

SEQ ID NO: 302200 - DNA, 2755 bp, Cannabis indica
ttttttttttttgagaagttgtaattgtattttttttaaggttatagaatatagtttgggataagtaggtttttagaaaattcatgttaccgttcggggagactattaaaatattcaacttggtgatcctagttgttggtaacttgtcaggttcattcgatgcactcaactctaagtaactttatgagttaccattggccactcactattcgagtataatttatatgaaaagaatgtgagtgtgatatcccaaaactacaatttcctcgcattgttatctaaatttatgtctttggcccagaaaactcagattcactcactaagtcactaataacaatgatgattgactccaaacccttagtccacactctaaagtctaaacactgaagataagtaaaaaagagctagctttagttttatactatgtcccatcaccaccctctactgtcttataaatacttattttcatgacaatttttatactttgtagtgagagggaagggagagaatattcgatttcgcaaattaactatcttctctatcacatgtaactccacaaagtctcagtctaatgtattctaaccacacccaagcccttgtcctctctctctttctctatcttttccctgtaaaaagctttcattgagcgttttaaagacgagggcaatgggtagttgaaagcatttaataacccaaaacattcaatcaaagtttctttctctttactcgggaatatttaatttaacatatagaaaaatccgtctcactgagaccttggatgaaaaagaaaagtagtaacagtagtcctagtagaagaagcagtagcagtagtcgtaatacactggtcgacacgtgtcccatgacttagcatacttgaaacccgtggtgatgagagtaaaattggcctcgctgttgctggtagtgctgatcctgctcggcctgttgttgcgggagcggtggttgatgtgtcatctctttctggcgacggagctccattactttccggtgggagtttgagtgctgtgtcaggacaaatgtcgggctcgctgcgggtctgtattcgggtacgaggcggcccgacttgtacctgaccccgcaagcgttgcaaagcgttttgggtcccattggaccggtcctccactgtggtgtcttctccgatgcacagtgcgtgcacctacgcgcccctcccgataccgtggaagaagggttaacgttcgaccccgacgcttcttctcttttcgattttgttttagcagagatcgatgaggatgattcaagctcctgcggtgttggttgattcgatatagatccccagctagtgttggcgccggtgatcggaactctcgatcgcttgcttctagctctgccggcaaatgacgcgtcgtttgggtacgttagggctccggggatctctccagtgggtaaatcgttaaacgaatcgtccgcaaatctcgataaccattccagttcggctacgtcatcactctgctcaagaccaaatcaaatggaaacaacaaaaacatattatatatattatgataaacaaataaaaaaagaaatgtaatgagatgagagaactggtcaaatgaggattacagggacgcagaggtcgctggtgaaatcaggtgggttaaagaaatgagctgacgcagatgtctgaggaaggaggggtggaagacaatggtggtgttgaggaacgtcgaagttggaggaggaagagaagaactgttcgtcgtcgttgtttgaaaagtcgagaaggtcgtcaatgccgaaacaatcttgctggtggtgggttggtagttcatgatccatttgcagtggcaggagtaaagggacagtagctagctagccgaggcgatcgtgcttctcttttatcagtgtaacgacctctcacctatctctggttttagtttacagagagaggagaagagggaaagaaaaagagagagagagaatggaggaatgaagaaggagatgaggctataatgttataattgatttgcggggaagaaggggcagaggaacgtgcagagagtgaccaatccacgctcactagaagagagagagaaacaagagtgaatataaagagtagtaaagtaaagatggacttattattagtgaacgtttggtagaaggttaaaaaaataacttcattaatgtgaataatatgatgtaggaggatacgattgtctctaaatttgtcaagtttattggttaatttggtaaaatttttgttcatggaaaaattctaataaaataaaataattatttcaaatttacattttcaaatttcaagttaattttattttactatttttttttaattatatgtgtgaccaatgaattataactcaaggaatatttaatgtttattgatatttttaaaaaattattataataagagcttaaaaaataataaataacagtaataaagaagatagagatttttacgtggttcaggtattaattaaccttaatccacgagtcagtctattagccatagaaggcgtatatgatatttttatagtgcttatgcaagaagcctaactatgtattttgtgtttctcttgaagaagaagaaagcttagaataatattagcaaagcttcggctatctaggttatgataccccattcgtatggaaatagaagggtaattgtaggttgaagggcgagtatggacatgcccatgacatgcaaacactactacaaaaactccttttagaggcggtttttaagctctttcagcgtcggttt

SEQ ID NO: 302201 - DNA, 3934 bp, Cannabis indica
taactaagtgtaataacttgaaggacataattgtccagtctacaaggccttatggtcaaagagtagttcttaagtttgctcagtacactggtgctcatgccattgctgaaatatgagtaaatcaagtcattcatctatgtacaaagcgagatgcctctagcgagatgcctccagcgagatacctttggaatggagttcctattctgatcactgttaactgtcttaaagacagtttaaatcacaactatgtgatttttaaatgtaatttacgtgtatttaaatggagcgtaattaaagcccacaattttgagaaaaattgtgatgaaatccaaatttaaatgtaattaactgcctacccatattactataaataagggcagattatacagaaaaatggacgaaaaaacttggagaaaaagaagatacgaattgtaaaccctaattctgtatccagaaatatctgaataagatagacccgtggactatgtagagttagctgtaaaaccacgtaaaaacctggggtaattatttttattcttctaaaatttcatatagtttctgtgttaagtttactacaaaaataggctcataatcgttaataaaaatctacgttaacagtttggtgctgtcattgagagcttacatgataaaagaaaagctcctcaaaaaaatccctcctaaccaaagaaagaaaagtttttctccatggatgatcacgaggaaaacgacaacagttgccctcagtagactaaccaacgtcctggaaaagagtcaatgggctcacagaggccacccacttcaagaactacgcattcaacacgatcaacacgttcagaagaagccaacgtgataatgatcagaacctaaaaacgggaatgaggaagccaacactaatgttggtggaccggtacctatgagtgaaggcgcctatgatcccactagatatgtactgctagtagagttggagaatcgccaacttcggcaacgtttaattgaggcaaatcaacgaaatgctgagttggaaaaagaggcagctgcagctagggcgactcaagaaaacaacacacaaaaccaacctaatcctagagtgagaaggccataaggtagaccttggggctcaagaaccaggaagtaggagacagctcaagaaaacccccagaacactcaggaggagcaacctgggaaaaatggggatattccagaaggtgaacaactaagcaacaatacacctcgacgagaggtacctcggagatcccagagattcaacactcaagagaatggaaacaacaacatttaagaatcatctcgtagaaatgagagtgtaaggtaacacaggacaagggaccatgagatccctcgtgcaaacaagagaaatcataggactcaacctaggacaagtggcttaccaccgagacaccgtcaacgtccttctcgcagtgatagggaggaggcgtatacacaccctagctaaggacatgtatcaaacctttcccaaaggaaaaggcttgtacgtgatgaggtaagttctagctcgggacgttcaagatcccaggatcacagtcgatctacgtgaggaggagataggcctcgacgtagtaatgatcaagaaagtatgagtcatataaggagtagtcaatctaagagttactcagatactacgaggtccatgagcaaccatgaacgaagacaaccagattttcgtgaacatttaaatcggaggcagcctgatttgcacgagtgcttaaatcagaatgcacctaatttacaccactcaataccaatcgaaagcaagagcatccaatctaattgcgaatcagtgagttaaaaaacaaattcaagaaataccaagatgataatctttctgattacgactcaaatgaagagcttaaaccttttcatccaatcattatcaactctgaatttccccaaggattttaaaaccctcacgtctcgccgtatgatgggattacggattcagtcgctcacctcaacaattttaataccatcatacgagccagcaatgttacgactaatttatgttgcattttattccccacctcgttgactgggccagcgagtagctggttcaataaattcacccatcactcgattacttattgggaacaattgtctaaggacttcaagaaacaatttcaagtagtgagagacaggcgacctgaagcgtcttcccttactaacgtaaaacagcaaccgggcgagtcacttaaaacctacttaagtcgtttcagtatagccgctgctagtgttatcctcacatgatattactcaaactaccatagcttattaccctacattaattcttcacaatgtcactactaacccttctctgcaggatgaacatactcaagcagatatcgatattgaacagtctccttctctgcaactccattcacctcctactcaacctgttctagtttccccaagaagaagtagaagaaccaccaaaaccccaagctaccttagagattttgaatgctattctgctatacaggaccaatcttccactcctcattctctcacaaaatttctttcttattctaaactatctaactctcataaagctttcattcccactgtaacaactgctatagagcctaaaaattacaaacaggcaatacaatacaagcaatggatgtaaaaatcatagctctcataaaaacaagacttgtattgtagtaccacttctaccaaccaaaagagtcattggtcgtcgttgggcttataaaataaaatacaacactggtggaagtgtagaaagatttaaagcttgattagttgcccaaggctataccaaacaagaaggactcaatttttttgacacctttttttcgttgccaaggtggtcacttttaaactacttatttccatatccactatcaaacaatggcacacattacaactagatataaataatgtctttttaaacaatgatctagatggagaattttatatgaaattaccccaaggtctaaccattcattcttcttgtacatgcactaatcttgtttgtgaactacacaaatccatctatggccttcgacaatcttcaagataatggtacaagaaaatgacaaatgctctacttcgggaaggacttactcagtcacagaaagactacacgctattcatgagaggtttagttgacacttttgtagcacttttggtacacgctgatgacatcataatcactggttcctctctctggctaaataaaatggttactgattatggtttttcacatgattccttggttcttttttgtgatagtagaagtgctactaacatttctaaaaactcagtccaacactttcgtacaaaatatatttacatacagtaatcattttattagacatatggtagaatctaaactcttaactattactcatgtatctataggtgctcaacttactgatctgttcacaaaggtattagatgctcacatattagctaatctctgaaattcaattggggtgtgtaccatctgatcttaagaaagttgcatcttaccatcttcacaactgtctttatgtcttaggattgtttttcaataattgttggttcttttcataaatagatcacatatatgttttcattgacaatacatatatgtgatcttattcttagtattatccaactttcattgactgactttcctatttttttgctctatgttgtgtttgatgtgtaggtgtctttctttgggtccagctgagcattagtgttaagtttctagtgtctgagttctttcagtattgtcaggttaagcatttttattttcacatgatattcatcaaaattgattctaccattgttttttcccgtgtgtttcttatgttttgggctttagttttttttttttttactgttaatgggcttttgtattctctcaaataggctaaaggatatttttgac

SEQ ID NO: 302202 - DNA, 3862 bp, Cannabis indica
ccctttcataaaatggttcaaaaaagggaagctaaaggcctacattgtagtagtggtctctatataatgaactggtattggagaatctttaagccattgcaagttataaatcaaagccaaagcttccatgatttctggtttaaaacaacctcgaaaaggcatagccatggaagctatgatatcacctgtgtcgttgcgaaggattgcaccaaaaccagatttattttccattatgttaaatgctgcatcagtgtttaacttcagctggcctgatggaggattcatccacggcacctccagttgttgtaggcttgaagtagcagctgcaaaagggacagcagaagctggtttgtctcgagtagattgatattcctccaaataatctaaagcaaaaaacaaagcaaattcaggaggctttgtttttgaactatgtctttctttgttcctttcattccaaatgctcaaaggatgcaagcaaattgttcaatttgtttaaaagaccaaattggagacatattctgcaataaatccattagggaggtattatgcaacatgaaatcgtttattgagaaagaggagagttgccagattttatgtggccgcctgcaataaaaaagagcatgaatgatggattcattgtcacggtgacataaggagcatgtggcagaatcatcgatatgtctgtgatgaagaatttctacaactgggaggcagtcatgcattgcacgccataaaaaaatcttaattttagaaggcagcgacaaagactagaattttttccaccattgaaaagaaatgtttgtactggcagtaggttgttgttcttcaagcctggtaacaagtgtgtagcctgttttgaaagaatacatcgcatattagttgatcttgttggtcacaaagggtaagtggaatactttgaatcttagcaacatccgaatccagaaaaaattgcttaagtatgattccattgcctattactggagatcaaatctgaaaccttcataaaaatattcggatcctaattaaacatcaaaggcttaaaagaggtaataccgggcagcgatggatcagaagcacataagatatgattccattacccactttccatctcaagcctttgttaagaagttcttttccccaaacaatacttcaccaagtgagagatggataagatcccatttcagcttctaaaaaggaattgtacttgaaatatcgagctttgaggatcttgtgaaggagtgatgaaggattggcaaagattaaccaagcttgtttagctaataaggcttggttataatgaacaaaactcttaaaacccatacgtccttcaaccttcgctttacaaagagcattccaagttttccaattaatcctagatgatgaagagttggatccccaccaaaatttattcatcatgacttcaatttggtggattagagacttggataagcgaaaacaactcattgcataagtgggtatagattgagcaacagcggtaagtagaacttctttacctccaatagaaattagttgttcttgccatgacgagagatgattccatagcttttccttaatctccccaaataggtttttttatctctcccagagtaagaaggaaggccaagataacgttcatgataaggcttgatagtcatttgaagtgtttgttgaatgttaagttgtattgcagaagttgtgttcggtgagaaggaaagcactgatttctctgcatttaattgttggcctaaagcacggcaatagaaatccaaggagcgcttaatagcatctatagatcttttatttaccaggctaagaacaaggctatcatctgcaaagaaaaggtgcgagactgacggggcaccacgagctacttttaatccttgtaggttcgcacgattttcctcatattgaaaaagtcttgaaagtccttctgcacaaaggatgaaaagataaggtgatagtggatcaccttgacgaatgccacgagtaggggttacaagtccttggatggagccatttatcaaaaaagagaaagaaacactattgagacatcgctggattagctcaacaaccggggaggcaaaacccaaggcaatcatagtgctacgtagaaagtgccactccactctgtcgaaagctttactcatgtctagcttcattgctgcataaccttcttttcctctttttagatgcttgagagagtgcaataattcaaaagtaaccaggacattgtcagtgattagcctagattgcaagaaagcactttgagattccgaaataaccagtgagagaaaaggcttcaagcgaaccactattgatttggagaccaatttgtagagcacattgcaaagacttatggggcgtaactgagagacactccttggtttcataactttggggatcaaagtgattaaagtcttattaaatacagatggatccgccccattattaagaatataaaggacagttttagtaaccaaatcacccaatatgtgccaatagttggtgtagaacatcaccgacattccatccagaccagaactactagatgccatggttccttagatctccttcacaaccaaaagtgatcatacacaattcaaattcatagtttgaaatggttacagcaaaccttcctttccagtttgtggtgataaaattgtgcaattgctttgggttatatcctccatgggagaagattttgcagataatttgataggtggttggacgtggtggaggatcaacaatagaggataggttgataactactttttctcgaacagagagggccttgaaaatatctgggtggaatgagtctatgagtaaaacaaaagcaaaacaggcgaagaatgcacactgggagattgatgtaggaaaaagatagtcaccagaagggaaaatagagggggagggagggtggtggatgattagttaacggtaaacatgggaggcgggagcagtttttagtgaaggaaatggaattaaaaactaacattaacagttaactgccacagagcaacaaaagggcagacgatgctcattttgtattttaataacattcacttttagtttgtgttttatttgacagattttttgtattaattgttttaaatttttatatgactatgatttagttcaatatgtaattaattagatttattgactgtttattaatattaattgataactgaaacgtgttattattttttaatcaatgcgtatttattttagtttttttatttggataatcaaattaatttttttggtaagtttaatattttagttcggttttatttctagtgatttgttggtttgcaaaattttaatgttcaaatatcttattttctttatatttaggttcaacattgcttttattttattatattcttaagtttatattattttcatgtcataaaatattattttatttttgtaattaatatatatatattgaagttttaatgttggatttttaaattttgtttagcttcatttaatttacttaattttaaggtcttagtacaagtttttgtgggagttgcacctctgtttggttgtttttgtattgttgtgagatgtgccaattttgtttgttttttacctttggttggcattgttatgtctttttgacatagtttaccctcaagtctattatcaaggaatcgcttagaatttgttagataagttctccttctttaaaagtagaatttgagttttttcgtaatataacttattttgatttttaaatttctcgataattgtgggttattattatgtgctgatttatattttggcaggggtgattttttcattttggagttagcagattattgaatagtcaaagtgttggaattattttacc

SEQ ID NO: 302203 - DNA, 1110 bp, Cannabis indica
ttctttgaaatgagcaactcattagtcacacaaaggaatataacagcaacaacaacaatgactagaaatacaccaccaacagaagaatcaattacacaacaacaaaacatggaaggaacaatgatggggaaacaatatttgacttcatcgactatgcaaaactggtggtagaagaaatggtggagcagatagaaaacaataaaaacaaagagccagaagtcactgattatgacatttatttaatttctttaaatttttttgtgaactatcataggcagaaatgttactttaatacattgctattacattttctatgatattggtttttaaaaaggttgcataacagttgtttgataattttatgcgatattcaaaatattatcataaacataaaacattagcaacatcatatttgaaacattaattataggttcaaaaaaattttcttattacgttaactagcaagttgaatattcaatagttgtcaaccgttgaatgatagttgtatataagttgttatatatatcacaaagattaaaaagattcatgtattttcaccaactacttttctagatataataattagacatgttgaattaaagttctcccatagttgaatcaaatattttatatattggcctaaacaagaaacttgcatgaaaacatatgaattagaacccttcttaatttttgagataaaactcttaccagccttattagtctttgatttcttcttcatagggcaatgatcgagttctgctaaaggtgtgttatccaaatttctacacggtgatgtggcatccgtctaggtgacacgtggaatacatttcataatctggacgagaaattctacacctaatgggtcgtgcaggaagattcgataatcaaggtcataaataaaggctaggacatctaagcagggtacacatagacatccgaccaatctctatcaagcaggttgctcgcatgcaccaaccagagagtgggagttggataattttagagatatatcaaatatatctcaatgcttacactatccctaaattcacaggatagattcgtattcttagaaaagacagacaacctgtcttgtttctttttttttttttt

SEQ ID NO: 302204 - DNA, 1800 bp, Cannabis indica
aaaaacctcaaaccagatgagaacatgaatggaaaaatagaacctcagccgaatgaagaaattggctactgaagaagttgagagtgtcgaaaggaaaggggaagtcagccacaacaaaacaggagaaggcatggcgccaaggaagaaagaacgaggcaagccacggtggctcaaggattttaagagccttttccctatttgtttataaataagacaattgtaaactttgaatatattttttttggaatgaattagcaagcaattgcaagaggagattttctttgtctcgaaaagagccgattatgattattggcgctttcattgcatccttctcactatgaagaatgaggagtttgtcgtgctaattcaagatctcaatgctgtgataggccttaaattttagcagatcatcgatagttaaaaggtggaattgcaaaggatggtgaaccaacaaattgcttagtccaaaggatgattgacccaacagatgactcaggcgaaggaacgcttagctcagggtcttcccaagtcacccactcatatcactggagaagctagtgcaatgggggtgatgataaaatatatgggtaagtgttcaaaatcattctctaattgtcatgaatttaatactattctcaagactttgatagttaaggtgccaagatttgatggtttgaatgtggaggactgggtttataagatcaataaattctttgaatcttcatcatgttgaccatccaatgtgattagcggtgattccttttcatttggatggagctccctctacttggttctaatgtacggagaagggggtggtatctcagattggagttctttcttcatagctttgcagcaacattttggtgtttcgatcaatgatgtgttgaaattttggccctaaataaaactcaatttcactgtaatttatttactttcaacaaagatcagaaatcatatcttgacctagtcatatgctttgttaacatatttatgaattgattataaatttaatatataagctctattaaatctcaaacatataattattgacaattacggtgatgtcatcacaattgaaagtaattgtgattatatgcttaaaattatttagctctacgatttattagtgcactggatttacactgacatgataaccaatgatgaggtttccttacatttggattagtcaaatgtcttttctaaggtgtttaccgaaattttttaaaatcgattaattagaacttaagaaaaatataaaataataaaattaagacacgtagtttttttcgtggttcaggcattaattatccttagtctacaagtctattgtattagccttataggcaaatgttgtatattacaaatgtttacactaagaacatgaaccctttatttctttcatcccccttaaagaagaagaagcttgtaggaattttagcagagtttcagtaggtcgaaaaattgtcctcctccgcacatggaaaataagagtatttattgggttttaatttgtgccctaaataaaactcatttcaatataattatatttactaattaataaaagatcagaaattagttttatgttgcatggttcacatgatttatttcatgattatgcttaatgtacaaattctattaagtctagagcatatataaatatatgtatatatatttgttcattattatagtgtcatcagcacagtggaatataatcatgattatatgttcaaaagtttaagtcctatgatttgtcagttcactggatttagactgtcatgataatcagcgataaggtatact

SEQ ID NO: 302205 - DNA, 653 bp, Cannabis indica
caaacacctccttaatgtttaaaactccgccggattagcatggtggtgaggcaccctttatttgtaaatgtggtgcatgttcgagtagaaccaaatcttaacaaatgtagatgcttatacagatatttgttcccgaaaatgataccggtgttggtccctcgaagtgaaggtactgatgatgttgctgtcccctccccgaaatcatggaaatgtttgtttggcactccttcttccatgggtattcttggtaggttgtgttgggttagaaaattgtaggatataatagggaatcatttaccttgtacacatatttgtaaatgatattaaaaatacatatatacaatgttaaaagtatttttgggtttatttctaatttttatatttatgtcattttcagtgacatgtctaagtctctattctactgaagagtgaagacaaagtagctttacatgaaaaaagtaccattgtggtccttagtgtgaggtcttcttcaagctcaatcattcaagggagcccaatcaatgtacagtagaacctttatccaagaatacacttgggaccaagtaaattatattctaattaggaggttataactaaatagagttacactaaaaaaaaaaaacttagaaaacccaaaaatatcaatgtaacaa

SEQ ID NO: 302206 - DNA, 1361 bp, Cannabis indica
aatcagattgttaagggttttatttagggcacaaaacccaacaattaatcccaatgcatcccatgttcttaaggtggctgaacttttgattgaaaggggggagtgggatatccagaaggtttcgtgcctttttgacaaagatacggttgatgcaatcttaaaaggtgggcagccttcgggtcagggctatgataagtagatctggacattagagaagcacaggaggtttacttgtaaatctgcttacctggcccaagccttggagagagggccgcattgcaatgtttggaataaactgtggaatagcagaattgtggaacgtcataaagtttttatggtggtgtatgttgtccaaagctttaccggttcactcgatcctcaatagaagatttagattagaagacatgagtttccctttgtgtgggtgtgaggaggcttctgtggaacatttgctcccctcctgtaacctggcctttcatttgtggcgatcttcttcgtggggaatttttcagatcgttggcactgggattcgcatgtggtactaggtaaaattcctctagggcttaaagagttagggtatcaattctgatgaggtttttctctatgcgtcaacggtcgtcgacaccatatggagggtttgaaatgataaggtacataataacaaacttgataatgtaaaccagtgcattgattctattgctatatcttatgcagattactgtgcatcccttcttccctcccttgcctctactatggtggatggttggcttcctcctcccaaggagtggcttaaacttaattgtgatgttaaagttgggctggatagcatgtgcattgcagtcgtggctagaaattttcagggtgaggaggtctgggtgcaaaccaaacttttgagttttgtggatgctttgtgtggggaagcagcagcttgttgtttggctttggaagtcgcgaaagagaaaaatcaccagtttttcttagtggagagcgactccaaggtggtggtcaatacgctcaacgaaaaggactcttatttgacgcttaagaactatacctcattttgtaaaaggtgttttcctttttttgtgagttgtattctgtcaaatattagtcagaattgtaattttgcggcccataatatggttaagtggacttttacccacaagcggtttggatggcttcttatcagttccatcccgattgaactcttttatactgactatgaggtttaattgctttatgggctatttacaaataaataagaaaataaagataagttttgatatatatggcatataaatataattacactaaatatgatattttttttcaaaaaaacttacaaatatgggaaaaaagtc

SEQ ID NO: 302207 - DNA, 6894 bp, Cannabis indica
atcttaaaccgtacttctggtggagcagtatgaagaagaatttggtagaatttgtatcgagatgcctaacctgtcagcagattaaggctgaacatcagagaccagcaaggttgttacaacctttaaggaaaaaacctcgtggcataaaaggaataggaaaggggagagagggtccccttgacggaggcctcgctttggatagagcttcttttgagggaccccatttaggagaaccgagtaagagaccgtggagacacatatcataattaaaccgctaacttgactatcgaaaccattgcaccgaaggactttctcaaggaagccccattctattctatcaaaagccttatgcatatcaagtttaatagccatcaatccacctttgcctttctttgtgttaatcgtgtgaaccaactcttgagttaagatagatgattccgcaatccatcttcctgggatgaaagcagattgtaggggagagaccatcttgtcaataacacttttgagtctggtagcgattatttttgaaatgatcttgtaggcgaagttgcaaagactaataggcctaaaattatccaccatgcacgcgttctcttctttagggatcaaacaaatatataagtgtaattgatttggctatccaagcaaccatattaggttaactgcagatgacctagttatcttctgtggagacaatgtgtcttctttgagaattatccaagaaacttttgatgacttttgtgattgtacgaggttaactgttaatatggtgaagtcttcaatttacgttggtagtgttagttgtgatcaaaaacaggaattgctcgaaatttctaagatagttgaaggttccttttctctaaaatatcgagtgtgaatcttcttcctactaaatagaaagctacaaattgtgagggtattctcaacaagattaagaagagtttacatggttgggccaccagacatcttttatttacgggtcgggctcaactcattcactcaatattattgggcatgcgcaattattgtatgggaatcttcattcttcctcaaaaaattacacctgcaattgataagatgtgtcattattttttatggggaagcaatggaaatcgtagcaagttacaccttagttcttgcgaacaagtgtgcttacccaaggactatggcagtttgggttttcgagaatatggaagaagtggatcatagccatgatgacaaagtatttatgggccatttttagatagcctatgggttcgatgggttaatgttgtctatatttgaagaatattgatttctggttagtgaatcttaatcctaatgctaaccctagttggtatttcaaaaaactaattaagcttagagatagcattgataagcaagcgcttcttgatgctgacaagtctgaaaggtataaggtgaagtatttctatctctcttttatttaaaaggacaaaagtaccataaaatggtctggcacaggttcatcatcccaaaacataaatttatcttttggcatgttgttaacagttatcttctaactagagatttgattagaaaatttatacccatcaattctatattgtgtcctgtttgtgggatagaagaagagtctcattcccatctcttcttcaagtgtattttcacaaagagagtgataacagaaattacttgttggtttggtcctgttaattagcctgagcaggtggctgatttgttgaacatggatttgaaaactccaataagtgttgcggagaaactaacagtggctttgatggctgctgtgatttatttggtgcggtgtaataacagctactttgaaggttattgtggctcgacagtggccgttagtcatcaagtgaagttggttataaaggccaaagtgcggaacattaatgtatccaatttgtctaaaagagaaaatgatttaatgttgtttgttaacaatatgtgatttgtttttgttgctgctctgcaaaattttctttaagcctcttaatagcttgagacaacttcatctatagttcaacaaccaaactcacctttccgactttagtactgtgtataacgcaacaaaaaaaaaaaattgactgtggagggtcacggtggttcgctagcatctggagtgatgcgggtggattaggttgggttgtcgacggctttgccttaggtggcggcggcggcggcggccatgtttggaagggttgagttagggtgcccaaaggagtgataattagagtgagaaattgggaggatgagtgaaagagaaagggttaattaattaattttgggttagtttgtaacgtgctattaggttgtattgaattataatgaattggattatatgttatatttttatataatactattaaattttaatttatactaaaatattatatatttaggtgctcataaaagttaatatcacatataattttacataaaaatgttgcataaaatataatttaatataatactatacaatacaatatggtgtaatacgacgtaccaaacgaattatgttttattatataatatatcacaatttttactctaagttatatgaattttcaaaaaaaaaaaattataacacctttattgataaaagattatcctttgataaatacacttcaacataaacatgtaatttgaagaaaaaaaaaagagaggtgggaaaaagaacaacaaattaaaattgagttcctctgttttattttgcttaatcataacaattaggtactaatagtcaagcctaattagttatcagcaggatacttaaacaatgggagagaacgattaacaacagtgaaacctccatcaacaacgaggttaagcccactcacgtaccgtccttcctcactcgccaaaaacaaggctgcattagcaatatcctctgccttaagcgttgcatgatttaggttcccaaccgagttaaacataccctcaacctcctcttcactaacaccaatagtgtccacaaccaagggtgtcgcaaccccaaatggcgacacacaattcacccttattccaaactgtcccaattcggaagcagcgctctttgtcagcccaactaccgcgtgcttggaggtagtgtaggcgtgcgtgcctatgccgcctatgcacgaggcagcactagcagtcgatatgatgctaccgccacttttagcggtgatcatggcatgagcagcgtgcttaatgccaagaaagacaccggtgacattgacgcgcatcacgcgctcaaaatcatcgatgttgttatcgatgatcctaggctggagagtagtagacatgccagcgttgttgaacattatgtctaattttccgtaggacttaatggatttttcaactgctgctttgacttgagattcatcggatacgtcgcaatggacgtaagtgatgttgttttgggctgtgttggctgcaattgattggcgaactgaatggcctaactcgtcttggacatcggctatgactactttggctccatggtgggcaaagacttcggcagttttcttaccaaggccactggctcctcccgtgatcaaagctaccttaccttctaacctaataatatatattttaaacacattatgctaaatttattaggtgttcaaagttgactattatagtcattgataaatacacaaaataatacataaatagtcacaatttttcttttatcaagtaacgtccacattaatattgcttttgagtaccaaaagtagattttaaaagcccaaccaagtaagatcatataaatctataagtattaaatcatatattccaaattagaattgacacaaaaaatgcatatgaaattaagcatgatttaacattattattatgcaaacacataccttcttgagattgctgagagtagtgaagggattgccattatgtttcgacaggagatgacaaaagattttatacaagtgtctggtttttgatgttaatgttctgatcgatgatttgttccaatgtgtggatacgtactatatacatatatttacatatttttataatataaaaatagtcattggtcaaatacagaaatgtcagatctggtggctaatataaatataattatagacagatagttgattatatagccagtttaccaaatggtatatcatatgggtccatatagtaatcttgtacaggttgcatttgctgctcacactacaaaaatcattaattcattataatctatatgctatacaggcacgaagtaatatttgcctattacagtccaattgctaatgcttggaaatatagcactatttatattgtataattacgcttttcattattaattaattttgaaaaagaatccacatattcatcatatattttaacatggcatgttaagcaggctgctaatgaaaataaaagtggaatgatattactaaatgaaatttttgggttgagacgcggactaggtcgctctctttaagacattcgtgacactgtcgaggaatgtgcaagcagtaaaaaattgttggtcatgtcttcaggataaaatagcacagtcgtatactgtatcggatccccgttgcactgtagaaatctgtcgaatatatacaccctcaaaattaatttcgtagatggaattttttttttttttgaaagactgtgtttttttcttttttggatcacgaagaagatacttcaataatcaacaagcaaaaataccctcaaacctcataaatacaaaactgcacccaacccaaagacaaaaagacaaaataattacattgtatattctattcaagtagtctctttcctaactagtcatttttttgttattgacaagattcaatctatataaaattgtactcttcacttcagctacaacccaactggctgttttggaactaccttaaaaaacacacatgtttctatttaaccagaggcagtaacaagtggctataaggatggctatattgatgcttcttttcaaaccagaaatcttagtagagaaccactttttccagccctctagagtgtttagccaagcattgtaaccaagccaagcaaatattttggacaacactctttgtgaaaggctacaagtaaaaaagtggtcatgagtttccaaatgatcaccacaaaccgggcagctccaagtaacaagctcaaacgtgaaatttactgagattgtcacgagtaagaagatgagagagttcacaatatgccataacacaaattggtgtttaggcaaattcaagtagttccaaatagccttacagtagctatcacaattatgctttaagaggctattataaagtaaggccgtcctaaaattacctgttttgcccgccttcattatgtcctcacttgagaatatacttctcagcttgcaaaacttcctccaatactagctcgagtctagttttagaatgtgcaaccacaaaggattatctttgagataaatgagattgatccattaactcaaattaagaaggtccttcttgtccatgatggcccaaatatacttggatagcatagcatagttccacttggttccttctttaaagtctaggcctccataagctttgggaaggcaaactttctcccaagaggtcatgtgatacttgtttctctcatctttagtgccccacaaaaaccctctacacaatctttccacttcttttgtaacactctgagggaggacgaagatattcatctagtagtttctaagcccaagcaaaactgtatgaataagttgggctctacctgcatgtgaaagatgtttactagcccaagtgtgtaagctttgcttgattttagatatgacaataccacaatcttcgattttccacttcgttaattgcagagggactcccaaatatttgagagggaatgtcccttcaataagagtcaaatctgtcgtgatatcatctttttctctatctttcactccaccaaagtaaatgtgagacttttgtgagtttatggagagccctgtggtgttactgaactcatctaaaacagatttaatcacaagaagagactctctagtcccttttctcaagataattaaatcatcagcaaagcacaaattaacaagctttaaacctttgcacataggatggtacctgaattttgagttttgagttgcagcttgaagtaactaagtcaggtattccatggtcaaaacaaatataagaggggaaatggggtctccctgtcgaagacctttagccccattaaacctgccttgcatccgaccattcataagtaaggtgtaagaagtgtttcgcacacaaatcatcaccctatccacaaatttccttggcaacttgaaggcattgagaagatcttcaagaaaatcccagtacaccatgtcataggctttactaatgtcaatcttcaaagcacacttgggagaggaattcttccttctatagtttttcaggaggtcttgaaggatcatcacattagagcaatagatctactttgcacaaacgccccttgattttgattgataattgaaggaagaactttagccaacctggtacacattagcttcgaaatacacttgtatatggttgtacaacaagctattggtttgtaatcaacgactttagaagggttctcaatcttacgaattagagaaatcatggttctatgcaactccttaggaatttttccagttcaaaaacatcagctactgctttacagatatcagctcctatgtgaggccataaaactttgaaaaaacccgaaccataactatctggcccaggcgattttgagtcaggaatacaaaagctggatttcttaatttccttgggtgtgaacggtttcagtatctcaagctgctgatcaagggaaagaattgttgggttttacgccctaaataaaactccatttcaatgtaatctattttat

SEQ ID NO: 302208 - DNA, 2041 bp, Cannabis indica
atttaatataatttatatatatacattacaataaaaacttatgttttattgatattcttacaactttcttttaaaataaagtttattttagagtattgttatttgacaccagtggtgtctagcaccatctagaggtggcgttctacaatcagttagcgatattatttagataatattatcttaagttatatgagaatatatacttaattgcactaatagcaatatgacactgaggaatgtgttaaacaccactaatatctttaagtatttctctttattttacccctagctaatcaaatatagcattgattttttgagctaaatttagtataaaatttacatcatccattagagatagtctaaaagttatgacaaatttaatacaaaatgtagcatatatgagttaaatttcataccacaataaatattactttttatttactcatttgccactcattgtaattaatgacatttatatttttatttatatagttaatataatttttatatatttccaatgaaattttgacaattttaaaaactctttttatacttttctattgaaatatagattactttacctttatgcatttggaacataattgtaaaatttaagttaaatataacattcatttattttttagctaaatttagcactaaaattttcattattcattggagattgtcatatatgagggttattacaccaaaaaattattatttttgagccaaatttaaccaaatagttttattaacggaaatttataatttaaaaaaaaaatgccacatcatttggtattagctagactatcccaataaatggtataaaatttgtgctaaatgtgctcacaaaatgagaaaatattatatttgcactaaatttacaaacttgctccaatatattaaggggaaaattattattataggtgtaaaaagttaacaaaagtattaagtttttattaaaaatataatcaggcaggtgtgagtgaattggagaaggttgctatgataatgtggtctatttggctggtgcgaaatgatgtagtttagaatgaaaaaactttctctgcaaatgttgtagttcagttagctagaaactctcttgatcagtattcttgagctcaaaatcgtaaagggttgtcattattttttggtattgcaattaatatggcttaagagcactggaattcaccttctcttaatctggtcaaagctaatgtcaacagggaaatttttcaataggaaaggaagtttggggttgggtgcttagctcgagttcatgatgggttggtcattgaggcttttcgaatgatagagttggtgttgttaatccagagattgaaataaaggaagtgttaagtttgaatgatgaataagcatgattctagaaaccaattcattattgtgtgtctgttcaagcaatttagagtgatatttttatgccttctgagtttggacttttagtttaggactcttgaagtttcttgtggaacactaataatattattttacattttgttaaatgatctgcaaataaaattatttgttatcttctacttagttcttgttttatatatttcaagtggcctattttagtgttttgtttttgtccctcaattacaatcctttggctaatttgctttgattaatgaaagttgatttttaaaagagaaatgcattttttttaattagccattattttttaaatatatatttaatttattgattatcattaataataattattttttatttttatgttaatttgaatcttaatttgatattatgtattgaagcacaattgcaaaaacaaaatgtgctaaatatattattttattatattttgtgtcaaattttatacattttttactcatgtattggagatgtgtcatattattattagtattatttatattttctaaaaaaattaaatttaaaattaaaataatgttaaatttcacatacagtagaacttctacccaagaatacacttgggaccaaataaaatattttctaattaagaggttataactaaatagag

SEQ ID NO: 302209 - DNA, 1871 bp, Cannabis indica
tttaaaaaaaaaaataattattagtttatgttagatcgatatttttatgaaaaatttattaaaataataataaaatattaatttgtaaatttaaactctaataaaatattaaaaataaaagaattaaggaggaaaaaaaataactttaaaatatttttagaccgccatgtcaccccctcatctcttttatagatatagatagattataatagaattttaaaataaattgctcaacaccacaagaaatgtacgttatatcacgtgatagccgatttttgttatttttttttttcaatttaataagtaatatggaaagtcattaatcaatcaatcagtgggtgacatcttaagtaagtgttagacactttaaggtaattaattgcaatgttgttattattgttatgataagtgtgtcttttgtatgcaggtaaggtcccaacattagtagtgttttgtttgatggtcgtagctgcttcattttatgcttacactttgtacaagaaagacagagaacaaaagctacgagttaccgagtttttgaaggactattttgctcttaagccatcaagatatacttattcagacattaagaagtttacaaataaattcaaaaataagttaggcgaaggagcatacggaacagtgttcaaaggaaagctttccaataaggttttggtagctgtgaagattctaaatgattcatcaaagggaaacgatggagaagagttcttgaatgaagtggcaactattggtcaaattcaccatatcaatgtggttcgtttggttggatattgtgctgagggtttgagaagagctctcgtttatgaattcttaccaaatggttcgcttcataactatatctcattagaagtcagcaaaagtggacaccaatctacacttagatgggaaacattacaagatattgctataggtgttgctaagggaattgagtatctccaccaaggttgtgagcaacaaatccttcattttgatatcaaaccgcataatgttttgttggaccataacttcaaaccaaaagtttccgattttggcttagctaagttatgttctagagatcaaagtttggtatcagtgactacagctagagggactgggtacatggccccagaagtattctctaagaattttggaaatgtgtcttacaagtcagatgtttatagttttggaatgttgttggtggaaatagtaggaggacggaacaatacaagcgaaacagatgaaatttattatcctgaatggatttataatctcctagaagatggagaagattttcaagcgctaatagagaatgaggaagacagaaaaattgctaagaaactcgcaactataggattttggtgcatccagtggcatccgatagggcgtccagccatgaaaactgttgtccaaatgttagaaactgacgaaattctcaacttgccgccaaatccttttgtgtcaacaactcaatcaaatacgcgcataaccccatcaattttagagttagaaacaattgttgaatgagtgcaatatataattatacttatgtagttttttgtgtactttatattttccatttacaatgtatattttgcatgtactataactagtgtacgtaaggaatgtcaacaataaattcctagtggacaatggcaagaatttattaacgatagctatatatactaaagttatctaatggaaattgtaaagtccttttttggcaagttagttgacaaaatattttttctttatggtaagattcttttgcatacatacccgatttcttaccttgtattttcggttttgagttgctttttcccttgttaggaaagttgcacttttcagctagactttcctttgtttagaaactt

SEQ ID NO: 302210 - DNA, 2213 bp, Cannabis indica
atagagagagagagaggggttaaaatgaggaattcattagaaggctttttttaaccataataggatatatgtttttgctattaatgttttctctttagtattacatttattttttaataagactagggtaagtttgcctctaaaattaacaaccctaagtgagagatgtctcatcggcactggtttgctgtcacaaatacactcgtcaatgtacagagccaaaaaaagtactcagccacgtgtcaacttcataggtaggaacagtcaacacttcactaaaattatcaacaagtaataatattattataacaggattaggaaaggtaaataactttcttggtacgaataaaagaagatttaagaagatggaaatggtaatttccaataataataataataataataaaacattgtcagtagtacaatactaaacccatgaaattgtataatttttttaaaaaacaaatgttccatctaaaacatcttatttcaagtttcaaaaattgagatgcacttttggttttgttctctcttttttggggtctttgacacgttcatccacttcttgttttccagctttggtaatccccggcagtactaaacttactcttactttattgttctttcacttaaatagatggctaccttgtgcatcattttccacaatatattataactcactcactcactcactttatgtccacatttatccatacccttttactccttagttatttttttttttacttttaccaacctttcaacaattttaatttcaagcttgattgaatggaatgcctattcttcttcttctttttcattttgaacgatatgggttccacgttttatatacaaaaaggtttaaataactgaaaaataaataatacataaagtaccctttatcggtttttcaacggttcataaattgttaaataaaagctaataacttccccaatagcaacaaaagtaaaacgattcccaagatgaagttatgatattattatatgtatatttatatatattggtcagccccacaatcagaatcaaaatcagaagatgtatgtttcagtttgaatgaacaaaattatagtgagattgtacggccactaagtggtgtgggtctgtggctttgggcctctccttgaatgctggactctatttttggtgatttggtgaatcagtactcagtcacaaatggaagttaaaaaaaaaaactcattcattcacatgctcatcacacaacacaccacaccacaccaccactgcacacgccatttatatcttttggttgatcaactcaatcaatgaatggtatcattacataaattcaaaaacaaatttcgtaccaacaaaattaaggtttcacagagaagggaaaaaaaaaacaccccaattaataagccattgcaatgcaagtatttatttatttatttttttgaatagccaaaaaccaatataattatctaagaacaaaaatatcacaattaaccaagataaaagaacacaaacacaaggcaatcgaaaaagaccatactctgccttaaatataagattcaaatatatataggatgcatgtaattattattaatattatatcaattttgagggagtaagtgccaaatgttattatagtaatgttaaaataataacatatactaaatttggtgctacaacatagcccatgccatgccatatgacaattactaaactcacctaaacaaagtaaagatatatgagaaaacacccaatacttaatttcgttcatttcagcacaaagctagtcaagaaataccaacaaaagacttcaatagccctagctaagaaattaaattaagaataattgaggggtttgaaattaaagcattgttttattgttttaaaggtctagcaaaagataacaaaaaaaaattaagataggaattaattacttattttcagcccccatatagcggctaggagtcttgtttattaggtactctacttctttgctgcctaattacgatttaaaagaccacgccaattaatcttaattagtgaataattattagtgtacacctaattttgcaaaattaataccccaatataacattaccttacaatatgaattttctaatattaagttcctatttaattgatgtgagaaaagctaataattagagctattaatgttgagcttcttttaaatgggaaatttgattttctatacttagaaa

SEQ ID NO: 302211 - DNA, 2979 bp, Cannabis indica
cctcaaatcaaataactcctccttttaatggctgccgtatatcacgggatacattccgtgaaagtacatcatgtcggtgtccctacatatgtatagtgtaagttttacaaattgcattaactaattattttagaaattaagaacaataatacatgatatatgcctacatattctcacaccatatatagtaattaaagtaaagttttcaacaacaaattattaaacaggcacaaaagaaatagttaaaccgaagagtacatcacatcacaaccattaattgaccacatctctactataaaatctctcaaacagctctataataagaataataataatgataaattattctttataataattatatttatttctttattaatgtattttaataaattagttaggtttcctgccaattggtacgaatctgaccattggtcccagttagggggctaagttggcccattttgatcatagcattggcaaaatcgttataaaactgatcagcatcttcactgtaagtggtgacaagagaatctgttgagcccccactaaagagttgctgatctgaatgtaaaagccctttcttctccaccaaattcttgtaataaccattatcgaatataacatggcttttgttgtcaagtgaagaaagcttgtcatcatcatctgtgcttgaactgcagtttgttttcaaagatgttgccaatgaagaatcaatattagtctcattgtagattctgtttcggaacataacacacctagcttctcctgttgtatgagctcctgcatatttgtacatatatacacacaattgtaaatgtacgtacgtggtaagtatgcattatattattataatcaaaatatatatatacctgaaagagcaacgagttctttttctgtgaatcccttgagtgagaaagtagttatgagatcatcaagatctaatattgaagatgggagttgggtattcgcagcagtgaagcttgcatttgtcgagtctcttcttcctaactcaactttccaagaagggccccccaactatatatatcaaagaaattataatatcaatatcaatattatatgttaatatatacataatattcgaaacatagtatattgtacatactagaacaacagaatcacgagctgcaacggctagtatatctgcacaagaaacgaccccagggcaaagagtttcgagtttagactttatagtgtcaattacatcgaaacctctcactgagtctacatttggtgctgatgtcttctctccattgatgcttgaactgtcatctaatagaatagatgcatcacagccctgcatatatataacaaaataaagttagccatcattacaaatttttatcacactacaaaaaacttgagttttagtcacaacacccttaaaaaaaattgtgactaaaacttttgatcacgatattttaacttttagctacaaattttgttgctactaaaaaccaagttttttttaatggatcactacatacatgatgagttgttactaaatattttgtttagttatactagcaatttttgttgtgaccttttttttttttctttttgtatgagaatttccaactcacatagcaaagcttgaaattttcgaaaagttgtaagtgtaacgtttttcatgtgtgctaaactatggcaatttaatttgagatatataagatagtgtaaagatataatagtaagaagaagaaattaaccacttgaggctagttcaagtggctataaaagggtgcgtgttggaggttttgagtttgagtcccaaattatacattgtaatatataaacgtttaattcaaaataaaatagtaagaagaagaacttgcattaacaaagcagtcatggaagtgaaggcggagcaaggaggctcccattcggtgttccttgacgactgcctttattacgatggctttgatggtggagagggcttttgaacatgttgagttgtagaaatctgtggacaactgatcatcagcagaacccattttgaagttgacaacaagtacaactacaaacacaaataagcatagtaatggtcttttaaaggaaatattaacattggataagtgtaatgacttcaacgccatatctgccaatatatggagaattaataatttctatgtttggatgaagattgcaagactaaatgtattacatgcactatatatagacgatcttatagtgtccattaaaatacaatatgctttaagtaagaagtcaaagcttatgagtttgtttcttctttttcttctttaaaatagtaaaaatagccttcatcaacctaaccccaatatcattctagtagtgtagggaaaccaaaatttcatgtatttttagtcaaaacgattatatatgtattttgtgtgaacatatttggcatgggaatctatatatggtcaaaatattaaattttattattatatggttagcttagcattattaggctttattaatttgcaagtacaatgttatatgcaagtgccccaaactttagaatcttccctcattgaatcaacaaagggaacggccaattggacataagaaaataattaattaattcaatgatcatatcttagggattgcaaagtctaagttgttcagattaaccattgttaattacatatgtgaagtttaattactctttgacgacaattggtatttatttcataggaattaatattggtaaattaaagtaaaactatatgtatatcccattgacagattaaaaaaaatataaaatcattattatataagtttaagctagtgattactacctcttgttctctctcttgcaatgtcaaaattcaataccccatgcaagaagtatatgaatttaggaagttcaccatcattcttgtttttattcatcacaaaaaaattgttgcttttaatgataattttttgtcacaatataaattttttgtgactaaatgtgacttttcgtcacaa

SEQ ID NO: 302212 - DNA, 3335 bp, Cannabis indica
ccccacggaccgaacccaccacctataaccgaacccattaccccacggcgctcccccaccgacccacgacgcatccacgacgcacccccaaccaaatcggacacaatgtcaaaggtgagttcgtgttccgttttaggaagaattattatttgagcccaataaatgtgtatagacacgattagttagtgatattttataaaaattattgtattaaattatataggatctaatagtacttaattgcactaatagcgatataatactttagagagtgctagacaccctactcactacaaaataaaaattatctttagtaacaatcttttagtcacaatataatttttttgtgactaaatgtgacttttattcacaacaagttacttgtgacaaaaacatagtatattaattcaagttgttatttatttagttttagtcacaacaaattatgatttttgtgactaatacttttagttacaaaccatttagtcacaacataaaaatgataatttatataactagtcataatttttttactttttataagtcacaagtttttaacatttctctttacgaataattaacagtatgacacctcatagcgcggtattattataagcacaactactaatagcctctaaggattttgcttgtattattgaatatgtacaatatatgtatggcaatatagagattgcatattgttgaatttcaagtggttttgatcatatatttgtgtgtatatatataaatgtaattaattatatataaaggtggtggaagcattctaaacttggagagaaattgcctttcgttagagatagattgatggagtgtttcatgtggcaagttggaataagatttgagccagaattcagttactttagaataattgctacacaaatctatgttctaatcacaataattgatgatatgcatgacatatatgcaactttggaggaactacaacttttcgctaatgctcttcaaaggtaacctaattaattaattaattatacttaactacactattaatttaagggtaaatattattttagactgtgtattttataaaaattattgattgggtcttctgctttgttaaatgataatatattcgagccttatatttttcaaaatagtataaaatagatccagagcttaattttttgtcaaataaaaacttaacaatacataaactgaactgaaaatgttatgacaagaataattacattttttacatctatatattcatgttagaaaatgatttcaggttggttatactaaaaaaaaacgaaaaaattgagttcacgatcaattttgtactattttgaaaaacacggggtctaaattgtatcatttaataaaaatagagagtctaatctataacttttacaaaatatgggatccaaaatgatattttacttaatttaattatacaatcatttactacttaatttttttgttttaaaacttaaatagaatttattaaattggtttgcaggtgggatttgaaagtaatagatgagttaccggattacatgaagatggctttcctcattttatacaatttcacaaatgaaatggtgtttaatgtattaggagaacatggttttgttaaccttgaatacttcaagaaattggtatgttggtacatataaaattcatatgttattttaaaatatatattttgagcattgctattaggtattaatagtatccagtactatttaaaggtggtgtcttacaattgtttaataatattacacgaaaagttatcatgttaaattatatgagatctgatacttaattgcattagtagcgatatatcatattagaaggtgttaggcaccactgaaattttttcaaatttctctaatatttttcatgtgaataattatatgcagtggatagacatatgtaaacatcaattgcaagaggcaaaatggttctatagtggataccaaccaacattgcaagaatatactgaaaatgcttggatttcagtaggaggaccagcttttcttatgcatgcttatttctgttttaccaatctcataacaaatgaagaagtggaatgtcttaaagagggttatcccaatattgttcgacatggatccctaatattacgacttgcggatgatctaggaacatgttcggtacgtaagctcatatttcgtatcttgtgttttattaaaatacagattggatgtatgaatgtcaaattcgataaacaaattaaatagtactcttattatttttggaaaatttgataatgataatgtttataataatagtaatcatttatttaataggatgaaatgaaaagaggcgatgttcctacatcaattcaatgttacatgcatgatactggtatttctgaagacgaagctcgtgagcacatcaagcatttgataagcgaatcatggaaggagatgaataatgaaaatggagatcataattcttctttctcgaaagaatttgttcatgtttgcaaaaatcttggtagagcgtcacaatttatttaccaatatggagatggacatgcttctcaaaatactctatcaaaagatcgtatttttaaaattattattaatcctttcccctataaattatgattatagatgtattatggtattgacattaataataattacataaataaaataaaattatctattatatgtatatgttgaactttgtggtggtgaaagtacgattaaagtaaattgagatgaatcaatttaactttttaattaataatatgtttttttcttctattgtttatttatttttattatgagcttcaactctaactgaagtgacgtaattaactagttgctggaggttgtttttttcttcgtccaggcccgccagccttctttggatttaggtgtggcttggtcgggtttgtacttgcagttttgctactttagtcctgtcttgtaacatagttttgaatatcttttgtttaggttactgggattagtcatttttactgtgacatggttttattttattttattttgttgttgatttgtcttctttggtctttgatgactcgtcatcaaatcattgttagtggttgggaataacaagttatttgtggctgaaagggttgttagtggttgtcatagtcagagtcctgtgatccgaaggggaaagaccgggagttgtacaatcccccatcgcttggggaaggtcatgtgtgatgattctgagactgtgtaggtatgggactacatagttgaagaggacttaaatggattgattggtactacatatatcaacaaaatccatcttattatttttcggtagcccatcacgaaagaactcta

SEQ ID NO: 302213 - DNA, 1445 bp, Cannabis indica
ttttgttttgtttcgttgttgattctttaatggttcactatcaaatcgttgttagtgattgttaataataagttctttacaactgaaggaattattagtagtacaattactaacattgtataagtattaaatgctcaaactatgagattaaatgaacctataacaatttttattattatatcttttaagtggtagatgaaaataactatatgtattttttttaagattaacagtaatatttttattttttttatatttttaaatttttttcatcaaacaatttgaaattaaataactatttatttaacttacttttttaattctaatcttgatggcatctaaaaatatatcttaattaaattgtatgctattatttaagttaattaatattaataaaattgtatcatttattaaaaaaaactacaattattattcagcaaaaaaaatagtacaattattatatttcttttttaaaaaacaaaattaaaaataaaaaacttgagtcagagccaaagggcagagaagacagcttggaagagtgccacgtgggacccaatggccaccccaccaccaccatcaatagcatacaataaagtttttttttttttgaaattctgcatacaataaagttatctttataattattattattattgcaaatttctttttttaaacttttgtttaatttttttttgtaagataaacttttgtttagtttattgtatgattatttatcttcttaagagatataaatggtgtttgtgttatgttagaacatgaaagaaaataaaatgaagtggggtgtaagattaggaattaagagttgagacttgagagaggttaaagaaaaagaaaatgggagtgttttatttatttatttttttaggggaagaaaatgaagagtttaataattttaatgtggatggtaatggtacacggtcccaacacggatgagtttgttatgctttacacgtttctaactttgtagggttttttcaaaaaagaaaaataaaattctagggtattgttttagaggggataggtttattatgctttacacatttgtggtgtggcaatgtaatttattagttccttatattatttattaaattaaattatattggatttatattaaaatacactaataacagtatacattttatgatatttggtacttaaagatgtcttttaatgatgcaaatatgagtcgggtttttgacacagtacaagcccgagaggcatgagcacaatcggccacgaaaaaatatgtgcttagataagacatagcacgacaggagaaaatatgggcttaagcatgacacgacacgaaaaaatatagatttaggcacgacatgacacgacacgacaagcccaaaagcacgaatagattagcttaaaagcataacacattaaaatgtccattaatttaataataataacaatga

SEQ ID NO: 302214 - DNA, 3660 bp, Cannabis indica
gtatttttgtaaatttcccattagatagagggtatgggaaactggattacacaaattggtattttactttgttaaatttatgaaataatgtattattgtaaatataatatcaaatataataatttaaatatataatgaagtaaattatgtataaattctggtattcatgtttctttaaaaaaaaatctaatatttatataatcaattgacatttttctatattattgctaagttgtttatcactagctaatgttctgactcgagtaacatagaatattagaagtgaatcgacaaatatcactttacaaagctaaatactcttgaatgaacaatagtaaagtagaagagctgccagtagtgtcttgcaccacttaacgatacattgtaaatttatgattggttagcaatatttcataaaatttattattttaaattaaataaaatttaataattattttaccaattatgataatagtacttactgataccttttagtgtttctctaaatatatagcattacgagggaaggatggtatattaaaaaatctaaacgaatcctccttgttgagttcttgatcgttgactgagaatttataccatttttatcaaaactaaactagacatgagtcggagtaggtttcgtaaatgggagtgcgagtaaagctctcacctcatccacatccttggtatggatcaattcgaaagcactaattaattgtatgcaacactaatattaagacgatttttataataactgttaaattaaaatatttagaattcgatattaatttgtaccaataaaaatataacatgatgttaagcaaaatctttgcccttttggcaaaaataagtggatctattctttgtaaacaatagaatcaatcaacaatccaaaacctaaaaaataattggaattgcaaataaactatatacatattcttaagaaatattcatgtgtagacatcaataattagtgttccaaagataagctttgaataaagaaaagaaaactagaaaaaagaacatgaaaatcaacaaaaaaagaagatatcaatataaaatctcaaaacaagtggcaaagttgtgtttgcatggcccaaattagaggggcctttaattaggacaaaagccatcttttaaagtcattaaatattttcttttttaccatcttttgataaatgcttatgaaataaatgtctcttttttattttatctttactgtaaaatatatcttcttctacttttttttttttctttcgatattgataactaatgaatttcaaaattttgaattattcgataaaaaaaaataaaaaaattaagtggggctattatagagtggcccaaataagatctcttatatctaccttaacaactgggatgttcaacaaataacgaatacttttcaccattttaaacatttttttaagcaattgcctcgatccccagatacaaataaatatgaataatttaacactttattatgaggaataatatataatattgttaattaataataattccctagtttctttttctttttctttgtaggacttcttgacctctttttctctcctaaattcaaatcaaaattgtacatagtttatagttaaagatgtcctttaccttagtagtactagctttaatattattaagattccaagactatagttttctagaattaatccactcataatgttacaatatcaaaaactatccaatcaagttatctttatataatattaccgaaaaatgtctgattattatcaaccttagaattacaaatattatttttttaaaaaaagttggtataattaataacaaaaacaataggtttattcataaaaacaaattaaataagttatttttaatttttaaaccacgtaaggtctaatcataataaacggcaaatcttaaaaaactattggtaacatcataatcaagttactgataataagtacgtattagtttttttttgggtagaacacataatatataatcacatatatatatataacaaattaaatccccacatgaatatattaattataataatataagctagttagctcatatgatcatatgataatatataataacatttataatatatatatatatatataaatgagttttgggtagatagctaagctaataattaataaaatcatgattattaaacgacatcgtatcttggttttggaagcaagaataataatcttgatgaggaagaggaggaggaggatacggcatgatgacgtcagcaggaggaggaggaggaggaagaggaaccacagttgtagtggtggtagtagtggtcgacgacccatgataatcattgtgtggagtagcatacacacgattataatgattaataagatgattatgatgatgaggtggagtactaaggtacatggaattattattatgaatagtaggagcagctggggcaagggccacgtcatcatcataatcaagaagaagatcatgatgattattgtgattaatgatggtttgatgaagccatatctgagccttgagaaacttgacgtagtgaattgcctcttcgagcattgaaacagtgtccatctttgctccgcctgggaccaaactctgtaagatcttaaaacgctcgcttattctgtgtcttctttctcgagccgcaacgctttgaggatccgtagacagtttcacaccaccacaaactttattattcttcttcttacccttcttcttcctcatctctttactattattattcttatttgaatcaaaagatgagctacaacaatactgatcagttgttgttgttgtacttggaaacttattatagtccatgatgtaaacaactgggttttttactacttgattgatatatgtatatataatatatgtatatatatagaagtatatatgtggtcacgtgagttactcagagcaggattcgagtgtctataccctatagaaaattaggtctagctaaaagcaactatagctattatatatatatatagaagaaagaatcacacatcccacacaagttttattattttattttttaaataaacaataattaaaatataaaaaatgaaaataattatatgttggcagaaaattgtgagggtattattaggtataagtggtgtctaacaaaactccatagtacatcttcttaaaaggttgttttgatccattctcaatttcttacaatattcaatagagttttttagtctaatttaattttaagattgcatacgatgtagttttttttaggacaatttgtaaattttttaaattttgggataaggtgaatattccatctcaaaaccaattaataatgggaagagtagcacatttatcttatatattatattatttttttacacattagcaatgtgtaactctctaacatcctcctcaaaatggtagctattttattttcttgccatcatggacaactggatcataagcagctttttttttagctcactatctctcatgtactttttagattggtatttttggattgatttttttttttattttggctcttggatcaattatttttagatttttggtggctccaaaaaataccatgttagaatttgggataaggtggatgggattccatctcaaaaccaattggcaataggaggagta

SEQ ID NO: 302215 - DNA, 932 bp, Cannabis indica
aaaaaaaaaaaaaacttagaagatttatctatatattttatattcatggataaggattaactctagctataacatgtactaacctagctagaaatatgacctagaagtactactactgatcgattcttatgtagatttgttttgtacggtttattttatctttaaatgtaggggccttagatgtatatatatagacgttatatgaaaatgttactgatttggggtggtccggctcccaaaaacccggggacaaaatatattttacgtacaaaataatgagtctagctagtactacaactacactattatacgatatagaaaaatctaaattacaatccaaaacaaaacatagatgttttgggtgtatcttttaagtttaaattctttcataattatgtgttaggacacgattttgttcattgatgtacttttacggaatgtatttcatgatgtacgacagtcgtcatataggggagttatttaatctgagggttggggttaatctaggagtaattagggttaaaaactagtaacgtaataacttgattgagacccatctaatgtaccctgaaactcatctaatgtaccacggaatacattccgtgaaagtacaccacatgataaaatcatctccctatatatatgttataattatttaagataatttaacagtacatgcgaccttttaccagaattaagttactaatattgtttcaactaatttggcgaaccttgaagaagatggaagattctaggaaaactactcgaatggcggacaggacactgccctcaccccaaggagactcgagatctatcactacaaaaaattgttatttctagtgccaactttttagtcacaacataatttttttgtaactaaatgtgacttttagtcacaacaaaatgttacttgtaactaaaacatagtattt

SEQ ID NO: 302216 - DNA, 2008 bp, Cannabis indica
aaaaaaaaaaaaaaaagaatctacattgtgtcatgtgtgaagtaaaaggcgtaaaaccatctcaaacaaagtaacgcatagttatgaaagagaaggaatgaggaagcaaatggacaggcaaacgtaggaggaggatgttatagtaatattatataatctatttggtggagtatatgctttaaggagattccaaccataaaggttttgccttataaatagtaagcttgcaattagtaggaacttcattctcattttaaaacacaccaccttatagaaatactacaaaaaattctttattatacgatataataagttgttgatatattgtaatattaaattcaattaatattacaatggcatacaacagctcaatattgttgatcttcaagctattaatcttacaatatctctccgtcctttgtgtttcacaggataactttgatttcttctactttgtccaacaagtgagcatatatactaatgatcatatatactaatgatcataattactatttatatatgacataattatcttgttgcatacatatcattaaaactaattaataatgtcttttttaaaaaataattaatattaattaataataacttcaaatctcgcttctggctatttttcgatctgcccccactacttgattttactttttttttttctcttaattttactattgttaaatagtaccatagctaatttctacatataagcaaatatgatactcattttagtgaacaatcaataatataaacatctatattattaataaatatgcagtggccaggagcatattgtgatacaaagcaacatagatgttgctacccaaaaacaggaaagccagcagcagattttggaattcatgggatgtggccaaactacaacgatggttcatggccatcaaactgtgatcccgacagcgtcttctctgttcatgaggtattatatataaatatgataaatatgcccggttttggcgcaagttattatatttataaattatagttattaataaccatgttatgtacatattaaatatttataaaatgtttatattattatacatagatatcagacttgatgggccgtcttcaaaaggaatggccctctctaagctgccccagcagcaatggaaacagattctggtctcacgaatgggaaaaacatgggacttgttccgagcaacaactagaccagcatgattacttcgaagcaggtctcaagctcaaggaaaaggccaacctacttaatgtcctcagaactgctggtgtgtatatatataatttatcattaataatgtataatgttaattagtttttgtaaattgtggtataatgatcaattgattaaataatttgatgttgttacaggtattgagccaaatgacaatttttacagcttggagaaaatcgaagatgctataacagagggaattgggcatgccccaggaatagagtgcaacaaggattcagagggtaacagtcaactttaccaagtttatttgtgcgtcgacacctctggatcggacttcattgactgtcccaagcttccaagaggaagatgtgccacaaatgttcagttcgccaaattttaacaacaccatttcaacactactttctacttttatttgcttctctactacttttcttcttatcaaataaaaacatttttattttatttaatgattttgattacatagaatcaatattttttattagcctcttcttaaattatactgttgttttcgttaacttggatcttgacctgactggtgtgtaatgggctcaacttcttttgggtttatcaaaccaaacaggaagttttacttagcttagccctatgaaaaaaaataataaataaattttgatatatatgggtacaattttaatggatagtaccctgagtgatattagaaaattttgaaattttatgattaaattttctatttaattagaaaattttttcatttttacattatatgggttgagattgttccat

SEQ ID NO: 302217 - DNA, 3578 bp, Cannabis indica
taaataataataataataactcgagttcctttacagctttatgtgtagagcaatttccaacaatctcgaccgaaacttttatttatatgatgagccaaattaatatgaatcattgtcattgagcccttgaaattaattgttactaacgacttagattatgttttattacacctaactcatgctttccttttgactttggtagacatgaaacttccattttctcattaattgattccccaaaatctaaaaaaaaaaaaaaaaatgaaagaagaggtgaggtgagatgtaaacaaagaataattcatgtacttcatgcttgttttgtgattagcttctattctagctataacaacagcaacaacgatccattgggaatttcctcgtgacacctttgtctgcatttattttataaaatcacttaattaaaatatactttgcattgggaatgaagcttatgctaatctctccaagtagtccattactactctctaacaaaaaattgtgatgttagtcattattgttcgagtcaaatgtgaatatagaggaaacagattagaaaggatggaaatgaagagacctctttttttagtcgttttctgttttcttattcaaacgacaaacaatactgcacatggtggtaggcccaagctaataagtattactattttcttgcttttttttcagatttttccttggaaaatatcgtaaagaaatatcttccagcttttcaagaaaaataaagcatgaaattaatatgatatcttctcttttattttgttgtgatgggaagaaaattggttactcaaaattaagattatgaagctaaacataaatactcacgaaattgccaaaagtgagtacttgaaagtttaatctcttcaaagaaagaaataaaagagtaagtcagctgaagaaaagaaatggcagtaataatgttcatctcatttgaagatcatgtaccactaggactattactcttttctgacactattgggtgagttgggtagcacattaatttgagtgggggaaaaatatgaaagcaccatactctaaacccataacaatttttttccccttctagaattggaactaccagactactagtgactgtgtgagtgagaagtaggtgtagttaagggccactttgcattaatatctacattttacagacagagtaggctatatcgaattatcgagaggttgttgaggttagtcacaatgaacataagtcgtattatagcttttccaacacaaataaaaatgaattaaaaagaaataagcaaaagctcataggaagacctatatttttgaaccaatatagtattttgaaaaaaataaaaataatgcacgccatatatgggacaactgacatgtgacactaaacaagcatcttcataaaataaaaagtgcaaagcaaaaaagatgagaatcactcatttgaaaataacaaaaagctgcttagtgtgaactcaacaaaagccattgaaaattctcatatcatttactacgagttaaaattgttgttgttgttgttgtttggtgtgaacgagttaaaattgttgttgttgttgttttggtgtgaacgagttaaaattgttaaaaggcttcaaaaatatcttttgtcacattagccattcaaggaccaagtttagtctttaattataaacggctagattttaagagagatttgtagagaatagtgacattttcacatttttcttgaactatatgacagtttgtctttcttgactttccttttttttttccaattcatgtttgaacttaccatgcagacataacagctcggaggaactttattgttacaagttattaaaaaattaattttttttgaattactattagatattagtggtacttagcactacttcaaggtgacactttgcgattagttagcaaaatttcagaaaaattattacattaaattatatgagaatcgatacttaattaaaccaataacgatattacaccttgaaggggtactatacaccacaaatgctttttccggatttataataaggcaacttttccgggtttgtaggagacttacaaagcctgagattacattattacaataaaagttaacaagttatacttcaattttttatattaaaaaagaaaagaaataaaaaacagcaacaagtctcctacttggttcaacttcaaacataatatgtgaaagctgagtataagtaattaagtatttcactttcaatttattgacgatcaataaacaataattactgaaaaacaaagactagtttataaatgaaaagaaccattttggaatgcttaacatacatatgctcttccctaagctctactaaattactattcttgtctagaccaatccccgctcttcccaccagttttgctctctagacgtatatcagtaatcaggatatcctttgaagcagccttgcacatatcgtaaactgttagcccagcaacactcacagctgtcattgcttccatttcaacaccagttttaccagttgatgtagcttccccttcaacgttaacactccaatcctcgggattcagtgttagatcaacacgaacatgattcaaggttatgttgtgacaaagtggaatgagactacttgtgtgctttgctccagtaatgcctgcgattttcgccacactaaggacatctccctttgctatttggttagctaacaccaaatcatacaccttctttcctaggattaccttgcaactagcgatggcagttctcttagtacttcctttcaaagaaacatctaccatttgggcttcccctgtatttccaacatgagttagaccgattgaactctctctttctttttggaattcagcctggggctcctgagctactacatgttcttcagttacagagctggcaagataacttgaaggaggttcaccaaatactgactccatttcctaaagccaggatttcaataagccaagcagtgtagtactagtagctagtgtgtacgtgtgacaacatagtaaagttttcaagtacaaattggatttaccggctttagagtgcaattaccttattgagctccattatagtacttgagacatcatgtctgctgttactgctactgctaagaagccttcttgaatgaggaaatgaacccgcaactcgtcgaagaaacatgacaagcatacaaaaccaagcttaaccttcaaccgcagaaagaactgaaatttatacattatcagtttcagaggctaaaatgttaaggaaacacgctaagacagtagtatgcttaattgatttctttgtatggtcacatttttttttaagtgcatgacagtttagttagttatgttggcctaactaacatattacttaaaacatttctagagttttgttttctggtttggtgaatgaaaacagcataatagactagataaatccaacacgtaagagcagttcacattagaaccgtaagttgatacgtggtaaaacccagccttattcaggcattttaacaaacaggtgaaggtcataaaactaaaccataataaaagaaaaaagagtttttgcgaggaagagaaaggag

SEQ ID NO: 302218 - DNA, 1382 bp, Cannabis indica
aaaagtgcggattggatcggatgaacacccctaatttcaccaacaacaataatggttggtggcttgcgtttgtaatggtaaaattggaaatcactgatgtattaggcctcggatgattcgtgcatattaattagggcatttttcagttatctacaactatataagaaagaaattagagtaataatacatattactatatcaacaatagcattattgatacaaaatttgccatatatcaattgtcacaagaaaaaaatatattgttagtatattcctcgtaatctagatagtgttttctttttttagattttcattttttaacggtcaaaaaatgttcacaaattatagatcattaatttttaaaattttgtcttattgttttaatcatgacttttcaatcaagaaattcaatttggataaattagatgccattggaaacttaataaaaaattcaattactttgtgtgaaatataatttttcatatccacactatattaacaataaaaatataatcatattatacgccgtattattttatattatactgtgttgtataatataatattaaattattttgtatattgttattttaatacaataatatatttactattaacatgtcttaatatgttgtatcaaattaaactatttttggtatgaaaaaaagaaatctttgttgagcagtagtattgtattgtattaatttagaaaataattaaataaaaatataattttaattatatcatatgtaatactaatcttaaccctaccgctggtaccactcaatctacgcatcttgattcaactcctaatccttaacaaactcaggacacaaacctagaattagacaagagcacgaactcaatcttggatctcaaccctgaccttgaccctgtactcgaaccctgacacccaaaaccaaactcggaactcgaccttgaacctcgtaccctaaccccaaatccaaactagacctcgacctcggagcttgtaccccaaccttgattgaccccatccttggaccccaaacctcaagccagactccggcctgaccctaggctcaatcccgatccaaacctcgaccttgtaccctgatcttgattagacccaaacactagatctccaccctaacccaaaccccttacccgaccctcgaccttgaacttgggccctgatcaagattcgagtgagtttttgtatataactaattgttgggtccgccccttttgttgggtttggaccaataaaggataaatgcccattttatttgattcaattaaaagaaaaaaagaaaaagggggtagcaagctgaagagtacttcgtgagcagcaagtcagccaagagaaaagaaagaaaaagagagggaaagaagagaaagaa

SEQ ID NO: 302219 - DNA, 3264 bp, Cannabis indica
tatcaaacatgtcgtttactataaaaacctaattcatatcacagtgatgatcaatagtagatcggtctgaatcttaagtaatcatgatttcttgttcatgctattagtttctttgattcattcattaaagtttctcagagaagataattcttacgtacaacttctatttatgggaagttaataatgtggatggctgggaacttgatttacaattatggaatcttgacttccctaatgggtcgaatattggttccctttaagtgtaaattctgaaactataaaagttatgcacaaatttagaatggatataaattatactttcactagtgagttaacaacatgaaataattagaagggtaaaacgtaatttgaccagaattaattacaaattgacacaatgagggctaatcactggaactgattatatcaatggacactacaattaaactcaataagtataattctataattacttagagttcaattctactgagaaaaatgttagaaggcttaaccctcgttctagctattattttttaggatacatagaattcaagtcaaagaagtcatgtgggatttggtgcttcaagttctcaaaaaccaaaggaatctatctttgtctcagatagaatttttccttctcatgttcatgtgtcattttccctcaagtttgttgcctcttgtggtcgttctgtttcaacagataagttacaagaagtagataaatccaagggtaagcttgaaaaattcattttgatttttcatatttgtggaagaaaatatcatatttgacatagatttttactctaatgattttaattaaaaatgaatatgttgagagattcaattattttgataattcaaaaagagtgaaaaaaaaaatgacaaaattcaagcaaagaaaatacaggtcaaaaagaataaatgttttgatggttttagtagagtgaatatgatagaccaggctcttcatatttttggtattttgatagtgggtgttcatatcaagacatatgacaggtgatgggtcaatactcacagacataattaaccaatgcattgtggatttgtaacttttgggaataaaattgaaggtaatgttcttggaatgcgtactcttaacttaatttaaagggttacctaaaatcaaataaagagtgttactcgtggaaggacttaaagctaacgtgcttagcataagtctaatatgtgatcaaggttataatgttaactttgataaaaataattatcttgttttgaacaagaatggtgagaatgttcttgaaggatttagatcaaatgataatttttatactctttcaccttcaattatttgtcagtatgttgtgagtaacaatactgatatatggcatgctaaactttgtcatgttaatttcaaaactttgataaaattatcacattcaggattgttcgtggtttacctataagtaaaaatctaatggtaagtgcaaatcttgtcagctaggtaagcaattaaaattcacacataaatttttttctaatataaacacttcgaaagttttagaattgcttcatatggatattataggtctaattcaaattgagagtataaattaatggaaaaaggtacatttttatttgtgtggatgatttttcaagatttactaaggtagatttcttgagagaaaaattagatacgtttaatgcatttaaaactctttgtttgaaatagaaagttgacaatgattctaatattggaaaaattgttcacattagaagtgattatggtaaagaatttgagaattccatgatgatttttggaagtctataggtatctctcatgagttttcatcccccaaactcctccacggaatggagtagttgaaaggaaaaatcgtacccttcaagaaatggctagggtgatggtaattagcaaaacactaaccaaacggttatgagttgaagcaattaatactgcttgttatatcataaaccgtgttttctccgtctaggtacatcaaaaacatcttataaaatttgaaaaggtaaaaaaccaagtgtgatttattttcatttttttttatgtgtttgttacattttaagagatagaaaatatctttgtaagttttatgctaaaagtgatgaaggtaattttattggatactccactaacagtagggcttatcgtgtttataacatgagaacccaaactataatggagttttctaatgttgttattgatgatatcaggttctgagttttctactgagaaagaaattgataggtttattgatgaacctactaaagttcaagaaaatatcattgtcaatgattatcttattgcaacaactaattcatatatgccaacggatcatgaatctgatgagacagatactgggcaaaaaatttcgaatatcatttcaaatgaagtccagaatgagccttgtagcaaagttaaattgattcatctggcagattcaattcttggaaatccaaacgatggcatggctacaagaagaaggttttataatgttgttcactttgtttgtttcttatctatatttgaacttaaaaatgtgaaagaagctttaactaatgaaaattggattaaagctatgtaggaagagttagaaattttttttagaaacaaaatgtggatccttgtgcctagaccattctacatcaatattattggtacaaaatagattttcaagaataaaactaatgaggttggcacaattgtgcgaaataaagcaagattagcagcacaagacttgaatcaattagattattattttctattgcttgtttaattggtttcaggttgttcaaatggatgttaaatttgcttttctcaatgggatcttgaatgaagaggtatatgttgagcaacccaaagagtttgaatgaagaggtatatgtttgattagggtttatgccctaaaaagcctataaagatatttctgtttataaataagagttgaatattttcatatatgcttgaatgttaaaattataaatgtttaatattgaataatttatacataaatatcaaaaaaattcgtattcatatatgaggttgtgacttgtattgtacgaagaactaatatcacttaaccacgaataagacaaatagtaacacattaaatttatggaatctttaatcaacgattgctagtagagtttaataatgcccgttattcggagcaagcaatctcgattcagattgctgatgtagtatggcattgttaggctatttttagcctatgttttggatctaat

SEQ ID NO: 302220 - DNA, 2624 bp, Cannabis indica
taaaaacaaaaattattattatattttgtaataataattattattaattacaacactttaagtagattaattatatttacgtttaacgtgacagccacaatatatatagaataaatatatgaatattatactattcaatattaatgatacttaataatttttaatagtattttacaattaattaactatatttaaactattttttttaatttatacgtgactcaataataatataacaaaaagatactaaatacacttttgacatttctatatatagtcatattttcatatttattattacttaattctaataaagtgttcttcttcttcttctatcttcttctctcttatttattcctacttatactagtttcttttcattcaacaatttagggcttaaacttgagaaaagaaaagatgaatagagttagaaagtgttgtgttgtgataacaacattgtgtgtgtttttgatgttgtttacaaactccatagttggagaaaaaagtagtagtataagtgatgaagagtgtgaagtgaaacccattaaagcatctttaacacaaagaatcacaagtttactttttgtgtcttcatcatcattatcatcaccaacaacaacttcttcttcttcttcttgggataagcttaaaacacttctcaaaaatcttcacacccacttcttccctcctaatcttgagtaagtgtttttcttctctcttttttgttataattattaagatttacactaattttgcactagatcttgtattttatttttttagtaatgtttttggtgtagtgaaaaaaaaaaacccatgttttagatttgtgtaaaaattaaagaaaaatgttggattagtagctttattaattggattaatcattattattattacccttattgagatttacactaattttccactagatcttgtgtttttggagtatagtgaaaaaaacccatgttttcgatttgtgtaaaaattaaagataaatgttggactattagctttattaagtggaattattattattattattattattacccttgttgagatttacactaattttccactagatcttgtgtttttagagtctagtgaaaaaaacccatgttttagattagtgtaaaaaaaaatgttgggctaatagctttaattggaaataataataattattagccttgttgagatttacactatttttgcactatatcttacatttacaaatatataaaatacaaatggacatcaagttttattatttatatttatttatttatttattgtgtgtatttaatttgtttgtagtttcagaggtggtgaagaaattagaggggttagtagtaatagtgttggtagtaatggtgagaatgtgaaaggagctatgggaaaaagctttgagaaaggtattgaaactgtggaaatgtctgcaaaaacagctgcaaaaattgctgaagaaactctcaaaattaccaaagacaaagtcaaaaacaccttctctaaagatcataataataataataatgatcaacaatctgagctttgatcttttttttactttttacttttaccttctttgggttattttcatcatagtgattagctctcttctttgcttgatctatttattgtagttttaatttcactttttttttggattttgtttatgagttgaatttaagtcatttggtgtaatttagaatttataataactaaggatgaagtatttgattggtaaatgaaagtaaaaataaaataaaataaatgtgtaataaaattatttggtttgtattattcatctttttccaactttggttattataatttatttgctttcattgtataaactaatttacatttgaaatatagattagaggaaacatgtgaaatattagtatttaaacttagatatataatttaattaaaatatatatttattttttaacaataaaaatatatatttatatataaaaaatattaacataaattttttttcagaataaatttttttaataggttgtgaagtaactttggagattagtctaaaagtgataaaagatataatgacaaattacataaattcaataacttttgtcaaaaaaagaaaaagaaaatcttgaatagcatatccctagaacatgtaccttattattacttttggggttgctatggaaatattgaaatagtgagatatttatcaagtttaatttattttaattttctttataaaaagaaaaataaattaaaagatactatctagtctctactagataacaaaaaaaaaaaatgatcccaaccaaattgtaccaattataccctttctttggagttgggctatgaggttatgggccgcatgtctatcgattgggctggcccagatcaaaatgggtcttcaacccaaaatgtgatctcaatcaaataccatatcatcaccttctctatctcactcatttttttaaatataacaaattattaaatattccaaagccaaaatttttttgaactatctttctaggggtaagttgaaaaatgttttttttattcatcaattaatcaaatttacttctaattttatatttatttgaaacatacctccttttatatgtattgtactcaaa

SEQ ID NO: 302221 - DNA, 2774 bp, Cannabis indica
gagactgcaggtggccttccaggtttgtttcttgattttccggctgttgtggagcttttactacattgaatgataatttgaagggtaattattgcattcttctaaagtgctctgcatacattgcaggattgcttttgactttggatcgtgacaaattgtatgtgagtatcagattggcttgttgcttatctcttaacttctttatctgttttaaatttaattcaagattcataaaaatgcatactatttttctatttaatgttttaaattgtattttctcactttttgaaggttcgtgtacggggcccatcagatctgaagtacttagtcgatgcactgaggtctttcatcccaaatgctgctttgcattatactgagggctttggaccctcacatggctctgttgatcttataaatgaccaagatgtgaaaatatcagctattgttttacaaccaactctttcagaaggacagcctggtgatatgtctgttgtatatgtttgtgaattacctgaaatcaaagggagatttgacgataaaaaagccctggctttgggtgttggacctgggccgaatcgtggtcaacttgttaaaggaatatcagtaaagtcagactgccaagatatcatggtgggttatagaaacattatgaaacttaagggcttagtcaatgctgaatgtatctcctatctgttttgaaaataagttatttctccaaattttgtttaggttcatccaagtgatgtaatgggcccctctcttcctggtcccattgttctcattgtagactgccccaaggagtctcatttgcaacagttgttgtccacagagtctttcaataattacttctcaggttcacccaagagttctaaagcggtgagttgtattgtacacttgagtcctgcatctgtagttagcagtccgaagtaccataattggatggcaagatttggttcagcacagcatataatggctggacatgaaaggtttgccagtttggcttttgttttcttctctcttctttaataacgtgaatgttatttaagtgcttatctgacttcctgtgttgttgacaggaagaatattaaaattccaattctcaaatcaagtgcaagatttacaactaggcttagttatttatgtccccagttctttccaggtccagaatcaaactccatttgttcaagtgaggtttgtcaaaatgttttaatagaaccttcaatttttatttttgtttatttttaagaaaaaatcacgtacattaggagttgtatttattttacaagatttaaaccaatccacctgtaatataacttattctgccaggattctgatccaaagctttgtgaaagcattgctgctgaaaatcttcagaaggtatgaatgactcctttacttggccttagctagaaatttattcagtatctgtactcttaaaagagtgttctatttttctgaatataatcattgtacatgttaatcttctcttatgacctcgtttattcattttcatccaataactccccaaacttttaactttcattactgaaaacttggtacttttcatatttccttgaaaatttattgtaaatatattgtgtgatgaagttaatgacatactatatgaaattaatcattcacttcatgtatgtatgaaatactgatctgaaaacagtctaagtataggaatattctattctggggcgagttttgttattttgttaagaatagtcaatttcctctgtttctttctgtacagtttgttttaagacctcatagtaagcaaggattggataaatcttgtgtaccaagtttgttggtgcccacagaaatcattgacgaattacattctgagattccagatattgcagttgccgcccaaaatgttagacagttgtggcatacatccactggatcagcaggagaaataagttctgctcaaaatgttaagtttagtgttgaagggccatggttggatgacaatactcttcctagctgtctggaaaatataggaagagaggacttggagattatttttctggggactggatcatctcagccatccaaatatcgaaatgtcagctctatccatatcaatattttctcaaaggggggttgcttttagattgtggtgaaggaaccttgggacagcttaaacgaaggtaaacccaagcatgttatccaaatgcatattagtataataacacttttataccatgtactaacttatagttgttatggtgccacagatatggtgtagacaaagctgatgatgtggtgagaggtctgaggtgcatctggatttcccacatgcatgctgatcaccacgcaggcttggcaagaatacttgcccatagacgtgaattattgaaagaaacgcctcatgaaccaatacttgttgtaggaccaggacagcttaagaactatctagatgcataccaaagacttgaagatttggacatgatgtttctcgactgtcagcacactacaaaagattcacttggtgcttttagaaataaaccaactaatgggcaaatcgattcagctgacaatgtcacagaaataaagagcttgaagaaaattcttggtgctgctgggttggaggccttgattagtttttctgtttttcattgcgaacaggcatttggtgttgttttgaaggcagctgagagaattaatagtgtcggaaaagctattccaggatggaagattgtgtattctggcgacaccagaccctgtaaagctttgattgaagcatctcgtgatgcaactat

SEQ ID NO: 302222 - DNA, 3449 bp, Cannabis indica
ttcacctaccttcagccataacctgtgtaataatttcatccttttccttgagaagagcagctgcatcactttttctattttgttctcttcgaagagtatccctttccttagtaagagcatatacctgaattcatgcataataaacagaaaaatcaaacatttaacccataacagagaaaattacttaagatgtgcttctccgtgagtttaaattaaaataacataaaaacagagtacccatctaatggatggagcattagcacccaactggagctcgtgttcaatcagcatttttcatataaatccttctaaatggcaaccaggaacttatcaatcactggccattaatacttgcagttaagataagggtaaacatagcatgatacaccacagtagagtcaatgacacaaatgagggaatctgagagtgatttttagctaaattcccaggaaattcaagagacctgtttgtcccctagaggtattgctcaatacatattagaatttgcataccctaatcttacactcacattaaatttatttacataaactttcaaaagaaaacagaatctaggaattcctaagacaatgtgcttgatcccaaaataattaaatgtccacaattatccaatgtcaaaatctgctcaccaattatgatgtcctacgcataggcctgatgaattggcagtctaacatagcaattgtgaacatattgatgtaactcattacttatttggaacaaagttcatcttgaactgtaactgttttcatcacataaatttcaatgggaaaggtcattaactacatgtttacttgcaatctagatggcatggcctgtggagaaaattctccattctagagtattaactgtttactgtgtcgtcttacatgttaaacactcagaagtgaaactaacatacaaacaagagtaacaaaacacatataccttcctttcaagagctgcaaccctctgatggtattcttctctcaaagtctcaacttctgcatcacttggtttcctctgatggatgcatcagtttcagaagttagaaattgaacatctaaaaaatgtctctggcactaatgtgaaatgaagtaaacgaacacagataaatatattctacacaccttcaactcctcaatcacaacttttaattgttcattttcgttcattaacttggcaatctcgtcagcctttgactggaaagttcagatagatatgaagttcagaactgtagaatgcaattcaagaaaagcatagaacatatcaaaagaacacaagaaagatagtacaatatcatctgaagacacacctgagcctgtcttgccgcaccttgcaatgcagtttccatcattttcatatcctttttcactctctcaagttcaaaagcaagatctgttcctgacattaaatgttgttctctgatgtccttctgtttctcatcaacatgctgatctgaaccagctgttttaacaaatgtgctattctcatttgaaatcacctccaaaactgtctgagaagcctcatgtgaatgaggtggtgtacttggaagatcatcattagaagatttttcagcactgtcactttcctcagcagcagagggctctgcctctcttgtaactcttgtacttgtatctcccaactccccagtttggactcgagataaaatctctacgctctcctcaccttgtgtcatatgttcatcagagatccctaattgcatgttactttcatcagtgctctggctctctacttctgctttctgttcatgcattttcacattctcagtagttaaatcatgtgattcatctggcacgaaagcagtgccctcaccttgatcaacttccacttcagttactcctgaattctcttgcgctaaatcaaaactacccgagtttccatctcctgaaatctccctcttttctagactttcaacagaatctgacagctccggattctcaacagcaggttcagacaccactggtgatatagtttcaggtttttcaggacttgacagaacaacatttgtttcgtcttgcatttctgaatgttcatcatgtttttctgttgttaaattctcactgtcttcctcggcagtggcagttcgtttgctagcagattgtgatgaaatgtccacccgttccccttcatgttcctctgatgtagatggatgttctggatattcatgctctcctaatggtttatcaccttcaggtgattcaggagattcagatttttctgatgattcagaactaccttcctcacttttttgccccataaaggccataacagtggatgaattccatagcccagatgctgacagacatataagaagaaatcaatcaatccaaaaaagttcattttcttcacatataatataacacaacaacaactgaaaacataacttctaagggaaaatggggtaatgaaacagtagtacaagggtttttcctaatgaggatagaataatatagtcaattcgtaggaaaataatccctggtttaaaaaatgtactctagccactattgaaactcataacacagaagtagtaccttcattgctggaatcagccttctctttatctttctcatcgaaaccaagagcgctatcaaaattcttctcgatattcttaacgctctcttggatcttattcaccgcgccagcgatatcagcgaagttacccaaagaaaccttcccactaaaccacgccatcttctggctatataatcaaatcagattaacaattcgaaaacaccatcaataactctctacacattcacatccgcaaagatttctcacaaaaagaaagaatgggatcaaggctatcaaattaagattgctgcgacgtagatccgaatcgtaatcggtagaatccaaaaaccctttcttattataattttccggtaaattgagatttatacaagaaattaacaaaaaaagagtaagaaccaacctggtgtggggtggtcagaattgagttgagttgccgtgaatgtgaatgtgaatgtgaatcaaatcaacgagttttgtgcttcattgagcttactactgggattatctcgtccttcggaattcctccttttcgaagagaaaatatatgaaaagcggaaaagggacaccgcgtgtggtgtggttctttgatgaaatagacggaggatcgatctgatattactgtatagctactaagattaattaattaattaattttgtgttaaaacaataaaataatggttatttaagatatttgccaacatgacatatgtattattatgctttgatttttgtaggttgttattcttgaactatttagagtgttgtaaattaattattttgtcaaattttatataaacgaaatgatattatgttgttacatctgcatgtaaaataaataaaaattgtacattttaaaacattcattaaactaaaattaattaataattaaaaaatta

SEQ ID NO: 302223 - DNA, 5155 bp, Cannabis indica
aaaattgaatttatatagtaataattgataattttctttttttaaataaaagacaccctggacctgtttacaaggtgtagattgagtaatttgttttcttctgctaaatactcattgcttcttcaagagtgtaatgttaaatgtatacgagggaactttaatataagagaaaagtgttaatgttaatgttaaatgtatatgaggggaaaaggagcacaagatttgttgattcagatccacccttgaccctccttgatgtaagtagctctatatgtatttctctgtcaatcaatttatattcttctttctagtttttttttttttttttttgaaaagaaaattaattttattaaccttcaaattcagctaccaaatgaggtagaacaacagttgggacattccccaaactgaacatacgatcaggataacaaatggaagctctagcaaaactatgaggtaccatattggctgaccgttttacaaaatataatgagacatttctcaactctttaagcaaatctctacagtcacgaattacaataccaaaacaagataacatttctacttgactgcgaatcgcttttacaatcgtaagacagtccgtttcaagaaagacgccaattttattcttaagccaactcaaggcctctctcatacttaaaacctcggcaaagaagatcaattgattgtgtaaatattgggctcttatgcgtgcaagaagacccaagcgatcttggcagcgactctgcaacccttccatcagtcaaacaaccagcttttgcccttagaagaggatcaagtaacacagcttcttctagtaagcctgaaacaacgaacactgaaataagttacaccatggaagaaggtcgatagtgtgccgtgaaagaagaatccaggtgtgtcttatgatcgattaattttagtaacaagtctttgaattctttgtcaagcaatcatgtattatggattctactttatatatttgttgttcttattttcttttagttttgtttttacatttttcaaagatttcttttaagcatggtgatttttaataagagccgtctctattgtatatccaaatcagttgttctttgtatatccttaagaggagatatacttgttaattactatcacaaagttaactatacagatgattttgctataaaatagaagtacaaacacaaaaatatatattcatcggagcaagaaatgtgtacaatgtaggaaggtgtacatgatcaacggccttcatttatggtatttgtcaacacgttttcagagaattgttcagtacaaccgtcataagaaacagagcttttcaacacaaaagttggttgttggggacttgaaatactgccaacttgatcgttttcaagcatggagactgcatttgacatgatgggacgatcagctgggtcatcttgtacacaaagtaatgcaaccttgacacatctcaagaattcaatttcattgcaactctcccttaatgttgggtacatcagatcaagtgcattgttttctttccataatttccatgcctgcaataccattaattaattagttaattaactagagatagagaatcatatcaacataacacagagaccataggaaaacagtagactttggagaaagcaatacttacataatgaggaaggctcatagctaattctgattgggaaaatcttgtgttttttcttccacttataatctcaagtatgacaacaccaaaactgaaaacatctgatttttctgagaataatccatataatgcatattctggagacatgtaaccactacaaatgacacagtatgagagaatcagtttgttgaagcattcagataagtgattttctcatccaaaaggtaaaaataaataagaacttactatgtaccaacgactctgtttgtgctcgcctcgatttgtttacctccaaaaatctttgctaatccaaagtctgaaacttttggattcatttcctcatcaagtagaacattgctagatttcaaatctctatgaataattcttaatcttgagtcacgatgaagataaattagcgctcttgcaattcccaatatgatattaaagcgaatctcccaattgagcaactcacacagcttgtcatcttgattgtccattttaaacatggagtgacattttaaagttagaagcagtagtttatcaaaataaatattcacaaaaacattggctaaaaggactcaccgaatatgaatgtgtccaaactcttattgggcatgtattcgtaaagcaacaatttttcatctccttcaacacaatagccaacaagtttaacaagatttcgatgctgaagtttggctatcaacaatacttcattcttaaattcttctaatccttgagttgaaccactcgagagcctctttatagcaatttcttcttctccaggaaataagccctgcaacaaagttttgtagcaaatataatctgttacctttcagaatgaaaataaatgttagctagtactactgtaatgtcaaatgattaccttataaacagggccaaatcctccttctccaagtttgtttgcctctgaaaagttatctgtagctactagtatgctttccagagttacaaatggaatatgtatgtctctcttctcatcttctccgaattggtattggcctgaactcgaaagtagcaagtttgagacatgcctctcactttcatccgcgctgactatcctgtttatctgactgtttctcctaaaacctgaattgaaacataattatgaggtcaataacatactactaaaaattacaataaacagatagaaagttaccaacatattaccatctttgttggccatctttcttcttctcatatagtataagaaaccagcaatgaaaaagatgagcaccgcaatgcagacaaacaagataacatagaacttccaatttcgtagaagtcctttatgatccgaaacagcttgtcgaacaaagagagtctttcgattgctgtcaccgactccaagctgcaccatattcaacacatctcctttccaaattgaacaaccaagggtgtcataagcataagcagtacaagagcaattgatcaagcatttcgatttgcattcatctgaactctttgcttccagagattgtttattttcaggcaacagcataatatggatctccaaaaatgtatctctctcgttacccttagtactaccattaatcttctcacactgcaatttagtatctctaatgcaaccacccgaatagtccttcttggaatcccaatcaattggggactttggcttaaaccctttggagcaactgcaatgaggcgacgagttttcattgcagctaccatatgccccacaaaagccatagacatcacattgttggctcggaaatgaccaaaatacagtccatgggttaggaggcaccagattaaatatcttaacctgtcccgaaacatctatttcgagatgagatatatctacagaatcttctttaatggaataagtgaaatagctttcgtttgtattgttaaccaacttgtaatcatagatatacctgaacttcatcgtggggtaattgctaaaagtactactgctccaagttccactatcccaatacttttgagtcctactccatagtaacataaaagtgttatcttttggatcaatctcacaagagaaaaggcctggagcggggtcttcagagttcttccatgaagtgataacctggctagtgttggttattttgttatacctaaatttagccccaggcagccacacatgagttgggtaatcaaaactttcccacaatgattctgatggacttgttgtagcttttaagacaaggttgccatcatctaaaagaaccgcctttacagaacgagaggaatttctaatgggactcacatttgtagaccaaacaaccgtttttaactcatcgaagagaactaaattaccatctgagattcttagctccgacgcaaatgtaactggtttttctctgtttgccacccaaactgcctttcgagaacgatccttggagtaccatattccgaggtaataatttggagatgaacctggtcgaaagaatcccaactcgaatacccttttcgcagagacaatggtagattcaccagagagtgagtggtctgaagagattgtatcagctccaaatgagaactgggtgtttagaaataagcacaagaagaagagaaaacgcttcaatcttcggttggtttctgcaaccatggtagattgatcaaaaaggaaaaaaaaaaaaaaaacagaactctgggctcaaagatgcttgaactctgcgctttgtcttatttatttatttatgtattttatttaaggtacaaaagaggtgacgataaggaatgacaagtccacattgtccaccggttagatgaaagactatggtcgcgaaagaaatagtaaataattatgacggcctgacacacaaatcacactcagaattaacaattagagatcccttcgttggcccactcaacgaaaaacgaaagaaaatgtaaagaaagtaatccttgtgttgggagttagtaaagtcactacttgttaggtggagtcatcatcacgtgggtttccaataaccttaaataaaactaaccgggaaggaataataaggcgtgtcaaaattgcttgcctggctcatccatgacaaataacattgccacgtggtagcttagggcatagttaaaaagaaaaaaattatatagatggtcaaaattaagttaaaatttaaataatttgtaaaaataaaccaaaacaattatttatagtttctgaaaaattacaatgagcagggtataaaagaaaaattgtagttcgtttttgaagggttgcacacgaggagaagtctccaataatattagcctcatctaaaaaagcactggatgttggtatcttgttccctcattgttgggtccaaatatattatgagctcactgctcacatcatctttaaagtctacagtgctgcaacaccattaggaggatggattttttggatggattaaatgcacttttacttttatgcgctaaaatacaaaataatctattctatttttggtattgaaccaaatggtaaaaacacaacttggtagtttctgaaaaaaaaacaaaaattag

SEQ ID NO: 302224 - DNA, 1133 bp, Cannabis indica
agaacctcgacccaattacaataccaataaccctaacaaaaccctaacaaacctcaaatgtttgatcaaacattggagaattattttccttagtgaaaacacaaaacatggagagaaaattagggtttcaattccaaacatgcacacacacgatcaattagtgaaacacaattagaatcaaatagaagaagagaaagaatgaaagacagtatagaaaataccagatttttgtcaacattcacccaaatgataggctacgtcttcgacgagcacgcctcagcaatactcgagctccactatagtcaataacaggtacagatccttgagtctctcaagatttcatgtcacaattagttttggcagataatcttttatataacctctcttcgaatgtgtttctctctttcttttacaagctctctttttgtttctcttcttttctagtacaacaatcgcaagtaaagctcttctctccacaaaagaagccatctctctctctctctctctctaactctctactcacagaagatggatataatgcagcaggtagtactcctagtcttctcttctcatttttatagcactagggtacgttctgagtttgtggatctcttgtaactgaattttgtcctttctaaattttattaagggtaaaaggatgtgaaagcaacttgtgcttgatccgttgtagttttttcaattgttggtttttctattcatgagtttataaaggtatttatataaaaataaaaaatattagaataactataggcatataaatagtcatgtatgcatgtagaataaatttaaggattgaacatatacgaaaagaggatagatattatgtatctctagccataaaggaatataagcccccacaaaatctcgatatttagattttaaaaactacgagaaaaagaaattaatggggtctagatcttccaagctctaactaacccttttggatgatgtttattaaagaatggatatgagtcataaccctgatgatcaccaataccctatatataggagagagcttctattaaaatcttcgttataattaattgtcataatttatgaaaaataatgaaaaaataaaattaagtaactgttataaatattaataattatgt

SEQ ID NO: 302225 - DNA, 1908 bp, Cannabis indica
agcctttccttttctctatatatagccgatcctcttcttcttcttctctaagagaaatacaattttgaaatacctagtgaaagagtagtgcccacacagcaaacagtacctcaatcttagtttggaagactgtgaaggatccaaatccaagagaagggcattcggactcagatcttgattatactctgcaacagaaaggatttaagggttagagatctgagtggaaggagacgtattattccgctacacccaatgtaaggtttcttaactttatatgtgtttattatcgtttagaagttcatatttaggatgttaatcaacatacttgtgagtagatctaagatcctaggtaaaataattccaacactataggcgtttggtcagatttaacttatctcttgtttatgatttgatagttcattatcaaccattaattgatgtatgggcattgtgaaatcagagaattatgggtttaaaccctttagcatgtctgttcagtgtaaggcatcatatgctctttcccatgccgcattaaatgtgtatacagtgatttagcctcaggcaatgtgctacactctgcctgtcctttcgtatccttctctgagtcgaattcactcgcagagaagaaaagataaaaactacccatcgtctaggtagaccctctcggagatgacaaatctaatattattcttttagaatgataaactctaggagtgattaagatggggtgtctcgtagtgtgggtcccattgccactggcttcctcctgaactagcacgtattttcggacaaattctaggcaacatgatacttactagttttaatggcaatctggatgaattcctcaccaagaatctatgataccaagggtctgatatgtagtgtgaccttattttctaaaaaatggtggaaaaaattcaaagaaaaaataagagagacaacgagggcattaaaaaaatagaggaaaattgaaagggccatcggagtgtttctctgaaagttgttaaaaatagtgaagtagaacaatgaagatggaagtaaatgagaaaataaaaaatgcccacttataatctgtctcgcaagcactgtttgatcattaatgatgatcaataaatggtgattaacacagatgtcagttgaaaagattgctttaattaaccacagaggttttctcaaaaataaaaacttactcattacgtataaaaggatgactcacttcccaagacagtgagtaaaaagtcatttcaaatcaaaagtactttttaaggggtaatttttatagtcataattcgaacaatagattatgggtctggctacatgatgcgtgtacaataaaaggaataaattaactcggttaattaaaagactaagagtcaatagcctccttgcaatatgaagctcgtacattttctactctacataagctgatactttcaacattaaatgcgagatgctcattacactcacaatatgcaactgaggaagctaagcttgtgaaggcattcatgaatattactggtgtcactactacaaagtcagaatacgcaacggtcctaaaaacactttttttgggggatcgtcgctaaaaaaattaagtaactgtttaaaagcattgggaaaaattagtattctcgactgtttataacagtaattacaggaatatgcgacgatttaaattagaattcgtaaaatttattgggcccttataggtgacgatttaaaaccgttgcctatagtataggcgacggttttaaattgtcgggtataagagcccaataaaaaatcgttacctacttctcgccacatttcccacgtgtccacctacctttttctatttctcacatgcccacctattttttctcacctatttattctctatttcccacaccctaaaacgaaaaatcttaa

SEQ ID NO: 302226 - DNA, 3819 bp, Cannabis indica
caaaagccaccaagtcctcccccattgttactcatcaaaatcaggatatgctgcaaaagccaccaagtcctccccccattgatacccatcaaaatgaagatatgctgcaaaagccaccaagttccttcattgatacccatcaaaatgaagatatgctgcaaaagccaccaagtcccttcattgatacccatcaagatcaggatactgtggttcctgatgtgccgaatcataggtacaaacatatgctttttttttagctatcttaatccttaacttgacacaacactcacaacaatgctgtatccatgggagttgtttaatttaagttgctagtgtttatgtttttaatcttttctctctcaaatggttggaaatgttatgaaatgttatttcattgattttataaaggtgtgtttggaagtcactgcgtagtaattacacagtctagcaattaccttcaattacatccaaatttaattacactatggttttccaaacgtatcctatattttaaactacaatagttagtaattatacaagaatataatattttttagtacgtaatatctatgagaattgaagaatgtaattgcatagccaaacaaacatgtcaaaatgtgtaattacctctaatcacacccaaatccaattccacctggctttccaaacacgccctttagggtaagtgaaagttctgcatttgtaattgaaacgtcagggcaacattcataaccattttacatcttttggttaggcagttttttttttgcttattcaaacatattttgaaaactttcatattaatggagttgtgtttttcttgatatttcagtgaggaagaagagccgccgaagcttgagattactgaaaatgaagctagagccatacttgaagttattgcatccactgggaagttctggtatgtttatatctagaccttggaactggtgacttgctcatatgtttttagtgttctgagttttttgtatgcttagtaatcttctttttctatctggagaaggcaacccgaaatatgtagattgcgactttagccttttcttccagaagaactaaactcttttaattgctttgttaagcagtatgataactgttgttgaaacaaccaaagataaattttagaatttgcctaatattttggaagtcgttgctaatttattgttttgcattgaagccatataatatattgctgttctaacatcttcttgcttcatatttgttattttaggcatgagtgggacaagttaaaggctaccttatcctttcagctgaagcaggtatggggaggtatgacggcatgtgggtcttttgttcgtagtttatatgtaatgaataagtgtatagctaatgtgtctcttcacctctaaccatccaagcggattttttcttttctttttaattttccccttttctataatttatgaaggttttgttggagtatcctgaggcgaaaatgacaattgaagagcaaaatgcttctctaagagaaacattcaccgagctggtaaaaaggttggatgaaggtatttcatttccttaatctgtattttcgttcattttgatgtcgtttaaagagtcttatatagttttagctttcaagtttcaactggaatatatgaactgacattacaaaatgaagagtgattcttgccacttggtccccaatttgtcaacctttgaaatctttcttgaccttgctgtatgtttttttttttgtttctgatattaatagaattgtataaatcatatatccgagatgttatctcaaatgatcagacatgtgatttgttcttaccaagtctaaggttcgattatgttgtgattgtaaacaccccctccacaaatgagctctttaaggaattgatgataagacccaaactgatcgaacagtaacaaacagtagagaaagagcaatagagaaacaaaccagaaccagcactgtagtaacagtaagggccctatcgaaccatgatttcgagaataatctcaattcttgcataacttctttccttactatctcactcggaaacccactctcaatacaatgactcgtgtacccttttttatttaatgtcttataccatattctactatcttggggtctaatcttacgttaccagccgccctaatttaacctcatcatcaaggtgaagtgcattggaactaaagagggagtcccgaaatgcaaaggtgtgtcctttgtcaaaaaaccaatcgaccaaatggaggcttgtagcgactgaatgtttgggaatctgtgataccatattctactatcttggggctctaacaattgatgatcaagctttctaatgaccattaccaatacattaaataacatgaaaaagagagttgttggagtatcatttctttcctataatgtgaaattgaaagtggttcttgtctttgtttcaaaacactgttatgttctaagcaacattaaattcaaattgccatgctgttattacttaatcatatttcttatatcgcgaaggtctttttgtgtgattaacaatgtatgttctctacattttcagctctccatagctttgatcaaggtcccccatttactcttcagaggctgtgtgaggtacacttgctttgtttaatgtgttgcaaattaacttgacaaaacactatcttttaatggattttgttcaaagcaagtatgattttgatttttctatttcaactcatcagatcctcttgaatgcccggggcatttatccgaatctctccaagcttgcactagcactcgaaaaggtactttggtttaacatctgacattcattaacttttcttgttaaactacatagattcacttaatatgttattatcttattgtaatttgtgttaggtataatgttttcgaaaaataaaaaataaatctttcctggatgttgaataatcatatcattagtttgtacttcggctatttttcggttgtgtagaatctcctagtgacatctatgcttacaatctccaccgatccatatcctcaaccaaaggcgatattgccagagccaatcgaaccagaaaaggctagtgaagaaccaccgaaaatggaatctgattctgctgctgctgccccacagaatggggtagaagactcgagtggtgataaagatgaagtaatgacagaggtagatgaagctgatacagttgacaacatgaccatcgacatggaagccttggagagttttgttgaatctaccgaaacaaacaccgcacccccgaactcataattcttagtttccattactctggctcgaatattttattaattctaggcgcttaacgatcggtacagcaatacaaggtattcatataagatggcaaattttttatggatatttatttcttctatggccatctacttgtacaattcaagttcattaacttgaggaggatccatttggtttccttaaaacattttttattttgtgttaatttttaacaattagttttgagtttatgtaactatatatatatatatatatctctatgtttagaggctatatataaagctaaaatcttggtgttgaggagatatgattttagaagtttcaaacttgtgaagcaagtaaatttgcaatcttcttttcatgtataaatagtttgactctatgaaacatcacatggaagcatagcctttccaaatattgtgtcctacattgataaaagaagagggagttgatcactttataaggctaaggaactactctctttgttgccaataattacaccatataatgaaatttttaatttttttactttatattgtgggatagaatttttttt

SEQ ID NO: 302227 - DNA, 2547 bp, Cannabis indica
taacaaagaaatatgagaggccacgtgtcctgttactataatttaatatcaatttctacacattttaaatttaataaatataatgtaaaactgatttaacaaatttgatattaatttgtttacacaaagaagaaattgatattaatttgtttaaaccgattaatcatattaataaatacttttctaatcaaaggagcacaaaatttagaaaaatattaatttgtttacaaacataaagtctttcaactttaggaatttatccttttatatatagaaattagaaaaacaccacaatttgtattagttcacatttcaaggtcggctttaagtttaacatgttaaagaaaactataaatttaaatgtttcatgtttgattcaacgaaatttaatagggttatttatgtatatgttaagataatatgaatataacaagcaaattaataatcaaaatatatataaatgagagaatgacataagggaatgtagccctcttaaaacaggtgtattatattttaatatgttagagtaccaaatgttgttatagtacaatttctaacacgagtcatagattgaccatatttcgtttgtgtcacgtttagtgttctttatacatattatacacatacacttatatatacgtgtactatatacaactaactatatattatattgtatggggaagtagctcttttatgacctaaaaggattcatttttttggtattaacacacatctttagttgatatctctagaaatcaacagaaaagagttattaattataactaataagtataacacggttaagttaaagcaaactattcaattatatgcgcgtatttgcgttcacaagtcaaatctttactcgttttcatcaaaaaatattgattatttctttatttcttcatagaaaaatatcacaccctcttaatctttttctagaaataaagaaaaaaaaactagactttcaattcgttcccatcttaaattgaaaaactcaatttagtcttctttatataaaagacccctccaccaataattccaagctcatcacaaaaattatctcaaactttctctttcaaaaaaagaaaaaactttgtcttctttctcaactcacaaagatgaacaacaacaacaacaaaacccaagtttcatatcccacatcagaagaaatcaacccatttcaccaaaccaacccttttgtatcatcaccaccaccaccaccactaacaactaatcaccaaaacgacaccgttccagctgaaacgacaaacggttccccaaaacgacaagagaaacgagttcattttcaaggtgaagaacaacaaaaaggttcttcttcttcttcttcctctgttccacttccaccccaacaacaacaacaaccagaagaatttgtttcagatgggagtagcagtagtagtggagagaaatggggtacgcacgtgatgggtcaccctgcagttcccacgtgccacccttccaacaagaaagcagcgttgtggggtggtgcccctactgatgacgaggctcgtcgggttcactacccttatcttcagtacacccccattgaaaaggctcccaatagtactactccgatggactctatgatccatgccttcaattcttggagcaacaaggctgagtctttggccaataacatctggcataaccgtaattaactaactccctctcaatctcaaatctctatatattttgttttttttattattagtatatagattgattgatggggatctttatttttcttttgagttcgagtaaatttgatgtgttattagatatgttattgaatagtgttgttggtatgaagatttgccaaaaatttaagagtgttttgacttagaatgaaaaggaattggaagaaataggtaatagtttgagattctctatttaacaaaatactaaatattagtagtttttttatattattaattaggctaactagaatttttacagtgaactttgatatttatcaaattacgtctctgaattttttttagctgttaaaaattcttcttaaattattgagaatgttagatttaaagacaatttcatttaattttactaattctgtgattatctatatacaaaatcatgctatctagattttaatatctaccaaatcatgccctcaagtctcctgaagtagttcaaagagtaaaaatctgaattatatttattaaattaaaatataggagattcaatatttaattgaaccaatagtaatgtaaagaggtgttttatcccaaatcctcttaatcacatgtgaggaaaggatggggtttggatttgaaggtgagttggaccctacagtatagtagagaaaggaatggttctctcactataggaaaaaagagatcccttcttgcttattggtgttggacaacttaatgtagagcaacgctatacatccctttccggtggaaacaaccatcgcggtctaattagttacagtcctctggatcaatccctaggcgatgaatgtttccaccgggatgaaaagcttttagcatttctcaaatatta

SEQ ID NO: 302228 - DNA, 1220 bp, Cannabis indica
tttttttaacttttttttttattctttattagtatgaagaaaatgtagtccgagcacatatatattaatcataataattatataaaaatattgggtgcaatatgatttagacgtaatggcaccccaattaaattgtttgttgctttgtgaagaacaaagattctgtcagctaaattttgtttatttgtttatttgtaatgttactacaaaattaagaaaccaaacaaatgactgaagttttttgataaagaacaaataactttagttagtaaaaaaaaattagaggagttatatatgtttgcttgttgagatttgaagttccttcttttaaaaaaatgaatgaaatatgatcatcaatcttttggcctattgtaattgcaagtaaggtgattttgtctttgtatgccttgacaatgaaattttgtattctcccttctatgttttttttttacttggaatatagataattttttcatccctttccaaggttttttttcttttccttttttgagataggattcatccttggagttactatgcacattttagttttactactacttttatcttcagatcacaactgcaaatgtaccatagtagttaatctcagctagtatagctcatttatttacagtcaaaaagttgagaaagtacaataccaaaacttaaatacacaaacttgaacaccactactacatgatgctgtatagaataatctttaaatctgacagttgttagtttacttgtttaaaaccctagcaagatgcaatttagtgttaatgaattattaaaagaaaaactctaaaataataaaagagactttttggattttcttgttgtggtttgcataggtggtagtagtagtagtaggagtatgataatgatatcatatgagcatgaagtatgaacaatctctatccacagaagatgaggctctataaatacagaccgggaagcaaaacccacatgttgcagtcttattggacaggcccacaaggcagcttttcatggacaatactaggcccattaaatagtcatcttcacttcactacaactgtaatgtatgcaaaagaaacagtagtagagaagtgtacccaagtaagtttgttcattacatttgggaaatttgattttcatacctaaaaattttcaaaattttttttttgtaaccaataaattttatactatgaaaaatatgcctactttacctaaatcccaaa

SEQ ID NO: 302229 - DNA, 2176 bp, Cannabis indica
aaaaaaaaaataaaaaatccctttttattgggtgatcatgatacttccaaaaatcaaacaagttttctcaatgcaaaattcaaatttctctaacagtgatctttagtctttcatctacccatgatttgcaaacaaaagtatgaatctgtatttaattcagaatactaagcccctgttccaaatctcagaagtccaacgaaaagtactattttaagaatatatgtatgcaaaatactagtagtacctaacacttcttgacatgtggtcttacaattagttagcgatactctttaaaagttattatattaaactctaatacttaattgaccaatagcaatattaatacataaaaattcgttagacaccactgatgcattttagcatttctcatattaattatatattttagtaccttttcttttagttattatatcacatcattaatggtacctagatttatttccattttaataaagaaagacttattttttgagagaaaataaagaaagacttgtacctaattacttaacttattttatggaatgattttgtagcaagtatccatgcttatttaatgagcttaaagaaagccaacatcccaaggtacgcatacgtacccatgcattttttgtgacgaaaaaagaaagaagaaagtaccccactaataatacacatatattaatatttgttatctagctatatttaattaatattaattattgatttaatgaatagtttctagtatttgcatgttcggattcccgagtttgtccttcgcatatcttaaattttcaaccaggagaagcattcatggctcgaaatattggcaacttgattccaacctttgataatgtaattaatttactaattattaattgcaattaagtaatcaaattttgaaatatcaattattaatttttgttattatttgattactctgtagttgaaagactctggagttggatcaattattgaatatgcagtcgaaaggcttaagatagaaaatattttagtgattggacacagtcgttgtggtggcgtgaaaagacttatgtctcatccagaagatggttcacctcctttgtaagaataagttataattttttttattataataaatttaataatattatgtgatgtaaattcttctcactcattaaattaattttattaacatacattaaatctacagtaattttattgatgattggatgaacattgctcaaactgccaaaaataaagtgaaaactgagcacaaaaatttgtcatttgaggagcaatgtgaaatttgtgctgaggtaattaataaaattaaatcttaataataattaataaaaaaatatattattacattatagacattcttgactgtagcagtctaatatatcattgttgaataaatatttgaatatacaggaagcagtgaatgtgtctctaaacaatctctattcttatccatttgttctaaagggagttgaagacaaaaagatagcacttagaggtggatactataatttcgtggttggaactttcaaactatgggatctttagttatcaattaataactaaggaactaattaattcaagcttcctacactcttttacaatatttgtagtctttttaagttactaaatttttatagtgaatgagtaatatagtataaaatatgttgtgtaattgttatataattataaattttagctctaaataaactacaataaatgaaagtttacatttatttcatgtgttagaaagataaatgatgagatagatacgattgaaatttaagagttcattattttttatgcagtattatgtttgtgtaataaccaaccaacaagttattataaaaaaagggtaatttgtggcataatctccttaagtggccaggtacttgcaagtacccccaattttaaaattttaatggtaaaactttctaaactcaagttctgttagcacctagccattttctttccatctttggctgttaactgccatagtggaacgtatacgtggacacagtgtacacgtgacacaattttattggtccacgtaaataaatatttaaaaaaataaaaaaaaataattattttaaaaattaaaaataaaattcttaaaaattaaaaaatttatttttatatattttttttctttttctttttctttcttcttctt

SEQ ID NO: 302230 - DNA, 2144 bp, Cannabis indica
atatatacatatatttataaaattatttatgtagaattagtaattttattccaaattgtaatacatgtataaatattatatttactcaaaaataattctattatgatataatattaatgattgttttatgtcattgttgttacattgatatttttttatattttgaatttttttctagtgcaattttatttagttataacctctcaattagaatataatttgcttagtcctaagtatattcttgaatagaggttctactgtatttacttaattattacattatatatataccttttttatatgtaaattttttagtaatgtaaaatatagtcccatataagtatttttctattggtttcattgcacttggtgaatgaatttgaatttatttttattttttaatttaaaacaatagacacccacaatatataactaaattaaaagtggatagtcttaaaattaaacccaagcaaccatatataattaaataatttaaagctcacaaaagtaatatgtttttttttattatcatgttactttatatttatatatattgaatatttcttttaaaaaatattcaataaaaatatatagcaatcttattaaattagaatttttatttataataataaaaatataaaattacaactatatatatggagacacacaataagtgagttatgaatattgtttaataatattaaccattaatatatgataaaaaggaattattaaaaaagaaaatgtggttttgatttaattaattaattaattattcgattaattaataatcaagcttagttcgaaattattatatttaaataaattaattacagaattaaatgacaatatgatcaatatgcaatgatgacactatatgcatggtagatcatgatcatggcctattattattatttaattaatttcatatgcatgcttataattaattaattaatctatattaattaatgatttataattaattatttaagatcaaacttagctaacaattttcttttacaccaaactgatgacctgtaagaatcaattatccaagttgtctaagcttaatttccatcatgtcaaactttcccatttggaccactctctttccaaccctttcaattaagtaatgattaattattacaaaatatactatgatataaataaaataagagaatcgctaaaatatattagaggtgcttaatatctttctcagtgttatatcgctattggtataattaaatatcttccatataacttaaacaataacttttagaaaatatcgctaatcaatcatacagggtgccacctatagaaggtgctaggcaccactggtgcccaatagcaatgcttataaaaatatatgaatttttctatttttacacctttaaataattttttttttactattttttactaaaaattcacatagcagtcaacagagtaacttaaattgcaactaaaatacacaaatagcaacccacatagaaactatcggagcaatccaaactataaaaaaaataatatataagataattccgctgaaataaagttaaaatgccctttttgcccttttcataatagtataataacctagttaaatttattaggtctcttttgctcaattaagttttgtttttcccaccaaaaaaattaaaatcttaccaatatcagagtatgattatataaaaaatataaaataatttacgatataaatatttaagtttaactatatcgattacagataaatatttaaaatttaatttttgatatggtaataatactttaaaattactcatcagataaaaaacaagagtatattaggtaaatttatttcttaattatttattttattttcttatttttttaacattaattaatctaatattaagcgcaataaatgacactattagtttcacttatttaaacattaattaatttattattacaaattaaatacaatatagagatatattcttctaatataatacaatattattacaaatttaattaatttatttcctaattaattaagtcatgaaacattcgatgaggacagagacagcattcttttttgtccaattaattaagataaataaataaatatttttcattagattgagaccttactaaaaaaaacc

SEQ ID NO: 302231 - DNA, 1719 bp, Cannabis indica
tattattttaattattattaattggtgttatcatcttctttctataaaataggtttcaaatatccattcatctccatcacttcaacacttttatttctctctctctctctcaaccattctatagcaacacaggagtttttacagagttatatgatagccagagaatttcaactacacatccaagattttgtaacatagaaaaataaaaagacatggccatgtttgaaagaggagatgatgaactcaacctaaaccttgaggcaacagagcttaggctagggttaccaggctgtgatagtactactacagcaacttctactactcaagagtactctgaaaacagcacaaatactacaaaaggcaacaacaagagatctttgccttctgatgaaacattcaaatctaactcttcatcagaaaccaaatctttcggtcatgaaaacccttcacccaccaagtaagcaaatattctaatactatttcacatgattgtcttcttcttttttaagagggaattttattaagttatactataattgaccaattaatattatacgttacaggacacaagtagtgggatggcctccagtgagatcttaccgtaaaaactgcttacaatcaatgaaaaaagtagaggagagtggagtatacgtgaaagtcagcatggatggagctccttaccttagaaaaatggacttgaagctctacaaagggtacccagaactccttaaggccttggaagacatgtttaagtttaaagttggtgactttaacgagagagaaggctacaatggctctgaattcgtccctacttatgaagacaaagatggagattggatgttggttggagatgttccttgggagtaagtgttttaattttttttattatcattattttatgcgttgtgtgtgtatatatatttgattttgttattattattatgaaaaaaatagctaatttggttctttaatttctttttttttacagaatgtttacctcttcatgcaaaaggctgagaatcatgaaagggtcagaagctagaggcttgggttgttctgtttgatgaaatataatacatattgtcatatataatatatatattttgtatgcacacctacttacgtgtccagacttgactgggatctcatgttgaagaggaaattatataaggctccatcttcatgaaagcttgggctctccgtggagatcgaagactaattaattaatttcaaatcttgattattattattatgtgtaattttgatcatcaaaaggaatattttacatgcatattcctacaaaaggaagaaaaaaaagttgaaatgcgaagaagtaattgtcgcttgtatatattttgttaaatcatatatatgtgctcgatcttcgaaagcaattactgtacagaaaaaaagatgaaatgagttaaaattgaaatggagattaaaggagaaagaaaaaaaagaattcgactttggtttctcccagatgtattgagctgtgtttattatataaatatatatttatttatacatatactaatcaaattcaacagatcttctctcgcaaaaaaagagaagaaatcagaacccatatatttaaattgaaaggctaattactaatgtttttgatgaattttgacatgtagtaaattgtgccgcctgaacttttttttccgttaaaaattctccccgaactattgaaattgttaaatttaagga

SEQ ID NO: 302232 - DNA, 3632 bp, Cannabis indica
aattgtcaattttgaaagaacttattgtcaacctctttcagatattaatctatctgatttagaagagaagaacttgtattagtatctcaattttaattcaaacatgggaagcatacatggtgatttgtaatgattcattattgtgggaagcctatcagtaagaaaaatagctgaaacaaaagcatcccaccaaaacttaagaggtattttggcttaagctagcatacttaaaccactatatgtgacatgtctttgtttcctttctatattccttattgtggatgagtatgtgtgcatggctgtctaaatagaatacttaattttttgtaagattggttgtaattttctatactctcctcgccaatcagttttcatacctttaattttaatgttaaattgattctcaacaaatgttttgaaggttagaaagacagggacaacttttgttttagttttcatagggtaaatccagctgtatttggtgaaatcatctacaaacaagatgtaatacttataaccttcaagtgtaagatatggcgagggttcccaaacatcaaagtgaatgagctaaagacattctgttgtttttagaggaacacttgaaaaatacattaaatgatttttaccatgttgacatgcgtcataaatggatagattagattttgaatattttttattcagggaatgtaaaattttatttataattacatgagatggatgtccaagtccattgtgccacaatgcagaaattcgagtggactccttacatagtttataactaatatgataggtagaaacattacaaaattgatttgaattgaaagatacatcacttttatttaaggctaagtgaactgagggagaaggaaaattccatgagcctaaagaaggaaaagaaaggttatatagaccttgattaagtgttccttgaagaaaaaccttcctcgtgacgttatccaacacaaaaaagtgagaagagtcaaacaagatattaatatcattgtcaagagtaaattgagaagcactggtgatatttttgtgtacggaaggaacatgtaagactttgtgcaaatgtaatgttttagatgtaaaaattgagcaagaaccaatagcaagaattagaagagaatcactgttacctactaccaaattttcctttttctatgtattccactgcctcacttagtttttcagcatcagacacaacatgatgtgatgctccactgtccaggtaccattaaggatcaaccactgtggttgcagatgcaagaagtgcatgaggttcgtttgaagtaagttcagttggagtagagtttccttctccttgataactcagatcaaatcggtgatacattttataccagtgtaaccaaattttccacaaacttgacaaattggtctatttccacctcaatttttgttgtagtttgtcctaccacctttgccacgataagcacctcaaccatgactagaattattagagttagaggatgcaggcgatccttttttggaggcatagttggctataagattgtgaagttccaaggtagcaggggaatgtcattgctcaagtcaaagttcttgagtttgaagcaagaattaaacatcttgcaaggtaatgaattattttgaggtaagagtggcaatagtagagtcatattcattacctaaacctccaataatgtagaggataagctcatcatcactaatttgatgtcctcctaccattagagcatcagccaggcatctcatcttgaggatgtattcatagtttggtgtagatcctttctttgtcgattaaagcatgcctcagggttgaagaattcttgctcaagatgtattggaaagaaattgtatcaacacattccagagttcaaaagatgaggcacattgagctacatgtcctcgcatgaattctaagatggaattgaacaactagctcatgaggaattaatctagacacatccagtcattgaaggcatgatttgacactactctcgtggtatcaagaggatcaagaatggttacaggaggtcaaggacgagaactagtgagaaatcctgcaagtcaatgagcacgagcagtggaaagcacttgagatcaacagtacacctaattagtgtgattgagacatagattgagagggactaggtgatgttgaatcacaagctctgctacaattggaggaagaagagtagtagcgaaagtcgagcttttagatcgtggaacagaagaggaggaggccattgttgagagcttcaagaatcacgatgaacaaaaaaaggaaaaaaaatggaaccaaagctccaataccaagttgagaatagtatatgagatgaagtgagcttgagtgaaattgttacacaactttgaacgatgaattatatttatatgaattcagtgtatacaaggcatgaaaaagaagattgttatttaaaatgattggccagatgtgaagagtaaaaaactctatcctacacgcacaactgacataactaactaactcctaaccatattcactaatatggcctaaagcatgaacaacaaagtttatcaaccatgtcatgaggaacaaaaatagatcaataagaatagagaattgataagagctaggaatttaatatcggccccatatattttaacttaatatttattgtgaaaattgctaaatacttataagctgttatttcatagtagtaatagacaccattaatacctaatagtaatgctcataagaatatgctatatttttactaaaatatatattataaatatggctcaatatatatattttaacttatgaaccgttcttaaacaaatgttcttttattttgataattttcatatgcttggtattgtaacatttatcacacagataatgaacaaaattaggattacttgtcttcttctcacaaatctccaaaaaaaaaaaataatcaacacctttgattgtccgtattttcccctagtcatgacacgtggatccccattaaaaggaagcctcatgaaaagggtcaaaaacatcattggtgcaatcacaaagaaggacccgagattgaaatgcctaaatgatttcagaaagttcatccaatcggtctaagtcagcttcaaccaagttatagttagaaaaagtcaactatttggtgaagcatcagtaggtcggtaacgtcagtgaagccaacttctcaccatggtctcaggcccatgcctaagagtcttgacagtaagctacttcaaatcatgatagttttcattgaggttattcaagaatggaatccagtaggagtgaacaacttcctgttgggattttatgccctaaataaaactcatttcaatataatttaatttgttatcaatagaagattagaagtcatttatatttacatgtagtattcatgctgattgtttaatatacaatttctgttaaatccagaacatatagttattcacaattacagtgatgtcaacacagtggaaggtaattgtgattatatgcttcaaaagataatgtcctatgattcatcagtgtacaggattaacactgatgtgatagtcagcgataaagcttacttttaccttggataagtattatgttctttccagaacattagcaaagtatgctagtatcagat

SEQ ID NO: 302233 - DNA, 1538 bp, Cannabis indica
tgcaatcacaagccatacaactttcttcaggtctctgtaatgttcataaagcagtctaattcattttctaatttgcaggagcaacttaaaacctctaccgcatcacgtggttcactgacattttcagaggctccaagccttatggttagtttgtaaaatcattttatattttgttctggttaaatcatcactggaactgcaagcaaacataaagcgtatttgtggatactttcacagttgtatcctgtttgttatttttgcataatggttatatcgttaaattatagatgaaatttttaatgtttgactcagaatgggacattgaacacaaggattactttaagctagagttttcccaatggactttaagccccgaaaccataaaagttaatgcgcatatatgaacacgtgcgcacacaaacaaacactgtccaaaattcacatttttcatcaatttatttatgagcagctccagttttcatatattagtgtttagataatcaggtcactctttcctttgtcatatcgtagggtgaaattggatttattttttaaaacttgttattttatcactgtattgcagggcctgaaagacattacagattctttatctggcgtctattctgaagatggtactgacaagttggagaaatcatccaaaaacctgataaggtttgaactattacacttcctctagtattatgcttgggcgcgttcatgcacatcaatgtgttctcttcttctacatattttctacctttttatataactatataactctttggctaccttaactagaaggcctttataattggcttttaatgttgatagtttaatttgtgacaaacatttttaatgcgtaaaatattgaccttacacgcaggtccgtatcaactaggtgttgacaacgttctgaacaaaagatgttttccatctcctggtttatttttcttgcatatatgatatgagtataatttttttattattatttcttttatgaatttgtgagatgatgcagcttagtatctcaatctgaatctcacgaagaatgaatgtacacctttaaaaataaatacttaaaaagattataacgaagtttgttgatggttgtaatgaacttcaatgctcatttgcattagtaggaggcgtaatagttgaagtattccaggtcctcattcattgatgcttatacttgtactaatatatcttttcaatgtatttagagcaagttgtgctatgacaacctttttttttcattattatatatttgttcttaattaatatatatacttttttgagtatacattgtgatgcctacttccatacattttttttaatgcaaattggaaaagaatatgacgctctagcaaagctgttcccagtcatgttagcagattgttaaataaaaaataaagaaacattgtttaaaatagatagaagcttacgacagtccttcaccactacttcaagaggtgaaactatggtgatgttacttcgaatagcttggacaattgagagacaatcgaactcgagttcaa

SEQ ID NO: 302234 - DNA, 998 bp, Cannabis indica
taacttggatattacccagggtttccagccacttcattcccaatataacattagccctcccaattctatcacaacacgaagagctccgagctccaaagtcacttaagcacacactccttttgccttgacccaatcacttgtactcaaaagaatgcaatagccattagtttgagtaattggaatacctgtggcttctaccacctcaagagaaatgaagttgtgttttgccccgctatcaatgagtactgccactggttgctggccaattttcccaaccagcttcatggtgtgcactgatgagatttcaaccaggaagtttaatgagagagtcgtcggagtgtcttatgttacttcggcttcgtcagccaccagagatggtggtggtgactccaggaccgacagagactcatcttcatccacaaacaataatacttgtaacaatttttctgatattcatgccctcgatgatatttttttatcacatattaaacatagccctttcattctcttttcttgatattttgtctctgacatttggcacatagttggtggtttgctggttaaagtcgccatggacgttagtggtggagattgcaaagaagcagcggtaatcaatatgttattgaattgattagggtttgggcggattgggttgatggggcttaagttgggtttggtgggtggccctgtttgacccgtaaagtgtaactgatggccctcctcaatacatggactatttccattatttgggccaagcccaatgggttcaacatatgaagggttcccttaattttagggaaatttacatagtatgctaacttttgctatttttttacaaaaatactgccaggcggtattttttacttttttactgtgtttttttataagtttcatactgcagtatactgtgttaaattttcactggtgttctactggtgttttattggtgttctactgtttttttgagttgttctgttttgtgttttactggtgtttta

SEQ ID NO: 302235 - DNA, 1860 bp, Cannabis indica
acttccgacattcccaatgtctaaactatcatcccgttaaactaaaaatactaagatgtgattttaatagccatacaccgcgttccaatgttgctgggcaccaaaatatgcaaaattatgaaatttctatatgtaacataaaaatgcattctaaattcaaataaattatcataaataattaattcaataccaataaatgattttcataattaaaccctaattatctactaatttccaaattaaagctaagcggtctttacacttagtgtactttggatcatactccttccttggcttatttgaagagtcgttgcggttattactcttgccccctcttttgttctgagagtggctcacagttgattccaaaacctcgatttttgcatgtttgggagccacactggacccgatctgtgctaccatgtacctgaaaaaattgttctatgtaggtgcgagaacatgggtagtaggtccgtaaatagttggggaaaattgagttcctagaagagtcaaggctggagtcgaaacttgaggtgcgaagctcggtgtggccatggaaggggttggagccgaaggaacaccaaagtcttgtatataagcaccctcaaggttaataataccctaagcctttgacataaactcacataattttttgactctatttctttgcatctctccccataataaagaaccaataaccaatctagattggagggccatcgatttcacgtcgtcactgaccttagtcttggtagcagcctccattatcctttgaataaaagccttcaggctttcgttgttttgctgtttgacattggtaagagaaccaacttccatgtaattatcacgcgcagtgataaactatttgtggaaggtcgattgcaagcccttctagttatcaatcaaacttggagccaacctcttccaccagtcttccgcagacttggtcagtgttaggaaaaaaaaaccacttggcatcaatgctgactagtgcaacttgcatcattttattgtattttgtcaagtgttctcgcggatcggtctttccctcacacagctcaatgtggggcattttaaagtttttcaaatgtgaggtctccgtgatcctccttacaaatgaatctgggtcctcatcttccgaattcgagagcgctctggtctgttttttaactagcttggttaaagcagctatctattcctccaacctctttgtgtcactttctggaagatcacatccccttattttatcacttagatggttcctgaggtcacccttatgtgtccttgccttctcacttttgtacttcttgtacttggtgtgtaatcgccatcgaaggtttgcggtagaccaactatcctcagaatgtcccacaactgtcagtctgtcctagttgatagaatttttagggtggttcctgcgacccttaggcctaggtactctctgtttggattttataccctaaataaaacacatttcaatacactcttattagttatcaatagatgattagaagtcatttatgtttacatgtatttttcaagattatggtttgatatacaatttctattaaatctagaacatcttgtaattcacaattatagtgatgtcaacacagtggaaggtaattgtgattatatgcttcaaacgtttatgtctcatgattcatcagtgcactggatttacactgatgtgatagttagcaataaagtttacttacaccttggataagttttatgttctttccaggatattggcaaagtatgctagtattagatgtatggagtatacattggactgggaccaatattgatcttggtaaagatactataatcttattgttgtatctttctcagtcaata

SEQ ID NO: 302236 - DNA, 1359 bp, Cannabis indica
aaaagattttttttaatgatatccaaacactttaaattgagtaatgagtcctttaattgtggttgtttttgtggaattgactcaatgaattaatagctgtttcaaaatttgttgagatttatggagtttcatctcaaaattaattggtgatgagaagagtagctcattttaattggtgatgagaagagtagctcatgttcttatatatggccatacttttacatttaatttatgtgggacaatgttcttcaataaaattactgtacaactgcattgaagtgggcttgatttgaatttttcagattggtctctgatgatcacaactgctgtctacagtagtattctctctaaaggaaatggacgttggttacacgacctaagcaagctagaccgaacactcgaaaaagaagttcttcctccatcgaagagaaaatggacgaagggtgaggaggtattcttcacagagaagagcttagagaaatttcaccataattgaagagggaatgtggaggaccttctttttacatgatttacacctttttgaatgtgttagtcaagtaatgttaactgctattatctgtgtctctcatgttatcctataccaaaccaacaagtcaagtgactatcaataaatttatacaagtaacattaataatgataatatattaataaggtgtcatgagttttttttagaataaactatttatttatgtctaatctatatatgttaaatttggtatttaagaacagttcaagccaacaaggcactttgtagactctcaaagaaagctgattgtagcagagcttgtagatgagccactgacccaccttttcttttactctactttcattcttctattctttgctcccaataacactaatagcactaagaaaaaaactctatacctaacagttcatagctaactaaatcacctatctttatagatatcaataaattaatactaggagaaagagtgacagaagacaatgaaacatagcaaacactcaataacaaacaatattttgtgcaacccttttcagaaaagaaaagcataatgatgtcttaaactagaaaatcaactgagaagcatttcaaaacaataacaaaagaaaattactctatcatatctttcagtatattaaactgagagtgttgaactgattttggggttactgcctctgtgcttttggtgtaccagatttcatcattgcagcaaactcatcataacttatttttccatcctacaagttcatgaaaagaaattgagtaaataagagcaataaactatttggaataaaaacaaggatggtctcttatcataccttatcaatgtccacatcttccataatggcttcaac

SEQ ID NO: 302237 - DNA, 3623 bp, Cannabis indica
ttgccgagccccaactcactgcttctccatccaagcttaatccttacctacacatggtacaaactgatgagtcgacagactcagtaagatatgcatataaaaaattataaaattgacttgtgtctaggtgcccatacacctattcacaagattaaccaaatgattaagaatgttcttaatggctggtgctattaaccatgatatcaccagcactatgatggcactgcgggaccagcactatgttcgtaccgctatgatagaatcaatagcacccaagagtacaattgaccatgatatcgctcttaaccagtacaatgcacgtattgccgaactaacacaatggttgtgccgccatgatagagccaattaatactctctggggtaaatatcactcttaaccaacatgatgcatgtactaccaaaccaacacaatggttgtgctgctatgatatcacccaaatcatatacaatcacaaacacaacatgcatatataataagttctatgcaaatcttacctcattttcgtgctcaggtgtgtcggtcagcctgagtggaatagctgctcgacgctttacagggccctatatcacaattttcataaccttgatgagatacacgctaaaatactttctggggacttaaaaccaaaactaaaattatccttatcgatggataacatgataatactctaaatataacaaaaacgggaaaactagggtttcaaaaattgtcccaaccggtagatcggttccccaaccagaattctggttcaagggggtttcttggggaccaatcggtcaaccggttcctacaggtcccccttaactgatcgacaagttcagtgcaagaacacccaaaaacatccccaacacttcaatttaactctaaactccataatatcttccaaaatacctgtaaatactataatgaaccaaatttaagcaataaatctcaatttcaaacacggaaactcaattcaacattagaggtcaaactttgccaaatcatcaccacaactaagcaacctaacaaatctcagctcaaacaacctcaatctaaccccaaaacagaaactgaaacattaattctcaacacagaaccctaatctagaaaatcatacactaaaatcttgttcaagcttaagaaaatcaagataagagaactaagagattataccttgatgtgaagcactcaaattctgctaggattcactgagttgagctgaaaaatgttcaactcctagctggttcttgatgcttcgaaagagagggaatggtagagagagttctaggttcttcaagcttattacttagttgttaggataaaatgaattaaatatttttcaaataaaacttaaaatcagatcatttatgcccacaaaagacaaaagtctcaaagaaaagactaatatgccccttgatataaatcaaaggcaaacatgccacctaagggcaattggtcaattttgaatcccaacaactttctgacactctcaatgtctaaccctgataccccgctatcaataaaattctaaatatataaaatgtgactctctaatggcccaacgtcacgctccactgctaccgaactaaaatacgggaaataaaaaattcacatatatagcataattagtgcatactgaatttaaataaatctctacaatatataaatcataattaattattcaatctcatagttaaaccctaattctttaataattcaacatatttaacttagggtgtcattacatttttagaggttcaaagcaaggcttgttgttaagggctttcactagaggccaagtctggacattggggagaccttcagtcaagttatcaaagccctaactgtcagaactgtgttgacaattgttgtgtctaaagtatgggatgttagacaacttgatatcaataatgctttcctcaatggaaagcttgaggaggctgtgtatatgacacaaccaaaatgttttgaggataaagacagaacagactatgtatgcaatttagaaaatgtctctttattggctggaacaagctctaagaacttggtttgacaggctcaaacagactctaacaaattggggcttccttcaatccaaggctgataactctttgtttatgtttcaaactaaaaaatttgtgatcatggctctagtttatgttgatgatattatcatcgcatgtatggtaatctaactatttgttacaaccttaattacttcttaggaataaaagttcacaaagactcaatagggatgtacctaaacaagggaagtagattgttcaactattagataagctaaaaatgaaaaatataaagccttatcctacaccaatgattacaggtgttccaatgtctataagtgatgacacaccacttgaaaatccttcacactacagaagcataattggagctctgcaataccatgtttacaatcgacttgatatagccttttctgtaaataaattgagttaatttctcaagtgtcccacaacaattcactatagtggtgctaaaagaatcctaaggtacttgaaaggaacacaacatcatgggattcacatacaacacagtgataacttgagcttaatagggtattcagatgctaattgagcttgctgccctaatgacaaaaatcaattgggggctattgtgtgtactttggtgagactctggtgtcatggtcctccaagaaagagtctattgtatcttgatcaagtataaaatcagagtataaagcattaactcatgttacagtagagatattttggcttgaatctctgctcaaagaaatgaagttctcattgaactctgtctcaattgtgttgtgtgacaatatgagtgtaggtgatttggctgccaatttcgtctatcatgcaagaaccaagcatatagagcttgacattcactttattagagataaagtccttcaaaactactcgacatcagatgcgtgccttcatcagatcagattgcagactatctaaccaaaaggctcttgcgctcaagatttcaagttattatggataagctcagagtaactcagtcaccatctcgcttgaggggtagtgttaacaaataattatttggttatattgtcattagtgcctaatcatggtgttctactctttgttattactttatgttatgccttgatttttagtgtggtccagtgcttgtaattatgaggtgacaagtatctctctcttgtactggctttttcctataaatggtaatggacccctcatctctttttgagctgagtatttcattcattactgctaaaagtagctctttctcttctgatgcaacttcttcactcggtcagacaaagttgggcctctcttctttctctttctagtgcttttcctgtttccttgagctccgctcttacagagcgagccatggcctgccatgaccatcactacaaaaaactgctacttttagtgacaactttttagtctaacataatttttttgtgactaaatgtgacttttagtcacaacaaaatgttacttgtgactaaaacatattatttaattacaagttatcactaatttagttttagtcacaacaggtattgtgcctaaaagtacatttagtcacaacaaattgtaat

SEQ ID NO: 302238 - DNA, 2646 bp, Cannabis indica
ctttttctttccctcctattataccaaacaactttagggaaatatataatccatcatcccatttcattttcccacacctcacactaaatctatcattagctctttccattattattaccaaactaaaccttagtgatgatgtgatagcatattgaaaggtcagaagatgaaaggagaagaaaatatcagcaaacttgatgcttgattggtcatttggtctacccagaccatttagttagattctttttttgaagttacatatgctctatagtcttgctatgcaaaacaagttctaagtttaaggagagctattcttagctccttgatctttttccaggccgtttgttgaatataaaggcacccttccacaaaatgagttgcagattaagcagaaggaattagagctagaagttaataaattaatatcaagaagagggaaagtgagtttacatatttggcaagctttctttgtcgatatcttgttctgaatcacgacactgaattgctttatcatgtttgtcatacaggtttctattgctgtagtaccgtataaagaagctgctgacatgtgtggtggttcccttcctgattacatttcaaaggtctgtatttaatttgttatacttttaaatgttcttgcatataatgttttcctttttttagtaatacatctcaacttgataaaccactttagttggtatatttgtttctttaacaatcgttttctctacttttatgatttgtatgtatcacttgtcatattagttagtttggataaattggtataagaataagaattggtatgtagtgtccattctatagcattatttttcactttccagtggcacaatctgataaaaatactactgtttcttaaaggaaagcacaccacgtatagtgaagtttggggacttccctggctgcccttgtggcggtacccatgtttcggatttttcagagatcataagcgttacagtaagaatctttatgcttctgtttccaagtgtactactaaagcttgtatactttgtcttcgtttgattgataatgataaaaattacttgattgaaatgaaaccattggagttgtttttttgttcaggtatctcaaatccggactaagaaagggatcacaaaggtgttttacaatgttggatcgtaagtgataatatgtgataaagaactaaaaactgtcttacaaagtgataatatgatatgaaaacaacaacttatgtatggtaatagtgtgaagaaaacttgaaaaaggtataattaatgttctatataggttcttttctttgttcttcatgaatggcaattatgtaataccattgagtttatctactgaggatatatttatgctaattgctttgctaccaagtagcaatcaagatgctattttttttcatatgctttataacgcgtgtcagctgatgttgatttataaagtaaatcagtggataaagaatggccaactatgcctaatttttatctttgtgtggcatgagtttgatttaatgttgtaattgtaagccagttgtcaattctttgatattggataagaacttttctccactggaattaatggacacaatatttagtttctaagagtatctctaattatactctttaattataaaatagagaataaaccttaataagctcttaccgtacaaaaatggctcttatatagaaaatggattgggatttagaaaattctttattattttgcctaattttttaatagtattttagtgttttttttgttatgaaaataatcaatcttagctaaagtagagaagatgattggagtaagattaaacaaaatggttctctattttaatattttcattatatttgctaagaaaatgagaatgttctagagggaagtcttgttaatggttttgttataatgtaggactagtggttatatatgtatgtaaattgtatttaagatgtgaattttgaattatgacatctcaaaaacttaaaagggcaatttggggaaggaaatagatagaatggttgactctaatctcatgaaagatattttggtacaatcaaaatgaatggttggggattgaatattggtttgcttaaatcagagaaatgataacaaaaatgatgggttttttatagacgtagtagtgtagtgtagtggtccttaatcaatggtacgaagaagattgtagatgtgggcttggtcagaaatccccaaacccaatttacataaataactcatataattttgcgtctaaaaacagttaacattcgtcattgtttaatttgttatttttttttcctctttctcggaagcacaaatctgttgtttaatccttttatattttcaagtttttgttacattttatatatatactttcaaccagatgatgtaattatcaaaacagaatgaagataatttaacttaattttagtcaaatttgttttaagagtttgaaaataaaaattattgattataggggttacttttttcattttgacaattaagaaaattttctacaaaattgttaaatataatcttattattgtcactatttttcaaaaaaaaaaaattaatatttttatatttagagatttttttttattatatatttttactattatttatagaaacaacaagaaaact

SEQ ID NO: 302239 - DNA, 2373 bp, Cannabis indica
attatggtagtttcttttctactttcgtgttaagcattttcatttttcttaatgattgacaacatgaaaaaaccaaagcttggtataatggaaaaactgttaacgcttcactatgcctttgtcttatattccaaatttatcaactgttgatagaattgacacagatttatcaacagttttggtgtgtatctcaatctttaattgctactttttgatgttaatcagatttattttgcatttggagccaacttttaagttagttttgcttgaaattatggaattttttttatggattattgtatggtcttttttgaattgccatggacttttaatgatttttatgatattccaaaacactctattgtgatcttgaatttcaaaaatggttttattggggtgatgtaggaaggtgaaactataaggataaatgtgaagccgaaaccgacgagtggaactgggatgctatcagcagctgggcttgcaggtccaggaaagccgaaagcagcagttggccttgcaccgccgccggggactggaaaaatcaggtctccgttgccacctcctcctaatgatcccgttgtggctcgattggcatcccctggtactgctagtgctgctcaaggtcttggttttaaggctactaaggaaaacaccaggagggatagtgattctttatcagatctttcgccacttgaggtatgattcttactatttttcttttgctatcaatacaaatgcaaatgctgtagatagtagaactagttatacccaattggtgtttatgaatagaattgtgcacattcttgctttttcaatggcgaaagggttggttttggtgctgctgtaatactttgttgtgtataagccaatgagttgatcaaatattgttaaattatggatacaaatgcaaatgctgtgtagactgtagaattagtcaatggcaaaagggttggtttttgtggtaatgtaatatttcgttgtgtatattggtattgtttaatgtgggctctagctttgatttttcggtacatttgctgctagagattgtgttgatgggattttctcttagttcagattgcattgattttagtattactataattgtggcttgtattggaaaatgttgtgttttgttctattaattttagaaaaacattcgtgcaaaggaaaatatagtacaatttcttattggaacatgatgtgttttcgattgaagttctcttactcaaattgaactaaatctttatatcccttttttctcgaaccgcaatttctgattttacgatttgacacaatgatgagttccgaaaggtgctcaagtagtttatgatgaatgtgttcatctttgataagtctttactgtgatttctttcttcttctaagaagtatcttctaattcactcaataaagaaggtttttcttataacaagaattgatttctatcataatcaagtggttggaagaaattcatccattttcaatctgagagctttcttaaccaatcattctcttaacatgatctcatttttgcagaggaatcttccttccgctacaagctcgggatcagcgaagaccaccgcagctggatgggcagctttctgattatggaagcaatttgttcattgtggttgagtttattcatgtctgatgtgtttgttttttttttattattattaatttttcccctctttttttccttaaaaaagaaagaaaagatatatgagaaaagtgagaaagcgccaagaactgattacttcttatctggaaaataatttgttttctgcaatatatatgcttcttttattctaacatcttatatcttttttaagctttatgttatgtctcattcttcttatttttcttaatttcacaccttaaagaaattgaaactttaggaccaaattgttacttgaaacagtataaagactaattagtaaattgttagtatattattaatgaaatgaatgagaattaggagttatacacttcaaaaaaagaaaatggattggaagttttttatttttaattaaaagtgctattattatttattattttattaaattaatttatgtttgataaatttaaaatgtaaaatttcattaaaataattaaatactaactaaagtagaaagcataattggagtaataataattaaaatgacttattttagctaaaaaaaatcgaaaatgcttttagagcttggcactgattcgatattagagtttgacactaactcgaaaagtgtttacattggtaatttcttacatgaaagtggtatagtagtgtaataatataagtatgtaataccatttgacaaatgaataatatcaaaggtgttattttattagagattttttttgaaagaaaaaaaa

SEQ ID NO: 302240 - DNA, 1751 bp, Cannabis indica
atgttgtcaccattgatctcattacattgaaactcatttttgtttgttatttatttatttcttgacacattatcattcaaagaatcttgtgttaactgaatgcttttgcagagttacaatgcaactacccactttgagacaactgtagaagatgttattgccttgtactccactttttatatgtatgtctgtataatatatgcattttacaagctgcagtgtagtgaagagaaaaccctaatgagttttctttcctccgtagttcaaaagttatgagttataataaacttgaagaaataattagttttaaaaacatatgtattaatgattgcaatcatgactattggatctggacttgtttgtggatctgactgattcagaagagtgagattttcagacaagggaggtgagggactggagctccaagactactctctttcattcttaagcatcgcaatctgtttaccaatcaatatatatggcatttttttgtgggaaatgaacaatatcaatttatcatacaccatacccccaaaattaaaagatgtcgcattatctattgttacttgaatttggtacttatcaaaagtcggaatgcactgcttgaatagactagtagtaactccaactgttctggattctgaattagcaagaaaaaaatttctcttcaaagtaaaactgttcgtagtagataaacaacctcaggaacattgagacttgactacaaattttaagtgctctgcaaacttgcctattcatagaaattagtgtatttcattttgttgacagcaatatctttaataaccttttgagtttcatggtaaaagcaaaagcatctgaaatgataatatttttttattctattaaaacaacattctatcaaatccgaaagacagagatattggatatgatgtattctgaaaaaacatccgctaggctaatagaagataaaaggctaagagtgttctaattgtcctaatcaaatatgaaaaacattataaatatgctactccctcttggactttgacagtgctttcttcctctgcccaagcatataaccatacaggtggggactacctgcaataataggtgtagccatggctagtgaataaaataacttagctagacaaactctctactattgtaaggaagaggatgaactcatacctgggacatagatagctaagacaagaatggaggcatagaaataatcaaaggagaagttccacttgtttggcatccttaaacagtacaactcggatttctgcacaaaaatcctctcatttagtgaacatatttccagcataatttcaaaacgcatagctcagttagcatagaatttcctaccttaatgtatggcagggcagcataaactagaccaacttcacttgtgataccacatggatacaacactgtgaaggtgctatacctgcatcgcatgaattaatattattattatttctaaattaagtatagttgccaacaatttcacctttctatacacaatgggatgaacctaaaacacaattagtacctgagccacaagagccatgaaggtgcgaaaccaagtgcctccttcatgccaaagaaagaatatcgtataatctgcaattaatggatacataatctaaaactttattattcaggaatcaacttggcgagatctaaaagttggtgtgaagaatatatgcatgaagctcactttagttttaaatacagcctaggaagagagaggaagagagagggggaag

SEQ ID NO: 302241 - DNA, 919 bp, Cannabis indica
tagcttttaaagaatatcgctaaacaaccgtaaggtaacacttatagaaagtgttaggcaccactagtgtccaatagcaatactctaaagattaagagtggcaattgtgtgtttacggatcgtgttcgtgtcatgttaagactcgtgtattgcatgtacgtacagacttcacccgaacatgacctttttaatagttgtgtcacaaaataaaattcaaacaccacctctttataaattaaatagtcaacatgaccgatccatgtagcctgtgtataaatagataatatttaaatacgtcaacctattaatctattaatgatctatttaacacatttatgacatattcaataagtttatgatttttttaaggtaacttacagaaatactgaaatttgagttgatttttataaaaatattgtcacgcagatttttttttaaaaaaatattgtatttttataaaacaacagtggaacacaaaacagaacaattaaaaacaatagtggaacaactaaaaaataaccgtagaataacagtaaaaacttaataaagtacacagtataaaatttatacagtatttttgaaaaaaaattatccctgcaataaaaaattaaaaattttagtatgtggtgtaaataatccttttttatgacatgccaaagtcctaaattaactttaaataagtcaatattaacgggttaatttcgtgttaatcatatcaatcctaacatgatctttttataaaatgggttagacatatcaattcaaaaatggcccaaacttatttaagataaatctaaacttagggatggcaatcatacccgcgagttcgggtactcgcgggtacctgcccttaatggggcaagtacgggggttgactttcgggggcgggggcgggggcgggtatgggtttaaagattca

SEQ ID NO: 302242 - DNA, 1491 bp, Cannabis indica
aagttacagattggaccctgtgttttgtaaatgacaaaatggaccctgtattttactaaaaatagtaaaaaatacggacccctgagcttaatattttgactaactttttttttttaatacaaccaacttaaagacaatgcttaatacgaacagatacaaaaaatgtaaacagttttgtcattgcacttttagatcggattataattaattttatttgaacaaaaatcaattcagggtcctatttgtactattttagaaaatacagggtctattttgtcatttaacaaaacacagggtccaattgataacttttgtaaaacagagggtccaaaatagtatttacccaataaatatataattaaataataagacatggtataagattagttgatgggcttaaacgtattggccaaaattggcggaaaataaagaactatctaattaagaaaactaccattgacacgttgtgtcctttcatccattgaataattgtgctaatttaaattgaaattagtgatctatcaaaagaaaaaattgaaattagtgatctatcaaaagaaaaaattgaaattagtgatcgcattttcatttccgttcacaattattgacataattgttcaaatttgattgtgctaattattgaataattgtgataatttaatttctatttatatgagaaatgttaaaagatactcatgattattagcactattattaagtgtaatattattattgataaattcaatttattttattttaataaaagttaaaaaaattcaatatccatttataagacatcatctatagtagtgctagacattttagtgactcctagcaataccccatatataatcaacaacttttattattaagattattgagtgagtgactttgtgaaaaagaaaaggtattgagtgactttaattaattaaattcgtataattacgtattattaattaaattaattttaattatgaaattgataaattaatatggatcatagttgtgtactgtacatttgttaggtggaaattattacatttcataattgatgttgcattaattatcatatgtttatgaataaaattacatgtgtttgatgatgtatgtactaatattatgtcagaaattctttacaaaaattaattaaatatagtctacatctaaaagtcgtgatcatagacatgtagtatagtgatattgcactatttaattaagaaaatagtactcttaaatttgaatctttctcccaaaattaatctaagaagaaaagtcacaagatgtgtacatctaaaattaattatttatgaatgtaggaagatatattgtatccaatttcaggacccatatattttcgggtgtagtttcacctatatacagttttgttttcaaattattttgtaagtattgtatgagactgagagtacgaatacatccaatatcgatgtagtaaatgaaaattgaaaattatatataagaggaattaaagat

SEQ ID NO: 302243 - DNA, 1276 bp, Cannabis indica
aagaagtacaggacgaaagaatgaagttttagaggatcataacagtttacaaccgaaaataaacaagtaataaatgcaatcggttcagtcatagctagacagcagcaacaacaacaatgttaaacagaatcccgaaactatgaaataagaatgtaaattacagttagtagaacgaaataccttcgtatcgtccaaggccttgcaatgattttgctttgagaagaacagcttcaaggagcagactaacagcatgcatggacatatgcggaacagattcactctgtgaacggcgtctattttgttcgcaccttctagaaatggatactttcatcctaggaatcactgctgcaatgtctattccttcaaatacatgaagtgcagcttctatgttacccttttgatactctagtcttcctagtagagctcttgcttcctataaaccaaagccataaaccacaacaattaatcatgaaatcgaaaaactcatactaagatatgaatagagataactttaatttcttatcatttttgtcaaccaaattaaataatgagtctttatatgaactacaactgcaacaaccccagtgttttgtgaaagtggtattcattagtaaaataaccacatttggtgcaaccaaaaagtatattgtgcgaccataaatttacataatgcgatcataatggtcgtacagtgtaaattcaacatggttattttgcaaattttacaatttcaagttgttagtttggcaaatttccgcaagtttcgaatttagataacatgtctcaattcatggtagatttgagtcaagaaaagttttctaaccactcaaatataaagcaaaaaaagttgagagttgtgcaactcaaactagtaaaaaatatccaagtagagaatagaaaaagaaaccaacctcatagtttagataaccactttcacgaagagaggactcagcttcttcaatattgctattatcaagctttggatccacttctcctggtctagaggaatacccacttgctgaatagtccctagtagccagagaatctgatgaatgatcaatttcatccattttcacttgctctcctgaacgtatgcacttcaacatctttcttactctacttggaataccaaagaattttctttgttcatgaaactcttggttctcataccggattgtaccacttcaaattgttctgtaaagtaacacagaaattcaaaaccaaacaacctaaattgcagacacacacaacatgagcatttatgctatgtaattct

SEQ ID NO: 302244 - DNA, 2505 bp, Cannabis indica
agcacagtttatgtggaatcataaggttaggttacaatgatgctaaaattttgtaatactagtattagtacttacgctttcataatggcgaccaatggaaaatggaaagaaagttataatggtgcatagcaaatgaactgctccatcctgcacatgagaggtagataaccaaaaaaaagaccaatgttaagaccccccaaaaaaaacagcatccctcctatatatccaataacatgaaatgcacagagaagcctagctttgtatatgcaagtaatgggcttgtgcatgagacagtacttctaaatttggtaaagccaaataagacactcttttgcatcggaacaacccaggggtatctacctattatagtctttaagtttccctccttttaaaaaaagtagggttcagcagaacgattcaatataaatgttgctgaaagcctttaaataatcaattttcaataattgacacatgatagttcaatagcatagcgaatgattgtgaacttcagcaacttacccaaattgcctctgaattatcatcacttaacaacttcagaactggttgaataagtttcccagcatgggctgtcccatctttcttcacatttgaaaatcctcccaacctaaaatcagcaaaggcttcaacagtcttgaaagcagtaatggtactaatatatgcacaggtcaagtgtaacagaacaagcataagttttgcaagaccaagttgtgcaataacagactttttacatcatgcagatgccatggatcagtgaaatgtcaaaagtcatttaacatttggaagtaaacaaaaagacaaacagggacttaaaatgaatggtgatcatgtattcgatgtactatgatattagcaataatttttattatgatgcttaaatattgatgagtgatgacattgaaatgaaacgtatatgtggagattatttgtcaattatacaaatttatacaatagagattcttatgatgagatagagtggtgtggttctgcacatctctgtttaccatggtcacttgttcgtgtgtaagaaagaaagggatatacatgaaataaagtaatggaagttataattaatcatttgcacacatctttaattcatataaatatcatcataattagagagacgtgaaacaagtgtaccttatgagtaaatctgataatgaggcacacgatgccaccttcacaaaatgagatgctgctgaaaactggtttattacataaaacaaagcaggttatgctcagctacatcgtaagaaaataaacgtgaatgaaatatattcataaatttaagtaagaaattaaactatatgcttaacaaatgaacttttaaaactttttgcaatgtaaagcaacttcaccacgagaaattactaaatttgatattatggaatcacgaagtatctatcctttaagtgcaagatttaaaataatattaataacctccaaagaaagcattaagacatattcaaatgagatgctaatgcgttaaccatagtagtctcccaaatgccacaaaatagaaaattggactattctgctggatttgaacttttgagaaacataataaaactctcaactccatgatttttggaagtagtcatatacacaaggcaggtttttatcaatatacctgaatgcgcgatagaagcttctgaaaccaatccgagtatgatgccaagaaacgatcagaactgcattcttgactagttaccccaagtaaacaaattcctgcccaacatttatctggctagaacagaaacataaaagaagactaaactaagtattaagaaagatttacagatacaaatactggaacaacatacaaataatattccgccaacaggagaaactaaatacaaacagtcatcaaacaaagttattacgaaaagaaaatttatgcattttggcttccctcaaatatagtaatgtatccttaaaaatcactttaaaaaatacaacctcagtaggtcccatgtccaacttgttccaacaagctaaatacatatagactggtataggaatggtattttaatgcatgttacttgaattctacatatctaattggatatggcaagctataaaatctaatttgatcaccatatatatagactatctctacatagagaaccattggaaaccacacaaattttcagttacacaattaaaagtgacgcatcagcatagtatacagaccaatcttttagtaaattcatttctaccattcccaagtaaacttgacttgttgccaacctctagagcacagttcttcttgccctcgttacatcattaatgtaatagttacaagcgcatgaatgtagcttaattgtactagcacattcgttaaacaaatgaaaaataaaggcattcaagaaggctcaaacaccaatggaaatttaactgagaaaatgaagcaagcacatgtaaaaaaaaaaaaaaatcaacgtatacacgcaccatatcattagaaaggaggagtaacaagcggtc

SEQ ID NO: 302245 - DNA, 2628 bp, Cannabis indica
gcagattaatcttcacttagggttatttgttgggcttgggccatggctggagtagaagagagataatttgttgatatgccaaagtagtgaaatggaattataattccaccaaatgaaaaatggaaagcaattccattagttttggagaatagtattactatggaaatcttttccaaaagtgttattttccaaccaaacaaaagaattaggcccattagtattccattccattcttttctggcccattaccatcaaccaaacgggcccttagtgttctatatgatgcattgtagagtgttatatagtctttaaggcacacgctattaatatgagcttgtagattatatattctcttctttattttctatatactttcttatttttatatttctagggtctctgattaccctagagaatatgatggtgtctgccttcaaatgagactgtcatacagccttgtagctaaattttttctatttcttgttcaattgactgcttgtcaccttgttggttccttgggtttgcttaggattcttatatacaaggtgaaatatagtttgtttgagtgtattttgttaataaatataccacaataactgatcagtatgtttatttatatgagaatggaaagactataatgtctattcaagaaaggaaagctacttttcagcaaaatcaagttaatcaggacctaattatgatgcgggagtctgtccagaaattgagtgtgagtattctgagattttagatagacctcccctcgctagagtttgatgatgctggatctagccggataaaggtgggaaataataatgtccatggcaataatattgacagtgacacaaccaatatgtagtatatatttattttagttgagaaaattatacttatgttggtattataaatatatatttatttactaacttttagataactataattgtattatgcatgtatatttagaacaatttaaaattaagttttattaagtaaatttttataattaagcttttatgttttattttttatttattataatttaaaaataattaatttttttttaaaattaaagaatattaaataaaaataaaattaaattacaaggttttataaactcattattatgtaattgtatctatctatcaaaataacttttgccagtgtattaatgtgttggcaaaagtaaaacttttcccaacatacatttgtattggtaaaaactagacttttgcagcgaattaatgcgctagtaaaaataagatttttctcagtgcacatttgtgttggtaaaagtctaattttttccagtacattattacacgctatcaaaagtcatttttagcaacacttttaattttacgttggcaaaagtcctatgactaatgcaaatttttcaactcatccttttgctagcgtgaaaatacgctggtaaaagtagaatgagaaagaacttgacccgcatgaaatacgctggtaaaagcagattgacccgcatgaaactaagaacttgggttttcagggtaaaaattaattaataatagaatgagaaagaaaatggactagttgtggcgacaatatacaaaaaacttcaatacattacccatatgactctactggtctccaaagtattagtattttgagtaaatttatgggccatggggtgagattagatatttggtagcactcgagtcaagatgccaacaagaatcaccaacaggagtggcacaaagatattgcatctcaagaacattgatagtgccagttgacttctgaattgtttcagggttagagaaagacttgtcaaaatgatggaaatattgtttgatagtgacgcactgaattagacacactacccttgaggaggatgatggaatccacgacctatctgagctgcacgtacgcgcaccactgtacaatggaaaacgatcaaaaccaggtggtccgaacacaatagggtaaggaatagtggacgtagttgatccataataatggaagacgagccacgattctaaactacaagtttagtatgagcaagattcgcctcattcttgacaacaagttctttaacagtcttgtcaaggcgaccttcttgagccattagcaaggtctcaatctcggcaactaagcattagctcttgtgttgactgaggtataaaaatgtcatatagtcattggtcaagccattaaagatcgcttcattgtgcttggaggttggaaacatgaccaatatagatgctaaggtgtcgatgatgttcttgattttgataagacagtcacctaattaagagccttgcatcctagtgctgcaaagaagagtgttatattgtcggttgagagatgtatatatagtactcacgtgatgaataatccaaatctgagcaatagtatcatatccaaccattctagtgaggatcttctcggacatggaacaaagtatccaaaatataaggatactatcttgttgattccatttttcatactcataattcatttgattagaaagttggtctcctttagtgtaagaaatttaggcagagtaagagtcggatcaagaaaatgttgaagagggctatccctttgatggcggtgaagacttgatgcttccatggaagctaattgtgtgctaat

SEQ ID NO: 302246 - DNA, 2591 bp, Cannabis indica
aaaatgctcagcagaagaactttttctcaatagtttaagaagttataagatcagcagtgattacattcaataggtgtagactgtgtctatgcttagcttgagttgatgcacttagttagcaaatcggcaggattgtgagcagtgttaattttcttcacgagaacctctttgcttgccacaacctctctaatgaaatggagttttatatcaatgtgttttgatctctcattaaacataaattttctcatgagaagtaatgccctttgggtatcacaatacacagcgatatactttgagttaaaccccaatacacagtcgttagttagttagtatttcagttattgtttgttacctttgcttagctgtagtctaactaactttgtaaccaattctcatttactttcctctgtatataaactctactgttgactgtaaaacattgtattgatttcttttattcaataagacaaacactttcttctctgttctttcttgttctctctttctctctaattcaacatggtatcagagcttaactctttttaatggcgtcgtccgttgattccactcgttgttccattgaatccaatcaattaccaagatcttctacagtttcgttcaatcatactctttcgatcaaacttgatgagaataattttctcccgtggagacatcaagtttatgcagccattaaaggtcatcgcctactgaagtttctcaatccaacagcaacacctccaaaatacaaaacagcagaagacgaagcagaggatcgaacctcggaagagtttctggaatgggacgtttaagacagcttactcgtatcctggttactatcgtctatggcagagaaatcctcacacgcatggtaggttacaacagcactgctaagatctagtccactctcgaggaatgttactcaggtcaacacagagcgaaagtcagtcagttttgcactcaacttcgtcgaacaaagcttactggaaatctcaacgattacctactcaagatcaagcaagttgtcgattctcttgcctctattgaccataatctttcaacgcaagatcatatcgaagctatttttaacaacctcactcgtgattacttcgtctttgtcacatctttgtccacaagaaaagatgaatactcagtcgctgaagttgaatccctacttatggctcaagaagttcgaaacaaaactactgagacagatcttgatatttcgaagccagaggcaaatcttgctgcgcaaccaagtcaaaccagacctcctgctcctcaaagtggacatcagaatttttcacctgttcaatttggcacttaaactggtggtcgtggctcctaccgtgctccctttcccttcttccctaggaatggcaacttctctcattatccagcaggttatggtaatttctatccaccatattatccctctttctctaacactcctcgtactcctagaggtggctttcgtggtggattcacaggtactggcagaggctcttccactcccaaaattcagtgtcaattgtgccacaaataaggccacaacgtcaaacaatgtttctataggtttgacaaatcatttacaggacccgaatcgtttcaatccttcaatggtacagctgctacaactgagatgcaagaatccattgctacaccagatactgttattgatcaatcgtggtatcccgactcaggtgccacaaaccatttaactcctgatctgaacaatctaatggctcctatggaggttccaggaatcgatcaaatacacatggaaaatggctcaggtttgcatattcaccacactagttatacctcttttaattcccctttcacttctcaacctttagttttacaaaatctccttcatgtacctgatataacaaaaaatctgatgagtgtctctcaatttgtaaaagataactctgtgtattttgagtttcacccttctttttgtgttgtgaaagatcaggctactatgaagattctattggttgggaaggttgagaaagggctgtacaagtttgacaagcctctccaatcatctccttcgtccaacaccacctccactgttagttctgttgcctcatcatctaaagctatattccaatgtcaacaatctagttctaatgtacctttttcaaatttcaatctttggcataatcgattaggtcatccctctaagcatgttgttcaatctgttatgaccaaatgtaatatctcttccattaataaaaatgcatttgatttgtgcactgcctgttgtcttggtaaacaccataaattaccttattcacattcacaaactgtttacacagctcctttacaaatgctacacacagatctatggggtcctgcccccatggtctcttctaatggagcctgtaaattgtcgagcaattcgttccactctggttgaccggcacacctgaattcagaattgaggtaagattagtataacagtatgcatatgtatttacatgtttagcgtgcatgttacgaagcctgttagattacattagatatgtatgttggctttgtaccatccgacagtatcacatcggtaaagctagagtatgactagc

SEQ ID NO: 302247 - DNA, 2350 bp, Cannabis indica
tctagccctcctaatcatataataatagtacatagtcatagatacatattaatatgcaatcttgtacttgtgtatcgcaaattgaggtggaactaagaccatatgagctcatcaattaatgaatcaccaccaccaccaccaagttagcctttcctccctaccttacgttttttttttttttttttttttttcttgaaaaaaataatagaaaacggaaattgtggaacttaacacttgcgcactaactctaacagcgattaggtgtataggtcatacttgttggtataacttactaactaggaatattaattatccaaaattttctcgacccactttcaacattatagatatataataatattggcataattacttactcacaattacattaaccaattttaatgtaaactttgtgacaatagggtctaatcatactcacagtacaagcccgttcatcatctcttaaaccaccaccgtgcacaaaaactggtttggacatatgtgaagaagttcatggcggcaaggctgcaatgctatttctgggcctatatctggttgcacttggtgttgggggcataaaaggatcgctaccgtcacatggcgccgagcaattcgacgagagcacccctcaaggaagaaagcagagatcaaccttcttcaactactttgtgttttgtctctcatgtggtgccctgatagcagtgacattagttgtgtggattgaggacaacaaagggtgggaatggggttttggaatctcaactctcagcatattgttatcaatcccagtcttcctatcaggatcagctctttacaggaacaaaatcccttctgggagtccacttacgactattgtcaaggtgaagcaagagaatatgttctatataaataattacatcccctgttttccttctgttctattcattctcctccctcccctgaatataacatagtcataacactgatcttatatatctatgaatggaataagcaggttttggttgcggcttttgtaaatacttgcatgaagaagaagacgccaagcaatgcaattgcaaacatgggaacatcatcctctcctcccaccacaaccaacaaggaagtagaaaaagataccaaacaaaaggagtccactgaaacaacctcaaatagcttcaaattccttaacagtgcagctgagggtgatccaattcatgtggctttacaatgcagtgtgcagcaagtggaagatgtcaaagctgtgttgaaaatcctccgaatctttgcttgcacaattatgctcaattgctgcttggctcagctatccacattttctgtccaacaagctgcaacaatgaatacaaagcttggttcgttgaaagttccaccagcttccctccccattttcccagtcgtttttatcatgatcttagctccaatatacgaccatttcattgtcccatttgcaagaaaagtaaccaaatccgaaatgggcataactcacctgcagagaattggaattggtttacttctttccatcttagcaatgggtgtggctgcactagttgagattaagagaaagagagttgcaaccagctcaggcctacttgactcaaccgagccattgcccataactttcttttggattgcattgcagtacttgttccttggttcagcagatcttttcaccttggcagggttgttagaatttttctttacagaagcacctctaagcatgagatctttggcgacatctctttcctgggtttctttggctatgggatactacctaagcacagtgattgtgtccatagtcaataatgtcacaggaatctccaaacacaagccatggctgtctggaagtaacataaatcatcatcacttagaacgcttctactggcttatgtgtgtgctcagtgcactgaatttcttgcactaccttttctgggcctgcaagtataaatacagatcaaacaaatcgcgcccttgaagaataagaggaaagaaagaaaagttaacaacaaaaaaaaagcaaagaaataacaacacaaaagaagttacacatgcagtggcatttgtcaaattgacatgataattttgattgcacatcgaatactcaattgaggcatgttgaaactgtctcggctgtatatacttggggttgggccaaattcaaatttggatgcaaggagatcaaaccaggaattgtatctgcaataccatatttgataacaactcccattgttatagtagctagttgtaattggtttatattttcagaaaaatcaagcttctttttttgtctaatcaattaattagttaagcaatgtcaatttttctttttcttttctttattattatttaaaaataa

SEQ ID NO: 302248 - DNA, 2320 bp, Cannabis indica
tgaggaaactgagattaaatgccttgatgactctgatgcaattaaccatgcaaaaacaacaactatcagaggcttttcttagggaggagattcattggaagcaaaaataacaggttcaatggctacaagaaagcgatatgtgctctaagttcttcatggccacaaagataataagaagagaaaagaactatatacaatgcatcaaagcctcctcgcagggggattggatccgagaccataaggagatcgcctattattttctccaaaaatttaacaaactattcaagaaacaatcacattacaatcagcctcagcttgatggctaattctccaagatgttgtctgcccaagaagtcgaaatactaaatgccattcctattgtggaggaagtgaccgcaactttatctaagatgggcaaggataaggctatggggcctaatgggttacccccaagcttctactctcaccatgtgaacactgtacaatatgatttccttgaaatgattattcacttcttcactcgcacagagctggctcattttattaacgacacttccattgtcctggtcccaaaaaaagattctccaacttttgttaatgactataggcccattgcgctttgaaatgttgcctacaaagtaatttccaagatttttgccacaagattgagagccttattgcataaaatcatctcacctaaccaagcgacatttgtaaagggaagacacatagcagaaaacacgatgattgctcgtgaaatctttcattccatgaaaagaaagaaaaggtaagagaggcttcatgttaatcaaacttgatatggagaaagcctatgacaaaatggagtgggaattcatcatcttagtgcttcatcaactcaatttctctagtacttttacttagtggataagggcttagattttggtggaagaaattaaacttcttttaaatggacccattgtgaagaaattcaaaccacaacgagggttgagacaaggagatcccttatctccttcgctattcatcatggcttctgaaatactatcccgccttctcattaacaaggaacacaagggattaatcaaaggcccacctaatgttttctgacgacataattgtatttgggtaggcaactttacaagaagctagatcattcttagattttcttaatacttattgcagccggtctgggcaatttgtaaacattcaaaaatcctcagttttcttatccaaatgtgtgtccagtaggaaagcgcaaactatatcacagttcttggggataaaaggaatgatcgggaaggccacctacctaggactacctttgtttagatccatcaaaagaaacagaggatacccaagatattgtggatcgtgttcttaagcgagtcaaaggatggaaggccaagttactgtcaaatgcaaggaaaacttgtctggttaaggccgtgggtacaactttatcaaacaatgttgcatcctctgatgtcattcctacctagacagcaaacaaagttgacaaagttctacaagatttctagtggggcgatactgatgacaagagaatggtacacacagttgcgtgggagaggttgtgccatcctaaagtgcatggaggtctagaattttgctctaggaaggacaccaacaaggctttccttgtgaaagggcatggaaaattctaatggataaatatagcatgtggagtgatcttatggaagcaaagtatattaaagatcaaaatttccttgacatggaagaaaaatcttcagactcactcatttggaaggcaatccttcattctcgcagctacctcactaaggtcctttgttgcaaaattggtaatggaaattccacctccatttggtttgacccttgggtccctggaaataacattcaacctcgttctgaagtatcggtagggatgagtctagttagcaacttcatctctcaaaaccaatagaatgaggagttgataatacgctggttttatgatgatgatgctaagagaatacttaatatgacccttcctaaccggccctctaaggactcatggctttggctttcggaatccaatggtgtcttctctattaaatcagccttataagaaatttaagaaatagagctacaatcgatagaaagtggagaatcgtatgggagctaaaattcataaaagactcaagatgttttggtggaaaattctttccaactaccttcttacgagggagaaattaagatccttcctccccatacccgactaccattgccctctttgctctttggcattggaaagctctcttaatttgttttgggaatgttcttt

SEQ ID NO: 302249 - DNA, 5198 bp, Cannabis indica
ccccagcgatgtgggattgtacagcttacccggtatttccccttacggatcacgggactactgactgtcacacaagttactattccaattttattaaacttgtcaaaacctaatatcgaaagaatattaagggagtgaggatagataatgccaaggagttacaatttgttgagctatttgcttctcttgagatagttgattaccattcatgtgttcataggccacaataaagttctattattaaaagaaaataccaacacatgttaaatgtagctatggcccttttattctaatcctttattcttttacttattgggatgagtgtgtttccattgccgcttccttaatcaatagaacacccacacctaatcttcaaaatgtttgtcaatttgaggctcttaagtctaagccactaacatatcacttgagagcttttggatgcctagcatatgcctcaaccttaactgtcactagaacaaaattttcccccaaagttgcatcttgtgtatttagtgtaggttactccactggtatgaaagcctaaaagcttcttgatctaaactccaataaagttttctattctagggatgcgaaatttcatgaaactatatttccatttctcaataatgagtctttgcccctgaatatcattattttttctcctcacctcttttatttttcattctccagctgataagtctaataattgtcctttacctatcccaacatttcacaacaggcctgttggaacttctaataagccttcacaattaaaggattataattgcttcttctctactaattctatatatgtgttttcataggaatctacttctgttacaccttaccctatttctcaggactcaattatagcatatttactcctcttttttgagctacagttttggctatctccagcaagaatacttcaatcaagaacagggtatacgagaatgggacaatgccatggatagtgaaataatagctattgtgaacaatcatactcagacgattgttaatttacccactagactacatgtaatggtatctaaaagggtctacaaaatgaagtacaatataaataattcaattgaaaggtctaaagcaaggatagttgctaaggggtacaacaagaaagaagtgtggattatatagacactttttctccagtgaccaagcttgtcactattaaacttgtctttactcttgcagccattcatggaaggcatcttcatgaagacttgcatgaagatgtgtttatgactatactgggatcttccacgtaatttagtttgtcaactaaacatgtcactatatgatttaaagcaggatttaaagtaatggtttgagaaattttcacatgctttacttcagaaaggttttaatcattcatcaatagattactcctttttcatgaggcattttttggatagtcttataatcctccttgtttatgttgatgaagtgatacttgcaagcaacaatttggaggccatggaagaacttaagagtagattaaacaataggttcaaactgaaaaacttagaaaagcttaaatatttccttggtttataagtggccaaatctcataaagggattttcatatcccaaacaccatatgccttacaatgacttgaacatctttggcatttggggtgcaatggaagctaatctcaaactttgtcaagatgatacaattgaagattcttgacattataggaggatgattggtaaacttcggtatctcaccattacaatgcctaatatatccttatttgtaattaagttagtcaatttttgactacacttaagtctagacttctaaaaatagcacaaaaggtactataaaatgtcaagtcatgccctagacaagatttatttttccctgcaacttctatagtaaatcttaaggcttacattgatgcagattaggcagcatgccagctaccagaagatccactactgaattttgtattttcttggtgattcattgatctcataggaaagtaaaatacaaaatactctattcagatcattagtagaagctgaacatagagccatgagaaacacaacttggaacttgtctggttgttatcaattcttaaggagctaaacattgagcataatgggcttgaattgctctattgtgataacaaggctgcacaacacattacagctaaccctgtttttcaagaaagaactaagaataaagagatagactctcatttggttcaaaaaaaagtcaagcagggaatagtcaagacaactcatgtgtaatttaaagatcaactattagtaatgtgttttactaattagcactcttccattcacagttcaatagcttcaaagacaatatgggattaatgagcatttgctctccatcttgagggggagtatcaacaattaataaacaagttagttaattagttgagtctgttaaagtcaacttttgttgactattatgtgttaagtgcagtaatagattagtaactattttcagtttctagttatgagttgtatatcgagctatctatagctcagtttctgttattaacaaatcaatcaatacaattgaaattaattttcattctttgctcttttttttattgtcactatagatactctatgcaaatgcttatttagaatgaaaacattttccttgttaaaataatgtgtaaaaaatacctatccaggaaaacccaagctgcattgtaagctctaacctcttgcataatgacatgccttataggaaaaccagcaatgattttgacttccacgctgatctggagtgacaataaacttaggtgatgaatgaagtaaacaaaaacaacaaagggaaataagcaatctttcaaataagagacacattcatatgaagaaaatacgtataaacataaacttactactcatattggtctttaatcactggtatatattaatgttatgtttggaaattgaaattgaacctttattatgcgatttaattatataattaaaatatactaaaataattaatttaaccatttaggtcttagacagcatatgcttgtcaaaataacatctacttatatatcttgtttctaactcttttacataaattgttgttggaaaatgatataaatttgattaaattagttcatattataatcttattttttttatttaaatcctgtaaaaatattttattattatgcacatgacatcacataattggttcacttcagaatatttttataaataaatttacaataggattaacaaagagggtaaaggagatgtgtatcttagagaggcaaagaagcaatcttccttgatgtatattcaaggaaaaattaaagatgaccctcataataggaaattaatggatgaggaaatcattgtaaggaaagattatgtttaagctcattcacattaaattcaatttttgagacagaaagcaaaagtagattgttcgaaggggagatcagaataccaggatatttcatagccgcatttgaagtagaaggattgaaaattctatatattctattcaggatcttcatggtaatagatctgatagccaagtaggagttacccaagtttttcatgacttttacactagtttgtttggttcgagaatagtagatagaagacaagttgattatagcgtggtgcaagaaggaaagttggtgtcaaatagtcaagcagagcttcggttatggaaatacaccaaagatgaggtcaagctactttgtgtttctattctagatgagaaggctcatggtcctgctggctatagtagcgcttttttctatacagacttaggatatcacaagtgagaatttagtcactgcagttttaaattttctccacacttgtagattgatgaaagagattaaccataccacagtaactctcatttccgaaaataagatgtccaatgaatgtgagtacgtacaggcctaatgcatgttgtaatgtagtgtataaagtggctactatacttatctgttctcggctttgagaggttctttcttgtattatttctaagaatcaaagtgggtttgttaagggtaggtttattgctcataacattatgatgtgccaggatatggtgcgaagctatagaaggaaacatgcaagaccagtttgtatgattgaaattgattttcaacaagggtacaatacgcttgattggaattttcttcatgaacatgcttttgacgcttaaatttcccactaaatttgtgaaattggtgatggattatgtgtcaacaccaagattctctttcatgataaatggggagatcataggttttatagagtctaaaagaggcttgaggacaaaggatcccatgtctcctctactctttgtcattgaaatggaatatcttactagaattttagataagatagctcaccaatctaatttcaaatttcatcctaggtatgaaaatatgaagcttaattactcatctttgtttcacagatgatctacttatgtttagtaaaggtgaatttcaatcaatccatttattattgaaaggttttcaattgttctctgaaagttcaagccttcaagttaatagagaaaaaccaacaatttatggagcagctatgaaagatgatttatcgaagttttgactcatatgatagactttgtaaaagatttttttcctttcaattatttgggcatgaaaaattagtaatgagtgaatttcaaagagagattgtgagtttggtagacaaaatgatgcacagaattcagacttgaagctcgaggatgaaaaaataccgagagaaagagagagggagatgaagaagtgaaaatgatgaaaaggctcacacgaaagagatgagcttagccacttatatattgatcaagaaagagaagagttaattataatatatagtcgatacaactatcaagtagttagttagagaaactaacaaaaaagaacctaactacttttacaactaactaacttatccctaatatcccccctcaagttacactgggcaacaaagtgttaacttgtcccttaagtagatgaagtggctgacttgtagtggcttagtaagaacatctgtaatttggaatctggtgtcaacatatcgaatgtctaccttattttccaagaccttgtctttcccaaagtgtatgtctgtaaagcccgcttagttaatttggaaattatcagttaattatgattaattat

SEQ ID NO: 302250 - DNA, 3167 bp, Cannabis indica
aagtttggattgttgtcgttttttgatattcacctgtaaacgacactgtttttgtaagtttgggattgttgtcgtttttctatattcgcctgtaaacgacactgtttttgtaagtttgggattgttgtcgtttttctatattcgcctgtaaacgacaccatttttgtaagtttaggattgttgtcgttttttgatattcgcctgtaaacgacaccgtttttcggaagtttgggattgttgtcgttttttgataattttcctgtaaacgacgacgttttgattttgaattttagtttcttttcttgatattcctttttgtttagtacttaaaagtctaattaaatttggataaacgacatgtcgtttattcgagactatatgtcgtttcttcttgttcttcaataaacgacatgtcgtttaaatcgtcatcattctatttttcttcttgggaaaactctcgatctctttctctgtaccttttcacttctgcaacgattaccagtcccattccacttaaattagggttattcttcctacacaaaattacagacaataaatcatgtaagtacacttaaagatgtaatgatcatcagcttctttgtttaattccatagaaaataatttttaggttttgaaaatttcgtatttttattgagtaaaaattattgtgttgaaggaggaaatcagtgaatcgtccaccaacaccagatgtagtggaaattcaggacaaagaacccacgcttcaagaacttcttaacataaaggtgagtttttttttttattattattattgaaattgattaattccttcctttttttttagtaagaaattttttgaatttataccaaagtttggggttcttttatttatgacagttgattgagagtggtgagaaggaaagactaatggatcttcttagagaaaggcttactgaatgtggttggaaagatgatatgaaatatctttgcaggtacttactttaaagttctgttttttaagttaatcttttgggttattaagttattttttagattattaggatcaattaataaaatagattccaaatgttaggtgtggagataagtaactggctgaatctggatgtgaattttttttctttttcttttcccttaaatccatttgagtttgaaaatctaggtgtatatgtatactatatacataagcctctcatctatttttgattagaaatctttattggtttaatgaattagaacacaaactaggatggtattgactattatttagtttatatatggaatagttgatgaccctatcaagtcttttttagtttctgcaaattaatatttctgatgtattgatccaaatcattctaacaaaagcttgagacagaaattgagtaattaagatattttgagcaatggattgtttttctaagtccaccttactttgtgttcaaatgctgataaaagtgccaattttttatgatttgtagaaattggtattctcagcatatcatcttcttattacttacaatcttaattatacctttccttatgaatgtaggcaattcataaagaaaaaagggaggaataatgttaccttggacgaccttgtacatgtcattaccccgaaaggaagaggtgagacaattctctttcttatttttgttggctgctgtggtttgtgtttgcaagctcttactatgatagatgtcccataaggttcacttatgttagataactaactaaactaaattgttttacttagcgtagttgtcgtaatagtttgaatgttagttgattgtttgttagaagcagtagttagttaggaaggggtttcaaaaataagtggttttgggttgtaataatcacttttagactcaagggatattggctatctcgaattagcttctgttgttctttgtaatgtgttgatcttagtctctagttgaggctaaggtttgagaaataaaggtagagatttctggtttgcttgtgaagtgttctcggcttgagatttgagatttctatgggattcttatctttagaacattttagctgataccctgtgatattgagatcgaatccgcgataataaatcttaatacgaacttgtttgttcatcttgtccactaaaaatgctctcattgtttgttttctcatggataaggaaaaacttaatgaacaagttaacttagtaatcttttgaccaaccataccattaccaacttcttagtttttcccaattatgtacaaatgtttacatctattattcttgcaaatgtatatatatgtgtgtgtattatagctttttttttttgataattgtgtgtattatagcttggtctaacaagtttagtggcatggtatgttttgttactatgcagcctccattcctgattctgtaaaagctgagcttttgcaaaagattcgtacttttttggtgtcagcagctgtttgatgatggtgatggtgatggtgatggtgatggtggtggtggtggtggtggtggtggtggtgaggacgacgacgacgatgaaagcattattattatctcatgagcttgagaattgagatcatcacaagaaaaggaactgaggaatacaaatgctagtaatatattcttttctttagttaaaaaaaatgtattttgtaacttgatactacttgtagttgttaatggaataaacatcattagtaatctattctattttaagtatattatttagtttttttttttttttttgaaattaagtatatattagttaatacttatgtttatggtttattaggaaaatacatgtattatatagtctgtataaatatatataaataaatgtttattaatcaatttagaaaattattgtttttaaacagaaaaaagtcccggcaagaaacttgtactagcaattctcttcgtgaaatgataatttaacccaaaacagttttgttagcagatcgtttgaccagtaaattggaagaaacttaaatgtttggtaaaattttgtttaatttatataatcgttcttaaaaaaaaaattatcatacaaaatagagtaataataatgttcaatcataagtttgctaaatggaacattatttgtttaaacgacgtgtcgtttctttgagatttttatccaagaagaaaacagtgaacataaaacgatatgtagtctcgaagaaaa

SEQ ID NO: 302251 - DNA, 3309 bp, Cannabis indica
ggcaatgataatgtaagagacaaccaagatatagaggtccttgctgatgtagctttgaacttgactccactatcgtaccaaagaccactcaggccaccgacacggaaaaaaatgccccgtagaaaaaattgctaaacacctagtactaagtagtcgtccaggcgaaaccagtaatgctaaaggaaccattgactgtacaggtcctaataatgctagagagactaatgatgctagtggtcctagtgatgctcgagggaccaatgtaaccattttcttcttcgacaagttacgatacatttagattgtacatattattgtagtaattactctttagattgtacatattatttacataaaaaccttatagttatcacacatttatcaccacaggtatgtgtgaactcaaaataagtataacatcttgtaggttgatcaatacttacatgaaaaacacacacataaacatctaacattcctcatgagcaatctacacaagagaggttgttttggcgacatcatatttcaatcaatccatttagaatgagagacaaactttagactttggtcttaattttaattaaactaaatatactctacaaaatacatataaatttatgtgtatatataattcattatatattatggattctatacatatgcacatatatatatattttgtaaatcacatataatgcaatttctctcatctaaaagcctcaatatataaatttcaacaagaaaaaaatagttatttaataatatctatataggattcaaaccaaaattaaccacttttaatcaaatagaataagaagaatggtctgagggaccctgcgctgagcaaaagtggtatgaactgtttactatgactgatctatgaattttcatcggcctgatggtcgtaggcgcacaacaaaatgatgtaaaaaaattgtatctttgactagcaatttaggggtaacacaagaagaagcttgggaagagaatgaaaaggtagtgatgtcactttgtgggaagaatcatattgaagaaagatgttaacgataggcttttttctacaatctttagccgaatgtggaaaggaatatcagattggaatgttaagatttttgacgaggaaggacacaactcttatgtggggatctcattcaaatcaaaagtttatgccaattgttttagggaaacaactctgtgtgtttaaggaagttgtgctgctattagaagagtagtcagactctagataatggagtgatgcgaagcttgacaaaatttattgttgggttaaaatgaaaggtataccactgaaagtttttcgtttgaataatgtcaaacaattgggtgaaatggcagagaagttgaggatcttagatggtcgactgaatagtgtatgtttcttaatggatatgcaagggtgagaattgattttccattggacaaaagagtttttatgggtcgatatattcctagtgggaaaatgaaatattgggttcaatttaaatttgagaggctatcaatgctctgttttgggtgtgggatttggggtcatgaatagagagattatgctagtcaaataaaaatggagagagatgagaatgggaaagatgttcctaaatatggggcatggttaaaagaagaagatccaataccaaactatttcaatgcttttcgacaatcccaaatgcaagctcaggagccagcggtgaatcaattaaagaagaaagggaggttatactagggctaggagcaaatggaggaattgaactggagaaagatggtggtccgacggagatgaatgatggtgtaggcggtgatatgacggtggataaggaaatctcatcattgattatgctgagcaatttaggaataatgggaatcgtgggggatgaagcgggaagtggtatccaagaagttaggtgaagtgggttgacgattagggtttaattgggcccaaacatgagtggacaaaataccaatatgggcctaaaagggaatttaatgaaggataatggacttggggggttagagatgccacttttacaacaaactagttagaaaggaggcccaataactagaatgaatggaggacataaaaatggggttagacctctgccagatggatttattgacagggaaagtgatttaaaaaagaggaagaacaatgacagagcttatgtagaggagactgcgagggaacctcgatctgttgacaaatggaagatgattgtctcgatatgtgaagagttagagatccttggaggttttacaccggggttaagtggagatggaaacaaagagatgaagccccacaagggcagagaagaaaggtatccactaaaaataaagcacgtaaacaagctatgtcacagttggccttgagtaccgaaggagctggggcaatgttgcaaaaggctcagggagaagacatagaaggaggagaagggagatgtaatttatttgagaaaactgggtatgctaaactttgggaaggtaactgtagattcaacaactgaggtgagtatttctaacacaattgaattatcatctcaaagttccttaagtgaagcaacgagccttgcaatgtaggaccgccgagcacaatgaaactcttgagttggaatgtccaaggaattggaaactcttggacattacgtgctttacagtcccatattcggatgaataatccgagcattgtgtttttttgcaaaaagtaaacttacaaggtatcaagcagagtgattgtgtactactctttagtttggagtaatttttggacagtagacacggtgggattgagtgggggcctattattaatgtggaaagatgaccttcatgtaagggtggattctagttcaccttgccatattgcagttgtaatggccagcaaaggttttctaccttggaatctgacttgcttttatggtcatctagatgcttctcaacataacttttcgtggaaacttcttagacatatcaacagggagacggagggagcttggctaagtgtgggcgactttaatgaaatagtgagtttggcaaaaaagagtaggggtatattgagagaatcaggtactatcgaagctttcaaagaggttctcgatgattatcaattgattgattttagtactattaaagatgaattcacgtggtgtaatgactatatcccgtcaacttatcaggaaacacctgcaaaaaggcagaacaaatatactatataataatatagtccataagcaagctataacattaaaattatggttttacccttctcgggtcaaattataaaaataccctggctcaccaacggggtct

SEQ ID NO: 302252 - DNA, 3245 bp, Cannabis indica
actcggtagccaagtgggcacgtcgatacaaaccagtttgggagtatcgatctgtccaattttgacagttccctgcttcctccttgagcagatggctgttgttattttagtttatttagttcttagcttagcttcgtcctagctgttgttaaacctttgtttttgctttgttctgtttgttccactgggactttgctctgttctgggctggtttactccagtcttttgttctcttgtctttcgtttttgtgctttcttgaaaagccagtaatcaaaaaaaaaaaaaaaaaacaaaatactccccatatccctttggagaagaaaaataaaaaataaaaaataaaaaaaaatcttcccatagcccaaatgaatatctctagatccttttgtttgaagcaatattgatttagctggatgaatgacccacacacaaagttaattattaaggctccattaaaggaaagcgatgggaccattaagacaatgtacctgtctatatataatatatggaatagagtctagtgctatcatattgtgtattgagaatatcagtagaagaaaagactataagcatggtgttgacaacggcgagtaagggtaggggtgatagcggcgaggatgacgagaacgctgatcactacttaaactcgacgtttgcgtctcggtacgtacgtgaggcagtccccaaatggaggatgcccaagaagactatacccaaggacgctgcgttccagttcataaacgatgagctcatgttggatggtactccaaggctcaacttggcttcctttgttactacttggatggagcctgagtgtgataaactcatcatggcttccattaacaagaactacgtcgacatggatgagtaccctgtcaccacagaaatccaggtatatatctttcttcatattatttattcatcccgatgtttttatacttgttacagaaaccgatgcttacaaaataaatagataaacattaatgattcaattatggtcgatactttgacattgttacagaaacagattcttataaattaatagatcaactgattttaatggatcttaaaaggattacttctactttttttttttttttttgtccgagtataaaaaatgtactacagagtgtagagatccttatttacgatctccgactaaaggaacttctcttttattaaagaaaatgtagaattattctgttcacttgatcatcactgacactttttgatcatgtacttagaatcgttgtgtgaacatgatcgcacacctgtttaatgctcccacgggagatacggaagctgcaattggtgtgggaaccgttggatcatcagaggccataatgcttgctggtctagctttcaagagaaaatggcagcaaaagaggaaagcagagggaaagccctttgataagcctaatatagtcactggtgccaatgttcaggtgatctcacattccaatttaaataaaccgactttctaaaatcattgtattttaagtcaaatatagtgtgtttagcaatatctatctttacattttgctaattgattgaggtggtgggaatcaataggtgtgttgggagaagtttgcaaggtattttgaggttgagctgaaagaggttaaactaaaagagggatattacgtgatggatcctgagaaggcagttgagatggtggatgagaacaccatttgtgttgcagccattcttggctccacattgactggtgagtttgaggatgtgaaaaaagtcaatgaactccttactctcaagaacaaggaaacaggttgggacaccccgattcacgtagatgccgccagcggcggttttgttgcaccgttcctttatccggagattgaatgggatttcagattgcctctggtgaaaagcatcaatgtgagtggccataagtatgggcttgtctatgctggtattggatgggttgtgtggagggacaaagaggacttacctgaagaccttattttccatatcaattaccttggatctgaccaacctactttcaccctcaacttctccaaaggtatagcagtttagtttactattgaattttttaataatcaatcactggcctcttctaatactttttttttttggcagggtctagtcaaatcattgctcagtattaccaattcatccgattgggatttgaggtatttcctagtgccatccaagtgattttaaaatagatgttgtgtttcctctcatgactgattttcatgtgtgtgcctaacactaacaacattgttatttgaaaagggttacaagaacataatggaaaactgcatggcaactgcaaaaatactacaaaacagattagagaaaacagggcactttgacatagtctcaaaagacataggggtgcccgttgtggcattctctctcaaagacagtagcaaatacactgtgttcaacatagcagacagcttgagaaggtttgggtggattgtgccagcctacaccatgcctgccgacgccgaacacatcgctgttcttcgggttgtgattagggaggacttcagccgtagcttggtggagagactgatctcagacatattgaaagtgctgaaggatctggacgatcttccaaccaccagtgccacaccgatcaatactgacactgcaatcaagaagaagactgatagacagattgaagaagaagtgaccggacattggaagcgttttgtcaaggaaaggaaaactggagcatgttaaataagctttctttctcatagcagagtacatctctgttctttcctaatgtgcttaaccattccagtttgtactactgtttttgattgatttctaaaatgaaaactaagaagtgtgcggttatgtttgtgtattattatgggacttatgagttgggttgtgttaataaatgaattatttgatatttatgattaacaattgcaagtcatatattatatcaaaatttggataatggagcgattcaagatagggaatggaagatccaaatctgtagaaacataagttaagtagacaccgtagacaatgtttagttagaacttcaaagctagtgactggtgtgagataaaatttgtaagcccaaataattatttatattattattattattttgtaaaatgtaattgtagcatatataattatttttcatatttgttctatttgtggcatatatataagtttgtacatttttaattgacaaattatttgtattaataagtatttgttataaaataat

SEQ ID NO: 302253 - DNA, 3299 bp, Cannabis indica
aaaaaatagtcaaaaaccacaccacccgcaccgcaaatacccttacatctacacaaactttcacaatttaatacatgcgtacacattcagaaaaaactatgataattaacaagaggtttagaagaagaggaaaaaaaaacttttgtgacctttcacttggccacttttctcttcactttttttacacgtacacacatgtgacactttcagaggactactatgaaaatgagttcatgagttacaaataaactaacagcaacacaagttaaattataaaacaaaagagcagaagccaacccacaagaaaaagttgcaattttatttctgaaaagagaaaaattctccatttcaatagaacagtctaccataaagcagaaggactaatgaagttcaccataaaattttcaacaaaaggagaatttggaactttattgctgccaaaggatgttagttatttcatcgttcagaatcgtccttgagttttgttttcccaccactccaagaacttggtttgagcaaccatggtgtccagcttgtagagctgcagggcatggtttgcagcttcttgtccgaaagtccaaccaaaaacacccccggctagaagagatagtccagcacctgtcaattacaataaccaaaagacctcaaaattttgacctatccataccaggctagttgaactttttgctcaatgataatgataaataagggcagttatgacaaaaagattagtttatgaaagtaaattccttcaagagtgataaagtctcattcacttggaatggcttttcatggacaaagaagagggaaatcgaacatggaatttcagttctttttccattactgcaaaccaaatatgcactaaagtccaaatctgtatgctcctagaatctaggagaaggagcatccgaatcacggaatgaggaagactaataagcataagacagaagacagaatgatcggcagatgaataattgcatctaacaatttctacaagatatttagctagaggaaatcaagagcatgcacactcatagtaaacatgaagttaaagttgagacctttgcaggtgcaatatacatcatacatgagtagtagcatatacatgagattaaaaaacataggttgggctggaaaataaaagagaatttattctgaaaacacagcttttatactcaaacttatatcgtagaagaattgatgacagatgcatgcaaaaaaaaaagaggttaacttacattccaatcttgtgctactaattcctcacctaacttctatttccctcccaaaagtaaactgagataactatgactttgtaaatgccaaggatgtcttcgcatttttaaaactacaataactccaatgacaagcctgatggacaccaaaggcataaggtgaggttaacttatgtgagaaagggtaaacaaacttaggtgtttgctgagttggctaagggagggtctttttggtatttctatgtagggtgagctgccttttgttctgtgagtgaggctagaatcgtggaggaaaagattagagtaatattctccgcatcatggagagcttttgctctctacttttgtaagagacccttggtctcaagttttccctggattataataacagctccccatttcatctttttcaagttaccgttgtgttaattgctgtgttctaaatactgttgtgtgaccaattgcctactgttctgagtttattgcagcaagtactcatcaaagctatacttatattttctcttgtcatattactaatctcattggtgtgaattcaaatgtgacaattaatattgtaaaatgttgttgcaagaaataccctaaaatttggcacacacaaatgattttataggaaataaaaccataaatcacaaaaggaaagaacctggaaaattcaatgatctagaaactttatttccaaacaggaaaatgtgatgggtctttactagtaacaaaagaggcaagcacagaaaattatatcctgaattatcttctaatgtgatcttaagatattgatgggctacctacggtggtctccaatttcagaaacaatgtgaaaatggatgaccagatgattcaatagggagataaaggcagtggtgtaagactgtgaaggaaacaacaaagcaaccagatggttttactttaagaataactgagataatgttaaaagagcatctcatgaaagattttagtaagtttcacaaaaattgtgtcataaacatttccaccaatgaaatgtatgtgccccttgtctctaagtcatcattcttgctcaataaataaattttgccccatcagtttaatcactagcctctacaggataatctcaaaacttctagcgaatagtttgagagatgtgtaatctaacaaagtctaagaggctgaaggagcttttatagctgtaaaacagatattggatgtggctttaatagctaatatgtttgttgaggaatacagggtggacagtagagattgatgatacattatgtgaaagcatgtgagatatgagtatgacaaagttaaattagatggtcgtttttgaattttgttctggagcaaaaatatttgggattaatggtgtttgtgggcgacataatgcttaccctaaataacatacttgattgtgatcaattgtaaaccaaggtaaatttagaggaggtaaacttctctcaccttattggtaaatgatttggggagaattgtaaacattaggcaaaaagaagatggacgttctctttccaaggtttcaaatttttgtttgttgtactggaagttacaaatttttgtccaagttaactagattacttgcaaatttttgttaacatcaagagtgaaataagtatggattaaagtgtaatgtgggcaaaaacttatggtacaattgattgtctggaaaatactttttaagtgtatagtgggaactacttgtaaaaggaatttgggactacatttaggtggtaatccacttaagtctgatttctgaaatctcatgttagataaaatcagcaattgattcgatggatggaagaaagcatatatctctcaataggaagattaaggaaatagatcatttgctttcatggggaaatggtttgcaggcctaaaatgtttggagagttgggttaaggcaacattataaactgagatagagctacactaatgtatggttatggagatttcctatgctgaagtaaagtttgtaatatcaagtattaaaaaataaatatatgggcagtagtctaagacaagtggcctctttctctttttttacaaaaaaaaaaa

SEQ ID NO: 302254 - DNA, 2201 bp, Cannabis indica
aattttaatctcagcttctgtgttcgactaaatttgcgtatttgcattagtaaaatctttatgtgtggtgtgtttgttttaatcaagaatactgttagtggaatataacaatatcttgtttcaggaaaattacaaggatctgattgacgcacttgctgggtcagatcattcatggaccggcctaactttaaaggtgattttttaatcataaaagaaattttggttctacaaatatcatgtagattggttcagttcatttccgattcaaaatgttaaatttcttttgtttatcatttgatgattgaatttgcaaacctcagtatgctattcgattaaaaatgtttagaggccgtgaatgctttttattaggacctaaatttatattcattattgtcttctttgacattctcgaaatggtgtctcctgtttttggtttcccagttgtgcactggtctggagactgcaaacaagttggtccagtccactaactcaaacgttatatctctatcggagaaggttggggagcttgaggaagttttcaagaagggggattctgctgtggcagcgatcaggggtgttatttcttctttaagcgaaaatcaaggaggaaaccctttcggaactcgaacattgaaatgatccctccttgttttggtcttggaacaaggttagtcgagtcagatttcaggctttctaacattgttcattattagtatatatcaaatttgttcaaattgagatgacttaacgctattgggaataaaaatagtgagtaattgtttgacatgatagttgtaaaggaaaggatgctcctttgttttaaacttctttatgggaatatacattcttgttctggtgggtttataagcttattacactgcaaatctacttcgtttagtctatgaatttctagcttctactaatagacaaaagaaaaaggggtttcctataaattagagggatgctagctatagacttcgtctcagtctttcatttaccatttactgtttaattttagctaaagtatagcctttgtttcttaataatttacatggatgctattatcaataatctacttttatatgtttaaccaattgatcaacccaccgtgatcaacctaccaaccttaaccagtgtaatctactcctggtaccttactagatgcacatttacggtattcagtattccaacacattagtttgtgttaaaccttgaattattgacattattttggattattatattatatggacttatgtgagagagaattgagaaagtgggtattttgaaaggataaggaagtgaaggatgaaggagaaggactaacgggtcaaactagagaaagaaccacctatttttttcttcacaaaaccaccaaatggcacccattgattgcgctagccacaagcaaagcacaccatttgatgaatcttgggttggagttttacaacaagaataatattggcaagctacactcgtcgattgaaagagatagatattgtagtgagctttggacacttcattcacagtcgaagttgatatgataataataattttactatggaaatctagtcacactaacattcttttctttgctttttttcacttattctcttttttagaaaaaatttaataacttttgtcaaaaaaaataataataaaaaaaaaataaataaagatttattattgtcttcattaattaagtaaaaattaatacatatatcttcctttacttaagattaaaataacaaaagtaacaacattatgcaaaaagtcggaaattttctttcatttataaaaaattattatctagtttaaatgtatgcaaaaataccctgggagagtttgaaaataaaacctgaatattattggatataaagaaatgcatgtcatattagtacgtcgatttattttaatgatacatgattatattgtgaattaaatagtgacatcaagttaatttttgttaagggaatttaggggatggcaatatatactttggaatttggagtgagttgctacttgctaataataaatatatatttttccaactttcgtcaaaaattgtatatgtttatatgtttgttttgactctgctagcgtaccacatgtttgacagcgatcccaaattgggaaatttgattttctatacttacatatacctaatattttatacctaaactaatacatatcaccattga

SEQ ID NO: 302255 - DNA, 2344 bp, Cannabis indica
aatttttttttttattttcatttgttaattttatttaagtcgggtccggggttaggaccgggtctggggccagggtctgggtctaggtcaaacgctggggtccggggtcaaggtccaaggttcggggtccctgctctagttcgggtctcagtccggatctagtctgggcctgttctgtctagggtacttgtccggtccagatccggatcagggtttggtctcaggtccaggttcggattagagtttagggttctgattagagtttgggtccgggtcctgattcgaggttcaggttagagttcgggtttgggtccaggtttgggtctggagttcaggaacatggtcggggtttgggtccgagttggggtccgggtcccaaggtttagattgtagtcagagtccaaaatatagattaagaaaaaaaacactgttcaaaatttttttgaaagttatttttattttatttaaacagttttatagaacacgagtttggaaaacatttttaattttctaactcaaaaaataaaaaactaattaaaaaagtatcaccgaacgcatccttaataagttttatttgttttttatgatatcagtttgtaaatataaataaacatgatttttcttcagaaaatcttagtttgtttgaaatatttattggatttttaataatttttgtttttttttttttaagatatgcgttttttaataaaaaaaattaatatgatttttaaagaataattttcatttttttaatgtaaaattaatttttgtttctttattcttttaattaatttaataattaagttttaatatcttttttatttttttttaaattaatagaaaattataatttttaaaataaaagcaggcaaattttagtattgttaaaaactcaagagtaaaactgttaattattaacggtaaaagaaacataaactaatagaaataaaagtaaaattatataattgttatattttaagaaaaatttttaataaccattatatattaaggcacaatcggatagtgtcgaaaatttatgggcaaaaatataaataattggttaatgaaacacaaaatataccttatctttaattttaattgtttataaaagagtatgagaataaaagtgttgacaatgaatgcaccttaaaacacagtcaagttctactcaaaataatagtttaatatgcatgtcactgaaattaatttagactaaaactcatgatgattattaaaaaaagataaataagtaacaattaatgcgtaccagtaatcctatcataaacatcagcagctgattctccattagggaatcgaaagaagaatcggccatatagtgtacggagtgtcttctcgtgcctcatcttctctctatcctgaaaattcccttttccataacacaaaatttcattagccttttattcggtttcaaatttgaaaagatttattaattatttaccgaaatcttgttctcgaagacgaggctcttccctaaacccagctattctggatcgatcgaaagctcgacccaacccacggagagtttggcgggttcttctgtaaggcgaaacgtagaagtaaaccttccaattagggattccgtctctctcgatcattttcctaatttcaatcccagactcctcagcttgagcaattcctttctttgttagcgagattttggggtctgcgattcttgtataaacgctctcgtcgaggttcccttcgctctctccatggcgaactaggattatccggcgaggcctcggcggcggcggcggaggattcatcgcctgcaaattcacttgttgttgttgattctcgcttaggttggaattcgaagatgagcaccttattgtagtgttgttgagtctggtgtgagaaagagatgaggaggaggggagtgaaagtgatagagatacaagtgatgatgccattgttgatgatggagatgatgttgttcagttgatgagaaagttagctaaagaaaagggattaagtgagttgaggggtttcctccattagagtacaatggagtttggtacggtacagtagtgctctcgcgcttagctaattatatggcgtacgttaagtttgtcatgctatcctaatatcttggaagataattataattatttgggctgaacccttaaatttcacattttgtaacaaataatcttcaattttttttgttgaacttaaaaaacttagggtgtttttcgtatactttggtgccgtttggtaacacttttgtttttaattttttaatcacaaaagaaaataaaaatttttgtttttaaaaaatttgtttttgaaaaacaaaaatgcgttctgtaaccacttttgt

SEQ ID NO: 302256 - DNA, 7442 bp, Cannabis indica
ttaatgttgctttaatgtgttcaacacatccggcctacatgttttggagtagctattgaaatatccaacttctttaatggcagatcatcgctggattttgggttctttcaattgtgggtagctggtgcaatttcttgaccttgttctacataggtacgatcagaaactcaattaagatacacttcgtttagtgttgctaaatttttatcttttcttattttttctattgtttgaaaacagctgtgattttgctgcacactttgcctgtgctttatgaaaagtacgaagacaagattgacccgttggcagagaaggcaacatttgagttgaaaaagcagtatgtagttttggatgctaaggttttgagtaagattcccaaaggacctctgaagaagtttgtttagagaggctctgtttagtcttagggaggctacccaggatgcctgacattttggtaacctcatggtttttgtagcttgtgatgatgccaagtcattttctctcatcatttcttcggtctcttcttactcaatctgcgcgacgacaattaatggatgcctacccctttctttttggcttggtttggtttttggtgattgtggtttcagcttccctttcaagttgtagaagttatttatatgcattttgtaccttagtttttagaaaacaagcaccttaaccgtatttgtatccaatacaaagtttattaactggatattaatggtcgcttgtacatgggttgtcactaaaaatattttgaacagttatggtgttcaagcttctttcattttgtaagctctattgtattcaatgctttctccttatttgtaagcttttgctggcagtagactgtattttagaggccccttgaatttttgtttgctttatttcgagggagaattcaaagaaataagttttggcgaggctttcattgaatttgaacaataaaacaatgtttttctcttgttttgtatggtttcttttttttgaaagaaattttgtttgcttgatagtcggttataaattaattgataataaaaatttcaaggctttttgatagcaaattaccgtaaccatccatcgcgagcttaattcattcaaatatggcaaagatttggtgaacgattattgaggaaagactgaaatgaaaacaatcgaggcaaaaatatttactcatccactttgtccccttgggtaattaataaatacataaataaattgaagcagcacaacactaaggtctaagcatatattcatgtgggtgtaaatgatttcttgagcagttccaaaatgcagataactctcccccaatttaaatgggaaagaaatatcaggcctccactcaaacaaaataaccgtatccattcaaacaaaaataccaggcaactgatcaaactcattcgtatgaagaaagaattgaatgaacaaagattaatgtcaaacaaatattaatctatacctcttaattacaatatgcgaacatattttcatattcaatatctgttgagcagcctgttgctttgaaaattgctatccgaggatgagagaggcactgttgagaactcagaatcagaatgttcagagttaccactattacctcggtagggaaaagggcttgtactgttttggcttgggaataaatttgtcctcgacaaaccagatccagtagaagtgacgtttgttataggctcaggcttggttggtgaaacatttgccatgtttgcacctctatgtaactcttccctgtcctgtgcagaagaagcagcagcatccatggcctcccttctctctctttcttcactttccttaagaagaaaatcaacccacaaatctgcaaaggactgaaagaaatggagatatatgagacaacattgacactgattgtcagcattaagttagtaattgatgaaataataaatgccaacacatatctatgaagtagacagatttttgtagtgctggcaccctggtagaaagctaataaacattttagtgtcaaataaatgaaaaacatcttcattacaaagctgttaattttgcccattccaagaaaaatgtggcagcttagtagagtactatgtacccaagaactaaaccgcaacaagtttcttattgcacaactaatcaaaagacacttccctataaaccagagattgtccttctcattacctggttatcagttgctgcattagtgggtacttggccagaacttccccccaagatgccaccaaccagacggccggggaaacccaaaactcctcgaactacaccttttcctccaccttgttgagcaacacctattctttgtttatcttcatcagtgaaacccagcattcgaaccataagatccaaaacctaaagacccacatacataataaaaatccattagcctggctggctgtggaaaaaattgtagagaattcactaattataaaaggaaaactagatgcaactatcaatatttcctaaatcatcagcacattggaggtattaattctgagggcccttctccattaaagaaactatttcgtaatgctctgcaatttaaagaaactatccattaaatatttccatacctccttactgtagtttctttggaagtaagtaacgagtaatttgatcacaatgcgtctgcaaaaaataacggcagttaaggaagcagcatagcagcatgaaataaagaaataagtaattcagatatccaaagtcattttggacggattggcaagaggctttttagccttagatagcaagagctaatcattttggtttccagcaaaagtaatatgtaaggaaattccaacctgtcaacaaggaaatctgaatccactgacattctattaagcctggtcatgctctgctcaagagcacgccgtaattttgcattgtcttcctccagtttatttactctgcccttccaatctgttagggtcctttcagcttgcaaaagcttagacaaaatttcatcattttcccgctttgacacctcagcttgaatatctgcattctgagaatagaaggaaatcttaattggcagaaacaaaggaaggaaacgtggatttacaaagttggaatcagattttatgcagcaacacttttattgcggcaccaacaaataaatgcaatgcagctccaaatggatgagaatagatatgatactcgaacaaaaaaaaatcatatacaacagagcaaggataagtttattattactttcagcagttcagagagcttagccacttcttctttagcatgagccaaatctccttctagatgttcctagttaaaaaattatcatattaatatccaaagctgctcgctgcacagtaacaaaatgcgggaacagcatatttacaaactcaatgagagaaaagaaacaagattatcatttgtttaccttagcttcaatttcagcataatattggccaagagcagtttgaagatttataagttcaacatttttggcttctatggtgctcatacagtttgtaagtttcttattaaggtcatcaataagttcctttgacttatgaatttcattgttggtgatcaccttgacttcctcgtgatttgccatggcctgcttcagtgctttctctaaatataagatatgtgccctctggttttcattagtatctcgtagttcttcaataattttgctgtcctcatccattttttcagattcctcatattcctatttaacaaaaaacaaaaatcactgtcactactgagagatactattttttatatataattattcacattcagcattaggaagaggcactggccctaatttaagttgcaggttaaacacgtaaattaaactgcaattataagagaatcattgcacatgttcaaaaaaaggaaagggattattatggacaacagacagataaccttttctaacaaatgctgtttaagacgtgccaactcttgtatggctttatccctttcgcgacgtgcttccttcatctctccatccaatttttgaagagatagctccatttcttccttcccagtaaaacttgctgatggctctaccttctgccaatgaaagactactaggttagtggttgacgtttacatgatcacatgttgtttgtaataagagaagtagaagtttttattagtaagtattatcacagcatagagcatacaatcatttgaagaaaactgaggagatataatgtcaaaattgttaccacgtccaccaattactaaccagtaatttttcgtcaattggcttcctgctcatttccacagtggccttaagttcattcttctccatctacaaaatgaaataatattgtacttcattctcaagccgagggcagtcaaagcagtgatacgaactttttctatactcaattaatgaaagataatataacaaaccttaagggtagcattttccttttctagggttgtaatagatttttttaaattctccacgatgtcatcagcaccttcagcttcttttctattcagctccatttgcagtctttttaccatggatattttctcattcagctcatcttgtactttgtttgactcaatggaggactgcttaaagaataaaacatttcaccacagaaaaggcatgttgagagaacaaaaatggactggatgaacttaggcgttaaaaaaggacaaaaatagagtggaataacttagacattcaactatcctgtgtaccattgaaactcaccttgtcattttccatttttagcaatttgatctccttctggaaagattcgttcagctttctttcctctgaaattaatgggaaaagtaaaacacaagacatcagatgacactattatatatttgccaatcgtgtatactgaaagtttaaatctgtaccttctaatttcagttgtaaatcagaatgattattacgttccttttcaagttccaattgcaattgtctaatctcagcagtggcctgcgctgcagcagctgacgacctattattctcttctagcaaatctgcaaactcctagaggcattcatacatctgttgtcaagtttattcatcattaaaaaaacaaaataaaagtaatagcagaaaacctaagacagaggcagtcaagatattttgaacagctagaacagctgtttttgttaagcgttaagacagcagaagaaatcagtctgaaacttcaaatttgaatattttgatcccactttactcgaaatgacatcaaaacgaacctcatttgtaaatccattgttcactccatcctgtttagagacaacaccattatgcacttgatttccagaatatctgtttttcgcttgacttgtgaatttatgttgccgattgggtgaattctcctgcaaaagtaccatgttcgcatgcacactacctcaatttttttttcaagacagcttagacactacctcctcaatcataataattcactttttatgcttctatgaaggaaataaaaaagccaaagcagagaactaccttcaaaaaattcgctccatttgttgagaccttgcgactttcatttctagacacatttaaagcagcagtagttgattcaaaattatgtttcaatgatccattttctttattcaatctggatatttgatcctgtaagacgcaaaaggattgtcaaaccaatgccaagcagcaccaaacagctaatgaaccaccattacatctcaaatgtacctctttttccttcaacaaagctgcgtaatttattgatagtgctttaatttctgcttcggattcctgaagcctcttaatttctgatttgtaatggtcaatctttacccaaaagaaagaaacacaggagaaaaaatttaaaagaaaaacacggaaaaagtaattcaaagcagatgcatgtaaaaagaaaatgaaaaggcgtaataaacagaaaccctcatttgcaatcctctcagttcatagtcatcaattcttttattattattattactagtattattattattttacaagttttataaatagagcatgcattcatattaagtataaaagtatctaaagttcttcaagacatgttacagataaagcttgtaactctaataagaactgaagcaaagcattataagtaggaaatgtaacgtattatttctgactagtacaacacaatacagacataattaaactaaataaacataaaattcatagaagtgcagcataagagctcttagataacaagttctttcctgtcattcgcacattctttcttcttcttccgtttttcctttttaaaaatgtaatgtaggatctttcaaaaaaagaaaaaaaaagtaatgtaggatggagatatgctcaatatgtttgtttgagaaaatctacatgatgatagaaagcatcatcaacgtctctctaaatttaaccagtagatgtatatacataaaccgcagatcacaattacactcagcatttagtaacctcaaagccacgttatccccaactacaggatccacatcgcaaaaatctatcgaaagtgtttaagcaaaacgaagtttgaattcggaatatcaaactcatgccaagaaactcaaggattaagaaattatttccaaataaaacataaaaaatcctaaaacaaagacaaccaaatcacacattcgaatacaacattagtttttctcaaatttgaaaattacacaaaggtctcaaacaagattatcgaaagagccactgacttacctcaggactagcagtaggggaatcgatcccgttcgcgagcgacggtcgagaagctgactttgaatgcgcaaaactatgtgaatttctccgatcaaagaccggcgacgcttcgcttccattgaaacccattgatatcgagttcgtcatcatcttcatcgtcatgcacatcctgtgcgatcttattcaggttctccttcaaatttgctatcgaactccacatccatccttacccccgaaaaagatctcttaccacaacgatgcaacgatgctctcaagcagtatataaatacacacacagttgagccctgacgctacaaatcttagaaaaaccgaagactcgtgtgcttgcgaatggagataaaccttaccgactgcaattaggatttgagagtgtaaacgagattacaatttggttagatctgattgattgaagggaaaagaagggttgggtaattttgtgttcggagtatggatgggaaggggattggaatttcagtatcacatcaaaaaataataatattaataattaataataataataataaatatcttaatttattagttggaggacacgttgtgtcactaaccaggatcgtcctatcagcctccaatacttggcccatttcttcttaaatagcttctatgcgatttttacaaaaataatgaattttaaataaaaatttacaattttacttttagacggtattttacaaattttttttttttttataaaataacaaaacagaataattaa

SEQ ID NO: 302257 - DNA, 1572 bp, Cannabis indica
ttttctctctcggctatgagagtgttgggataccaacttgacggaatgtcttatttctaaaattttactcgagagaatcctctggtgcttttgttcttttctttcccattctgttgggttctttaagatttcaaccaaacggttatttttttcacttatgcaagatatgagggacaaagcaggtgtatcacgtgaagcgaatacaggatctgtggctacaggagacactgaagttaatgcaggggatcctgaaattaatatgaacttacttctcaactaccccaatctgttgacaacaataaggaatctagtgctacagttaatggagagggggaaaaagagactcaaaacaatgatgtcaatgaggacccaaaagatgatttcgaaactctacgaaacaacttccttcagtctatgaccctggatttagagcccgattttgaactcactgctgagattgttagctcaggggtgcttgccagtttcatggatgacaaaggggtctctaagtctagacttaaaactatcctttctcagatttggaagctcagggggaactggaagttcaagactatgaagccaggagtctggggtattttctttgataaatcagaggactgtgctgaggttttacgcaaccggccttggataattaatggaaaacttctgatcctccaagaatggccggaggatggtgactggtacaatgtaaacatgaagaaagctatgttctgggccattgcttcaggtttgcccaccccttatctcaacggagtcaattctcgtacggtggcttcaaaggcaggaagattcatccggagtgatcaagcaaatacaaggacagttgttcgaagaggatttttgaaatttcaaatagagattgatacctcatttcaactctcagctggttttttttctggatattaagaggggaaggaaggagtggattcagttcaggtacttcaaactccctaagttatgttacaactgtgggtaccttggacatgataaaaaggcttgctttcggtcgacggctctagcttttccacctgaaggagatgcggtatgttgcgatatttagcacacgcaagtgtacgtatcgtttcaagtagtagactcactaggagtgaggtcgatcccacagggagtgtagttaagtacgttaaaattaaacttttacttctatttgattaaataaaagataggaaaaacaatgaagtataagaaaaatagttggaagcaacgattcgagaaaattgatagttaataaactagggtgtcgatttcaattgtttttattgaatatggcctaatatgattattttcctaatattaattcctatgcaatagcaggtttactaaggtaatttatagtcttctcagatatataaacctcaattacatgcaaactttctactctcgtgataaatttaacatgcaacaggcattaaacacagaaaccctataagctatctaaaccatataggtactctcgtcctatatcgaaattcagttctattctactatagcatatttgacactcacttctcagatctcgcatcaaaatcatag

SEQ ID NO: 302258 - DNA, 1489 bp, Cannabis indica
atatttttgtcaattaaatatgccaaaaatagaattaacaacctaaaacctcaggattttagttgataggcaaacctctcatggttatttacatggcagaacgcctgtgactatactgatcgcgtattaagcatttttatattaaaaaatagaactcgtgagttcatgatgagttgtcgcatacattagtcatttagactaggcgttgtaaagatgtggtctttacgtgggacataggggagaaatacttggtcaccgcacaatcgatatatatgcgtgactatgctaacttctctccatgtcatgtttttacgtactatatatgaatagtgtgcgactagacctgtcttggtcacactctctcgcaagtttagatcatgtaaggatagctctactggagttgttattaacatgtcatccttttttaactaggaacagagtccacgtgtcaacaatatttgactgcgttgtatttttagatgaaaaaattcattctataacaatatcaattttagaaatatattgaaccgttagatttggatccaatagccaataataaaagaggcatttaatatatatatatatatatatatatatttacactatatcaaatatatctaactcaaacttcttataatgtaaaaatgagatttttttttttatttagatagaaaaattaattggaaagaatgaaaacataagaatataaatgagaatgaggatgtataagaatatgaatataatagaattaaatttaaaatgcataaaaaaataataaagaaaattattaaatttgttctcataatttattagattaattttttatttttttgcaaaatgaaatagtcattctattaaaataataaaaaaattattctaataaaataatattctaatattttaaaatacaatttaataaaaaaaatgaaataaaacttatttagttcctatggactgtaacacttttttcataagttataacatgtttgcctctcacatcacgcaaggcaaattgttcatgggaaacatgtttttcttggatggctacaacaaaacgtgtaatgtgaaatatatgacagtcaattttaattaattactcacacaaatacataataatacctaattgaatatatcaaagcatatgtatgcccaataatacctaattaattttgttttaggttaggtatttacctccatctttatttgcaataacttttaaattcctaccaaactacatacacacaggacggattcacatagaagcaagaaatataatttaaaaaaatcaaggaaaaaattatatattttttagatagttaagatatatatttataatatggaggaggttctaatggttacatttttattgtaaccatcatggttacgttttttttagccattggatcagcattaaatggttgtgattaatttagaaattaaataaaataaaaaaaaaaatgacctgtaacctgatattaacctgttaatt

SEQ ID NO: 302259 - DNA, 2939 bp, Cannabis indica
tatatagacgcttgaaagacctcaatttgggaggcaggcttcctcctgaacttgtgaatcttacatatcttgatacggtgtaagtgtttattttgtttttcactagctagatactatatatgttatgcaaatccactaattgttctaatagtaaatataaaaatatgacatttattatgatataaattttgtataatttaaatttagatatttttattatgtaacatatttgcattattatttggtatatttttattagaatacatctttaataaaatgaattatattttacatttacatcacttattttattcaatttatataaattgataaattactccattaatgctatggaataaattactccaattattagacgtttttcatttaaatatttcctattctaacttatttcaataagctctcgcacatattttaagttaattaaagtaattttagaaattgatatgtagttgttaaggatgaacctctcgtaacttattgggttctattttttttttttattattgttttggaatttttagtgatttcacgcgtaacttttttcacggttctcttccaccgatatggagtaatatgaagagcttgaagtccatgtcagtatcaatatatatttgattttattataaatttgattttttatgcttttgctttccttttcgaagctcactgacaaattcttgcacagttctcttactgccaattgcttatccgggaaaattccaaaagagtggggagattttccaaatcttaactacttgtaggtttgattaatttcacatcttacttttataaacaaatataattttatgattttttaattatgatttaatatctttaacttattttaataggagaattttaaagtacggttgttatttatcttcaaatgtaacgatatgtacatattataattatagcaagtatcatacaaatttttaaaaattcgaaataacaattatggtgtacatgaccaataaaaaaaagtagttacttgtttaatcaattatatactctattttcggcatcatacattataaaaaaaatgaaaaccggtagattgctttctagaactataatatacaccattaattatatatgtgtgttatgggtagaattagaaaaatttaattttttatgtttaatttttttatttaattaaaaaaattatatttttacattatatgtgttctattctattggataaaaaaagatttcacttaaatattttgtatataaatgtatttttgataaaggcgtaaaaaaaaatatttttaattaaataactaaattaagtataaaattcaaatttctctttaaatttttttattagtaactacaataggagaagtgtttcataaacagaaaatgagtcacaattttcttatttgccaaaaatagaaaaacatagaaataaaagtgagatccgtagctactatttaatactttagttgccttattatgatttaaacttaatgtaaatgcagaagttttgaagcgaacaatctttctggtagtattcctgaggagcttgggaagctaaccaacctaactcacttgtatgtaattatatatatatatataattcgtttcggttttcatttatcattaaatacaatttgttgagttaaaaaatgtgtatatatttatttgatcaggttcttttcttcaaataagttagtgggaaagctgccaaatacacttggaaatctgacaaatttattggatctgtatggttcacaagtttctgcttcttaatagtaatctttttgtacatatttttggatggtgttgtttgaaggttataaaactaattacttgttatttcttttgtcatatatatatgtatgcagtaggctaagcgataatagttttgaaggccctataccagaattcattcaaaacttcactcaacttaagaggctgtaattttcccttcaatctttctaaccttttattacattaattttacctattttgatatatatctttacacaattacatattatcattaatgaagggaactatatgcaactggactagaaggacctatccctgctgccatttttcaaaatttaaacaatttgactgatctgtacgtaataaacatattaattaaacagatacttatttttcaccatgcatgtgactttatctaattaatggtgttttaaatacatcttttaggaggatcactgatatggctggtgaaaagtctgacttatctactctaaaaattaacatcaagaatagtcctgatcatagtgtattgtaagaaacatgtctcttgagatatctcttttacttttcaattgttgatataacctgatttttattttcagggtgctcagaaatgtgaatttaactggaattatcccaaatacaatcgtgaatatgattacaggattaaagatgttgtaagttttaatcaaaactcttttcctttgattaattaattgctttgaaataataaaattatttagtattaattaaacgagatattcaacgacaagcaaagacattttatttatttatttaacacaattcccttgagaaaattttcaatatcctttccttttaaaaaatgaccagattgaaatagtgaaagattagtaacttcgcaactagggatgcacaccggacggggaattagcggggagtgctctcctcgtccccatccccgttaaggattttaatccccattcccgccccatccccgcttattccccatcggggacggggcggggaatcccctaatggggcggggacggggcggggaatcacctattgtaaaaataaagtttattttaaaaatttaaatgtataaaattattaaattacataaaagataaaatattacatattatttactattcaatatagtaattattatacaaaaatacaacttcaaaaattgt

SEQ ID NO: 302260 - DNA, 4082 bp, Cannabis indica
atccaaggtgcaagtaaactactgtccccggatgaatgctttgaaccaaatacctaccaggtgcatgctagccagccctacaatagttggaggcttgctagccaatgcttgccatagggtcgaccaggggtggtcagccaaccccctacttcccgttagctgaagtgttgtgtagatgacttggacatcttgttgacaagttgcacgtggcattgatcttgatgacgtggacattccacgtcatgtgggcaaaaattgggataacagtaagcaatatgttttttttgggtttcgagatttaaccaacatataatcaacatagaccttcatattattcccaactaaatcttaaaacatacatttcagtagtctttgatatgttgcacctgcctttttaaggccaaagggcatcactttgtaaaagtacagtccaacctctgtacaaaaactagtgtgctctttgtctggcggatgcatgcttatttggttatatctcgaatcggcatccatgaatgtgagaagttcatggcctgtcgttgtgtccataattgatcaatatagggcaaaggaaaataatccttggtgcaaactttatttaggtaaatgaattcaacacatgtcctccacttaccattccatttgggtaccaggagaggtttggacttccaatttggataaaaagcttccataataaaactgttttacaaaaaaaaaaaaatcaacttcttcctttgagaactttggagtattctttatcaaagagcccatgtttttgctgcacaggcttgaagttatttttatcaatgttaaaggcatgagaaatgattgcagcatcaatttcagtcatgtgcttatgcaaccaagaaaatacatcatggttttgttagagacatgccattagaagtgttctcaaggttgtccccagatttctaccaatcttgacaaccttggtaggcttcactttggtgagagggatcttttctagttcctcagttggaccaactcctaaatcattatccccatagtagaggttgatatcttccctaccttgggtgcaccgttaggcatttgcaggtgcgatcttcatcttgttcttagcgagatccaacgcctcagagatcttctttttatcaactcattttgtagccaatgaggtcttattagccacagctagcaaagtgttataacactcacgaggcacacgttggttgcctagcaagtgttcaatgcctatcgagattgagaacttaatgggcaagtgaaaaattgattagatggctttgaggtcatagagagaaggcctcccaagaaccacattatattcagattttgtatcgaccactatgaaagtttccattatagtgttatcatgtggggattttcccacggttaggggcaacttgattttaccacatggagaaataacttctctactgaagcatacattagctgctcgcatggcactaggtctttcagggacaaactgatttgctccaaatttgtttgaccatgattttggatgactctccaccgtcatctattacccttgctacaatcatgttggaaatttgtacctctaccaccaaggggtcattctgaggatattggacatgagcagtgtctaactcttcaaatgtgataagatcacactcgaagtgttgggccttgagaggtctctcctaaacatccaatatgtcaacacaaggctcatggtgtatcaaccttgcatacctctctaatgcattccttgagtttctagctagatgcgggcctcaaacaatcacatttaatcatcccgcaatggttgcaggttggagaggtgcgataggctctagaggggatgttggttgtacatatgattggagggtagcgtgcatttggtggatgaaaaactcgacgtcttcacacaactgattacactaattggtatcatgaccataatcattatgaaactgacataacttgttcatatcacgcttttctatttcctttttaagggccacgatttcttatatggcactgtaaattgagtggccagaaaaaattcttccctatgatctaaaagaatggaataagtggtaaattagggttcataatcctaaaagatcttatcccccatcttgggcctcttggctctggaagacttgctagttttaccattgtttcctcttttcccctcaggctttgctcctttcccatttccctctacgcttgagtctcaggagcaagagagtcttcaagcttttagctcaagatacaacttcctcgagtttgataaagccatcaactctatctagaaactcatgcaaagtgtagactgatttcagtctaaggtccgaccacagaagactcatctccttgagcccagttgctaaggccatgacctttgcatctttgttaagaagttttttcttagcagggacgtccaaaaatctatggatataatccttaagggattctttgtctaatttttgagagggcaaactaaatgtagaaggcctctacaagctcactctaggaatctatatccaagggttagctttagataccatctctgagctattccaaacaatgtggctggaaatatctaacaccgtgcatccctttacacatactaaatgtcaatttacacctcaaagttatgtatgttagacagtgggtcttttttaccagtgtacaggtgccatgctagatttttatacttggagaaatttccaaggctttgatttggacaaagaagggtgatcaccattctctatctatctcatactcttttggctttaacttagccatatcctggactaaggctaccagagtctcacatttgactctaccaactacgcaggtggtggtatgcatacaatttgagttttagcaacttgtacataagagtcagcactagaagctcccgcttccaccaactgcttttggctgagatcattcattagttctttatgtttcctaaggcaatcaaagacattggccttgttgaccgtcttctgaccaggcggcctgggtggcaaccttgagcatttctgctagatgatgacagagacatctctcaagagatcacttctagcgtagtcactcctggtgttgcaacaactatttccttcgaaattttcttcttaaaaattgcaaatgtagagggagtcaaactaattactccagttcaactcttctccatgcacctgcagaaagtattcttatttcgtcccgttgggtccttgggcaatgtattaacacaaagcaccttcattatccaagaaatagttctgggtgtgaagtggtttgttgttccttaccctctagattttgaacaaatcattatcatggttcattctttgagtggaccttactcgttctactaaagatctgtttccctatgtagggtcacgaggttgcttagaatcaacagaccaatgagaggtagctctctgtggtgatctagttttcctacaatttggattgctccaagtagagtcctaatagactcactccaccaaaggtgcaaggcctataggggttgcccacccctagtttgatgccagtcgaactctcgctaagggttttcttcctcattaagggctcactcacttctagtctgaggccttcagtctccttttaagggtttgcttccgaaggtgggggtcgctcacttatggtctgagtcctttcgaactctccttgagggttcgcttccccaattaggacattagtggtaattgctcaaggagcggtggcagtgctaccgagatcggtagctataacattccttatgttcagggtttcaccctgagcattggtgtcgacatggccatttggcacacgaggaatgcttcctttaatggatggtactctccctagcaccatcctactgtcagctagaaatgcttcgtgtatcaattgagccagattttctctcttatgcctttggtagtttgttgagcctcaacactagtccattgcacctagaaactgttggatattattttaccaggatctagatttgctaccaagtatgtttgattaacatcctaatatgaattctaaaacaatgaaattaaacacataagagttca

SEQ ID NO: 302261 - DNA, 6270 bp, Cannabis indica
tttttttttttaaaaaaaaaagaacccaaatgtagaatcgaaatagaatataaccactatttttttttttttaatttttttgctaggaaactattatctttatttgagtctcttattttaaaatcattattctcccgccattcaaaccagtaaaaaattactcattgtttttagtcttattgtctgagcttaatttttctggtttatttactgtgaattaaactttattttcatcattattttagataattatgttttaagaaattgatgaaattttatcaattaattatacgttagattataatttcaatttattatagtaacaactaacatattgtattctcataaacttattaaatatctatttatttaaaaaaaaataattagtatttttatctgttaatttttttacattatcaagttatagctcatatagtataatactttaacatgatcattctcatcatatttaatttaattttatagtaaaacgaatatagctatgaatactagttgataaatagatacaaattaaatatatttcacatttatttacttaatgattaaaaacaactaaaaagaaaaatataaattattataaaacaaaaaaaaattattctattattcattaagttaaaatttgtgaaaaatatttaatttgtatatatatttatcaactttaggatgaaaattaaaaaaaaatgcaatgaaatgattacgttaagattatgttaaatttgcataatatactattattacaaaaaataataatcataataaataaataaaaataaagaaaataaaaaaaaaaaaaaaaggacgcagatatatacatttgagcggtggcagctgaaccacgagcgattccatactccactccagagtcgaagctcagacccacggccatggtgtcatcaccatcatcatgatcatcacctacagctacctacctatatactcttcatcttcttcttcctacatggcttcctgttctctgcagctacctacttctgcttttgaatattctacgacaactacaaggacatggaggaggagtaagacacctcgtccatttcaaatcgtctgctcttctcttcaaaacggaggagaaaaccagaaccttcttcctcctcctgatcgcgccaagtaagtaaaaatcaaaatacaatctgagtccttcttcaattgttataatttgaatgaactctttccgtacagcatcatgtcgtttgatcaattgttgtgtggtttttttgctgcagatgtggaggaggaggagtcgaagaagtgattttggttgaaagatatggcaatggtactgctaagaggtccttactttgttactcatttttttcattttgattaataaataacaaacaaaacaactaattactaaatttacattgtcctggtttgaaaaatcttagattcatgttatgttgagatttcttgtgtttaattttgggcaggtttgttgtagatgatgacttacagtttcgaactttacttgaggaacataaacccatttctaaaaagtctcaggattcacagttctccaactcagttttattttgggttccagatgtggttaaagattttatcttgcctgcaggcttcccaggtgtgacaaattcatctctctttctttctttctttccttcctttttgtcatttccattcctgttatgttattttctttcaattacttatatgatattttttacctttgaaaatacaaagttgaagatattttatttatatctggttagttagagatcaacattttattcctattaggtttcgtttgctttttttggaggagtgaaaacataagaattggaattggaattagaatgggagtaagtataagaatagagtggaataaaatttaaaatgtattaaaaaaaattgaaaaaaattattaaagagaatagtcattctaccgaaattgtagaaagtcattgcaaccaaacaatggaatgtaatgaaaattaattcatttccattctactttattaccccaacctgattttttgcttttcttcatatatgatgcagggtcagtgtcaaatgattatttgcagtacatgttgttacagtttcctaccaatgttactggatggatttgtcatgcattagtcacatcaagtctcctaaaggttggctattgtctcaggtcatttcctttgaatggtctcaattgacaccctattttgattgcttgtttttcttaaaacggaagagttaatatttctttctactatcaacactttggatctttggaattccctctcacattggatatttctactgctaagcttgattcttttgttcttgctatgttaacaagaaagatgtttttaggcaatagtcaggaaataacatggctataaattcaggcattgctagttttagcatagtgtgacaattttattcaaaaagtttatccaatccattgtggtatttctttatagccatgtctaataaattcttcatgttgaaccagaataccattataaggacatatctagacaagcaactagaatctaggaaatctgctacagaaattcaacaacgttaattcctaatcctatggttagagatctgcgagaaaacaccactacatataagaagaaccaaaccaataacaaataccagttgcatgctggaagtgcaattacacataaaattttttttggcatgaagtatctttgttgactaaataaataaggcaatttgatgagacttagaaggtaaactccaaataatcattgttttggtgtggtttcagtgagaaatgaaggctatttgtaaccaagtgagctttgtttgtatggttggcgtgccgccaacttggccttcatatctctagatatgacctactttagccctataatgtgtgagtttctgtctgccacatacatagctatttttgcctttttggtcatacacattgatttttcaacttggctaaatagcgctcatggctagttttttaaaagctttatgtagaaagggtattcagtggtttttggtagtggctattgtattgctacctctctactttgtggatatattttattgctctttatcagttgatgttggtttatagccaaactatgtttttctttctttgccttatttgtttacttttctttctttctttcttttctttttttttttttttgttcgatttagttcctttgtaattatattccactttgtacactggttagttcgacactggttatcgccattggctggtttattcaatcaactacttgtttaaatctacttgcaggctgtaggagttggctcattctcaggaagtgctgctgcagcttctgcagctgccatcaggtaaacctttatctttttcttccataataattgaaagttctacttgtttaaatcatgattttttttccttttttccaaaaaagacatgcatgtaaacgatggtttcattatatacaccaaacctttcaatggactgagttgtagattgtaagattgtttctgcaggtgggtatcaaaagatggcattggagctgtggggcgcctattaataggtcaggcaatgtgaactaaaggatcataaatttgttttttgctcgaaggatcataaggttaagtgctagaatttaccagtaactgttgccttgttttgtaggtgggcggtttggaaatatttttgatgatgatccaaaacaatggcgtttatatgctgactttattggcagtgcaggaaggttgtgtatcaaaccttctatttgttgttagataaattataactgaagtcacaaaacatcgaagtcaaacttaacaatttcttgtgcagcattttcgatcttatgacgccattgtatcctgcctattttttgccactggcatctcttgggaatctaacaaaggtattctactactctgctttttctctattgatgaataatgtgataacatgcactgacatttgcataactaactaatttaaattcctatatatgccccatttttctggtaatgagcttgctacctatacaggctgttgcaagaggacttcgagatccttcattccgtgtgatacaaaatcattttgcaatctcaggaaatctgggagaggtagcagcaaaggtataggatttgaacgtatcttcaatgttaccataaaagattatattcatttatttattggctagtgaatgagaattaccacagtaatcttcgatcaattttggctctgtggacgtgatttaagatgacgtcttatcatcttttatgttaaatatgcaactattttaccttgtagacataaaactttatgccctttgccatgtcatctcaacaaagcattaagtttaagtactacagggctttatagtgttaatagttaaagctaattgttcttgctgtataagagatctagatactattagtaagcaattttttaattaatgcaccataatttttcttatgtttcattagaggatgaacggttcagttgagatgctttagattagtgaacttaccgccgctgctcatttaacgttaccatacatgcacctcaactccattatgcttttattgttgtcaaggtctttttgtatcttaatattattctgtcataagttaatttgaggaagtcttacatggttcagcaataatgaaagggtttttttttcttggaaatacttttagtctaattgccttgtcaattgatgactacctttttaaattatatgtaaccttttcttaaggagaatggtttcctcataaattctcaatttaactgataaaagatttcaggaggaagtttgggaagtagctgctcagctgattggtcttggtttgggcatactattcctggtattctgttgtaccatttctaattcttcatattcttttctgaataacatccacttactaagaactaacatattattgtttaatctaaacttgttttagaataatgaatgcaggatacacctggccttgtaaaagtataccctgttttggcacttacatggtttggtgtgaggcttcttcacctttggctacgttacctatcactttcagttctgcaattcgactctgtaagaatatcatatgctttgtcaaatacgagagcaaacaaaatgtgggaataggttttgagtagattactcaatgctattttttttgttgacaattaagtatgttttccctgttgtttcaattttcaaagtaatgacttctcatactcttgtattcattttttttatgtataggatatgagataacggttgatgtgagtgtgctggggtactcattgaactcttttttctttatttcttttctaacagataaatctcaagcgtgctcgcatactagtaaaatcacatgtattacactctattgttccaggtagcattctaaagttctgttcttaaaatattttttggttacattaacaaacaataattatgactccatttcaggatatgttgattgcaatagggaagaaaacatattattgtggcaaagattcataaagccgcaaattgtttttggtgtgcctttggaggagcttatgggtggcgagagatctcttaccatggtaatctttcaaacttcttttaattttatgaattaaaaaggagggaagaaaagtgaagttgggataacaataaaaaatttctccaaaattctgtaaagggtcataaaaacatatagactaatttattttaatgagcttatttgctaaggagcttaaatttactagttatgtttgcaaaacgttaaaattgagttgttgatgcatatgaccactttcttcattctaagatattaagttgatttgacaggcatgtgatttgcccaacaaagcctgaggttcaaatccttcttttaccattggtaatagtttcttggtcctcaaatattgcaggatcaaggggagcttagaggctgtttggttttacagtttaaaaactattaggagtcgtttggcaaaattttttaaaaactgttttttaaaaatttaaagcatgtttggtattgttttctgttttttgtttcaaaaaattgtttttaaaaatgagaacaaaaaatagtttttgaagtttttaaaacacaagtcacgtttggttagtgtttttaaaaacaatattgaccaatagtaaattggtttttaaaacagaaaataacattttgttgttttcaaaattcttgtttttgtaactttgttttctaaaaactgtttttaaaaaataaggccaaacaagtcaaatt

SEQ ID NO: 302262 - DNA, 2581 bp, Cannabis indica
tttttttttaacgtttttggggggtgggggtattagaatgtaatttcactccaacaaaaaaaaataatactaaaaatatatagtgagtaaagatagaatggaccaatagacactcattttataattgcttttttattattattaaactcattttatataattgttggtcctaaaattcttactagggtcacttgtcaaatattttgaaaatctttcacaattgcctgttttttataaaaattaattatttttagtgataattttttaataatgtattatttttttttaaaagtcacactaaaataattattattgtttttggctaaaatataatatttaaccacaaatcatcaataacatttacctttttaataatttattatgcattttagtcgcaacaattttttttggtgataacataaatatcatgttgatatattttttgtgacaaatatgtttcacttgactgatcacaacaaaattttgtcgggacaaacgtcctacaagctctcaaatatatcaaccaattaatttcccataaatcctacaagctctcaaataaatcacaataaataaatttaccgatcaatcaatttgcgagtagataagaactatattttatttggtgtccccattcacaagttttgaggtttttttagtagtacatagtagttagaattgtaaatttttatctcaaaaccaattgttatgaaaagaatagttcataaatcttatatattgtattttctttctataaattaagcaattggggactctctaactgtagtaacagtaacaaatttatgtctgtaaaacccaaatataagttctccagttaacttgatggggatcgatcacaacaccttgatatataagggtttctataatcttatatgataatttggtagataattgatcatatacatacctttcctaattattgttgtatataacaataaaattaacatgagatcgatcaaaatcatagtacaatagaaggagtgtggaagcttacattgccctcgagaagaaggactctttgctataattaatatcggttgaatttgtatgtattgtatatatataatatatagatgctcaccgcaagtgtttattgctatagttattagtatttatagtattatagtatagccttattatccaagagtttttggccacataaatataaatatagaaaatcctacgcatttatttcttcaaaaaacaatctaactcacctacatttgtatattattaattaatatctatttatatatattcctctcttcttaatatatattatatataagatttgatttgagagagtctcgaagttgttcacgcaacaattaaatttaatttgtttgtctaaaaagttcattttatagttttgtcccattggaattgaagtgtcctcatagctaggtctaatcttgtgtaacaatattaaaacattcaaacaaggctgctattgccattttcgtagtttcttataattttgcacactcactatttttggttattattaattataatattatatattattgatttcgtgtataaatatgtttgtatatgacttattatatatgaacatcaaaatttataatttccacatgcaattgaccttaatatgattttgatatataaatatataaatatatatataatgaaatacacttgttataaacatgttttattattattattttcaatatatctatacttttcattctttagattgatctatatacctatcatttatcgtttgggggtagatttttagtattaggttctttacaatataataatattaatgagtaatattgtttttatgataatactatcgaatctatgtctaaatagtgaccttaatagtgacaacttttatatttggttgcatttcttaggtctaaatattgatgtgggtatcatatatatatgcaatgcaaaatttcttgttaaaaaaataccaaattttcctaataatttgcactactcatatacataaatttaattttaataagtagtagcaaccatttgaagacgcattattgccaatattaattaacaacaaaatatatgatcatagaaaaaagaattaaaataacctaatagtaatacatgagagaaaaataacaaaatggaaatttatattataaagcacactatccatagtgaatatattgtaccacaattattaattatttaggaaatttatatttggtgttatatataaatatatatatcataaatattatagtagctagatatatgtttaataattttttgtaaaattaaataatttacggttccaaaatcaagattcaaacatatatatataaatcaagtacttcataaatttaaaaataccttaaattattcgaaattagaagtatctacgtccatttataaaacataatatgtttggtgcactaataatatgcttttcatgagaattgtttttaaaatgaaataacaatacacactacaaaagatcttagactaaaagtaaaaaagttgtgactaattattaattattattcctatgttgtgactaaaaggtccgtgactaaaggta

SEQ ID NO: 302263 - DNA, 9694 bp, Cannabis indica
ctgacttggcaggcccagctgtcagatagtagccacgtcatcatatgaaggcttttgggtgcaccttttgggcttctcctttcgaatacgcctccttaaccctctagagggtgttgttcactccatctcctagaaggttgaaagggcctccgagatcaggaggatctcatttctggaggcgaggcttctggaagtatgaagggctggggcctacctctggtttggactgggcctttgcatgctggaaggcttaagtcgctcatgatgtggatcggttacacccttaacacgctgcgtgtcactcatctgaaaacttggataacaaaggtgaatccagtgttcggatgtatccatgccctaattttgtcatctttctctgtttgctctccttcattcttttgcatcattatcttttgagaaaacgcatgtgatttgactcttccattatttgtaattttctttcttgagcctcaatagattgcttattaaattcagacatcaaatcacataaacgagcacttgccatttcaaatgccttgttcttctttcgtgattcctatccttcgaagatttttttcccaagagatcttttgatacttgggtcattgatatcatttctatattgtcgctggtaggagtcttgagaattaggagtatctggagtttgagaattcattacagtggataaattattattttttgtatcattcttttgcctttgtacaactaaagcatgccatttttactcatttcaacacttttcaaatcaaatgtaaattttttcttctccatctcaatgtatagcaattttgcttgaagaacctaacatcaaactacatattagaactagaagacaatatacatatacactatatcaacagttattccaaattgatgtctattctccatttgtgtaagatatccacaaaatttattgcaatacaaattttgtatcatattatattgtgataaatttgtattataatttgtatcatattatattgacacaagattaaagtagattttttttataaagtagactacattttatatttgcatttccaatagagatggacttactcagcaaatgaattggcttgtcatctattttgatagagaatgaaacactaaaataccattgccgattaagtttggagaagagaaataatcattgaggaacccaaagcccaaaaagggaaaaagcactgcattcatatgtatatataagcgttgttatgacttaaatgaagcaacagctacttgtccggaagcacctcttataattgtcaacttccttaaaatttgcaaatctagaccaaaactaccaatagtcaaaatatagcccattttctgtgtcctatgaaatatgaaaattacatcttggtagtgaggctttaatctctaaaaactcaactaagcctttttattattattgaaattgaccccactgtggactgtaataatagccaaaaccaaagattattgatttgagaataaaagttttcaaagcttgatgcaaagaacaccacatcacaaaacaaactatgttgaaattgacaagaaaccatgttgtaaaagcacaagataaaaccagaaaagaaccaagtgaactttcaaatgtaacatttctatatattaaaatttgtcatctgaactttagatcatgtcttattataagtttagaaattaccatcgaggatagcagagcaaatcaagctcaataagcaacacattctaatgcaaacaactaagagcccattcttcttcttgtaaatcttcaactacaggagtcacaatcacagtatcaaatacaaaacataaacattgagccacagttttccagcatagagtttattcttcccaaggcttcatggccaagtttttcataagaaatagtgcatattatcactgttcttcgtggtcttattcccaatgagtggatcaataatagttttccatccattaaaatctaatggggagccagcatcaggtaattgaaatccattgataaagaaagtaggtgttccatacacccctcttgcggcactatactgcaagaccaaaattattcaatgtttaatattagccataacaaaatcaaatttatctttggttgattagttcctccaaattaaactttagtaaccttaactgcagtaccttgaaggaaacccttgttttaaggtctgttttcctatcattgaatccagattcaagagtaccaagataggagcttccaactacttgtgttgcagatttaacaatctcattcacaacctctgttcttgtcaagttgcgagtttgagcattataaaatttttcctgttcaacagtagtatgtatagaacatatgaaagtgttttattttcatgtgatgatgatggtaataaagaatcaagttgattttcaataagctaaaacgaattgaaaccaaaactagcttcactgcctagaatatattttcaaaacatgggcctaaattatgtaaagaggatcagaactacacaaacctggtacttgaagaaccactccaacaacttgaatgtataatgatgattacttataccattaactatgtgtaaagcacgtgaagccacaaaagcattatcatggtaactgcaatttcaacaaacaaagaaattaattaattttcaataaaacaaagggatttcatcataaaccataacaaacaaacaaacaataaaatgggtaaagcataaataaaagactaataataaaaattagaattaaggttcataaaaaccccagatagagaagcccaaattagaaggaaagagataaaatttactgacggcaaaggcaataggtgtacgagaagccaaacacggtctccatagagggctagaacttgtttgaggggtggccaagcatctctgctatcggggcaaacagggtcgagaaacgcttcaatttgaatcgcatcccaatcgactcggtgttttccatagacaaacccatcaaattttggaggcggtaagggttgagcatatacaatcgaaacggataacaaaaagaagaggaaagttgactgtaatagggaagtgaccaagtttggtcgcttcatcttttcttatgtcgtacttagaccaagaataatatgggatatatctaaatagtagtggagaatgagaacgtattattatctatatctattcttaattataaccattattagtaattaaagtctcaatctcaaaatccaacccttatttataataattgatttgtatatggccattatgaacatagacacaaataagaaatgaaaaaatggacatgtactgtaattaaaggaaaatacaagattgatgttcactcaactctacatctctcccaaatccatattcaccatatacgtcacttttatgtatacagacgtcattttcctaattattcatttttacctcaatttaaataaaaaaacaacctaataaaagcatctataatgggtcaacataaataagtaagcattagaattttgaaataaagattttgatcataattcatgctctataaaaattgttgggattaaactcatttaacctatcaaattaataggtaagctactgttagttataatagttggctataataccaacttaaatgagacctactaacaactataaataggtgttcttctattctcattctaagttctaatgttgaatctctaagctcatacttcatattcagaattaaattgagagagagagcccaagatcatagtgagtgtcagtgtgtatatggagggatataatgggagtatcactcttgaataatttttttcaatgtgagacatttctttataattattcactgtgttgagttgcaatcttgagctcatttaattgtgtactactcacaattcaagcgataaagatccatgattcattcattctcgagcaaagtatttcttgtctaatttcatctaagttctaactttaattttgtaattgatttagttttgtttgtgcatttttgaatattgttactgctgtaataacctattttgaggatgtacattcaccacaaaaatagtctcaatagaattatgcatatatgagtgtattaggtctcgaaaatactgggttcgtttggtacgttgtattaagtcgtattatattgtattgtgttatattgaattagattataatcatatttttatataatactatgttaaaactttaatttatattaaaatattatatatttagctgcccataaaagtcaataccacatatagttttacataaaaatattacataaaatacaatttaatataatactatacaatacaatatgtctatatgacaccccgattgaagaaatagagaaaccttacggtttggagatgaaagcaccaacaaggaggcagagtattctgactgcttctccatggctgcgaacacaaaaaccatacggcaccacaccaactgatgtttcccaatgcgatccacaatcagctccatccgccttcaatgctgctacaccagtcactgctggtctggggggatcctacacacaacaaaatttgcaacaaatgagggttgttttacagccgaatacatcccttgattttaggagagttgctactcgcatggaatcttctattaatgaccctactataattttgcatgacaatgaggccacctttatgtcagatatgcaaatagaattagttgacctaaaaagaaagagaattgaaaataattctcaatcagtcataaatattcgtaattctaaggaagtgaatcttgaagatgagcccaatgattttcttaaccaagatgttgttggacctccaaaaaaggcagctcggtgggtcctggttcccaggctcaccaattgatatgagtaccattagttggaattaccgtgggcttgggaacccacgggccattcaattcctacaagatatttgtgttgaaaagaagcccagttttttatttctttgtgaaactttgtgtaaaaaggaagtggtggaccgagtgaagagtaagttgggcttttaaagttctgttactgttgaagcccaaggaagaaaaggtgacctagctttcttttggaaattttatgatgaagcccaattattgagcttctccaataaccacattaatttggaaatctcccttccaggcaaaacttcatggtgtatgaccggtttctatggtgaaccacaacgctctcttcgacatacaacatggaatttgctccgttcaattgctaatgaatcgactcttccctggtgcattcttggagacttcaataatatcacaactcaggaagatatgaagggaggccgaccctaccccgactctttgctcaacggtttcaatcttgcactccatgactgccagcttggcgaacttgacttgaggcctggcttttatcaacaccattgggatgttgtcggccctgacattttgcagcttgttacaaatttctttgaatccgaagacttgcctcttgatatcaatgacaccaatcttgtgttgattatgaagaagaaaaacttttccacaatgggtgatctgcgtcctattgctctatgtaatgtatcttataagattgtggctaaagtccttacgaacagaatgagaagcatgattgttcagattatttctccaactcaaagtgcttttattcctggtaggctcatctctgataacattatggtggcgtttgaaatcatgcattacctcatgcaaaaaagaagatgtaaaaaaggctatatggccttgaagcttgatatgagtaaggcttatgacagagttgaatgaggttatttgaaagttgttatgtgtcgtatgggttttgccagaaaatggattaatcttattctgaaatgtgtcacttcagttagatactctgttatccacagtggccatatcatgggtcctattactccttctcgaggcattcgccagggcgacccattgtcaacatatctgttttatcatttgtgctgaggggttttcaggtcttatcaagaagtatgaagcagacaggatcatccatgggtgtcgtgtggctaacggggccccctctataactcatatgttttttactgacgacagttatttgttttgccaagcaactccaagtgctgctgatagtatgaatagactccttcactcctttgagcttgcttctggtcagcgagtcaatgcaaccaagtcttcgatattcttcagtcctaactctgatggcgtggttaaaaatcaaatttgctcaactcttggaacgcctgaagctactgaaggctccttctacttgggactgccgaatataattggtagaaagaagactattattcttggctttcttaagaataagatcatcaatcgcataaatagttgggatggtaagtttctttctcgtgttggcaaaaagattctattaaagactgtcattcaatctcttccaacttatgccatgagtgtgtttctgattcctctgaaaatctgcaatgacattgagaagcttatggcaagcttatggtggaaaacaaaaagtactagtggccaaggtattatatggatgtcttaggatcggttggttgttcataaagatttgggaggcatgggttttcgtcatcttcatgactttaatcttgcaatgctagctaaggaagggtggtggttgttatgttcagattcttctcctgttagtcaagtctttaaagctaagtattacccccgttcagatttccttaatgctgaactcgggagtaatcctagctttgtttgacataacatttggaacccctaacacttgattcgctctggtgccaggcgaatcattggcacaggtacagctacaagcattcttgctcatccttggcttcctgatgatgacaatccttttgtatccaccactacttccggcctcacccatcatatggtcaactcacttttccatgttcaagataaaagttgggatgactctcttgtacgagacatgtttaacgccaaggatgcaaatctgattttgggaattcctctcagcttctctgctactgatgatcattgggcttggattggtgaaaaaataggccattatttgtcaaatcagcctacaaattgctacaaaatcagaagaataaccgacatggggaaaacaactctgggttttggtgtaaactttggcatctcaagataccacctaaagtgaagaacttcatgtggcgtgcagtttctgatgtgctcccaacctgttttcaactagtttctaggggtgtaagtgtttcttccatgtgccctgtttgccatcatattgctgaatctgcttcgcatatcttacttagctgtccctttgcaataagatgttggcaaaaggctgatttggtcctctaggctaactttgttggaaccataggacactttctccaccatgtcttcaatggttttgatgaagacatctcttgtcgtgttatgatgctgtgttggtcactttggaaggcaagaaatactttagtttgggataaaaaagcttctttcccttctcaggttgtcacttctgcttggactactcttgatcactggttaaaagcacaagataaaacaagtttgttatcatcttctatgttaggtgatggtaacaactttgagcattggactaaacctacttataataagattaagatcaatgttgatgggggccacttttgagaatgacaatgcatattggtttggtattgtagcttgcgattcggaaggcaggatcattgattttgtggctaagtactctcatgggtccttctcggccgaggttgttgaggctttaggagttaaggaagcacttagttggctcaaagacaaaagttgaaatacggtaaaggtgaaaactgatagcctactcactgtccaagcagtcttctgtctttggtttgattactcatgattgtaaaactcttttatcctctctatctaatgttagtcttcgttttgttaaacgatcaacaaacaaagttgcccacttcgtggctacgcgctcttgtttttactctgattatgccaacttgtaatttgaatgctttatttcaatgaagttgatatttcatgttttaaaaaaaatacaatacaatatgtaatatggcataccaaacgaacacttaatacatttagtcaattacactttgttttgcttttttttttctactcaaaaattttaaagagcactagtgctaatttcggaaactttctatgatctctcataagccacattatacacgtgccctacaatttttttggcaacattaaaagaccccgcccactagagatgacctaagaattactatactaatttacattaattaccttacttcactactacacatttaggaaaatattaacatttttgttttgctttgtttatgaataattatggtaactattttaggttagatttctattttagaattatttttggttttttttttataataataatactttacttcattcataaatattagagttcccaaaaaattctaccctgttacattagaaaatgaattcagggatcattttaatttgctagacttgcaacagtcactaagccactaaggctagtttaatggtgagagagaaatgggaaaagagagagatcatgggttcgaacacaggacctttaaactactaagctattaattaattataaaataacattagactacactaaaaaaaaagacttacagcagtcattcttctttcaggctctttagggtatgtaaagaatgtcagtcttattacagttcaaataatcacttaacttggaattgcactcatcatctctatcctcttttccatcctcttcatccattcttcattagatttgtcaatgaaataatatgtgatagaacctaccacaaaacctttataacattggtaaccttgccatgactttcattaacgttaagtaaattaccttataagtccagttatttaaaaaatagcaaattacaatatgccctggggctaaggttcaatatagaccaagactctaacagaaaatcaattacaacaaacccaaaaacaaattacaacagaaaaggcctaacatatcaaagcttcggataaagatcagacctaactacttctacatctatataaacccttctacaagtggagattttacctgaagtctcattattttcttcaagcagtactgttgtagagagagagagtagagagagaagcagctcatcgagcttagttgtaattggatcaaaaagaaagagaaagaaagagagttagtagagaggaaagaaaaaaacacagataaaatcaaatagattataaaccaaagatcgtggtttaaaatctaaaggcaaagttgtaattacctattgttcgtagtgaaaagcaagcactttgaggtagcttgacaaagacgtagcccactgatttggggtgaaatctgagatcatatcgtggtgttcagaatctctctaatctctatttgtttctcttaatctctatctacaatctctcctttatgtgtgttggtgttcttgattctgtgtggtttgatttctgtgtgtgtgtgtttttttttttgtatatgagagatcgagtttgtatctcttgatttgttggaaccctacgggttttcgtttactttgtagagagagagagagagagagagagagagagagagacgagtactcgag

SEQ ID NO: 302264 - DNA, 1802 bp, Cannabis indica
acacaaacttatatacttaaaaaaaataataataattagatattacaaataaaaatataataatttttaaaaaataaaaattaaactaaaaatatattaggtgcaacctaaagaaattcagtattttaggaaaaaaaatatactcaaacttgttctacctaaaatttagtttttaacaaaattattaattttaatattactttttatattcaaatagtatttttaaataaaaaataattaattttaaaattgcttattaattttaaaattttaatttatttttaattttcttaattatttaataatttttaagatataaattattttttaaagaggaaaagaatacaaaaaaaaaaaaacacttcaaaggaataggaaagtatgcctggaacgcagaactcacaacaggggggattaccatattccaaaatgcataaactttagaaactaaagttgatttggctaaaagatgaaccatcacacattggcttccggaaccacatgagagagaattaaactttattttccggatgaaatgatgaatatcattcagagtggtattgttatcccaaacttcacaccgatgacatggtattcagtaagatgacacgtggataacataattgatgttggacggagtttattttctggattgtactgaccatactaggtctaagttaaattaatcaagattgacctttcaatgataaacatccgagcaggactgagattgtgtaatatgccgagtagatctagagtttcaaataattctaattgccgactagaggcacacactgagtgaagatcttccacatatcttttccttaagtgttccctcaaatgtagctcgattaaatccctattttcgtggaatttgctgaccaggctgagataatagtgggatttcatatttaactcctttcccaaatttttactgtaatatcaggataaatatttaatatttttgataatttagcaacttatgtaatttcacttcccctaaaaatagtgaagtcattttactattcaagggacgctttttgcattctaaagagcaggcactctacaaaaatttctgtacatttttcaagagctattaggaaactcacttggtcaaactttatgatctgaatagttcttcatagtaatacaacaaaaagggaagtaggctattactataatcaggaaccgaacttctatgtaatatcccaaaaactaaattatcattaattgaagcatattttatgaaatgtagagtagtatgagtattaatggaatatatgagtaagattataatcttaccaggttaagtatttgataattagagattttattagaaatgtaaaaaaataagcataatttattaataacggagattttattggaatatacgagtaatatgcatgatatttgtgaagtaaaatatttttaggtctgcaaactgtggaatcccgatgggttggccagaaatatcacatcagtattagtttgtgattttgttataccgagaagttttagttggtattggtgttaccggagtattgcgaggtatatggttttgaccatcttacctctagctttggggtttacttagaggcactgacaaacctagaatttttaattagtgggggctaatttattattaaaaaatatttatacctacattataattactcttactagatttatttaattttgtgggagcttttctattattataattatcaatttaaaaaatttacatttaattttttaaggtaatatttttgttagtggaggttattgttacgaaaattataaac

SEQ ID NO: 302265 - DNA, 1381 bp, Cannabis indica
tatatatatacacataaaatatttaaatttaaatatcatattctatatcactatacataacaatatgatataaaatcatgatcacatatatatgacacatatacttatatatatatgtataactcacataagtatatcatatataattttttatatattaacatataaaactttcttattcaacaaagaaaaagatgttaatacatatattactattatttaaaataataaaacacaaaattaaaaaccaccatactcatctaaggataattttcacataaaatttcttatctttgtattctcataatcttgattaatctcttcttccattgaaaaggaataaactttttgattattagagattttgttttgataaatcaatgagttgtattgcacaaactgatatcacccacacaaaggcctcaatctatacaatttgcatattcttctctgtattctttgtctttctttcttctaacaactaagcaaaaaaccaatctttatctacacttgttattttctttggtattaatacattgatccgagtccttatgctccatttaatatcttcaacaatctggctgttgttcacctgtcctccctgccatattacaacgtttcttgctttccagacattatacactagtgcaggaacagctgcagagtaaaccaacttcctgaactttgacacttttgccttcccaatccatcggattagctgctgcagagttacaacttgtgctttccactccagccaacttttgatctccaccaaatattggctaactacactgcactcaaagaataagtgttgaccattctcattgaacttatcacataagctgcacttctcctgtatctaaataccaaatttaaccagctgatcctttgtcttcaacctgttaagatggcaagcaataaaatcacactatgttttggtgtattcaaccgagcccatacctttttactccaagccattttttcttgaggagtgctaaacatcttgtaaccggttgctatggtatatttgctcctctgaaatttagcataaacagttaaggaactgatcttgtttttttaaagatacaagcttcttccagtacctctggagtgaatagaagcattgtaactccaccaggaatggtctttgatatatacactatgcaccatctaagcataagctttcttggttatttgagatagcccaaatgtacttggtcatggctgccttgtttcaaacttcaagctttttgatccctaactccctgtagactttgattggcaaacattatcccaagaaacagccccagctccatggaatagagtctgccccttccataagaatgctctacagatggcttcaatggacttcagaattctt

SEQ ID NO: 302266 - DNA, 1554 bp, Cannabis indica
taaacatctccaaattaaatacattgaagaattaatctccatgtttagaaacaaaaattagttcattatgctctaaaaatgtgactttactggcagttgtttacctagctgcaaatcaatcaaaaagatcaacatttttgaaagcaacttcatgaaaaataaactacagtatcatattgaatgagactagaaaggctttcctctaagccattgcaaaccagttataatgcaaaagcaacaacctgatccctatcattgcaaaggtttgaacccaaaaaaaattgttgaggtaacagaaagcactccatctgtttcaaaatggtgacaggtcattcatcaacattatactatatctatcatccaatcttgaaaaagaaaaattgtcaaatatatagagtactttcaaactgctataactaaaatatgaagggattgaaaatagtgcccaccaagtttaaaattcaactagtagaatgaagtatgactcctgcaccaaagttaaagtttttagatcctgcctagagttgtacattctggccggacttttcggcacgacacgaaatcgatacgtgtccgaaaaacacgacatgataaaaaaagaaaagaaaatttataacaatatatattataaaactttattacattatatgtgtaaaaaaatttatttaaaaaaaattataaatttctttaactatgagaaacatattctcatttttatgtacaaattattggtaataaatttgtatactaattaagtaagcattgctattaattggttaatcttgtcataattgtatcccaatttaatgtgttattaatacattaatcttattaatcatttacaattgggattttttttactacaggctctctgctctaatgattttaagatcattgttagaggtttttgcaagtttattatcagattaaagtgtttccaatctgtgttactcatagattaattgtgcatgctattcggatggatgaaaaacttgtttgactagatgactatcatatttttgtgatgtatagtatattttgatgaacattacatctatagtatttgttcaatgagcatgaaatgtatagtatttagaatcagggctggcctgaaacaaagtgggccacaggtaaaaatcaaataaaaaaatatataattttaaaagaggaaaaaaaaaatttgggccctgggtgggccctacgcagcccccgcctatgcccagggccgagcctgtttagaatatccctattatctattggagtggtcttgccacacatgcaatgtggtctaatttttaacattataattaactagatcataacattattattatcattataatagaattttaataattcataacattttaaaatttatactttaccaaacacttaattcaaattttttccacaattttcttcacaagcgaacccaacataggcctaggctgggctaaagcacatgctgagaaaaaaggggtaagttgaaaaatgcctcttttattaatcaattaatcaaatttgcctctaattttatatttatttgaaacatac

SEQ ID NO: 302267 - DNA, 3105 bp, Cannabis indica
ggcaacataagcacaataaccatataaggatctatccagaatctacaagaactagacaatctctaggtctaattctaataaatttttattttgagaaagttacaagtcatgtatttgatataattagcatatatagggggaaacgatggggttttataaacagtggatgaattcgagagcagcaaactacgcaaaaatgttggaaaagttcattcacttatcattatgagctaaaaagtaactaagaaaaagaatataataagttttacattgatcacataatactattatattaatcacactagaaaagagaaataataatagagtgcagtgaacaattatattaaccacactagaacagaagaataacttctcatgccaacatatatattaatccactatgccatattgatttggtcgaaccaagtgaagctaactatatttattgcatgaaattttttgtaatattagactttattggtcatacgggttaagaaaatcaaagttcacatcctggttttcatacaaatataaactagctaagtgtaggtcctaaatatcaaggatacaatcagtattcaaaagaataaaactaagttaacaaatcgctaacaatctattctaacagaataacgtaatatcttcaacatctttcttgaatcatgatacccagcaaagaacaaaagccaagaagtataaaagtagcctgacaagtcttgaatcagaaaagaattaatgctatcttaacattagtttcctatgattacctgctatcctgtccatccaagtacaattgacttttaatcagttgagattggaatcagttaagtgggttcttcaaaagaggcatttgtttaaattaggctaatgtcatattcaacaatagttcttaaggccaatattttgcttgtataattacaaaaacaacaaaaggaagtgtagcatgttcaaaattaaatgacactagtgtttttattttgggaaaaagattcgagtaatttcagtgctacagtacaaagtatttagcacatactttcatcgatgacatgtcaatgcaaacacctccattaggtgacaaggtatgtccttcaactgaagtgcctccaccatatggtacaataggaacctgctcatggattaatgcaaattagttgagtatctaatgaaattatttataaaactccagcattgaagaaaatggcaaataaattatagctacaaaactatgggatacatagacagaaaactgtgtacaaatcactatcttattttacaagtaagaaccagacttctgaaagaattcttttgtacggaacaaaagaaaacttaaaaggtgattaacagaaaactaatacaaagtggagaagatcaaaccttatacttatcacataactttactatcttggacacttcctcttcagaactgcaaattacagagaattgcgcaaaggaaataagtgaagtatacaaaagcatgaccccagcaaagaagcaaccagtatacatatgataaatttttatttggctgggtgagaaggaagataaatggatacatgtgattgatcgcaaatttaatgttaaactcaatattaaatatactgaatgaaacaaagaaagcactcaattagtcttaagaagctaggtgcattaaaatgtagataaaaagtatacctaggagaaacaacaacatcagggatgttaatggctttgtggaagctatgttgtggttttccatgactatacctctcatcatagtccattgtcatgttatcctgcaaaatagactatattatgcatctggaaaaacaggaaatgatctttgggacaccatgaatttcaagtaagagataaacacacaccaaagttaccagaaacaatatactctagcttaatgtttccttacttgaaacaatcaaatcaaacagctattaataaattgaaaaagagtaataataatacttggcatatagccttcaattcatgaataagctcttctggaactttcttgtacaagcctttcaccacaaagtcggtgctgtctttgccccccaaactgacacctctgagatccaaaaagtaaactacaactcatgagcaaaccatgtctcaaaaataccattaaactcaaaagtagataaatggattattaaataactagctaagtggattaactgagagtaagacattcatttactaaatgtgaatggatttcaatgtataatataatatagaatccaaaacagtacaaacattgcataatcaatcatttaaatcattcaccgagtgtcacaaagtgaggaattggaatcagatgccaaggaaagtgatccagctgagaatgcaagagccaagggaagcagagagctggaccaccaggatgagaatgaactagtgttcctattgaaagcgttaatggcgggcggaagtggaggtagtgcgttgaatgagcacctggtataggtgtgggaagcagagcttcggagattgagtttgatggagttgtagaagcattttgaacaagaacgcagtgaagaaaaccaggaggaggatggtgacaccattgatgaccacaaaggaaagatgatgaagactgaagtgtactctttcttttctttttagtttttacttaaatcagctacccgtgggctactttcttaaatgctttcattttctcttttaattttttaggagcttttaaaaacgttttccaatatgaatattaggtatatagtttttgtttggaagtgattttataattaatagggtgggtaattattagagtggtaattacaaaatttagtaattacactatattttaagagcattgctattaggcaccagtggtgcctagcacctttgcgatttgtcgcgttgcgattagttaacgatactctctaaaagttattatattaaattatataggacccgatacttagttggaccaatatcgatattgacacataggagggtgttaggcaccactggtgtcatttagcatttgtcatattttgaaatgcaaagtgtatttggatatgaggtggtaattacatatgaattcctaatattttgtttggcaaaatagttaataattacatgggaaaataa

SEQ ID NO: 302268 - DNA, 2521 bp, Cannabis indica
atttgcgataaatacctaaattaactcagttacaaataaatacttaaatgtaatttttggtgctaataatacttcaattataattctagaacttttgtaggtatctgactcttaaatgttaagtaaattgtcacgtgacaatttctgattagtcaaagtcattaaattttttatttttttataaaaattaatttaaatataccaataagaaaataacacgtagatattgacttaatatttaacggttaggtactcacagagttctaaaaatataacttaagtattattactgctaaaaattaaactaagatatttatttacagcgggagttaaacttaagtatttatgccgcaaattacttatttttaaattccttgtataagttaaataagtagtaaatttgaaacttaatgttttatagctaataacatgctaaagtcatattttttataatttcgtttttataaaactctactttttaatgactacatagaatatactatatgatagactctatgttataaaaaaacatatatattatatatatatttttgaatctttcttagttattgcattttgtcaaataattaaaacaatcttcttaacttgaatttagtatcaaaatattataatcttttttgaaataaaaaatggaaaagtagtaagattaaagggtagttttttccttataaaattattgttgtctaggacaaggactatatatggtcacatggccatggcagattcctcttttctcttttgatatgccaatctatattttatataataaccttttttgactttgttgtggttgtttcttttgggattttcagtttgtaaacttgtgggtctctgtttttttgggcctaggtttgtatatatgaataggttgaaaaggtaagatcatgatgtttagagttgattaaatatcttttttcgtttgtactgtagttttggctgaaagattcatttttgtctaagttgtgatgaaatgtaatcaagtatatgagatcaaaatcagaccacagttgtaattttggtgccctctaagttgatttggcccttggtttcattgtttcttggtaggtaagagatcttaggtattaggtaggggtattactttaccgcaatagtattttctatttccaatactagattatattttaattttttatatgaccttagtaatagatattttgttcgctttttaagaaaatcatgaataaatttattcaaaataatctattgcaccatagcggaataaaacttgcgtgcaactagaaatgaaaattgagccggcaatgaacggtgaatctctattttaatatttatttttacctccattttcatgtatttcctattagagatgggacggtgaatctctactagggcgggtaatacccacaagaaacttatttattttaataaaaaattataaataaaaaataaatatataaaaatttactaacaataaactaaaagtacatgaagataatgtgtaataatttaaaggctaattaggatttttgtccactaaactttggcatgttttaaattatgtccctgaatttttttagccattaaaaatttctccccaactattgaaattttggatttatggacatttgtccagtttcattcaattttattaattttgtaattgtccatgtactaaatcatgctctttagactttgatatttaccaatgccccccgactttgacatgtaccaaattaagcctcttgaactttcattcatgttaaatttttcttactaaaattagaacaagttcttaaattcaacaatctcaatagtacaagtgaaaattttaacgaccttaaaagttcaaaagtcatgatttgataaatgttaaagtccagaggacaaaaatcctaataagtctaatttaaaataatattacaaaattaataaataaaaattaaatgggtccttgttagggcgtggggtgttatccctatccctgtctcgtttaacattcgaggatagaaagttgtccccatcctcaccccattctgcatttaggtagagaatcccttccccattaagagtgggtacctgcaggacccatacccatgagtacaatttttatccctacttattgttttaattttattttcgatattttaaattatttagaatttttcaaaaacagtcgaaatatttagtataagtatagtgtacatctacacaaatttggtttatgatttatgtatgatgtattgtatggtatcttctaattaaggtgggattggaatgatcctttctcaagattgatttgttggaatattttttatagtatataatcaaattaattatatattttttggttttacttgatttaatataagtaaatatttgattaactgactagatattttaattgatgatcaacttttaatttgttactatataaatataggcagccgattttgtgcccatatgtgcaaaacacggattggaatccgttgtacggcaggggggtcccaccgtacttttaaat

SEQ ID NO: 302269 - DNA, 2894 bp, Cannabis indica
atttcgacgaatcttgtcagttatctaattgaaaaactacacaaaggaaatgtctctgcagcaagaagtgttactacttggcaaggaacttgctatcttacacctctaattggagccatcttagcagatacctattggggtagatattggacaattgcagttttcaccacagtttatctaattgtatgtttaatctttttcatacttgtttctctcatatactcaacattctcaataaagtgaagctcaagcctttagtatatcatcgcgatgatgttgtgaatgcgatctcagctttgattttttgtcgtttgaatcaacatactgatatgttggattggtgattggtgtagggaatgtctgccttaactctttcagcatcagttccatcattgaagcctgctgaatgtataggttctgtatgcccttcagctactcctgcacagtatgccatattctttttcgggctctatatgatttcacttgggactggtgggatgaaaccttgtatttggcctttcggggcagatcaatttgatgatactgatcctagagaaagagtaaagaaaggaacctatttcaactggttttacttttctcaaaacattggggccataatagcaagtagcttattggtatggattcaagacagggttggctggggcctaggatttggaatccccaccttgcttattggcattgctattgcaagtctgttctctggcacgcttgtatacagattacagagagcaggaggaagccctttaacaagaatatgccaagtttttgttgcagcattctataagaggagactggatgtgccagaggatagtggcgtcctttatgaaacgcaagacaaaagctcgattatcaaagggagtcgcaaactggagcatagcgatgaacttaggtgatcatctttctaatctccctggttttaactactattctttcttacctactaataactataatttacaggtgcctagacaaggctgctttggtctcagaaatggagactgaaagtggggattactctaatccctggagactttgcactgtcacacaagttgaggaactgaagattttgagccgaatgcttccaatttgcgcaactggaattatcttttcagctgtttttgcccaaatgccaaccttgtttgtagaacaaggaaagatgatggataaaactctggggtcattctcaattccagctgcctctctttcacttttcaaccacattagtgtcattatcttggtaccaatctatgacagactgattgtccctatagcaaggaagtacacaggtaaagaaagaggcttctcacagttgcaacgaatgggaataggccttttcatttcgattctctgcatgtctgcagctgccatagtagaaattaagcgactagaacttgcgagagagctcgggttagtttacaaggatgttgttgtgcctgtcagcatattttggcaagttcctcagtatttcttgctgggttctgcagaggtgtttactttcattgggcaacacgagttcttctacgagcaagcaccagatgccatgaggagtttatgcagtgcattttctctgctaacaaattctttagggaactatctttgctcattggttttgaccattgtgacttacatgacaacacaaggtggtaagcctggatggattcctgataatctgaatgaagggcaccttgattacttcttctggcttttggctggacttagtttcttaaacatgttggtgtacattgtttttgcaagaaaatataaggagaagaaaacttcttgattgtgtgggatgagattcataaggcattgtttgtataattcattagtagaaggtttaatgtatattgtgaaagtaaaattcattagagggccaatactcaataggggcacatacaattgttgagaaacattatgcataatgtgattatatatattttagaaaatttaagtttgggttctctttctctatgtcaaaaactcaaaatagtaattttcaaaaatattcattttagttttttaagggactataacttataacttatgtaagtcacacctaaaataggcatttttagcataaaagataaaattagagacataattgaaacaattgtaaaagaaatagcaaaagcctacatctattaaaaatgatataaaaacccactataagagcacatctccaatgagatgcaaataagtgagtaaatgtaaagtatagttcaactttgttaaaaatttaacttaatagtgtaccaaatttattatgatgtaaatatctcacataacaaatagtaatctaaatttggatgacaatataacatgatgcaaaaatttgcatcacaataaatgttatgattttatatttgttgctatactatttttaatattttgtcattaaagtttagttagcatgctcatttacattaaataacttgcataattattattaatttattattaaattttatatttatttttttgattattattattttagatttttaataaattattaaataagcattaaatgacattaaattttgtatcaaatgtactatattttataaaataacaatggaacaccaaatagaataactaaaaataatagtggaataataaaaaaaaaacttaacatatttttgaagaaaataagtattttctaaaaaaaaagggaaacttacaaaataattgaaatttaaattagaatttttactaaaataactgttacacggaatttttttctacaatactgtgttttattaaagcactagtaaaatacaaagcagacaactcaaacaacagtagaacaactaaaaaccaaccacgtagaatgccagtgaaacttaacacagtactactgcagtatgaaatta

SEQ ID NO: 302270 - DNA, 2096 bp, Cannabis indica
ttagttaagtaaagtaaagtaaaagaaatatttttttcagcatgggcttaagcccacactggtccttcattgggtccgccagtgcactcaggtgaaaaaataaaatcaatacagctaaacaataagttttttaacttgatctcgactaaaatgccacccccaatcaaccttgccgtactcaaccattttcattccactaactacagaaagacaatcggaagctatatagaactaagacatatgccacctttgagccaattccaaccctaaacgaacagcaagggcctcagccaacgaaatcgagaaagagctagggagaaatttggtttcaacaaccaccaaagctcttctacaatctctgacaataacccgcaaactgcaactatttatttcagcacaaattaaagcatccacattgaccatgaaagacccaagaggggggcaacccaactttgaagcttttgggaccttagtggcagtagcctggtatggcaacaaaatatccaacaaccacaggtccaaagcccaagcaagccgcaccagattagcaggaagcttttgcttgaattttttttatttcttcgctcccacactaaccaagataaaccaataagtaactctattttaatcttgggaactcaagaaaacaaaaccataagaaagtctaacacattagagacttttttaggaaataaatcaaaattccttattttttttcccaaataaatctgacaacccgacatctccacaaagcatgacagatagtttgagcttcattcttacaccaacaacaactaggattcatagtcatacctcgtttagaaagcacaattgtcactgtcagccaatgattacaagctctccatatgaagtttttatcttcagagtcatcttggagccccaaacaaacttccaccaagccttcatcactgattattagagcactcaacctacagactgaaggaatcttagattatacccgtcagcaacaaaatattcttccgtaggggtcaaactccatttaaccaaattaggaacctcaaggtaagggaccacacctaaaatgcaggggttatcatcaagataaaactagctacaaacctcatctgccttccaattcccgtcagaatcaagcagagagtgaactcggaccccttccataatcgacactgacaaccgaagagtaaaaagaagaccccttggtatccaatgatctttattaattctaacctttcttccattaccaatgcaccacctagcacccaactcaataatttcccaaccccaaagaatttccctctagattaaggagccattgtgacccaatgagacccaaaaaaatcatcactgggggtaatataacgcttatataacccgagcatgcaagaaggcaattaggattagttagaagtttccacccatgtttagcaagtaaagcttggttaaaattctccaaattacagaagccaagctcacctttctcctttggcttacaaattttatcccaatctccctaatgaattttattctttttagaggaagcccccaccagaaacgagcaatcatggcctgaatatcatttaacacaccttttgggatacgaaaacaactcataatatagcaagacaaggcttggatgacgaccttattaagaatttccctcccggcttgagaaaaatggtcgttttcaaccttgaagcttttctcaaacccagttttagagacccccaaaagcttttattttctttcgacccataacaacaggcatactgagatacttcgtatgagctttcactaatttgactccactagtagcagcaagctcttcaccttggactttactcactctacacctcatactaagatctaattattttaagttaattagttgaccagatagcgagacataaacatctagaacctcacgaagagtaacaccatccttaaatgcatcaaggaatataaggctatcactggcaaaaaaaatgagagagacgctgatcttgttagggtttatgctttgaaaagcctataaagatatttttgattattaataaagagttaaacattttgatatatgcatgaatgttaaatta

SEQ ID NO: 302271 - DNA, 1006 bp, Cannabis indica
caatctcaatagtttaggggaatgtttaacagctagaaaaatttaggagtatgatttagtacatgttaaaatttaggggacaaaaatcttaattgaccaaaaaaaaaattatgagggatggataattgagaagtgtaatagaaaataatagatacttaaattaaattaagaagtattttcataaaaaattaataaggttatgggaggtttgcaatggaaagagaacctaaaagaagacaatgagcctaaagcggtttccaaagttttggggtatccaaagtatagtaatgtaagtgtttgtatgaaattatgtgatagttttttatggggttggtagctaaatgtgattaaattagggattaattaggtttaagtggccaaccgtgtggccttgatcagctcaaaatggttcacagttccatgaaccatggtgggctcacctgacctgacctgactcagtcacccaccacaaaatctttgaccacctcagtcccaatccctatttatatatattaacaacaacatattgcataaccaaaatacagtaccatccccttttaattttaaatgataaaacattcagaagcttagaaaatttctcaaaaaatatagtaattaatgtgttaaaattctgtggttatactataatattttaaaaaacaaaaaacaaatctcataaaacaacttaaaaatatgggagagctctctttaaaataataataagaatgagttgaaaaatatttaaaaatccatgtaaaacaaatcaagggtatatgcaatacatcaataaacataaatagttgtaagttgcatcatataaaacttgtgattaatatacagtactataggaaaaatttatagcaactaggagtaactctagtggaaaattttaaacaataaattacactaaaaaatatttttattattattatattatttcatttaattatttcaatactaaatttttaattctaattccaacccaaaaagtaaaaaaaaaataaaa

SEQ ID NO: 302272 - DNA, 2842 bp, Cannabis indica
atatttttgtcaattaaatatgccaaaaatagaattaacagtattatatattattattaaatattattactaaaataagtaaaatacataatacacgatatgaatataattttagtcatataatattttctttattctttctttctctttctctctatctctcattctttcttataacagctgtcataagcaagtttttctttctcttagttggggatactgctagcctggctgtgcaatgctccttgctggcgcaagaggattttgtcccatggatctttgatgggttatctttgttccgggcatggttctcaaaggtccagaatgtgtttaggatgaagttgtctcactactataaaaatagctttttgcttcgatttttaaggggcatataaaaaatttacgtcggttagagtaaccggcattatagccatagatgcaaatgctgttattttgttcttaacttctaaaccgacacaaaaaaaattttgcttcgtttcataaccgaaacaattagtaatattgcaatgacgcaaattgatttttttttttttaaaaaaaatgaactagatcgatcacacccagcaccatcaagatttagatttggatctaacaaaaaatatgaactagtgctgtaacatgtttacgacatgtcttattcatgtataagtataaaatttgagccatttgtactaatacgcacccaaaaactgaaaccctagcatgagatgtcaacttgggcactaagcgcccagaatatcaacttggacgctagttactcgggttgacttataagagatcatttcaactctttttcagttctcaagatttggacttggattcttcttaactttatggatccgaatacttaaggaaggtgagttgaaagcagcttagcaggatccaaacacccatttctaaagttcccaaagtaaactttggcgcagtaactccatgaatatattttcttcttgccacgtgttaaatgttgatatccacacatcagggctagtttttaggtaaatatagttaaatcaatttaattattctactcataattaaaagattataccaaataacgatttagtcgaaagtaccatttttccctcaagaataattttccataaattttaatgctctcttaataattattcctcaaattaaacatttccatttatattgtggtatagaggtgatatggggaccataaacctatatttcgatgctctaataaactctagattattattgaactcatcaataaaataatatggcttattaattccattattactccactataaatatagaattgtactttttgataatgtaaaattatattgacaaaattatttttagtagtccattgatataatcagtaactagtttgtcttccaatttattagttcataactagagctgatcaaaataactattattttcttctacttatctcttgaattccttgagtaccattaatttattgtgaacaattaatctataacttcaataatagatttggatacaactacagtcactcctcgaattaacaatttaagggagctaatattcgatcctttcagaaagtttggattcctcttattgtataacttgtttccaaccattcatgttatcaagctcttaaaacagaagttgtaagaatcattttctttaagaaactttaacgagtgaagcaaacaacttaatgaatacaaacaagagttcatgaatagtcaggatttaatctgatctactgatgatcatcattgtgatatgaataactctttaatgatgaataactctttaatgataaataacatgttgataaaatatgttaattgtgcatttactaaatgtctattcacatatgtgatcccaataaaaatcacatgccactaaattatagtacttagtaaacctacttagtaattctatattaaaaattccatacctttaatacacacaaatttattctagctattcatataaattatatctctataattaatatatattttttttataataatttgtatttcatatattctctaatatattatccactaaatatttactttaagggcgtaaaccctaacaccaacaacaacaaaacaataaaaaatgcaccaaccccattacaatatgcaaattatttataaatcaactccaaaaaattataaaacataaaaaaaaaaatacttttattaatcaaatattaatcactctacccaaaccaaaacaataaacaaaatacatatacaacaaaaacaacaaaatattaaaaagataaaacaacttaacatcaactcatctttaaccttatgattgctataatagaaagaaaaataaaaacatagaataggtagaggagatgagaaattatggcgatataaaaaagaatatatttctttttatcttatttggaaagagagaaggaaaaaaaaattaaatgtgtaattataatttaatacttttatataaattatttttgatggaaataattttaactaattttgtaaggattaaaatgaaattaattaagattttttcaaaaaatagtattggattaaattgagtgtgactagtaaaaaaattgtaataaaaagaagaagttattctaaatcttaaaaatagaacaaattgtatgatagtgagaaaaataggtaagagtgttaaaaaagaaaaaaaaatcctaaaaacaaataaagtgtttgaaagagtgagggagtgagaatagaaagagtaaaaaaaaagtgagcaactttgacaaaaataaagaaaaaagaagaaaagtctgacaaagagaacggaaagaaaaaagtcatgctcatgtattagaaaa

SEQ ID NO: 302273 - DNA, 3131 bp, Cannabis indica
cattatcgagattattataaatttataaatggtaagtgtaaagcaatgaaataatttttttttaattttaaattataaattatataatattatcttttttaaagaaaatttaaatttacaaatcacctatatatttataccaatgcaattaggattaggattaattaactatataaatttaattaacatctaagtgtaacataacaaattgaattgtgacgagtttaaacaatatggagagtgaaattattagtgtagtaatagagaattttgaatggttgaaacttgcattgattgagtacataatactcacatttgccctattaataatcggtatgtgtattataatttttatatggacatgctacatgatgttggatcgtgatgaagaagtagtaattgttggtgcaaaacgatatcgtattatccaattattaagagattgtttcatcaaagataatcaagacgataaccaaactataagatacggattagaagatgaagattgtgctatctgtttggaaaaattatttgatgatgagccaacaacaattaaagaggttgttgaatcgaagtcatgcatgcatgtgtttcacttgcaatgtatcactaagtggactcaaactgacaaaacatgtcctctttgtcgtctccgtttgcatcaattgaatgttattgtttgtaaagtctctaaaaaatttatggatggttgtgatgttttagataatatagtttaaataaatcttttattttgaaatatgtacttttatagagattcattttaattataagaaaaattatatgtaagttaatttattatttagtcctttataaatatttttacactaaaacgccccattttatatataattttttgcatttttacttattaatttacatatcattaaaaataaagtgtgtgaggattagtggttattatattttcttagaagaatctaaactttcaaatcactatcaaacataattgttgtataagtatttgtttggaaattggaaacaataatgtagtacacaataataaataaatgtgcttgatttgatagcagacaaaacagagaacataataaaataattaatcttcttcttcattatttctgtccctttatatgtacattaaaaaaaattaataattactctcaaattctcaatacattaaataatttagatttattcctagttacattacatgggtctaatttgatgaagtctattgtaccaaatagagtgaagtatcatatgaaaaatatcatatttgacaggcttaggattccacaaaaaatgtttttgtacctttttcaccatcatttgcaaccttctatacttcctatccgagatcgaaactagaatgttcttcaaattgggaatgtctttctcgggtacaaaaaccgcgaaagattcccaattaagaacttctagaaacggaggtacaaagttgtcggatatgatcaccgggacacaatcgtagaaaatcgcctctacaactctaggactattgacttcatacccttttgcacaaatgcaatacttgctgctcttcatgtagttgacatatactttgttgcccttcttcctaggtaacttaccgaaaattttcatgtcggggtctttattttcccaatgctgcagcagaattggccgaacatagccgtgcatactccccgcgaagaatgcgagggttgacctcttcgatgcaggcttgcctccaatatttcggaggacatctttgggtgagtgaacataggtttcgggaagggacacatctttaccaaatacaaaaccttctttcacatcagcattgcatagagctctaatgcatttccccatatatcgctttgtctctgaaggagcctgattttgtatatgattcaagaaaattcaattctaactataagaaagagttattactaatactaggcatagaacaaagattgattatgtcactactttgcaaagataagtgaacatttttatccaaaaattaaaacgttactgaaatataaaaacttccattaaataattagtaattttacccttaaaattttactattttactactgtcaaatcgtatccttttcatttaacaaaagttcgggagacacaatttgaagtaggttaaaatctagaggacgaaatatgagagtggtcatacttcgaagagtaaaattgctaactatttaacaaaagtgtaacaggagtcttatgaactactatcgttcgaaattgagggaaaatatttaacatggctaatagttcgggagcacaatcttattattgacaaagttcaagaacaaaatacctatttattcttgttttaataattttcaaagtagttttttcgacacaaatgacaccctatctagaagattacgttgcaaaggattatcaaaagaagatgattatactactcttatcacatatgaaattgagaaaacatacccaatcatggcaagcaacaaggaaatgatcagctccaccagttctgttccagtatggatattttgtagcaataatgtccaagtaattcttcagaaactgtatgagattcttatgactatgtgaatcaactacatataaggtttcctctaacattctagagctaaaaggcaagtaaaacatgtgagctttccttggatttttagtaacaaattgtctattgttctcaagctgtttcataaaccatccttcagaagcatatattcctgtgagtactggtgtgtgtagtataggcctatctccttccttgtaaatgtaaattttaagagtttgttccattaattcataactcctgcaaatatgtcaaaatcattattaaaatcaaaattaaggacgagtttggaaacccttttgtaattgcaatgaatgtcagagtaattataaagtttagcgtatttggaagtaactgtgtaattactagggtggtaattacacaatctagtaattacactatattttaagatacaaagtgtgtttgtatatgagattgtaattacatatgaattcataatatcttgaatggcaaaacaaataataattaaacaggaaaataatagttaatatttgaaatagaaagtttttagtaattacacagtgtaattacactcaattctcat

SEQ ID NO: 302274 - DNA, 1720 bp, Cannabis indica
atgtatattatacttatagcagaaatgttgcctactctacaaaaaattgttaataaattacagtgccgaaaataggacttgaatagtgagtagcacgcgtacttgcttcaaatagtgactattttgaaatttatttttgatacagtaaattattcaggatttctcaaaaactgggaagatatctactattactataaaatataaattgtggttaaaaataattaggatataatttctctaggtactggaaataaaaaaatacctaagaagctcactatacatttatataaatatatatatatatatatataaataaaggaagcttcttaggtgggagcatcaattttgctcctaccgtagcagcgtttcttatttttcgtacttaaagaaattatatcccaattttttttaattgatgttgtatattatagttatagtagatatcttgtctgctgaaattttttgaaaactttatgttgtcaaaaatatagtttaaaatagtctattgcacgcattcaactgaatgtttgaatcctattttctacactataaattattcaaaagtttctaaaaacagataagatgcctagtataactatcatgcacatcataatataaaaaaaatggtttataatttctcttatctaccaaaacaagaaattcccctgtaggaccaaaattgatgctctcaccaaagaattttcctatatatataacctaaagccaaaacagtacgcacacaacatcgtcaaataagcaaaaatataaattataattttaattttaatataataataaaatagggaaagttcttaaaagctaacaaggaaggtgcacctatagttcatttaggaattggattataaatagggcagggaaaatattcattatctttcttattcaaaaacttttcatattaacatatatttggtactggaggtgggaagggagattttttttgaaagagagaaaggagaggtgggaagggagatttaacccaaagtttcaacatttattcattaaaataaaaaataaagcaagaacaaacataagagaataaaaacatttaataagaatgacctgtagttgtaatgatttaatttcctcctccgaaaataataatgttcttgaacttgcacgttcagaatgaagtgatgattgggctgtttctgcagccgtcaatgcactctcaagctgaaaaacaattgataaagaatcacgaagtgatccaatgtcacacaaaaagaaattgactatcatataatgtttgacattcagaagatagaggcattgcagaataagattgaaaggagaataaattggccaacacaagtaagggaacagaactttgttgttaccatttcttttcaaaataaaaaataaaccagaagatgtatattgtgtaaggtctgagcaatggtgaagcttgaaaacctaatttattagccttagagagagatatacttgacaattgatagaagggaaaaaataatcattaaagatccagtcatacataatcccagaaatctttactatactattcaactgcactgaagctactaatgcactttccctaagattgttgttttaactccaaatccaaaatacttggcagcatctatggtaaatcttctctaagatttataccaaaaactactaatcttctactgtgaataatggtgcaattctttctgacacaatttataaaaataaaaaaaaa

SEQ ID NO: 302275 - DNA, 1976 bp, Cannabis indica
aaaaaaattgattcaattctattctattccatttcataacccccaactaaatgcaatctaagtagaattaaagagtaacacaaagatattaatgaatcattttttagctaaatttaatttattacgattaaattttttaaataaagtaataatttttggatatcttttctatggaacagattattatgttgctgctttgttaagaaaacccaagaacaatcacaacaaagcaatgccacaatttcaaggatagaagaaaccaaattcatcatctcattatttcccatatgcttgttaggtttaatatcttccttaggaaatacttatttccttgagcaagcatactcaatgaaacagaaaataggatttttcaaggtaccttatgtcttgctcctaagcatgtacaaattggccaactatttgttcccgaaattatactttgacactgtcgattcttacattccttcgtgttgcacaagcttaaaaaaggtgctcaatcgaattggaatggctttatcactgctatgcgccttactatgttgtgttattgctgcaaaagtcgagagaaagagaattgacataatcgttaacaagaatatttgtgatcctaataaaatcactgagcctgtcgatatgtctatactctatcttgttccacaattttttcttctaggcgggttttatggtttggcatacgaaagcattgagaggttcttaaaagatcaccaaaccccgccaagtttgaaaccctacatggttgattcagcaattggtgtatttggtttagggaacattggtagtgtcttcttagtttatttagtatataagtttacttcaaaacaaggtaatagttggtttgataaaaatataaattgtagtcatttggataaatactattggcttctaagtgtatggatagcaattaatatagtttggtacttgtttgtatcaattctatatcaacctaaggagaaaccaacaacaacatcaaatcaagaaggaggagaagaacaagaagaaaatttgtggaattctttgaagaagttagccaagaaatgttgtgtttttctgccggaaaaagttcctgattgttgttgttccttatgttgttgttgttgttgttgttgtccaacttctggtgatccaaggaaaaaaaattatcaggcagaacaactagcgacataaaaataattgcaataaggtatcgtgtgttaaataaaagttattcaagtatttttctgtattttcatttttattttttatgagtaacttagtacacttgtgttaaagatcatcataaagtttgatattgttgttaagaatacattttttaagtccttaatttgatgtttctttatattatgccatttagctatgaagttaaatttggcatgaatgaaagaattagttgaagaaaacaaaaatattaattaacaagccagagaaattgttaactgttttagaccatgaaaatgtttattatcaccttctttaaatcttgttatgatcataatatattaaaattgcatgtatatattgagaatattctctaaacatatatataagtacaaaatataataattaatattaataattaatgggagtttaaatattttaaatagtcatctgtagtgaaataggttctgtaaatatatataccgtggtcgggtggataacaaatttttgtattgttaaatgttgttgtgattgttttatatatattgtattttgttattaattattaatatctttaaattttttgggaacgttcaattataatcgttatgctgctgaaattttaatagaatttatgactagttactagttagtaatttagtatactatagtttgtaattttgtaagcctcgaggcgtttgaggcgtaagcctcacaaattatattgaaataatattttagaacacctaaggatgaataaaatgtcacataaatttcaaacgggaaatttgattttctat

SEQ ID NO: 302276 - DNA, 3848 bp, Cannabis indica
taactttttactagtatatataagtgcaccatgttataattgttcttaagaaaaataataattgacttatagattgaaaaaaatttatttcaattaacataataaatgataacaattaataaattaaaagcatgataataaatgaggaaaataaaagggagtcggctcagtcgggtcataacacgtggtaacagcacgtgcggacccacacatgaaaaaagacaggtccgctagctggcaaggcaacggcgctgtgagccataatggcaaacaaagactttccgcacgtgcggaggttgggttacgtgtgggccaaagacgtgtgccctccccgttattgggtcccactctctcttatttttatttatttatttattaaacaaaggattaattaattaattaaatttgcttttccaagaaatgggtgagagaggccggcgtgaagaaaaagtgggatgaggccacgtggggttccattccaaaccctttgtttcattttcacactcttctctttttccttcctattaattaattaaattaaattcatttaattattatttatgtcttttttttaatacgtgacttgcacgtgcatttaacttcctctacttttcttccattgctaatgatatgaattagggttggttaatttcgttgaattttaaaaaattataactcaatttgatttgattagatatcaaaatttaattattaatttgattgaattaattttataattggttaattatacaccaaactatttaaaaaaaaacgagtaatatttagttttgatattaagaatattaaatttttaaataaaataaataaatgtaatggatttgagtcctccacgtgtctatatttatgataagttaacggaagtgttagtaatggtgtaagagaattgtaacattatgtatttttacctcaaaaaataaacattaagtatttaaatgtataaaatttaaaacattaagtatttatgccgcaatttacccattgaattatatctaatttatcactcgattggatttgattagatatcaaaatttaatctaatcaatttaattataattaaattgaattgattttataattggatctataattagttaattatacaccagactatttattatataaataaactttaaaatatgaagaaaattacatcaaatttaattgatattgaaaacaatttaaaaaatgaaggagctattaggtattttcctaggaatttaaggctatgcatacatgtttaggaaaatacagtaagtcaaacatgttatttttttaatttaagatggaatagaattatttttttaaaaaaaagaattaattaataaatctattaataaataaaacacggcctaaacatataattaactaattttttaaatattgaaatacaaataatattttaatatatattaattataatttgattagattaatttttaattaactttttagattaatatataataatgatcaaattcaattagacatctaacttttgacatccaattaaattgtaattagatatctatttttcggtaattaaattaaattagattgaattaattcggtttaattaaattagattggatcttgtccagtcctagaatgagtttattgaagattaaagtattgtttgttattatttaaaaagctttaatgttatttattttattttattttttgaaagggatagagataatgaatgaatatgaatggttgtctctaaaactattctcaactcaaactgcgcatgctatttgaacatactccaaaatcaaatcaactttataattattgtggctaattttgacaaacactatgggacaccaacactatacatccctaactacccggattagacttatatttataatataatccttatatattttttttttctttatttaaagaagtttaggtacattaatatataattgttatagtatgaatttttcgagtagaaattcgagaacaattttttataaaattgacacgtagatttaatttttgataaaaaataaatgagtttttaattaataatgacttttaaagagttaacttcgcttgatctgaactcgcgagatgatgtgattttgatagggtctaatcgcatactatgccttacgtagtgaaagataagcaggaccgagatgatttatacaagtcgcgcatatatcaaaatatatgcaatgactaatagtcttttcctacgactaagtaaatattgttctttacatgataattggtccaaatgacagactgtgttcgacgacttgacagggctcacatgccccatgttgtcaatatgcgagatgtctgtcaatgcaattcaaagtgaacgcagacatccgagcgataggcccattagccgtttagcgaatatataatatatgcacctaatgcctaaaagtttgtgcgagaatatgaacaaaaaattcgcactcaatataagaacggattaaaatgttcttcatttattattttacatttattcatatttaatactatcatttattgtaaaattgttctacacaattaattagttatgtaaaattaaaatggcacttgctttctatataaagaagtgatccaaattaataaactaagcagaaatcatttgcaatagtagactaagcagactgtgatctgactgagccactatatttctttgtgtcattattttcagttgttttgttgtttttggtagctccccgttgaatactcgctactctaagtaagtgtttgctcttttttgtttttttcatttattatttgcacgtattttaatgttgtttaaattcctctacaccaataataatcaaaactcttttatgtagtgctaccaaaaaatgatgaagtagctagtagaaaattgaaagaaagataaaaagttgaccaatatgtttgtgcatgggtggaaataatgttttaattttcattccatgattaaatttgatacaatcctaataataatcagaatcaaatagatttcataagagaaattagagactaactaagccgattaaccattagtttaagttgtttaacaattaaagtgactagtaatagtatattaatgaagttattactttagtagcaaattagttcatctcttgtattgggataaattttctctcttacttatttgattctattttctcaaatacacgatataaagaatatattcttggtcgatcaattttttccttcacactttatgtgaacaaagatgaaaggtgtttatctttatttagaaaattatttgtatgactctcttcagtaatataatatgcttatgcttgtaataaatatcaatctaacctttttttagcgtattaattcactttagctatattacaatttaaatgaatggttaattattgatgtaataaatcatccaaaattattaagtacgagctattcttttatttttattttcttttaggttttatatatcgttaatattattttataactagggaccacttaaggattggttcttgcaaagtgaaaacagccaaaaaaaaatgtataatatcttataatcttaattatggtctactatacagtagacaatatttcaaccttagatttccatatcatgtcattactgtcacaacactatatattattctttacaaaaaccaaatacatgaactcgaatataatattatatggtttacaatctcatattataaatgtcccaaaaattatatatattatatatcttgtggtacaagtaatgtcaatggatggatccatattaattagggaaaaaaacagaaaaatataaaaaaggaaaaaaaattacaaaaatactttgggcc

SEQ ID NO: 302277 - DNA, 2575 bp, Cannabis indica
caaaaaaaaaaatatatatatacgagaaaaccagtttaagataactgactacgtaccctaaaattaaattgtttttctactgtggaagtattatagttactaataattttatatatgtgtgtaaatatacagggcagagaagaagaagcaaaagcaattttactaaaaatctacacagctgaggaagtagaaaccgaaatgcaagttctaaaagagtcaatagaggcagaacaacaacaaaaaggattagatgagaaaatcaacatttcacaattattgaaaacaaaaacagtgagacgcggcttattagccggcgtaggcctacaaattgctcaacaatttgtaggcataaacactgtcatgtactacagccccaccattgttcagctcgcgggaatcgcctccaaccaaaccgcgctactcctttcccttgtcacggcgggactcaatgccttgggatcggttgtcagcatttattttattgataggactgggaggaagaagcttttggttattagtttgtgtggtgttattgtctcacttggccttttgtctgctgtttttcatgaaactacttctcattctcccgcggtgagtgtcgccgccacctcccatttcgggaactttacttgcccggattatggctctgctggttttggtgctggaacttgggattgtatgaagtgtttgaaggcttctaagccggattgtggattttgtgcttctccaaacgacaaggtatcttctgtcgtttttagaatttggtttatagtatattatttactacttcatacaatggaataatggaattctattttagtgatcataacatcattaaaaattttcatttaaacactagcaacttgttaaaaggaagtcaatcatcccataccattttacatgactttagtgtaatttagtattagaccacacatatttcatttaaaatagattatatatatatatgactatatactaaattgcaaataataaacatagttaatttgaacattatgaatattacatattaatgctctaaaaataaactagcctagcttttcttctcatttgtattagaggattactattaggaaatttataatgcccaaaaaaggtaataatttataaatagttatcatttttctatacatttcattattataataaaatatacgtgattaaatattaacttacactaatagatatactgactctaagattttatgaaacttagaaaaaatttaaattatttggtcattatttaagaggtatgtgataaattaccaaaaaagatgtgtatttataaagagaaaaaaaaattgcggaccactaagttgggtggaccctaggcgtaatccaagaccgagcctagcatgttaaaaggaagaaaaatttgcgagcccctaagctaggtggactttagatatgagtctagtctgtcttaacacaagacctgcgtttctcatggtgtggcgtgtttagctttttcctttgaaattttgaattatgtttatttttttttagagatgtttctgacatgttaaaagaatgaataactataaatttattaattaaaatatttttcataactttcagttacttccgggagcatgtttggtatcaaacgacaacgttaaggagatgtgcaaacaagaagagagactatggtacacaaggggttgcccaagcaaattaggatggctagcacttgtagcacttgccttgtacataatatttttctcaccaggaatggggacagttccatggattgtcaattcagagatatacccactaagatttcgtggtgtatgtggtggaattgcagccacagctaactggatttcaaatctaattgtggcccaatcattcttgtccatgactcaagccattgggacctcttggacctttttcatatttggagtcatttcagttgtggccctaatctttgttcttgtttgtgtgcctgaaactaaaggacttcctattgaagaaattgagaagatgttggagatgaggagtttgcattacaagttttgggaaaatagctcttcatcatcattagataacaacaagaagggacaatctgtttagacaatattatatgtatgtataattaagtttttattatgtaaattgtgtaaggttgaagttgtttttgtgtgttgggaatttaattattaggagagacttaattttgggaacctttgggattttgatgtcggatgagttccccaagtttattgtataattatgtattgaagattgtaatgaggttattggtatgaaagttgtgaaattagaaaaaaaaaaaaatatatcacttcctgttattttttcattgagcatccgccctgttaagaattatggggttccatctcaaaactaattggcaatgagtggagtagcccatgttcttatatatggctcaatacttttacatttaatccatgtgggacaatattctccaatatcccccctcaagatggtggctatttttgctcaccaatcttgaatcaccttatcacaggccatgccatttgctcgcttattttttgttcggatctcaggtgtcttt

SEQ ID NO: 302278 - DNA, 2761 bp, Cannabis indica
ttcgcaattgtaagattaactcacgaaaccacgtgctgtgtgtagtagtaggaaagtctattggttttcttagttgggttaagagttcgactctcactccgtccctcattttgagagaattatgcttagcccttgaaggttggcttgttgtggtgtgctatctttgggatgagaactttcatgaggtgtaatatctgagttaaggcaagaagaggtataagacctttatagctagcacgaggtctcaaggtaatccattttttccagaaatttaaaataaaaaaaaaaacaattaactcatgaagaaaattagctactggtggtgttagactagctcacttggagtagctagctaatgtttagctacatgtgttagactttatttgattgagcttctgttttctcttttaagcttcttagaaagctcttgttgagatagctagtaaaatttacttatgttaaaagagtttttttagtactataaaatcaacactattttggttagtacaatgataatttcataatacgaaactcttttgttgcgtacttgatttagtaccataaaaccaatactattttggctggtaacatccatggggatgtgtgatatcaaatgtgaatcctacacactatataaggaggtctaaagttctcatttctgtaacttagttttctatcaacaagcacttatcaaaaaacacaaggcttgataattctcaaaactatttcttatagaattcccttagtgattggagataaggaaaataagcttttggacaaagttgtaatactttgttcaagtcatggtgattcccactaatctatactcaaggttgtgagtcagtaattcttcttcttcatattatatatatgtgttatattacatgcgatgtaatattcatgttcttctatcttttttatataaagatatatagtgtatttggcgttgtaacatttatataattaattttttaatttttatattttattataatagaattataattcttaatttatcttacattgtaataaaatctctaacatcaaatttataaagatgaaccaagtttaaattctatcaaccatcacatgtctcattcgactagctcggtagcattagttcaaatatccatataatttcatcgcatagttattagatatttataatctaaatttaaacttgtaatttagatatttaacttttaattatggctaaaatgtgttaactatatagtcaaagattttagtaggttgtagaaaaaaaaaattggctcttaaaaagaaaaataagttaagaaaaaatgtgtaatttaaaatgataattttttttaggctttgggctaggtgggccttaagtgtgggttaggtcgggcttgtagcctatgagcttataaataagaggtatgtgggtttattattttataactcgcaactttgcatacaaatgctctaccaaattgttatgacttgtgcttgaaagactcaattgatctcgctcatttgatcccaaatattggttgctactcatattaaaataccaagtggaatagaccaaaacaatatttggagctgaactactacaaaatatgtgtgatatttatttcattgctcttaacccatttattacgtttactcattgttggctaaattatggtcaactaataagaattttccttcttggtacgatcaaatatgtgtgtagtgtgttagagtgattagtttgttaagttatttttagttgagttattttcttattatggtcagggttgtttgggaagttagttaagttagttaaccttacttctcccctttaaatagatgaactatctcttgtaattagttcatctaataatttttcattcaacaaagattttcgttctgttttctattctacaatatggtattagagcgggaaagaaaggctttcccttgatcttgatctctcttcgccgtgtttccttcttctccagcgactctctcaccagagttggtgtgttttccctctgcgtttcttgcactctatttctattcaaagtgttctttatttggtctttccttttttttcgaagttgtctaatgataatcagacaactcctattgcaattggtgataattctgcacaagctacgaccaaagaacaagaaaattcgattgtacagagcaatcagactcatcagttgattcagcaaagaaatcctcttgaagatccgaccgatacttactatctccaccatgttgataatccaggcattgttttggtgtttcaacttctcacagggcaatacaattacatgtcatgtcatggagtaagcaatgcaattaaccatttttgtcaagaagaaactcgggttcttggatggttcgattcctaaacctttatttactgaacttattttgtatgatgcctggactagaaataacaacattgtcatatcatgaatcttgaattctgtttctaaggaaattttctctagcattttatatgatgagtctgttgcagctatatggaacgatctaaaggtttgtttccatcaatataatggaccgcgtatatacaatttgaggaagggtttgatgaacctaaagtaagatgatcaaggagtcaacatatatttcactaagctaaaaacgatttggaaaaaatatcctattaccgtcctacttgcatttgcaatggatgcacttgtggtggtgtcaaaaagctccaagaacaccaccacatggagtatataatgtcatttctaatgggtctttcagattc

SEQ ID NO: 302279 - DNA, 2192 bp, Cannabis indica
gcttccaacaatgaagttgaacatgaagctatggttgctgacctacaattagctaaagaggttggtgcccagaacatggagctgtataatgattcacaactggtagttagccaagtgttttgggaataccagataaaaaggtaagagatggctagttacgtagaaatgtctatggagctattgccacattttaagcactattccgtcaagtaaatccccaaggataaaaatgccttcacaaacatgttagctaaattagaaatagatccaaacacagagaaatgtgcactagtcaccattgcccatctatccactttaagcatagaagcacaggggatgatggttattgatcagtcaacttcttagatggctccaatcctaaaatatctagaatttaggacactctcgtaggatagagcagcttcacaaaagatacaataccaagctcctaggtatgtaatcatggattgaaagttatacaaaagaggattatcgatgtgattcttaaggtgcacaattgggaccaagataagtgctgttatccatgagattcacgaaggattttatggatatctcacgtctgtacccaatctgttcaagaaaaatcatttgtcaaggatatttttggtcaaccattaagaaggattgcaatggatacgtatgcaaatgtgaacaatgacagtgttattccaaggtcctaagggctccaccaacatagataaccctcatgaatagtccttggccctttgctgtttgaggaatagatttagtaggatcacttccaactggaaagggatgagtcaaatttactgttgtggttgtttactattttagtaagtggatggaagctgagcctatgaatgtagtaacttccaaaaaggcattggacttcttaatgaaaaacactgtgtacagatatggaatttcacacaaaattgtttttgataatagaaagcaatttagcattgatcaattcaccaatttttgtgtcaagcacgaaatcattgagagctctttagctgtggccagaccttagacaaatagacaagtggaagttgttaacaatattttgaagacaaccttgacaaagatgcttcaagcttgcaaagcacattggccaaaagaacttccaagacttcttttgtcatataaaaatattgaaaggaccttaataggccacactgtgtattcaatgacatatgggtgcgtgcgaggcagtaatcccaatcgaaaccaacatgtcttctcataagagagaaacttatgaccctactcaaaatcatgctttacttgaagaatctttggatctgattgaagaagtttgagaatagtcacaagttaaactccaaatgtaacaaggcaagatcaccataaatttcaattctaaagtcaagagccagaattttgaaattggtgatctggtcttaagaaaggtatttctagcctctcaggagccaggaatgggggtcttagaacaaagctcagaaggtccatataaaattcgagataaaatttatgatggaacatatcacttgaaaaggctatatgtatcacaaatcccaatagcatagaacactgagcacctgcgctaatattatcagtagactgtgtagaaagttttcttatatttcattttctttttattttatatgtttaatttccatctacgccttagggaagaaatcatttgaataaaacaagaaggtattttcatttcatactcaatttttaaagtttttgtcttgtaacatgtgaccaagagtctaaaactcttaatcctttgggggatatcatacattatatgattataatgttatacctttctatagaaaataactaaagtaataacaagtgtaagagtaggtagtatcacctaaaattggaactctaaggaactagaagtaagttactgttgggttttgtgccctaaatagaatccatttcaatataatcagatttactaattaataaagatcagaaactacattttatgttgcatggttcacatgatttatttcatgattgtttaatgtataaattctattaagtctagaacatatgtatttgttcatgattatagtgttctcagcacagtgaaatataatcatgattatatgttcaaaaatataattcccataatttgtcagttcactggatttagactagcatgataatcagcgataggtatactt

SEQ ID NO: 302280 - DNA, 4983 bp, Cannabis indica
ttatcgattataagttcataaccttggcccatattccttttgggcggaactgatctactaattatttgattccagttagtaagagggattcttgccttacacacttcactcaagactaccctcccatataaataccaatgtacactttttatttactatattctagcacaccatactaatcctaggttctaacagtgtcatggtatgccaatgaagttctcttccttggtcctataatatctatattaagtgattttctttgcctttattatgtcaatgaaaagtatgcttttcctgagcaggtttgtcagtacatggtgatttacaaggagttgagcgtctttccggtgctctctctgctcatatgtggcctggaatgattcttaagtcaggagataggattacagtgccatcatttcctgaaagagaaggtcttactcccatctacatttggttactacttgacttcttgtttggaaataataagttttttattctttcctttcagacctgtccgaagaagaatctgattacgaattggagtatgaaattctgtctggtggctcagctgaaccatgggatgatacagataaagaatgggtttctgcaagtgttgcaagccctcaaggtaattccaatctagagaatgtaatcaaatatgatagggaggagatgcggccctcaacatctgggactgcatttcatgatgagaatgacaaggccgacatgattccccatccagaagattctaaccaagcattgaaaccagatcaaggttcacattttgagtttgaggagttggaacagttgatgtctgagatcggtaacatacgagatagtttaaggttgatgcctgattctcaaaggagagaaatggctgcaaatatggcattgaaaatggccaccatgtttggcggtgccagcgatgatgaacgtgaaacttaatgcatttaatcttgtctggcatattttaagaagagaatagcgagttgtttcgtgccatatctgattttgctctacttgtttcaagccactaccatagacatgagatagttgctcagaagtacacaaaaacttcacaattgtttttttttctttggtttaaattttaaacttaaaaagagacaaatatgcattgtgccatacaatatctgagatttagaaataattgaatgagatttgcaaaatagttttgtagatatgcagttttgagactggaacaatgatctagtagattttatgtctggtataatagaacatctcaaatgtgtttgagcaattgcatagaactattttttttttttttttcgaagctacaagtgtatatatcttacattttccatcaaaataaacgtttttgttagctgcatcccttttactttctatatgaccttagttttcactttaggattcaccaacagtattgaacaagatcaacaacatgttatccacttctggttcttgcgctttatcccccgacagaaaaacatgaactttccctttcatctgtatccaactacatccaggaaactttctcacacctttcaatcccatctccttcctcaacattttctcctcttcatgctcatcatttgctgcataaatattacaaagcgtcacatgagcaggagcgtttagaggatcgagttcaagtaatcgtttggctgcctgtctagcaatcttggcatttgtctcgcctaagccacatactccaagcaatgctccccatacagtatgttctggttcaaacggtagcttcaacacaaaccgataggcttcttttactttcccggccctgcctagaagatcaatcatgcatatgtaatgttccaagcctggttgaacatcataaacattgttcatggcattgaaaatttcccaccctctactcacaagtcctgcatggctacaagctgataaaacacccaaaaaagttacagagttcggaagagtccctagattccaccattgtttcaaaggtctcctatacatttctttgccagtccatgatttgaaaaccccatgatcattgaattccaagaaatcgaatcccgaaaaaccatatttgagaatatgctatatgcagcatttatctccccacatttggcatacattgaaatcaatgaattgtcaagaatcaaatcaaacttatactgtgtttttatcacctggcaatgaaactgccttccaagatcaagatacgccattgcacccatggctccaataagagtacaatatgtggaatttaatggtgaaacaccatgaacctgcatttcagaaaatatatctattgcttccttgaaaagctcactttgaacatgccctgaaatcatggttgtccatgccactgcatctttgtctggcatgttcgaaaacagatgacaagcctttgaaacttctccaacactgaaatatccacttatcattgaagtccaagagaccttatctcggataggtaccatgtcaaacacactgtgagccctttctaattctccagtctgtatgtaaccattaatcatataattataagattgaacagtaaggttatttaaattcatggtaaagatgatataggccaatttcatgttaccaaatgcagaatacatgtgaacaagactcttacttaacctgccattatagtcattgttgtccaaactgttaataattatctgagtatgtaattgcttaccaagacaaggccaacccaccccagcacaagcataagcaagtgatataaaagtctcttcatttggtttcaagtcaaaacttcctttccacttaacaaaaagcaaaagggcttcttcatagaagccattccaagcaaaacccccaatcattgctgtccaagaaatgacattcctttcaggcataatttgaaacaaagaatacccttcatccacatagccagacctacaataaccagatattatactagtccaactaacaacattcctatctttcatctcatcaaaaagagcttttgcttcttccattctacaattctcagagtaccctgcaatcataatattccaagaaactatattcttatccggaattcgatcaaaacaagccttgcaccattcaagtcaccattcctaatcaacccagataccatagcattccaagaaacgacattcttctccggcattgcatcaaacaagctccacaactcatcaaccctccctagttctgccactccacaaagcatggatgtccaagagaccacatttctctctggcatcacctcaaaaaattgaaaagcttcaaagaatctccttgactgaacatagcccgataacattgcattaaaagtaacaatgttcctctcaggcatgatatcgaaaagcccgcgagcttcatcaataaagccagattttgagtactttgtgagcaacgaagtccaatgaacaatatttcggcggttaccatctctgtcagacaatttatcgagcagttggcgtgcttcctgaactctatgttgggaaagacattgcaggagtctagtatcgtggagtgagagtttaaagtaatgatggggtttggaaaatggaacctgggttgcattaaagttacgaacttgaaatttgagcgaggttgttgggagagtaaaagagagaatttttagagaaaagagaagcataacagtttataaaatgtaaagaccgaagataatgggaattatataaatgaatgaagcagagaactgaactgggttttggctggaatttgatttgagaggtgatataataaatcatatattggggagttgattatggcataacaacagctttggttaatagtttccagccttagatgcatttcttattctgcagagcattgtgaaccttgtccaagtaagtaatggacaatgttatgggaaagtgtgatttcgtgtgtgagtgagaatagtttgagttgtatttggtgacatttttggatctaataatattacatgtgtttcgggttcaggtgtatggaatgagttagatgagcagaagctaattgaagatactggttctggcaataccatttataacattacaaagcatacctcttaacatttgggatttgagatattctcttagtggtgcaacctgtaatcagattcttaatgtatacaggatcaaagaatggaagtaaggctggagacaaagttacttaaactgtaattatgtcactacatgatcatagttaaattagatgaaaactaaaggaataaaaaattaataaatagttggtatgtatagcataaaattttaaatatttacccataaatattctgcttaaattttaaagaagttatttgagcttcagcttcttagtagtagttcttttacaaaattattttgagttaaatgagtataaaattaatattttattataaatacattaaaaataatatatttgacaaaatataacaataatatcaacggcattttgtttaatatttattttatgtatcactctctattacctatttgaatttataacacataataataccataaccattttctaatttttaataatttacttagttgaagggtttacacatcaaaatcacatactaaaaatatatttataacccatagataaaacttaaataatttataaaagatgtgggacatttaattttaataatctcacaaaattttaaaaataaaaaaaaaaaaaaatactatgatgtcacatttaataagattaagatcgccaatgaaagtttgtgaaaggtgaatcaaaagtggtttgatagtagaaaggttggtaaaatttatttctatagggcccgtttggtatgcaggactggattggattagacaggctaatttgtctaatccagtatttgggtatgttagaagtttggataactaatccagttaacctcatctgtctggtattatttatctcatccagcagggtgggataaataatcccatgcatgtgagattttttttatcgtttttttaatttaattttattaat

SEQ ID NO: 302281 - DNA, 810 bp, Cannabis indica
ctcttagactttagaaatgtgatacaaaaaaacttttttccttatccccttatgtgaaggggttaagaggtttatataggttagagttcaggtccagacatacccatgatccgtttaggttttatgtaaaagttgacccactattggggcaaaaatacacaatatactcgaccataaggcccattcaaaggtttttccttgtggtttgacagttccgtatagtagtaccacttttagcgtagagcacatgtcgagcagaaattacgcctagtaaacaaagttgtcagaggagtcgtcggacaaaatgagtgtacgcagaggaggtgcacgcactaccatgctctgacatagggaagagagtctaatcctgtgtcagaggagcaaacacgtcaaggctgacatctgactcctattcttcgttaagcttccgcatgcccgttggtatgcctggagggctccgtcccttatgagatccaaaaggcttagtaggctttcgaccctttgaatatcgttttaaatcgaagtaaggctctgatctctattgggcttctacccatttcagatctagtttggcctttcgtgactggaaagcttggtcccacattaatacaataattatatttaattttgtaccgcatgtcctcttccagaaacgtgaatacagtctatatgtataatagaaaaaaaaaatcaaaaaataggtaattttcttaaaaaaaacttacgaaaaatgaggaaaccttgtactaaatggtcacaagctgcccaatactaggtaggccttgccttgagctgggtagccgtgctaac

SEQ ID NO: 302282 - DNA, 1297 bp, Cannabis indica
aaagagccccatcttcgttgcaatcgagctggaaacgaccgttgcttaagctgtgcaagcgcccagctagtggatagaagtagactagagtgtggctcaaggaatcgattagggtttgcgtaacggtttggaatggggttgaggttggggcgtagaaatagataacatttgtgtaagttgtgtatccgatatgatcccattccgacaaggattgattccctttccaagttggttttgcaggactcaccattagcttttgctttattttcaactccattggatttggaataatgatagttaatatttgtgagaaaagcttattagggtatacgtatatttatattaatgatagttaatactacgtattcataaaatttgaaatagtcaactatatcagatgaaaaaaaaatagagaagcgggtggtttgaatcataattttatatgtttaaactatcaaactttctttttgaaaaaaatatgtgaattgtattttattaattaagattaactaatgtatttacttaaaattttgtatcgtattaattatacggccataatttctaatacaatattaattgtattatttaaaacataaaaaattatttgtattagcttgtagtcttgtactataatatttagaaattgttcgagttgggtcgggcctagcacagtcgggattcagggtctggaaccaggattgagtctggggtttggctcggggtcgaggtgagagcctgagtccgaatcaggtactattttatataattttaaaaaataaagaatctaattttattatttaacaaaacagatcaataatatctaattcataatttttacaaaacacatatataatccataatggtggatgatattttctattttaaatttgtttccattccactttctttgatttgttactatatatacttttttaaaaggttttcttgtaaagatggaaataacatgaattaggagttacttctttgaatatttaagtttattgtctagttgctttgtatttcttattctcatgtccaacacaacatttcaaaaactaaaaagataagttgtcttcttttattaatagacaaatttttgggcgttccatatatataatttaggaaatttttgttttagattgaagagttttttgttagacctcttatatgtttcagagtctagaaagttttttagtttaattctttttataaccgtgtatgttgtaactatttaggagcacttgtaaattatatatatatatatatatatatatatatatatatatatatatatata

SEQ ID NO: 302283 - DNA, 1488 bp, Cannabis indica
ttaattattctattagtattttaacaattttataaaaatcacacacatagtgtccctatagattagcgcgttatatgcaacctttgaaatcatgaggaaaattagttagtgggattatcttgaaaagtatctagaaatttaattaagaaaccatttccaatctggtttgcgagtcgtaagagactgatcattggcaccttttagcgaactaataaaatttctctgtcttctacgatagtaataacatgaaaaaactttatgccatgatccccatcttgaagctaagcaattctggatttctgtctccacataatctcttccttctaaagagcatcattaagttcttgtcttgctgagcccaccaatgactctaggtagcgaaggattagccttaatcacgaacaacttaactcgagcatgaagaatttgtttctttaagtggctgaactgagattttttctagctagataaggcttttataacttcaggaagcttcttgtggagtcctaccattggattcccctcagagatagaagcccaagatttttcaacaatccaaaaggagtggtgatctctatccttcatattctcatatttgaaaggtctgcctagggtcaccttcaccgtctgaatctaagaggatttgattgtgatcagaattgctggccagaagagtagaaaccacagccttgggaaataacatctaccattctatcgaagtcaaggtcctatcaagtttgtctttctttcaacaaggagtacctttagaattataagacttcttcctccaagtagacagagggcctttagtcccaatgtcaaccgaacccgagcccctaaccatctgttggaaatcaaaggaatagagagaagtgttactcgattttaaatagttaaaagttttagcatccaagagagtccattgagatctccaacaacacaaataggatcccttgtagaatcaatcatagtatccactctacaccataattgttctctaccacttaaagacgacggtccataaatggccaaaaataaccacctttgccctaggggtccgaagagatctcaactacaataaggtttgagtccgcaaaaattatcttagcatcaacacccttcctccaacacaaagcaagacctccagataagccatgaggatcatgttggggattattttaccaggatctagatttactaccatgtatgttgtttaacatcctaaatatgaatttctaaatcaatggaattcaaacacatataaagttcaagaaaccttacattggttgcaacggaattaaatgactccttccgctcagatctctaacccttgtatcctttctgtagcagagtatcaccaagatttgagctcgattctccttcagttgattggattcttcccagtcttacacaccattattgagtaccaacttcctacgcgtgggcatgcactctatgtgacagtcagtagtcccgtggtccgtaagg

SEQ ID NO: 302284 - DNA, 2245 bp, Cannabis indica
ttaagtttaatttattttaaaattggtacgagttaatgatctaggtctacatatcttcaaaatgcgggagataattagtattattaatttattattattatactttaattttaaaacaacttgataataattaatgatgatcattaattagattaaaaataaataaaaaggttatgattctataactaaactttgttgcatgtacatgtgaaaaaaaaaaaaaaatactaggagaacatttaaaatttattatagagatttaaaataaaatgttagatttggtgtgacttttgttattttacgtagctattatgcatattagcatacatatcaaaagtactcaagttagaataattctgttgtatacatatatataaatatttatgtaaatgttttagggtggctttacaatccacctagtgcactctctacttgagtatttaacaaaaaaaaattaatctaattttttttaatcgtatatgttataattatttaagaaatttttaataatttataatatagaaaacaatgttgaaataatttatttcacatgcatataaaataaaaaaaaaaaaaaatcacatgtacgtgctatttgtaccttatttttggcatgttaatttttctgaattttactaaaattttataaaatgtcttaaataactacaagtacaacatacataactaagaaacaaattgaactaaatttttttatctgaataccgaaacaattaagagtgcatcaatacatattttcctatgtttaatgtatgtaatttttagttaattagttatatccactaataagggtgtttagccaaactttttagaaccaattttttgaaagaaaaaaaatcacaaaacaccaaatgttgttttttatttttaaaattaatatttcatcacatattcttttctacatttcgggtctcggggccagatcccaaacctgcacccggacccagactctagccccaaacatgggatatatctgtacccaagatcttgactcagccttgagatcagaggcaactcgaatttgggaccctgacccgatctcagaccctaactctaccagaccgaattcctagaccaaactcgaatccaaccccaagacacgtctaaattcgagtctgagttcaatctttgaggccgagaccgaatttggatcttggggtcgatttcaggtctatgtccagggccaagtccaagtttggagtgggactagtttcatgtcgatgtataatgtaaaatatttgaatattttttatagtaaaaaaatctaaaatagtttttaaaaaatattagtcaaacactattaaatttttaaaatgataaaaaattattctctattcttatttttaaaaattaaattctaaaaacttaaaatagcctctaatccctttatgtgtttgaagcttaatttgttatgagtttgttaattattaagactagtttttattatatattattgggtcttgtgatattattaccttaaagataatttcacaacaataatattaaagattttgacttttagatcttgatgtcaaagtcaaaatcatatttgtcacctccattcttattaatatatatatatatattcaaatattaatttacatatatttttggtcaccaagtgtaacatcaaggtatatattgattcatatattattattattatgtattaaaagaattagaaacatatatgcataaaagtgaatgaaggtgattaaatggtgatttattattgggtgttagtataagtttagtcactaaaagtcagattagttgttgcatagtatacttttaggtaagattattattgttgccgttgaacatgtgtacttacaagcaattgactatacacatatagcacacaaataaataataaataattattttattaattatatataattaattaccaactaaaactaccctaagttgaattaattttagatttaattaattataataatactaattatttatgctcttattagctcctatcttattatactataatacgaccagtttcatctatcaattcaattctaattaagatagacaccatgaactaatattaaattattaataattttttacaagaggaagactatcattttctcatttatatgatcaatttaattttcagatatatatatactagtaaaaagttacgtgcgaagcacgtatactaattttatgttaagtattttttactttatttaaaagatataat

SEQ ID NO: 302285 - DNA, 929 bp, Cannabis indica
ttttttaaaaaaaaaaaaatagttttgctttttatgtgcatatataataatccttttaaaacaaaatgtagaatttcgcaatgaatatgtaactaaaaatattttctctctctttcaaaaaaaaaaaaaaaaaattctctcaaccttacaaaaaaaaacactttctctcaaaattttacattattgaagaaaagtatactaacataattatatttttataaaacataataatttaatcgtcaaattacatatgttatattcaactttgtcactatgtttctaattatgaaattaatcataattaaacttatggatgtgaatccatttacaataaaatttctataaatggatgcttaatattggagtagcttccataaaatcatgagagtatttaattatgtctcgtgttaagaaaattacaataattatcttaattttttttttttgaaaagaataattatcttggtaaacaaaatgttatgttgcattaaaagtaaggtaagataaaatatttatttaaaattgttttagacaataattaacttttcaggctagttatcacattttaaaattgttaagtacataataagtagcaatgtgatacctttaaagtgaaaatatttatatagctatatctttattactttattttttaaaagggcattttacaaaaatactggatttgaggtaatacttttcaattttactgccacacggcagaaataacatttatactgtcctctcccattttttttcttttatactgtaaataccaaaacaaacgtatgagacctccatctttcacaaccacagacaaaaccaccacaacaacaccaggataaccgaaaaataaccattaattctgacaagattgagcaaaagcagtgaaatcgacatcaaataaataatcatggcaaaacaacggtaaa

SEQ ID NO: 302286 - DNA, 3397 bp, Cannabis indica
tccactcttgtcgctaccacacatggcatgtgtcacccttgatattaggttagcattttaatgtttgcactttgatctacgtaacaggcatcttgctcactttgaacttagttaccccacttctatgacccttcatgttccaagaggtaccacacttatctctattccccccatttttgttgtctttaagttacgtttctagaatgcttgcagttatagtttgggtgttgccattgtggcaccagttgcatcacttgcacctgcactcgggcatacacccccgtgtgtattatatagtaaactcaatatcttgattttacctcttaggtgatggtgttaaggtagcgtgtctctttaaactattccgtcctgggtctcatttgggcgcaaccctaaaaagtgatattttctacggccaatatcattaatattttgtcgtttgataaggagggcactcaagagagcctacatgctagatatgttagattaatatctaagaggatcaatcactttgaacacattattaaccatagagagcatgttgagaaggtcaaagctgaaattcattctgttttgagtagagaacaaaatttctggtagcctactccgacgtgtatcgttttaggcttagagcttcacttgttgaatcttcaaaccatctgagattccttgagagttctctccctcctaagcctgatattccatcccctttcaaggcttcctgatcttctttgggcgaggagcatggaatcatgtctactccatccttattcccgggggtaccagggtcaagccttaggctcacaagaggcccaaaggagatagaaaatatgtgcctcatgcttagcatcacttttatgtgtctgcaggtatgactccacctaagcaactgaggcatcttgtcgcatcccacaggcgctcttcttcttaccttcctaggtgacaagtccttccattgcctagtgaagtacccttcgtctatgtagatgtcaagagaaccatgtccatagatggtattcgtagggtaatatacacctttaaaatacgtacaactaatgacttagcactgctcaagctggggcaagatgaattcaccgtcgcacccctccaagagggggtgggggttgccttcattgaacacattatggcagctagcgtcactttatctctcaatccatttttattgacatacttgcctagtttggtattgcacctctccaactctccctgatggcttatattaggttgacatgctttgccatagcttttaagggggtgaatggtcacttcctttcttccacggagtttcacatgattttcaacatctatcacactgccaaatctcctcgcacgtatcacttctcaaagatcttgtcccccaaattccaaggtgctgcaaggatgcctttgaaggttcacttcaagcctttcgaattcagaatatcaggaagaaatggctcggtctcctcatcggagtcataaccaggtaatttcccatgttccccatctggatattttctaaacttatcctccaactcaatgattcacaacttgatgggatccatttattgttgatttacttttagttgatggcgtaagtaaggtacattctgattcaatcactcgcgaagatcgagttgtcttcgattcaaatgtttgcaaagatcaggtttccttcactaattgctcacagacctcgtctctaagtaactcttaaattggtagctttgcgtattgctcatggtttcttgattggcataatatcgaagtctacttcgttctcacattttcctacctgatcgactgtgtcctcgagacctcgagtgtcccaagttggaacttgcttcttcttgtagtggccttctcctttggaagaggttagatacacatcatctatttaagtacgtgtatacaccttccccctctgatcgagtaggacgatgagggtgtctcggtggcagaccacttcccccttcatatgcatcctcacttctaggtatatatcctgtagaattatgggtttcttcattccttctttctgggttttgattatcacaaccatagtttctccttgaacgccatgttccagtagtatgggatctttgagaacccattcgctatttcccagggcgatgtgtagtttcttcaggacgatttccatcgttttgattataatctgccatgtatgaatttctgttggtaaggagggatttttctgggtttatcactaaggctttcaatgaaagtaccaaactgttaacgcagatttcgcttaactaaaaataatgagcctttacgtaataattatatcacagaaataataataaacgattaaataactccagatattattacatggttttgtagttaaatctacttactccacgagtctatcttattaggatattttctttatacaaattacaatatataattgataatcttttttctctccaattctccaactctttttctgtgggatctgcccctatttataagaatataggttgacaattatttattttggataagtttaaaaagtaactgttcatgaaacactacaaaaaattgttacttttagtgacaactttttagtcacaacataatttttttgtgactaaatgtgacttttagtcacaacaaaatgttacttgtgactaaagcatagcatttagttacaagttgtctctaatttaattttgttcacaataagtattgtgactgaaaatacatttagtcacaacaaattataatttttgtgactaatacttttagccacggacctttttagtcacaacataggaatcatgacttataattagtcacaattttttaactttccgtcacaagttttgttgtgactaaaagtaaaaaattttgtagtaaaacgtggacacttcccacatttcatttaattatatgaaggataatacttggtcactgctcgactgctcttttttcttatccttttccatggtgaatgcgaatttagacaattgtatctcgcttaacccgagttatcttacttgttcatcttgatgtggggaaaatgctaagtgttacccgatggttcgcctcgttaagttcattagttaatatagcgagatgactgtctcgctatacataacttgaggttgacacgtgtgattgtatttattctacttcaaatacatgaatatcttcattgactatgactctgaggtaggtgcgtgtctcgtcaatacaaattttaatgaccttttatcattatctcgcttgagactatatagtcagcgagttataaatattttctattaaatatttgttaacgagttattttatcttgcatttaatgatataactttattatattaggtgattcatattccattgaagacacgtgtcactttctgaagtg

SEQ ID NO: 302287 - DNA, 910 bp, Cannabis indica
gcctttttcttagttagatacgataagatccgaaaaatccatcactatttgatggtaaagaaaaaaacaatgaaaaatatacaacaacgataattaagaactaccaaaaatccttttaacaaaaaaaaaaaaagactacaaagttctttttgtcgatggctcatcttccattttccttagcaaaaaagcaacttgaaatgttcttcatttcatatacatgtaccataaatataatactatgacctagcaagattcccacttcatttaattacttatcatattccaccaacaaaacaagtctaaactaaactaaggaacctagctagctttatgttgaacttgtgcatattaaaaaggccaagcatgggagaagtggtgattttattattggcttcaccagaagaagaaacgaaacatgcatatcattcttaaacatataaaattaaataattaaataagttgaaaagttgtgctccaattctttcaccgctacactattttttctttcattctttcaccattttaggctttgaatatatgtggtgctttatgccactgatcatgtacttttattctccatccaaataattaggtttaactattcatgcattcatctaaatcatattgaatttgcactctctctcaatgattaaattgtctttttttgggacagcatcctaaaatatccttttagaagaagatctttactctaaatctcactttggattcttatctcgtaccggtaaatgttaatagttatacagtagaatctttatctaaaaatacacttattacgattaagcaaattatattctaattgagaggttataactaaatagggttacattagaaaaaaaattcaaaatattaaaatatattaatgtaacaataataacaataaacaattatt

SEQ ID NO: 302288 - DNA, 7361 bp, Cannabis indica
ttttaaaaaaaaaaactgaaagaaaaaaagaaggaaaaaagagagagaaagaatggattgataggcgttaatcaactgacgttaatttgtagatacctagattgcatgtaaagagtgacattgtgtgtaaagtgtataaatagtaaaattataaataacaaaagtgtaaaaaataactaccgtgtggaagtatatatgtaataaaaaaattattttataattttggtgtaaaaatttcttttggtaatgtgagcaacataataatatgcttgtgatatcatttgattaggttatctctgtactttgaaaaacctttacttcggccatattcttcgtaatataattttgcttctttcattgtcccaaaaatcaatcccacttatggtgttttcaatctatctatatctttacttgtatgtaaaacattgacttcaccatattgttcttcattttcatccactacctaataaaaatcaagaagatataagctgtgaaataaaaactattatgaatagcataggatacagacaaagaagctaagagacataaaacctacaatttcattaacacataattcacgcataatttttggaaacagcagggtaaagtttccaataaacaacaaaaagctgctctatttaggaaaaaacaaaagctagcttactatttctttttcattcactgcattaaaaatggagaacagtagctagctcaatactactagagaatttattagtgatttcaattagtttgtctttcgtttttacttaggctttgcttctactctgttttgtttagttttctttattttggttccttatttcgactactatttgggtttttaattgaatgggtgtcctattttaaggtgccctctccatcatcaaagaaaaacaatactatcaaaaataatggtacaaaactaaaacaaaatagcactcctcagaagattaaagaggaaaagaaaattagaaagacctcgtgttgaatcagatggtgacgagcagcgagcaacgacgattttttattttttaagtacaattaattttattttattttgggttaggaatgaaaaaggaaaaaaaaaataaagagctgtaatattaatttgatatatacatgtgttttaatgtaggtgaatccaatgaactataaattgtgttaaaaattatgttcaaggaatccacccctatatcaaaacagggaatttataagaagaagaaaagaagaaaaggctatatttatcgtgaaaaaacgaaaaaagaaagaaaccatgattcaattctctacagctccgtttttttttcagtcaaccaacctgaaagatgagtcaatatatgaatatatgattaacacatgatgatcacgacccatctatcatattcatgattaggtaactatttttggtttatccccaattatcaaataatgaacaactcttttaattattataatttaaaagaaaagaaaaagaaaaagtaacatagtattaattaattaattagctagatgaggaggaggaggtggagtaaccagtggtttctagagcattttcctgtcagaattgtcatctaaactaataaccaacttggacatatcaaattccgtagacgaacaagatgggtcccgctcaaactccaacacatacctctgcaccacaaccctctgttgctgctgctgttcctgactattactacgcgatcctccaagagacctagacttactcagccgcaccaccgccggagccatcttaaccgtcacccctgaccttcttcctccagcactcggaccagaattgctcgtttcgggttcaggccccagtcccacttcaatttcgtttacggacccgattgactttgaccgcaccactcgttcaactttagtaatagtagtagtcgaagcagtaccacgactaccattaatattattagaataagagaaagtagttccattcccactctgtgcgcccgaagccgtaccactggatattttcctgtctctacggctaactccttgccctgccgccgccgtttctaggacctttaacacgtctatttcgctcacgtcgtaaacctcccggtggcaaagcaatggctctttgttctccacgcatttcactcgctgcctgaagttgttccatataggcggtgcgtgagcccttttcctgaccaccttcaggcactccaccacctcaaccatcgacggacgcttctccgccgttgaccgaacacacctcgccgctagaacagccagttgtcggatcagggctgggttagctgggggaccgattcttcggtcgcagattccagcgtagtcgccgcgctttattacgggaacagcccagtcaacgatcgaaggagggctgtaattaacgtcgatagcgttcctcccgctgatgatctcgagtaggagaattccaaagctgaagacgtcgctcttggccgttagatcacccggagcaagatagcccgggtcgaggtaacccaatgttcccgctggaggagtgcactgcactagaacgtcctccacgtgtcccctcaaggagagtccgaaatcgcccagcctggcgtccccgtcatggtcgatcagaacgttggaagattttatatcccggtggattacaggcgggttcgacgtgtgaagcgcgtgaaccgccttcgcgacctggtacccgaatctcacccgtcgggtccaacccggaggtctcgaagatcctgagtgtaacagatcgtataaagacccgttaggcatgtactcgaccacgatcagtttcctatccatggagtcagtacaaaacccgaggagattcaccagccttggatgctgaaccctcgagagtatttcgatctcgttctccgccggggttgtacaatttccggggcaggaggcggcgttgaacttgaagtggtgcagagtagtcggcgtggagttggagggctgtttcgtcttcttaacggcggcaataagtttcccatcgtcgaggacggctctatggacgcttccatggctgcctttgccgagaaagctctcagcggagaaaccgtcggtggcagcggcgagctcgtcgtaagaaaactctctgatcttcttaataagttgcttattgggtcttctacgtatcttattagctttgttttttagttcaggccagttgtatgtatcgcaggtggctacggcggactccgcattacaggaaagataacccatatgaaagaattaacgataaaactaaagaagatcgagaggaaaggccaaatggttttatgaagagtagttggttagtcgaactttactttttaatttttaaattttacttaagacgagtcaaaagagaataaaaagggtgtttgagattgctgtaaaggtggtagagaaggatgaggaagaagatgaagaaggagttgataatggttgtggttgtggtggtcatggtggggaaagccgagagcggcaaaggccataactacaaaataaaaaataaataaataaacaaaaattaaaaaaaaaggagttgtgttgtggcgtttaaagtcgtgcgtgttattgttttacagctctttgtgtcgttttaaaagaaaggaaagagggtgtgaatgtgaatttgatgtgaaaatgggagcttttcaactctcatcttccttcccctaatattttattattacattttattttaaccatggaaatgaaagcctttttgtgagagcatttcttgggcttgggcgtcttgtgggcccttctttcttttttctcaactaagtggttacttttagttcaatttttcttatctctaatttaataatatttaagtatctcattaagtattgaaattacaaatattgaagaatatttatgcacaattaatgaagaagaagaaagatgtacaatacattggacttggagttagacaatggcttcctttcttgagttaggacatttacacgcctacttttgtaccattttgtgtaggagtaatgaagagcttttgagtttgcaacatatggtaattaacaaggtaggccctcataatgattattttctacttttctcgtagcatggagcatgcttggggaaataaggaaatcaaattacactccaatcttctatctaaaattttgtctcaactagatgtctaacttattaaaagttgacacttataatacgaatataatgcattattttttacttttttttaaaagaaaagccattataaattaataccacaaattagattttatggtcattacataaaatgttatttggtatatcgacaagattgaccataccagttacacttctaacaaaagcccacttattcacgttatgggccgtaaaattacactgtctaaaaataaaagaaaaattacaagattgagagatgcttacaacttttttttgtctcttatttataaaaatatatataccatttctctccactcaaattaggtaactttttttttctaatcaacttttttcctctcttcaaaaaagaaaatttataagtagtttttttttcttataaaaaattacaaaagtttatataataaattaaaagtttgaaaaaaattataaatagtctttatctcattcttttacccgtgcaaattttaacttttctttacgcaactcaacttgaagatggcctacacttactcccgagcaaagtccacaaccttaaaagccataacaaccaccaccaacttgaagaaggaggtggacgaagccaaggaggccaagaaaaagagtttgaagttgggcgaggttaataaacaacttttggctgccaacaagcgagttgagaaactgtagcaggagattaaggatataccgtccactgtttaacttgaagcggacattgaggcactgaccaaggatcttaatgctttgaaagttgagagggaaggtctccaggctcttctctctaacttaaccaaggagaaaagggatttggaagagaatctcaacttcgggcaggaagagcgggaggcacttcagaaggagatggaaaacttggagatgactgccctgaatgttttctatgagttttgaaaggcaaaccaagaagaaaactttaattacctcaatgaaaacaaggaggcatatattagtttctgtgagacccaaaaagagaaagaagaatatgaggcagtcaaccccgaagctccgactagccaaagtaccgacaccccgaccactgaggatatcatcgacccgtacaaagagcgaaggactccagtcgtatgaattttttctctcctctttttttttttaatttcagtttggcccatgagccttttttcagtacaatgtggctgaccaagcgacctttaaacttggtaatatttcattttgttttaacacaactagctggtctggcagccgttaattctagatttattgttctttgttatcttttgaaatgaatattttcccttaagtttaagtaattgcacatgaaattgttgtgtttttttgagcttgttatttacctataatttgtacgagtatagttgcccccaatcaatcgagcagacttatgactcctggtcacttgtattgcacaagttcaatttttgtgtgttcggcaattggattcaagcagaccctttgtacacatttttaacgttaaattcataaattgctatagtaagaaaagtaattgacacaattagaatgataattaatatctttattcatttattggtctgaatgattttgttaccgtagtaacttacatttattgaattatgaaagctacgacatgatatgactaatctttagctaattaaaacataaagcaattttttttcttttttagattgcattttatagatggtcatccaatctaagcaccagcgttttatctaaaccttagagcgaggtccacccaaaaggccatctacttaaaagtagatgttcgagtattgtgtaccttaagggggggcatcagaccttgtacacttacttctagtatttccttaaatgttctccattccaataccttggtactagaacaagtttcatgtttttattataccgagcaagtttgtatgctccagaatccgtgacttctattacttgatatggtcctcccagttaggtcctagtacgccagacatgctatgttttgcgtttaagaatactcttctaaggaccatatctcccacaaagaatttccttgccctcactcacttgttgaagtactgagccaccttttgttgatgagctactagctttcggtctgttgaggcacttttttacttcaatttcatcaagtgattctaccaggagggtgtgattagcttcttgattataggtcagtctcctgtgggacggaggtgctaactctacaggcaatatggcttcataaccataagccatagccaattgtgtttatccagttgctgctctttttgttgttcggtacgaccacaatacctcaggtagctcctccagccaattccctttagcttcttcaagccatattttctttgtgtctttgagtgtcttgttgactactttgacctggccatttgtttgagggtgtgccactacggagaaactttttatgattccatgtgtcgtatagaaatttatgaacatctggctatcaaactgtttgccattatttgagacaattttgtgcagaagtccaaacaaacatataatgttttttactgttaaatccagcactttcttagatgttatcattgccaagggctcagcctctatccacttcgtgaagtaatccactgcgactactgcatattgtactctacccttacctttgggaaattgtccaatcaagtctattcttgtactggctctgggttatcctttgtattgttctcttatttgcttgtacattccaccacgaagtctgctaaggccatttcaacctagtcactaccctcaatggttgccttatatttctaatgtgactttagattatgatgctcgtgtgaataatgaagacattgtctctgttgtcccaacagaaaatccttcctcggactctactaccgcttcaccacacaaaaatacctcatcataccagaccccttcaccatctaaacacacatccctctcccataaatcaatcccctcctactccaccattccactacatgtccatattccaatctcacctctcactcagctcacacaatcgcctcaaactattatctccaccccaccccatacaactccaccaaatccaccacctatgcaacgccaaccttctcaccctatgattacacgggcaaaagctggcatttgcaaacctcacaccttcaatgtcttctcaccatcacccatggcctttatgaccgagtttgaacccaataatgtgttgggttttatgc

SEQ ID NO: 302289 - DNA, 4761 bp, Cannabis indica
taaataaaaataaaaaataataagtccaactccaccgcctcggattccaacaacttcccccaattctttcaccaaactccgatttagggtttccaaatctgcccccagtttttccgatcgtcttcaaaattcataccaagtttcgatttttcaactcattggattcgattctaaaccccttttgtcactcagatgacttcaatctcttcaggtcacttctctctcattttttctctctgtactgatttttatttactccgatgagtatggtaattcttgtttggtagctgagaaagtaaggaaaaattgtgtctttgagctttttttaaggataatgtaagtattggggttggttgagcttcaggttcagcttgagctgtgttttatttatgtgtatatatatatttgtagagggagtaagatgaatctggggaatttttgttagttattttcgttgatgaactagtgttggtagggtttcaggagttatcttaacagtaggtactgtagtttagtttgttgtttctttgatttttgataacataaaaaagctttatggtaattaaagactccttatgaatggttggctcttaagattttggagtaaaagcatgtatttttattattaaattctagcaaaataagaaaggtagggttgaactttacttgtgcttaacaattaacatggttgggctcactgaaactggtaaaattatccagtaatcgcatgactttttcttactttttttggctagtaaatgcataatattattgtgaagcttttgtttgtatctttctcaaaagtgacaatttaatttgtctgaacagaatagtactgaatgagatgtttattttatgaagctttaagaggttatctgcttttttagtaattaattcgagttatatttttgttatagttaccattggcctaatgcttgaaggggccacaggcaccaccatatggctatgaactatttttgggcgtatctggaattactgggggactcacttatgtaaaatatatcaatggtacccgaaggatagcggagttatggactgttttcgagctattatttattttaaaggtaagttactaagtttaacttctcaccatctagttgaacatcagtggtacttcatttttgtataatatagttattctaaggttttggctctaagctttaagcttcatgtattgaatgtatatgatttatccatcttctaacaggaatttctatacatgtttacttacattattcttacccttttgtacttttgctgatgtagtaaattttttttacttcctttaacatgagaatttgagcgaaagtttacttctttatggttgcaggttcattgccgcattggttattatcattatttctaatatggatatctggttttcaggatgcagtggcattgcagccactgcttaaggaaactaatttttcttctgtatcagagctaacaaaacaacctattagtggattcttcgagccaattgaaatatcaccagctgttcttccacataatccacgtccagatgaacctttacctccaatgtacccgacctttccaacaagatataatcctgtcttgactggaaaatgtcctgtaaaattttctgcaatatcgagtatcttggacaaaacagcatctgattgttctcaacctttggcagcacttgtagcaaatgtaatatgttgtccccaacttaatagtttagttcatgtcttcaagggtttctctagcttcagctcagataagttggtgttacaaaactcgagtgctaattactgtttcgaagatattattaatatcttggcgagcagaggagcaaacagttcaattcccacgctatgctcggtaaaaccatcaaacctcacaggtgggtcttgcccggtgaatgatgttcttacatttgaaaaaactgttaatacaagcaaattactggaggcttgcagtagtgtggatcctcttaaggagtgttgcagaccgatttgtcagccagcaattatggaagctgcactccagatttcaggaaaaacagttgacgatcaatgagaacaagaatgtagcggggggtttcgctcattttgattatcttagtgattgtaaaggagtggtttatgcatacatttcaaggaaactatcaatggatacagcaaatgctgcatttcgaatattatcatcctgcaaagttaacaaaggtatagtgttggagtatcttgaagatgtgtattgtgtacgaacaaagcattgcacttgttttcgggtttatctaaaagattagattaatatttgcaggataatgctagaaatttcatcaaataatcacattctagacttttggtcatgtcatgttggcacggtgcccgttactacaaatactctattttttttatatcgttcttttattttgttcataaaagtagcattgaaaggcatatgttttgacttagttatcgatatatactcgtgtttcttctcattccatagtcattacttgtgcagtttgccctttggattttaagcagccttcagaagttatcaaagcatgtcgcaatgtagctgccccgagtccttcctgctgcagctcattaaatgcttacattgcaggaatacaaaagcaaatgctgattacaaatagacaagccatgatctgtgcaacagtatttggatccatgttgcggaaaggaggggtgatgactgatatttttgagctttgtgatgttgacttgaaagattttagcatacaaggttgctttctatgcatgatattattgttattcatattttgcattatatttttccttcctaagctgatgatttaattctttttccttttatggccactcgagcagcatacggacaagaaggtatgttcggcgtttatttctcttttaccattattgtttggagctttagttagttgcgggaatgcttgtcgctatggctaagtcttttaagtttaaatttttatccgactacaggttgtctccttcgaagcctgcctacagatgtgatattcgacaatataaccggcttcagctttacatgtgatttgagtgacaatattgcagcaccatggccttcatcatcttcaatgacatcgatttccctttgtgcacccggtaacttctcaaaacaatcaatctctttcttattattctctatttttctttcgtatctaaatttaattggtttacgcagagatgtcgctgcctgcattaccaacctcggagacttttaaaaacaccggtgcatttcattaccccccatcttcaaaatattctagttccataacttccatgtcataaaaaattgatctttcttttcttctgttgctgcaggctgtggtggtatcgcggtggaatttgttgtacccattttttcatttttggttttcggtgcattttcgctctgaaaaatactaaagctgatgagggttggttgggaattaggatggttttattaggggttgggggggggggggggtccttttttgtggaattgaccttttggtagtggattttgcttagtaaattttgagttagtctttttctccatgtatagcacaagtttctttctttctttcttcttcttttgttaatttcagatcagagttccacattatcaccaagtgtccaaaattccaaattaaaacacaaaaagtctaagattgactaaatatcaaataggttgggttttgggtacctcaatttttgtgttttccaatgttttaagtaagatttttctttgacaaaatcaaagagggcaactactaattgtaattgagtaatctttgtaatgtaaaataataaatgaagctaaattttgtcttctttggtcaatcaaaaaaaaaggggaaaaatttatgccttacacctcaaaaagaaatgggattatttatgccaagttaacttaatcttgaaactaaattattgtcactatttttctgtcaaaaaaatgaaatattaatgttttattatggggaatatgataaaagcttttgtttaattaattacgagtacaaaaaaatatttgatgaagagattatgaaagacattaattttcacttccattaaatgaatattttgaatgactaattcaccccaatataagtatgtacaatgtgcaatgtggatgattcattgtgggattttatgtacgtgacaagaagtaacatgtctaaggctgtttcaaatttgacaaaacattgatgagaaattggtgaagcagaacaagttatctaagcaaatataatggatgatgttaatgttctgaatgaatctattgatgccttgaatggcaagttatgtgttatggagagtaaacaggattttgctaatgctactttatactatttgtgtagctttattgatgggaagagagttaaaatgcccgaaacacttaaaactgtcgcccccttatcgcgtggtttgctcacattttcgggggcttcgagccttgtgggattgaaagacattgcagattctttatctggtgtactgaagatggtgttgagaacaagttggagaagtcattgagaaactcaataaggttggtagcaactagaattgggtgttgagtacttatcatttctagaattatgtagggaataaggattgaggaaatatagtgtgtatagtaagattaatctaagggggagttgttttattgttctaatacgtagttttatgctttttattaaggaataattacacaaggcaccattttttataaaatatttacattttt

SEQ ID NO: 302290 - DNA, 1469 bp, Cannabis indica
taataagtttatttttagatttataagtgtttttaatatgtattatgtattcataaattaattgggcatactcttaagataaacaaataacttgtttcgttagtaaatattattagttcttttaaaatattttgtaaaacattatgattgttctcaataaataaaattttcattgcttaaaagaataatacatcatttttatttgtaatatttttttaaaaaaaattaataacaacaaatttatttcttttataatttttgttgttctcttggagctgccaacatataattgatttgtcatcaatagaagagctaaaaataatgtcattgaaacagataatcttgtggcaattcaatcaatatttagttctgcaaaattattatttaccttttgtttagtgatataagattattgtaaggggttgtttggatgtttgagaagtgttaatttaatatttgttaaacagtctactaactgagatacgcatattatataatttaacaatcttaattgtttgttaatcatatatttacgggggagtatgctcttttaaaccttttatctattcttttgaacgattgctttaagtattaagtgataaagtttacttttcattcaaaaaatatatataatgtccattgataagtaatttaatttggtatggacaccaaattgataacaaactcattatttttcttaaatgctgaaatcaaataatgtaattgatatatcacctcttttttaattgctagaaagttatgggctaccggaatcattttaggctcataattgagaaggaaaaacatatttaacaattaatgtaccatagatgaaatgaaagattattccaaatatcattcataaaaattactctcaagttatatgctttcaaaattaaatcaacacatccaaaactagcaaattatatttcagtttcatcaaacttgtgtttacttcttcacgagtgttttttccagttgttttcaatatttatcccaatcatcaaattgaggtctccattcaatttttagagaagaagaagatctgtgattacatgattgagtaatcattacttttaaaattgcatatccgagtatccattttcttaataaaagtagcacattatgtaaaagacaagtaaaagtagaatgccatttttccttttctttttcaaatattggtagaacttaaaagtaggtttctagtttatgctccaagagttaggtcccttgtgaaccattaggtgcaaaaaaaaaagaaaaaattagtatatttttttctcataatttgagattgatgttttatttattacactttggtatactctaatgtaaactccttcaaatctccactgaatatacatataaataaggaaaaattatcattatattctaaggtctttttgatttatttttatttgtttcagtttaaaagaaaatatgggtaaataccattttggtaccctctg

SEQ ID NO: 302291 - DNA, 5426 bp, Cannabis indica
gtaattatcaatattatgcctaaaattattcctaaatatcaatatttaataaaaaaaattaaaatatatattaagaattaggcggtttaatttggttttgaaccatagatgagaattttaaaatcacgaacaaactagagaattataaacagtccggattgactaaactattgacatcaaattcatttggttcgatttcaaataatttggtcagaataaatttgaataaatttgagtttttttttttggtaatttagaaagatttattgaaaccaaccgaaaacaagtcaaagggtagccacaaaaggggctacctcccttaaaacactacctcgtacaaacatgcaaaattatagcataataagctaacccatctgcaacaaaattctccgcttgagggataaaagacacaacacatctggaaaacaaaggcatcagagcaagacattcaaagaacacagggtaagtaccccaagcaaaagggagattgcccaaggacaaaaccttgacaacgatcgaggaatcaaattcaatcaggaccgagttgacattgttctcctttgctagctgcagagcattaaggatggccattaactctgcttccagagtattgtctacattggtgaaatgcatcatcaccacaacaacatcttcttcaacttcgccttgaaccagtcccaaaccaacaaagttgtccttacatgaggcatcaactcgcaccctgagctcccaaccggggtcaggtggcaaggaagcacaaggaactttctccactgtcaagttcctgtcaagcagagccgaactaaattcattggctcttctcgcaatgattctgatcgagctatgtatattcggagtcacccccaggaacaatagatcattcctgcattttcatatctgttcaataatgcagatcacatacaatagaagtgattcattgccaaagttacacaaccacacaaaaagatcctcaaaggacaagcttgataggctactacttgtaagtccccaagggttagaaaaccacaaacatctcgcgaaagggcaatctcgaaacaaatgcaaattagtctcttcttcagccccacacaacccacataatctctcctccctctaaaggaatcgtagtcgacttttgagagggagacagcctgccaaaattctccagaccagagttgagtgtcgagggtgcatcttagccttccagagtttcttccacaccaatttctcatcatgaaaccgagattgttgggccatccaataggcacttttaaccgagaaacttccattccggcttcccctccaaagcagactcctttccaaaggacgaatacggagaatagcaacagctatttccgttgagaaacagcaattaatcaatctttcgttccacctttaagtgcctggaatgaaaagatctgaaaccgaagtaaaagcatgagttacattgtaagaaaaactattacgaacctccaaagggctgaaacccgtcacccaaggcttggtccaaatatcaatctttccattgctaatgagataccccgcaccagagatacacagctcaagggtggccagagtaccacgccacaccctagagtcatcacgtttttcttgaacacagtagaaatccaaagtgaagttatatgaataaccctactaatatgagtggcctaagtgaagttattatcattcactataaacttcttgcattctatatttttaatgtgagtctatctctatcctctaattaccgtatatatgttgtcgttggcgaaatttgaagtgaacaaaagtggtaataacttcaaattcaaacaaaacatataacaccaattgacattcaaattcgtattttattcttacacacaccaagtgtgtccagaaaaggctcaaacttgtgagaacaaaccacatgtatgattatttgagtaccaggggcagtaagtttttatcttaaaaacgaaaattgcatttcaaatcaaattttaaagaataactcattactaataaactacttaaaagggtacaaaacaattttaaccaatattatatataaaaaaaaaaataccacattgtacgtacatatatatccatatgcgaaatattacttatggaccacttaagttttccgccgcagcattgtattcactgagttgctcaatgcgtaaacgaagctcctcatacacctgtatggagttagccatgaacttctccatagccatgaagatctgcttcaaacccaactgtaaatcattacacttgataatgtcactatggttaagaacaaagcttgttaccagattcttttctcgaccctgaatcaacttaaccatcttttgctcttccctctcaaaaatcttaacttttctttcaatttccttatccgaaatgaccattttaagcaactcaacattgtgctctttcaattgggtatcaatacaagcaagacagccttgaagggctccaatcacttccttctccgagatcctatccaaggcttgggaccaatggttacagatcacgaaaatgttgggcgcgccaagccggccaggggagaagggtattaggccatcggatgtttcttcaggctcatatagaaggcatctcataagccaaccatttatggtactaatcaagtccttttgggagaaaatccaattggagaagctcaagttccacgtttgaagcactatcttgagttgtatggacgcttcaagatcagcattgttgagtctttcattagatgtgatagcattgccatctaagcttttcacctctgaaattgcttggtattgccgcttgtgacattctatcatagctttccacattggtagtaatctaaaaaatattaaaataaaaaatcaaatttgattctctaagtatataaatacatgtttgtgtgattatatgctgccaaactgcatttgatgtgtgacaaacagaggattcttttataaataagacagattcttatttctcattttattatgtgcgctcaactataaagaaaacatagtatcattgtatctttgaccagaaactgtcaaagaaaaagtcaacaagaaatgaccatatgagaaaataatattttttaataattaatatttaaaatagaaaatttttagtaaatgtaattatactgatgccatcagaattagagagtataaaatacaacccttcaattatttctaatttgtatataattacagtgtaattatatgataaaaaacatattaatttatataattacttccaattatacaataactttctaaatacgtcctaaatttaaatttgagcttagttatgttattatgtacataaaattaaaattcaaatttatgcaaagatcaagatttgtatatccttccaaaaaaaacatacagagaatgaggtaattaagataatttagattaatgattggattaaggactaattaagatatatgtgtgtgggtgggtgtacctgttgttcaattccttgatttgaggccacaattcttcctctctcaacttatttattgcaatggatatcctatcaactatttgaaacgcaatcttcaatttagtggatagatctcttagtaaggctttagtggaattagctttcaccgatttaccaccttctctatccaaaattttcagctgctggtactttttctgatatattgttcgtagtttttcctcagcctacacaacattttgtcatccacataattaaaaactaaattaaataaataataactttaaaaaagaaaaatcatttaccttaacttcaaaataaagtttcttctcccatagtaagagcttctttagagtcgaagataaatttggtgaactgattatccccatatcttcctcaaacaccaatcgaaatgaatctgattgaccaaattgaccagctttaatatataatatatatagtcgataaataatattttacactattaattttacaaaagttaatttattttctgttttgtaaaataacaaaatagattatatattttttaaaatataaaaaataggactttaaatttaattttggacaatctttttaatttaactaatttaaagataattggtagtacatacaaaaaaaaaaaagtaactaattagtcataatccctctaaatttgactattattaagttttgttttgataaaaaattatttcaagtttaatagagtacattatacaattaaacaaaatagaaggtggaattattaactttaataagaaaatggcattttaagaattattcaaagaaaaaaagttgtattaaataattgagagaatttaccttgattaagaggcacccttaagcgatggcagagtagcttggaaacctcactgccagactccgaagcttgaacaaactgaagcttaatctcattcatggcttctgggacaccaagtactactactgtactgcttggagttttcgaagtaaccgagccgtttgctttctcagagctatccttcttcgtttctaaaactcgaacctcatacgtcgtcgtttcaccattctctttctctttctccggatgcgaagtgtacaaccgctcgtacttgtcgaaattttcgaacaagttcaagaaatcccaagccgagccgagcgaagccggtggaggagatggaggcggcttcgaattcaagtattaaagttgtgagagattaagccttgggattcctcttcgttgaggcaattatgcccgagtttattatgattatcactatcctcgtcctcagaagaatcggaagggatcgaaggtgcgagtctgctgagtttgatttatgcagcggggaagaagaagcaacggccgccggagataaagaagaagacttttttaaagtttcgttgttgactggtacttttttactgaagaaacgatcaaaagcgggacccaatgccttgagggagtcgaggtaagcggcgtgagcttcagcgaagtcttggctatggcggagagcttcgtctaggtatttacatcggtcccggcacaaggccaccgccggaagatcgttgagcttcgagttggcgcagcccataataatggagagacttagactgttactgacccaacccaattcaaaacgctgtcgttttcactcgtctttctcacttgattttgaatatcaatatcagtgaagagtgagtgagtgactgagtttttcagttttctttttaatatatatatatatatataaatatatataaatatttaaatgcttctgttggggaatagtaaaggaccacctccttttctttttgaattaattcatttttttgggaaaattatcattggtgggtcaaaaactctggcggcacatccttctaatctaatagtgactagtgtgtaatactgtatacattattatgcacatttaggtcttggttaaactttaatttatactaaaatatta

SEQ ID NO: 302292 - DNA, 3362 bp, Cannabis indica
ggtcagtcatcaatccaggaagcagccggagtggcgtacccgtgtataagagccattagtccgtgggtgtaagggtccaatggaggcttgaagcagggacgttacactgtatctgatctgtgccactctgaagccaaaaaaactagcttgtgtagatggttgtctgaaagtgcctggtccgtatactattagagctattaacgcacttgctgaaggaataatagttggagcaaataattgtggggtttgagttgttgtatcactagtagatggtgctagaaatactccataggcttgagcataagcttcttccaggttaatgaatccttgggctctatcctttttcgttgtagttctccccacaagaaagatccagtagttattactgatgttaaaggcaccatattcatatcatcagtaatcttggtttttgtagtagcatccatcatacagtgaatttatttcttaaggctttctcctggttgtttcttgatattcgtgaaggagctaacttctaggtcaaaatcatttgctagtatgaactgtttttttgaacattatctgtatatccttccagttatgaatggatctgggagataatcttttccactaatctctcgcagacttaggcagagttaaggagaaatagaggcattttacatcgtcactcgccttagctacttgcatcatttaggtgtatttagatagatggaccttggagtctgtcataccttcatacatatccatttgtggcattctgaagtattctggtagctgtacctcgattattcttttcacacatggttcggtatcatcctcttttgaattggatacagttccattttgcttctagcagttgcgttttgtgaggtttgtcaaatgttcatttttttgttccagacgcttgatggttgcatcttgagactcacacccataaatttgatcattgatatggtttctcaaatcatctttgcgaggtcttgctttcttgtttctagctttttctcttttagcattcagtcatgcccaaagatcattcgttgaaagacttccacttctgtcacctaataatggatgaatctcatctacatcatcacttcgactaacaaaattcttaggatgtttttcgtcttttccagtggcaggttcctgtgtttgaacattggacatgtctttctgtgtagctttgcctttagcatttgtccagttaccttgccctgaagcattggtttctttctttttcttaggaggttggttggaagactttgttttctttcgttggttagtgggagcagttttgtttgaggtttctcctacttttcccgactttgttttctttcgttggttagtgggagcagttttgtttgaggtttctcctactttttccttccttttatccttacaaggatcataagtttcagaattttttggatcaatcctctctgcgtttgtggaatagtatcatcaagattttatcactaggagccatatttattgttgcaagtaacgcctccagtcttgcaaattctcatatattagaagagagaaatctttcttgggccgctaactttagttcagttaatcttaacattctgaccatgatgatcacaagatctggcttatcgtgctccttttccttatcaacattctcatttttaggatccgtaggattgacatcttcagtcttgtcttcagcttctccttcatcgatgggatcatcatgaagatcttgcttatcatattgatctttttacttttgatgattgattgccttgtgggatctttattgagccttattttggcgttaagatcaacgttgtccatcagagtgttgtgatagtgaatactaggtttagttcaggtgagtaccataattacattatgtaatcgttgatggtatcattgctttcttcaactctcaatgaaagtaccaaaatatttattgagattttcagaaactaataatttaaatataagaaccaaagaatagtaattcagaaaaaaaaaataagaacagcaaaggtttttacgtgattggcgcattaactaaccttagtctataagtcaatattattaagagagactagaaaagccttagggattacagaaaatatgaacactctatttttgcttgagtcagtgagccatgaatttccaaccctttgcatgcagggtttgtatggtatttatagagtataaaggttatactagttaccttatttccctttaatgaggagtttataaatataatattgacttcgggttggtaaagcccaacctatggggagctgatgtggagaccacatcatgatgttagttgtcaaaactgtatactatgttcgtaaggaattaatgacacattaattgtttgattttcaattacttgtttccttatttgagatatgatcttccatctaagattataggaaggtaatccctcatcttgtgcgatttggtaaaaaacaagaaactacgccagagcttctggaccacgatgaacgcttcttccagctatgcgattgtatgccttcctaatgctaatcatgctggatggattctcgtctgaacgagttgtttgccatttactcagaaggactaatggtttatagattcggcccaatgatgtcaattgggctcgttattaggtctgaagtattttagacgttgtatttattatttgggttccacttgtctcttgccaaaaacatggataacaatcaccttcatatcaatccatattgctgaatcagattcattataaaatatactaaaagatatttctttggatatagaattcaagaaccaataaatgacaatcttgttatttctaatccaaacattataaagaacataatatgtggaagagagtttaagatttgaaccatcaagaaatcaaaatttaatgatagaaatggttaattgcatcgccctactccataagacataattgtcatgtctagttaaaagttgtgagaacaaaatattacctggattatcttcatgatgcagatagtaagggttgatagaatcttcaagaggagttttagagcacgctacctatagacctggaacgattgaattatgtggctctaccgcaatttgaacagattcaccattattggtctgagtaccttgagaggtttaatcatcaataaatattgtttttcttggaagaaaaagaatagaaacactgcgtttgagagacgaagagaaagatataagggaccatttagttcattaaatgataaatctaattctgaattttctaaaatgtaacaaaaattgtaccctgaaatcaattttgtcatttttttttaacataaccaatttgaagccagtttctaacacaagtaaaaaaatat

SEQ ID NO: 302293 - DNA, 2680 bp, Cannabis indica
gtgacttggccttcttgctgacaagctgtactcgacatggcattaatcttacctatttggattgtggacatgccacataatgtgggaaaaaataaggataacactcataaaataagaataattgtgactcttgcctaccgagacattgttggattcatattttgatcaaatgaaaggttgataaaatagtttccaattcagatgagctgacaactctatttaactggtgatatcttttactctcgcctacctggacattacatatcacttagttcaaaaccttggataataattgacatatgtttgttttatatttttcatgtctccattatttgttaaatatttatttttttgcaaaaaatgtgtatgaatttatatagaataaatttatagtgtagtatcaaattccatctccattgtacatcaaacaagagtatggtttttaatgggacctcaaggtgctagacatccccctaatagatggtcatccattagacaattaaacatcttgtagattcatattctggtagttcacccctatggtgaatacttagaattgggtttacaaatatgaaacaatggtagaagctcataaaatgaaaataactttgactctcacttacgaggacattgttggattcttattttaatcaaacaaaaggttgcaaaaatggtttaaattttagaagagtttactactctatttggttggtgatatctttaactctcatctatcgggacaatgtatatcatttaactaaaaatatttaaaactctgatcttttcctctttagatttttttttcattaagaatttgctaaaattatacatgattggattagaaggtttatgaacaaatactattgctctactttcttatgaaaagaataagttctagacaactttgtccaagctgatctattacttgataaattgtcatcagattattattcacatgttcttaattttttgatgaatgaagatgataaaaatagatggcaattctatccttagcttggtataagaaaatgaatggcacatatgaacatagtctagataatctatctagaaatgataacaatcctctatttttagtaaataaaatttgaatcttctatttaaaatgctactgaaaatccattaagcgtatgctagtaagctaaatttctaaaatgaaatacaagtattatagaagtactttgaaaaacaaatgaatgtatgttgtagaaaagacaatggcattagaaactagatttatttattatctagcaggaaaaatagcagatattaagaccaactcttttgttttagaaacacatatgtatttcttgaccaatgcttttagcgacgatgagatatataagggcaagttaaacattgacttgtaataacattttagtgggggtccaaactagaatagtaactcatttacatttactttaacactaagtctaactttcacaatttttaatatccatttctatgaaggcatccaaacttagttgaatgtaaggaaaacaagttttatattctgagactaagaatccatttacactattcaacgaactgtttgctgtaactagacctaagaatcatatacatcaaaagaccaataaagattaagcattatctatggcactttatctttcttaaagtgtttttgacaagatcctttgtggcaaagagaatacgtgcgaaataacgacttagaagtatatttatatgtctttggacatatagatgtgtaatccaagggtggttacaagtatttcattaaattcttagacaattactctagatatttaccttatgcaagaaatttgtaatttttgagaaatttcatgagtttctagaaatggctaaaactagttaggtaaatctctaaagatcttggggtggagaaatatttagatatgtcgttcaaagatcttttagtttttctttgaattgtattccaacataccttctcacaatataagaatcatatattgatgaaaattattaggtttatggttagctattcaactatccctaattccttaagaaaagttacagttgctaactaaggtttgcatatttgttggcaattctaaagagattaggtgtgggctatccatagcatcaagacaagaaagtgtttattattacaaatactattctttctagaagatgactatagaactataactcaaaaccatgtaccaaagtagtagagtctatttgatttaaatccaaaagtgttcaatcatcttctacaactgtaaagaatggtctcattgcctctgtggtattgacacaagtcgtgatagcttaagaggataatactgttggaattattttaccaggatcggaaaattaaacacataaaagttggagaaatcttccattgggtgcagcggaatatatgtctcctcccactcagatctctaacccttgattcctttctgtcgcagagtataatcaagatctgagcctgaatgtccttctttgttgattctgaattctacacagccttcctcactatgattgaggtattacttgatttgtgtgggcactactctatcacttagagaatttcgaaaacaaagaaggtagagagagagaaggtggcagcttgaagaaagtttttgtgtgatagaaaattctgtcaaaaaaaatgttacaaaaactgaagcattta

SEQ ID NO: 302294 - DNA, 1211 bp, Cannabis indica
aacaccacgagggaaatcccgaaccacacttttcactcttctcgtggtccatttcagaacaattttcaacggatgattatcaacgtccaaccgtctcttcttaaccggggtggttctttcattaatctcagaagttggtggaacaccaatatcacattgacccgcttttctcttagttggtccttgtgaagcaaaaacagccagttcttggggataactttcttgagcttgaaaaaattttgttagagacctcttttcatcaagatgctcagattagtcttggcccagaatagacatttgcgaaccaccttcaccatctaaatttatcacactatttttatcacctataatatgaattggttacacatgtacattattttgatttgtaattggaatatcggaattattatgtttggttttagatagtaagtaatgaaataaaatgtattgtcaaaattatttttactttaatttgataaattagttatagaagactattaaagtcatttcattttatatacttatttttaattaaaatgtaaaagcaacaatataattctcattacatccatttaggtatgtaatagcaattacaccatagaaatgcgtgcgtagctattcttctctcttccatggcaaaaaagaagagaattgttcgaaagccagtatcttaattgagtgatcatgattctgaagctggttcgaaaaagggaaaggatttatctagagatataggattggtctggacttgattgcaaaagtagtgattgagaagggaacgattcaagttagggatttgaatcttagtcttgattctaaaattcatccacaggttaaggtgaattgggcaaatgaagtagaagacaggaacgactttgatatagatcaggtttagtttcatgaatctgctgaagtcattgggagtcttttgcaaaggagaacacaatatatcatgatccactgctgacttatatagaaccggtcatttagaatggtatgagaataactcaagtagattctaagaaattcaaagaacaagctacgaattagagtaaggcagtcatttgtatggttcttggggccgatcctccaatggttgtgtttgagggattcatcaaaagaacttaggctcatttaggaatagcttgttggaattttatgctctaaataaaacccaatacaatctaatctgatttgttatcaataaaaga

SEQ ID NO: 302295 - DNA, 3437 bp, Cannabis indica
atcaaccgcccctacagagtcgctttggaaaatcactagcttaagcccaagctaaaccgtagctttcgcaccataacaaagagaggcaatttctccagcaagaggatcactataaagaagtttagtagtgaacacacttgttaaaatgccctggtcattacgaaatactgcagcacctgttgccaatagctacatctgtgttgcacattctccaattgttaggaggggggagtcattcaaaatggaggggatattgcgtatactgtttttcatccagttcagctaacctggaattgatgttatgcacaacaatattaatcggagttagagtgtttttatgaattgtagaattcctcaggttctatattctttccatcattatagctgctccttcaagaagagtgtcaaaagtgagattcagaggtcttttatccttttgcttgaacctgtttatccattgactccaatctgtgacctggttctcggttgtcttgatgtgccagtttcttccaaaccatacggctctggctacatgacaatcccagaagaggtggagagagtcttctactgccattgtacagagtgggcaatagggatcctgtaagctgcagattttgaggagtttgcttcttgtgagaaggcagtcagataaaaatctccaccacatcattttttgatctgctatgtattttggcgccccaaaccagtcgccatttctcattgtccttagaatttggctcaagattcttggtaattctataggcggatttgatactgaattgtccatttgcttccggtagccagagccacgagtttttcacaggagagtttggcaaggttatatttagtattcgtttggcattgtcctgttgaaaccaatggcgaaccagatcttccttccacctattgtccccaataaagttacttaccatgctaatcccctatgttgcatctctcagaggttttggttgaagttctcctcccgggacccaagggtggaaccaaataaacgtaccattcccgtttccaatctttttgcaaattcctttgtggatgaattgtctagcattgagaatggctttccacataagtgagtccgagggttgagcttcgatatcaaggaaggcattgtttctcatatatttggcattcataatctgagcccagagactattgtcctccacgaggagtttccaagcccatttcattaaacgccatgtttgtgtcttttgtggttcggaaacccaatcctccatgattctttggcttgcaaagtctttcccatgaaattgtgtgcataactctcttctcatccgtatcaccccaccagaattcccttaaagtttgtctattttattagcagtagaggcagggatagaatcagattaagctaagtagtttgccaagggggagccaacagatttgattaagcatgctctacccgcgcttgatagaagctttgtcttccaacctttgacttgacccaagactttatcaatgagttgggtgtaatcttccgttctttttgcagctttgaataagggtagacccaggtagattgcattggctgacatttgtttcataccaaaatactgagtgatcgcttgaacttttccacgacaaactcctttcaagaaatgaattgatgactcctgaaagtttatagattgccctaaccataggcaataggtagatagacagtccttaaacgcttttgcctccttaagcgttgcttgcccgaataagatgatgtcatccgcaaacattaagtggttcacagcggtgccgtttctccccatcttgaaccctttaatctcaccagatttttccttatggaaaatgagtcttgacagagtgtccgctgctataataaacaacgttggggacagaggatcgccttgccttagtccctactctggtttgactctcccttctattgagccatttaggagcagtttgatttccttagttgagatgcaatcccttatcctgttcgtgaaaggttgggagaagcctacttgatctaggacaacaatgataaaatcccaatctagtttgtcataggccttttccatgtcaatcttgatcatcatcaatcccctctttcctcttctcttcttcatagaatgaaccacttccttcacgatcattgtattctccgctatgcatcttcctttaacaaacacgacttgagttggcgaaataagctttgggaggatggcccgaagccttgtggcgatgatcttagagattattttataggtgacattacataatgcaataggccgataatctcttctgtatactggattgtctttattaggaatgaggacaattgaagcgtcatttatgaatggagggagttcaatttgggtgaagaagtgagttaccatttcatgaagatcacagttgattgtgtcccaatgatgagaataaaaggttgctgggagcccatctggtccaggagctttgtctttccccatttcagatattgccgcagtcacctcctccgtactaggaatggcgtttagcatcaaattttcttcatacgtaatgactcgtgggaaaagattattgagttggggagtagggcagttcaggtctttcctaaatagttcttggaaattctttaggaaacagtctgcaatttccttttggtctcaaagccattaccctccttcagagtccttaatgcactggatgaagtttttccttcgacggactattgtggaggtcatgaagaattttgagcatctatcgccctcatgcaaccactgaatcctagacttttgcctccaatgaatttcttcctgaagcaaagcttcatttaattgttgcctagcctcctcaatggcattaagatcaccaggattgaattgctcagtatgttgaaggtaagaagttgcctcctttacctagatactaatctttcgaaattgttttttattccattggctgagcttccggcgagtgttcttaacttttctgtggaagtttaccatgggattgttatggagcctctttgcccaagcttcattaaccacccagtagcatctcggatcttttgcccacatattttcatatctgaatggctggcgctttcctttgtatcagggccgtcttaaacattttggaggccctgttccaatcttaaattttaggcccctaataaaaaaactatttattataataattgttatttatttcattacaactttaagtaagtatcaaccttctatttaaaaaaggccattcttcgcacactttttgaagcgaattgatcaaccatctcttcatattttacagtttctaaaacatcattttcaatcgcgatcaatgctaatccattaagtctttcttgtaacatggtagaccgcaggtaggacttcaacaacttcaatttcgaaaaacttctttctgcagaagcaactgtcaca

SEQ ID NO: 302296 - DNA, 5445 bp, Cannabis indica
tattattttcttgtttttcttgtacttggaaaacaatacataaggcaagtcccatccatgtactcatgatatgattattcaaatctggtggtagttgaattgtaacaaaagattcactacttgagtaactgcaccaataaggaattgtagcttgggaaagaacatttccaaatgcttctcctctataaatatcatcctattatatatgaaatagtaataaattaacaaattatatatgaacaaaaaaatataaaagaagataattgcagctaaactccaatatatgaattaatttacctcacatgatgtatgaagtagggggtaaaaatgttctcttgatactccaactctgtattctttgccttctgtacccaacttcgattttcgaaaatctataacacaaaaaccattagatgttgtccatacaatagttccatctagatcttttagttgagtacaatcacgagcattgacatatttgacactaggagaaactattggcaatgattgaagattgtcacaaccattcaatctaagttctctcagcttagaaagttcaaacattttacttggtaagctcttaaaattgttctcactcaaatcaagtagctctaatgatctcaactcccaaaaatcgtccggtatatcttcttcttgtagattgcatttgcttaaatctaatgatttcaaagagactaaacccgaaaatgagttaggtaacatcaagcccccgacggattcagagccttcttgttttgttgttgttacatgaaacaaacaactacaaatgagggagaaccatagcttgttacccgacatgatgatgtcactgcatccgcgaaaagataattgctttaggctctttagttgtgtgattgaggaaggtacttgtcttatggcggttttacttgcataaagctcttccaaacactccaaactaccaagattttcgggcaagtgatcaagacatgaacagcctgagatgttaagagttgtaagattaatcaaactactacaaatgttgtgtggaagactctcaagttttttacaatctttaagattcaacaaagtgaggccactcaagaacttgattgagtctggtaattcggttatggctgtcccattcaaatgaagttgtgttaactctttcatgttgttttttcccacaatctctggaaatttgttgagccttgaacatcccgaaagaattaatgtcttgagagattctaagctcatctcattgatgagtgttttgattgattcacaatcttttagattcagtaaaacaagtctcttgagaaatccaatggatgagtgaatcattgatagttttttgcagcctgcaagaatcaatttttcaagatttggggttgtgttgaaatttggagtcttggtcaagttgtgacagttgctaagattgatcaatgttaacttttctagtacctattgaaaaaaaaaaatcattaagtagagtgtagagataattagatattaaccaacacaaatttgaattttcttaccatgttttggttccatagttctttaatgcaactgtttgacatgttgagttcaacaagattttctgggttgaaacttgatggcatagatgtcaaaggatatctatgccattccaaaagtctcaactcatgagaaagatatccaagataaccagaaattttgacattagaaatcttcaacaatcttagcttacacatgttcaagaatgggtcatcattcaaaagaatttcttcttgtttaggcgatacgaaaaagatgccttcaacagcttttgttccctgagttttacaagcaataatatgagtttcaaagctttatttcaaaagaaaagaaatgtaagtattcatgtttgtgattatgatctcttactgagttcttatcgagtatttcatgaacatccctatgaaggaaaagcctgctgcgcttcccgggctcttgaggagattcttcacttacaatttgcttagctaattcttgtaagagatcatgcatccatattttgtcaccaacaatagttaccatagatttttctgtcaatacttttaaatcgatacccggatagcattcgcagcattctaaaatctttttcacccgaatttcgctctctcccttgaaaaaacaagcaatatccaaaaacattttcttctctgaatgctttaatccatcaaaacttactttgagaggaccaaaaatgtcattttcaggatatttcccaagtctttctaatgcacttgaccattcttcctcacttctttcaaacaaaaaagaccccaaaacttgaagagccaaaggaagtccatcagcatatttcacaaccttgttagttttctctataaattcatctgcagggtggttattcttgaaggctttcttgcaaaaaagcctaagagattcttccttagacaacttatcaatctcatatacataaacattattttctccaaaccttttcaaccattgcttgtctcttgttgttacaatgattctactccctttgccaccaaagtcaccttttccagctaaagcttctatttggtctaacttatcaacatcatcaagaacaataagtacttttttacaacgaagtctgtctctcaaaacatggactcccgttcgaacaaactctacttttgcctcgctttcaagcaagaagtagtaaagtttctcttgcaaatggcgaaggccgtgcctctcagactcctctctaacattgtcaatgaagcaacttgcatcgaacttatgtttaatctttctaaaagcttcttgagcaagcgtggtttttccaatcccgcccatcccccatattcctattgcacgaacatcagatgcctcggtgtccaagcacgacaacagtttttccgttcgagaactcattccaactaactccccatcacttacacaactactcaatgatgagctattcaataaggtaaagatttctttaacaatctcatccctgaagaaaaaagaaaaaaaaaaagttatataagtaagagaatttctctagtgctctttctaacataagaatcaccatgctccctctcttttttctctttatttctctccttaagcatgagaaagaaagcgagtgagggagcataggacttccccgagtattggtattaggcactatgacacctaatatcacaatgaagtgacactctataaatgattaacaattttctatacttattattaacgtaaaataagtagacctgatattaaattgtatgagaatttttctagtgcttttcctaaataaaaggaaacatgagaggaaaaggaaccaacaattgttacaattaggtgaatttctttagagctcggaagcaccattgctttccgtcttttttctctttacctttctcttatctcctgcttgagtccctcttgaatccctaaaagaaggggactcgagcaggagaggaaaggatcaccaaagaaactccttataattaattgttagccacaaacaatgaaagaagttggagcaaaaaccaaaacagagctaatactatatacaaaacaaacatcatatgtaagtaaactaataagataatgttgacttttgagtagaaaattaagtaaaataagaaatttacttctttaaactaagaagaaacttagtacctctctttcaaatcccatccagagagattagctatctcaaaaagagatgttctccacttcttcaccttctcaaaactatgatctttcaaagattcatcatcatgcttagcaaaggcctcaccgaaaagacctctttgctttctaacatgcgacggatccacatgataaaaaaccggaaaaacaatctgtcccattttgtgtctgcaatctgtaatctttgaaacctcctccaaacaccattttgagaaggcatagtttggtgagaaaacaacaacggcaaatctcgattcttcgattgctttcaatagctcaggagcaatgctgttccctctcttgagcttatcatcatctctaaaagtatgaattcccttcttttccaaagcactgtacaaatgatcagtaaagctctttcttgtgtcttcacctctaaagctgaggaacacatcaaacttccatgattccttcattgaagccatgtataataaaaacaacactcttatgtattaattcccattaatattcagcttcatatacaaaaaattttaggtgtgaaaagttcaattaatcctcataatggacagtgatgctgtaaagcttaatgctttaagctttttaaaaagtgtagaaaagaaagaaagaaagaaaaaagaagcacataatgtggaaattttaatatatgtattatatgtccatctaacaattaagatattgtatagattataatcacgttgatatatcttctaaagagaaaaatgaaatattctgtaatattaacatattttcaataaagcaagtgcttaggaccgtccatttgtccttttttgattggtcctggactaaggcaggtctgctcaagtctaatgtgtcatacatcttaactaattagctgtgaatatttgttgtttacaatacattcaattttatttgagtaaaagtaaaataatgtctttcattttttattttaggctctgaacaaatgtgacccctaaacatgggtttagcctgcttatacctagtgtcggccttaatctgtgcctagagcctacccaccaagataaaaaaaaaatccatttagaataagttttgaattcatgctatttttttaaatatacaattaatagaataatcactaaattatatgagttttttatagtttcaattctgtattttatagttactaacatattatttcattaattgtgaaataataaagttggtattgaaacatatatttttatagttatagatcatgattttgtaactacaaaatagaaaattagcaaagaataaaaatatagaaaaataaaaatacaaagtttttatatgtgataggtcatgcctaaagataagattattagtaatatctcaaatatacagaatatttggcttatgtatataaaggctatttgagtgacaactagatttaatttatcacaataaataacataacgtatttgttcaactttcccaaaataaaaaaattaagtcatcaaatatacttttaatagttaaatcaaataatatatgtaatatatacataataaatacaaaatatttttatcaattaaatatgtcaaaaataaaattaacaatatacatccatatttattcatatttacaagagtacttaggctttctcctaccactccatccaaaactagtgatatattatgattttatgttgagcatggctatttgatttagggtttatttttatattattttaaattatatttttttatcataatattatattaaattttaatttctattaaaatattatatatttaaaagttc

SEQ ID NO: 302297 - DNA, 1884 bp, Cannabis indica
caaatgcacgcgctctggcaactccaccaacatcaggggagaccactaccaaatcttcagaacaaattttcttgctagcaagataatcaagaatcacttgctagaaagcacgagataaaaaaaaatatcagtcctgaatgaaactaatgaaatcaaaaacataaacttacaaaaatatttacctcacaatacacatgatccactggaatatcaaaataacctagtgactgcccagaatgaatatcacaagcaagaacacggtttgcacctgcttctgtaataaggtttgcaaccagtttagctgcaattgattcacgtccttgggtctgcaataaagacataaatgtttagcaatgcaacatagtttgaatgctcaaacattctgagaaatcaacacatggacaaaacttacatttgagcgcttacaactcataagtataacaaaaacggattaaatttacctttctatctgctcgggcatacccaaaatatggaattacagcagtaatatttttcgcagatgcccttcgacaagcatcaatcattatttctagtttccatgagatgctcattcacaggaggacatgttggctgcaaaagatagacatcacatcctcttacactctcttgcaactgaacataaaattcaccatcagcaaatctttttatgttgatctttccaagctcaagacccatgtaccatgcaatttcctacgacaaagtaactgaatgtcagtaaacataaagcataagaaattcaattaccgattatccactcacacttgatttacacttgcatacaacatatattcttcacaacaatatatacagtataacgaatatagaagaagagtccaatagcaaaattatatggaaaataaaatcgaaaggttaattacctgactgagtgaaggattggctgagccagaaaacaacttaattttggagttgtttctgtcaacttgtctctccactggaaccgattccaagaacctaggcagtgttctatcattaagaataggaatggtcggtttcacattcccaagcctgtttgactcggccatatcacacctcttcaaacaacaatcatacacacacaaaaaaaccatgtcaacacaactcttaactctcaggttccaataaaaatacacaaaacaaaatgcaaatttgtaccgaacactcgttttctgccattactatctcaatcaaagcccctattcacgatcaataaaaaaaaacgaaagaaaaaggaactacatcgcttaccacggtgttagtagcataaattcgagtgagagagtcacactcaaacaaagttctacgacagagcaaggagcgagacgaagaagaagacagagaagccgccgccgccaacgccgctgacgtcgccgatgacgacgacgaggaaggagaaggcataatcagcgaggcagccatgccttagtaattacagggcgtgagattgaagcttcgttagggttagtgaggagaaaaaggagaggtgcttatcaatggcggagggcactcggagattccacgacacactcggacttagagaggagagggacttttgattatcccacttgacactttttcaacaattgacccgcgcccttatcaatcagagtttctctttatatacaaccccaaaacgtcgtcgttttagctctcgtaacggtgtcgtttttggtcctttagtgtcgttttgtcgtgctcttttagcttcttaatttgagaatagagtgggacccaccaccagaatctaagtttgaaaatcaaaacatggacggaagaatggaagaggtttcttttccacgtggcagaggtccaaatcccacattttaaaacgtttgattataatttttttaatgttaattttttttt

SEQ ID NO: 302298 - DNA, 1379 bp, Cannabis indica
gatcacttgaatgatgtgagtccactttcaaaaaatctatgagagtaataaattgccaattaaatgtgcgtgggcgcgcatggtgaaaagacttgttgaatcgtaattgttgcttcgtcgcatactcaacgagtgaatcctcattagatcagatctttaggtgcaagatcaatatccattctacctgtaatttataggaacggatgtgcataaaaaatactattagaagacaatataaaagaatatttacaatgagtatcggtttgacttgctgaatgtacttgtgatttagttaacaacactagctcagatcaagttctcgtaccaattgtaacaatcccaacacatttaaatgtccaaacaatctaaatttttggtaaaatttattcattgtaatttgtactagaaatttgaaaagacttagttaatcaagtttaaagatcgtgttctcacactcacatgaaaaagaatactttcaaatttaacaacatagttaaacaaaagaaatagaaagggatcacaattaataaaaaaaaattttttccaaaagacccttctttcaaatgttttcccataggttgatccacatgtacatcactccaatcagaccccagcgctcactgcttgactttcactttacccttacctataatagagaacaactaggtaagcggcaaagacttattatcaacttttacatacagaaacattgagcaatttaatttaaacaacattcacaaaaatttcacattagtgttgaaaaattcatcgaccttatcaattacttagataatgccaagaagtaaacagtttccacacccatacatgagaactacaattatcctagaaaatgtaccattcaccatcatacgagctttcgaactcttctagtcgttaccccatttctacacctttgccatataccataacctgggaaaaagttgcattttccaaagcttaaacgacaatcttgaacttacacatatcaaagatatgcagtccagcagtatccattcaccacaatatctattcaaattaaaatcatactagtggagacatccaagtaagtcccatcaagtacttcttacatatagtagctcgtattctagactacactttcaaacctcgaggtatgtgtagttcccaagggttatagtttcccataatcatctatcccaccgtttgtgttgtataaatttcagtactacttaaataatttcagtataaatagaaatagaacacttcttaatgaatattacccatgaatggttactaaaaaaacgtaactataaatattaattttaaaaatatcaaactatctaattttgatctaataacgaataatgaaatcacaaatttgaatttatatgtttaattta

SEQ ID NO: 302299 - DNA, 1730 bp, Cannabis indica
acactgatacatgtatagtagtctaacaatatgattgtttctaaataaaacccttaagaaataccaaaccttccataatacatgaattgaaatagttttttcttacaaaaatagtgcacacctaaaatcattactgataaaattatttcttttctttgacatggatgtgtttcaacttggtctggagaaaatataaaggttgtgtttcttataaaaatatataaaattggttgtggtttacaatatcaatgggctggttttacgcttaataagttaaggctgctataatacttaaaaaaaagttattgaactaagatttgaaatgctgatcagacttcagagtgaaggacagttgtgaaataagaagtaaatacaaaagaagatgtttatacattataaacacgccttaggagtgtgtgaaaaatcagaagttaggcaagaaacttatcacggactgtttaattgcttgaatatagccaacttgtagttgttttctttttttaaacagcgaataggatgctttttctttgtataaaaaaattgagatgatgtgtagatatggatgttttgtccctgatttgttgaatgttataatagtgtgctctctccgttgcattgatatcattttttttttgttttttggtatctgttttgtacattaagatttctagctttatttagtttgagtgctttctatttttcatttgtaaagtgccaaactaaattcctttgaattgcctcaaacaggacattttcctcgacaaggttgctgcccaaacgaatgacggaattccagagtaagctttttaatatataactctgtactttctgtatttagtatttttaatttttctgtcacctcaactctctctctagtgttaagtctgttacttgtcgggctggatggtgttggctgattatagcaatcttgttccttttatcagtgatgatctgcaggtgtcagctcctccaatgacacctgaagaaaaagaggaaatgcgtgaggacattgaggggttgcctggaactacagaaataatggatttggatggcgctggggaccaggttgaccaactatgcccaaaatttatactgctttctcttttctcatgttgtatgcctatttctttttctgtgttagtggtggtgggcgggtggggaaatattgctagatttgtatatatatatgtactttaattttaaatggcgtggaatgtggtgatcattgctatttgttggtctttgggggattgaatgaaatagtggagtttttgaagatttagaaggaaacttgagtctttatgggatagagtaagtgctggatggttcatttgctagtttattcattcttacgattttagagactttttttcttaaaaaaaaattaacatataaaatatattttatatatatcaggatctctttctgttcctttgtaaaaaaaatttttcgataagaaaaagatttgaggatgtacattcacacacataaattttatttatcacatcgcatttttactgatttttttgtggataaatatattgcttgtgggttagattgaagttccagatgcaaatatagaagctttcgaccatgctgctgaggatccatctactcctggattcatggaacatccaagcccgtctaaggctgaggagcctatgaactttgatggtcacatggaatcaaaagatctgaactttgatggtcacatggaatcaaaagatctg

SEQ ID NO: 302300 - DNA, 1908 bp, Cannabis indica
aaggaaaaggcaataatcaaagtttacgtaaaaaacacaaggtttccttaaaaacaccaactttccaaagagaattgcttctctttcaagaagtttccaaacaaagaaaagtccagctgaaaagtgcaactttcctaacaagaaaaagagcaactaaaaaccaaatatacaagataagaaatcgggtatgaatacaaaactatcttaccataaacaaaaaatattttgtcaactaacttgccaaaaaaaggattttacacgatctattggagtggacatcgattgcagcatccttagtcaattttgagaggtcgggggaggagggatccagtaatatagagccttcctggtgccttgattatttgttatagagatcaaatcctccaatttggcatctttatattcctgaatcaaatagcagcatgtttccatgagattttggtgttgggaagcaatgcttttttgagtgaatttattcctatgaagccaaactaaccaacacaaataaacaaacaacacaaaatcttcttttgttaatacagtggcaatatgaagagcgactaaatcaaaaattttaacatgagcagaatctttaagaaaggagtataagggtatacctttccaaatcttccagacacaattgtatggtcaatgttttctaacatgtcattgcactacaagccaataggaaaaaaatattttatgaaaattataaaaagtggggaacgtattctttgagacacaataagcaaagaattttatctcagtaggaaagttgagcgtccaaactgttttccaccaagcaggaggccaggaaggtgatggttcatgacgataggaatctaagaaaaaactaaggtggaaccagacttggcagtataagacccagaggggtatgctaccaaatgagggactcctcaaacggaaacaaaggaagagggatagtgagaatatcattcaccacatccctggagaaataatgggaaagagaggaaaggttccaggtcatgttattgttgataaagtaagcaacctggtttgggaggttacgcatggtggtcacaaacctagtgttaagtatccaataatcattcacatggtcagttttttggccatttcaatcttggatttaagaccatgttttaacagcccctttccccaattaatactttgccactctaaagaaggggcacgcctgacattgctgtccaggaaagagaagcaaggatgatacctagctgtaaaaaccttgcaagaagggagtttgggtttatgaagagtctctaggctttcttagcaagcataccttgataaaagtgagtgagtgatctgaattttagaccaccatctcgtttggacttacatgttggaattattttaacaggatctagatttactaacaagtatatttttaaaaatcctaatataaatttctaaaacaatgaaaataaacacataataggtatgagaacccttgcagtggttgcagcggaattaaatgactcctcccactcagatctctaacccttgtattttctgtagcggagtatcaccaagatctgagctggattctccttcttgttgattggattcttcacagtcttacatactatgattgaggaccaaattgatatgtctgggcatgcactcaatcactaatggctgattttgttttgtgaagaatggctttggtattttcgaagattcaagaggaagaagaagaaggaataggtttcaacaagtaattatctcatttggttttgagatgaatattattgatgattgtgtatatcacaagttcaatgggagtaaatgcataattctagttttatatgtcaatgacatattgcttgccattaatgacataggcttattgcatgaagccaagaaatttttatctaagcaatt

SEQ ID NO: 302301 - DNA, 4940 bp, Cannabis indica
taatatcacagctaaaatctgtagtagctctctcccacctgtccctaaactctactagatcttcccaaattcttatttctccccttgctatagaattgatttgcagactaatagcttcatatggtaagggaaacttatcatccatagtgacttcctcaactcacatcctccaaatgggattgtatccctattacccacgcctagtttgaaagttatatgcttgaaaaacttatatcctgatgagataaactttcaaggggttctatacgcgactctagaaaccatagaagtatttattgatctaaagaatgaaaatagccccaccaaatgatctcatcactaagggtggcagttcgtattggcatgtcaagttcgtggtgtgttgagatcttaattttacttaaaacctgttgacacgaacacaacttgtataaatttcttgcgtgtcgaacctgtgaaatcttgtgtcgttcgtgttgtgttggcatgttgtaaactaaattgtttttttggtatcatcgtgtcatgtggagttcttaaagttattttagatgactggcacgaacacaaagacgacccatgacacgaaatattgataaaatacggacacaaaacgacagacataattttcgtgtcgaacctacaaaatctctaatgtgttcgtgtcaaacacaagtgttaattctccacatgacaagatcccccatcaaaaaaatctctccaatcttcaacttctaggtttttactctttagattggacctacatttcttcactaatgcctcatgactcactacaacaataattctctaaagcttttcatatttgccagcaggaaagatgccaatattcagttctcatctcctcttttcacaagctttgccactattttttgtggttcttatgaaagagcaaagctcaagcaactctaataggtgtctatagtcgtttttatggttattaaaacctcattttttagaggtaccaatgcacaacatcatgaaaatagccccttttctatgtagaagatcagttcactaaataaacatgataggaaatgagttcacaactcagaatttccttcctgttctgagaatgaatgtgtgagcttgtgtgacgaattagctactgataattttataacaccagaaaaaaaatctgacatgcttcagacttctgttttggcagaatacaccccaagaaaacttgtataatcaatcaattaaagttatgaatcactccacattcaaaatatttcaaattctcacaacattgtatggcaagaacaagcaaattaaaagttgtcaataacctcttagggaaagttggtacgtggtattacatcgtattacattgtattgcatacaatatttttatatatattactaaatttgaaaatgatctgtagtaccatacaatacaatacgatataatacggtgtgccaaacaaacaactgtttaaaaggcggccgagataatccctttaaagatggaccaactaagaaataaagatttaagtagtcatgtcagtgctttgaaggcaccttggtcatcaaagagcttttttaatcctttgagcaaaatgaattaccatttggaactttatgacatacatatgaaactgtaaattcttgtaggtaataagcatttaatcaagagaaggagcatgcgcataaaccaaaagtaactcaaaccatctatgaaataaacgaatataaggaaaacaaaaggtagcatacttgtttgtttcgtcaataatcaacgctccattactatctctgttatctataccgccacttctttgattagcacaattatgcctctgttcagcactcctagccaagcgataaagactgtctcttatgcacaattttgtcctgacatccagctaaactcaagcaggtttacttaattagaatttgtataagtaatattcccataaaattaaagagttatccatcaaaacattaaaaatcatgatcctttcagcacaagagatatatccttgaaagtacggtcaacaagaagaaaaagacttttgtacatagttaagattttcaaaggaagttgagttcatgctaaattgataatattaactattatcaaaatcagatctgtacacgcaccatcaaatccaatcatactccaaaaaataaatagaagttcctaaatgtcattggaaagagaaagacaggcatagatggagagttgcttgctatgaaagcaaaatctgagtcctctcacagataaatttattgattttaattctagttttaatcatcaagtttcccagtaataatagggggtgagatttctgtgtatattcttgtctggtagcagacaatttatcagtacctttttccataacttgctgcagctggcggaaacttcttgcttcaactgagatatcatttagtacagagctaaggcaagacttctcctgtacagtcgaagagcccaattcagctggagcatcaaggctgcttccttcaacatcactttgaccttcaatctgcctttcagattgttgcaattgcttctgatttaaagctgcaccgttaaatgccattggacttgttgaggccacattctcaaaattctttgtaaaagaggattgaacactttggcagctatataacttttctctctttccactcattgttatggcaggagtcactgtcgatgcatcacgagaaccatccatagactgcaactggttagatgtgcaggaagactccttcaaggcaggagatggacaaccattgttctccgattttgtaccagagggagttggacagactgaaatatcggaaccgtgagcgtagtccaggtgcatatacggaagtttactatttacataactcatcgaatctgattctgtactttgcttatgttgttgaatactatgtgtagaataaacttgattggatagttcttcatgaggatgcttcatatctgtaaattgattcaagttatcataactctgaaaagaaataccactttctaggtattgatctgtgttttccccttctgactgagtctgttgctttggctgctttttactcaatgtaatctgtcatgcatatcttaaatcagtaaatggagtattgatcaaaacatatagcttctaaacatcttacgataactcacaaggataaagaaaaaacctaaacattttacatgaagcaatcctataaaggcaccaagctatgacttgagcacaggctagatggaagcagaagtcgccttaaatcagtttatctctatggacacaaattactccagcaaatgaaagcaaggttataaaagaacttcattagtatcacttgcttcagatgacatgccagatgcaagtttcttacatatttaatgtcaaagtgcaatattctataatttggaagatactttcttgcaacacatttacaaattatagccgtataagttatcaaagcacagacaacattttcagatatttgaaagcatggagaatatgtttacttgttcttttggcataaagatatcttcgcttccagattttgtatctaacccatttaaaaatgataaatgaccaagagcagcgggatcatcagcatctgtattttgtaaacacacactgttaccaacagagccaattttcttttctgaatgggttgaatagcctacaccgtcttgcttaaaatcttcatcatgattagaaacacctactgatgaactagcatttgaacctgaaaactttaatccagacttgttttcagacccttcagttgcatttgtaggaggaaaccagcacaactcctcatcattgctgagactctctattccaaatgttgagtcacaatttctgctgagaaaagacaatgatcgtataataatataattagtgagtgacataaaagggaaaaaacttaaatgaaacctctgaggttgcaaaaggtacctaaacatcctgtcaacatcttcaaaatttcctatatcttgccacccataaaataacagacccgcattttctttgtcttcattatcattatcaaagaaactgagatcattgccagtttggggtacttgaccaagtggataacgatatacattattatcgactgcagtacaacgatcacccatgatagcatcatcattacagtaatcatgggcttcggattccacattgctacttttgaaagaaaatgtggacctcattgtatcatcagatgctatactagtcacttctttcattgcatcattgtcacgtgcagaaaacaaattatcaggactgtgagcccatggactcttttccaacatactgtggttacttgtcacagaaggtaattttcttttctcctttccttggatatggtataatttagatgaagtatcagtattagcagcatcaattacttcattctgtcgcttcttgcaaccactcccctcttttggtgaatgatctccatgtgtattaataggatgaggcactatatgatcatcactttcttcaaattcatcccacacgttatcttcaagctgtaaactcacagagagcaatttaggcatataatatgacagtcatggtaaaaaaggatacatcacaatagaaaactaacaaatttatttagatatagtagttccaaaataataataataaagagaaacagacacgcacacacaccccccaaaaaaatggagtttagtaggattcagtcaattgagagattaaaacttataagcaagaaaaaatgaaatcaccatgagcttccctttaataatttataacatgtaaagtggaaccatttcataaaccagttaggttagtttaatcatcaattccaatgtacaattcttttaggtggcgtttggttggaggtaatgaaatggaatggaatggaaacaattttcattctattccttgtttggttgcatttaaatcattggaatccattccgatggaatg

SEQ ID NO: 302302 - DNA, 3526 bp, Cannabis indica
tatatctgtatgtgtataaagatttgtacataatggatggatgcctcatgcctgtcatgattagtccattaccacaataaacaggacagaagtttaagtttagacacaccaaacacttcacatttgttgttccttttctttcagtttgttgtctttacattttcttacaaaactaatgtgaatagttgaaaaaattgtaggtcagccaaaacgacatttgctcactagtggttggagtacatttgtgtctgcaaagaagcttgttgctggggattcatgtatctttcttaggttggagtttaatttttttttttcttccattgtttctctagctttttcaaccagatgggagtaatttgaactaaggttaatttaaagaaactctggtaatttttgcagaggagaaaatggagaccttcgtgttgggatccgccgtgctatgaaaaaaactctaaaccatgcctcaacatccgttatatctagccaaagcatgcagcacggcgttcttgccactgctttccattccttttctgccttagcttttatacatgtgtactaccgtccttggtaattaatctaatgaaagctattctagttataagctgtttctccagcattatcatttgattattgcatatttatgaatgaagcctttatatgaatttcaatgcaggacttgtcctgctgagttcataataccttatgacgagtatatgaagtctgtggaaaatgactatttgcccggaactaaatttggatacactttggaaggagaagaatgttcagaaaagaggtacttatttgtcccaagttttttgtaagcccattgggacacttaggtggtgttttgttggtagtactccattggaatgggattgaaatgcctttactatgtttggtttcactttcaaattatgtttgcctttaatgtagtttatcattgcacttgtcatcattaattatttatagtttaaataataatccgctaaccttgcctcactattttctttggtacctttgttttagatatacaggaactataataggtgttgaagatcaagacggcataagatggcctggctctcattggaggtgtttgaaggtagcaattctagctcttaagacaaatgataatttaagcataggtttttaaaaatgatacagaattgaatttgtgaactcaaatctactttacaggtgcaatgggatgcccaatcaagcatatctgtgcttcctgaaaggctttctccttggaacatcaagccagtggactctacagacaagactgacatttttgtcagacctccaccaaagaggaggcgcgagcttgatcttctatcatctgaatctcatagcttggccactcaaggttagaaatcttcatgaaaaggctttgtttttattttatttttattgagtttgtgtagtgattgtgactaatcaaagttttcttttctgctacaccttttggaattcagccaagcatacaccgcagagacttaaagaggtcttgcaaggtcaagaaataagtgtaagacatggccaggagccaagtgcacgaatacaatcaatgctaccaaaatttgttatgccaccaaatccagaattgaagcaaggacaactgaaatttgaaaaacagctccaagcgcctttctatcagtatcccagagaacaattggcatttcctggtgaaaaaacaacgaaaacaagcctcactaataaccagtggtggtcaatgtgtgccccttatagaggcagtgatagtgctgcatttactaaaagcttttcagtttcaaatggaaactctggccattcaggttcccaggaatatatgacattaggaaagaagagtggtgatggagctccttgctatccaaatgactctaacaaatacatgctgttcggagtcaatttgttcaatagtcatcaggagctcccttcaccacaagttactacatcttgtgagctgttaagccccttttcctttcctccaacatcccagtgtagcagtgtttctgaacctatccaggtttcagacacatctaagagtgtctctgactttttcccagagaaacaatgcaataaatgctgctcaatccgttacaggagttacataaaggtacaaaacttttgaacctgaattgttggttcaattatcaaatatcaaacaattaagctgccttgctgatcacttaaaaataattgttgataactctcctaggttctcaaacatggaactgcccttggaagaacaacggacctctccaaatttgatggctacgcggaactcatagccgagcttgatcagatgtttggtttcaatggaagcctgatagatggaagcagtgagtggaaagtgacatacatggacattgaaggagacttaatgttgttaggagattatgattggcagttgagtaccagaaccaatactttctttttatccaaaccatagttttgttttctgcactgtcagttatagaattgatctaacttctccagtttgggaacgtgtttcatgtgcagggtttttcgctcagctgcccgaaagatattcatctgtccaatggaagaaatcaacaaaatgaatccaagctcacttaaatccagtctcttagttgattaatgagatagttggtttgttttaatgcaaaagtactctttgagaacttgtgcttatgcatattactacagctgcgttttatcttttatttaaaaaccttaaagtgtttgaagggataattttaatttagatttgtgatgatccagactaaaattttgctgttgcattgatactatattccttattggtaatgatcaagaagcttcagcatgaaatggctttcatttcctagtacatgaaatactatttgttgtttccttctataaggaatttacatacttaggtagtacaatttgttttccctatacataaaccatctcatttaattttaaaaactataagtaattttctccaaaccaaatattatcatcaagctctttcatcttctcctaattatttcattttttaacatttatctaagacagtgcaacccaatctacatagatggattatctctttcaggcatataattctaaaacactccttcccagcatatgattatcaaaaaattaaagttcttgagatcaactaatttaattcctatccctgttcgctttttgttctcacaagtcagactcataacaaccatcaacaaatacattataattgttttctgtggaaatgaaaaatgagcagattttcttctaccatagtttcatttttaggatgaattaataaagaagtttcttatatgatcatataatttagagaacttttgtgctagtgtagggtaaagttccgtattaataatgatatatagttatatacactaaccatctgagtttaggtgaagtgaccgtacgagagtccatgtatcgaaatttttgggttcaagagtcttaaattatatattataatatataaatgcttgaataaaaaaaaataatatatatatactattat

SEQ ID NO: 302303 - DNA, 3392 bp, Cannabis indica
ctgtagtagagatgtaattaataaaaaaacctcaactataaccccaaaaaaacccgattccgtaaacaccatagaggaagaatgaaaagaatatcttatcgaaataatcgtatttgctttgatagatatgctcttcaagcacttgaacccacttggatcacatctagacaaatagaagtagaaagacgagcaatgacacaaaacgcccgctgcggtagaaaaatatggatacgtatatttttagacaaattagttacaataagacctacaaaaacacgtatgggttcgggaaaagaatctctcgaatatcggatagatgtcgttaatccaggtagaatcctttatgaaatgagtggggtagccgaaaatatttattgaaataataattaaagtgaaaaggacgaatctctttatgacatatttgaattctcgaggtagattttaaatagtttgttattaaaatctaaaaaattataaaaatattaaaaatttggtatttttataatttttttttttgaaattaatccaaaaaaaaaaaaacagattaaaagctcatttctttctttctcatacagcaacgcaacctctctctgactctgggtctctcttgtcggcataagcatctctctatcgtctcctctctgcgcccccaaggtaattcgtattttcagctcttacatttataactgtttaaaatctttacttctaagatttagaaattgtgcatctcttacacttccatgtcacctaagcgccatcaccaaagaaacttttattataattttgtgattttggttaaatgggattacgaaattctgtttcttttattcaaatcacatttctatggtatttctttctacatggctaatattgtggggaaatggttttaagtttaagataattttatatctgggaatggaattggtgttggctgttgaggaagtgtttgattacattaagaaaattatctccaaataaaatccaatttatggtgtttttaggcaatttgaactggaataattttaagtactcacagtgagaaataagttaactggaataatgttgtgttgctattgattggagagataatttgtagttgtttagaattttattggggattttaataggagaagcaaaatgggcactgcttcattaagtactaagtagttaccaaatattgacctgtttagagaagttttgacccaaaatagacaatacttcattgaaagctacgactaataaactgtttagagaaactgtgaaaaaatatggtttattcatttgcatctcttcagcattgttgttagtattgtgacaggttttctgtcagaaataacagagttttaataaatattctgctatgccacaacaaatttttgttatgcatttattgactattgtataggtaagaaatatataatgtagagggatttgatctctatctaataaatgctagaaaagacaatctgctttgttttgctttagtattgcctaagatttttttattcatattagttgaggtttgtatttgtccattataatactggtctctgttttagttattattatgcttaaaattgatgagttttggtcaataacttcttttttggaatttgttgacactacctttgttaggatttacaattttcgttattttgtgctatcttgtgacactgccaaatccaaatgctaaagtttctatcgaaagtgagaattgaattcaatgctttggaccctcgcacagcctcctgcttggagtttcttgctcagtgcaatgcccgcaaggccaaggaatctaaccctgcttgtcaggttcttgtcaagcgccgtactgacgatgagccaccgaagatcgctgtaacctttgtcaatggtgtggaggaggtatttgatgccacttccacgcctgcccagaatattaggaacatgattcttgaaaagggtcagcacctagagactgaacagatgttccgcgaggcaggggagtcttggcctgtcctcattcctgaggaagagatccatcagtacgcccctggaaccaaggtaatttctcatcttctctctttctttttagcttctagttgcgtttttctcattggagcatttcaatcgaacagtaggtgtggttttgaaaccaactaacactagagagctttgtgagatatgctggttaaacatgtatcttttgtctatgctatagtgtttttctttcattgagaaatcatcatgtacatctcacgagggtatttgctaaaagaacatggtcaaatcaaagatagaattatgtttgtcttagcacttagaacaaatttagtgtctttgcattgagtattgaactgtttggtgactgagttgggtcttatggatgatagtgaatattgttttcatgtccccttttttcttgtgtgtcattgtatttattacatgttcttgtcattttaagacaatatctctgtagaataggactgtaatggtggcactttgttatgccagtttctacaaacacttcatatgggattgagattgaccatatatcattaataacccctttgtgttggtgctactaaatttctcagctttaagcttgtttgtagctacaacaagtaacatgctattaaaggttattgttttcattggttttttatgtttatgtgcctttggcagccaaggaaagcagaagaaaagaagcaataattgtagttttgggatgatgacaattgagaagagacaggtgtggtgtggtattactcaatgagattgtattacatcatgtttcattcttgtattgtagaagaaaagtctttatgtttgacttcaaatgccaaagcacccttgttccctcttcaagttatagataaataaagctgattgaaagacgaaagagctggatgatgagaaagttatgaattagcaaaatggcctctcacttattttgtagtataaatgtgtatatattcctcacacatctaaagggaacaggataattttaatattagacatgatcatggtatctgactattggtagcttgtagaaagaaaacatgaacagacatattatcctagtatgtgtatgatgataggattgttctgtaaaataaaggcatgtttggtatggaggattggattatatagactaatttgtctagtctagtgtttgggtatactacaagtttggataactaatctagtcaatctcatctagaattatttatcctatccagtatggtgggataaataatcctatataggtaagattttttttttattgtttcttttttcaattatgattttttaatatattttaaatgtaataagaattttaatgaaagaattattataaatttacttataattttttatcaaaaactttttttttattaaaattagtaaaa

SEQ ID NO: 302304 - DNA, 2551 bp, Cannabis indica
tttgctctggttcttgcttattaaaacaggtatgcttatttattatcattgaaatgtttggtggggttatgttacattttgttttacagggtaaagctaaagatattgagctaaagggacacactgatagtgtggatcaattatgttgggatcccaaacatgctgaattaattgcaactgcttcaggagataagactgtccgtctatgggatgctcgtagtaagtgattccttcttatttttgtatgtgttaccatttatgttgctggagatgccttaatggttgttttggttccgcaggtgggaaatgctcacaacaggcagaacttagcggggagaacattaacatcacttacaaacctgatggcacgcacatagctgttggcaatagggtaggtttctacaacctgatgttggaatctcgagttattatctgaaaaataaaagcatgttgcattttttagtggtatttcagatcatcatttgatatctaaaatgttgtaggatgatgagttaacgattttggatgttcgaaaatttaagtcaattcataagcgcaagtttaattatgaggtaattcgaagtaaaggctacttagtacttttctctctcagctttatgttagtgacaatgttttactaaactggattgatattttttcttattttccaggtaaatgagatagcttggaacatgaagggtgatatgttctttctaacaactggaaatggtgagcaatttttcgtttcgagtatttcttctgtctgtctactggaatggtttatatgatttaactttgttacgctgtttaggtactgttgaagttctatcatacccatctcttcgaccacttgacactcttatggcccatacagcgggttgttattgcattgcaatcgacccaactggaaggtatcctacaaagcaatcttagtctttattttgcttagctgtttactcatcgaactaaacatcttcttttgtccttaaattttacagatatttcgcggttggaagtgctgattctttagtcagtttgtgggatatctcggaaatgctttgtgtgagaacatttacgaaactcgagtaagcttcttccccaaaataagaatcaaaaccttatatataatgaatgtttgctcaccattgttttgttttgtttttttatcttaatccagatggcctgtaaggacaataagcttcaaccataccggtgaatatattgcttcagctagcgaggacttgttcatcgacatagtaagcttttatattgtttatgattaaacaagatttttcttttaaaagcaattagataggattatgtatgacaatattatttctcttataaacaaacagtcaaacgctcaaactggaaaaacagtccatcaaattccatgtcgggccgccatgaatagcgtcgagtggaatcccaagtacaatttactcgcatatgcaggagatgacaagaacaaatatcaagctgatgaaggtaatgtttagtttagtttaaggcacatttattttgtttttcgttttttttttctaatttctcttaacaaaattttatagtttgttcatagtttttgattaattaatcagaaaattgtgtttgtaatcgttaccgaacactaccttagtttctttgttgcaattcttgtctcttgacaaaataacaacattctttctatgtctcttaacaggtgtttttcgaattttcgggtttgaaagtggtgcctgagagaaattactcgattctcggagccctttccggtggcctttactcaaacctttaaaacactttttctgttggaaattggggttgtttgttaatgaccaacatgattatttacatattattattttaatttagtttttgttgttgtttaattaacattaatgaggatgagattaatcaatcaatgtaaagtaaaatttaatagcaaagtgtacattctcaacatgctcatacattggcaaagttttataatgtataattcaaagtcaataataaactcatttgttaataacttaatattaaagtgttttgagattaattattaagtcatgatctgaatttatcaagattacttgggtataagattgtagactaatcgaaagaagtcctttgagttaattatttaataatcaagtaagaatatgataaattgaaattcaaaatactaataatcccaattcaatgatcaccatgaacaacttgatacttctctgttgaaagggaactaaaaagtcaaatttttgaagtataaagttgtgataactctacttcatcctatcatacgttttactcatattaaactttaaagtcacgacccttccatcccataaaccttacgacaccatagtataattagaaatcaaacgatctagaataaaaccattttgagtgtcaaaaattccttttggcaacaaaacttcaaatttattgaccataaaaaattaattgaagaagtccttacaaaaagaattaattgctaaataaattttaatatttttgacactaataaaaataaattataaataaaaaattaaaa

SEQ ID NO: 302305 - DNA, 3439 bp, Cannabis indica
attggcgtatttgggcttctttaatacctattgttggagggattcttcttacttctgttacagagcttagttttaatatgtttgggttttgtgccgccttatttggctgtttggctacttccacgaagactatcctggcagaatctcttttacatggttacaagtttgacaggtactttattcttgtttctttagtcaggtctggcagattttccaaaaatttataaatttaccagaaactttaccttggatcttttcattatggtgttaataatgtaaaattgaattttatatattattcagatcatacaatagatgtaatatcttgtgaatgagaggtagatagaaattatcacagccaagatgtgtaaactatacctctgaatgaggagtgatccaagtcaaaaattttataggcttttccataattggctctacgctcaacatcaacaaatgtgtgtatatatatatatatgcataatacataaacatattgcttctccttgactaggtcttcacacgtaagatgtatatcatttttattttatcaaccctccttttcttgttacttgcttagtttgaaattgagtcttcaatttttggagtgatgagtatatgatgcattatttggcaaatattaggcaagttttattatatggtttcatgctaattttgtttttattttcattgatatattttatagcataaatacggtgtactacatggccccttatgcaactatgattttggctgtacctgcaatgctacttgaaggtaatggggttctggaatggcttcacaccacgcaggctcttggttcatcacttgttattattttcagctccggggtgttggcattctgtctcaacttctccattttttatgtcattcactccacaactgctgtcacattcaatgttgccgggaaccttaaggtaaaagttttaagccttttttttcttgtcttctctagagtgttgaatcatggattaaaaatgctacgggatcatccttgcatccaagtgctatactgtcaaggatctatacaagtagtgttctgcccactaaatatataatgggaatttgaacgggattgaatgcctgtgatccacaaatttacagataaaccttgcatatcatatcgggctgaactttaatttctactgatacatgaacttcctttcatacttcttaactcttgaacaacaacattgctgcattctcattcaagtacattgttaaaatcctaatgatttttaggtctttctcaggttgcagttgctgtccttgtttcgtggatgatattccgtaacccgatctcaggtctgaatgctgttggttgcgcaattacacttgttgggtgcacattctatggctatgtgaggcacatgcttgcccaacagccaccaggaacgccccgaactccccgaacacctcgtactccccgagcccttatggaactgcttccccttgtaaatgataaattagatgataaagtctaatggtttcaagaagtcaagcatgagatgaggctcatcgcagtttgataagggttgataggaagagtacaaaagaaaattaaaatgaaaaaactcacagctctttgttgtgtaaactggcattagactaaactttttttaaatttgttttccctactgggaatattttcaaattcttgttttgtattcatttttttcatgttttattgggtatcttattagtacttttgagtttgagacaatagctaatagttgcaaagttacaatcagaccaaatggatatcttccatctaccaaaagaaaaaaataaaacttaaaacttttatattatacacaaattcaatagaaatatcataacattttaaaacataaccatagcattccaaatggtttcactactccattaattataaaaagatgggtttttttattaatttttttttttatttttttatttttcagcaatgaacttttattgaacttttattgaagataatcagagtttaatatatcataagaaatgacgcaaaatcattcatctaaactatttcgccaaatgacgcaaaatcattcatccaaattatttcattattcaccttgagtgtacacaaactgctaacttatgtatagttttattagccgaatgacgaacataaatcagagatgtcttaagaaaattagacaataaactagcaatatcatcttgtaaagagcctacctcatcataaaaagtagatctcaaaaaggctgaaacaatgtgtttactgagatgttcggaaactaattaaataattgcttaagaaactaataagtaaataagtaatggagatggagatttttacatggttcgggtgttaattaatcctagtctacgagtcagtgtattggccgaatggctttgatgtattacaatggggtcttacaagtttaagaaccttagcttcttgttatagtatttcccctttggcttttcttacttagagaagaagaaagttttgtttaaggaagtgaattattcgtcccccttgcacaaaggtataaagaggtattttataggctaggatccagatctaggtataaagaggtattaaataatttaatatttaaaatatttaaaagtaatcaaatcaaaataatcgatatacacttttgcggattgaatttgagctattatgtgaattagattggatccaaaatttgaaattgacaatttgagctatttatgtcgcgaaaaagtaaaacattaagtattgatttatgtgcacatatatctttgtagtataatatacatatatacactttataacactaaatgtggcaaattatatatatatatatatcttgggtaatttacagctaaacaaactgaattttaaagtttggcacgatcaactccttaaactgaaacaattagggttgaactctccaatctatagatttgttttgctctgtacttctttcgtccactttggtttgttaagtgtcaaagtgaactatcattgtatacacaaatgtatatatgacaaaattttattggtccacttaatattaataattaaaaaataattttaaatatttaaaaaatttaaaaataagaaaaaaaatctctttttttttttttttttttactttgaaaatcctaactcttcatactcagggaccctcgatacttaaggataaggatcttgtgatttcttcgacttgagccacttctcaaccttcgtcgtggaagggtgagagttcaagtaagtcttgagatttctccgtcctctggtgttttttttattgtatctaggtttgaaatttatttcagcaccaaccatgcatacattaaatataggatcttgttagaattttgagatgaggtgaatgagatttttatctcaaaactaattggcaatgggaggagtagagtgactctttttgctctactttttgga

SEQ ID NO: 302306 - DNA, 2312 bp, Cannabis indica
gtgtgatagagagtgtccttagtacttttttttaaagttttgttacagctgctttttctcacagtacaactacatctgtttttttttacagtataactgtgccaaactgacctgtaatattgtaatggtagattgttttggttaatgaaaatttacttttattaaaaaaaaaaagaaagaaagaaagtaccatgaattagttcatacactttggaaatatatcatactttatacagaaagttgtaattttgtttgttttacttctggcgaagaatattatggcattacaactcaaaattttctgtttataactctcctcaaaaggcagaaaaaagtttacaatggaagaatcgaatttggtctctggtttcgtttagatggcaaaaacctccctccacaagagtatgatcttttcatggcaacagggcttatgctaagaccatacgacattgaaggatgtcgttttagtaatccattatcaaccatactcgaggaacaatcatcatcatcatcgtcatcttcttgtttcagattcacagcacaatctgatctttcaaaattctcagcaatcaaggaaactactcgtctttcgccgtcttccatcgctatctctggattatcctttgattgatcatcacaatcaccttggttatcatcaacatcatcctcctctgccccaactctgacacgattctcactcatttgagagtgaacatcagaattccccatctgggtctcttcagtatttaccgaaatctcctgattttgattcaccggccccccagccatggtggaaacggaaccttcattaacgatgtgggcacggcaaagagggcaattggtgtgagatcttaaccaggtatcgatacaaggtatatgaaacgcgtgactacacttgggaagaagacgaagcgtttcatcttctcgaaactcgttaggcaaacagaacaatccgtcccttcgattaacccttctccttttctgtacctacaaaccgtaatggagttaataatcgactgttggagaccaacggtggtgatgaaccaaatgggatggtgttgatgattcccatctataaactcttcatctccgccgtccaattgagacggcggaagagcctcctcttcctcctcatagctatcgttcctcctcgctcggcataaaccaaggcacgactttgaaacgacgacgtagtatcccaacaagagcaaaagactggcgaataacgtgactaaaacgataacggagggagagatgtcatggctctcgtcgttaatttgatgggtaacggagagagatgacgttaacggcggtggaggaggtggtggtggttgtgtgtagtaataaccaaagaaagggtcacagaagtccgtacattcggtaccgttggttgatccatcgggtgaggggaagagttttctgtgcttcatcaaattaaaaagagtgaaacaaatgaagaaccaaataataatatttttgttttgagaaacaaaatatgatattagagaaatggaaaaagaaaagaaaagtaaggtgagtcgtcaacttcaacaaggattataagaaaagaaattaagagaaagaacagtcaacagtctctttcttggtgttcagtgaagcatattttggttgtgttaggtatatttggtgtcaagtctatgccatctctctctcacacacacaatgattcctttggactacttcatttcatatattacacttcaaataataaataatatgttattgacaatactctttaacatttctatgttggttgtataaatataacctttgctatagcatcattagtggttagtgatattcttttttcttttttgaaagaaagtattatatttcattaaaccaaatcaaccgttataagaagaacttagaagataagtacaagcattcattctaagacgttctcctatactagtaatagaagtagctaatgtatggataataccatttgctgaacatgaaatagcatcaacaaccatcactaacagctgctattaaaaaattaacatctaaaagaaaaaaattaaaaactatgttcgaattaggattacgaatccaattcacaaccactgtaaactcattttggatattggaaatgttgaaaccaaacctttgaacatagatcaaccccgttctaatagcaagaagtgttggattaaaaattttattgtgagcacatatatataatgtatatgttataaatagtattaattatgtggatgtcaaaatcttttatttattatcattaatgtaatcaacattccatttttcttagtttctctttttcttag

SEQ ID NO: 302307 - DNA, 6246 bp, Cannabis indica
aaaaataaatgaaaaaaagactagtgctaggcattccacgtgggagtatagctgagcgtgatggctgagctgctggcattgttgggatcatggtcaggagttccagtaagatttggatagtgagtggtctatgagtttttggtgatattcttacagttatggtattggggtttttgttatttttctaaatgccggagtcctgaactgtgttgacgttttaaggcacatttgctttgtttttttttgtttttttttttttttttgttttcttaacaagttctcagtacagagtttgatgtttctcttgtaaattatgatgagatgatctacagtctatgtagatgtgttcaagttggatccttatccaattctgatgatggcttagtggatgaattagtaatttgtaaatcagaaccaactgctgaaatacacaattagacttagatagatccgtgcttttgcttaagcacttgataagactttcggtttgttttaccttgtttagttgctttaccccattgattcttatttataaagtggagatgctagggataccttaaattgaacttaaaatattggggctttttcggaatgcgtcttcctgttaatttttattttattggattttaataatgtatttaactcaatacctttaaataatatgagtgcaatgcaataccatttcagttattcctattataaagatgtgataaatgtaatgatgaatagttgaagggggtgttgttctctgatttagttaggggttggaataattttttgtaatttgttaacttacaatctttaagtgtcattcataccaccttctccttgtatcgacttggcaatcattataattttgtttctttcaagtaaaaataaaaaataaatgtgaaggcatttcaaggttggttcttattacagaactttttgagcacttgtctcgtgcatttcatcttcctttcagctggagctggttgtaaattcctgtcttccttgtatgcttgaaatccatggttgtaattgtaaagtctaatctaataaatttccgctcctatcttttggagaatatgtatagtatgtttattctagatattgtataaagtagttcaacgtttttattgttgcatctaactccattcttatttcacttatatctgtcttggattcttttgcagtataaaaaagaggatgcagttacactttgggtaaataaagttggtccttacaacaacccacaagaaacgtacaactattatagccttcccttttgtcatccagctggaagttctgctgctcacaaatggggtggtcttggtgaggtcttgggaggaaatgaacttattgagagcgggtttgagataaagttccaacgtacgtccacatccttttaatttcttaaagttatatggagctggttagatgaaaatcactaaatttcattgttttgcagaaaatgtggagaagactgtcatttgtcaacttgaacttgatgaagcaaaggttaaacaattcaaggatgcaattgagaatagctattggtttgaattctttatgggtatgttctgtacatactcttagctgacaaaattttatggatactatcatgctattatcatacctattggcttagtgatatgtgctcggtgcatcttgaatggctactatatttccaaatttataactaaaagcaggcaagaattcttagtctacaacttaggtagtacattaatgttagcaggaaacgggttcttatggaatagcagttgaaaacttacctgctttgattttttgacagtttattttggatgtaatgccatagagaatatgctcaaaataactattgtaactatgtaagttactcatggtgtatttgtacttttgttgtagctagtaggtgcatggtttctgaaaatacatgacatgaatctcatattcgcaaaagtgatcaataattgtgtgcgtattgatagaatggggtacaatattgaaacaaaatggtttttgtcttgacatttcatattagtttgtttacatactgtgattgccagtactaagtactggtttagggttacaaaagaatggtgcttgcaacttaattcattactgcaatttaaggatatgtatagattttgtagaacaaaattgagatttatacatttgggtagaatatttgcataagtaaatatagagaagttgttttaatggcgctattggagttgagagtagttaaacaagtaggacagtgattttattattaaagcattgaaagtaattaaccaattgtatatgctctgagcatattgattgatatcccctcgattcccttattttccaaactgctagtgctaactcaatatttgttttgcattgtttgacgctatctgccgtggtctttgttatgttacatacaagttcagacgatctgccattatggggtatgtagtgatctcattctttaaaagttcaagtttgttattcagtactatggaattgttagtccttgcaattaatttctattatcctcttctcctttttgtatggttgtaggctttgttggtgagttgcatcctgataagaacagcgataatggcaagcatgttctgtacacacataagaatattaatgttcagtacaataaagatcaggtttgttggtctttaattcccatgtcattttctacagttagctgttttagctgtcacatgccatctgtatcatggctaagctttctatacatgtagataattcacgtgaatctctctcaagagagtccaaagcctttggaagttggtcgaacactagacctgacatactctgtcaaatggactccaaccaatgtcacctttgcacgtcggtttgatgtttatttggattacccgttttttgagcatcaggtaaaaatataattaggatcattttatttctttatgttacctcatgttgctttgttaccagtttccctgtaatcatgtatgttttcactttttataaatgtagagcttggttttagtgatacgtataatttattcatcatgcagatccattggttctcaatattcaattcattcatgatggtcatcttcctcactggattggtttcaatgatattaatgagaactttgaggaatgactatgcaaaatacgcacgagaagatgatgatcttgagactttggtatgatatcttaatttatttgtaaattcttttcgtgcaattttttaactactgggaggtgttttagcttgtaaaatgtggtattgaatctgtattttccacttttcaggaaagagatgtaagcgaagagtctggctggaaacttgttcatggggatgttttccggcctcctaggaacttagtgattctttctgccgttgtaggaacaggtgcccagttagcattgcttgttctccttgtcatcttgttggcaattgttggaatgctatatgttgggtaagtggacaacttaacagaatatatctgcactcattgttgagttttatttttaatctgccttggctgatgttattaattttattcttctttgcatacttgttttgcattatgagcatatgagcattgatgtttacacacctcttacttaattattgctcactgttggccacaacaacgatatactatgtaagaaggaagtgctaatagagttattaaagagcaggacatattcaagcttataaagagccattctaactagtaactaggcagctgtgtcataaaaacttcaattttaatatcaagataaatgttgggttggaactggttctggactacaatgtgctctattgtagttccactgttctcagtaatttatggagtacaataagtcgtgctgtatggacatcttgatatgttttctatcaagctcattgttatattatgaccttttggtttaactatgacaggatcatttgcctagtcttgtatgtcttactcatttttggtatttcaggagaggagcaattgttacaacgttcatagtatgctatgctcttacatcattcatttctggttatgtaagcggtgggatgtactcgagacatggtggtaagatttagtaattggtccacttttatatttgattttttcccagttttttctagctgtgtaatgatgttaaaaatttctattaatgcttctgtagcatgttttgtatggttctgattctgtgaatctgttttggccttttcttgttatttaacttctgaaaaattgacaggtaaaagctggataaagtcaatgattctgacagcatccctatttccatttatgtgctttgggattggatttatcttgaacacaattgccattttctacgggtctttagcagctatcccatttggcacaatggtggttgtctttgtcatttgggctttcatctcttttcctttggcacttcttggtacagttgttggaagaaattggagtggtgcccctaataatccttgtagagttaagaccattcctcgacctattcctgagaagaagtggtacttgacgccatctgtagtctcattgatgggaggacttctaccatttggcagcatatttattgagatgtacttcgtcttcacatcattctggaattacaaggtgcgccccagaattgttgcatagttaataaaatattctcatttaaagtatcattagataaagtaatattcaaatgcaaaattttagttttcaatagagtttccttgtgcaaaatttgtggacttccaatgattgactggctggtaagagtaagatttgtacagtgagtaaggtttgggatatattcttcagagattgatgtacctttttatttttacttattacatgttgaagttggggttgtcagaaaaagtactggggggtatttagttaagatggtttacttacaagtatttgatctctatctacaaaatcattgctccattctcgttggaaagagtcatttatacatagtgcagcggtgttctgaggggcagatattagttgctaactaataaactaaatattctgaagaacctgtatatgaaatgaagaatgaacacaactgtgcatgaactttattatcattagggctttatatattcattgttttccactttctaaatttcatttaatgcatccttgagcctaatattttgtctttatgctgtatggtcaacaggtgtactatgtttatggttttatgctgctcgtttttctgattctcgttattgtcactgtttgtgtgacaattgtgggcacatatttcttgctgaatgctgagaactatcactggcaatggacttctttcttttcggctgcttcaacagccgtgtatgtgtacttgtattcaatctattactactacgtaaagacaaaaatgtctggcttcttccagaccagcttctattttggatacactatgatgttttgtctcggattgggaatcctctgcggtgagttctttaaattgtcatcaaattttgtgtcacatttcctttttgcatttgattgtattaatgcactttacttcccattgatttcagtggatggtgcctatttttgttagtccctatttaggttccgtgctattatctttggcattactagtaactcaagtaaacttggcacatttagtgggttaatactaattagtgcatatgaatcttttaattaattttatcgaatgttttgtatgcatggtaaaatcagcccccacatttttgtccttattcataagatagatgtacagacacttggtaccaatatctaagcttgtttgctttagatgagaggcaatgcatgatataaatttggttttatatttatgctgattatttactttataggtgctgttggttatctcggctcaaatttgtttgtgaggaggatctacagaaacatcaagtgtgattaagatttcttgaagaggaacagcctgatagagcttcctgaattgcactgttgataaaatacagttggagaggaacgattatcggtcttatatgaagaagccacagtatcatctggttgaaaggatggtgttatattaggatgaggatgtattcttctttctctggttttggggaagccttgagattttcctccttttttttgtttcatttttttttaactaaagttctttttccccggatgtaagtgaaggccttaatttagaatgatgagattattctgtactcttaagaaaattagcaaattagactgtcatctttttacttctttatatttggaccctttt

SEQ ID NO: 302308 - DNA, 2769 bp, Cannabis indica
tcatttctaaaaacaattttttaaaacaaaaaacagaaaacaataccaaacgtgctctaagatttctatgcagccaaataggactcacctcgtctataaaagttaacgatgtatggtccaattggcatgactcaaacagccatttaagttcaacacgagcgtttaattcttccctcttcatgttgatgactggcacagtgcagtattctttctttttctgtgtttcattgaggtagaaggcgtaagcgatggtcaaagcaacagagccaacatctgtaaaaagcagagtcaataagaacaaatataaagattgcaattgttcagaatgagtatgattcactcgaaaaacataaaacaacttcaatttttttattgttacttagccttatgcttatgaatccaaatcattattaccagagacatcttgggcaattacagcatgcaagaatcttccaggtacgccagcattgacttcaacctttccagctcttagatataaatttagtctcttagcagtttcacactgttcgacaacttccataatcggtgagattccattgtaaaatgatgctgcacattgaggaagttgaatacttgataggtcttcttttcttttatttactggatatgttttttcgattggttttgaggaaccatgtaaggtttggtgatcttcatatttcttaagtgttaaaccatgaagctcatttatggaatcttgtaaacttctaaaactgaattccaaatctgatgaagctcttgtaaacgtatttggagttgttttggaaactttttttgacttctcaagagtagcctgattaaaaggctcaaaattggactttgtcattgaatcttcgaatgaggattccatggacgtttcatttgcataaaaatcaaaagtttcaatctttccatgaccaatgtctgagatagaccgtggaacgttgtggttgccagaactttttgggaaatcaaaggtaaaattctgatcattttgtttcaatagacccttataaaatggattctcacgtttacgagtgaatgtttcctgtaaataaagtaaaaaagaaaaatgcataaaatgaaaaatactagattgacctctaaaacacctaacaagcactaaaaccttcattgttaatggttgacatctaaagcatatctccttttgaaataaatataactttgataatggttgttacttgttcctttctcagtttagtaactcagtaagtatgatacagcttcccctaaggatttggaaatggaaaaagtaacaaacatagagatacttatgttcagttataataagcacataacacgacgtgtgtactgtggtagggatgcctgtgctcgcatccttacttgcttgggtcaagaattcaaatttcaccataatttctctttggaagggattatacttggttctttgggaagctagcttgcttggtgcattatggataacccaatcaagaaaagatgacccctatagttgagacctatagagacgtggtctatgagattgtctaaagactaaagagttagtgttggggtcacaaaaaaaatttaaaccaactgtgaattcagatgaaagatgctatttctactagaaatgatttaggagttccaatccatagtaaaataaaaggctactcttgtaatgttttttgctgagcatcttaggataatccattaatccatacttgttccctgtacatttaacttgccaagttttccattaaagcaaataagatcctacgcataattaaagtttttttttttttttttggaaaggacataggcatatagcatttaaaaaccacatcgacattggccacccttaatttaatgaagctggacaacgagtcaaatatctatagtccaattatataacattacttatactaccaaatatttcaataaaatgtcatattaaagttttagtagtaaaccaatgtaaaaattacaattaaaacgtgattatataaatttttttaataaaatcataataatgtaatttttttatatcatgaaaaaaattgtctcaaataattttattaattttattttcggtaaaatgttagcaactgctccaacctaggtaaaaggaatgatggttctatttatagaaactagaatggttaatatcaccatatcaaataccagaacatatgggacactattgaaatgttattcattagtaaatacgtgttgttcttcttacctgttgctccctagcaaaaccactttgaggacccatgttagacaaataaggagagaataatggattaggagagagtgatcattaattattcagtggctttatgatgagctttttattagaacggctgagatgaagagtaaaacaagcaaacaaacaaacaagacaagatccttgatgaggttctttgaggaatccgccattatagtaaaatccttttctaagatttcttgttttccacttttctgatttgcctaggaattttatttttctttggaattttgtgtttgcatttttacaggaaaattattgtaaatgaacccaaattaaagaattatattagtaaatgttcttatttcaaaactataataaaattgtcttttaaaattatttattattaatattattttttaccacataaaaaaattgataattttttttagaattagaagcaaattacttaaaaattatggtatatttatgatagtttggttaaaatcttttttatttaaaagttatgtgatgtttttttaaaaaaaattatgagt

SEQ ID NO: 302309 - DNA, 4296 bp, Cannabis indica
acagataaaagaattaaaagtgatactacattaaaatttaattaatacttatttttaatttttataaaagggaaagacctcgttaaaaaattttgccctaaacctcttatcatcttgagatacccttgaattgtataattttttttgtatgtatgtgtacacacataaatttatactaaaacactagactacatgtgatattaatgttttttttctatttaatgggattcattttactaaaaaaattaatttaggttactagaatttcacattttattttaatgtaattaaatgtttgtgtaccaaagtaataattatatacaatgatatcacattgtacatttgtaaagttgtgggtcttatatgaagcaaattgtgttattttgaatatcatatatactttcgtgcataatttttgtgtatatattcttcaaaaaaaaaaaaaaacgaagaagaaaaagaaaatcgtagcacgtaacattcctcaaaatatacatagtctcatgttaaaatcaaacgaaaaacaatgaaatagtacgtaccaactttttgatcgacatgcttagctgctatgttgttgaaagcatcctcccaatttggtcttgagaaatgggttttgaatcttgtttgtgacacagcatcaagtccattcttggcatgataaagagtttgaagcatagtaatgaaagctgagcgagcatctccttcttcatatacactagtacagtagttgtggacctcaatcatgtggtcgatgtccttctcagctacctcatccatcgcacccttgaaccattggaacgagccttcttctctggagctccagtaaaagtaggctcgttccgttgcaaaactaggttttttattttccctcttatttccactctccatttcgtttaattcgttttcattcttttgcttagtcttgttaagcacatcttttacaatgctgatgagaggagtggcgccaattccaagtcctacaagaaggatagttttgtactctttatagtcttgtgctggcgcaccgaacgctccatcaattaagagcctaaaattaatcaatattctagttgttagaataaagaaatattattgaaaaagtaaaatattattagcgtgtatggcaattaagatgtatatgtgcatatgaggcttcatttcattgataatgagtggagaatagggtatggtattattattaataatatttccacacacatactctagcgtgagtaaatgagtttggaagaacagaatattagtgatcatattagtaggtataaataaatgaagaatgaatgaatatgttctgaaatagctaaaaatagtgatcgattggatagtacataattagatgtacataccttggtagaccactgaagccactttgattagtagatggagactcacataactacaacaatacacatcataccaagattatgcatagcattatttatatattttattatatatatatatatatatatgtatttctggtttaaggaaaaaaatatatcagattttgattagctacatagaaaaatagattctaacttttgagaaagtggaattgagtttttttgtccagtcacccgatccgcgaatgtggacgcttaagtaatcgtcatcaggagccgaagtaagtgaaaagggatgcctgatttaaacatatatatattatttataattagatgatcaattattatcataatcaaaataacaacaatatagcaataagaatacagctataggtttcaattactcaagttaccactcaaaaggagatataaatgaacaattcaagtatatgtattgcccactactgtattcaaatccttgaggtttcgacatttgtagggctagaacatttccaggaaacactttaaactgtacattaaaaacatatggtattaatcttttatcagtattactttatatatatacattattccttggaagaaagaagattaattaactatagttgcatacctcttcgatattcactgcttggaaaccatatctaaatgctcgaattaaacgttcacaggcatataaaaggattggaacagctacatacatccatgtctaacaacaattttattagaacatcaaaattgtgattttagaaattaccaaaggaataatatttaaaagaattagttgttcttacagtctttttgtaccacttcttagataagtagagatagtaaccgtgaactagaaagaggatgtaaacaatgacaaacaagtggtgagaataccaaaaggtgttgaaaccaccaaacttctgaagggcctcaggtaggcccttgagggccttaggtagcctcttgatcacggccttgggtagctttcgcttattttggcggaacaaagatggtgcaaaggtgaaagcaacgaccattaagaacaccatgaccaaaccagtccacccctctgtgcctttcaagaaccaccaatagttgttgggtcgttctttcccaaagaattgttccattggcttatattgctcatcagttgcatgtagcagcctaggaaaatcacacgttaagtgtgcccctgcatgaacaccaactccaattgcaatcccgccagcaatcacctataataataaatatttatattaaataacacacaccactacttttccataattaagaaaataaaactgtgatatctttatcaaaatagagacatatgtaattagaaatagtatagatgatattgccttgtgaaagttgatattatcattgaacggaaccactactcccaacattgtcttggtcctgatcaatgttatggtatttctacaaacaggtaagagaattagagccatattaaacttgagagtctcggcagcacctttagcagcggtaacacaatagcccatcacttcaaacacggctcgatttttgtattggataaacttccacgtgaaaagacctacacatatggctagccacaaccccactacccaaatacgcctccagttctcctttacaatccaaaaacctctccacatgttgattacaagttgcttgaaccgacctttgtggtatcgttttatggtgttggattctttattctcatgatccaacttcttcttccttgggttctctagaatgccttgttgaagtagagtttccaattggtatagctgcatcaacaaagtacggccaccacattattgggcttttcttaaaagcagagctagccttatcaaatgaaaaacttgtacgaggtattttatgattttttttatatatttaggaataaataaaaattttacccctaaactataaaacttataggattttgctccctgaattatttgtaaagtacttgaacttaattaatacctctctccttaggctgaaacttaaaggaattgagggaaagactcctccaagagtagagcttaaagagtaggccatgatggtttagtttgatatttattgttacttagagagtcctttttagatgatatctacttattttcacttaagtattgtgtttgtttcgacttgtttccttctagcttaaggttttaacaattgcatgatatgaattgaaataagaaaaaacatattttatatgatgaagatgatagatttagcttttgagtctagaactttatatattatgagtcaaaagtactaagttgaaaatattcagcacacttcgtttatgcttaataatgcaattttgaaacttcaacattttgaaacatgatttcctcactttacaaacttacaaaaatagaagttatagaactcttttttagctctccatagcatcttgagttgtctaattgtgagttataacgagagaggtactgtcaaaatactaattagtagctgtcaaagaatactaaagagaaagtcagactcttggcctagaaaaagtccaagtcccagcctagacctgatagttcatgcatatatagctaatgcatgttaggccgcaacctagacatatgttggtgatgacttgagatgtttattaaaattttcttgtccaaattaaaatgttaaaatgggactagaaaagaaaaattaggagaattagttttggtaggctccttcgattaattgcgtttttcagaagaaaaatcttagaaaaacttctagagaggactatattgtatcaattttagagtttttcttcatcgtatctttttaaatgcgatttttatttatatctatggattctaaaactatctacatatatacagggccggccctagtatagttgggctaggtccgtgcttagggcccatactttttgggg

SEQ ID NO: 302310 - DNA, 1435 bp, Cannabis indica
taaaaaattgtcacaaaaaatagtaattttttgtggtgtcatgattcccataaaaattgagttgagtataattatactatatatgtaattactaaaaattttattttaaatattaactattaaaaatattatttttctaatgtaattatcaaccgtttttcaaacaaaattttaagaatttaaatgtaattaccattttatatttaaacataatttgtattttaaaatatagtatatttattaaattgtgtaattatcgctttaataattacaccattactttcaaacacactttcatagtttgttggatgaagttattagaagggtttgttttcaatgcatattagcaaaggagtgtccaacaatagcacagtataaaaaaaggaatgtgaccccttaaaaaaggtcaatattattagtaataagtaatgtgttgtctatatagggacagctctcaagtttgaaatagaaaggatttgagcttagtgttttggtattataatgaagtggaacttcgatttgtaatgattttaagatataaatatttatatatgctcatgacatttgatcattcaagtgggttcaatcaccacgaatcacgtcatcatctccttaaagttattaaatgattattgttttcttcttcttcttcttctttactaaagttccaatgattatgcgaatgtcacatactttaatcaagaaattaatcctacccttgtgtgatatatatgcaggtctttttgtttcgattgtatcaaacacagtatttacctaattataaaattttattataggataattgtgagtggagattgatgttgagaacaaggatatgtaatatagaggaatagaatgaactgtttcattcaattctttctctttttttctttttgggaaaaagtttcaaccactaaacactaaaagcaacaatacaataaacacgtttaaatatgagcattaggagacaattagcagctcattaatactttatttaatatttatgattatatgttcattagtagaaaataaaacctattttcagaattagacattaacgagataatttctcattttaatatttttatattttgtgcctaataacaataaaatttaacgatttgaccattagtgttactttggtgcactttagtattttagaattagcagagcaagttttatggatagtttgaatattggagttatgcgaggtaattagttatgactattttactcctaagttttaaaagttatttaaaagtggaaaaaaagaacaatttggtaactttagagttataagtttgatattagttgcccttagtggaaatttttagggaaaagactaagtcttttgtgatgaatattaagttgattaaaacaaaagtaattagaggataaacatcaaaaaaattcaagaactttctctctctctctc

SEQ ID NO: 302311 - DNA, 1209 bp, Cannabis indica
cacataaaattcatagtttgaatttattactttttttataaaaaataaaaagaaaagtattttatgaggtattttagagtttttattttatcttacataatatgaaatttgtaaaatacttttacatgctacaatcatattattttcgggttaaacgtgttgacctgaaaatgacatgcactacaaaaaatattagtcctataacgagaatataataccgagttaagtcatcgttaatgtattttcgcaccagcaggagaatgagcggttttttttttttgtttatgttcctctactgaggatatattctcggtattagttttacccaggacattttatttctttttactgttcagctgctcttttgtcttccctaaacccacataactgaaatcccccaatctcatatcagaccagttttcttccttctctctcagctctagcgtcctcctcctttgacgatattttctctcaactctggcagtttggtcctcaaagatacataataagttgtcaatatctatatattactaaatatttttttaattattttttatgttattttttccacttagagtttttttctaactatatgtaaattaattaggttgatctcaatttttttgttagcttgcctgactttcgactttcccttcccttgtagttgtggaaaatgaatcaaattaaaatcaagtttcatttattttcttctttctttagctattttttataagattttcgcaaaacattattatttttctctgattgtgaagtttaaaattaatttttgtttatttctgatttggtactgattttattgttgttagtgttattttgatttggtattttattttatctttaattatatcaactttttctcacaataggggataaaggtatttcctttggtatactacaaacttgacgtcactttgatcgcttccctttgttattgtgaacttgtatgtaaactttgttagcatataatctaagtcaagtcactctaaatcaagtctaagcattattctcctctaattacttgccgattaattgattaattaattaattaaatctcacttctagcctagtgggagattaaattaatctttttactaattatattattataaacttaggtaaaaagcatatatatagggtcagtttgacacagttgtgctgtgaaaaaagcagctgtagctgtgctgtgag

SEQ ID NO: 302312 - DNA, 2261 bp, Cannabis indica
aatttctttttattttttattcaatgagctacttacatctactttatgttttttttttttttgacagtgaacatttcattgaaataaataatttttttgtaacaaaataatagaaaaaattcatataattaagtttctcatccacctgaatttacgcattgtcatggaatacgaacaactaattcttgtgaggtcataaaatagagatttttctgaaagacaaacttgaaataatatgtaataaggctaagtcacgaagcatgtggctcaatgccataaaacaatcgaagttatcgaaacttaaatgtagaccaagcaaaagattgctccaataatatcaacaccactatatattttgcttgaatgatattaagggttgcaacagaactgtgaaaaaaaactaagctgagtgtttgataaattatagattttaaagtactgagttgttaaaatgtaatgataatgctctagtttattaaaatcacaaatatatatataaaaaattatataatatttttattttctatatatttttaattttttttcaaagtataaatttatatacatttgaaaaaataatttatagtatttttatattatattttatcaaatgtaataaaaaatcagaacctcaagtatataagaaaaactctaaatttatatggtttgttaatattaaaataaaatataaattattttttttaaaaaaaataagagatttaattattatttttttattataattttattttaaatatttttattttctaatatataataaataagtacatatagtttttagttgtcgtttttctgtaaattcttcaaaaagctattttttaactatttaccaaacacatttttatcacagttttttgaaaaagcagcttttagcttttctaaaagctataccaactggccctaataactccaagcaaaaatcttctccaatgaaattattaccgccatatattttgctaacaaaatactacataacgaaactaaactcaacagtaacacatatacaaatataagcaacaaaatgtggtggcaacagtcgagaaacgacagtgatccaaacagaaatagagtcggcaatcgagactcatggcttcggtaaccgagtagtgttacatgcttaagactttgtaatgtaaaactacatctccaatgactagatgcagacgtgttttcgaaatcagctgccatttttttctcaagaaacatgcttaaaatacagagcgtgagcctcacgactcccttaattaagcatcactcttcggcgagtcctccgtgatatcaccaagaacgacaaacatggacaatcccttcaatctcctaatggcatgtctgcgagtcataaacacatgacgaacctttggggaaagactacaagctatcgatactttcaagttctaagagcttgggggtaaatgttatcattgttaacggatgggatttacatggaacctgtagaagagtgccacgtcagatcatatactgatatcacggactctttcctaagataggattacataagatatcgaagtactcggaagaaggattcccttgagaaggacaaggtgattcttgaagttttagtatgatgctttcgccatttggaggcaaatggggagcacgagcactccgggataatcaagaatcgactatcccaagaaggccttggctggacttcctggaagctcccaacaacttaatctggaactacacccgatgattatgctttgtttgacaccaagtcggatcctgtcccttgcgtcagaccgtagttgtgtcctgtgtttattgtccgactgcttgtctaggatattatttttaaaggagaaacctttcaacgattgagtctccaagatcgccaaatctgaaaaatatttttattccacatatagctcatattacattcacacatgctatataaatcttcgtaatttataaattatgcttatttattcacttatagcaaatttaatttttttgctgaaatagattacttattatctaatataatataaatataaaccctaattagttaacattagacttattgagatattacaagcatcccctccttataaaaatttcgtccttgaaatttacctatataatttgggatacagtgcctgcatttatgactaattcccaagtcgcttcctcataaaataagtgtgacaatcagtagtcctgttatccataaggggaaacatcaggtaagttatgcaatcccacaccgcctggggaag

SEQ ID NO: 302313 - DNA, 1681 bp, Cannabis indica
accctgacactcatttaatgtactttgagactcatctaatataccacggaatacattccgtgaaagtacatcacggaacaaaatcatatccctatatatatatatatgtatataatttagctaccccaaatgaaccctttagctttaatacatatttttcatctaaagccaataaaactattactaatgaccacttttagaggcacccataatcataaaattttcaaggtttctttaatgggtctgggagaacaaaaacacacaagctacctagcccaaaaatgaaccctttagcaaacacctatttttcatctaaaacaaatatatggaactacattatatattacccaaatcataattttttttcttttttgtttgtcgaaacgtgagaagctaccatagttaaaaattagaccattcctggccattaaaagagttcaagagggagagactccaacacacagcctcccctgaaaaaaacaaaagcacttgcaccacttttgccacataatatttcataattttggagattgttaccgttgtgtcattcataatattatatatagtaataagttttaaaactctgaactaaagttttaaaactctgaactaggaacaggctgctttaacctcaacaattaatctgtaatacattttagttttggtgaatgccgaaagcgttagtcccacattgcttattgtgtggaaataaattgtgatatataagttaaatgagctactcctctgattaccaattaattttgggatggaatatcattcatcttattcctcaaattctaacaaaagcagctgtaggtactactaataaattaaattttggcataacaagaaatcatactgttgacaagatgagtatacagtagtactgactaatatatattgagcagtgtaaaaagaaatgcatggcaggaaaatgagctgtgtggcaggcaagcaagcatatattataatttctttgcatacattgttttgttttcactttttactcaaaagtgatgacaagattaagagtattgatctttgtataatcataacattacattgttaaaattcagggctaaatggtgcagtgaaatggaatattattgagtaaataaatatagaaacagtgtactgaatcgctctagttaattagtacaactgtacaagcttatttatacgtacacagattctgcaggccatatgtatatatatatattccatgctgagttttctttcttattataatatttctctctccctccaaaggagtgtaaaaaggaaaatttaagcattcttatggggattctttatcgacatatccatcagccttaatcagctcatgaagtgatgttcatgttcttagccagaaagaattataaattttcccttttgtttttttgttgggtttggtaatattttttcaattagttttttattttttatttagattagtaaaaatatttttacaaaacgcattttataaagctgttttcactttttaattttggctaattgagatttttgttctttaaactttaacatgccccttgaattttaaaaattctccctaaactattaagattgttagatttaaggacttttatttaattttattcaattttactatttcagtgattatttatgtactaaaacatgctctccaaactttgatatctac

SEQ ID NO: 302314 - DNA, 1752 bp, Cannabis indica
aaaaaaaaaagtataaaaaaattttgtctttacaaattttaaataaagatatttacttatatataattgcatatttttgagtcatttactataatatttgtttttaaaacacggacgttggcaacacatatcacatatgttgagtaagttgtaagtaataatcaaacacaattatggttttattgaaagatgccgaacaactaatttactaaattgtatttgtttctcataaggttaaattaattagaaactcaaacactgtaaacgtatcagccaatgtttctttattcagtaattagagggctaataagtacaaacttaatttattatctcttattatataataatttaagcatacatctttgatcggtaaagacaaagggatctgtatcgacgacccaccaccagaagtttgttgacaataatttactgaaattgcatgtgtatgaaaaaatagatactttgtggcttgcatgtcatatgttgcatcacttaattttaaattaatcctaaagtacttataatgaacctgttaggtgattagcatctcaaaatgaaggagcataacatagtgtttatatatagcaaaactagacgcatgcatgcactttatacatgtagtaatgtactttaaaaaatacagagtgataatttctgaaaaataactaaatataaaatttgagaaagataaagaatgataaatgctaaggagcaccttaaggtgtctaataacaaaaggtgacatattgttattggtttaatttaatattcactctcatacattaatttattaaatacataatgtgagagatgatcaggcaatatataggaatgggtattggaaacttattgatattatagattaaatcacacaatataaaactgaaagtaaaacagaaataatcacaatttacaagcttcccctacatcaaaaatatattcggatagtgcttgggttccctaaaattaggtaaataattccaatatgaatctcaaaatatacaatatccacttttgtacaaatccacacaaaacaaagtattaattaaagattcatacacaatatatttaccctaagtactcttgatgaattcaagaccacaaatctaattccccttagatctctcaaagctaagatccccttgcttcttatttatcgaaatcccttcagcaacacaatctgaaatcccttcaaacaaaacaggacaaaaaattcactttgctcaagttttcttttccacataacacaaagtatagaataaaagaaaatgccctagagagcaaacatcaagaatagattctaacaaagatgaagaagaggttagaaaaagctaagcaagttatgtactcacagtttataataacagaaaccaacttattacagttgcctttgagctgttacaaatattgttaacactaaatcaagaagctgaactgctaacaagatataaaatgaatccagaaaacatatgcatctaacaagacattttgtattaattataacaagagttatacatatactccctgagatacatatactaggccgattaattaaataaaagaagtccataatttgtcaattaagtctacattttacacgaatatactctgtagatgatatctacgcacaaatttgatgaaacatgctaaaagaaaaaggccagaacttgacacaaatttgtccaatttgtttgatatatgaatatatatatatatatatactagtaaaaagttacgtgcgaggcacgtata

SEQ ID NO: 302315 - DNA, 2282 bp, Cannabis indica
taggaccaaccaaccttcctactctgctgatttcctggaaataaatagacacagaacatctctctttgatcagcttcatgaactaatggagattgcaagaaaacagtaccatgaatgctgcttgaagaaacctaagacacatgaacaaactagaataagaatgcttggaatctgcacacatccaaataaaaatgcatttctgaatatccctttgcagttagtttcaagtggttttacaatgtaaaggaccatcattgaacaagttagtagccatatagtgatcagaagaaacctaagacacaaacaaactagaataagaatgcttggaatctgcacacatccaaataaaaatgcacttctgaatatccctttgcagttagtttcaagtggttttacaatgtaaaggaccatcattgaacaagttagtagccatatagtaatcagaaggccgactctaaactttattctatcaagggcctaaatttaatagttattatatgttaagagggcggggggtagggggggatgtggtgtaaaatacataaagggctaaaatacaaatcaaattacatattaaaaaaattgaactgcctaggacccatttgggtccaccactgtataacgtaggtatatagcaacatcaagatgaagtggaagcaaaaataaagttgagtcttactgagtatgagaagctaacgtctgtagttgaccaagaatagatttcagattcgtataaaaatcccatttttcccgcatttctccttacttgctgaaaattaggaatttaaataagactacataagaaaaataagactattacaaagataaaaggacctaagaattttaataaaaatgcacctttaaaggatgactgactgcctggcataacacttcagttccagtaccagcattcacattcaattcgatcttctctttctttgaaattttttttacaacaggagtgacatagtcgggaaatgtaaagggtacattcaaagtgaactgaccatcattgtacactaatttctgagaccaactcatgctaatagagagaatggaacccccgtcaaccttcaaggagaacaagaattgatttcttttaagtaaaaaaaaatgaattaatgtattcccagatacagaagaaaccaacttaaagaatgaatttgcagtaaaatattacaagtatgtacctgtggaactgtcatggtaaatatatggggcttcaggaaacctccataagtagaaaatgacttttctctatccttatcgtcttccaattttaccagttgcgtacgataggattttctagacacctcaacctcaacacctagaattgaaccctgttagccaaataatacaaacacattgagaacagtaaaaacaaacaaaaaggactacatttgtcagtgacgaaacaaagagagagacaatagagctgttattcttacaaaaaacaaaaactagtgaatatgaaaatttaacaatacccagcaagcaaactaaatttaagaaaactcctcgtgttttcatattctttaaagcttattattctttagattaaaaattaggattatttcatattgaatcacagtatcgttttcggtttcagccactaagaacagcaactagcttcagcattttcaaccacataaaggaccaaagttggcccagaagaactcctactttacaatctaaactgggacccaaatacttttaggtagctatagcgtaagctaacaccaaattcacgcattgactttcgaaattccaaaattctccagtataaatttacgcacctggtcacccatggggatcacaactcgacagctacagctcttactacccataacacaatgaagcctccaagatccaacgaccctcacaaacgccgtgtccaaataacaatccacctccagctcaatcccgtgcatatgtaacggaataagcgccggatgatcactcctgccatgcacgtgcggctggtaactcggaatatctggattgtccacaatagccgggtcgtagatcaccgcatacaccatcggcgccgtcggcaggtatgagtgagtccccggcttcatcatcgacggcaacggcttcggtggagccactgctctgtctttcccgaagtaaagccgcttagaaagcctgagaccatcttccacagccttgtcgaattcctccgccatgtgtacggacaatcaagaaaataaagattactttttaggttttttttttttgtttgggttcggagaaagaaaaaaaagaaaatgtatatattt

SEQ ID NO: 302316 - DNA, 3051 bp, Cannabis indica
atgtttttcagaaaaacctattttatgagaacaattaatgctaactgaacacacttagttgttttaacaatgttttactttttaaaacgaagaatgtttattaattagtttatttgtaatcaaaataaataaataaatcgtactagtgatttttattttttgtttagatataaatatatgattgtatatccaaaacttagttgttttaatgcggccttcttctgaacaacatatatatagatcgtaacaggctctcaaaaaaaaaaaaaatcaataaataattaaaggttgctggctcaatttagactttattgtttgtttactgttctaatcatcaatcatctatgaaataattgaaggtaaaaagaacaaaaaaaaccaacccagataagagtaaaaattgggggtttcaaagtgtattagtgattagtaattagtaatccttattattattattatgcagaatgaaaatgagtggccagtgattaaacaattaccatcatatggtaaaggcaaatacggggaaactggacgattcagaagtcttattttcggaacaaatctcaatgacgtcattatcacgggtatataaatttggtaattaatttcatttttaattatatatgtggttaattaatagttgtgattaaatgatgaacaggggacaaagggacgattaatggccaaggtgatatatggtggaagaagtcaagaactctaaagtacactcgcccctctctcatcgaactcatctactctacaaatattcagatttctcgtctcaatctcctcaattctccctcttggcacattcatcctgtttattccaggttttcttataattaattatatatgtattgttttttgttaattaagattatcatatttttgattatttatgttttatgaaatatatatgtatatgtatgtgtttgtgtgtgtatgcagtaatattattattcaagaccttaggatcattgctccaataaactctccaaatactgatggaatcgatccaggttgacatttctactactatcctatatatatatataatgattttatgttatttttcactttgatcattcctaggttaatatctattcagtttatctttttgctgatcgaaataaaaataaaaacgtagagtcacatcaacacagttgcaaatttgtaatatcacgacaattcatgtttgtggggcttttgattaatattccacgcaacgcatccatctcccatgttcatgtattgggggcggctctatttaaaattattcactaaaataaaaatggagagagctttgcaaaattatttttgtttgataatagtttttaattaaatgtgaaattattaattttaaatttataaattttactcaatacaattatttccccgctttattgttaactttaaattttcttttgtgtgacttgttgattgtttttgtttgataaaaacattaattactttttttagtttgctaaagttacatttggtaatacttttatttttaaattttttaattacaaaaataattttttttttttttgttttaattttttttttaaaaaaataaaaatgtgttctataacagcttttattttataatttcaaaaacaaaaacaaaagtgtgttatgtaacttttattttcattttcatttgttgattttatttaaatcaagactgggtccgggggagggtccaagtccggggcttggttcgagtttgtggtttccaaggtctaagttggggtttgagtctaaaatattaattaaaaataactatttaaaaaaattgaaagtaattttttttttttaaaaaaaaaaaaaatagattcttaactgaaaaattgataagtaaacacagttatatagaacatgattttgaaaaatattttcacttttttaattttaaaaacaaagaactaattaaaaaagtattaccaaacacaccgtaagagttgcacaatattaaatattaaattttcggtcggattgggatagcttccaaaatgcaataattattttttgctattggatggtatccaaaactttttataggtgttgccctacgatcagttagcgataatttctaaaaaaaaatttcttatgttatatggaattcaatacttaagtacaccaataagtgttgttgggtgcaaccaaaattctacattgactagaaataagaagaattttgggtatataaggatggatactatctctattggtatgaggccttttgggaatagctacccaagaacaaaatcataaggattaggcccaaagtggataatatcataccaatgtaaatatagataacgtgaacacaaacaagcactttaagctcttagagcatttatttatagacttgactctttaactgaattacctgttaacaaaaataacaattctccaccttgatagataattcaagtgaacaaataaacgaattaaaaataacaattcattctgcaggattttcttcaggggaaatcttgttgagttgaactttaccctcattgatgatgtctcacagtagatccgaagcttcctttgatcaactcctaactcccttgaaattcctttgagccatagtgcctcttttactgcttcagtacaggctatatatattcagcctctttagtagatagggctacaatgaattgcaagtttgctttccaacttattgtgcagccatttagctgaaaaaactagattgagatcttctctaatatagatctcctacatagtatgaatccacaaatccccttactcctgatctgtcttggtccgatccatagattagccccacattgattgttccttgtaaatatctcattatccacttcactgcctaccagtgttcagtccctggttttcccatgtatctgctcaccatgcttacaccataacacaagtctgctctggtacataccatgaggtacatgatgataccaacaacacttgcgtatgatactgttgagaatattttatcaggatatagatttactaacaagtgtgttgaattaacatcctaaatatgaa

SEQ ID NO: 302317 - DNA, 897 bp, Cannabis indica
gagcgtgttaggtttcatgcatacttgaaatgaatggtttaattattttttatgtattaaattagtagtacgtatttataataaacatacaaagactattgatacaatttattctttatttaatatgaaatagaataaactatggatagtatataatattgttgcagataacaacgagtaaaatacgtaattataagtaaacaaaataaaaataccaagttattgttcaaaaataaaaaataaagtaatatcaagtttgaggtcatcacgtcaaatggtataatttctctactacgtacgtactccctttcttacttttttttattattctttttaaatgcactatacttttctagttcctacttcctataagatataaaagaaaattctaatttctaagtaaactctttgatattttatttttgaccaaagacttaacttttgagccaataagataagatgaggattgccttcttatttacaaagaaaaaacgaggatatagatatatacactaaaacctttatctaaaaaaaattattttaataaaaagattataactaaattgaattatttttaaaataaaaaatcaaaacactaaacactatcattgtaacaataacaacaataaacaatttttagtatttgagcattgttatgagatacctcttacgataaagtattgctttataattgattagcgataattcataatatttattaaagtaaaataaatgagatctgatattaagttgcaccaatagtgatcttacacctcacaaggtgttaagcacaatgagtgtcctttaacatttctcttatatagttattgtaaccatcatggttacatttttctttaacctataatagcaggttactaataggtaaacattcttttt

SEQ ID NO: 302318 - DNA, 2907 bp, Cannabis indica
aaaaacaaaaattttactttcattatgtcattaaaaaattttaccaaacggtacctttgtaatcccaattttttttgcattatttatgcttaaatttatttttcccaaaaaaaacctctaaaaaaacaaaaaatccataaccctaaattatttaaatatgccataaaaaaaagttaaactatcttattattccagcaaataaaaaagcttatcttattagtaatgtccaaaaaaaatctgctagtattctcttctttcttttcctattctcttttcatatagaaagaacatctaataaaactaaaattgcataactttttctatatctctctaataattgagattttcacaacctcttatcacatattaggactttccagtttgaaaaaggaccctcaccagtgtcatgtattgcaggcacccaacccatggcactagcaatttcttgaagctctgttatcacagatacagagtcacgtatataagctcggccaccgggcctcaacattcgatccatctcaaccataatgcttgttatgttacatctctttttctcaacagagaaaagacctgcagcatgtattaagtcatatgttcttggataagtatcaaatggctcacaccaatcatgcataactccaatgagtccacgatcatagataacaggtaaggtattgaacccactaacagggacaacattcataacccaaccatcatattggttctcaatgagagctgttgcaaaccctccaaatccagctctcatgtcaagaatgtttctgaacttcatctctatccaatgataagcaccaagatacccatctattgtttccttccagtactgtgattctgctctaagaagttcctttcttgatatgtacccatccattgttatgctcagcagcctttctggtggagtttgaagtcgttcgggccatgtagtaacgttagctccataaccattttcgggcaatcgggtgatgcatggcttcaaatcaacataccaaacattgtctggatcatcagtgggatcacatagcttaggctgcaattcagggttacgatttgaataacagatattgttcaaaggcttctgccatatagctatgtatccttctttctttacaagtttccaacatatgcgtgtggtgaggtcttccatttctttccattgttcttgaaggttttcttggtgtttataaacaaaatatcctcctgcccttaacaacctattgacctcaagtagcaaaattccctcatcgcgagtccaattaactctacatcccgagcaatgaatcaagtcaaatgcttggcttggatacaacaatcgcctcgtggcgaatgcagccaccattgcaggcacacctcgttccaatgcaaactgaatcgggtgctcatggccatctttaggtgctattgacaaagtggtcacattacgttccatcaaataggccccaaaacttgccactccacaaccaatgtctaaagcaactcgtgtgtttctcccaaatgcaatttcgggaaccatctgttgttattcaagaaatcatcataagattgaagaatgtcattacaagaaaaaaagaaaaaagccattagagtaaataaagttttaatgtaaaagagaattcttggaagtgttcaacctctgaaatctggtccaaatatctaccagcaccatgaataaactctgtcccacctccagggaaaacaattttatatttcttcaaagctatcaaattctgaccacctttatctacagccaaacgtttataaggaatattactgaaccatacctgcaaaattcaatcttattcatcatctcagaggagagaattaaagaacaacagtttctgcagtaaaattccaaaagaaagtaatccaattcaatttacctggtctctgctttgcggccatggaatccgatgctggtaaccttcgggcatcggtaccaagcaatccaaagcttttccttggtcagggcaatgtctctctaatttctcccctctatgagtcgaattcaacttgtttatctcttccacattatccaaacaaggaatgtagtccaccatgctctgatcacagagcttgaatttctcaataaccctaaccttcttctccttaaccacatcgtctattattccgcttaaattcctcaaatcctcaatcaaattcggatcgaactctccaacctcaaactcctccgacatcactccattctcgtcgattatccccgtcctcctcgctgccgggggaggcggaggagacgcgtgaaaatgaccatcaccggcggtggcggaagaaggggagaagaaggtaaaggcggcgagaggataggagtagaaggaggatgaagatgagttgttagagtagaaacgagtagcgaggaagaatagggagagagaggttacaagaatggtgaagattttgacaaaagtaggagttttgataatgtcggttgctgtggaggtgatcagcttcatggtgttgagtgattggatggtgagaaaaaagatgtattttctcggaaaattatgggtttcatcagaaaggttctgatttctggtgagtttggattttgaaaaattctttatgaacaattaacataatgatcgcatctacatatattttgcttatattatagggttttgcaaattgcaaattaacataaaacaattaatttttatttacaattttacaatttaaaatttttatttttaaaaatatgtttataaagttttaaaattattaaattaaatcaaattcataacaattattaattaactataaataaattattttctcaaaaaaaaaactataaataaattataaaataactaaaaataattaaaaaaataaatttcataacaactataaataaactataaaataaccaaaaaaaataaa

SEQ ID NO: 302319 - DNA, 1721 bp, Cannabis indica
aaaagttccctaccggtagggaacttttgttaggtcctactatagtcttgccctatatatatatatttatagtaagtttagtaaatattatatcgaatgatctaaatattagtaaatatgttattaaaatgtattagtttttataattaagtttttttgcaatttttttgtaatatattaatttttgttgtacattaataaaaaaatccctaaacaaaaattaaaaaaataaaacatgaaagtttgattataaataattgcacaataaatgtaattttaaattgttataactatacatacataatatagttataattgtctaaaaattaataaataatcatatattttaaataccaacataaacataccctaaaataaaatatatactaatacaaattagttgcatcatcatcatatcaccattgctttggccaacattatcttccatctctatccagcaaaatcaaattgtattctcatatctctgaaccaggcacaaaaattgaaaatacatattaggatcgtgaagaaatactaacttcatacaatttacaattctttttactaaaacatagagaaatagaaacacaagacacacttagtgaaacaaccccccaaaatgaaccatgaactttgggaatgcaagtattttcaaaagtttccctttatgtaagttaaaatgaatttctccccagaaattaatgaatcagtataaagctaaatactctaaacattgttcacacttattgtcacaattaagcttcggagaagaaactctaccttatcatgtacaaaactgagctgcttcaaaaataagaactgcaaatcttttccaatttcatatattcaaccatcattaacagatggtcagaatttttgtcaacatcatatgaatcagtaggaccatcccgcttattagtcagaagcgccaatttagccctttcaacattttgcctctgaaattaagcagagaaagaaacgggttatattaatacaattgtaaaattttataaaataacaacaaagtatcttctgcagaatttttggagagatttgtgactcaaacatgccgaaaacgggagaaaggcaaccaaatattccatcatatatcatcatctgcagttgcagaagatcatagaagtaaaactgtcggttcaaaacgaaatctgaacagagattaatgacaaagaaataagggatgaactgttaaggaagaaaataatgatacaaagatgaagattggtggtcttataaacctccttttcatggaagttagtattggcggagattgatagctgttaaagatcagctcaaaaacctggctgacttacaacagttctcaggggtgaaattggctataagttgttatgtccaagccaaaacaaaatctgttagagcaacaaagtatggagaaaactcaatacacctaagtatagttttgtgctgtggattgcaatacaaaacaggttgagaacgaaggaaaggttgctgaattttcacattgttactgatgcaaaatgtgttttctgcaacacttgttatgaaaattatgtttattacgcaagtgtacgcaatcaagtagtatctcacgcaagtgaggtcgaaccacagggaattggattaagtactactgaactatacttatgattctattcggtaaaataataagtttgcaatttgaaagtaaataactcagaaattaaagagaaaataaacgaaga

SEQ ID NO: 302320 - DNA, 7537 bp, Cannabis indica
tggtaagatagtctctaggtacccccaaaggatgtaaaaaacatcactggtttgtaatcttttgaaacagacacattgccggtttgtacttcttttgaaacagacacacaaaaccttatgtttgacagagttgcagaatctgctccaagcatttcttctgagttgcctcctctcccagagggttctccaccacttcctcttgattctcctcccccacctccacctttgcctccatcaccaccaccacctccacccccatcatctccatctccaccaccgccacccccaccacctccaccttctgaaccacctcctcctcctttgccaccttcttgtcccccaccaatgatggtttctcagccttcactattaccacaacagatgctgccacctcaatcatccgtacattcttcaccacagttgccatttcaacctcctgcgcctcatgaattcagtggtgcagttactgtaaggcttctggcccattgtattttcttatataatagcatttggctgcaacctttttgacagtgtctttttatgcagggaaaccaacttataccaagggctgggaacactcctcatgggggtcctgcagatggttctgttaaaagtgagatgtttgcacagcagccacattgctatgttcctacaggtgtgtgtggcccacgagatccttctggatttaatccttcaaggcaactggaacatggacataatgatatgtatctaaacccacaagtttctcaaccaaaccaacaatatccacaaagtactaccccttacatacaaagacctatgcatcctgtgccacctcaaaatccttcgggccatttttcttattcaaagcctgcaattcagcagcatcctcagcattcctaccaccatccttaccctttgccatcccatcccgatggtcgaaggccatttgttgctgatgaacaatggaggatgccttctggtgagtttaagtcagatagtcagcgtggtgtatgggttaatggagggatgacacattcaggaccaccctttggccaggaaggtatggacttccattctcgtggcaagtttgatatgtatatcagagagactcatcgatagtagttgagaaaatttatgtttagatgcctgtattttcattcatcacattggctggtgtatgcgactgacacttgttttaaaaacatctcagatcaacataatactcatagttttgatcacaattgtgtttaaatgtggattgcgcaaaatttatgcatgtattatgcggtgttatgtggcgtgaaggaaattgaaatgcttctacttgtataaatgtcatgtttgctgtgtggggaaaagttattattatgtcgtagtgtatgactttctttgagtagaaacttaacttttatacatggccagaaaaactaaaattacaaaattaattaaagaggaaattttattgcctttgaagcccaaagagaagttagaaacatgcatttccttccaaccaaatggtccataaagttctatgtgttttatgtaactgatgttatcttagacttgccaaaatcaatatgtcttctcaattgttaattccttgcatttttcatgaaaaacccaagtaaactctgcttcaatcaacttattacatattttcaacacgtaggtatttgtacaaatgttttgacaggtgtgtcgttgcaggttattatcgaccacccttcgaaaggccacccacaaataatttgagttttcaacatcctgctcccagtactgtaccaactggtgctccaatttcaggtaactttaagcttgatgtaatggtgttgaattaactgctctgtttatgttgccgcgaaccaaaagaacaaaaaaatcagagataataaaaacatagttacacacacacacacatatatttattaatttcaccttaatgttatttgttttgcaggtcacagcgtcccgcagatgttgcctagtagaccagatatgtcggctcttaattgttggaggccagcttaaggtggtgaacctttaacattttcttgtaaattcttctgtgaataaataacatcacattttacaattgaagaaatgtttggaacttcaacaatcatgttctttatttgtttaaacttcgaaatattcataccggggtttgacttaatgtttcaatattattgtaatgtttcattgattcttacaacaaaatactattgatcacacatttactgtcaagtcacacagcacatttgatgcttttttcatttctctttgctgataagtttggcatttcttttccaattgtttcagtgctgttgattgaagaacaaagggtaaagcggttttcacattatgtttggcgttgaggtaacttgtgtacaaagtccaaccacaatttgaaggcagcattgagaaatggaggcccttggcaggattgtgtatattgtaatttttcctgacaaatgtatcccgagaacatttgcttccaagtgtaggctcatgtttctgacttggttagtacacctgtttctctattaatgtaattcctacttttaaatcgagtaggaattaattttaggcaattgatatgagctttgtcaaatttagctgctatttatcaactttaatcaataattcttcaaatgcatatccctgattttccttattttttggcggttatggattgagaaatgagcgtacttctgaaccttataccttttggcttgtataggcacaaatggttattaggtggtgatagattgtcaacttctgctgctgaatctttttcattaatctagattaactttttcataaaaagagattatattggaatgtttttctggttaattgatgtggtctgtttttagtttgttttgggtaatcctaagtcatttgatcttgtgttttcttgctgtttatcaatagatagtttgtgcttatcttattcttagattgagctaacattaatttttgtcgatagatagtttgtgcattaaactaacattaatttttggtatgagctctattctggatatgacttttcatctttctgaacatattcttgattactgcatatcgtcttaactgaacaaaatttctgcaataataaacccaattctgcaaattacttattagtttagcggccaaaatttatcaggggacttttcttatttgcttttgacctaagatttgtgtcttttggcttcgaatattttgcaagttttttttggaccatgcaagagtggaatacttcgattgttgattcaaattgttgtgagttaccattggagatttggctggaactgggaaacagagttttgatagaactgtagtttaaaatgtgatgattggtgcttacttacagttattgaaacatgttttacttttttttaggccgaaggaggcgttagtttcggaaaataagagaacttcactggtgttgttgcaggttttggcataaaggatttaaccaattttgatgttattattgtggtacacttacaaagttagggttctacttagcagataagactgcttcataaatttgaggtaaatatttttaatttttacatgatctctcttcatcagaggacaaaggtcgttatttttttttgttagtcagtcgagtacagtttaaatgccaacgttatatgtttccttgtaaagttatgtcaaatattttagtttttagtggtttttcatttatctatacaacaccattattatgtattattattcatgatttattacccataatccaggattttcctcaaataatttgtgtttgttactgaattgctaccatagtttaacacatctgagattattttattatataatttcacgtttgatgatttgcattagcagcattattattttatttttatttttcgtcgagaaataatttaactagattaaaatgccaattgagagttgagacaatgaatccctttgtaaatttaagtttttctttttcttttctcccacccatggccaaaagaatagaatgaaacccaacaaaaaatgtgttgcttttcttgaatttttgtttttattcactaatgctttgattccattttctatcttctatattccacatattcttttttatatgaattcgaagaacatatacataccgttttgggagacaaaagaaaaagaaagaaaagaaaaaaaaagtgggaccatgcattgcaacttaacctcaattcttcttcagcctggatgatgataatgatatagtataaaactatattatatgattggtttcggtccctcactcactaaaacgggtaaaaatctcttttcaacttcacaataaaaaaacatgagatccacctgaaaatcatactttgttgtttttttgtttggagtactttaaaatgtccttaagaaagttggcattttgacttttcatataccttgtattttatttggacaataacatgaaaacaaatgacataataatgacattattaagaatttggcattttctcttgcaccaattttaagctaaattaagatgttgcatatgatccattaagcaaattttgtagaagaaagcattaagcgattatattatgctacaacatattaatattattattaagacaattcaataaattatattgattgcgaaaattgattaaagaatagtgataaactacatataacaaaataatttatagaatacatacatacgaaaatctatcgacattcttaagtgtatacaataatcttctctgagaaaaaatctagtttgaaatggatgctgccaacaaactgtgatcaattgcataatgcttttgtactacacctcttcttggcttggcttctctctctaccttgtaagtacaagaaaattccaatcacaaaataatttgagaatgattttatttgatatatccctatttttttaggggttggtccactttcacttcttttgttttctatatactcatcatatctggttcttgaaaggtcctgaaaaaaatggtaaaacaaatttataaaaattaatcaagtgcagctttgcttcttcgaccagtaattggctttggcaacccatcaaatatcggttttgcaagggaagcagttgagaagccttgattatcagatttctgactccatttcgaaggtggtcggatcgacccattactgtctggatcctgcaaactaggtgtactcgatgactttcttactccggtaaacccctcagttaatattgaatctcccaggccaaccggtatagggttcaatccaccggtttcatctgttgccattgttcggccagctgctttgggtctaagagctaagtgctttcctcttgatgctgaaaatccaccgctgctgccaatgttattatcctccaacatcatttcgggggtacgtgagaagtcagcttcggatttctggcgccttctaatgagcttgtcacaactccatctctcagattcaccttctttagtgtctgaaatagatgtatcagctatttcgccattatcatctaaatatccactgaccaggcttcttgacttcctgtggtggtggctcaaaggtgggtctgaaactcttgtaaacagttcatcctctaaataatttggaactcctcttctgtagactgacatttcaattgaatcactagagtttctatttttttctttaagcccatagtaaccttgcaaagagctcatggctggtgagactagacgctgaggagacatatatttaagggattggaatgaatcgaacagatcacggtgcatccgcttcggtgggctgcggtctgtactgttcggtctgtaaaagtaaacaattccttaagcaatgacgaataaaaagtggaagacatattggccaacttgattgtggaaacattactaaaataatatgaatatgctatcatggcacaaagatttatgcatgaaggccaaaatccatcagaaggggacattgcatagtacgcaagaaaatgaaagtacatatgcatcagcaagtgtggaaatctaagttcaatacctgaagtttatattttactgcaattggataataatggaactaagttctaaaacaatattttggccaactcattatgatctcagtacagaatttaaaaggcaaaaacatgcccaatcccactgtactgctcactattaggacatctatattaatcttatctccctctgaaaaaaaaaaccagaaacgacctaaaattcaatgcaacttcctaacaacataaaactaaactcagagccaagcatgggaatgaaaatgaaaccagctaagcatgatatcactcttaccacttcgatatacatattctagagaatgaagaggtggcaattaagtctaaaaaagatgcaaaattttacagttgataataaattaacaacacagagcatacaagaatcctgagttccgaccgttaaagaaaatggtattgtactctgttctgcgcagaaattagtcaaaaaagcagagtacagaggattaattaccctggtgtattggaaccatttgataaacaaggggatggagggtgcctgccaggtagtggaatctgaatagatttgagggcaaacatttgaagatctgtgacgagtccattcatcttttttatgtccgaaacctgtaaaaaaagcaccaaaaatgatatataaagaaggcccttgtttccacctagagaatattaaactaatgcatagcaagtggaaaagaaagctaatgctttaaaggggcattgagtatttaacaacctcaacacccatttctactcattgcccaaaacatctttaatcaacattgaataaaaaacaacttaaatccatacaaaatccccagaatcgaccaaggcacacaataaacgaaaaacccaggaattaaatagcctgaaaagcccaagaattcatttttttttctctatacatatataaatgcacaatcaaatcaaaccaaatcgtaacgatcgagaacaaacaaattaaaatctacagacaaacataatcgaatctatacctcaacaccgtatttgatggcaacaccagcgagagtgtcgaattttgtaactatgtgttcgatgtagccaagagggggttgagatgaagaagaggaagaagaagaaggagaaggcgttgaagttgtcgtcggatgattatgattatgatgaccattagtctcaggctgctgctgatctagccgattttgatcaatatcgcaataaaaatcattactataattcccaaatccaaacccatttccattaccattcccattccgatatcgtttctctctttccatctgcatctccaccaataaataaatcaacgttccaccggtcaaaaatctatcagaaaaattcaaaattcaaaattcgaaaaagaaaaaagaacaaattgggggaatcgagtgaaacctagatctagtaaatatgaggccaagattcgactaacagctttttaatactttctctctatctgaatcggctttgcctccagattttccgggaaagattgatgaaacatgcttcgccttgccttgctttggtttc

SEQ ID NO: 302321 - DNA, 1740 bp, Cannabis indica
tttattggactaaaagtcacatctatcacaaaaatttatgttatgactaaaaggttgtcactaaaagtgacttttttgtagtgacacttgaaaaacaaatgatcatgcgttttttgctcccttccacagatgtagcagttgattggtccttgaataccttgcttttccagtctgtcacctatttttaatttgatccaagttgataaccaagccaccatttgatgcttaggtaagctatacatttcccagatttttctaacaaaccacctttgtcattcttgcctttgaaatatagtgtctcatgctgaatgaataaaataagtcatttgctagagttgtttctttgtgtagcatgttttaagttggtctctcacattcactatttgtttccattaccagctactatcatgacgtagctgatactcccaccaatctgagtctttcatataaacctcatggatctattttacccatagattgtcttgtttttgagctatagcccaaacatatttaccaatggctaacattattccaatcttcaaaacatcaaaatcctaagcctcccaattttttcggcttgcaaacatccttccaagctatcaatctaggggatttataggctgctgaaccattacaaagataatcctgcatattctataaatggaaaaaagcaccttttgggtaatatcataacttgagaccaatatgtgtgtattactactaaaacagagatgactaacactgctttaccagcgtatgaaaggtgcctaatactccaaactcagattcttgcaaccatcttctcaataataatttcacaatcatccatcgagactctttttgaacaaatcaggataccaagataattgaaaggtaacttacattgcttgaatctcgaggcatcaaggatttgttgaacatcttgactctccattcttgtgcaaaaaattaaagttttacttgcattcgcttgaagtccaaatgttgaagagaatcttttgaaacttctaagcagccacattatggattgcaaatcaccattataaaagagcaaaagatcatcaataaaacataagtatgttaattttaaagctccacatctatgatggtacttaaaactttctttagcagtaactttcaccgatattctaaataagtactccattcctaaaacaaataaaagtggtgatatatggggtcaccctgtcataagcctctttcgaaagaaaagaacccatttaaggatccattagaaaagatggagaattttagaattcgaatatataccataatgagctttataatttggtttgggaactttaaggctggcagcatttcctccacaaatctccactcaatagtgtcatatgacttctttaaatctatcttaatcatacacgatggtttacacttacttgtcccatagtgtcgcactaggtcttgacaaactattatattgtgaaaaatatgcttaccatggacaaatcctccttgggattgagaaataagatgaggaagcatgtaacaccctaacaagcataggcgtattacgtgatttttaaacacactgtgcagctcgttgctaatcaacgagggttatggaaatcgtgattaattaaaaaatttcctttttaattaaacttatataatatctcatacaaaatactttgggatcccatttacaaaatactttataaaaagtttactgtctattacaaaatacttgtcacccagcgacta

SEQ ID NO: 302322 - DNA, 2322 bp, Cannabis indica
acataagtagattaagatcgatacctcaaagtttcaatatgggacaaacaccatagtttctgaaacttatctccgaaaaaccccacttttccaattgaagttcccacattaatcacctgaacgtttgcaataccaaaggaacagaacataagtatacacattggctccaaagaaacagggaaatgcatattatgagcgagaagcaaatacaatataaaaaggcgcttactgactccaggttatcatcgtcgttgatgtcaccgtctgtatcaaatatgcatatcaatccatcaacagaagcagataacaacttgcttggctggctgggaatgaagtgtacctagcaggtataattaggttgttaataattttgtacgaataattctgtaacataaaccaaaataaatgaatggctatgtcatcaaaacaacataaggcacactaaaaaagaaaccacagttgtttttctaatatcttagaagtatatatgatcaacctatccaaaaacattttattatgcaatttctgtttcacagcctaacaatcacattagagatcagatatacgattaagtattcagttattacagggatgtatcataagccacaaaagcacccaatgaatatatatatgtatattgatacgcttctatacatctgcaattcatctcaaccaactgactacaatagtgaccctatatatgcctgcaagtatacttagtgtgaattattggtggtgtcaaagcgagaagagtacatagccaatgagcctgtatacgtacgaaccaacctgagtaacgtcctcaacatgggagtcctctagacatgcaacttgtttcttgttcctccaatcccaaaacagtatctgagattataaatgtcaagaagcaagaaatctcaacaagaaaaaagaaaagaaatttcacaatataaaacaacaaaatctccatacagagggtattcgaagcacaaatactatggaaactaatattaacacacactaatataagtacttgattccttaaatatcatcccaaaactaatacacacttccttccttctccactatggaagcacaaattcaggaacaaaaactctgcaattcattcccctatgccaaaatgtgatatttttctatgataaaagaacaaacatctgagatatgaaagcctctaaacacaagcaggggtacctgtgatttacatcccgcggataaaagattaccagtggatcctccaaacgaaaagctgaagatctcttgtgaaggaccagcactaatggatgaaacctgtagtaccaacaacaaagtacatacatttacttcaattgaaatgaaataaagagagaaactacatttagtcccacgtactaattttagcaaaaaaataagaaaaaaagaacaacaacctctttgaatgtacgggtgtcccaagctttaagggttccatcagaggagcaagagttcaagacatgaggggttgatgtagcagagaaagaaatgtggttgattgtatcagagtgacccttacactctccataatactgaccagttactggtgagtaaagcttcactacgttcgtcgacaatgagaccgccatagatgtccaatcattccttccatcaaaatggaaaattttctaaaacccattaaacttatacccttttggttcgatcaaaaaacaaaacaaaacaaaaatccaaccaataaaaatgaatatggaatttttgaagctagaaagaaaaggtgggagaattttacttggggacaatttggaaaacgtagtcatctccgaagttggtttggattgagtttttgagtccgacccgattgagggaatttggattggactgaggcagttcctccacatccatggccgtggcttccatgtcacttctccgtaggtttaagggtttagctaaagccaaaggaagcagacgcagaggcttcgagtctcggaagtcccaagttgggttttagggttttagatctactaaggtgaggaccactgaagtgactgtgtatctgcttttaaattcttgccttgtcaatgtgtcaccgttgacattcttcgttttgttataaatattatttatcttaaaaaataaattaattattaatattttatattaattaattaatatccaaaaatagtaatgtaaaattatagtataaaaaatgtgttgtattttctcaaaaaaaaaaaatgtgttgtatatatttttaaaaaaattgtggatgcatgaaggttttttttttaaaaaatagggatattggcggctaaaccacctaaactttacggtttgtaacacttaaccaccaaa

SEQ ID NO: 302323 - DNA, 3503 bp, Cannabis indica
aaaaataccaaaaaaaaaaatgacgacgatgcaagaggttacggaagggcaggggacaaacatgacgccattgcaagaggttacggaagttggtgatcctgggattgaagcaggggaaatggacgagatgagacagcacttcttcgattccatgacactagagcttgaggctgatgtggagctaagtgctgaagtaacgaaaaaagggatcttagctagaacctttggtagaagggatatagtaaggggtcgggttaaggaaatattgtccaaaatttggaagttggaaggaacttggcgaatgcagacaatgaagccgtggttgtgggacatctttttcgacaatgaaatggataagaaagaaattcttaagaaacgtccatggcttgtcaatggcgttttagttaacatcagggagtggcctgatgatgaaagttgggaaaaggtggacatgaacaaagtcaggtattgggtggaggctcatgggttacctacgccataccttacatgggaaaatacagatgtaatagcaaggaaggttggggtgtattgactttgatagagcccctcggacagtaattgctcgaagaggatacttaaagttcctagtagatagcctactcaatcaaagacttgttgctggtttttatctgaacatctcccatgattcacttgttgtcatttggctcactcgtatagcaaatgtgatcgtcctcaggagtttgcctaccctcctgtgggtagggcggtaccattatatgggacatggaataaagtgggagtgccgatacggaattgtttcgatcctgccattccaagattgaaagtggacgagacttttcgtcgtgctgaggattgtgctccggtagaagataaggacaagggtaaatcggtaataatggaggatgaaagtgatggcacaaagtcactgagacagtgtacaaacatgcagggagccgttggaatgataccctccccaaatagggtgatttctcaggggcaaagaaggcgtgcctggatgttcagaggaagttggctagttcgggaaagttgagtcaacaaagacaaaggctttcaccaaggttaagaagacatcctatgactagtattgacaatagaagaagagatgaggggataatagctagtttgatggctgacattgggcctacacgtgaccaaatggtggatatcccaccatgaggagatttgtaagtctagggttccacatcaacatcctgagcccacatatgtcacttggcccacagataaaaatcttgaggaagtcattgaccaagttatggacccggcccataatgagcttgggctcaatcaagttgtggtatctcatgattgtatggatttttctacttctgggactccctttactggtgcaaaaaaagagaaaagctagtgtgaccattgatcctgtgattgcacttggagatggagtcgaaacactgggggagaagacaccatcaaccccgctcaccacgttgcctcccttggagattaacacgtttgttctagggagcagtagccgtgaagagaccgctagcaagcaaagaagttataatcgaagatgaggggggaaaactcgggtggatgtcgtagaggagcaaaacaggacagtagagtctgtgagaaacgaaacagcgtggacaagaagaaaaataagaacaaaggtacgaattttaatgttggggaaggaattttgtttgacattactattcatgagactcaaaatctgaatgcgggtgaggaggcggcccattgcaagcccccaccgtcgccatgagaatcctttcttggaactgtcggggtattcgtagaaccccggcaacccaagctcttatgacttgggctaggtgaattaaactggagtgtatctttttaatggaaacaaagtgtagtgaagaggggatttttgaaattgccagatttttgggatatcaattttcttcaactcttcctgccaaaggcttagggggaggttttactctgttgtggaatggtaacattgatatggaagtggtagaagctaatggtggggtttttgaagtgctgattaaggagccaattactcggttgaaatggtgtatgtttgctgttaatggaaggccctatgacaatgaaaagaaatgtttttgggatatattggaggctagggtcaataggtgtgctttgccttggatggttattggtgatttaaatttgatagctcagccttgggagaaaagtggtggaaggaaagtttcggctcatgatatctcaattcttcagaatttccttcaaaatacgcagggggggttggtcttggctaccgtggatgcaagttcacttggcagaataatcgtttctcgggtggtctcactatagaaaggcttgatagagttatggtgtcgggaaactggatcacgaccttccctgtggccatggtatcgaatgcaccaattatcgtttcagaccatggttatatccttttggattctagtgcgggaaagcagaggggagtcaagccttttagattctttgaagcttgggctagagagcgatcctatcaagaaaccataaagtatgcatggtgtgagagaggcaggctgagtggcagaatttgtggaagattaagtgatactagacaagcgcttcagaaatggaaaaaaggggctttcaaggattgtgatattctgatcaaggaagcagaagataggctcggatggattcaagctcagcctgtgtctaactctcttttgcaagaggaatctatccttcaagctagaattacagagctgtggattcacaaagagtctatgtggagacaaaaatcaagggagatttggctgaaagtgggagataggaactccaaattttttcatgcttccacagttattcgaagacgaagaaatgagatcaatgcggtgaagaataaattgggaggatggaaaactaagacacacaaggtgggggttgtgttcaatgagcttttcagggagctatattgttcagaaagtacggttttaaatgaagatttctatgaactgttttctctgttagtaactgtggaggagaatacgatgcttaaagaaatcccatctcccgaagaagtgtggaatatggtagctgctatgcatcctttgaaggccccggggccggatggtatgccgtgttttttctatagaagattgggagatagtggggaccgatgtgctgcacatggttccaaattttttctccactaagactttggagaagaaactaaattacacctttatctgcttaataccaaaggaggagaacgcgtgtacggtggataaatttaggccgattaccttatgcaactttgcctttaagattatttcgaagataatggccactagattgagggggtgattgacaagttaatatcaccttttcaattcgattttgttcctggaagtgttggaaattattttaccaggaactagatttactaacaagtatgttgaattaacaacctaatatgaatt

SEQ ID NO: 302324 - DNA, 1541 bp, Cannabis indica
aataaaaataaaaaaaattaatgacatggaccaataaacgagtggcacgtggatcgtgacctggcacttaacaacgaggtacctacggaaattccacactagtgacggaaggtatttttaccgctaaaaatatgatttaggtatttatctgttactcggcataaaacttaagtatttacgccgcaaattactcaaaaagataagaaaaatacccttttgaaatacaataatactccttctcatatacataaggagcaaagtggtaatatgcaaagaatttgagttcacaacttcacatactcaaacactaaacatatatgaatagaataaacttatgaaaatagctaaattctccaaaattacaaaagcaaaacaaaaaaacaaaaacactatagttactaaacaaacactatacgatcttcacattggtgactttttgtgcttcaaaaatcaaaaccatcatacctatttaacactattgttgtcccaatggaataagctgcgcctgtgtaacaagattgtatagtctttacacttaaaatcactcaattttttcaacttcatagtcttcaaatcaaagagatacaaacaaagggttttcacatgtttgaagacaatgacttgaccatcctctcttaagcaacacatgggcattagtttccaaaattgaggtaacctattgtcaaactcacaaggcttcttcaaattaggaattggtaagtatgttattgagttaatgacaatactaaacttcttttcccaactatggttatgaaaatctttcaaaacccaaatatgataatcaactacaaatgagaatctatacatgagtgaaagattacccgccatttcgaacaacgacatgttttctctataaaacgacacataatgactccatggcaagctagtctcccttactcttaacaaatcatcatcttcttcattccatgtctccattgacaaaatagccttgtctaaagaaacatcccaatgtagaaatcgaccatttgagcatgaaattgggtcagtccaagatttatcatcatagggtgtgttttgcactattggacctgaaataacatcccattcattcttattactcccaagaagaaaagtctctataccaaaactatttgccctaatgtgaataactttgtattgttttgtgtttggattgaaaaccaaacacaaacaacatcttaaatgtgtacatttagataggcaaattgggagactaatatgagtcttggtcatcacattagtcacaatcataccatatattcttggacgttctctatagacataaccaccatgatgagcacatgttgtcctataatacccaaatctctttgtgtgttcaagtaagatattgcggaagaaaagggaaaacattcaagagattttattgtattgaattgatatgtttacaaaaggaaataagccttaaataggcagcagtgaagtcagaaacagatctccttaaatcaaggagaaccgttgaaaacaagggaccaaccaaacagaacatatacatatgtata

SEQ ID NO: 302325 - DNA, 1886 bp, Cannabis indica
tcttccaaacttgctcgctgcctcaatcccatcgacatctgccttgcttgcagcagctcctgctgaagcatctgttgttccaaagattgccgatgtccatgctgcgcactagataatgcatcatatagatctcttggatgttcttgctgtggagtctgacaaagctttgctcgaatgagctgctctagagatggatctacatgcctaggtgtgtgatgagactgttgttggagttgatttaaaaggtgctgctctaaaagtacttgatctagaacattattggctctcagaggatcaagatgtggctgtacaaaaccaggttcatgcatttgactatgcatcaactgttcaagagacagttgtcgtgcatgagattgctgttgttcttgcaaaagcttttgcttctgaataaattgttgttgctgcatctgatattgctgttgctgctgctgctggagctgaagctgtcgatgctgttgcagctgaagtgtcttcataagatgatctagttctggtgcagaaatgttagccaattgttggggatgaataagactttgattaggcaaatgttcgaagaatgactcatttaattgtgggaatgtagacaacatatttctctgctggagcttctgttgctgcaactgttgtgacatcagctgatcagttaaatcaagatggctgggtccgcgttccatgcgtgacaaactgtgagcagccatcttatcttgatacaggttgggatcagaacgttggtttctcccataatcagcccaagagtcggaaacaagagctggatcagccataccaccaaaggaagcagtcctgcccatgctagaagaaacactggatgcctgtgcatagtttgtttgagcaccttccagctcagaccacagcaagccaaaaggatgcatcttagtttcagcttgattttgcaagccaggttctgtatattcaggcaaggagggaggaatgtggctaccacaacttgccaaaccatcgtgagggttgacaggagattttgctgttgcaaagccagtgttcattggtcttcctggaaacaagatttctagaaaacagagagctattaggatgcaatataaaaaaaaaaataccacaaaagcaataaatcacagaagctaccttcaacttgtccatcaaaaccgtcaaagctttgacctttaaaatgcggcagttgtggatcttcagcctcggatattcttagctgaacaagctcatctgggaggctgttgaactcaggtaaggatgggctgggttcatttccaatagatgaggcgcctaatccagaagcaggagcagaaggtaaattagtccccaaagttactcctaaagatccaggttcttctatctccaggttttgattaatattatacccctgtccatcccatgcttttagatgtggcatgacctcacccaaatcttgaaaaggtgttccttcaggtgcatcttccaggcgaactggtaagtcagttccaaagaaaccttgctcaaaccatgagatgatgtcaacccccagatatggtccctgaatcattccttgaggatcaaggtaacacaagcataaatcttcaggtaagacatccttatccaatctgtttgcctcaatggtagtgttcacattgtgagcgtcctcagtaaaagacaaaatatggtgagaaccttgattgttagacagcttggaactaacgtcagaatcaacagaaccaatgttgtccacacaagaattgctggtaaaagaagaatcgaacttctgtttatttgtactgatatcatgctgaaatgtgctatggcattcaccgccaaaatgtacaccacttccaataccaatacattctgaaataaaagatcattagagagagagagagaga

SEQ ID NO: 302326 - DNA, 5473 bp, Cannabis indica
tcttattgcaactagcgaagcaatttaaatcgcgaccaaaaattgtataacaacctacatagaaaccactaaaaaaaatcactttaaaaatcgtaaatttaaaaaaataaaaaataataatatatgaaataagtcaataataatatagaagcataaaaaaaatataattatatgtaagaaaataacaaaaagaaaaacagaagaagaagatgccgtgtgctaaagtgccacagccgccgttcactgttgcattcacggcaatacagtgtcaactatagtctccttggagcagaagtcagcaccgaatccaacttatactaaatttaagctctttccatggagaattctttacagtttggtcttacttaccagttaccaccacctcctttttgtgtcaaaatcggtacttgacaagttcagtcaatggttttggtccctaatgtcacatgaacacatggctgctgttttttggtccatccacaaggagataactgcttcattcaccattaatgaaatggagccatgggaggtcaagccaacttaaccacctcattaaagacaagcaaaacactgtcactgtcgtaatgccccacatctccctatgtcatttggaccctcatctttctttgcactggttttactgtataattgcagatacaggaagacaaataaaagaaaagatcacaaaatggggacactatctcggatttaaaaaaaaaaaggaatcattctaagtttcaccaactacatgtgtaaaacagctgtttttaatgcagattttttttatctcatatttggacaattttcttaaaattgcattgttacaaatttcctaaataaaaaaaatagaaaatcaccacctagaatggcgcatcccttaataatttactatctagtgtagagatccaaacccccacttggactataattctgaagtggacccctctcattaaatttctactacagtacaagagtacatgaatcatatactatgctaccttggatctgagtaatttacatcgaagtagcagcaagggaaaagataccatctttcccaccagatttggatttgtttcctgaacttgcttcttgcagcatgctcaccactattcgcattgatggccgagtaagcggatgtgggttgatgcagagaagagcaatgtggagtactctgctaatttcttccttgtgagttatgacatcaagtctggaatcaattacttggtctgatccattttgttccatagtagcgcagacccatttaaccaaatctttgtctccgtattctgaatcaactgggagtctaccagtcaatagctctagtaacaccactccaaagctataaatgtcgctcttttcattcactcgaagtgtataaccatattctgttttcgtcaattgaaacaacacaaataaaaatgaatcaatgaacacttaagattttaccaaatgttaacaaagaactgtgtaccaaaaatgagttacaagtgactaagaacagacctggtgcgatataaccacaagaccctgcaataatagacatagaaagaacatctttactgactccgcctacaattttagccaccccaaaatcagcaactttggctccaaaattttcatccaacaatatgttgttggattttacatctctatgaacaattggaggtacacaatcgtggtgcaagtaagaaagcccctcagctgcatctagagctatcttgtaccttgttggccaatccaacatgcctcctttactactatggagtaaatcccccaagcttccattaggcatgtattcataaaccagaagtttgcaataatcagagctgcagcaacaccacagcctcacaatattcttgtgtctgatctttccaagtgtttctacttctgcttcgaattcatctttctcccgcacaacagggcaagtgtcatctttctttactcctccccaaagcttctttactgcaactttctcaccgttgccaagcacgactttgtagactttccctgaagctccacttcctatcacattgtcctcgtttaggcagtcgactacatcaaactcattgaaactaagtttatggaaagacctccatatggctgtagtgattgtttcagtgttcttcttataggacatgtacttccaatagaacccaaaaagtccaacaagaaaaacaatggctgcaagaatgaagattgaacgtaaaatccaaaggtatttcatcttgttacttgtaacggcccgagaacaaagatcagggatgtcaccacacaagcctggattgcccaaaaaactacttttgtaattttcatttgcataaagaggaggaagcgcaccagaaagcttattgttcgacaagtttagcatattaagctttaaattctgcaactcggatgggattttcccagagagaagatttccagaaagatcaagatagttaagaccaaacacactcccaatctcacttgggatttgaccagatagcttattgttagctaaactaagctcattcagcttcttcatagaatcaattccgaccggaatctgcccagatagttggttgttactaagatcaagccttcccaattggctcaacttagtcaaactcgccggaatggaacccgatagcacattatggctacaagataattcaacaaggctgtccagtgaagcgagctcattaggcaaggccccagaaaacttgtttcgagatattaacaaaagtgaaatgttacgtgcaccagaaattttgctagatatgggaccagaaagtgaattatgagcaaggtcaagcaaggagacacgggggagaccccagaattgagcaggaacaatacctgaaagattgttgtgcttcattctcactctgctcaaggactggcattttccaaggctcgctggaattttcccggaaaatgaattgtatataataataaggtcttccagtacacccttcacgcacaagctttctgggatttctccactaaacccattgtacgaaacatcgagcctctgcaacggcgagttcttcccgagttgactgggcaacatgccgctgagtttgttgttgaataatttgagttcgtataagtttggagactcagctatactctctggtagtgtcccttcaagccgattatcaaacaaattcagcgactctagttgcaaaccgcaaagctcattcggaatcgtaccagtcagttggttcatggacacgtcgaatcttcgcagggtcttcaatgtcgacattcccggaggtaactcaccggaaatagaattgttgtaaagctcaatctgttctatacttcgtaggtctgtaattgaactaggaatagctccgctgagtctgttcatggaaatgtcaaggttcttgagccgcgtcagccggcccaaactcgccggaatctgtcccacgaggttacaaccactgagccataagctctcaagactagtcaggttaccaaactcactcggtatccgactcggcgagaacggattataagcgagaaaaagctctctgagactagaaatgttaccaagagaactgggtataactccgtcaagaagatttccggagagaataagcgattcaagtttctgaaactgaccaaagcttgccggaattccaccagtgaagttgtttccagtaaggtccagttgccggaggttagcgattttggaaatacttccgggaatgggacccacgaggaggttctgagagagaacgagggtctggagattccggcagtcggagatagtgttcggcagagaggagttgatagagttattagagagaataatggaagagagagactggaggcgacaaaggaaaacagggaaaggtccggcaagctgagaactccgaagttcgatggagataactcgacgagttgagttttcacaggtgacaccgaaccagttgcaaggatcatcgtcccggtcattccaggaggagagggactgagttggatcggaaaggccacgtttgactcggaggaggtagagtccctcttggtttagagagagagtcaaaggaggagagagaaagagaaggaagaaaagtaaggtgagcaccattttagaagaatggagggaaaatgagttgagttttggaggtgaagacgaagaagaataataataaaaaagtagcaactttgagtgtgaaagtttggacatttgaagcagaagaaggtgggccctgcaaatttaatattaaattgttggaaatgtaagattttattttattttttccaagaaaagggaatgaaataataattttggaatttgaaatagaaaacaagaagaatgtgaagatgagagtaattaattcgttaattattattttttttttaaacggattaattcgtcagttaaaagaaagcaaatcattaaaattagtcaataattaaaatgaaactgtacacactacacaaaaagacgaaaccgtgacagagacagaagaaagaagtagtatatagttatgtttttctatttcttttttctttttaaaaaaaaaacctatttttatatgtttgttacgttaaaaaaagtaaatgaaaagaaagactagatggtcaaacaactaacttcaactttgttttttcgttattgtttttattggttcttttaacaaattgagtcacaaaaggagtttaatataattagatttcattgggagttgcaagttttaattaatcagctatgaggggctaaccgaatatttgagaatataggaattatggttattgatatttttttttattattatctttctttatttttgaagaatgattgttgatagttaataaaaatataataatgggatattccttacgaagctattgaagattgtattaatttgttttctcttccttccaaagaaaccggaagcaatcgaaaaaaaaatgcaagatgggatatttgttattaaaccataaattaaacaaagaatcatgttatacataatattaattgtgtgatttattcatgtttaatttagtcaacaaatttggtcaaaatttggtatttaaagaaatttaccattgctccttagctattgttaagttcaaaagttaaggctacctttttcaagataagtcacctaggaaaacaacaaataaggtgtgtttatttattataaattcaaataccaaatacgtatcaacatataaatacaaaattatcaacactgaccggaattgttgactaagttaatatcattaaataaatttggaaattgcaattttaacaagatgatattattggtcttataagttaattaactaacttaataatatactcctgagtgctgacaaaaaaaaaataatacctgtatattgtttaagatgaatgattaggacagttaaattgttatttgaatttgtatttattattaagtttaaaaatgaaaaaaaaaaaaaaatctaatataaaaatagagatattgttagaaataatgaatagagaaaagaa

SEQ ID NO: 302327 - DNA, 978 bp, Cannabis indica
tactagtaataagatcagcttcattggttgggatgatttcaaggttgattttcagaaaatgggaaatgataataacaatgatgatgataataaagggagaaggagcagagttattgttgttgataagaatgggaatggtgattctttaactgttcaaggagctattgatttagttcctaattacaattctcagagagttaagatcttcattcttcctgggatttacaggtttggctttttaattctttaattttctccattgtttttagagtgtgaaaatctgatttttgatttgggttttttgcagagaaaaagttttgataccaaatacaaagccatatatatcattgattgggaatcaatctcaaacatctgagactgtaattagttggaatgataaagcttctgatagagataataatgggtttcaattagggacttatagttcagcttcagtttctattgaatctgattacttttgtgctactgccattactttcgaggtaaaacattactatgaatcgagtcgaatatcacaacttcttttacccatcttataaattttccttcttttcggtttttgttgtaatagaagctgtttagtagacaagattttacgaattcgacacaacatgaacattactgttggagccttagctcggttccaactacgagagtttgcttttgtttcatctttctaagagtggttttattcattatttaatcgaacaaacatgttttcaatctttcgtttggtattattgggggattttggtttgggttaaacgacatgtcgttttttgttttgtttcgacagaatacagttattgctgatcctgctggatatggtatgcaagcagttgcattaagaatcagtggtgataaagctgtgttttataaagttagaatcttgggtactcaagatactcttttggatgataccggaacacattatttctacaaatcctacattcaggg

SEQ ID NO: 302328 - DNA, 1794 bp, Cannabis indica
aattaaaataaaaaaaaattacatcactaaagcaaccacagtctaaaattttacacataaaaaaaaaacagaaaaaattacaaatgtgaccacagaattcaaattttgaagttaaccgtacatatccataaaaatcaagacaagagggaaaaatctccgagaactacaaattgagatgattgtattttaaagtattagaatgatatttcaatagaaaaaatttaataattttttattaatttttttttatgcattttaaattttattctatccttatttttattcctattcctattcttattctatattttcatttctcctgaccaaacgtgattttagctttttttttccttaaaaaaatgtatattatgtatgattaaaaagttattaaattaaacttctttgatgtatttatttaatggttacacaagtaaaattaaaaatacatttatttttaactttttggttcagaactttagttggtcttgaatgaagttttgtagttagcaaaaacaaaatattatgaagttttattaaaattttgaagtctctacgtaatataaaatttcacatatttattatatcaaattaattttgtaagttttattaaaatttttgaagtctctacataatataaaattatgtttattaatcgcctgttttatttctaaacttacccatatatataaatgtatatatataattagttaataattaaaagtgattgataatatatgacatatgttacatattatacgatcaaatcatacttaatattattgtacctcggtgagacagctgcagatatttttgattaagactctcctatgttatatatatgtggctaaaggaaattcccacaaatatatatatttaaactttaaagcaattgaaacaagtaattaatattagataaagtccatgtatattgatttgtggcaactaactttgtttttttatatacaaataaaaagctttgaatatatagagtaatagtacaaaaaaatcatggcaattaattagtgtagtatactttggtatatatattagggctacacattaggcaggtttggccagtttcaggtttttcgggttcgagtttcgagttttacaaaatgtgtgtttcaagcaagtacataaataaaactaaagtatggcacaagaggcttggccatgttagtaaaagaggattgcatgaactaaacaaacagagattacttagaaaagtaaaacttgagcagttagagtattgcgttcttggtaaaggttgtagagtcaaatttagtactagcaaaatggataccaagggaatactgaattatgttcatagtgacttatggggaccttcgaggacacgatcacactctggaagcatgtattttctttctatagttgatgatttttaagcactagaagataatgattgagaatcaaaccgaaaggaaagtaaaatggcttagaacaaataatggtctggaatactgttttgaagagtttgatatattttgtaagaaggaaagaatagcaaggcacaagactgtgaggaagactcctcagcaaaatggactcgcatagaggtttaacataaccttcctggaaagagtcaggtgcatgttattgagtgctggattgcccaaagtgttcagaacagaaattgtgtccactgcagcttatttgaataaataaatatctgtcaacagtattggatttcaagcaccagatgaggtatggtcagaaaatccaacaagttacgaacactttaaaggtatttggatgtgtctgttatgcacacat

SEQ ID NO: 302329 - DNA, 937 bp, Cannabis indica
tttgtgcaaatttattataactaagctataatgatgttgatggaatagttagcgatcatgggaatgctcttatacacatactatattaataatcatttctaataatactatttacaatttctcatttataatatttatggagagaaagagtatcgaactggacgaaaacaccaaccatttgaagagactatatattattaacaaatacatcaatttttttttacgtgacgaatggagtttaaaccccatatttaatttacaaaataagatcaacaaccacttttgcacataagtggtatggtggtactggtacatattgtttatgagatcaaaattttgttcatgttttgttttgtccactttattttttaatttcattttagtattctttcttagtgccaaatttaacttctaatatagtataattttccccataaaaaagaaaaagaaaaagattggttatgttaaataggcagtggcagtgactattggttttgactgggtgttgtgtaatgttgggaatggtagactttatggataagaagtagaagaaggatactgatttccgacgtgtgagatcagaagaaggatactgattacagacttcatgggccatgcatgtggcccagtatggaaacaaacataattttcttagtatgcacgacaaatttctatttcggataaggatatgatcaaattcgacccccttctcactcttactagactccttcaaacaagttttaagattgaaagtaatacatttgaatagttcaaattcatcataaataaatgctatacatgatgtaccttttgttgagaaatacttgtagaatttcggggatggaaataaatgatgtagagctaataaaaaaagggattattttataaatacacaaaaataaaaaaaaaattacaaaaatacgatttcacagaattt

SEQ ID NO: 302330 - DNA, 3936 bp, Cannabis indica
ctccatctcattctccttatcttaaaacatcttacaattcctctcaagccaaattgtccatataatacccacacacaacatctccatataatgttcctttctaatcaaggccttttatgaagtctaggactatcacctcataactgtacccataatttccctgcaaactgacaatgtaagaagatgtgaactgtaaactcaaaactcaacttacaaagaacacaccatgatggaacatcatttctatatataatccatcatctttatcttattcagagccaccagccaccccaaaactttgatctatctttacaggaccatttgcttttcataagagcctatgtggttaaacatacctatctggctcttcatctgtcaatataagaaacactgattttgcatacaaaactagcattcagatctaatatacactccctcttatcctccatacctgaggaaatgaactttccactaacaagatgcaacatacctatctggctcttcatctgtcaatataagaaacactgattttacatacaaaactagcattcagatctaatatacactccctcttatcctccatacctgaggaaatgaactttccactacaagatgcaacatttccaataaggaggaacttctctaccactcacccttctcttaaaataaaattccagataaaactcggagattactcgttcgctcaactcaccataaatctgggaaataaccttcctgcagcctagaaccatgacataattttttccagaacctcagcctcctcctatttcccactttaatcctcacacaaactacaaagtcaaggtatgtgataacgtatttgactcaagaaactcccctcaatcatttcataacaacatatttattcttcttaatcaaattttcaatatccaatcctcctttctcacatattttgggcaacctcctccgaaaccattaattgattctgctatccccactacaatctgccaacaagaaatcactcaatacctcctttattaaagaatgactaactcccactgacagagatatataatatagagggattgagaacgtaattgagataagggttagcctgacacctcaagaaaggttctacgccatccatcaagacaatttgcaacctttctaataatcggtctctaaaagatacactcaaagaatttcctccaaaaggaaggagtaggaataattggcctctctccagcttacagtccaccacctcagccaaagacagcacaaaatcatcttgaatgttaacacctaagaatgtactcttgctcatatttattctcatcccagaaaccatacagaatacctcccaaactcttgttcataattattctcagcccagaaaccatagagaatacctccaaaatctgaaacatattcatgaaacatctcctcagccccctaacagaatagtctcatcaacaaattgaaaatgtgaaagagacaaaacatttctacccacttgaaaacctatatattcaaccatttaccacagctgtattcagcattctactgagatcatcagataatagggggttaagaagagcttaatcacaaacatttgttcaaaaaaatggattaggaaaccattcttggagcaattatcacccccattagagtatacatgcacaatgcatatgaaatttcgaaataactaattgaatccatactaatatctaacagcttaatgaaaatatagcaaccactacatgtgatgtgaacctaaaaagctgatttcttgatataattatatcaagctatacatcacggtgtaccagacgagcccaaaaggtatgaaggtaaggtataacttgatattaaaaaaaataaaacacaaaacatgcaaataaaagggcatgcaaaattaggggacaaaaaaaaaaaaagaaaaccttcgtgtcacatctttagcaccattccctgcaaaggcaactgcatatctcaaagatgttttgcatgccgcagctacagcttcaaccttctgctctccatcaataatagcattaatagcatcgacatgcacccactttccagtcaagttctctccattgcagtgtacctctgcccaatacagaggagaccctactcttttcgatccaattgcagtggatattacattggaacatgattcttcacatacaatctttttcattctcttcgaatgtgaagagaaagcagacaaactattgcctgaattgttcacaactgatggtattttagtgcctgcatttccaactgctgtggaagaaagagccatttccatctgcaactcgaactcaagatccccttttctctttgatccttgagatttttgggcaagacaggcctcagaggaatcatgcttcgactcaaaagctaatgaacaatctcctgagacatgtttagtcttcaaatcataattagtgggaaaatctgtgtgttgagtgttgtctgttaagtggcagtccttagtcgtgcatgaactcctctgagaagtttcatacacactctgactgggtgaaaatgatttgcccagagaagcagacacctcactttgtctcgcaaccattggagttgaattactgaagatgcccctacatgatctgcttgcatcttgactaaaataatcagacttttctccatctggttttaaggaggtgacatccaaaatggacacaaacctgatttaaatacaagtctgcttattagtaaatacagagatatttatgtttaacaccagacataatgtttttcctaacacctcaattatccatttcctttatatataccaaataattacaaccaccaacgtgaaatgccaccactatttctcgaacatcaattcatcgctgagacaaagcaaattactaaagtcacaaagtaaacacatgaaaacccttgatacagacataactaataaacaaaatcacacaatgacaaatcaataatacaatttatttcttagctaagccattgcctatcataatatttcctttctatcatcatttcctttcaataaaaatgaggccgatattatctacataaacaggggcaaaagatgacaagctatctttaattacagccaaaatttctatctctagttaacagaaaacaatgtatccttaatccaactccaaaccatatatagatcccccactgtctttgaaaaatttaaagtagaactgcatttgccaatagcataaaactaaaatgattaaataaaaaaaattcaactgttccagtaattgataaatttattattatttagagtccaatccacactttaataatccaaacaaaactaatccaagtctgattccaatttccataccaaatcttctttgttttattatttttgaaaaagagacaaaatgcacatgcccatgagtgacctcctcccaaagttattaagagtcctcacttgtgacagaggaaaaccatatttcctatacaacatcaccctcacaattccgactcttttagttaaggattactatttaggcccaatttagagtcgtagagacaggggcaaaaaagccacggataatggccaaaggctcaacaacataattctgatgatgatcatgatcatgaacatcaccatggcattgtgacgacaaagtggcaatagccaaatagaatgacaataaaagaaaattttgaaaaattccagatgcatccttcaatttctaatctcatgatgaaagctaattaattattttgagattattgtaattcatatttaatggatacttttgaaaagagaaaattcttgcaatagctttccaaataaactattgtgcctctgcatgtaaggttatcagaggttaaaaatttctttacatcttacagatgttatgaatcaggtagaaaccaaaaattgcatgtaatttctgtacaaattgaacggttttcagaataccc

SEQ ID NO: 302331 - DNA, 6993 bp, Cannabis indica
gaagtcatttcacacaattatagggagtgaaaaataaaggtataattaaggtgattattaacttttgtttaattttttgacccgttatttactacgacagcactatgtcatcttgagctaataaattaagttactatgcttggacttttatatgttattaacacacagaacaaagctacagagatgtgtattatctatatattaaattaatgaggtgaagttgatacaatttttggtggcatacatacatgaaataagagtgaattggtaattgatgatcatgtagtgagtgatagaactatatgtaaggtgtaaggttaaagttatatatgtggataataatttatttatattcaagatgcaaaattgtttaattagtaggtatagagttatgctggtaatgtttataaagtgtgagtgaggacaatattgaatgtcaatattgaaaatcaatatatatatttatatatgtgattatacattaataagctaagtttgtgactacaattaataatacaatacaatttcctcttagtacaatacaatacatatttaaaatttaaaaatatggtaccaaaacgttgacatgttattacattcaatggttaaacttttaaaaaaactattatgtaaatgatattgtacaatatttatacgtttaattatacttagaaaaaattaggtgacagaatatgcttcgaaatctttctgtttttttaataatcttatatataccttgtataaatatttatttgaataccttttataatttgggccaattacatccaaaccaattataaactagatatgggtcagatatcttttctaatctattggtgaacgaaaagaaagaacaaataaagattaatgtaaaggctatatagcaggtaggatggaaaaatgattgattggtaggttgggtggtattagtgagatgatttaataaaaggtttctataaattttaaaactttaatatcattaattagtatatcttattgataattaggaattaatagtatgtgaatgaaatatattagacagagaaattggatgacagaagagcatttaattctttgagctaggaacatgcatgaaccttataggtctccctttattttattttccaaatttccatgaccaaaacttttttttggaaaaaaaaaacccaattaaacgacaatcaacatattaatctaacaagtcttcctggttaaaaaaaaattgaagggaaattataacaagttatgacagttgtttgatgatgtattttagttacttactgccacgtttaccaatggtgagtgagtcggataatatataataagatatatacaacaaaataaaaaccgtttagcgccgtcaaattcaggagtcttaaactagagtcagaagacgccaaagaaatgccacgtcaccaaattttaattaattaatttaattatttatttttttggccgatcatcagtttgtttttcttttttaattgatcaatttgagaagtgacccaatcaaatcctccaatagccttcatgacaacgtggtgacagccttaatccagttgtcaaatgaccccacttccgcacctttctttttacccaataatattctttccattttctcacccttttcacttaatttcttttccaaattctgaaattatatgaactgtctttttagttgtgttcgattaaaaattggaagttaaaatatagtaagaataattatttctatggtatatatatatatacaaggttgatcggatcaaaataacattgaataacaattatatttaaaaatgaaggagagagaaagtgaagccaagaggataaaacaggtaagcagccgacatccattttagtcatctcatgaagcagcagtagctagcttggctagctcccattctctctttaaacccataaaaacgcagagaaaaaacttcaatcaaaatccaaaaacgacatcataagggtcacaaaacgacaatggatccttgcccattcgcccgcctaatagtggagtctctggctctcaaactcccccaccaagccaccaaaccggccggtctaggcgtccacccttcagccactccatgcttctgcaaactcagcattaagaatttcccctcacagacggctctcctccctctctgctcatcctccggcgattctcctccgcccgattccgccacctcctccgccggattccacctcgattccatcgctctccgccgtatcaaggctgctggaaagcccgttacccttcgcatctcggtctacacggggcgcatgggtcgcacgtgtggagtgaccaacgggaagcttcttggtcgggttaatgtgagtgtggacctgagtggagccgagttccgacctggggttttccagagtgggtggctcaagctcgggagtgagaaggacgagaataagtcatcctcctccgccagacttcatgcggtggtccggtctgaaccggacccccgttacgtgtttcagttcggaggcgaaccggaatgtagccctgtcgtttttcagattcaagggaatatacgacagcccgtttttagttgcaagttcagcgctgaccggaatgcaagatcccggtgagttctaatttcttttttgtttatttggttgcttaagttacggagcactttagtggttaattgttaaatgttgctaacgtgagccttggttggtggattttgtgatttttttttttttagaaaataatataaaatatatgaaatttttaattgttgattgatgatgggggcggtagaatcgattgtgtgtgaatcaagtaattgtgttgtcaattttcttagctggtgtctagtaatcacatgtgtcaagttggggctatgcaaatcttgatccattctacgtttcttatttcatgcaaacaatctgcaaaaagcgcaattgcatatttattcatgtgttccttacaattttcaagaccagttaaaagctttcattttttttgtttcgcttttttcattataatcatgaaatgaaaactaggaatcaacatttaaggaaataacttaaatttcatttatcattgtattaaaaaaaaattgtgatgagctgtctttcgcttagttgatcagtctcttttcattactcttttttaattacaaattgataaccttttactgttgaaaagtattttcggagtatctgatattacattatttgtataagttaatataaaaaacatttccatttgcctttgccgacttttcataattagcaaatgtcgttcacgaaaaaatacacactctgtattatcaccaataatcacaactaactcaattatgtcttttattatattgtataattataattaaattagaaaaaaaaaaccaaacaaacaaatgatcctttcccatgtgcaaaaatcttatgttctgttgcatatcttcataaattctattgttgacatatgtatagtataaacattattatttgttacttaattctttgtttctccatttatataaaatataaaccaaaagaaaaattcaagattctgatgttggactttttgtttttttaacatgaaaaatacagatcactaccctcagatttcaccataaacaacaacaccagaaacagaggatggatgagaacattttccggcgaaagagagaggcccggaagagaaagaaaaggttggatggtgacaattcacgatctatccggatcaccggttgcggcggcttcaatgatcactcccttcgttccttcccccggctcggaccgggtttggcggtccaacccgggggcatggctcattctcagaccacacggggtctccgtcagcagctggaagccttggggccgcctcgaggcgtggcgggagagaggccccgtagacggtctgggctacaaattcgagcttttagctgaaaatgctaacggccccaccaccggaattcctatcgccgaagccacgatgaacgtgaaaaagggtggggaattctgcatcgacagtaggctgagtgtggcggcgttgacttcgaggtcgccggtcaaaggctttgtgatggggtcaactgtggaaggagagggaaaagtgagcaaacccgtcgtccaagtgggagctcagcacgtgacttgcatggcggacgctgctctgttcattgctctctcagccgccattgatctcagtatggacgcttgccgtttattctcgcataagctgaggaaagagttttcccatgatgaacaagatatcttctcttgatatattcacaaggtctcttcatggtggctgtgataatcaagtttttttttctttgctcgagaaaattgtttggtttgagcttcaaaatatatataaatatatagttcttatcttttcttcttttcaattgattagagtattattctttaaattcttttgatcgaccatttttttttctctcaaatttttccctttttcttcttttgttccctgtatttttcggggtgtctatcaagttcgacagttcaagttctggtggcttttgttctggtttatttttttggggtcttggcattgaagactgaacatccatacgtgcacggtttcggtattcgagagtgagagtgggtttcctcgtcttgttaattctgaaatgattagattagaattttattatacactttatacttttattggggatttctcttataattctaagttgatctgtacatatatgcaatgtacatttcaaaacgtttcacaaattccaagtgtaaattcgtaacaattactattattgttaccattcttttgtcattctttggcctcctatacgttttttcacaatctttttggctggtttaagtagtattataagaatgtttaaattttgcagcaacatgacatctcaattgttcagcacatgtacgtacgactctttgtagtgtaacatttgagttttagtatgataaccaattacttaggcggttaggttggttagtttagcttaagtgtcattacacatttatgttatgtgtactcattctgttataacaaaattgattcttgatttgtattgaacttttagtctataaataaagagttttgtactatgtagaattctaagtttaaaagcattcctccataatttgttttgcaattctctctcctccattctaattcttcatgttattagagctattagctgccttcttctggtgacaacttgtctctagcaagcataactgataccagtatcgttcatggtgctccaacaactcaaccgtggaattgtttttcccattcccttacctcatcctttgtgatcaagctaaatcgcatagagttcctcgcctggaaatcgcaagtcataccaacattgattgattacgatttggatgaaattttgcttattgatatcgcaccacctcaaagactcatcaatggcaatcttaatcctgtattcactcaatggagcaagaataatcaacttcttctctctcaactttgagcgtccatgactgaaagcatccttggaatagtagcaagctatactagttcgaacaaagtctcgaaagccttggaacaagtcagctgagctctttccaatattcacaaaggtatgctgataagatgaaatccctctatgattcattagctatagcttgtcatccaaatttggattttgatttgatattgcatctttttaatagccttgaacaagaatttgaccctgttgtatatggcattacgtcttggagcgataatctttctcttgaggaagttcaggcattattgatgtctcatgaaactcgtcttgcaagatacaccaccatgttggatctttcaactaagatctctgcgaacctaacttttggatcaagaattggtcaattttgaccttccaacaatgttgacagaggcaatatgtatgaatcttcatcaagattttctccacgagggtttgctcttccaaattttcctcgatcatctaatccaaatcgtccattatgtctagtgtgtgcgctgttgccatgcttcacgcatctgtcactacacgtttgatgaagattggaccactcccaaatcagtttttagacaatctcaagctcaagccaatttgactgagcattattttgagtatgagccttatgcctacgttgcttaatctattccaaattttattgatgatcaagggtggtatgcagaaattggagccactaatcacatttctttcaatgttaatcatcttgagaatgttatgccttactctggccaagacaatgtggttgtaggtgatggtaagaagctagtcatttctcacattggtagagctagcatctcttccaaatcatcttccccattgcacttaaataatgtattgaaagttccatctataaataaaaatctcgtaagtgtttccaagcttactaagtatttcaaaaattttgttgtttgtcaaggacaaaaaaacgggagtaatcctaatcaaagggaagattaaagatggtctctacttcctaggggatgatgattcaagtctgtcaaatacttcagtgcagtgtcatcttgtcactttgttgacgctgaaaagtggccaataccaactctctagattggtgagatgaataataagtttaagcaaataatttggagagacatataaaatttatagtagttcacttcccatgtcgtgatggtaatggagcttcgtctacttaaagtttttatttctcacaatatagtattacagaaaaaggctaagtgtttaagctctagtttctggagagagtaactagagagagatgctatgacactgtgagcaattttctaaatgtgaaaaataagctaagggagcttttctttaatagttgaaggagacccacaaaaataggggaaatacaaattagatattttatattgtagatgatgatctaacggtgaaaatttgaattcgatagctttagaattgtgattgaagcgtgagacatgacttgatagatcattgaattatcttcaaa

SEQ ID NO: 302332 - DNA, 790 bp, Cannabis indica
ttttttaattttaattttcataatgtttaacccatttgtttgcttgtgtttttttttcggcaaaaagacatttgtagtttatcaattttacatgccaaaaaaggaaaagtcaactaaaatagacaaaactttaaagttcaaaaaatagaaaaagaatgatgtcataaaaaacatacaaaattcaggtgtaaatggatctttttttgttatcgaacaaaaatttatgttaggcgtagtaatttgagtcagacacgataatacgatttaaaacccgcaaaaaataaatgaatttgaatttgccttaaatggattagggttattttttaattaacgtgactaacctatttattttcgggttggcacgcttaacccgaaaatgatactataattacctatgtaagagtatacactcttaaacttattatatttattacatgtaaattatatatttttagttaaataagatataaacatgttaaattgctcataaatgtgtcatgttgggtttggattttaatttttgacacgattactaaatgaatcagatttgaatttagcggttgcttctaatacctaagcctcaacacgacacgaatacgactcactaacacgaatttttacccctagttcatgtgtaaatggatctttgcgtttaatttatttttaaatgaagaagtattctgaaaaataacataagttattatgattattaggcaaaaactatattttcgaatgaggaaattacactctatactttttttatattgtcctcttttatttttaccctctt

SEQ ID NO: 302333 - DNA, 1213 bp, Cannabis indica
aaaaaaaaaagtaaataaaaattccgaaaatacatactgatttttcaatttcaccgtaattatctcccggaaattatatatttattgtatcattgtgatatattctttaagaaaaataatcgtatttcccaaagaataataaagattgcgttagatttgaagaattttctcggtaaccaaacagatcttagttcgagaatataatgtaagaataaatatatatattcgtataaaagtagattttattttatttgatttcttaaaaaagaagcttattaccttcaatctgataatatactcttcctccttctcaacgaagaaggtattgaatttctcgagctcatcttccaacaacaaaatgaaatcgatctcctccctagacatgtgctccttatctccggcttccaccgcatcgccgccgaaagcctccactttcgggcgcttgctcggccgctctccgacgacgccgttagttttaggctcaatagacttcaatttcttcttcaaatccttataggacaaaaacttgtctcgccattccggcaaggtttcttcaatttggttactcaggcttttcccaaacttcatcctagctataataattaggattatatgtttgggtttgtatttagaaatgtgaaaatggtaaagaaaatgaagaaaagggttttacgtttttgaatataatttttctatttctgtgggaaagagaaggaaaatgagagaaactggaagaaaatgtttgaaggggaaaagtgagaggaggagaagaggagggggaagatcggaagggagatataactgtaaaggacagaatattcgagggttataataggaatatccttttgttttcgaagagtatatttggggttttattccttttgataaagattatttgatttctttatatatttatatttaatttttatagatttgaaaacaacacgtggatagacttcaggactgtggctccaggctccgtttttaagcttaggaagccaatcagctgactcaaaataaaaatttctctaataaacaaacaaaatatatatcctcttagataaatgtaaaagttattagtgttttaatatttttctttaggaggagtcctgccgggaactctctttataattttttagtcaatttttacgcttaaaaatatatattcgtatattttttttttaattttttttttcacgggggtgttcgttat

SEQ ID NO: 302334 - DNA, 1987 bp, Cannabis indica
atagacgggaagcgaatcattgcctggcaaaagaaaataaaaaatcaatggtgacaatcataaatgtgacccacgcgctaggggcatgtgccactatatttattaaggaccataggccgcatacaagtctcatttacctgttacaaaataagatttggggggtagatgttgtctcagatttttcccaaaatacgtggccgcgactgcgtataacacgtggaccaaaaagacacctcacccaagaattagctgagtcgtatacatatggacaagtgtagttcgggcagtgagcccccggagaagtacataaagcatgttcttcctctccgggagctagaaatataataaagcatcttcaggagaaggaaaacatattcgaacaatcacctcacagttaatgcagcatgggaaaagcatctacgaacgcctataagaggacgtgttagacaacataagcctcgtttacggcgattacacgataatcaaaggggctagtgacaactccattatgaaaaattacatcaatcaaggaaggataaagattaatctcacataatccctacgatacctacggcataggatgcatgccctattttgtatctcttgggaacttgtgctcatacattactggcagtaaaagacaagtgaccccttttgaaccatccttgtaaatctctataaatacccttgaacaaaatgggaagggagatcgaaaaaaaaggagagagagagcagagagagaagactcaccaagaatattctctgtataagaattctcattaataacaaagactcgtggactatggctcattaattcccgaaccacgtaaaaatcacctgcattaattatctcaaagctctcatcattatctcgtttaatcgcttgctgaaaatcttggtcaacaggaatatttactaacatattcctataatttgaagtcatttactataatttctctatttaaaattcagtacaatcatatttttgtatttctgaaataatcccataataaaatggtagtttttattttatatttacatagtacattgtctttagaagatttacacaatatgttgattatgtataatattttttttaaaaaaaaactcacatcatattcaaattataatgtagcatacacgacaataattttatgtataattctcctcaaaactgttttctagatatactagaagctgtcttgtagatatggcatatacaaacttttccaatttttgtaaaaaaagaaaattataaacaatgacattggtagatagtagattactagataccatatcatacactactcattgaataacaataaccttttccttttccgactaaaaaattaataaagtctttctttttctttttttttgaaaattaaaattataggcttcctattctcttctttttacaattagttagttaagatttccgaagtcataacagccaccagcaccaccatatgagtgggtaatcatttcatctgaactaacatgactcgaatattaattaattaattacttgtttttaattatttatttactaattttttgtttggacggcggacaaatattgaaatcatcactcctttatttatgggacctattttgttctctcaatctttttaattaccttttttttacctttcctttctacatctaatcatcaccatttagtcattactgcaaaaagatattcatctctgttaaactatgtcataatttaactgtttaactgtttggtttcaaacttctatgtccaagtccaactccaatctaatgtagcttttacatacataccaaaaaagaaaaagttatataaattattttcacattattttggcttttcatctacgatcacaaaatcaaaccaaatttcaaataaaaagaaaatatattgtcatagtgatggaaaagttctcattacaagagagaatatagaattacaatcaaaatattcaaaataaaaatagaagtattt

SEQ ID NO: 302335 - DNA, 3445 bp, Cannabis indica
gtatttttgggttttagataaaagtgtcatatattttttagtttgaaatgtattggtttaagaataaaatattaaagttttttaagtatagaaaatcaaatttccctttctaaatctgccggtagtagtagtagagtacatggagaaaaaggaaaatgataccccaccatcaatatattaaacgacgacgcgttttggttaagcggtaaaactaaaaacacagcaactgttataactgaatcatatagaaatcaacgcattaaaataattctttaacccaattaaaaaactacatataaatggttcttaagttttatcatcctgtccgaggcgattttctcgctctgactcactaactcacaccgacaaacagtcacggagagtgacaataatagtaggatctgattctcaacaccaaactagtcagacctggtccacctctagggtttaatctttaatggcgaccgtagggaagacgaagcttgactctgggtggctcgccgccaggtctactgaggttgacctcactgggactcaactcaccaccacacatcctccttccaaaggccctaattcgccttggatcgacgccgaagtccccggaacgtaatctccctctcttgaactgagtattttgtatgattttgtgttttttttttcttggttctgaagtttgccagtcatttgacttaacttttgggtcaatgtcatgtgcgattcacttctttggattttatatctcggttttagcttaaaaaaatcatacctttttgttttgtactttgtttgatatcgagttttttaatatatgattatatgattgggttgtgttgtgttgtgtttttaaattattgcttgaactttatttgattatttaatgttttttaattaaaaaataagcattgttctatatgtgttatgtgttgggattggattttttttatatatatatatatataaattatcagctgcggagtaaaattttttaggatcgcaattaatagtgatttaattggcagtgttttgggaaccttagtgaagaacaaagttgtccccgatccgttctatggactggaaaatgagacaattatagacattgctgactctggaagggaacactacacgttctggttctttactacatttcaatctaagctggtatgtgacatatttacacagttcaaatgatccttgagtgtcactctcataatattgtgtgatttctgtatgggccattaacacaatggaatttcactatacaatgttgttattttaaggttttgctattggttcagttctgggtgtaaaatgctggcaaacaaacctgtttatttacagttgctcatataagattatttgaatttgacatattctcactaaagaattactttgttctgtgtaatatatggtgttcttatcttattcataagtcctttttcttctgcttgctctcatattctagtcaggttctcagcacctggatttgaatttccgtgcaatcaattactcggcagaggtatatttaaatgggcacaaaaaggtcctccccaaagggatgtttagaaggcattctcttgatgtcacagatattgtgcattctgagggtggtcagaatttgcttgctgttattgttcaccctccagatcatcctgggcgtattcctccaaaggggggccaaggtggtgatcacgaggtatattatactaacggacaacaaactagttactttacattggtcttattatttttcttccctgaaaatattatcttatattactcaataaacttttttcagaaattctttaagatattgtgtctaggtcaagttggatggtgttttgatgaattttattgttaattaatgtgcaaacgaataattttttttatttaatttcatgttagatcggaaaagatgttgctacacaatatgtggaaggttgggattggatagctcctataaggtgactatctactacaattgaagatcatttttttcacgtctaatgttattgtcaattgtcatatattttccatcttgtgaaatatggcaaatgtctctgcattgttatctcagttttgttgtaagattgctaactgaaagggataaatgcttgtccatcggtgttctcatttgtacttctgccctatcagcatggagataatgaagagatgaatatataatgctttccttttggtcattactacagggataggaacactggcatatgggatgaggtttctttttatgttacaggggtgagttgtgatcacatggcatgcaaattagatttttttcttcttcttgcacatgcacatatcgttcatgatattcttggtcctttatgccagtattatcatgattatgctatcaactttaacattttaataataaacttaccatcattttatgcagccagtgaaaatagttgatcctcacttggtttcaacatttcatgacaattacaagagagtatatttacatactacaactgagttggtaaatagaagtgcctgggttgcagagtgctctttaaatatccaagtgacaacagagcttgaaggtaacatgtgtttggtggagcatctacagacgcgacatttgtcaatccccgcgggatcacgggtgcagtatacatttccccaggtcagtaataacctggtgtgctgcatcttatttagttgtaagatagtctcagaataaaaagttgctgtgattttggtttatcttgtgttttttggttaaagaatttataaatctggctttcaaatttctgttcaagtgctaattagtgcaattggcagctctttttttacaagcctaatttatggtggcccaatggtatgggaaaacaatccctgtacaatgttgttattacaattgaagtaaaaggatatggagagtctgattcatggcgtcagctatttgggttccgcaaaattgagagccatattgataaagctacaggcggaaggtgtgttctagctatcttatgatttcggtactttcaatgtattcataaccaacactgttggtgtagaacagaagttctttagcatttgtataactgaatgttttttggtgtgtaggctgttcaaggtcaatgggcagcctattttcatacgtggaggtaattggatattgtcggatggattacttcggctttcaaaaaagcgctacagtacagatatcaagttccatgcagacatgaattttaacatgatccgttgttggggtggtggattggcagaaagacctgaattctattattactgtgatctttatggtctgctggtaatttacctcctttatgccctgctcttgctttgtccatgcattgtgatctctaattctaatgtctagatgatgttatattatgtttcaagtttaagtttactcttcctaatttttaaaacaaacttttttctttttttaagtttttttttt

SEQ ID NO: 302336 - DNA, 3307 bp, Cannabis indica
gacagaaacaaagaaccaaaaaataactaacctcgccggaggcagcgcagagaacccgcttctggttctccaattcggagacaatcctggcatcctcagtctcatgaatcgaaatcttgtcatccataaccataaagaacttgtccccagtagaatcaaatcccaccatgctagcctccctgcccatccggcaaaaaaagctcctcctacccctcaacaagttgagcatcccaagacactcgtctcgccccaccgtcagcgccaaccttccagacgggtgcacggagaggtcgttgattcccttcttatggaccttaactgtcttaaggaggacaaaggggtccgcatcgtagatgcagacggtgccatcagaggccgcagagatgaggttgcgagggaaggagatgctgggaggggtgaagaacgagagggaagtaatggtggcagtgtgatcgttgagtgagccgagagatgaggctgcggcgaagtcgtagagatgaatggtgtcgtcggagccaccagaagctgcggcgggtccggcagcggctacggtggtgatggaggaaacgtgggaaggataagagaataaaggggttagggttagtgtttttccgtcggagctttgtttaaggggtttgagcttgaatccccatatgaatcgctcgtatgaacctgcgatgagactcatggtaacgatttcgattcttctacgacaggtgatgggtcaatggagaaggaaagatggtgagcaacgtcggctagtgctgtcttccaaagattttagaatattgatttcgagggtttttagttttcaagggtttatgatgagaatgagtataggatcaaacgacatgtcgttttagttataaaatcgtcttgacgtttttaaccccataagttttacttcttcccacatttgcccatatttgttatatgttaacattctacatttcgataatattttaggttcagtatttgagtagagaattaaataaaaatcttatatgttgtataatttataatttaaaattataattcactaccatttcaaaaaaaaaaaaaatgaaaaaaagtagtagaatagatttttgtgtatgaatatttataacaccactcctaattcactattaccaatatttgagcaatacgagtccctagtaatctgagaatatgcaacacacatagacatataagatggatcgaatttcaatttcaacaaacaacaatttcaactaatgtacactaagatcgtttcctcgacttaaatagcacggtatctaatcaatgccattaatagtagaagagtttggaagtaaacatgattcaattatttattaattatttatttaacacttttatgtaaaacaaaaaaaaaagaattgattctttgcagagtagattaagaggggaaaaaaacactttacaagaatttgggatatttatacaagtaccggatcagttaatcaaagtcgtcaacattaagccagtcacttgactcctcaccttctgaatctttctcccttgattgggtggaattttttcgagcctctggacttttactaagttgaacccaatcattagattcattagccgaagaacttctgccgtcttgagctcgcttgtcttccgataatttacgagaaacttcactgtcatcatcctctagatcactgaatgaaatgtcatcttcagtttcaaactttaaagaggtagaatctgctgctgagccgctcgagtggacaatttccttgtcctctggctgttcttttggcaaaacttcaaacttttcattgacatttgatgatggattctccttcccttcttttttgctaacttggataggaccttgagatgcattcgggacctcagagttctcagaggtctctgattgtgcttctctgttcttttgaagcttctgcagaagtacatctcttgcttcaacaatctgcaaagaaacggtacatttctttactaagagaaaaacaaaatcacaaaaaaaataaaaagtttaaaatcttctccataaagctgcaacatgggacataaaaaacatgatgcagtattccagtgacaactaaataacttctataaaaatgacattcattatttcacgtgttcaactaattccagacaatgaaagccatggcatttattgataaaaggccctccaaacttgttggtcaatcctagaacaggaaagctcatagccttaaaaatccaagaagaaaagataaatgcctgcatgaagttgtaaagttgcaaacacaactcatatgtggagatgaacacatataatgagcacgctatgattgaaaagcattaagcatatatagatcagctaccacaggacctacacattagtaaaagtcaatctttactgaaaacatgtgaagcaaaatctctaaccttgggagtggaaagaagctcaaaatcatgtacactcagtctaggaacgagcaatataaaatagaccatccaaaaaatttcttggctcattgaacggcaaagccttaacctaagtgcagcaaactcaggaatatactgttcaattgttgaggcatgttctctctgtgcatcagacatgccgaattctgcattaaaaaaaaacagaaatgaaaaacctaaagaccacagttgtactatttgtacaagtgccaatttcttcagtgaaaagataaatctgcacgaaaagtcagctacgcaaatatgaatatctttcatcatcttgtgttttaaactctagcccaacattctttaaggcaaagcaagagaggatacatgaaataacgcggcagctgtaacagaaaattttaagataacaaagagcatttagattcaaatgcagaaatactacattattatatttcccgaacaaagctcctcaatagtccatgataaatctaatatttatgctcaggtcttaataccctttgaacaaatccttccattgatttaacatacaaaccccatagaaaacaatagaaaaactctcttggtttttataccgggtaactcagaggaataattacttctacgattatgcattaccttcttccctttttttcttctttgcatgctatcatttgctataggtttttgctcctgaaatgtcagtgagcaagaaccaacaacaataaaaccaatagatgattcagtgaatgagataaactcaaactgaatgcagaaaactgacagatccaaacccacaaaagagatgagaaatctcatagaatgaatgaactataaaaaataaaataaaaaagacaccaacacatcataagttagcaactctctctctctctctctc

SEQ ID NO: 302337 - DNA, 2152 bp, Cannabis indica
agccttctctctctatacctagccgccactctctctctctctcttcctccttgagatttcgagatcctggtaaaataaattcttacagataacaacctggattccacgtgtccactattggaaacgcggataacatttacccacaagcttccaggattatacgtctggtggaatcttgcttcactccttcagtatggacatgtggagaatgagggataatatcatgactttctaagggttactcgatcaagaaaggtgacttccgtctttgattgtggtacatccacgtgtcaatccaatgatggtggaaggacacaatcgtggaggagtcgctttccacaaacggctatattttgacagttgttcacttttttggcacaaaaattgaaaaatggcatcttcatcattgattgtgcctcgattttagagagcattaattgtgaagatgtgtgtggatcgttgaactccctagtcgttttatgaagcttgtgttttgggagggtggatcgtggactgttcatccttttttcacgtagattgctttttgaatataaataccttttacaaattttagataccactttcctctcatttctaaatttttaaacccttcaaaacatataactttctctatacccttttgagactaagaatcaaattcagagccagatttcttcaccttggaatgtgctatcaatttctgcattcaccttttattgaggattcgagcacgagagtttccacatcatcaactccagtaatcgtgagtcttacacgagaagaagacacggacctagatttgatgcaaaagttgactctttgattgccctagcatctcttcttcatgaaaatatgtgattaacttcccaagccaaacctagcgatgattagcttgacatcaccgctttcgatatcatgtttcttcttcatttctagattgtattttctgggtttgttgttataagttatgcttgcatgttctattctaagatatgattacaaatttttgtttgtgcgattgtcttcgtaaataaatttaggcaccacaaacgatacttttttttatgaattccttgttagaaatccttagaatcaagctttttgcagtagatatgctaccaaaattttccaacacctaaattccttttggttttgggttcttcattgatattttaactgctcgtcctctccatcattcctaacttcctatctggaacaaataaatcatgggtgtttaaccccatttctagacctggccaattataaatttgcctttgggttactggttcccggagcccttgggacaggacttcatcctgttggttggccagaggtgttccaccaaggggctggctggctaaaggttgactaattaggggtgttgttaagcctaagatccctgtcggccctcagaccattggttgtcaagatctaactgttctcgccacttgatctttatggcaagacttgtttcgggtaggggatggtttgtcttggttctagaggaacctagttagatagtttgtcagtagaccctccctaatctattaaatagtctcccttggagaagatctatgatgagatcctgacctattctagtagttctctcattaaacttccttattaagtcggtagcgtctctattatggcagtccatctccgcctggtgagatcgaaggatgtactcttggtcatccatccatcttaaaaatttgtgtctctgttgtgcgaatacatcgccaccaacaatgcatggttcttcagtttcgccgacttgatatacaacctctctatgtctggccaactcgagatcttttcccaagtctacatggggctcgtcaattcttggccacgcctctccactataatactggggaccagatccagctgtggtgcctgggggttgctccacgtggaccatccctttagtacgaggcactgctggagggtcctccccgggtggcataggtcgatcattgagaccaactagatttgttgtattgacctggccagttatggtggccaagttcgttgtgcctaccgaggtggtaggggtggccactgttgggttttgtgccctaaataaaagtcatttcaatataatcagatttacttattaataaagatcagaaataatattttatgttgcatg

SEQ ID NO: 302338 - DNA, 3528 bp, Cannabis indica
aaataaaatattctaatatatatgtatatgtaataaattgattcattgagagaataattattgtttcacttaaagtagtacgtaggatatataaatagtaagagagaatccaataatatataactaatatgtatatggttgtggttaatctatacagttttcacgtacgtaaattgattagacatgtcatggaagtgatatccaactttatacttaacaatatatttatatataattaataatttcccaattcataaaaataataaaaaaaattgtacaaaaaagcatttgaaaagataagaagagaagaatagtagtactattttataatagtaaattagtgatgatataataacttctatattaggctaccaaaaaaattattctactttacttgtttttgtttactctttttaatcttccactagtacgtactgcttagctagaatgcaaattaaaagaatattagtgtgtgtcgtaataagagatcgaagagaatattacagttttaggtaattaataaattagtcacacgcatatgctgcagaatttagaattacagtttttaatccaaatttgtcttcttttctggaataaataacagtacagtacttctatatatatattcttttacttaattactaattttattttgggaaattattcatatactatttttttaatttttcttttttaaatttacagtttgaatttctaaagtggttggagcgctagttgcaataggggtttctatacgatttttttttgttgcaatttagattgcagcgctagttgcaatagggatttcagtgtagaattccgtaaaaatgcaaaaaaaaaaaaaaaaattattttgaaatgtaaaaataaaaaaactccttttatttatacaattttttttttaaattacatttatacaaataaattactatagtattattactgaaagtttaatttaactaaaacaaactgcttctattttgtttagtaatattttttatataattaatatttagtgataattttaatattttctatatatttattttgataatattaattagtaacaaatttattaaatttgtattattttatatcacttatatcactacaaattttttttatttttagtcacaataaaacttgtgattaaaagtaaaaaagttatgacaaattataaattgtcaatattccgtgactaaagagtccctggctatataaatgtattaatcacaattataatttgttgtgagtaaatgtatttttatagtcacaatacttgttgtgattaaactaaattagtgacgatttgtatctaaatactaagttttaattacaattaactttttattgtgattaaaagtcacatttagtcacacaaaaattatattgtgacaatttatcactaaaaataattgtttaaatttaattcataatatttgcaataaaaagttgtaacaaatattaatataataattttttcaacaatttctacattaccccgtgttaatttgcacgtgttaattgataattgtttattactttgtaaaactccaaagatggttaaaaaattatattatcaatagtttttttcttttttagaaagctaataaataattttcaattgtatgtttttaagcagctgggttagatggtgatggtgattttattttttttttaatttttttgttaagagatggtgatgtttattagatatagacagaataattatattcattcgttcatttcattcaacagaataaaaacaaaactttaatacattttttgataaattctaaactcagtatctacgtaaacaatcttccctaaaataaccgcgttaacgaaaatggcacacgtgtaaaccaatacacactacaagagagtgagtccaagaaataatatacccaaatttgggaaaaaattacatggtatacccactttactttatttgttttaatttttacttttatttccatattctttaagatatacccacttttaaagatgatgtgcttattatagcttttacataaatgtaaattatgtactacacttaagtaaaaggtaagaatatattagacaattcacttataaaagtggatagattttaataaaaaaagtattcctcaatttatctccaatttcggctaggccggccacaaccaccaccaccgctcccttccccatcattgtgggcttaaaaggactcttcagtgggggcccaaaatgtttaaaaggcccatggaccacgatgactctaaaaccacatgccaatcttcatccaacgcgtgtccatcttattccttatctacgtgtcagcctgtgatttgttaatttgggctctcatctcaattatatgaaataataataataataataataatgaatccaaaaagctggcaaaaagtaaagaaatgactaagtggacgatggttttgaaccaatgaaaaggtagaaccacaacacattacactatgagtagtgaatagtgattagatttaggaggagcgatgtaacattatttgaacatgttcttctaaagagcataaaaaatgaatatgaaaaaaaaagccgaatgtgcttttcttaattgggaataaataataattattacactgaatgaaaataattactgctttctaaaaatctaaatatatactcttttccatttgtaaaataagagaacaattttttttgcatttggtcaaattcattttttccaaaatatctcaaaactaatgccatctagctatgacataactcttattcattgatatgtgtagccacatatttagtatatttagatattatactatatgttagtactatcttttattatcagaattttaattttattgattgcatttttagaaatttcaatttctcttaatcattgttatgttactaaaaaatttatataatgaattggaaaaaattatgcaaagtactcgtataattttttatggattaagctataacttgtgaagtttaaattaagattgaatttttctaaaggagtatcgaattaataatgcatcataaatacttttaatttttctacttcaatcttttatacattttttttttttttatagaaaatctaatattttccgaagaaatataaagaatcttacaaaaaaaatgttcatatctaactagttattattattattattattaaaatttgtagcattaataaagtggtatatattattgggattcaatttaaaatataataccaagagtagcactagttaaaaaaaaaaagtagggcaactatcactatatactcttaaaattaacatttttgcttacaatgaaaatgtaggtattagtcaaaagttaacactaatctatttttaattataactttgaaaatataataattttagggtaggatattttgtcataacaaacgtttatatatgggggttggatatagtcttctttttgggatcggtgttagtgcaatttgtagtatcaaatcgcccccttgtacacttggtgtaagttttaggatcatat

SEQ ID NO: 302339 - DNA, 2182 bp, Cannabis indica
aatcctaattagcctaatttttttatatagttatttataaaatattattgaaaagttaccattagatttgattaaatctaaagttataactaagacatataataggaatgataaaatataggaaacacaatttgcatgacttatttcttctttctgccttttgttgccatcatcggtcgactatctctaaaagttttaggaattatcatctgaacaaggtattatcacttttgtccaaaagcttatttaccatatctctaagcactaagggaactctcatgaaaataactttgggaattatcaagccttgtattttctaacaagtgcttattcccgttgtcaaccattcagtggctttaaaaaggcttcagtccaaagttggtagtgatctagctctgtttgatgtcgatcttctagagcaaacagttggtacctactgccaactaagcgtagataggtgggctacagaatttcgccaagacacaatcttcctggcgtaattcactttgtcattaggctgctagagttagtattctcaattaatgttgtaattaattttattcatcatattttactaacgttattttattctactctttttaaggaaaaatgctcgcagaacactgtttggaaaatgactttagagttagagaacctccagaccgaacgcgagacatttaacaaaaagagggaggaggctatgtccaagttggaagagatccataatctaatgacagagctcgtggatcaacaagttaaggataggctccaatctcatatcaatgacattatcaaatcttacaagtaggacttttggaagcaatagaagcaggcatatgagtataaggagaattacaaccaagctaagggtcgaatcgagaccttggaagctcacgagttaagtctaaaagataagcttcagaacgcggagtgtgatctgaggaatactggactaagggtggatgtgctaaataaggaccttgatgagaataataattgcatctacatcctggaacaggatcttaggctcatgaggctcatgactggcttctgtgatgcttcattgctagccaagaaggaccttaccaccaaacttgaggcccaaaccaaggaaaaactaaaatttaacttcaactaacaaaagcaaagaggaaagcagaagaggaactggcagccgtgaaaaagaaagcagaagaagacctggcagtagcaaatgtttgtacgagggaagatttatcaaactcctttcttattgcccttcatacattatggaagagggatcctaatgttttgaagattcttggagaagaggaaaagaatttccttcctctaatccacgatctagataggaaaaatcttccaaatgatgaagaggcagaggactctgagtcagaaattgaccttccaaccgaagtgctaagctcaagacttactcaacctgattcaactactgggcttgctgttccaaagttttgtgtcagctaacactgaagattccatgcaatcttaatggccttatattattttttatttttgtttgggggacaagggtcccccttttaatcattttgaagataatagttttgctcttgtcatagagttttattgtttgtaatttaactttccttttatcgtccctaaagactagatagttttttaattacttccacacaatcacttagatttcaaatgcattaagtgttaggaataaaagaattttgttaagttagttatcttccaaacaccctgaggttctagctcccacaacctgacccttggagttttaattttatactcagactttttaactatttaagattaaaataataaatctggaaaacttataagaattacttactccttgatccttgagattctggttccaaaagtctaaaacttttgggcttcaattttatttcttcaatgtttctgcttttctttattgtctttgaagcttgaacttctttctttagtttatcaacttgagttaactagtgaactattaatataagtatggtaagatggaaacttacccacggttccctaaggttatggttccaaaggcctgaaccttatggacttcaatttatgcttctactccaagctgattaatgaacattcacacttaaaagaataaaatttttagatttttggaggtgcatcgtgttgggttttgtgccct

SEQ ID NO: 302340 - DNA, 1146 bp, Cannabis indica
cttcaaatcaatgacatataactcattcggtagaggcggtttatcatatatcttaaaagttacagggtgtggcagccaaggatcttcaatgactctaacagaattgccattaacaatcctccatcgataccctttttgaataaccttcttcccccaaaccaaacttcgccaaataaatggcgcatggttcccacttttttcctccaccaccccaccatttgggtaatagcttggtttcaacactcggctacataaagaattcggaaaccgtatgcaccgccaaacttgcttagctagaagagcttggttaaaaagtctcaaatcccgaaaacccaaaccaccttgctctttgtgcttgcataagacgtcccacttacaccaatgtatcttcgaatctttctccgaagatccccaccaaaatcttgccgccatgctataattttatttagttataatacatagaaatcctataatacataaaatcctataattttatttagttagttaatttattatgtcaaagggaaaatggaagaggtgggtttcctaatatgaagtttgaacatcaccgaactttgactttgaaactaacttatagtatgcaatgccgtatggtgcggatccaccaaattggacttcttttttaaacaacaataataataataatatatttggaagattagcaaaagaaaatagaagaaaagtatttgaaaactggaagtgttaggttcggtcaattgcttggggttcttagtcgttgaaaatacattggttgaagttgcagccaactctctaatcaccactactacatattaactctactatatatatactacccgtctttatcatgcaaatttacgtactttgacaattcttctttcttttttccaagtttaatccaatttgtccacttaattatttcttattaattattttagtctcgtatatatagagaaaaatgatagagcatattttgtagctatatatgacaagtaacaatatttaatatacgcatgtaaaaggttaattggcataatgaaatttaattataaggcagagagattagtcgtacgtaccattactactcctttgcctaaggccatatttaatgccacactaaaaattcatatattatataatttttta

SEQ ID NO: 302341 - DNA, 2837 bp, Cannabis indica
gtctaataaaccgtcccaaactactaacatactaaattgtgattttactgagccaaacaccgagttccaaaataccgggcaccgaaaatgtaaaattatgaaaactactaaatgacataaaaatgcatctctgaattcaataataacagtataaataattatttaaatagctataaataatttcataattaatcatgattaactgctaatttccaaattaaactaagcggtctttacacaacctattttcatttgttatcctgatcaaattctcatcctgtgtcctaccttttgtagatgaaccctgatgagttttggggaggcgaacatcttacaaaccaagatctatgtcaactcttatacgaggatcatcctcgcctctgtgccagtctgtcctcatccagtgataacctttccaattctagcttcaaagattgggagataagtagtgaacacacaccttccccagaactataggtgaaacaccacttttatcatggccaaatcgagagttaaggctacggacacttcatttgggatcttagaaacagggtgagatgctatcttccgtccaacttgtcatatattgtccgtctagatatcactgataccttgcccgtaggtcatccaaatcctattgctggaggtaaacctattgctacgttttttatgaccatcgctagacatatcaacaagggtctgcctaggcctaggacgatggcacaaaccaagaaaactttgcggaagtcttccttgtctgactcacaaattgcccgcctcgctactttgccaaacactgagaaggccaggcctgctaatgaagaggcagatacagctagggacgttgaagtctaagagatgaaggattagggtgaggtccgtcctgatacttcttctgaggctaacgatgaggaaggtgcagctcgaaagctaccatttcgtggcttcaacaaagagggacaacatgtgtctaaggtcggggaagtcctggaggttggtgaagatttggtcactaaggaatacgccgaggctgttcctctaaggagacaaggtgcactaggagatcgatgggtctctcctccatatatggtaaccagggaaaagatgaagaatctactcaatcgtggttacttaggggatgtcgaatgcttccttccctcccccaaccagttggcgactagtccaatggaaggttactgcgcttggtcgagcgctcacaccaagtagggtgttatgttacccttacttccgtacattaggaggctcgtagactactaccaccttagcccgaccgagttgactcctaagggcatcaaatgcttatctgccctgttcatcctttatgcctcggaaggatggggtgagctgtccccacgtgacatcaactggctctttgatttgaagtcaagtctcaagcagaacaaatcaggatacttctaattttctaagatcgaggacaagaggttgacaggcaccacgaatactgaggtgagtaaaatagggatcaactggccgaggctgataatgatttgtacatggagcttctgatggtgggttcctaaaggaggcaactcgcataagtattttcttctttatttttatcctgtctttttaccagtctagattttaactttttcctatgcaactcaatcagaggatggcctacacctactcccgagcaaaatctacgaacttgaagaatatcaccaccaccaccaatttgcagaaggaggtggatttagccaataagaaggtagtgcaggtaagagctgagctgagtgagctgaacaagaaacttttagctgccaacaagcggatcgaggagggaaccaaggaactttaagagatttcatccaccacccagctcgtggaagacagtgaagctttaacaaaggaggtcaatggtcttaaggatgagagggagggcctccatactcttctcttgactttaactacggacccttgcagtgtgaatcttttcttttctttttcttgttcagccaatgggcctttattaaagataatatgactgaccaagcggtctttaaacttggtaatacttcatatcattttgagaggactagcttactgggcagcctttaatcacgggtttacactgtgcttttaccatctttttaatgaatattttcccttgtttcaatacttgaacctgcaaactgttatgtttttctttttaagcttgttatttaccttattgtttaccaatgctttgtacaggtatagttgccccccaagtgaccgagaagacttatgactttgggtcacttgtatttcacaaatttggtttttgtctgtttttctctttgcatcgagcataccttttgtacaatttaatggtaaattcataactttctaacataatttacacaattagaataataattaaaatctttattcatttattggtctgaacagttttgttaccgtggtaacttacatttatgagagctattaaatgatctaactgatctttagctaaatttaaacatgaaaaattacacataaagaaaaaattgtacttttgaaagtggtcattcgacctaagtacttagttatttcatcaaaacatttgagtggggtacgcccaaaaggccatctacttaaaagtaaatgttcttgcattgcgtacttaaagtggtcatctgaccttgtacacttactggtagtattttctcaaatgttccccattccaataccttggtactagaacgagctccaaatttttgtcataccacccaagcttatatgcccctgattttataactttgaccacctgatatggtccttcccagttaggtccgagcacaccagtcgtg

SEQ ID NO: 302342 - DNA, 3664 bp, Cannabis indica
agtagagaccgatagcctccttgctgttcaggctactagaagcgatcacaatatgtcctccacttttggtttaatcaccaaagattgtcatgctttattgttgtctctaactgatgttaatttacgttttattaaacgatcagcaaatcgggttgctcatgctgttgctagacatgctcgatttttctctagttgtagtatttttgagtataatgtctggcctgatttacaggctctcttgtattcagaatgcttttaattcaatgaaattgatatttcatttaaaaaaaaaaacacatgccttgctcgtacatcgcacaaatatattattagttacgtaaacgacaacaaatcgggtcgtcgctggtgttctgtatccaaaaaaaacaaacttctaaggaaaattgggatattttcccggaaaaatatctaattttctcgccaaggcttaggatgactaagattatggttcagccactgttctttctgttcacgatcttcttcttcttcttccatgaatcgttcagttcatatgctggttcagccagttccatcatcaaccccgctaaagtcaaacagatttcatggaaaccaaggtatctctcctattggattttgaatttgttttcttatttcgtgtaatgaatcggttttcgatcgtcgattgattttcagagctttcatctacgaaggatttcttacggacttggaatgcgaccatttgatctcgcttgtgagtaccgtggacggagcagttcattgattatgatctttttgaagatatcaaagtatttgagtgctgaattttcgatttcattgttcacaggccaaatcggaacttaagagatcagctgtcgccgatagcgagtccggggagagccagcttagcgaagttcgtactagctccggcatgttcatatctaaggccaaggtttgccttttttttttcttccttcgatttgtatggaatatgttatgatactggtcttaaaattctgcattattgaattgaacatgttttgttgttactcaaattctacttttcgcatttaacttcttaattgggctacaaggtattggatttatatgtaacgatttgggaattttagtaatatttgtgctctaacagagtcttcaatgttcattgtttagtgatatgggtgggaatgtgcgtttttgtatttgtatgaggaatttgtttaacattactcaaatttgtagctcatttatatctgaatttaaacctatccgtaggaccctattgttgctggtatagaggacaagatttcaacgtggacttttcttcctaaaggtatggatttttctttaaagctaaattctttattttctcctaacctaataagttcctataactatcacagtttctagtctctgtatgtgatttttctgctgtaacatgtatatcagtatttcccttttggaaggtaaagaggaaagaagactccttttctgtttagtcttgccaatgttaggtctcaaattagcctactgcataggcaaagttaattaggattacggtagctgagctgtcttttgtcgctgagatgtatgtttttttaagtgagatgtcaaatactaaagtcctgttgggtagacagttaggaatcattgttatgctagcctataaataggaggagggagtctattgttagttggggactaattttgtgattgttatagtagaaattacactggagttttccaagtttctcgaataacttgggtatttgtaaccagcctctggctttgatcaagtacaaaactttcttctttcattcaagatctgtgttgtgttctagtgtctatcggccaacccattaatctaacctatgtgctatttatttagtctggcttcagaacttatagttaaatataaactttgtagtgtaatcttcacagctgaagtatggcatacttaaaagaagtctttatctgtatttgaaagaggactaaaagcaaactaaatctaaacgaagagacagtagaagagttattatgtggagaatttggttgaaatgctataatgctagtttagtggtatgatacacgtgtttagatctgattagagcaagctgaaactttaaaggacgttacttgtgtaatataatagttctttgttactcataccaatttattgaaagaagacacagaaccagttggccttcgttctttattttttgttttttgttgttttggtttcttgtttttctttgaagattgctggttacaaatatatttttctcaatttcagaaaatggagaagacatacaggtacttagatatgaagaaggccagaaatatgaaccccactatgattactttgctgacaaagtcaacattatccggggtggacaccgcatagcaactgtactcatgtatctcactgatgtagtcaagggtggtgaaacggtattccctcatgcagtggttagttaaatttttcacttaatgagattcacataattgtcttcagacattatttgttggtagatggtgttcataattggctttacagagtcttgcctggttttctctaatttggtctgtcaacatttcatgtgtcttgtcttgaaccaaatcttttggatgagcttgcataatattatcaaatgtacaattatcttctaacaattgaactatacatgacaacctgaataggttgactgataaaagtaattataaactgccaagaaaactcttccattatctctgcctttagtttgtccttctataacattaattaacaattttttatcttccttcaggagaatccacgccataagccttctacaactcacgaagatttctccgagtgtgcaaagaaaggagttgccggtactaattacaaataaaaaagtttcaattattgttatttaattctacttataccatggttttcgtccaagtttagttaatgactacggactcttttctttctcaccatgtcaatactcagtcaaagcacgacgaggggatgcccttctcttcttcagtcttctcccaactgctattccggacacactcagtctccacgcagggtgcccagtcatcgaaggtgagaaatggtcagcaacaaaatggatacatgtagattcatttgacaaggatgtgtcagctggtgggacctgtacagacatgaatgaaagctgtgagagatgggctgcccttggtgaatgcaccaagaacaaagaatacatggttggatctccagaacttcctggatactgtaggaggagttgtaaaatgtgctaaaatcttccagtcctcgggttagtagtatccattcattttgttcattttcaactggttttattgtacggtacatgacatgtttttttactatatagacaataaattataagacaagccatgtgctgttctttttgttgtacctctctctcagatttacgaaaaatgaaatagtatttgttaatgcatcaaaagatacacttgggatttgattgattaattctttgaaccacacaatgtttgtttccatttgggatttgattgattaattctatttattggggttgttgtgatgattctctcttatccttaatttttacagacattgcatcgggccaattccaatatattaatttcccaagagagagagagagagagagaggagggagggagg

SEQ ID NO: 302343 - DNA, 3904 bp, Cannabis indica
aattaattaaaaatttgaagtaatctcttgctcgtgtaattgggtaattgctgcgtttggtgtaattaaatttaagctaattaggttttttgtttggaactttgacatatatatgctcccagttcaagcagttaaaaattttccctgaactattgtccaattttattgatggaattctgacgtggatgaaaatttagggaggggcacaatttggtgaatatcgaaatttggggggtacaattatgtatatggatgattgccgcattagtaaaattgaacagaattggataaaaggtctttgaatccaacaatcttaaatagttaggggagaatttttaatggtctgaaaagtttggggtaagtcaaaattcaagaggcgaaaatcttaattagccttacatacctatccattttcaatttcttgatggcgatgatttgtcatgactaacgagtcttccttgttattttattgtcgagttgttctaccatttcatcgaacatgccattgttttcttcttgttgccctgtgtttgattctgcaatttgtgtacctttttcgattattaacatgtcttgtgtgattgttgagtctcttggatgttcaaacacataatggatattcggtggaaaatgtttatatgtcgttcgttcgagttactcattaattgtcaaatttcataggaagctttctacttgaatgatggaatgaggaaagaaattttgagttcagtaagcattaaatggagacatttcaaaacaagcttgaacagaaagttcgtagctccatatttggagaacccggacttattgaaagcaaaaccccatgctctcgaaaaacctccacctttatataaggggattacggaaaagacttggaaacaatttgtttccattagagcaactaaagaattccaagtaagagtatctcatatataacaacttcaacaactttgattcattattattattcatggattgactaattcatttctaattaaaataggagtataggaagaaacaacaagaaaggcgcgccggtataaagtctcctcatggattgtcaagtcgtagttacaatgagatagaagctgatcttgtatgtgagagaagtgatcattttgttaataatttgaaatgttttgttgattccatactaacttgtttctaatacagggaagtgaatttggcgcaaatgagtcaatagaccgatctattctttggaaggaggcaacagaagattcttcaggggattatcgaactgagcttgacgagttaacaacaaatgccattgtaagtttcaaagttgcgaaaaaaattattggcctaaatacaattttagatcctatgtttaacaaaatttatggattgaactctctgtttggtcaaatgataattttgatcttgtcaaaagaaaaaaaaagaacataatagatatactctgagctggaaatgctatgaccaattgggttatttttgaacttctttgtgctagattctgttcgatgttggttatattaaaaaatttgactaaatttggctcaggtactttatgttcctttttaaaaaaaatacaatgtgtgaattttcatttaacaaaactgcgggtctgatcggtaaacaatttctcccaaaattatttgtatcattttccaagtattcatttttaactcttgtcattgaaattaacatgtaggataatccgcttgagaaaagaaaagcaggtgggcttgtagagattgggaaaaatgatgtattgacccaagcgttggggtcttccaaacacccacgtcgagttcgaagccaaagccaaggggtgagtcagacagactgctttccgaagccaactgagggtgtgagagaatctcaagaacaacatggcggagtgtactttcaagattttgataagttgcagcagtcattcgatgaaaaactgaagagtcgtgaagtagaatcaaagaaagaaagagatgtgtttttggctaagtttgctgaactttcaagccaaattgcaacactacaagaaaatttaactggccattcttcaacaagtatgcctactacttcgccaatatacgagacacctacacctatggagggagtaggggagttttgcactcctatgaatatcgaaacaacaaaggtagcagctaccaagccttaatttcataatagagttttggtaattcggtaaatgttatgtttagtgtgatttaatctgtatataaaataagtaatgtaatctcatactaattcaatagtatcatagacattgcaggaaacccaaaagtgcaagttgttgggcaagaaagacggcgatgttgttgccgttggagaagtcatagctaagcaagggaacattcatggaaaacccttaggaaagggtaactactgcgttgtggtaaacgagtgtttggacaagaatgccgagattccaattccaaatgggaacgagaagactttagtagctcatgttgtcaacaattccgttgcgtggccatctcatttgatcattcatggcgacgaagaaatagtaagagaaattcaaaagaaattataatctaaacttgtataaaacaactaacatctttcatttttttgttgtttttcgtaaacattcaagtcgcggaagagagcaaagaagaatgagaagaatgtttctctacctattgccctaatgacacaagagaaaactcatacttccatacaacttcctaatcaaattgacactaccccattgatctccaaaattcctaatgagcttccaaagtacttgaggattctctttagaagcataaagtatatggaggcaggtctcatattccaagtccaaatggatgctgaattattaggtcatccacatattttatgcatttctcaagaagatataatccgatttggcttaatggagaaggttggagtaccatgtatttcgttttatataaggtattcgagtccctcttagatacttacataacaattgttatagttttctggtctccagatatcgtagggttagacgataatacgtttaaattttccatgcagagttctatattccgaattagcaaacaaggatataaatcactttattggattcctcgaaccgagtttttcgtcaaatgttggcgccattgaagtggagcgagctcgtttgatatcgattcgcttagataagtcgatacaaggtcaattttggttattaccataccatttgaggtaagtttttttttttcaattaattacaagttagttaactttgtatagttatattaataactaactttgtatcttaattgtgatgttagatatcattggactttaataataattgataaagatcaccaaatttgttacttccttgatgctcttggaaatcctccaccagaagatcttaagttacttatgtccatgtaatcattctaaccctaataatctttattataatttcaaatttaaatcacttttcttaattattatttttaaattttttagggttttcgacaaaaatggcggtgctaaatggagaacaatcgagtgccctcgtcaatcatcaacagcgaaatgcggtttctatgttctaaagatgatgaaagactttgttacgaatgaggcaccgattcggtggcttaattttcatgtaagtatttataaaaggtcattagtgatcttaattatatttatttgttgttttaattatctaattagtttgattttttttttgttctagtgtagcgaaagaatccgtacactttagagaaatcaatgaagtacgcgatgaatgggcgtttaacctaatcgaatggatgccataagttaattagtttgttaatgtaaatagaaatcttgtgaattttctttatatttactatcaaaaaattaagagcatatttttatttaaaaaaac

SEQ ID NO: 302344 - DNA, 3415 bp, Cannabis indica
aaaaatagtatttttcaacttacccaaatagaatctgcaatgcatagcaggcccatattaatctgtgtttcggaggaatagcccattccaatctaaatgatggtgttatatcatactattttggccttttcttttcataactaaccaaaaatgatgaaaatattacaaaaatactgatacacaatttcttaacaaaaatacacactgttgttttatgttatttttacaaaaaaaatttatactacattgtttgtactttgttgttttatgctgctttcatagagtttcataaaaaatgtaattggaaagaaaaacataaaaaagttaatcatgtttgaaaatctgtatgtcaataaaatgttaaaaatgtatcattttagacagtttcttttaaaaaaaattcccaactatttttgtctctctaattgtatactattatactaaacattatcattcaacttgttcacagggtagaaatcgtagcttgcaacattgcgaatatcattgtttgtaaatagttattttctaaattatatgtacaattttagaaatgagttttatatagatggtactgaaataaaattcattggtgcaatatcttataatcaaatacatttatggtgcatttttccaaagccaatgctttggcctttactcacacgccttgctcgcaccaccctcacatctaccattccaaaattacacttgcctggtaacccacagcctcgtgttttgactgatgatgaaacactttctactcctaatatctctccaccatcactgcatatttcgtccaccaactcttacccacttacttccccaattactacctatccaccatcctcacaaccctccactacttctccactgccttcactaccagcaagtattgacacttccagtaacaccttttctcatggtattcattccaccatttccaattccccacctattactgtttcacaatataatacccttccaacatccacgatgcacccaggcaaaaaagtcgaaccttgccactctgttgcccatttgactggtatttttacaccagatattggatctgctacttcaccttctttctctttcgccacatatcccccaaccttaacacccaaaccacaaatggctgcttactcgactgccaccattacaacatctttccctattgtatcaacttccacacttgtttcctcagtcagtaacaaagaaaatgtaccttccacggctgttactaagagacagaacgataatctttctgtcaggcagtttctcaaacgatgtcgcaaccaaaacacccatgttccaacgccactacctatgggagaaagcgcaagccacaatgtttcctatgatgatatggattcggatggcttcattgatgatttcgcggtgattgctttgcaatcccgcgactcattatgaaaattttaagttggaatgctcggggattggggaacccgaatgcattcaggcaccttcgattgcttgttaaacaacaatcgccccacattttgtttcttatggaaacaaagctgccaccaaattctatttctcacttccgtcaaactttaaactttcctaatggcttggaatcgcctcggaatggcctcagtggtggattaatgcttctttggcatcagaatattgatgttacacttctgaatttgggtcgaactttctttgattgtcttgtaaaagccgagaatgatactaccttccacctatctgctttctacggtgctcctgctgctcaacataagtctgattcatggttacttttgcaacgcctagctgatgtttctccatctctcccttggatagccattggtgatttcaacgaaatactttccaatgaaaataaatctggaggctgtctcaggagtgaacggcaaatggaattgtttcgtaagactcttgatcattgtaaattacatgagactagctttgaaggggacccctttacttggattaaaaatcgttgtggtgtaaacactcttaaggagcgtttggattggtgttttgtgaaccatcattggggaagtcttttttgtgcccctcacatgttgcatcttgactattacagctcagaccaccgagcaatatcagccacttttgttcctgttaatacctagttacagccagaaaaaagacgcagcaggtttcggcttgagaaactttggctttctgatccgcaaagcacagatataatatcagcaagttggaattcttcaccaaacgctgatcctattgctgctgtccttactaatattcaggagtgtgctttgaatctccaatagtggcatatcgacaagtatggcaatatgaagaggaaaatttctgatgctcaatccaaagtggaagctctcaataacagtccatttcgttctgctgaatcagtaaatactttgaagacttctgaagcttttttggacgaactattggagcaggaggaaatctattggcaacaacgctcacgtgttgactggttaaatgcgggggttcgaaacaccaagttttttcatgctaaagcatcggccagaaagtcaaataacacagttaagtttctgcttcttgagaatggttctcgtgtctctgctaaacatgaaatggcagctgctatccatgactattttgctgagatttttacagcttctccattagatgaggatgcaattgttaccactttaaatgccattccaactactatcacacctgagatgaacgctaatctcctcaagccttttgaagccgctgaagttgaaatggcactgcattccatggctcctgacacgagccccggtattgatggtatgtcccctatgttttatcaacacaattgggctgtggttggtaatcttgtaacaactgctgctctaagtgtcttgaataacggagccgattctacgagttttaacaaaactcttattacactcattcccaaaatcaagaaacctcagcgaatgcaagacttccgctccatcagtctttgtaatgttatttccaagcttgtcaccaaagtactggttcatcgcttcaaactcattctccctcatgtcatctccgaatctcagagtgcctttttgccaaaccgtttaattactgacaatgttcttgtagcttttgaactgatcaatgctatcaagaacaaaacctcggggcgcaaaggcattgcctctctgaaacaaactggatatgagtaaagcttttgaccgggttgagtggggatttcttgaaagggtcatgggtaaaatggggtttgctggtccgaatggatttctctaattatgagctgccttcgtactaatagtttctctttcattttaaatggagaggtcacgggttcactccttccatcaagagggcttcgtcaaggttgtccaccatcgccatacttgtttctcatttgttc

SEQ ID NO: 302345 - DNA, 4260 bp, Cannabis indica
ttgtaagaatagtatatttagtgaagtaattaaacttaaataaaaagtgattacttagttttttacgtatttttcttaatatttttaagttaatattagaaatttaggtgtgtaaattggatatccaaattataaaaaccgatccaatccaattagtaattggattggattggattggattttgaggtctaattggattggatcggatgataattttccaaatccaattactaattggattggatcggatgaggaaaaaaaggttggattggatcggatgcccacccctagtagtggcattattgtttagagagccaattttgaattgggctcaaaaacgatttgagggtgggctctagttcgcaggcccaccgttcaccatgagtatattaagctggaattgccgtgggcatgggaacccatgggtatttcaattccttgtagatcttgtgatccagaagaaacccaactttctttttatttgtgaaacaattagcaatagtggtattattgaaagacttcgtgtgaaattgggctttgaaggtatgcattcggttgatgcaaggggccacagtgcaggaattgctatgctttggagaaataatgtagacgcgtaactactcattattcttgtaactttattaacattcaagtttttgtgccacactcaattccctggagactcactggcctttacggagagccaaactggggaaatcgtcaccaaacgtggaatctcattcgtaacttgaaatagtcctcgactcatccctggtgtatcatcggagacctgaacaatgtcactagctaggcagataaacatggaggcaacaaatctccacagagtttaatagatggattcaatcaagttctttacgactgtaatcttattgacctcgagctcattagatatccatttacatgggaacacagaaaaggcaccccaaattggattgaggtttgtcttgatcgtgcattggtaagtcaatgttggaatgattatttcacttcagctcggcatactaatctcgagataacagcttcagatcattgtcctttactacttcaaccttcgattcaataattatttttccatgctcatcaattcaggttcgaaaacacatggttgcgtgagcctttatgatttcatgtagttaaagaggtttgggaacttaattctgattgcaacattttggaaagacttcgaatttgcggtgaaaagtttactgtgtgggggcgcgactatactggtaatttcaagcaaagaatttttagctgtaaaaaagaaatcaagaaatggaagaagggtcgtgattctgagtcaatacagaagtacaatgatgcccaaaaacttcttagtgaaatcatgaaccaacgtgaagtcttttggcaccaaagatctaaacaagtttggctacgagagggtgaccaaaacagtaaattctttcacgccaaggctacagctcgaaaaaagcataataccattcaaagccttcaagatgactcaagtaattaggtcaattgggacacgggtctggatgcacttatagttaattatttttagaacttatttgcttcctctaattctaattacaatgaagtcactacgagtattcaaccctcaatatctactgctgaaaatgagtctctcctttgcccgattactgatgaagaggtgaaaaaagacttgtttcaaatgcatccagataagtcgcctggaccagatggtatgactccgggtttttatcaaaagtattggtcagtagttgggcaagatgtcatcaatcaagtcaagactttctttacaacatgtactcttcctgctggtttgaaccgtacaaatatggtgttgattcctaagaaaaagcagccgtgtacaatgagtgatcttcgcccaatctcactttccaatgtgctttacaaggtaatctctaaagtacttgctaatcgattaaaggttgtattccgggccgtcttatttcgaataatattatgattgcttttgaggttatgcattatttgaagtgtaaacgtaaaggcaaagaaggtttcatggccttgaagcttgatctaagcaaagcatatgatcgtgttgagtgggacttgattcgtgctatgaggcttcatatggggtttgctagctattttattgacttaatcttaaaaaaaattagcacagtggagtacaatgtcactcatggtggtaaggttctcggcctaatctatcccaaccgtggtatccgtcaaggagacccactatcctcctaacttttcttaatttatgccgaaggcttttcatcattgctgaaacgttttgagaggaatggcctccctaaaggttgtaaagtagcaaatggggctctgatcatatctcatatgttattcgcaggtgatagctacatttattgccgagctaatgaaagagaagcttccaatgttatgagactccaactttttgagacagctttggggcagcaagtgaactttggtaagtcctccattttctttagttctaacacgagtgttgcggttaaaaattgatttttctcatcacttcgaatggatattgctcatgataattctacctacctgggccttccttgtacaatgggaagaaacaaaagtgcaatcctggggttcctcaaagacaaaatgcagaaaagaattcagagttgggagggtagacttctttctaaagccggaggagaagtattgttaaaaacagttgctcaggctcttcctagttacgctatgtcggtgtttttattgcctttggatacatgttcttcattagagagtatgatgtctaaactacttctcagaacacccgtggtataagctggatgagttggaaacgcttaacgaagcacaaagatgctggaggaataggatttcgtagctttcatgactacaatttgtcgttgcttggtaaacaaggctagtatctccttctaaatgatcagactctagtgggacgtgtgtacaaagcaagatattatcctcatggaaactttcttactgcctcacttggaaataattcaagtttcatttggaagagcatttttgaatcacaagagcttatgaaatcgtgtgctaggattcgtattggctcaggcttcgaaactaatgacctcaataatccatggctcccttcagctacaactccctgtgttacttctgatcatccaactcttatcaactgcaaagtctatcagctaatgaaacttaattctagagagtgggatgctgaggtgataaatgacatattcaattcaagagaagcccaagtcattttacaaatccctcttagcaacaattctaatgaagatgtttggtattggagcaaggaatcaacaagaatctattctgtgagaagtgcttataagcacctgcaagaaattaagggtaattggtcggttgatgatggttcgaatatgtggaagagttttggaagattaaggttccacctaaagatctccattttgcttggcgcactttgacagattgcttggcaacctgtgttcaacttcagattaagcacgttctagttcggaggcattgtttgttttgcaatattgcggctgaaaccaccttccacttgttccttgaatgcccttttttcgaaatcttgctggaatagatcagcagtgactcttcccccttcgacagttaccagtttctttgactgtttttctgtaatctggtctcggcacaaaggagaggcaattgaagaagtattgatggtcagttggtccatttggaatgctcgaaatagtcttgtttggaataatcgtacaagctcggatgcggaagttgttgtttctaaggcacatcaagctcttggtcaatgaaagttcgcttaaagctgtcgcttttaaccgctgcaaactatagcagcagcaacgaaatttggacaaaaccagcagaaggtatgatcaagattaatgtggatggcgcaacgtttgaagcgttaagctggataaaggcgtccaacttgttaaatattattattgagacggactgcctcactgctattcaagctttgcaaagtcaaatggatatgccatcgttatttgggattattgtacaagattgtaaagttttattatcttctttgattaatgttactatttgtcgtgttaagcaatctgctaacaaggccacccaccacccgctgtttggctcttgttattggtctgatcataattttgtaattgcaaatttggtttgctaataaattatccattcccattcaaaaaa

SEQ ID NO: 302346 - DNA, 2137 bp, Cannabis indica
gagatgtgttctcagtgcagatgaagcttgtaaattggtgtgtgatttactgcttgacttttaattcatgttcgtaattcatatcttgaaatcaatcaatctaaagatagacaacttggtaatttgaatcattaaaatctacaagttgcactttcatatcctattattattattattattatatatatatgtctaataggtatataactaagttttaaaatttaggggggccacaacccctgtaagggtacatgtggctccggccctgcttgtgttgtagttgatttggaagatcaaggtgtgagtttcattaccattccaaagatacaacatacaaagagatagcaaggacacgtgataggcttcaagaggtaaaatatttctatttatctttttttttctttaatatatgataatcactaaaatacttttgctgtacaccgtatttagtaccataaaaaaccagatagtaccagagttgattccattacgtatataaatgttgtgtgggtattctgcattatatatttgtatatatgatatgtatgtaaatggattattatgattattttgaatgtatggttgatgatggatcgtttattatattatgatattaggtgtaggaattgtttttatttatttttaattattttacgtaaaatatgattacgttgtaatgtttatcgcattgagctcggatttgatttcaaatctcggtcgtgctaccacatttgccatcacatgagaggtcgggttcatgttgggacccagcccatgcacgacgaaatttttgtctcgagttctatgctctatcccttctcgtgcaaccctagtcccatggtgaatgtgcatgggccacacatgtacacaagttagacctgtatgatccgttttcttcctcgtgcaatcagaccttgtgccctccagccatggcagtcttgccacctgtccagtcaattgccatgtagaagctcttcacagagctatttcaagaattcatgtccctatcatgccatcgtcatccacctagtattgaagacccgtgagggtcttacggggtccgtttggcctgtattgtgcgactgagagatgatgagacttgttcggctcttgggtctttgtgacccacgtgatgcttcctttggccatcaatggccaccgtggtcatggtgactaaggatggtaatataattcatagttatgagcacccatagttatttgatccgaacatggaggagaataaccgttcaaataggaaaaatgactaggtgggaaataactgcaccatacatatgcgggtatggtgcgggtacgtacgatattagcatatactgccccatacctgccccgatatatacatacattaatattttttattaatatatatatttaatttattctatttatatgttgtcatatcatatttttgattaacttcttagaactttatcaaatttatggttattgtgattttttttaatgttttgatgtgtctacttaattttttttaactataaattataagggtttatgccctaaaatcaagtatttaatggataatatattagagaatatatgaaatgtaaatatattataaatgaatatatttgttattccaatttttgcccacatgacgtggaatgtccacataggcaagattgatgccacgtggagtacgacctgtcaatagatgactaaagtcaccatgcacaacttatcaattgactatgggtccaaaagctcgagcatagaaaatggccaaccaagagggtctggtcggaccacccctagccgaccaaagaaaggcatgtgctggccagccttagacaaagggtaagccggccaacacctataattactgcaaaaaagaagcctgattgattggtgtttctacggccttcaccttggacgaaccataactcattcccagctgcgaatccactccaaaaacccgcaaaaatagggattaaaccttagatatctacctattctttaggagcaattaattagctatttttaatattaaatatatgataagggagtaatatcttctcattttaagggatattaacctattttgaatctagatctttttataagctctaacctatataaagagcattaggctagaccaaaa

SEQ ID NO: 302347 - DNA, 4119 bp, Cannabis indica
tagattaaaaagttaagttttaattttaactaaacatttaaaaaaaataggaatttaatttgggccttacacgtgtacacttagtcacaactaacagaatagtagtaacggagaggcctaaaatacaacattttgtattaaatccgctaaaaaaatatttaaatatataaaattgaaaatatatggtatttatgctgcaaacttttctttattgaatatagaaaatgcgaaattgcaattaacaataccttgtgtgtcttcaatttctgtatcatatatatgtcagtgtattgaatattttagtaactgtttaataataattcataataaatattcataagtagtaaataaagttggacgaatttgaattgagtaactacataatataattaataaagagagcataagctcattttattcaatcaaaagacaaacatagctcaacagaacatagcaagttgagctccttatttaatacaaacacacatatacaattacatgaggcaatgtagtaggctttctttattcataattataatcaagccactatttttatggtacgtacttttgcctctataaacgatttcagatctgggaaagcatagaaatgccagaggcgttaggaaacttagacaaatagtctaagttatctccataactcacccttaacatgtcacagtaccttttatagtacccaacaaggtttttgtcattattggtattagcataagttgggagttggtttttaattccagaatttgcattgataacaatgttgtggaatgaagggttgttatcatgttgagtcatccaataccatacggcagttttgaaggacaccactgagtctgttgctaccaattcaggattgtttatcaaatctattcccagtgcttcactagcaagcccatagttgtagttgctgtttaaacaataatgatatatattaaaatacaaattcagataatatagatacaattaataatcaaatttacaatattaattaatgcatagagagtgagaaaaatagaataaattaaatagaagatgaatatatagtagtatttacttatctaaagtaaattattttatttataaataaaacattaactgaaattaattcctctaaaataaaatacttactgggtaagttgaattggtcctcgactattatatttttttgccagcagcacatggccaatgagaagatgtacaataatcatactcgccagaagttctattgataaagcaatatccccatgcatgttgatcaaatgaatcaatccattttcctacacgtgaaaaatattgattgatcagtatcacaaaataattaaagtaactatatatataaatatatatatattattgaataatatccattaattaattacgtaagtaacctgcagttgcatgagatgtttgagcaaagaaagctgcgatttcccttttacgagttgccacatctccagtggtaccaaaaccaggaaaagaggcagcagcaatgacaaaagactggtaatcgtagaaacctttacttgggcaatcctttctatgcttaaacatttcgttgaagattgattcactaataacatttcttatatctgaatcatcattggcgttataatctccgagcatagcacgaatgagttcatcagtggaaggtgcaattctccaacattggtattgacaattgtttccttggcaataagcagctgtgctaccacaaaacccaaatctgctacaacaccttcctggagcgcatggactgtttccagtgccagccccacatctgtgatcaggtctttcattccaacattgactttgacaaccagctccacaataggcttctgtgctaccacaaaaaccccattggctacaacagaggttatttcgacacaaggccccgcctgcctgtcttccacattgggctccatctgtagagacaatccccactagcaaaacagaaagacaggaaattgaaaagagtgtaagaaggttgcttaacttcatcttcagaagtatgtgttttatgcatgcaactctaattatatgtttgggatggctttaatggaagacaactggggtctatttatagaatacgttctcatgggtattttgggtattttgcaattctttatgtagtcatgacagattatttatgtgcaaattcatctattctcatcgttcgctttcttttgtttcatatttttacatataggactggatggattttctttaacagcatgcactacaaaaaaaaaaattaaaaattcccatgatttcaccggaaaaaagtcgttatccgcagcgaggtatggttctaattaatgccagcaaagcctgagctttggtgggattcagaattttgtttagctgagccaaaagttaaaaaaaaatatctaaaaattccctaaatgtaaagataatgacatgaaacaaaatgggcataaatataaaaattacactaataaagatggaacgtaaacgaaaaagaaattacataaaattggattaaaatatgaaaatattgttgagaaatttatttacttggggctacaattatatatataaaatgtgtattgggtcatcgtataaataagtcgaagttatgtattttaaaacaatatttatgttaaaggcaaaatgctataaggataatttctaatttaacgaggggctaaataaaaataattaataaatattactagcagttgataatataaaaaggtaatggttagtgttgtatcttttcttcatgaaaccccatcatcaagaggcaaaagttccacagaaaaaaatttcactgcaaatttgtaagatcatacaattttaaagtcgattctataaactctagtacacttccgctaatatttaattatattgttagaattctctcaattaattaggattaaatttagattagagcattctaattaatatatattattttttttcatgaaaaataaatgtatgagttttggtggccatcttttccgtaaatatatataataagttttgacggcagcaaattcttacaccatcgttaaacatgggtggaggtagagtatcagatgtatgtagaaattctttgtattatttttaacattattattttattttattgttttgtgtcgttaaaagagcatcactctgtatattgttcaatattgttacaatcattatgtcttattaaaaaattgttaatttaattacttttttatattaaaacacgacttatgaccaataggtatttaacctacaagtatgatacatatctacctattaataagtaatatgcacatgtttcaaattactttaaggttatccatatatattttatatatattatatggatacatcgacatcagttatatccttacggtggaaataacttactattctttgatcgacgatcaagtggtgcagtagccttaggaacatggttatgagtgtgtcaacttcgttacataggattttttttggctctgctgaaaaaagtcttatcagtgtatggaaaaaatttaaaaactctgaaaaagtgttcaagaaaaaaaaaaaacactgtgaaaaggtaaaaatattggtaattaaattaagttccataataagtaataataagtaagatctactcttctcccattttcgaaaagggaaacaagttgatggatgcatcttccagctatggcatctatatccattacaatagagctcgacttttttcagctttctctctttctttctcctaatgaattttttcaaaggaatgatcgaatttccatttaatagatttatttttatggacaatttactacttccaacctcatcattaagctgatgttctgttcttatgatttagctaacttacattaatctataattatttttttcttggcatgttactgtagttagaagattcattttattattattcgataagattaaactttaattcgaatgcatatatatatatactagatagatgttacgtgttattatgttaattttcttttagtttttagttttttttattattcattaattttaaaattaataatattcaacgtagtgataatcattaaaatttgaaagtattatagttatttaaataaaaataaa

SEQ ID NO: 302348 - DNA, 2753 bp, Cannabis indica
actaaatacaagttaccctaattcttttacacctaatatacagctaatattctaacaatttttatcattatttgtagttaggatatgtttggagccacataaggctcatctacgtggttagatggatgaatgtgtgtttaagtggttgggttgcccataaattaatcttatcacatgaaaagaaagtataatatttaggattgtcattgagcttttcttagagcatttgcaaatttaaaaataggaagccaaaaatgactccaaagaaagcgtataccaagaagctcgatgggaaaatctaaagaactaaagatgttcaaattcacaagaccctgaataattcactcaatgcgaacacatatttgttaagaataaaagataaactcctaaaacaaaagataaaaaaggtaataacccaaaaaagcaactaaaatatcaaagtactgcatcacacactgaaagaagctgactgaaacccatgtcatcatcactctcttcctttggttcttccttctcctcagcagcgggagcagcagctgctgaagcgccaccattgtgtattgatgaaagcatctatacagaagatgcttcgtcaataataccatgtggccaagttttcatttttaatattaccatattaatggctttcattgtgtgctgtctaagctgtgttctatgtataatttctctgctagtgtgttgtttgaaagtttccagactatgttgacagagctctgctactctgttgatttcaatttaggaagagtgtcttttttttttttttttatttcctggttttgatgtcaaaaatagctcagatttttgcaattgttgagttttggcaaatattgtgctcctatggcttagaaggaactataaaattgttcactttttggattttaatatcagtcttctatgttacagaactgagtgataccctttctgtgtttttatgaaccggtatgtagctgtatattttggtgattgtttgatgtcttccacttttgtatggttgaggtcgacttgtagtactcttgtttccctgcctcttgttttccttggtggttatatcccatctccaaatattcatgtaaatttattatgctcggtcacttgttaggacataattgtaattattttttttttctttctcttaatacagagaaagaagaacagagcttataagggaggctgtacaaatgcgctacatgttgcttccatagtttttacactttatttagggaggcgaacacgagtggcattccagttgctcgtcctttatggatggagtttccttctgatgaagctacttttagcaacgatgaagcgtttatggttggaaacagtcttttggtacaaggcatttacacagaggtaaattagttgagttcttattacttgattttgtatttttttctgtacttcatagctttttttcactttatcctggttctaatgcccacaaatctcaacatcctttaccaatgtgctagctaggcaatggcatccatctattggtttgcttttttccttgtatatttgcacatcgaattccaccgctattccctttgctgatgctctccttttttcattcccttaccgctaatattattctggtgataaaatctgtttttccaatgccttctaccagagagcaaagcatacatctgtttatttgcctgggaaagaatcttggtatgatttgagaaccggagctgtatacaagggaggtgtgactcataagcttgatgtttctgaagagagtgttcctgcattccagaaagcaggaacaatcataccacggaaggacaggttgcgacgaagctctactcaaatgataaacgatccatacactctggtaaaacttgagcatgtctctaaaattctaaaaacttattggacgtcaagtcaactttattttttgtattatacatttagaattaaaaatgaaaaagagcaaaaataacatgtatgtttgcacggaaattttatatacatagaacttgttaatatatacttagatacatatactgtcagttctctggcatctgtttaggcagatgtaaagaagtttagagcatgtgtttctggatattatggtgaattgccggttactgtcactgacatttttcagtagttcttgtttgtttgacatatgatccatagattattgatatcgtcttgtgccatttttttaggtaattgctcttaatagttcccaaaaggctgaaggagagctctatatcgacgatggcaaaagcttttcatttgaaaacggtgcttacatccatcgtcgctttgttttctcaaacggcaagcttacatctcacaatgtggcatctgctcctggcggagcacaattttcttctgaatgtgttattgagaggatcatattgttgggacactctgctagaccgaaaaatgccatcatcgaaccagaagataggaacgtagaagttgaaatgggaccgttactcctaaatcaaaggaaagctcaagtttcatcacaatccgcaaacctaatgtaccggttgccagtgattggacaataaaatttttgtagaaatttacgatgccccccatcccaccatattaactttgatctagtaatttgatagggtcttaatgttgacggaagaagagccttgcttacataattagttttagagacagaatgacctcttccagatgcaattttacctttatatgctttagacttcagccagcatgatatatatttatatattttctct

SEQ ID NO: 302349 - DNA, 2577 bp, Cannabis indica
cttctgttgacaatattttatcctctacccttaaaagagtttaagaaatcgcaaagctctgtcctattttccttgcttatttcataaactacgccctatttaaaccagtgtatatggacctgtgaattaagcaattaaggaaaatggacaagatatggtatgaccccaaacttcagcttgagttgttaagaaaccataacataatttgtaaatcctaaagaatagatacgacaaaaagatacatagttcaataacaaaaatatgaagtttaaataaataagttaagtagcattcagcacaaacctttaagatgaataaatccaccatgaatgtcaggacatctctccaaatccagcttttccaagttaactaaactcgagaaggcacgcatgccttcagcagttactgcggtgctctttttaaaactcaaagaggtcaattttgagaatcctacagaacaaggttattgcatgcattcgttaggaactgtttaagttaatccttttttaatatatatatataaaaaaaaaaactaaataactttaagtaagagatggggggcactagacatggaggtgataagacatagttgaaattgtaaatggagaaagaatatagaatcttaacaccaatgtgattaagcccatatctgaaagttatgacagcaattcaaagtcaactcttggaggtctgtgcattgtttgagagaagccaatccagtataagtcacattagaaccagagagatcaagggtaagtaaagatgatccttgtgaagagacaacatccatccaactatccttcacaccaggatattcatccaaacaaatatcctgccaatataaggtgaaaaaccaagttaataagcacctttactctcacaataatgattaacaaaaagccattactacattaatcaactcatcctaaggaaatatcacctgaagagcacagtctctgaaagcttcgacggaaacatcggtaagacaattggaacataccaaatcattaaatattagctgactaacatctctaggcagcattgaaaatgaactgtgcatgtcaatgtcctgttacaatgagccagaataagataaggcagataaaatcgtatgcttttctacttgaaaaagacatagtaataaagtagacaatgacctgacgtattttttgtacgcatagttccaataaagatggacaattgtctcctcctgtctgaccatctacaacaggtctagaaaatgaagttgtcagccattttgaactgctactcttacaatatctagacgacacttcatgaggcacggtatcttccatgactggttggtctctcttccttgaacaaattcctcccataattcaacaatatgataaaatgttattaataaatgttatgaaatgtgaagatgcatgacattacggcccatcccagaacaaaatacagcccatgtcaacaccctccatcctaaatgacagaaaaagacaagaaattataagatatttggaaattttggaggagcatgaatgatcaacacaaatggctaagtaaaaacatgtacaaagaaaactaaactactaatcacacaaaagtgtaaaagaccgatacaaaaatccagactagaccaaaaaaaaaaaaaaatacaaagccaataagataaaaggagtcttataatacttaccaatacacacagaccaacaaggaaaatacccgattctttatctaaagcaaatagagactcagaaagctaagctgatgataagagaaatcgaaaaatacaccatcaaatagtcaaaaagattctttataagaaagaaatcaaacgcaaatccataaaataatattgtgttataataaaaaacactgtaaaactaaaagcaacgaataataataataaaggtattatcatcaacataatatctgccaataaataacatatgagtctgaatttgatagtgatcatcaaaaaaaaaaatgaagaaatcccacaattcccgttcccttactatttgaattttcatccatattttctcagcaaacgaacagattctaagacaacttttacacacttactcaagaaacaataaacataaaaccaaaagataaaaacagagctctcaccaccacctggccgtagttgagacggagagagatagagagatggggttgaggttggatagtaagtaggagagagagagaggagaaagagagaggggaagaatagtgaaagagtgaggagttttctttctcttcatctctgtttcagagtgacgagttaacctgattgtgacacgtggcgcatagaccgggcttacgtcaacagagtgcaattactttattgattaaataattatgaaaatttgtatattgaatgtaaaataaggctagtgtctaacattattatttggtgttatttaatattgagttttatttattttattttaataaatattataaaaaattagttattaattatataatacttcgtcgagatgttcgacattatgaatatttcgtagcaatactcaataataataaaggaaattactcatatattatttttttaatttttgttttttt

SEQ ID NO: 302350 - DNA, 2456 bp, Cannabis indica
atgtcgtatgtaaagatgtaattcattttttccttaaattgtttcggtgttctatcagtgttgatgttctattacttttgttttctcgatatatttccagtttgccgaaaccccctgcctgcccagaacccataaatgatattttcaaggtcatcttgtttatcgagactcattctcagcgtctccctggcaaccaacctccatcacattatctcggacccatatggccatccccaagtttgatctcataggccatgactgtttcctagttttcattccagctataactaatctcagaggccatgattgtattctatcttcaggtaaggcttttacatcgtattttttctcctgttgacaaaatatggagttggtgcagtgttgtttttcctagaaaaactataacagctagaagatagggtgttactaataaccactcaagtttctaaattatttttttgctttatggcttgttagatccataatttcctcatggagattggactctgagagcaagcttgagaaaacaaaatgaaaactagtactaagtgtgtttggtaagagggtgaagtgggagaaaggagagaaatgtgatgataatagtcaactctagtgtaagtattgtacaactaaaaatggctcccttctttttactacatcctcctaccaagcaacacaaggctgcttttcaattcttctctcatttctcttatagcaaagaaaaaagtacttcccttttctccttcccttttatctttttacatatatggcagttattgtccaaatcatgattgtttgttaaagctgtttttggtttaagttttgtgttagtcaacgtgtgtaggtacgttttcaaaaggttgttggatcatttgcataatctctctatctttattgtgtattgtgttcttgctttttaggttgaaagtgaaaagaaacgtatacaagaaacttaaggatagttataatggaaatgtcgcttagctcaacaacaaagaagctttgttgaatagtcatatggaggaatctagtttcatcttcaaaaggagttcgatgattgctactgtgattgtattataagttacaatattcatttctatttcatgaataatgtgatttatgcattcataaattgtaatccatattgataatatttatacaagtacgaattctatagaaaatgtaatcctgttttgtttttgaaatgtagtgtcactactataaatttggcctttagaggcggtttttaaggtctttcagtgtcaattttgacgaaattcgctaccgacgctgatccagacaacgctataggattgaaaacaacttaagctaaaaagtaccgtatgacgtgagttatttcataataatcgacgctatatatactttatgccgtcaattatatacaaataactatatgtattaataactgacgttaaaagcttaaaaattgatgccaaacccgtaataattaatttttttcagtttaaaacctcttattattttagaaatttattttatttaattatatatttgttaatttataataaatattatttaatattaaatatttattttttaaaactaaattaattttatgattagttaatatacataaattaattttatagaagcaattaaaaaaatcacaattatattacacaaatattttaaaattagtctaagtgttaacaagttaataaatttaattacaggttaacataaaaaagggaagaaaaattcttatagcatcaatcgtccaagccttcgtgaatcaccgccagcaatcgttctatatccatgattgatgtactcttgacttgctaaaccttggatactaaaccatatctaagcgactgtaatgactaaatcgtcaagttctaatattatcgagcataaaacgtgaaaaagtcaaaaatcataagtgacatgtacgacacactcagaatacaataaaatctccataatttagaaattataacaaaaataactatttcttacattaggacttattttgtactaatgcacatatataaccaaaaaatgtaattgaaacactaattaataagctactaatttttatgcctacatatgctctcattacaacataatttgaccaacataatatatagattatttttattagttatataatcagtgtctcaattattgtgtgctgtatatttttactcatattctcttttattttattttttttaattagaactggtttttgagttagtgtgtattatttacttttacttattttgttgtaaaatggtattcttttttttatttaggaattttttttgccaaaaatatacataagatataaaataattaacaaaaataacttaacaaatgtcaattacaaaaatattatcactttttatattatataatttgagatattttttgattatctctaaaacttacatgtatacatttttaatgattaa

SEQ ID NO: 302351 - DNA, 5272 bp, Cannabis indica
agacctcaagagttgagttggtggatttagccatgaagtctgcaagggcttgaccctttatggctgttcttggctagtatgtgatctcgaattggccaagctctatggcccatttgagtagtcagtctgatgctttaggtttctacaaaacctgtcatagtggttgatcggtgtacacctttatggggtgtgcttggaagtagggcctcagctttttggaggccaaagcaagttgtaggtcaccttctccatgagtgggtatcgactctgcgttgaatagccctttgttgatgtagtacacaagatgatgtacaccgccttcttctcttctgaggacaacacttacatcgtgctctgtgactgcaaggtacacacctaactcttcattgtcgagaggtttagacaacacatgtggttgggctaattgcttctttagctcctggaatgcattttcacattatttagtccactcgaattttttattgcctttgagaatgttaaagaagggtacacatttgtttgtggatttagacacaaatcttcttagtgcaacaatttgttgtccaacaagttgaggaggctgatcaacctcaagttgaatagaccaaggacaaccaggtttaggagcctttggccaggcaacctatggctggcgagggtgaggaaccctcgaccaatcaagatggtgattttgaggctgagcaggtttaatttgctatcagacctagtactactaggaggtagtataagacttgtaggatgatccagtgcaatacccttggtacttatgatgaggttggatgacctttaaatgccaagggtcaaccttcaaaggttggggtagaccattttgaggaagaggctcccgagccatgggtcctcgagtacatagatcaacagcactagatatcttctctatccttcctatcggctagcaagcttgataaaatcaaggaaaggggactcatgggtagagtctgatgtgataggcctactagagctcagttggaacatcatctactatccaattccatgccttaaatttggaagtactcttggagctactttatcacttgggatgtcagatatgtccatcatcacttatagaaggtcctgacatacattcactcaatcctgactctcaggtagagggatagagccaaccgtatcctgtctctccctacggaaaggcacaacatctactggttggattatgaggagaattttaggaagtatggtctgtaacgtcttatacaagataccaagggtgttggaaacccttctggagatccagatgatgctcctacaatgaaggtggttagccaaaaggaaaggcctacgactaagcacgaaaagggtgagtttgatgaggacgtcccctggccaagattgttagaatagtatccaagagcgcatgggaccttcaacagtatttggcatggggaggcatgattaaggacgcccttgtgttgatcaggcctgaaggataagaatctatcaagcctatccatccaccacctacgtctaaagacaaaggcaaggctactacttctgaggacaactctaatgattcctctttagaggatgataggctctcgaacagccctccaaacaatagtaatttttttactttcacttgcatttaatacttataacttgtgttctaactttgttatttttcttttattgatatgggctccaggatgaaaaactgacgaggggatcttcaggtagctcttcgtttggtcggctcaggccaaggtggccaggactgtcgagtcttttaatgtgacccagtctgacttgcctcctcctcctcctggtcctccaccagccagccaacccatggttaaagatcttcctttgaggagcacccctcctcttcttcctcctaagagaccatcgggcaagtcagcctagaagcacagtcgggtggcctactcgactacgggcgagatggaaaaaaatgtttctcacaactatattagaaaatgctagccaagcgttggtgagcaactccaggagctggatgttgacaccctagattacttgacagtgagcactcttaaagatgctacctctgtaagttgtttacttgtctaactttgtctaagcaagcctttttgtacagtttttctaactttgtttctttttagtttcaggtctttgtgaagcttagccatgcccatgtcagggttatgaggtctactacagctttaaagaagaaacttgagagcaaggatgtcgagctcagggcaaagaaagctgatcttacaaaggtgcatgctaatttggacttatcattgacccgtctaagggagatccaagatcgatataagggtgtgggtcaactacttggtctccgtaaccaagtggtgacaaatctaactgctgataattccaagctgaagaatgaactggataaggagtgaaaggagaagcaggtagctctctaggaaaagtaggtagctctccaagaaaagtagaaggcccttgatgggcaataggcgattagggatgagtatttagacttgtccatggaggttctttatgaggtatctctgcacaaccctgacgtcaatctgaagtacatggagtcgcccatttatgagagttggcttgcttgagggagggagctgtatgagaataggccacaaatagaccaggctggccaaagtgaggaggtactagccgacaagacccttgaggtgccttttggccagcctactagaacattggtcgaccatcttatggatgaggtgccatctggccagcctcctattagcaagattgcagagcctgcccttgaatctccacctatccaagacacaattgacttaaacccacctactcctatgattattcttgaggatatttagagacttacattttatgtcttttatgcttttatttttcatgctttattttttgttcttgtatgccctatagggcctttagttttgagcagatgaccaaccaggcggtctttaattctggctttaaattcttttatcagataggtaggtgtctggacttacactttttatgtataatctgaagtattccttttgcaattacttagtcttcaattatttccttatcaaagctttaaattttgcttaagtttgatgtgcttgttcaatggtgtacgatgtgagtgcctccaagtgatttagcagatttattgtctcttggtcacttgtgattcaccaagtactatagatctttgcctgtgcattgtcttggagagacctatttgtatgcatgtggaactaagaaaaataaagattaactttacgaagttatcttgttaagaagttattttacacaatattgaactaaaataaaattttattcattaattggtcttacatatgtgttgttgctgtgcaacatacgttttttggttctaaaagtttacaaatttaaagtttgcttccaaaactcattctatggctactgatacgcgacatgctgagcaggggccatcactgaatagtgatggaaacttagctcttttacactaattcctatacagtgagttgtatgggaacaactactaaagagtagtgtttttacaagtttctcactggtagtactttccaagatattctccattctagtatcttggttgaaaaagtaattccatgttcatattatagctactaagcttgtacacaactttacttgttatctctgtaacttggtacgaaccttcccagttttgtccaaacactcatgccataggatctttggtatataggaataatctttgaagcactatgtcccctacgaagaattttctttcattgacttgcttattaatgtacctggcaaccttttgctagtaggcatgtagctttaggtcggcttggtctcttctttctttttttaatcaaggaattctactagcaaggtgtggttaacttcttggtgataggatgtcctcttatgggacagtagttcaagctctacgagtagcattgcttcatagctataggctaatgcaaagggtatatgcttgatggttgtcttctcggtgatcctgtgttactagagtacctttgggagtaagtcaagccaatcaccttttgcctcctttagatgttttttcatagtgtccttaagggtcttatttacgacttccactttcccatttgttcgagggtgagaaactacggagaagcttttaatgatgttgtgtctgttgtagaagtcagtgaacatgtcattatcaaattatttctcattatctgacaaaatcttctgtgggagtccaaactggcatatgatgtttttaacaaaaaagtagaggattttcttggaagttattgtcgacaatggttcagcttatgtccacttagtgaattagttgattgtgactacgacatattgtacacctccttctcccttagggagttgactaatgagatctattcctcacacagcaaagggccaaggagactgcattagtgtgagctcatttagtggagctctcaggttctttgagaatctttagcacttgaaacatttcttgacatagtgcattgaatcctcgatcgtactaggacaaaaatacccttgtctgagtatcagtccattgaatcctcgatcgtactaggacaaaaatacccttgtctgagtatctttttggacaggctttgcccccagcatgacttctgtagaagccttcatgaatttctactaataatcactgaacttctttattggcaaaaaatgttaaaagtggcatcgagaaaccacgtctgtacataaccccattgaggattagataccgagcaactttcctcctcatttttcctgcttcattaattttttctggcaagattcctaataattctatggtatatagttattttttattggaataaaacttgatttatcatgaaaagagtaatgaaagtttgttgtttgttaagtttgtttagtttttgtcttcattttctatttagtatgctagcttttgagtcttatgaaattattattttttagttgtatttatttaattaggtcactactaaaaatttgccttttagtgacactctttagtgacacgcacatttgtgtgggtcactaaaaggttaggagtaatttttggtgacatgcacaattagtctctaaaattcaatgttagtgtcttataatttgagtcactaaaaatgtgaagtgtcactaaagattaatgctaataattttatgaatttttttaatttaaaatgttcacctagtcactctaggagagactgaaaaa

SEQ ID NO: 302352 - DNA, 3459 bp, Cannabis indica
ggagcagaactcgagctcaaatgtgatcaagtaaaggtttgttggttttttaatttgtatgatttgtgtttatatctgatgattatcttgagattgagagtttctatgtggcattttgtcaagcactttgagggcattgcttattacttaatttttaacttcttatcttattataaacggaactcaacaatgttagtttagacatatgatccagatttatgctaatgcaaaaactaaataaataagtgttctagttggtataagttttatatccaatgcatgtattttgacttggcttcttaattttatcatcttaactatgtagtttttttatatatatatatataaaaaaaaatatgactcttatatttattcactcagaaaagttgtggaacacttgtgtctacttaaagcaaatgataatttatcagaagagaaggaaaataatatgctggattatctctatacaactcagtatcaaatgggtggaatcctttcaatatcattaggtcagctataaataaatacacatgcatatggatagggcccatcagttttgataaaacttatgaaaactgagtttgacaatcgttgttctagtgtgatagttttgcaatagatcatatcttagattttttacaaatactggttgaatatgatatgcatactttatccctattactcctgtaggacgtatctctaatcaaagtaacgaaaattatacacatgctgtctatgtgcgtttccaaagaaaggatgatttggtcaagttttatgaaaagtctttctacttaggagttctcaaagagcatgtgttgccttactgccatgtatgctctaacatgtaaacaccaacactctattctttaagcttttgtttttagtagttctcatcccaattgacttgtgttatagtagttgttctcatctcaattgacttgtgttatagtagttgttctcatctcaattgacttgtgttatagtagtttaaatcttgtgctgataattgcaccggatacactacgtttgctatcaggggttactcaacttggactatgaatcagaagtagaaggtgatatccttcctatatttcgaaaaggagaggttgggaacaacatcctttctccatcattgatgaaatgaaatgattagattatggatcatcttgttctctttcaactgtacatgagttcaactagtttaaatatggctcttgaggctaaattatttcttctatctaaaagtgaaatctaaagtggttccactcttctcgggagcaggagttcaactatggtgttgaatttatgcttctaatttcatttaaggataacaccgttggactagttgaagatgcattgacttctttggaaagcttaataatgggatttccatctttgattgtccaatatacccaaggtttgtttgagctattaaccatttgatcattttttactttccattttttggttttgtgttcttcttctccttctccattaatatgaaagaatattcttattttgactttattttaataaggcctcctttatgagcatcaggtcaaaattttaaccatagcaataagaggtacacacatgcagttgtaattcgatttcgatcacgtgagctgcttttcttcttccttattcattatctaatatattattatttgtaatgttcattctttttacttgttgaatcatccagttgaagcttttcagatatttgaaagcagttcagaatacaaatatgtaagtaggagatttatcagtttaacttatttatgcatttagcattctgttatttaaaagcaattcagaatacaaagatgttagtgccattttttttaccctttttattgtgctccaaacctttagctggcacgatcaaagtgacctgatttcaacagataatgccttctaattttcttttggattttgctagttttggatataagatgaacttatgatgacacagatatggaggattaagtttgagccaatcactcaaagaacattatctgtctattattcggttgatcctgttggtactgacattatgtagcaaggaattttgtggtgggtttcccttctcctattctctattttatagcttcgaaacatgatatgtcataaatgttttaaaagttaactttaattgcttgcatggatttcaaaagcactcttgctcatcctatttttttttatctaagacaagtaaataggttatgacatctttattagtttttcatacctttgcattacattatgattctttatgtctcagaaaattgttcccgtgtctcatttcatctgttctcataagaatgtgattaacatttgaagcttcttgcttcacaacatatacaattggaatttctcaaatgtaagcatgatatgctaaatgaatttaatgaaatagaatcttcaagtctatagttggtgcttgaaatctatgagtggcgaaataaatcacgcatcgagtacagtttcctcaaaacacattatttcccttctctggtctaagattgttttcaggttgtattaataaatagcttccacaataattctagcctttgtgtatttgtgccaagtaaaaatgagtgtacaccaagaaacttgttagcacaattttattctgaaagaaaataattaatgttcgtaattgatggaatttccttttcactgagttttgacaatataccattattaatatcactttttgagaaaagtaatatagctttggaaaagttctagtgctggagcactcaataagcctgcaccacaacactgaatctttatttctctaaatgcaaatccagtgaattagcattacaacactgagcttatgtaatattggtgctgcagcacacatatatttgtgttgtggcttagtgtgcaatcaatgactgaggcaacacaacactgtgttgtctctacaaagtactaataatggtgttttacaccatgtaagcgccatgtcctgcacgtgcaatcaaagtaaggttattgtcaaaatactcatctttggacaattactaacagttggatttctattcagtttttgttgtttctcaattcaaactatgttaggctaattaggatttttgtcccctaagctttaacatgtaccaaattatgtcctctgaacttttctggcagttaaaaattctccctgaactattgaaattgatagatttaaggacttttgtctaatttcattcaattttactatttcaatgattgtttatgtactaaatcatgctccccagactttgatatctaccaaatcatgccctcgaactttgaaatgtattaaatcatgccccttaactttcatctatattagacatttttactaaaattaaacaaaagtccttaaatctaacaatctcaatagataatgaggcatttttaacgaccttaaaagttcagagggcatgattgttgggttttatgccc

SEQ ID NO: 302353 - DNA, 1550 bp, Cannabis indica
acgaaactgtaattggtataaatcaactaaattgtaagttagtgggataatagccaataaaatcttcagtggaaaaagctatcctaaaatctgaatatgtagccagtttgtggatttataataataatatatttatagatgaaagtactgttgggtggtctagggtctaccttgcatgccgctggtccactgtagtggaaagatagataagcgtagacaaaatgtggcccaccacgcatatacatgtatgtacatgccaataattcatatctttagatgaccccgcaatctcctcaagtacatgttcaattaaactttattattattcatgaaattggaaacatatatacaatgatagcacaaccctatcattcttgcgatttttatttttgacttcaatattaatattcttgggagttatgtatgttgtcatcattctacttcttttatttatatgaaatgataggtagcccatgtgaggaaggatgcatatttcaaaccaaagttattagcatttcacattggtctggtgaacgtttccatttttccaaactaaatagtattgttaatttgttatagtctaattaaatcataatgaattgacattagtgagaacgcaaccataccaacactcctcataattgtataccccttttcatttgttttagcaccaacttcgcgcaagttattgaatagtcgatgcatggttatttaaactaagtttgcaatcgtatggtacgatgcaaatatagtttaattaagagccactctatcttaacctcaaaatttgtttaaaatactccaaagaaggaaatcaaaattagtttattagagtaaacgctcaaattttttaaatttttattaggacccaatttttgtaaagcagtactaataaacaatacaatatcctatgatgtgttattccacatgtcaaaattttttaatctatgcacttacataaagtcatccataatctctctattatccatatttattaaaaaaattataaatttcttgtagcaaaccccattaaaatgttactatagtggatagctttaaataatctttattttgtattcgttctcttacaatattttaaactatcatttgatctatatactggaaacagtttctaaaattctaatttcaagctttcttttcaaagctaggaaccacatattcaaacgctttaaaagtatatgatgactattaaatattttatctttatgaaatatatataaactcaaattcacttataataataacaataataataaatacatattaaaataaaaataaacaaatacaataaagtttaattaagttcttcatatttggcaaagataaatttcaaaaaacttttctcagagctcttgaaagatttagtgaatttaaaattttaaaaaccatatttattcagtatgcatagatttaatttcttgatatttgatttatctccttgagatttctttgcttcaatattattcgcatctacttttagttttttcatttctattcgtttgaataacaattttaataattgcttattg

SEQ ID NO: 302354 - DNA, 2739 bp, Cannabis indica
cttcctttcctcctcccccacctcctttttccgatcaaccaccttcctttgattacggcggttccaccaacgttcttcacgtgggtcatcattttgagccgccacctccgattatggagcctgggtttcatggtggtggtggtgggtttgatcatcatcctcaccactctcgtcctcatcatcaacagacccatgatcagggtatggggggatctctttctgggctatctgggaaacgtactgttaaagttttactaaagctgagcctaattactcactcaccattagagatggtaatgtcattcttgctaggtctgatccctctgatgagtttcaggtttgattttccaaaacccctctttttctttttcttgtgatttttcagaagttgttaattgtgataattaatttgattggatttggaatttgcagcactggtacaaggatgagaagtacagtacaagggttaaggatgaagaaggttgtccatgttttgctctggttaataaggctactggtcaagctatgaaacactccattggagctactcagcctgtaagatcatcactggaatataataatgttgagctcaatagatcattgatcattatgtgaaattttgatttttgtgttcatgggaattgaactaatctgaagttaatttcgattttagttagcagtgttcataactaagtattatgaaatagcagtgtcacctaagggatagctcaaatggtatgatttgctctacaaggtctgaggttcgagtccacatacatagtttctatagttttgttcttttgttttctcgatattagaagagggtgattcgaacttgggaccttagtagcagggtcattagtagcatcaatggctgatttagtagtaccagcttagattgaccccacaaagctcacaaagcacatcatactgcatctttttttttattcatttctttctttacaaatcaccttacaagttctttgtaaccttacaattttgatgggttttcatttttacttgcatattgtctgtaaaaacacacacacatgacacattgaacaattgctatgacactcttttagcatttgggggtgtactttgtttctggtatggatgattatttaaatgccacttgtgatattctagaactatatgtgtcttattgtcccaaaaaggaacactttacactgaagcaaagtaatcttttcaggaaacattaactatcatcatagaaacttgctgaggtagttttgattactagtttgtcttgtttgaatttgaataatttcggtgactcggctatgttagatgttctcttttccataaatttctagtgttatgcttgcaagcaaccatttgttatgttctttactcttctcaacttctctcatgccctattttgctccactatttcttgtatctttgatggaaccgttaaagaagtgcagtaattgaaaatccttatccacactcaaaatcatatcattaataattttaacaagaaattaaacatgtcataaccttgaaattatgattgcccctgattggattgagagagctttggttcaattatctatgcttataaccgaaaattccatgttagatcaactacatcttttacccttctcgatatgcaggtacagctgataccatacaactcaaatgttctcgatgaatccatactttggaccgaaggcagggacctaggcgatggcttcagacccgttaggatggtcaacaacattcgcctaaacatggatgcttttcatggcgataagctttctggaggcgtgcacgatggaaccactatagtgctgtggcaatggaacaaaggagataaccagcgttggcgaatcacaccctattgtaagtttctcttctcccaacaacaagaaatcgaattttgtagcaacttactgaaacaagtgctgctcttttttataggaaattcgggatgatgccttggtttggtggtggtggtgctgctagagttgatgcttttatgtgtttgttgtgacttgttagagtgatcttgtggtttgaattttgagtattgcagcttgtatcttactatatctattatctatattgatgagcttatgagtgtatttgtaataatgagatttaatgaagcattgctatattgtcagttgttgcaatggtctagttgtttagccaatctatgagcaagagtattaaacatatgaataagagaagccactaaggctagcttagtggtgagcgagggatggaaaaaagaagaggtcttgagttcgaatccaagacctttaagctataagttattagttgattgtaaaaataccatactcaaaataaacatacgaataagagagatgtctttagaaaattgaaaaatagaaaaagcattacttaggagaattcaaaatgtcgattttgagtctagaatatcaaatgtctatttagataaaaaagaagctacaccaataagtaaacacaacaaaaaatatttaaaattgtccactaaaaataactatgtttaactaatttattacctatgtgcacatttttctaaggaaatattttacaaaaacaacaaaaaaaataattataaaaaatacgttgtatgttatttaaatgtttttatgaatttatttaataaaaaataatgtatttttatgttatactattgttgtattttattgtttgattatttgttatctgtatgttatttcttgttgttatttgatattattt

SEQ ID NO: 302355 - DNA, 3972 bp, Cannabis indica
aaacatatacagtcaaaccttttcttgaagtgttaaaatatgaaatttcgataactataactaaattacaagaatctccattttctaataataaacactaaattggcattgctcataatactataaaaattgttctcatgtatcaatcgctgaaacgtgtaatgataagagttatacagtcgcccattaaatcgtttactttatttgacaaaaccacaggaacattattctttcaaaaataatgaaatttattaagtctcgatcacattttcatctcaaaaccaaaattgaagaatgcttgtctaataggttacaataacattatcacccaccatggcaggcaatggtcacgagaggaagattttatctggttattgttgctgtgtcactactcccaatgggttcggtcaggtccctagcttctcttaccatgcctgcctatattcagtattcaccaaaaactaaagaagcagcaactacgcattcagccaagggtacacatttggggacgaaggcaaccgtgctgtgagaacttcgactcctgtctcggtaacctgcccacaaaatggaaaatgacaataaatacaaagcggatgacttgagccaaatgcaagttcaaaaaacaacagagcttaccaaaagagtgtgttcaaattgagcgctacgtttaccatcagctgtaactgcagtccacccatcaggccacatccgatcacgccaaactcctatttagaaagttcattaagtaacttcgctttgggtggctacacggacagatgataagaaaaagaattaaagaaatattgcagtacttacctgcattgatcataggttcaattgtaaatgtctgtccagccttcataacaccaaccgctttatttcctacttgggttaaggcaagcaatgcaatagaacaagatgggaccaatatttatcacacaaacacatatttgtctttaaaaaaagaaactgttaaccaaaacatgatagaaaaaaaaccagcttataaaggatactagcataatgaggaatatttggcgcacaatgaaagagttctccaatgccatgaccacaatatgacttcacctaatgttcattaagccaggtaaaaaggccattaaatattatcagatcttacataaaactaaaagtaaagttgctgtacacttgcagtgaaatagaatattaccacagagagccctgacatagaagcatggcgattaacgatttcacctatttcacgaaacctcattccaggtttaactgcgttgaatgaagaaacaagttcattaaaatctccaataaaaaccatacttcagttgactctaaaaagagaaaaagcagcttctcttaaagaacttgaagtatcacattttttgttcatcacataccaatagatatcgcttttttccaagcactcatatgtgacctggactagttttctagactcctcatcaacatttcccacaaagaaggtttcatttagatcacctgtattatgaatcaaataattttgggttggtaattttgagcgaaaattgaatttttataacttgttaaggagcatcgtttaaattataatggcaacgaatattctaaaaacaaagtctaaccgtgaaccccattatagtacactgtcacatccacattaacaatatcaccatcctccaatttcctgaagtaattatggagcagagaatcagtaaaatcccatgcaggctcaatgtagacatcgagtgttcatataatagacaaaactaaccactaagccactttaaaaagggcataaagtgtagtagaaacagtatttgaaagatgtaactatgatttatgttgaattggatttgttgcatgaagaatccaggagaagggtaaaagaacgagggcacataaacatatgaaaaaaagaaaaagaaaaaggccatatataaaccaattaatgagtataacataaacctggcatcaggaatcccgtggcaaattacttcattaacagacctgcaacaaatagagaaaacaagtacatttacttcagtacctatacactccaacaacattgtaattaatgtacacaaataagagtgcctacgtgcagcaagactttgggaagaaatgatagttgagcggagatggataccctcctgcagtgaggtaaatccaaaacaattaaaccaaaaaatggaccattaaacaaatgatatactccttaaggaaaagcttgtgctaaataccagcagcaatagttgcatcgtggaccactctgtcaatttcatcagtggtgataccaggttgtattattcgggcagctgcatccaaaacctcccttccaatctaagaataagaaaaaagaaagttaaacctgtacgataaatagtgtttggtgccaaagcagaaattcgcacaattcacttcattttctttatcaaatgaaatacttttttttttccaacattatttgtttttaatatcagacaataaaaataatgctaatgagaatgcagcatacaatctttcccataatccataaaatatacagttgggacttgagagcttactcgacatgtttctcgcattctcttaatttgatctggagttttgatctacgaaatgagaaaaagtcagttaatgaattcccaatagttgaaaagaagaagtagaaaagaaactaaaaattcaaacaagaaaggttagccgtattgacattggttcgaactctgtccaaatggtttcaatcagaagcttacctcaaccacatgctgcagatcactgttaggctcaattttcggaattccctacaagttaggaataaaaaagagactatgttacaacatgttaaaagaaattaagaaaagaatgggtaagggacagaaatttggaaaaagtaataaatgaaataatagaattcagctttaacgttccactgaacttgtattaatcagcccatgacagaggccactaaatgtccgtacaaaatccacaaatctaaaacatttatgcttagcaattaaactaactttatgcatgtaagtcaaattaagattagttttttcaacttacatcatttgcccaatcaggtttatcaatatgagcaggtacagttctcttactagatataggatatggccttagagacctacatgaaagcgaaaggtttcgacatatgagagagaacatgtgaaacatctactaaaaattagagaataagattaagattatcaaactgcaccctgataaccaaaaaaaaaaaatcaatggaaaaaatataataaggtctctataaactctagcacttatcaaacaaaaaacaccaagcgaaaatgaagcctagttgatattatttacttaaatttggcattgctttaacaaaaagaaaaacttaaatgttataaacctgaatacatggcagaaaaattcctagataaataccctgtccaatcaaaataaggaagttttggagttcgagcttgtcctttctttatgcaatattgccaaccttcagtagctgcatcagacttttgatcaccagttgcaccagcccctaacgaggatagctttgctttcaaatgcactgatttatgagagctccaagaagctttgaaacaatcttgagtgctattaagatacacaattccatcaatacattttctacagttctcgcatttgagtaaagcacaattaggatagtttacatcccaacaaaatttattatattttctagcacacaagtaataaagcataatacaaaccaaaaagaagcaccatcacgaggaagcttcaactccatgcatttaggacatctgcaaacaaaaacaaacttaatttaagcatgatctgataattgatttgcctctacaataaaaccaactacagtgaaacctctatataagtgtactctgtataagttataacaataatctttacttattataaaaaaaaaaaaaaaaaaaaaaaaaaaaaaaaaaaataaagtaa

SEQ ID NO: 302356 - DNA, 1523 bp, Cannabis indica
ctgcttctgtactttttttttttactaaaagactctcaaccttttttagcactattatttgtgatgtctaccactttagctataaaataaaatgcattcaatatgataacttaccaaattgtttcgtacctttttcgaaaattaaaattataatgactttctttctttattgccacatttttttaatcaagcttatccttatatggaaacttatcaccttatcaactttcatcatttaataatcttcagataatgcgtttaatttgaatttattttctatagctgtacggcaaatacggtttgagctattttttcaatttcatgtgtagtgtgattcaacaatttgtcaaatttttttcttctgagaaatcaattttgagaagaaataattttggtgataaattcacctcccaaaaacttaggtcacaatgataagaattcacaacactccattttgccaaaaaataagcagcaacattaaagtctctaaataaccaaataatagccaagttagcttctaagacatttaaaagctgaaaaaaaatcagtgataacacactttagaagcacaagctgggaccagcccctggcaatcagaaataagaaacctccatccacccgaagcttctccaaaactttggctagctgcctccataacgcctccaaaggatctgaagtgtgtatcttcttggcaaccagagaaaacaccctgtcatgtgcatatatccttggcaacaaatccatcattaaacgccacatcaacaaacacataatgcatagtcccacattgaaagaatagtccagagttattaaatcttgaatataagtgttttatctatttcattagcacgaggccttttgagaaggtacccaaaaacaaaaccgtgagcgtaagcggacaatatcatattaatgtgcggggcccaacatttccaatcttggcatcgtcctcaaacttggtgatcaacttacctctgctaatagtttgttattttctgttaaactattagttacaggtggttagtgtaagttaaatgttacttattctaactttgtatagataccactgtaacaatgaagaattcttttacaaccatcaatgaagttttgtttaaagtatatataaatctagcgtcatgtacatgtttcattcttctgcacatgatattggatatgttgacataagaatcgtgctgagattatgtgaattcatagatacgactttgttagtattaatgttgaaattttgacttaaaatttctacacaaaacaataagaaaatgttagacaacttaaggtcaatcttgacctttcacaagtacttatgcatgcacaaaaaagaaccacacatacataacacccacttgtttctatttttcttataaataaggaatttaatttagtatgcctgtaaaatatagtcttttaatttaccaccaactacaaataggatacttatacttttaatatattttcctcctaaaaatgcccttacatttcaaaaaaagtctctctctctctct

SEQ ID NO: 302357 - DNA, 4489 bp, Cannabis indica
cacagatgctaagcccattaacaattgatcaccaacaacatgggctaacacagcaaagaactatccaatcaacccaagttttaataaaaccaataaaatttaatgtaagcccaaataaaagtctaacacgtcacacatctattaataaaattagacgaattaatgttcttaaattcaaccatttgaataattttaaaatcacgatttaatattatcaaaattattggagtaaaaattataattaacttttttttcgtaacaaaggattaaaattagctgaatttacttataaatttaattatgtattttagaaaaattcaagcccttatgagtattatttttttcttactttctttttgtaatttcttttaatatgcttaaaattgggtaaaacaattgatctttcttttttgtcaattttatatggttcgttccacagcggatttttgtgtttgctaccgttattgtcgttacctgcaaatgttgtcgtttgtttatttttcacgctcactgacgtcacccatgtaatatgggccgttcgattagaataatctcgctttgtgtgtcaaaaaaagatgttctaatttcttcaacttgagtcttcactctaagtctaaacttcagagagcttaaacccttgtcaatgcctgatatcatataatcgttcagtccatggcgtcgttggtcttcacaatcatcaaaaggtacggaagcattacagtaaacagaatttctttgagatcattttgcactgaaagtctctctgtcagcggcactggcattagaagaaatagaaaaaatctattctcgagaatcagccccttggggctgccttccatcagtgtcgtccctactcttgagcagtgggtcgaagaaggcaggactatccatcagaatgaccttcgcttcatactacgagagcttcgcaaccgcaggcgatacaatcaggcccttgaggtcagtgattttttttttccgacgattttgtttgattgctcagaaagtaaaagagaaaaatatagaataaaaagataatcaggctctaacttatattatgtatttggttgtgggtttgttgccatttctttaaatttggttatttcagcttgatttttcttcttttaaatacctttgtcacttggtttggctgatgagtacttgttcacttaaaaacaaattaagttttgtttgaaaaaatatattttggagcttctctgttcaactttgtctaatagtaataagattagagctgttatttgaatccttggggcagctatcattttgtcctcttctgatcattatatttgagagtattagtttaaataataggcttgatctttggaaacaaaatggtggtctttatttacttcgtctatagaactctagaattctttttggagtaaaatggtaactaaaatggtaacacagtttatgtctccaagctcagttattatccaccaaatgttttggatggaacatatgcattagttacttacattagttttgtctagaaggttgatctgaaagaaagccacacattgctttttatagtttcatacttccataacataagaatcttaaaataagtactgtggatgttaccaaaaaaattgttaatggcatcaccagctcatattcaggaggagaaacacatacattgctttttatagcttcatactttgatcgctttgaaatcttaacacaagtattttggatgtcaccaaaataaatgacttgcttgcatcaacagcgcatactcaggaagggagttagggttttgttgtaccagcagagtgcattatttatttcacttacgtgttcgggaatggctttgaatcgaaatcagtgctgtttataatcacgatctatattttactaattttaactatgcatgccatgccataaacaaagcagtatagagtaaacttttgctagttcaaaaggttgaagcatcttgaatggcctcactcccttacctaatactatctatgtctgtttgttgaatttgggtccccttttgcattgggactatttcattagttcttggcactacgcttttcaagatcttgctcatggaaattgtcaatttatatttcactatcttttgtttatgttgcttgattattgcaggtgtctgaatggatgagtagcagggaactcagcccatttgcaccatctgactatgctgtacagttagatctgattggtaaagttcgtggtctggattctgctgagagttactttaatagcctaagtgatcaagtcaaagttgacaaactatatggtgctcttttgaattgttatgtaagagaaggcatgattgataaatctctctcacatatgaagaagatgaaagagctgggctttgcttcctctcctcttagttacaatgacattatgtgcctctatttacgcacaggtgaactcgaaaaagtccctgatgtgatgtctgagatggagaaggatggtgttaaacctgacatatttagctatagagtttgtatgaactcttattggttgagatccgatctaaatagcatggagaaagtttttgaagaaatgaagaagcaacctcacatctcacttgactggactacttatgctatggtggccaatttctatataaaagctggtgaccgtgataaagcattgttttcccttatgaaatgtgaagaactggttgataaagatgctcttggctacaaccatctgatttcactttatgccagtcttggtaataaagaacagatgatgagattgtgggggcttcaaaaagccaagtgtaagaaccaaatcaatagggactatagaaccatgatcagtttgcttgtgaagcttggggaatttgaagaagctgaagttttgctaaagacgtgggagtcatctcaacaattttatgatttccgagtcccgaatatcctcatccttggatattgtaataaaggattgattgaaaaagcagaggcaatgcttcatgaaattattgagaaaggaagaactccaactccgaatagctgggccatcattgcagcagcatatttggataggcagaacatggatacagcttttgaatgcatgaagaaagctttggcagtgcaagcagaaaataaattatggaggcccaaacctcaagtgatttcaaagcttttggaatggcttgcagataaaggagatgttgaagaagtaaaagcttttgtgatctcactgaaaactgtaattccagttaatagattgatgtaccatgctttgatcaaggcacatttaaatgttggtaaagaagtggattggattttgaagagtatgaaaacagataacatagaagtgaatgaggaaacagaggaaatcctaaactcaagccaaaagtaaaactgttatggtggcatgagaagctgtgttgagctttcatgtgttttatgattttcacttcagttcgtcatcatcaagaggagatagacgatgctccgtatgcgcttaattttggagcagaagaactggaaagtacaatttaaatctttccattgaggattttatacggaaaatacttgagaaagctttggaaattcactactgcaactctattttgtaataggagtggcctgaaatacatggcctgaagtaaagtctgatttttctttttgttaattttaataataatatttaagtgagttttctgaaccaaatatcataatataattaaataccgatgattcgttgtgaaagacttattacactgtacaagttaacaataactttgattaaacgagggaagaggctatattactactttaatgaatgacaatgtcaagacaaatgttaatgtaaataaataatagggtaaatgttattttggagttttgcaaaagttattgatataattttttattttgttaaatgataaattagattttgtattttttaaaattgtacaaataataccatgaactgatttttttgtcaaaataagaattaataagaactcaatttttaactaggtacatttttttgcatctgttcgagctaaaagttattttcaagttagttatatattaaaaaaaaaaattatcgaaaattgagttcagattattattttaaatcattttaaaaaatataaaattcaatttatcattttataaaatagaagcttcaaaatgatattaactctaaacgatatctttaatttataatatgtattttggctgatgtaagaatttagtttttatattccaataacttattcatcaaaatatatttatatatatgggtgcactcttaatgggtattatctatgaatgggtaatattagaaaattttgaatttttagaattaatttttctatttaattagaaaaatttactcatttttacattatatgggttgcgattgttccatcagctgaaaaaaattaatgaaaaagaaatttttacgacaaaaaaaaaatagataaaaaaaattagagtttaacttaaatattttcatataaatatatttt

SEQ ID NO: 302358 - DNA, 4038 bp, Cannabis indica
gatcagatctgctccgccccgccaaattttttttctggatcggatctgatccgacccgattacaatttatttaaaaaaaacttaattcaagactcggatcccttcggacctggactcggacccggacctagatccggaccaggacccaggacccggacccagaccgggacccgggacccagacccggaccctaaccctgaccatgactcggacccggacccggtccccgactcggacctggaccttgacgcgggcccggacccggacctggactcggactcggactcggaccctgaccctgacgtgggacccggacccgaaaccggacctggaccctaaccctaaccagacccggacctgggacccggactcgaaaccggacgaggattcggacacggactcgaaacgcggacccggactcagacccgaacttggaccgagacccgaacccagaccgggaccgggacccaacccggacccgaacccgaactcggacccagaccgggacccgaatctttacacaatctataaatacatgtcaataccaaacatagtattgtatttaataataatacaaaattaaaatggatatataattataagttaatattaaaattcttaaaaaaaaatagtcgggtcaaatcagatccgacttattcagatcgaatatgatccgattcgaatatctgatctagcgaggcgggacagatccttacatgatctggatcaggtcggatcatagccggatcagatccgacctgacccattgacactcctactcttaaatgatagcaagaaacctagaatttgcatctcggaacaagaaaagatggtgagaaatgattggagataaaaaacctaacaacaaccataacaaacgaattaaattagatttagggtataatggggagtgaaaagcgatgagaagcaattaataatgggtgtttataaaatatctaatccaattcaatccgtacgatcgaatcaaatctaattcgcaaagtgcaaattgaatttgattggaaaatctaaaatacacacttgtgcgtctagattagatgttgattgacatgtaaaaataattgatccaatatgatctaatccaatccaatccacacattatacatgtgtttaaagaaaaacaattaatatttttatgtgaaaaatataatttaactattataaaaatatgtttaaaaaatgaatagtactttgaaaagtatttgaagaaaaaataatatagaggaatgtgaagaagcatttgctcttttactcttcagaattttaaagaattcaacgagttattgtgagtactcttatataagataaagataaaatgattaacccattctgttcaatgagcatttgtcatttttctgaaagaaaaaaaaaatgataaatgaacaacacgttacaaatgtattgtaattattaaagaaccgaagaaagaaagaacaaaaaatatgtaagccacgaaacccatttattatactcaaggagttcaattgggataactgatttctcatcagaaaatgtgccacaacgaagatcccaagccttgttgcaaattgcaatgtgtctcttaggacagaaaaaagaaataaaaacatggccaagtaagtataattagctttcctctgttttagggggacccttccacttgaagttgtcagcatatgccttcacctgacagcaaagatggtaaaaagtagttagagctacaagaaagattaagtatttatcagataaaaaactgaaacaagggcaatcaataatatcattatcgtcactcggaaatgggaaggacatatcttcttaaacgtgtttcagctatggaatagaaaacaaaaggaatgtaatatgagcaaaagctcatttttctcagaatggaatatacacttggatggataagcagaacatggatgacaaattgaatgccctagggcctaagccactttatagaagacacaggtaagctcaaaaaatagaaagactcgtgaggtgaaagttcttcccacagttcccaggccatcgctaaatatacactcccacgatttagcattcaattcggtacctataattggataaagctattcaagctcaaaatgacactgtgaaattggtgacaaagtcaagctgttcctggaaagtacacatccattgctctcaatataaatgttcactaaagttttcaatatgcctattgcgtagatagaatcatattatggaatggaaagaaaagaatttggataaaggttataaaaggagctcattaccatagaaagataaccacctatactagcagacaattggggtataaatgaaccatactgtacacactgttatgattagttatagctgcttaatattaacataataatgcattctcaacccaaataattctaacatgttataaaaaaatcagggaagtctatgagcagaaagtatcagaccttcaataatggagtattgcgttttttaacctgcaaagtttgaaatccatagtcacaagtgaaacaaaaatgaaaagaaatcactgcttacgaaaacatttatcaagctaacaaagaaaatttcaaaatggacaaatattgatagctgctagcctatcccctacacactcgagactagtatgaatccatactaaaaaatataagaatatacttgtacataagtggcttcaagggtatctcaagcgaaagaaacaataaaaataatagcacaaattaaaaaaaaaaagaatgataatgaaaacgtaccacataatcccaaccgtgtttctctgcaaatgccttagcagcttcttcactatcaaaaccgagagcagaatcaccaacattggcatatggatccccagtagatgtccagcccattaatggattctcccacctataaaccaatcatgtaaagtaactatttacaatcttgtaaagataaatgatagttaattaatagagcattaagaaatttgttgtcttcttaacacaacataaacaccattagcactgttttgaacagaattcaaagaaaaacgttcccaacacagatatttgctgaaaaattataaaatcaataaaattctggaacaagaacggttatggtaattactcgacaaatgtaaatggtgggaggaaagttctatgcaaatgataataatttaaatgaggattcaaattctccatataaagcacaatcaagttgaaagctttgactataaatctaatggaccaaaagtgaattggtatacaaagaccataaattgaaaaacccatacgcataaataaactaatgaagtgaatagcttcatacttctgtgtggacacaaagttgattttccatctcccaagttttcctgatccttgttgggttgctgttcttgcaggagagtaaatcacaacctgcccatacatgaccaattactgttaatcacagaaattacccaagaaaaaaggaagggaaaaaaaaactaaactataataatatttctaaagataattccggaaacccaaaattcattctgtaaaattccctaaattaggtcttcgccctaagctcaatgaagaatacaagaaaatggagagtcgtacccgcctactaaggtgttcgtcggggaccccagagaccataccgatctcaccaggcttgtaaacctctaaagcatcggcagagaaaggccttgaggcagtgatgaatgtggttcgaagagcaccaccatggctcgagatgcgtcgcagagaggaagccattgccgaaagcgtaaccaatgaattctaacgagagattgtagctcgctgcctaataatggtcgctagcaactataaacgacatgtcgtttcatatagtttgtcattttcttttaagaaaatatataacctactttaaattttaaattatgcttttattcttgaaaattataagaacgcccaaacttatttctatccttaatagattgtagaatacgagtggacaaataaaagtaaaattattattattattattattattattattatttgttataaatattaataattatgt

SEQ ID NO: 302359 - DNA, 1574 bp, Cannabis indica
tcaacatcgctataggctgtatttttattatttttcttaggactactctctaaaagtatagcaagtaagtattttattatttttcttagggcttagctagagtagagactagtgtataattgtaatcattcatgctttactatcaagtttagacgagtcccaataaaatagtaatatattctagtccaactttaaattacaaaagacaaaccaaaatcatttctccaacttttgtaacccattcaaaacattttctagctattgttttttttttcttcttcttaattgtgagacctcccccctaataatagtaacccatccacgtgaagatttttttatattagtctggaattattggacacgtcattgctctacacatttttgccttagtagtaggttcgctttcctataagctctctcataaggagacaaaaaacaatacacaaatacaaaacgtataacacaaaaggacaacagagtgcgtattgcgcaccacgctgcacttttcagtgtgcgcaacgcggcccccctcggcgtactttagcccattaccgttaaccacaaacccaaaaaaataaaaagttcacaaccaagaaaatcaaaagagctttttcaactttcaagccttaaagctaaaaaaaaaaaaaaactccatattttctctcactctcgttctctttttctctttctcgctcttagatctcggtttcgtttctcgcttcgatcatttcacttcagggagtcgccatggcgactcgatctctgcttcttttggcggtggtcttagccttcgtcgttgccggagcaggcaatgctgcggggattgcactttcgtcgaagctcattcaccgattctcggacgaggccaaagtgtttagggtttctgggcataggtttgcttcttcttggcctcagagaagtaccgttgagtattatgagaagcttttggccagtgatttccagaggcagaagatgaagctcggttctcaatttcagttcctgtttccttctgaaggtagtcaaacgatgtcgttagggaactacttcggctggtcagtcttctttttctctgctattttagtaaaactactttttttcgtttctttaatatttattatatttgttgactaaactggattatgctcttctattttattgctgtgtcagtggattatttttctgaagtgaaccagagcttggcatttgtcataaatgagcttttgttttggttgttaaaactgccattttttcctctctctctgtagaaataatcgagtgctttttgagttctgatcaaattttttagtgaaggggttgcaagagaaattatgataacataaaaattaacaaacttggaagcagttctctcatgctaacatgatacggttttgaatagttactctaaagagttcttttaattataacacattcgtactgctgtcttcacccttgattgggttatttggatttagtgacaaaatgcaggaagaaggaaatttttaatgtaatttcgaaaatgaatatttaaaggtttttttttttttttactttaagtgaaaaatccaggttcatga

SEQ ID NO: 302360 - DNA, 2003 bp, Cannabis indica
ctttattgatgttgaataaaatagattacattgaaatggagttttatttagggcataaaacctaacatgaacatataggtaaaatagaaagtatactgaaatgagaagaatttgagtaaaaataatgagagatagagtaaaaccataatttcgtggatgcaccataggaataggaagaattatcataagggaagaactagtggaggcctaggtagagcaagtgtaggaaggccagccatgtagagtgaaggaagatatgtacgttcaataggaagttcttgttcttggagatttagaacaacaacacattctccttcaaaaaaataaaataaaataagacattcatccgtcttatgagtaattaatctacaaaattcacagatatcaggaaagtctttcatatataaactccacccacaatctggcttgagaatccttaaactgaagccttttacccataagaagaggtttgtatgcatctagcaaaatgcaaatgcgtagaaagcaaaagcgagtagaatcatcatgtttcacaaaagtttcaatatagtttctgagcatgacccccatagctttagaattcattctaaattgtaatcggtacacctgaactcaaaaaagaacgtgcctaacatccactggattaattttccttaaaaggaggaagtaattcaaccaatatcacatgcctttataagaaatgctatagttgtccttccaaaactcgtattttctccgcagcaaaccaaacattagtataatttttttttcataaaaatatcaaatagttaaaccattacgaatatgacccaaagtaaccaaacgaactctcagatgttgaagaggaacaaagccaggcaagaacatgagaatatccttaccaaccaaaactttggttgttagatcaacaacatcattacgtggaatatcctgagcaaccaggatatcattttccaaggagaagtgagctacagagagatccggtgaaatatgagaaggatctattgatgaaagtgagtacaaaaatttatctcgagaaaaagatagaaatgttgtggttagaagagtaaagaattggagtataaataagcaaaaaaaaatatagcaaatgatagaatccatctctacaagatcatgtgatcgaggaactgtgggatcactaagtaggcagttaaaataaaggttgagagatagcgtcaataaaccatgaagtgatgaaatagtgggatcgcctgaatcaatagataaataaattataaaggtctcatttagtaggttgtataacggttatattatattaaattaataaataagggttattttatattaaataaataaataatattatatttggataaattaatggattgtattaattattatgaagaaattttttaatacaatgtaggttgtattatttaatatataacaaatagtctctattaacttgtattataatgtttacaaaggatctgagatcaacctcaatcttcgactcggacctggacttagacccgaacccgatatctgacctggactcgaccctggacacaaattggagacctagaactgacccggacttgggacccgatttagacccagaccgaacttgggacccagacctgagactcgaaccccgagcccagacaggactcaggacccgacccgacctgaagtcggtgttaggggtcgaatttattgaaaatacattataactttacacgacttattaatacaagtcagtagtaaatataatattgtattaaataattctaatacaatacaatatgacgtaccaaaccagcctaaaatagtgaaatcatgggatcatagaaatgttaaatcaatcaaggagagcgataaacccaccctatcctaaatcgtgggattatctgaatcaaaatctataacactatgagcttatttggtacgccgtataagagtcgtattgtattcaataataataattattatgtttggattaaacaatgtattgtattaat

SEQ ID NO: 302361 - DNA, 2511 bp, Cannabis indica
atatatatatatgtaataaagttatatacatatataaatagctaacatatagcataactttcaggtgttacataccaaaatccatataaatatacacaaaaactctcttaagctttttcatcatatcctcatttctgtatctcaaaacaaaattttaattcaaaaagaaaaaaaaaagaagaagaagaagaaagataattaaggatgaggatgaataattggtttcatcacttctgtgtcgttcttctttttcttattacgatcttagctccgaaaactggtcacgccattagaacaagtccggttcgtgttaattatccaaggcgctattcgagtccaagccatcaagtttttcgacctcggccggttcaaagttctttgggcgatcgagcaagagatttcgagtcccagaaacgacgagttcctacggggtcgaaccctttgcacaacagacggtgattcgtttctatattggattattttgaagatttttggtcaacactacccttgttcagacacaattatatataattgctgttatgtgtaagtgatcatatcttttttctttttttgatgaatattgttttatttcgtttacatataaacatatataagttatagtcttatagacatgcttaatttagtgacaaaaaaaattacttttaggataaatttgatgttattaggagttgaaatacgaagctagcttgttattactatgtacagaaggtttttggggtgaagatgaaaacccattatgtaagagttcagacgaggcctttgtttcactactttctatctcttatatactttatatggttcatacatagagcttatattaattaactaagaggatttcgatggagcagtactatactgaaaaaatttatgttatgattttttgggttttgtttttgttcgctaaaatttaattgtgccttgtttgaagctgtgggaaagaaagaacaaaaaaaagaacttttttctctttctcttctctgcaattacaatggttattatgatctgataaaattaatcgccgttattatttttatttatttatttaaatttttctctgctttggtttctgagtaaccctgctaaaaattcagttgctatatataccattaatatgaatcattttctcgagaaaatgacattcataccaatcataatcaattacacagttgggaattgagcatcaaacagaaacagctagctagctatctgaatagaatacacagaaatcaaggcatgcaaaaaagaaaaagaaactcgtttttcaactcagttgagttagaaaccgagttacacagcaaaattaaactgggttttagattagatattagcttaggttagatatccatgagtagtggcaatgccgcaatagtgatatatagacatagtagtacaaactcatcaagtgtgttagaccccaatttgaatgcatattgtaaatacccattatttcacacaaccaccatgcaattaagaaataaggcccaaacaccaagggaatatttgttaatgtgtttgggtccacaattaaggggcagcaaggaaatgcagattcaaatcaaatattggctttgtcagtgttgtacctttaagaccctcttgaatgttctctcagatcagagcaggaggactcgagggtgagttatgcccgaaaagtacaaccataaaagctgggggaaattgaggagagcagtgttagactaattagtagtacttaattagtactttgtggtcatgagcttaattgcatggcataattagtttagtttagcgttttaatttcttgtagagaaaataaacgatataatcagattaaactcaaaagtgggcatatatggtccacattgaaggtgtaagtgcacccccaaatggttcgacaatggtaaataaaagaaagactttctgtatgcatatatatgtatgcgcccgcgtgttaactattttgcactagttgaacgaattattacgttgttgacattaatatatatagcataatatataaaattattattattattttagtcaatgggagttgccattgaccccaacacgcaccaccaacagaaaggcacgtgcgagcccactttccacccgccacggcaacggccaccggccggcgcttctcccgtctactccttccgatcataataaggttttgcgaagtgtcaactcatttgtttagtcgaattatataatgattgagagagaatatggaagaagaaaacattgaatgtcatcattactaaatttatatataacatggaattaaaaaataaaatctaaatcatgttacttaaaagaggtgtgtttagtagctagtatatacaattattatactaatccaaatcctgaataaagataattttgttttcttttttcatatataacattattcaattaatatatctattctatataaagtgtgcctatataactgaattcttaatttatgagaaattcataagtgactttttatttatatttaataaaata

SEQ ID NO: 302362 - DNA, 3932 bp, Cannabis indica
attaatattcattagctgtaaggcagcaatgcttccttttgcatctttcattttatatttttgagtgaagatatttgcaagcatattatttaacatctagtgcttagaaaaacaaatcttgaaagcaatccccactgaactaacttcaaactcaatcttaaaacaatttaaaactcaagctcttcataaaaaattcttcataattaagttctatattatctttttattttattttattgaccatttaattaaaactaagagtgaactcttttacttctccatctcaagattctatcttgtaaaaataaaaagcacaaataactgaaattttatccttgaaatccttaaccagaattgcctcaaaattgcccaaaactatttgattcataattattgaccttgaccataataaaatagcataagagcccaatattctattaccaatagaaatttaatacaaggagaagaaagaaagaaggaaagaacatgaaactttgctttgctattcatttcatcttgagcttccgccattaaaggctgatgaagcttttgttatatcattacaaaagaaaattaacaaacaaaaaagaaaaaaagaaaaagaggggaaaagaccccaaaagaagagccatctcatagagcagatcaaagtaataaaatcacacttgtcaacaaccctctatacaaaaacacattcaaacctaacataaaccaaaactctttctttctttcttcttcttaatcatcaagattcattttcatctatcaacacagtcatcttcatgttcttcttcatcttcttcttcattttctctccttggccctgttcttaatggaaaatttgaaccaaaaaaacacaacaagtttaagtcttgtgtcttcttttttccttttccgggttatatattattattactattatgattattattatgattattattatacttttgctatttttctctttagaatcagatttaggctgctgcaactgtccctgtacggaaagggtaatccctgtttttgtttggggatgaagaagattttctctgctctttttttctcaaagctttaatggaagaaaagttacggtttttctctttagcttcgtctatttcgatctgttcagctctacactcttcgctacagaatggtgtgtcacctctgataataatcaaaaaaataaacaaaacccatatcagaatcattgctctataatcaaaacataattagaaaaaaaaaataaaaacaattatactatcccctgtttgtttcccgagaaaaagcaagaaaatttcctcttttatcaaactttctcattcgcattattcagctattaaacgaaatacccttttgagaaatactaatctagatacccaaatcaatccgattagatctaaaatcgagatttgggagaaatctgaatggaactgacctgtacatgaagatatctctgttatcaccgagatgtttcttgcagagaaaacatgcttccaagaaatggggttgaggttcttcgaatctggcatcataaaaccttccagatctgggtgaaaacgaagaagaagaaggcatggaaaggctcctgaaactactcttcctggatgaacaaaggggtctagagtaaaaggggtggtgattaccggaaaacccagcttccatatcagctagagaagccaaaccatcatcttcttcgatgaaacaaggtcttcttgagtttgaaatggggtccatatcgtattgttctttcttcttattattattattattgaagaacaagaaagttattgaggttcttcaatggcgagaatacagagagagaaaaagagaaaaaggggtttgattgttagagaagaagaagtgaagatggggggtttttaaaggaagttggtgaagactgagatgagcttcagaaaacgacgaaagagctctctctctctctctctctaaacaacggcacttctatgaaatccgtgactgtgaatccattggctcataatacctgcattctttttcttttctttttttaattccttttcctttggtgtaaatataacctgaaatgactgttttgcccataggtaatggtactatttctaaatttcaacaaaaaaacctccatttcctttatagaaaaattagacaatctttaaaatttatggatgcattttttatttaggctaattaagtattttatcctaatttggacatttattaaatcattctttttgattttttttgctcattaaaaattcttcctgaattattgagattgttggatttaaggatttttgtccaatttcattcagttttactacttcggttgtctatgtattaaatcatgctcttcatactttgatatttatcaaattatacccatcaaagttagacatgtgtcaaatcttgcccctaaactttcatccatgttagacttttcttactaaaattagacaaaagtccttaaatacaacaatctcaatagttcaagaggaatttttaacggtcttcaaagtttagaaggcatgatttagtacatttcaaagtacatgacaatttttttttttcatatttacctagtttataattatttaggagattatataaaattttaagaaattcagaaaaatttaatacgtcgaaaatagggttcaaacaatctattttatatgcgtataaaataaaagtctcgcgagcaatagactgtttaaatctttcaaatttttgcaggatgtcttaaagaactataacatagacaatcataaaaaagattagactaaaaaattctctcaaatgtgaaaatagataggagtgtatcggtatcccttttatgggtgcattgtagaagtatccaaaaatatatattattattctatttttatttatgtgagtgaatattatttgaggagtgtcattgtcaatctcctaatataattttttaggcagtttatgtgcttgaaaatatacgttggaatattttttttcaaaaataatttcatggcagtgttcgttacacttgcaacattattcctataaattttttaaaaaaaattgaatagtttacaaaaattgcacataggtttgaagttttttaaacacgcgtggtaaaacagaatatcaaactgacatcccactagaaattcgccatcacgctttccaattgttgacagaaggtctttgttaagcgaaaacaactcatagcataagttgggattgattgaacaactcctataagtaaaatttcttttccaccaatggagaaaatttttcattccaagcatgcatcaacttccaaacacaccctttgatgttactaaacaactcctttttgtctcggtctgagtaagaaggaagtttgagataacactcatgtcactcactaattcgcatatttaaagccagatagaagaaattttgctctgcaattagagtatttggcgaaaatgacataatcaatttttggtttttaagcatttgtcttgaagctcagtgatatacgttcaaagctcttttaattgccaaagcaaatgtgttcgtggtctcacagaacaacagactatcatcaacaaaaaaaaaataagtgtgaaattgaaggtgctcttctagtaagacgtagactttgaagatttcctattgcttcttcattttgtaacaatctcgaaagtccttcaaatcaaattaagaagagatatggaaaaagagagccccctatcgaaggttttcagttggcttgacataactcgcaattttaccattgagtaagaatataagatattgggtaattctacaatagacaccctaaaattgggcctatcggtagacaccctaaatattaaagggtaattggttgtaatatatatatccactatattttgtgtgcctcatcacattgaatctttaatcttattttacttaaaaaaaattaaatttaaata

SEQ ID NO: 302363 - DNA, 1550 bp, Cannabis indica
actgaaattcttttttaaatttatggttctgctatctttttgatactgaatattatttcatgttaatcattttagggagaggttttccaagttggatggaatcctaaaaatgaaactatcctagcttcttgttgccttggccggagactgatggtgtgggatcttagcaggtatttactgaaaaaaatcaattttcttttaaatattaattttactttgatgttatagtagtatgtgccatgcaatacaaacttatttaagttgatgtattagcaattactgttttaatgttttcttgcaagtttggggatcagagttagttttttttttttcctagatgttttgacagaggtcacttagtctcttaggtgctatcacaaactacaatagatatggcctaggtcaaaaatcaagtcaatcagaactctgacatggggagaaaaataaaatgtagaatgtcttttcaactcttagagaattttttttttaaaataaatatatatatttatatataaaagaactcttaagaataagcacaattgaatcattgaaggcaactacgagcaaggataagataaatttgtattagtaaaacttgtttagttctgagtgtgttatatcttgagtttataaagaaaagaagtgggatcaacctaaattcatattagtgtctgtcctttacttctattgaatcgcctagggaaggaagacaaattgaacacaaccgaattgatgattgtagccgatgtctttgactgtgaattagttcttcagggacatatgttttgagataagtctcgactttgttaagctaactaaaggataggattgagcctttaaaaagaaaaagaaagacaatatttgattacaaatggtaactttgttcgagttttatggtttgtttcgggccacaaattaccttttttgagtcctgtattatatagtattattaaccgtaaagcactagaatatattgatgctgctcccagtaaaacgtgagtccagtaattttaaaattgaaaacctcaagcaattgtaaattataaattttagatgcaatttcatcacagaagcttattgcttgctgtgctgtcccatgactttcttaattttgacttttttctgctggaactatgttttggtattctaacaattcataagttcatgttatttgtgaaccattgaaacaaagaatatgcacgaaaaacaatgatctatgttgtgtcggcattattaattattcttcttcgggtttgtttgcagaatcgatgaggagcagtcaatagaggatcaggaagatggtccaccagaattgcttttcattcatggtggtcacacaagtaaaatatctgatttttcgtggaacccatgtgaagattgggttatttctagtgtggccgaggataatattcttcagatctggcagatggcagagaacatctaccatgatgaagatgatttaccagaggaagccaccaagtcatcttagaaataaatgtcccattttaggttggtgaaattgagtagtcaaaaaaagaaaagaaaaaaaa

SEQ ID NO: 302364 - DNA, 3100 bp, Cannabis indica
aaaaaaaaagtaaaaattattttctatttatatatttaataatgacaatgtaaaaggaatttgatattttgaatttagaatttattatgttctattttaaaaaataaaaggttgaagtatttttgagttaattatcaaaatatttactccatatgtgatcatatggactaagtacacattaattattaatatttgaaaaataccaattgttaaaaaatttgaattgaggaaaaaattgagctatgctaataattaaggtacgtacctttctacaaaaagagccatgttcttttacaacttgtctcctcagtatttcgcactcaaattcatcgagcacatcgatcacgtcatcaaaaacatttttaagttgagcgagccagtttttaagctctctactttttccttgcttactttccacatcaatgagcacatcgccgaggttagacatgatttgttgaagctgtttgaggtcatctttcatgctccatgccatgttaaactcctcataagaaagggaagctagcttattcaacacatttaaagctatactggaaactagctcagccatattgaaagaacaagtgattgaattttctttcttcacaacaatatttgtgggtggtgagaaagaaatgttcaagtgcaattatttgtctatatgtatatatatatatatataaatatatatatatataaattattcttccttatgtgacaattttataatattaattttgtacacaagtaaagaatgacttttttttttggagtgtatgcaacgttaaaaaccattccttattcttaaaatgttaattggcttcatagcaaaatcttctacaatgaagttatatatagttgaagaaatataagtgatactattcttaattcttttttttttttttgtttttttgataaatcaaagatgtgtattgttcaaaaacttttcgtaccacctaatagtattctccaaataaggagaatctaaatatccttaaaactttacaaggtatcaaactattttttcacacttctagttactgtttttggtcatatacatgtaattttctttttcactgtgtttttcactttgataattacatattctacattagtattagaattttgccataaaactgtgtttcttgtgcaccatatttcatagacaagggctgcaatgacagcagcaaaaattgatctcttcaccttacttattcaccttataattctttttaaggtagtggcagtcattctccaattcagccatgatttcatcttttccaagcattctaagaaaaaagaacattcaaaaaataggtgtgccactgtctcatcttcagtgttgcaaagaaaacatttagaactctcaagttctctatactggaacctgtcttttgttttaattcttctcaagttttgttttgtttgatcctttcgaaactaattttgtaagaaaaagaagtttaggtgatgtttgttttgatgtaatgtaatgtaatgggaatagtaatggtaatatgaattgtaatggaataagaaaaataagtgtggtcttccctaaacctctcatcccaattacaaatataacatatattatttgattcttactttcttgaggttgctcctttaataccatactcacgatctctaccaataacatctgaagggttaacaaaagagtgagccatcatattgttacgaaaattataaatagtacgtaagtgcacgtaatcaagtagtaagctcacacaggtgaggtcgaaccacagggaatttgattgagtaccactagactaaatctatgtttctatttggcaaatcaatatttttcaagtttaataaccgaatcaaaattcaagaagcttaaatagacaataaaagttaatcaagatgagaagatagggaagagaatcctattgataggtttacccaattgttaatgcctaattactattccagtatctgttgtgaatgacagattattcaaattaacctagctcttttcatatcttctaggttctaaatcacatgctctctaattactctcttaattagaatcacataaaatctgcattaagcaataatctaaattgtcacataagtcatgcaaataccttcgttttacataaacctaggttgtccaaattttagcattctcaattctcacttttcagatttttaattgacatcatagaccatgcaaaagatgatcaagatttaacatggaaataacacaaataaggataatttcaatatcagaatgaacaggaatggcaattaacagtagctagggtaaactttaacaaacattcatcatcttccctaaatggaagactagctcatgttcaataccattccaaaaacagaatttaacataaagtaattgaaaaggaaggaagaaagaaactgttggtggaatgaatctgggtctccactttgctcctccagccgctcttgactgcgttttaggtctccaaattgcttcccctgtcttctattcgcagttttcttcttatttctcgtttttagattcaaaagatgaaattgccctcacttgtacgggatctcgccgcggccatagctttcctcgccgcggcgagtgatgatgtggccacggcggtagaacatctcaccgcggctactgacctagctcaaaaccgtctctctgcccagagtatttagccgcagccaggaatagggtcgccgcggccagaagtgtaccgaaccttaattttgcgtttttttgggtccacttctcttttgctgcacttttgtagcccggaacttccatagctttgagaaacttgaaaacacagaaaacaagcgtaattctgtcctaaaacatcaaaaagcaaatataattgtgacccgaaacataggctaaaaatagcctaatacatatccctattgtcatatttttagcaatctcatctaattgttgtcttatctcgatgaacaacactaaaacgataaacaagaggattggaacatgttgagaatcatgaaattccatctcataaccaattaatgatgagtggagtagcttatgttatatatggctcaatacttttacatttaatccatgtgggacaatgttctctaa

SEQ ID NO: 302365 - DNA, 2352 bp, Cannabis indica
ctattaattaaatttttatatactacttaataataattactaattaggaataaactaaaaatatatattttatagtaattttattagttttaataaataagattagttaataataatatgtaattagatgatataatttcagtattattatatattaactttaatttttaaattattattataataaatagttatttttttattattataaagtagaatttctatcaaaaaatacacttaggaccaagtgaattatattctaattgagattttatataactaaatagaattatactaaaaaaaaattaaaaaatcaaaaaaaatatcaatgtaacaataataacaataaaaggaaagatcgaagagctttggggtgatagacaatgataattgtctactttgtaacggtggcagcagcgagaccattgagcacttatggtttgagtgtccatactcaaaggactgccttgatcaaatcaaaaactggctgtattggggaaccacctcagtttcctggtaagtatcagcaagtggattgaaaaaacaaagttggcaatgtattagcggtgttgttgttgcagcgttggtttatctgatttggggtgcccgaaacaacatgttttggaaccaagtgatggaaaatggtgataccattgtatatagaattaaaagtgtaatcaaatatagaattacttgtatttggccaaaaaatgtaactagtagtgaagagtattggtttaatacattgtaaagattatagttggggtaggtcctctaaattagaggatgctattagtttgtaaaaattgtttcttggtttataatacacttgctgatttactacaaaaaaaaaaaacaataataacaataaataattaatagtacaatatcataatagaataattttagagtaaatataatgtctatacttgcattatatatagtttggaataaaattattaattatacataaataaatttacaaaatatatgtatatattttattacaatgtaattattattatataaaggtatacgttgttaatacgggacttagaaaatgtataattaattataatttagaggttatttttatttataattggtctaaattgagatttaattttttttattataaattagaggttattaaagtatttttaaatagaagttcatctgtaatactaaagaaattaaattaggtgcgtaaaaagcaggtatatatatattacttaattaatcaataaacaaaaattaagaatctttatttgtttccttaagtttggagcattctccacatacaaagtagtactactcatgggtgataataaaaaaaaacaataaataaataaatgcagagtccaattaggaactaactggcagtggtaatatttataatcagctcacacacaataattatatatatttgtacttatttttatgaaatgatgatcatattcatatctccaagcaattttgcaaatggccacagatattttttccaattttcaaatgtggggttccccaagcccacaaagtaatttacacctccattaaatatattatatatatatttatatatatcaagtcttgttaatgtgtggctgtcgtttcacgcccaaaataaaagcactatatctattcataatcatctatgtatttatttatgtcgtttgactggtctctaaatatataattatgatgaccaattggcatatataataacattattacaaaatttatagtatggactggtaggtatgtcatactcgtaactatattaaattacaactacaacatgttaaattatttttaagaaataaaaaaataaagagttttaatttttcattttatatctcatatatatttatgtagttataataggcaattgtccgttttcgagtagtgctcaatattttatgctgtcctttcaaaataacttattacatacttataagataaaagacacgcatgcaattaaatgttcaagtatttatgaattcttcgaaaaaaagtatatatgcttaatgagaaatgctaaatggcactagtggtgcctaacacattcttatgtatcaatatcgttattgatccaattaagtatcgggtcccatataatctaatataataatttttagggagtagctaatcgcaacacatgtcaagaagttgctaggcagtactggtgcctaataacaatactctatgcctaatataactataattgtatcattatatataaaaataaatagatttataatttctctctatcaaaaacaaaaaatgcccttacagaatgatcaaaactaagagtttgtttggctgtattttcagtttttagtttttaaaatt

SEQ ID NO: 302366 - DNA, 1657 bp, Cannabis indica
ccagcgcatttacgcgcgtacgaaaagtctattttttaccagcgcttttcattttatgctggtaaaaagttctaataccaacattgatttaccaaccctctttgccaacacatcacaagtaaattctatttaccagcgcaataccaactttgctaacacaaaaatatgctaggtaaaagtaacatttcttgtagtgtaggtatactccaatgcatacggttgcgaatttcttcaaaaccaaagctaaaaggccaaaaaaaaaccgtagataaagactctttttgtagtcatgatagatgaagaattgactaacaacttctaacctcctaatcacttctaactaacaatacaactatcagactgttaattgtacaaaactgaaactaattaactttctcccttgacaatatctaaattttattactattttaatttatttataattaacaaatacatatttattattattatattataggatttttcaatttttcgtgccatactttttcgtgcttcttagatcgtttcttttagactagtttatttgtgtttatgtgtcctgtcttttagatttattgtgtcatgtcgtgctagttctaagtatcgtgttatgttttacctaaatatacattttcttgtgctttttggacttgtgccaatttcgtaatgtgtcaaaaaatctgacctatatttacaacactacttgaaaagtaagtggtaatagtttaggggacatacatcttatttatttttaaacttatacaaatataaaatttaaattatttatatatatatatatggagatgcttcttgagacggggagagagaagggccacatgaattagggcttcaaaaaagaaaaataataagggctctgtcaattcaaaattcgattctatcaataataataatgataataaattgttgatacagatatatacagaaacagtacatttttgttttggtttcagaaaactttatcttcacgcggtgcaaaccctattttttttcttcagaaactttatcagaccagtaaaatacaagtatatacaaccttttatcgatgatctttagctttgttggagtactaggtactagggtttttgtatgtatgtacacaagtcatgtgacgaagctcataagcttcttaaaattacttgagaggaaaaaatgagtagcatgaggaataaaagaaaggaacatcaagtacagctacgtcttttcatctttattaattactacaagtactactggttgagtagactatactgtaatttgtcccttaagagatgatgatgcattgtaatgttgaatcttttttctttttcacttattgtaacaagacgtgtttgtcttcattatcatcaaaaccctcttttactttttcaacttgaaaccaatcatatgttgacaaacattgtagattttactattacgttgtacaaacaatatactatatattaattatttcctttggaacttgcagattaaagaatctggaataactcattgctagctcttgcagcttaaagaatctggaataactcattgcagattaaacaataactcattcaaataggattgatatataatcaactaagggctcctttggtacgctgtataatgttgcgatatttagcacacgcaagtgtacgta

SEQ ID NO: 302367 - DNA, 2026 bp, Cannabis indica
tgctactattgagggtgttgcttacatatgaaaatgctgatgttacacttgcacttagagcttgtaagtgacaagtgaatgaaacaaagactcacataaaaccggggagaggattcttggacaatgccttcaaccatcagggagcattataaattccatgaaggaaatggacgccaatatcattctacaaagaactttctaataaagcaaaggatccatcaacataactaaagaccctgccaatatataaataatgaaatgacaggactgccaaatcaagtatctcatctagactcttgaggaaatttcttagattagctagcacattacaagcacaaatgatatccaccaaaagctacagacctcctgtctttaatataagtatatatccagcaattaccatggcttatgtaaactaacttcaaccgattgtacttctatacaagcatatgtgcatggatgtaatttctgaagtcaccaatgaaaatttttatatgatgttttacaggaaacacatgccaacatgagaatagttgtagatttcataaagaagtaacctgaagctcaacatcaatgtaatcagccccatattccatggccaatcgaagtgcatcccgtcgcatttcttcatcaccattgtactgaccaccttcccatgttggtctaaaaatgtataacattaaacaatgatgagactctctcaaaggtagtgcaaggagataatagaataatgttcattgctgggaaacccaaacagactttcacaaaactttgatagtcaatctaaggtccattgaatattaatgtttaagctaaatcttacaatatttggaccagctcctcatcacaacaaattataaccatggatccaatttttcggccctttctagattaaaaagtcctttctagatttgttttgaataaaaattaaaaagaaaaaaaaaatcatttttcaactatatagacttttttgagaagctagtaatctgagccaaaacttttactaatgttaaccaaactgtcaaaatgaagatgagtttatctaacaattgaataaaaacagtctcgatctttcaatcatgcaaaggtgactaacctatacgtgaacagagtaggcaaagggctgcctttaattaaggttttaagatcctcacgaggttgaaaaacctccaatttgtccaatctgatctcgacaaggtcagcaccagattgttttgccttaaccagttcaacaagcatatcatctaccgattcccccataattggagtacaaattagagttgagttcctcataactccctggctgcccacttgcagaccagcaccagaagcaacctgaatccattcgaaaaaagaaaaaaagaaaattcaaacgataatccaagggcggagctatggaaactacagtggatgggagattagtatactgcaaagaaaataatagcgatggatagtaagattaccgaaatattggtagagtccatttggtttggaacgcttatctgtttggaaagtaagaaaatgagtagaaagaaaataatggttggtgtcttggtcacttcgttgattctttaactgatgactgatccacctaacaccagccgcctcccctccgcataaacaattttttttttctttatttatattattaatttaaaaatagaataattaggtaccatttttttaaaaaaaaaattaaggtagcgtttggtaatacttttttaatcagtttttgttttaaagtagaaaagtgaaatatttttaaaacatgttctataaactgtttttactttttaattttataatttaagaaatcaaaattttaaaaactaaaaaaaatactactttcaaatttttttaaactaatatttttttaattctaatattttggactccgaccccaatctagaccttgggacccggacgtctggcgccggtcccagtcctggactcggactacggccccggccccaaacccggacctcggacctgacttaaataaaattagaaaataaaaataaaaatt

SEQ ID NO: 302368 - DNA, 2786 bp, Cannabis indica
ttgttgttttcaaaattcttgtttttgtaactttgttttctgaaaactgtttttaaaaagcaaggccaaacaagccaaattgtttttaaaaacaattttctgtttttaaaaacaaaaaacagttttttagttatgatgccaaacatgcacttaatctctcaaaatggtaatccatttcttagaaaatactatgtttccataatggtatatatgcttctatagcagtcactagtagaactttgtgtttgcagttcgcttgtgcggttttcgaccaagttttcgaactataccacacaagtggttcgagtaatttttcaagcacaccctataaacatcacaaaaatgtggcgtgctgctgggaaatgtggctgtttatactaatcactgactttttttttttttggtaaaattaaacattataataaaattttatatataattcatgcataaatttcataacaagtgtttaaacgaaacaatgatattaaattattatacaaaataattaactcaaaatttaataaataatatggtataaaagtatgtatattatatataatttttaaaaacaaactttcattctattactcacacaaatatattacaaatatgtgtacatagtatgtgaatgtctttttagggaaatagtaggtgaatgttagttaatgcttaaactaacttatatttttaccaaagttcaaacaataaaaatttaaactacattaaaaaaaaataatggtattagagcctcgataactttttccttgcttctgagaaatcccagtcatacaccatgacaatattttttcgatattattgcctcttctagccaacactcaacacattccacactagtatatatgccttttgcaacaagcccaacattgcgacgattttttgctagcaaactccatgctttgtatgaagtttgtatttttctaatgacagaaaaattgtactatcaaacattcccttaataaattcatatcaagctttctccaaaccacaaagcctttttactagatcaataaaaactctcattaaacaaaccccaaaaactttcaaagaatatgttcaatccaccaaatttgatcaatgtaaccatcctgctatagagtaagaacaattaatcactctccaaatctctcatgagtttccacaacaatgaatagaccaagttctaactcacatccattttagggcaatcagagtcgccttaacccatcacgggaggaaagacttaccaatctgtgcaagaataacgttgctttatacaagaatgagaaagttccaacatgcctctatagacaccatagaagcaacacttaatgcagacatagtcattgttatattctatcccaatttttgcatgtcattaaggtataaacgattactagatgccttgaaggttcaactacaaattgtgggcatcgatcaagatcccaattccttaggatctacatataatcaacatatactatcaaatggcctacatggtgcaaaaccatgccattgacatcttagtagcgagaagttcaggtgcgctaatgataattgtcgatacaaactatgtactgacatgcactcacattcctcgttagatcacaatggaagaactccaataaatatttttgactttgtggatctccaactatgaaaagacccataggacattactagcagtccactcatcctgttttcatgtctaaaaggatggttcaatcgaaatatcttttccaaagaatgaagtaacttcaaggattttctcaactcaatacataatgtcgtcaatcatcccaatttctgcagaaatattatcctttgataagaatggttcccctatttatgcttacaaatcctccttaagtactgggacatttacaactgtctggattacaccacactgatgagcaagaagaggcacctaaaatgaaaagcgcgacaaagaagctaaaagaaaaataggaacgaccaaaaagatattggctcacttggaaaacccttaagaaaatttgactacctagtcaaatattcatataaactactggttcaccaggacattcagcaggcaggatgggaatgtgaagatgacgaacataagccattactcccatgttacaaactaaagaaattcaaaccaaatgcttcacatctcttcatgctaaaaggtagcaatgatagatttccacttccttttagctttacggatgaaataggaaaaatcactcaccagccaaaagtcctcaactcaaatatttgagaagctgatggtacgttaaagaaaatcactccaactgaggttgtcctcaactggcagacagagaacatgctagcccaaagcaagaccctctaattgatagacgagaaactttctacggtctacccacaaagttacaaagatcaacaaagaattttcaaaatttgacaccattatgactagactctaatacaaaatttcgtaagtgcatgaaaaactactactgaccaaatctaagcaagttccccaagagatttttctcacgaaggaagcagagctaaagggtctaaagagccaatacgtctctatgcaaactcacactcaatataaagaaagattgcctctcactctaggttggactctacacatggatattttcaatattaccaaaatctgcgcagttgctagcatcacctttaaaattgggagaccaaatccttcatctagagagaattctagatgaagaaaatcaacttaaaagaaaaaaaaaataaaaatataaaggccaatgcagtactcaactcatggt

SEQ ID NO: 302369 - DNA, 946 bp, Cannabis indica
atcatgattatattccactgtgctaacgacactataatcatgaacaaatatatgtatttatatatatattctgaacttaatagaatttatacattataaatataatcatgaaataaatcatgtgaaccatgcaacataaaatgatttctaatcttttattaattagtagatctaattatattgaaatatgttttatttagggcagacacaacccaacaatgatcacaatttaattttatttggtggggctcaaaatgtgttggggagtttcaagaattggctcgctggggtttgtttcaagtataaagggggcaagtggtacaaagggagttttgatgcgttccgccaccgttggggtcgttctcgttgtgcacagatgttgctattattctgggaaggggtttggtggatttgagggtgtgattcgggatgggcagggactggtttaggtggcgtgggtggtgggtgcggctggggacttccgtgtgagtgtggcggagcttcttattgtctgcttgggtctctctctttctcaatattttggttttcctatctttaaagttgggtgtgactctacagtgagtgtgagttgggttaatagttctcaaagtaatattgtattttattctattattttttatattatttctttaatagtagttataagcagttgtttttgtaatattatttattgttttgcaaatagtgttattcacgcattagctacttctgttactaatttttttaggagtgtttatttggacctttttcaagttctcatgtgatagcatgatctttaatttaaggggtattactatttatataaatatgagaaaaataaaattaatttaaataaatatgataagaaaacttaataggatttgtatttaaaataaaaacttaacatatataggattgaattgccataaaaaaaaattaaaattcc

SEQ ID NO: 302370 - DNA, 3469 bp, Cannabis indica
taaaaaaaattctcattgtgttgtataactcaactaaaaatatatcaatcaccctattcacattctttttcctcattttttctccattttgatcaatatctattttatataaaatgcagctatataacagaattcttgctttaacatttatttttttaattttataatattattaattaacagaatattctttattaattttataatattgttatatatattatatttaaaaaaaaaattatgtaaatattttatataaagaaatttaaatacttaaaatattttaggtttcgtgtttcaaatttgttattacagttattggattttagtacgtaatctctacattgtttgaaatcgttttggtattgtataaatttagcttacaaagcttgtagttagctaatttagcttgaaaattagcattcgaattcatttggcataaatttcttcttgttatttcatgtctttgtagaagaccttaacgatcatcaacctagttaatctatatatgtaagactgaggtataaggcggcgatatagtactcttaatcactccaaagctatttttctgtgctctttggatgtaattatgtgtatatatgtattttatatgtacgaattaaatcctgagtactaatcgtggtgaattgttgtaagaagaaatttatgccaaatgaattcaaatgctaattttcaagctcaattagctaactacaagctccgtaagctaaatttatacaataccacaacaatttcaaacaatgtagagattacgtactaaaatccaataattgtaattacaaatttgaaatacgaaacctaaaatattttaagtatttaaatttctttgtataaaatatttacaaatatatatagatttatcaattcaaactgagtacctctaaattatattataaccgaggttttcaaaaaccgaatatttagaacttaagaaagaaataaaataataaataatagacacgaaatttttacgtggttcaggcgttaactaatcttagtccacgagtctattttattagccacgtcggtaggtggtgaacattacaagtcattacactatggactggaactctttattcctctcgttcctctcaaagaagaagctgcttcataggaattttcgtagagtttttataagtagaatacaatgttttttcttttgacttctaagagttgcctctatctcatggaatgtaggggtatatataggccatttttttcttcacgtgatttttgggttgatcttgctagaatgaacctgaccgttgatttggtggtggacgattcatcacatggcatttatgggtgtcggcttgtactgttcgatcacttcacacgtgttacctcagggccttcccttttgaattgcccttgtcaatgaccgttggatcacttgggtaggtataactaggcgtgcatgctctgtactacagcataaggtgggggacaagtcttggcgtcgtacttgaaaaagcatgggtatcacgtctgcagtctaacatgtacaggtagagcttccatgtgacactgaacgaatctcatcctggcttcttctgtgacttgtattggcgtcctttgggaagcccttatcctttgcggagcattcagcttcactcctcgagactgggaaagattactgatagcggatgctccccgcaaccttaccttgcatgagacgtatcctttgtggaggcccatttcaggagcttaagcagatccttggtgggagttaggattaaggatactagttgattgattaccatcttggcttcctggatttgagtccacgtgtcaagcttacaaaaatctagacaatatttaccccccaagctttcaaggcgtcatgcgatccgggagcttgcagggttccctcgccttctcatgattggcttctgacatgtgtagtatctctgagtttctcattatgtcgtgtaagtagccgtcaactaatttgctaatgtggggatattatttgtgttgttatattggcagtgctttaaatgctgactcttgccattcgcgtacgtgctaggtgcgtgtctagggagacattgaaatggcagtgaattgactgaacatactcttcacttgccaagcgcctttctcaatgcattccgtaatggatgttgaatgatcagagctgatgcatcttctcagctccccatttatcagatcctcaaatactattttggtgaatgatccagattgttcacttctcgtggaaggcacctcccttggtattcattaaatgctcacaacatgcatcacctttttaagtctcaattttttttgctcttcacatcagagttctaacactttgagtcgtcttctcgctttgttttgcaagacttgatcaaccgggccatcctcagacctgcacgtcaccagacacggtgtagtagagccatccctcgtgatattcttgtctactaattagtaagtgttctttaccattttttacttgatgcaataatattgaggttaaaatggtgtatactgtgtacgagtcagtattctgagaatgttggtcccatttatactgtcttctgctaaaaaggagacttgatgttttgtactgacccgcttaaccccacactatcttatgtagaaacttctcggtctgccatggagagggccattttctcaaaaattataggagacaatgatctttgcaggaaaagaaaaaggcagaagactgctgctgataccgagggacacccccagggacatgacccacaactaaggctggttagaccaacccgcattatccattcatccttctaaagataccttccatgggtttgcgttccccacaaaaaccatccctcttgacccaaacgccatgcaaagggaaaaagagataacaaggctttggaggaacgtttggaaacacagaagggattcctgcacaggccggcgaatgtgctttcgccagtgaggagggtcaaaatcttggaaggctttcacgccttaaccccaaatgggccaacagtcgaagtggaggctctagagaagcgtctggcacccaatgtgggaagggaagttgcaccttttgtagcagaactcctggaccgggttgttggaaatgcttccgagttgcccttggagacttggccaacttgtagcaatgtcgatgcttttgccttagcccatgtcgctaagtaacatgcagctggggtaaggttctgagtctcttcattttgacctttggcattgtatgtatctctcttatctatctcccactgtaacaggtagctttactagcagaaaagcctgttgaggaggtcagtacgctggtcacggagctggagcaggctagggttgacaagtgtgacctgcgttgtgacagtcaatagtctcgtgatccgtaaagggaaatatcgggtaagctgtgcaatcccacatcgactggggaaggtcaagtgggatgattctgagactgtgtagg

SEQ ID NO: 302371 - DNA, 1969 bp, Cannabis indica
cccataaacacaaagcacgcccataacatgtcgtaaactagctcaatcttgacttagcctacacccctgcatattgtctttggcagcattatgcattgtgcaggacaggattgagagggtcaagctgaatcttgtcttgcagctcatctaactcttctttggcctgtgaataaacagcctaaatgtcagagaatccatctatgttgatctctttcaagataggttttagagcctttaatttacttatcagttgaaaaatctttgcccctcgaatttctctgttgcacacctcaataacctttactaaataatcaggatgtaaattccacatcctgaagtatttgaaaggttttttaccactagtccacctagggtacatggataagatgcctggagtatgataaaaaaactccttcattaacaaaaattgcctcagcattaggataatggtcaagccattcttgattttccattatcctgtcaatttttgaggtaattctatcctttccttgctgcttattagaccaagtaaagaaacaaccagtggcttttacatcttcaagttggcaatgttgaatataatttgtaaaatctgtatcaacatggtatttaactctctgccccaccctttcttctttggctatatggcattgaaatcccccataatgagccattttccacttgtttccagtgaacaaagatctacccaaagttcctttctaccatcattgtcatttactccttacagtaagacagctactaaaccttccatctgttgcagcaatttccaagtgcattaattgactagtgcacttgataatatctacaacaaattttattggatcccatgcaataacaatcttccctccttgatgccaagctatgtttatcgagaagcaccatccattaaaatcatttaggtacaaggttctaagcttttgaaccttgaccctagtttcgagaagcccaacaaagccaacattttgtgttctgataaactgtctgataagttgttgtgttttgctgactgttggctcctcgaacattccacactatgattttatccatgaccaagagagggttgtcccccctctctttaattgtcatgttctcaagtcaccaactcctatacataacctgtctgttcagtctcatcatcctcagccagaacctaaaatccattttccagtttagtcccagatggctgaccctgttctcgaacctttttacctttgctaactacttgaaaaccatcttcatcacttactggtttctgttgcctcttgtcctctttaataatccattcttgcttggccttggaattcttcttccatgcattcagctgtgatatgtcccataccagaaaaatttgagcaaacaacaggtttccattcatagtgaatgcccacttgtgtgttcataccaaattcatcttcaaattccaataaatcaggtagctcttgattcactaaaacttcgatccgaacccgtggatagctcagcctttccctctcctttgtgacactgtccaccataattgtgttaccaacctggcctacaatcttgaaaagtgatttttgaccctaatatttgaggtcaagatcctcaagttgtacccagataggcatctgcttcacatcttcctttctgaaattcgtgtttggatcctagggcttcataatcacaggccttttattgaaaaagatataccccccattcagcacttgatccctattttccattgaattgaatcttatattaaagatcccatatgttagcatcttaaccttgtcaaccttatttttccagatcgattcgatttggaaatccttccaaaatgtgcagaggagggtttgatcccaaaacatagcacacgatggaaggtttccaatagttaacctcttcttcaatgtcatccagagtgatcttaattgtaacaccctaactaacataggcgtattacgtgatt

SEQ ID NO: 302372 - DNA, 1323 bp, Cannabis indica
gttttgaagttttaaaacagtcatgttggttagtagtttttaaaacatattgaaccaaaagcgaattgaatttttaaaacagaaaacactattttgttattttcaaaattcttgtttttgtaactttgtttgtaaaaaatggtttaaaaaaacaaggccaaacaagccaaattgttttcaaaaaaacaattttctggttttaaaaacaaaaaacagttttttagttatgatgccaaacatgcactaactttctcttttaatgagagtttttataagaaaatagtaattctagaagagaagaagaagagaaaaatcatagatgtacaacagcaaaatccaatcgtatttttttttttgaatttaatgggatttattttatttattttattataatataaataaaaagtgacccatgaatttctcaaaaattattttatttttaataataaatcattttatttttaatataaataaaaagtcacccatgaatttctcataaaccaagaattcgttattttattatatataaataaaaagtgactcatgaatttctcaaaaattattttatttttattaataaatcattttatttttaatataaataaaaagtctctcatgaatttctcataaaccaagaattcggttatataggcacactttatatagaatagatatatttatattattgtcggtcactttaataactaaaacaatgtgtttgaagttaaaaaaaaaataggtgacagcttaaaaccaaaggctataccaatagcaatggtgcaaaaccatcgattattctatgagatttttaaatatcaccaaaactacccaaagtatagatcttgagtattgatctcatttttttttctaatcggtgtataatatttagtaatgataatgattttgtacgattttttttttttttttgagttgataatggttcaatatttttgctactgtttggatttgttctggttttaaatttgtgtttcaatattatataataataattctttgaactcttaattgttttagtgatttttttgtcggagctatactaagttagttttatattatatgtgtacaataactttgcgttcacattcaaattctttctcaacctcatactataaagatgaaattaaagctgcccttttctccaatattccagatagtaaagcatcggatggtttcaatagtggttctttaagaaaacttaagaggttgttgataatagattttatgaatgaagtgctctgatggtttgagaataaatttgtattggttttgtttagaataggtggatatgtagttaatagtttg

SEQ ID NO: 302373 - DNA, 3340 bp, Cannabis indica
gaccatgactttcattaatgagaccacaaataggacaaggagttgagtccatttggatacaaaacattgtcaaaaaaatttcttgtgagaagctgagagttaattgcttgccacaacataaacttgtgttttggaagactaaacttgctccaaactgttttatcataaagaatttgctgttgagcaatggtgctattataaataatagaagctttgaatttacctttagcaccagctgccacgatttgagcttgactaaacaccatccgaagacacaactttcttcaataccaactcgaataagtttttaaagtatgatcccaaaaggaacgaccctttaaatttgtggagtggacacctcttacccaaagcacatcatgcttctcagaaagagcccaaatgtatttaacaagaattgctttgttccatttaggcccctccctaaattcgagaccaccatacattttggggaggcaaactttttcccaagaggctatatgaattttacttctattctcatttactccccaaaaaaaccctgcaaagtttttcaacttccttaatcacactttgaggaagaacaaaaatactcatccaatagttacgaagaccaagtaacaacaaatgaataaattgagttctccccgcaaaggaaaggtgcctactagcccacaaatacaatctcaacttaataccaccgcaatcctcttttctccacttagtagggctcattggaacacctaggtacttgagggggaaagtcccttatgaaaagtgtaaaatctaagctatagtttttcctttatgtggcagcaaccctccagagtagatttgagatttatcaacatttgccaataaacccgaagtagcactaaagtcacccaaagcagcctttaacacgctcaccgaattacaagaccccttggagaataagataagatcatcaacaaaacacaagctagtgatcctcaaacttttgcacatagggtgaaatttaaaattagcatctaaagaagctaattttaatcttcggttatgtattccataactaaaataaataataaaagtgagagtggatcaccttgacgaatttttttgtcacctgtaaagctcccttgaattctaccattcaccatgagagagtaagtggtgtttttcacacaagtcataatccaaccaatgattctagtcagaaagcataaagcttgaagaagatcctcaagaaaactccaatcaatcgtgtcataagtcttgctaaggtttatctttatagcacatctcggagaaacaaccttccttccataattcttgataagatcttgaaacattaaaacgttatgagctatggacctttaataaatgcccttgattaacaatctgaggaagaacaatagctaatctagtacaaagaagcttcaaaattcctttataaatggtagggtagcaagcgatcggtttgtagtctatggctcgaactagggaatcaatttttaggactaaagagattgttgtatcatgaacgactgctgggcaatgacctgtattaaaattttttagaacagatctacataactcttctcatattttttggccacattgctttaaagaagcctgaaccataaccgccagggcctggggatttagaactcaggatgctaaaaaatactgctttaatctctttgacaaagaaaggcttcaaaagatcaacttgctgatcaaaagatatcttgtttccctagttaatacaatgcatatttaaggttgtagttgctgaactaggacttcccatgaacctcttaaaaatgattcaagaaatgggtagtaacttctaaaaacttatctaccacttttccttgatcatttgtaaaagaagctgttatattctccattcttctttttttttaatccaagcatggaaaaaagaattattctcatcttcatgtctcagccaagtaatttttcttctttgcactaggaaattgtgagacattctctcatgcatactgaaatccaaggcagcctctatttcaagatcctgataccaactatccccatggtgagcttgagcctgcaatattgagcctcctggcatctttccttagcctgctgattgttcttctcaatattgccaatcaaatcactatttaaaattcttcaagcattccttcaacctcaaagtctttttgaaaatatcttttaaatcagtacccgaaattagtttaagccaactttacataactaatctctcaaaatcctcatgcttcgttcaaaaattataaaatcaaaatggcttaataccaatacattctataatagatctggtgaccgaacaaaaatagtggtgtgaactagggtcctaacgaaacatgcaacaatatttgggaaagtatctaaccaatcttcactaacaaaaacatgatcaatcttagaataaattctagagtgaccatcttggttgttatttcaagtgtactttgaaccagtacttctaagctcatccctcaacttaagagagagccaatgattagaatctaccaattcagaggtagatagtgggtttccaccttgcctatcatctaagtgaaagactgaattgaaatctccaagcataatcaaaggcctaacagaacattttatcttagcaagacccttccacattcctttcaccaatcaagttcagaccataaacaaaagtaacactgacccaccattttaataaaacaatggacaaactgatttgtttcttccacaacaatcaccctcataaacactttcctctaaactattgtactagaatagaaatcccagttcaagaacttagtatccattactccaccactttattccttttcattttagtctctaacatagccacaacaccaattttatttatactacaaaaatctaaaatattatcttgtttattagtacctttcaagcctctaataatccaactaaaaagattgcaacaatccatgacaattaactaattgaggaatcaagatcttttttattaccttcaatttgaacctaggccgcaaaggaattcttcctactatgatcttgtcctatttccaacatatccgcaacaatcgaattctgccacaacttattgatctgaaatgtcctctttggagtaagccaatcctgacccctccctctccctgtgtaatgtccccgcttcaagcctccgttaggttcttacacccacggaatgaatggctcttatacacgagtacgccactttggttgcttcctggattgatgactgaccctacagaccaacacgagtgttttcagcgtgctttgtcctcactcacacgcatcctgggaaaacttc

SEQ ID NO: 302374 - DNA, 1748 bp, Cannabis indica
tttttttttcaattcattttccccatctaccttatcatcacccatgtcaagatacaaggttatcttccaacctaataccacttgaccccatcagcccaacagtatggctcaaatttgaggagcccaactgattagagttaattgggcccaattgctctagtccatccctatgacccgtaaccaatttaaccccactatccttcccataactaccaatcccaccatgtcctttctccaaactgcttcccacgttcacggaatttccaacactacgctttgtaaccccagcttctgcccgttctccgaccaccacagcgccaccacttcccccacctgccaccagctcaaccgcccccacaggttaaatcatctcttccataatcatcattggccggagctactgtccttggttcaacctcccttttctcatcatcctttgtcatcaattgcgattgcttgaatgccacaaaacaatttggtgtagaatcatcatccctcaaccaagatccatactttggaactagtttcccatgctcgtctttttccatcaccattgctctgtcacaatctctttgttcatgcccccacactccacatccgtaacagagcatagaaagcctctcaaatttaagctgaacccaatgttgttttccatcactgggaataaatcgtccaacgaaagtgctcttatgtaatgggaatcctattcggagtcgaacataaccgtttaagaacatcagtctgtcattgctccatttaaggtcttcgactctcctaccatctcgcctaattgtgtaacattcctttgtgtaaacactttcaacgacatttcctattggaatcttatcaagcctataatctttccattgtcatgagttcaaccattcttccagcaacaatagacccccatttaaaaaccatggttgcttggataataccactttagcatcattcctggatttaaaagagaacccttcagtataactatccccactcttatcatataacttaacttcccactgagtaatttctttccacatccttccaaacatattcaataataatcattcattgatatctctttttgatatgactatccccaccagagagcttcccccaaacgtagttacaaccttagtgttttcctcccattcctcttcttgctccactcccaacttgctggttattgtcacaatatcctcgacatcggccaccggtgcccctaccatcatcagactaaacaatatccacaaatcatttataattcacaagtcactcccaaaaaaaaaaaaaaattcacaagtcactcaccagtaacaacaagcgtaggccctcagatcatattaatccaattaaacacttaaaattaattttttctgtgggatattaaaaaatctgttagatagctaataaaaaagtaaccacgtttaatataaaagatagggtagttctacaatagacaccctaattttggtcacacccatacacccttaaaatcttgaatagtgattgattataatattgagacacatagcattttagtggattatcttacatacaatatttattcatttattttttaaaaattatttgtttatttatttacaatatatatatatatatgaatatttattagaacactgatttattaaaatattgaagtttaataaaataatagtaattgttatttataagtggattcatgggatcaaaagagagtcaaatggcagcagtggtctttctttgtt

SEQ ID NO: 302375 - DNA, 5565 bp, Cannabis indica
tataaaattagaggtaaatttgatcaattgattaataaaagtggtaattttcaacttacccctataaactacaatacttattatattaactccctatatataaatatatataaacaggccctgggtaataaaagcccgaaaaagaaaatggaccaaaacataatctaatatgagatatattgataattatctttttctattatacattcacaaaaatagatgcaaaataaatttaattgaaatatacattgttttataattcaactgctcaatatatcctcataagatattgtttacttaataaaacatattatttaccgtattttaggcatgttatttacttaatattaataaggcgtgtaatttactttattttaggatagtaatttttgttgccttatttaagacatgtttaccgtattttaggcacgttgtttaccttattttaaagtacgtttacctaatattgcatgtcgtttacctaaattaatgcatgttgtttacaaatgcatgttgtttacctaataaagcataatgtttaccttattatatggtagtaattttgtttacactatttaagacatgtcgtttaccttatttaagacatatcgtttaacttatttagacatgttgtttaccttattttagggcacgctgtttacttaatattgcatgtcgtttacctaaattaagacatgttatttacctaataaagtatgttgtttacctaatttaaaacacattgtttatctaaaataaatttatgtacataattattaagatggcgaacatggatgttatgacaaaagatattaattaattaatcaacttgaagaatagcaatgaaaaaaatataaatgaattacataattatttttcattaatatttttttatgattgttaagactaacatagatgatgtagtaaacatgatattttcttatttcattcataaagttagaagtctaactatgcatgcatgcaaatgtaattgtaattgtagtagaaaatatttaataagaagagctcaaaaatctctcaagttatttagagaaaataaaaatagaaaaagtgaaaagagtacgatatgtaaaaaaaaaatagaaatgatagactttaaaaaagaaaataaaattaaaaaaaatatatagaatctaatttcctcatagtggtgaggtgatagctgagattcgtgaggaagctatggatgtgatgagaacattgtattcaatcctaaaacgtcgaattgtgaggcacatttgattgctacaaatgccttgcatggctaggaagcataaatacttgttcctgatttgtctctccctctgtaatcactttctttgtatgtcacatttttttctaaataaggacctaaaaatattttttttccctatggcctactaaatttcagggccggtcctgatcacatgtaaataaaatatgatagcataattagtcaaaatagagaattaaatttaagagtgggtgcgtttgatgtttgacgggaggtaatgaaaaagggaaaaaaaaataataattaagttttattctgttcctttatttgttgaattttaaaccgtggaatgacttttacaagagaatccaaatataatttagattgctcgagtaacagcagcatgaattgcttcgaccaaatgaggcactgtctttgagctcaaaccagccatgctaattctcctgcccaatgtaaatgaaagaacacaaagagtatttataatcaaatatatgaaatattattcaaatttagtaaagacaaaagagtgtgtatgtaaaattagagggaggcctaattacaattagagcaagtcatatatgtcagccacactagccttagaacctgctaatttgactcatacataaaaagcaaaaaaggttttgtttattggttttccctaactgaccatgctacttttacaaaataatacaatgttatttattattacccatcagatgacatgtagatgtggtattctttagtcatgaaggcaatttgatcttggtttaatcctgagagagagtacattcccacctgcctcattatgtgactccaatcaccaggtgtacctgtgaaatttaagacaagatgtttctgacatgaaatttgaaccaagtttggactctggaaatgattttctaccaagttgaaatttcagagtgcatatacaaacatatgaatgtaagagtgcatgattacctaatttctagataaacatcaaactttgcctgcgcatgttgcctccccattccccatacccaactcttatttgatattatttactaaggataataaaaattagaaaaccaaggttgactgacttgcctttatcatgtaaactattaacaagtttttgtcgaatattgacaaggcgttccttcattttcttcaactcgctagtccactcattatacatctccctgcatttaagcatccattgattttcaaggacagctttcagaaaagtcagtcagtgaagacaaacgcacgcacacaaaaacaagtctgctaattaatatccaatttggattttcaccaagaagttttctcatgtgtgaagagctaccagaaagtcatgcatttcagaccaggaaatggcctttctttcataaaatcttctttaccaaaaatacacaaacctaatgttagataaggaaatgaaattctaactaatttattattgttgctcttgttggcctgctctatgcatgtcaaagcagatcattattaaaaataactcaatttcctaattcagattagtgatacaaggaagaaacaaaatgagtttgcatcaaaaaaatacctgtccttgaggatagcagtcactatggaagctccgtgaataggtgggttagaatacatgggtcttatcacaagtttcaactggccctcaacattgatagccacttcagctgtcttgcaaacctaccaaaaggaagttcccgtcaaacattccaaacgataaagccattgaagtaatttggaaaagagtttagaaatgagcaagtataaacttatgcagtgctaaaataagaatgacatgtcctcaaaaatatataaatgttgtattaaaatgacaataatttcggtccttacaatgataagtgcaccaacacgttccccatatagtcctatattctttgaataggactgagctataaggctctcaccaccatcagcaacaaataatcgtacagattgtgcatcagcatccaagtttccactaactaaaccctaagatagctcaggagacaaaggttaataaagaaaaataataataatatcaaaagctttgtaccttgttcttggtagagaaaaattccttgacccaatgttcgagtaccaaaggcgatactctccttgaaatgttctaaatttaaatgaattgtagtctacctgataagcagaatcgaaaaatggtaagagcccattagatcttatcaactgacgtatttgttcccactcctgaattgtaggatcaacaccagttggattatgaccacatgcttggagaagcacaatagatccagcaggtgcagaagagaggtcttccaacaaacctgtatccagagccaagacaatgagttcaactctcagtcaaacttagccttgtggatcatttaagtagcctcatcagaagtggtgaacaaattcatccaaaaaaaaaaaaacaaagtagcctcaaatatatagacaatactccagaccttgaaggtccagcccatgcgttgctaggtcgtagtatcgatacgtcttcacaactagaccaactgaagagaaaaaatttgggtggttggaatacgtaggctcaggtatatatactgacttctgcataggaaatgacaatgaaaaccatgaatgctgcattggtaccaaccaaaatgaacgcaaaaaaatgaaaatttaaagtatgtacagtacttgatggtaatgcttagccaagaactcagctccaactctaagggagccacaaccagctacacactggacagtggtcactctgttttctttgatagctgggctacttccagacaagtgaaatatataacagaagaagaaaaccattaaactttctgattcagagaaactattcagttggaaatgtgtattcttaagtatacttatctgaccaacaaaaagaaaaatgaaaaagaaggtagcttaggacttttatacctctcgacacccaaaattagtttagagctcaattcattgaattctggtattccagttataggaagatattccttatccctggacctacaccagtgttcatacaaaatcatattgcaacttgaaacaaaacaaaacaaaataaaataaaatgtctaaaagaaaacgtacaggtcattgactagaagctcctctgctcgtctaactacattcaaaacaaagggttttccctcctattgtgccacaagaatcaaaccacattcaggttttttttttctttctattactttgaataagcagagttcatgatatagattgtgtattgcaacaacaacaacaacaaaatagaaaatggtattagattagatgagttcatttctattaattgaattgaatttgtgcatgatcaaagcagtagagctagctttacttctattctactagttgtgaaaaaaaatataagattaagaacacacctcagttctataaactccaatacccagattgagctttaatggacttgggtcttgtctgcaagcagccataacctgtatatatagttgaaacttgaaatgaggattataagttgaaagtagaagggatttgataaaatcgaagtagaagattcttacggcatagactaggggttcaggagctaagggaacatctgaaaacgcagattcaccattttgagagtcggagcaaaattccggagactccatggccataacattaactcacatgtgtgtcccaacgaaaatttgggtaaactttacgtattttagaagaccacctaatttgtaactaaattaaatctaattttatattgaaatttttacatcaaaaatccaatttactcaatttattacaaaaaaacccctacacgcttacatcatcatttttacctttcctctttcttttattacaattataccacttacacatcaattccatgcatgcagccacgtcattgattgatgacttatatcaatcacaccttacatcattcacttatctttttctcttcttccttttttttttattattttcaatttcttttcagtttttttttttttttaaataaaacctccatagctgaactcttctcctcccctttgccaaagaaaagttctaaaatggggttgaaatctgtagctaataggaataagacgataactccgattttgcttctcaactgtcgaaacgtgagcaagctcctcctaaaaaaaatcaaaggttgctgcccaggaaaaaattcatcaagataatgctcaaaaaatgattaagatggagctggtcttcgatctcaggtttgttttcggtttctttttcgtttcccccctttttgaaatttttttcgtatttgacattagtgt

SEQ ID NO: 302376 - DNA, 4414 bp, Cannabis indica
attaaataaaatataatgaaatgatactgtaaaaattatattttaaagaataaattatattttaaagaatattactaactagtcgtataatataaaggctgcaacttgacagtataaaaaatttataagtcagaaatattaattattcaaaattatatcatacaatgtacaaaaactaattatcggaaagaaaataggggatatcttctaagttgctcatcaattaattgttttttgttttgatcaaatcagattagctattttgggaaatttttgtcttagttaataatcaaatgatggatttctgctgtgttttgaagagatattcactagaggaaaaatcataatatttatgtcaacctacgaggaattgataaatttctggagctgacagatttgtgtcgagactctgagtaagtggcggttaatatttttaccatttttatgtcaaatggatattagttaattattttttcctaaatagttgattgttggtataaattaatatagcactagccataatgtacattttcacaatttaccataaaacagaaacttttttagctgtagaacccagaatctgatttacattcttgtcatatgtgtataaataatcagcctaaacaaacacaactgtaacacctaatctgatgaaccagggtaaaagtttgaaacacaatcctgatcgacatctgttacttaatagtaaactatgacaatacataaatggtttgaaaatgcaactttatcgtgtaactcttggacagagagcgatacacagagaccattagaccatcaggtgcttccttgaccctttaaaataagcagcctgcattcaagttatggaaacaaaccaccatttggtattataatccccacctagtaggggaacagaactccataaacactcccaagacatagataaatcatcaagattatgatgacaagttacatacatctgtccgtaaagaatatacttcaccatctaaaggcattccatgaaattaacctgtaccttctggtggtatccaattaattgtgtatagcataaggtcaaattaatgttgaagcttccctaacatcttcaataagagcctggtctttcaggaaactctgtcaaaagatggatgagattttacaacccatccaagagctgattgatcaccaagcatgcaagaaagcattttggtattacttgtacaaaaagaaactatttgccctgcataacaagaaacagtatccactatccaggtgagagcactctattacttttgtttgttgcaactaaattgatctacaggaaagaaaaaagctgctgaagtttggttttttctaaccgtaactgcaatgagtagcttctgcagcctcctctagacatcgaggtgggaataaatagcacactatctgatctgataatctaggactacaaagtatagtttgtaggccgaaagaatgagctccgtagccacaagactaataaggattattgatatcagcgtatccccacaattcaaccactgactatggtctaaagaacaatatgcagaataataagatttagaaataacatgttatgatatataatgccaaaaaaccaacataagtaatttgggaagagctctggcagtacacatagcaatggtcaaaaaaattacacaacaaatttcaagtcctggttgtatgaaacttctctgttgttctaaaagtccagtaaattatatatgatgcagaatagagtggataatgaatataaaaattctgcggtcagctgctagttaacaggaaaatgcacacagcttgtttcatggtgcatatcgacaacagtggcatctgggtacagaataatgcgtgaaagacatacattgaaacatcaaaatacataaatatcacaagtcacaacctatatgcaaattgatgatcgactttccatgtcagagagttcaccatgtcagagagttacggcgccactagtacattaataactccaagtttactaggtatactataaaatggttccagtaagagaatgattatgagctcaaagcacgtaagccataatttccacagtaagcatattactctcctattaaagtttgtgaagctcgtttgtgttaagtctgtccccgaaacaaaagacagaccgttatgtttgcatacatcaccgttaacacattcattcagatttcagactctgagagagtcgcgaattacctccatgaatttcaaggcatatattccgctaatataattaagaagacgcattggacccttccaattaaacagtagcatcactattcaatcaaaagctcgttctgtatgaaacgttttgctatgtttagtgcctccaaattttggcaaccaaaaattccaaaagtttcttagttttatattggacattaaagcagttcaacttagataccctcctgtcagcacgcaagttggggaaaattgcacatgaatatatctttaatcataggaactcagtcctaaggtgacaatcctattaaggtgctagcaatatcaagtctacaacctctctgtctagtgtctgtaataatcaatctgtatgaattgacagcaaaattatatccagaatctatgtaagcacagttatacacccccaggcactagaagactagaactgcagcctgaacaaaaatataatccaaggaactttcttaaaaaaaagccaaggatcttgatcagaactgcaaacacgaacttctgtagagtgtcaaaaatggaaaagaaaacgaaagaaaagttggaaccttttcatgtagatgatctggaagacaaactggtgaagaacattctttagactttgcaaacaatcaagtactgtacatcctgaagacagacaatgtcatcttcaacatcaatgccttaagttattggagtagctacttctatttcatttacataatcttttgaactctcttcaaacgtaactgttcatcctattagtagaaagtagtgccacagttgaaaacacttgaaaatgaataatgaattatatactaaggcccaaagagaaaagattttgttcaatgtgatccttgaaatgaccaaatgtagcttcaaatttccatatcaaaaaatcccatcttcatcttctgaatcttcatcatcatcggtatcccccaacatatagtcctcacccgtttcctctgcaatccaatcatcattttcctcttccccttcagaaaatgctgaaattctcacaccattaaattcagaactcgataccacaagttcatccacaaccttatccagacgactgtcaatctccaaatcttgatcaaaatccccagctgagaacaacccattatcatcagtatcaaaaagctcactgcttctccgactcctgggaaccaaattcttctctgaaatctccccattctcaaccccagtccaaggcacccacacatcagcatgcctccccaaggccctatcccaatccccgaccaccacagtccccaaattcgcatccctagcctttctcaacatctctgaaaaatcagaatcgtccgagaccaaaaacaaccagtcaatccctcggctcatagaatgctgcatttgcctcttcaaagcccaatccgccgcttggggcttatcctccacggtcttaacaaatatcccagcacgcctaagctccgacgccaagccgtacccaaccttgggagtaagcaaagacctcgccgcctcgttgtacttgtggttcccggctatgaaccgctccttgaaacgctgtcgtttcttgcccttaagcgatcgcattcgattcagcttcttttggcgttcgcgctcgtggagctgcttgaagtgtttcttaaggtccaaattggtcttacacttgcggccacatacattgcagacgtaggtgtcagtgtctgggggtttgaccaagcccttccgctcaagaatatcaaggtgtttacgctcgcggcgctgctccataacccattggggtaagtggataaaggcgtggcggtttgcgtaggcggaggcatcgaccacttcgccgaagtgctgggctacctgcttgagcgccatggcagcctcgtaaggaggaccacgagggggtttgttatcgaggtcccagaggataactaccttcttcttcttaggagcgtagacgccttgtttggtcttgaacatgtcgatttcggaggcagaggcgcaggctgtgatgatgggccatttgaaggagatgggtcgaaatgagaagttggatttgagggattgaaggtgatcagtgtgagggcggaagaagagggaaggaagaagtggaagggtgggaaaggcgctggtagaagcgttgcatatgcatacggtgttcatttatctctactctctggagtctggacgccgatggtggatgagatcatgagagtagagagcctcagcctca

SEQ ID NO: 302377 - DNA, 1887 bp, Cannabis indica
taatttcataaataatcataaacgtaaactgataatctccaaattaactaagcgggctttacaaaaacattaagcagcctcaacacacaacctgcttctctatcatttgcacgacagttaagatagctatcatctgtaaataacatatgtgaaatgataggcgctccgtttgccactttgcaaccatgtaattccccttgtctttcaaactttttaatcaatgatgtgagaccctcagcacacaatagaaacaggtatggagacaaagggtctccttgacgaagaccacgtgcaggagtaataggacccatctcacgaccactattaacaaccatatattgagcagatgtaaccgtggtcagcaccaagttgacaaaagggtcttcaaaccccaacttcagcatcatcactaagatccaacttcagtgccatgtagccttctttcccctttcttttgtgtttgagataatgtataacttcaaaagcaaccatgacgttgtcagaaatcagtcttcctggcacaaacgcactctgagtatcggatattacttggggaaggataagtttcagtcagttggcaagaactttggtaataatcttgaaaatcacattacaaagggatatgggtcgcagatctcccatggttgtacgattcttctttttggggattagaactatatttattttgcacagagcattaggaagcatacccgtatgaaggaaagtttgaacctgagtgaccacatcatttcctaccacactccagtatttttgaaagaatcccggtgtcataccatctggccctggggacttattggggtgcatttggaaaagagctttgcgaacttcctctgcagtaacatcttggatcaagtcaacattttgctaaggagatactaaaggcaccaaaccttccactaaattattagccatagaaccacttgtcgagaatagattagtaaaataatccattattaccgattgtaatctagtatcccagtccacccaacacccgtaagcatcttttaacttatgaatcatattatttttgcgtctagaagtagctttggcatgaaaaaatttactatttttatcccctgcttctaaccacagctgtttagaacgttggcaccaaaacacttctttttgagtgaagaattcattgagttcctcctgggcttttttgtaccgaaccaaggagtcgctgtcactagctttcttcaactgtcgtatcttctttttgcactcagcaatccgaaacttaaagttctcagtgtaatcttttccccaaactgataacttatccccacatattgatattttctccaccacagaatcattctcgcatagctcccaaatgtcctttaccacctggagacacatcggctctctaagacatgcattctcaaaccaaaagtgtcgtatgggctgattaaagttcatcaccatagtttgaagtagaagagtacaatggtcagacatagacacttcaagattgagtaactgagatgaattaaacattcaagaccattcatcgttaaccaacaccctatcaagccgaacttcaacccagctttcagtgcccctacctctttcccaagtgtatggataacccgacaaatccatatcatgaagattgcaatcatttaacacttcttgaaaaccatccagcaacgtctgagggtacgggctaccccctcttttatccgagtgagactgcgtgttatttaaatcgccaataacacaccaaggcaaagtgtgttcagtagagagggaccgtaagtgattccaggtcttgtaacgaaacgatctattaggttcgccatataagcctgttaaacgccaagcattaacatcctcaccccccactttgatatcaacatggca

SEQ ID NO: 302378 - DNA, 3897 bp, Cannabis indica
tgtgcaaataaatttgttgaaggaatttcgtaaataaaataaattttaggtataatattgaaaaattccttataataggatttaagagacttgtagtgatgaaggtaatgtaaatgtaacgttaagtatttaatctgccagaagaaaaaagatgtggtatataagtgtatgaaatttaaaacaagtatttatgccgcaaatactctatgtttaataggatttaatagaaaagtagtgacggaagtaacggaaatataacttaaggtatttaatccgtcgaaaataaacatgtgatatttaagtctataaaaccaaaaatttatgatatttatgccccaaatatccctattatttaattatttaagattggatgatcattgatcatcacacatatttcataacctaaatctttaaattcaaaaccaaatttgaatcattgaattaatctaaaatcattcaaacttctctatttattttctacattttttttttattttttctaaccaaataaaatattcttccttataaaaaattacgtggcaagcctctaaatttaggagtaccaaatatacttaaaaaaaaaattctaaattattatttattatattaatagtgttttacgtttaaatttgtttttataataaaaaaaattaaactagtcacaagaaaagtaaaacccaaaatatctataactaatctaaaatttaaaatatttataaatagatttgtatgttcattttcttccatctatttttcaagtctctaagggctcgtttggagcgtcgtattaggtcgtattgtattatattgtattatattgagttggattatgtatcatatttttatataatactatattaaattttaatttatactaaaatattgcatatttaggtgcccataaaagttaataccacatatagttttacataaaaatattgcataaaatataatttaatataatactataaaatacaatacggtgtaccaaacgaaccctaactttttcaattctctcttgcaggttgtttagagtcttatatattatatgttgtcgagagaagcaatgaagaatttgtataattacataatttttttagagtaatattgcgttatttttgaaactatattataattttgtattcatgtataatatttgacatgtaagtatttttttaattctatttttagatggcaacgactaaagatatcattatatcattcacagaagaatatagtacagaaatataagatgaggttattctttattgtccttttattattttttcttatttgtgtttgtttattaaattctagctttcatggaaagatttatgcaggtttacaaaatctagatgtagatttataaagatactctaattttttaaacacgcattatgcataaaagaaatacggtgatgagaggctttgaatataatagtgactacaagtgaaatatagtgatgacaaagactttgaatataatagtgactacaagtaaaatacggtaatgacaacattgactttgaatagtggcgactataagtgagatacggtattaatgacaacaatgacgttgaatataataatgactataagtgatgggatatgatgatgacaacggttttgaatgtaggtagcgattgcaagtggatgattacaataattataaaatatatgatcatttttctataaatttatcaatcgtcaattttttagatctctatattgtgtaatggttcttcaatttttattctctttttcactataacaattgaagatatctctttgtttgctttctttattagataagaaattgtatgcttaatttttttacaatattaatttatttttttgagttaaaaataaaaatttagtaaaataattatttaaataaaatataaccacacgcaaaacgcgatttattttctagttaggtaatagaatagaaatgaattactttttatgttattcatttatttaattacatttaaaagtctatttgagtagaatgacttccattttcaaaaggaagaaaagaactttaaaatgttagatgaaaatttcattttttttatgcaatttaaatgtcatttcattctattcacattttcgttcttgtatttttattgcttacaacaaaatgtaccctttagtttattgctttcagatgtaaatgtggccaatcaacactaagtacggaagtctgtttacaacaagcactgaactaggtatctaaaatatttttgtacagacctacaacagcatctcattgatgaatactacggccacccaaatcagcggcagctttagaggctcgattcaaagctttttagacccaaagagctcctttcgagaaatagctactgtttacaacggtgtttgctgctgcacaggcagttcttcctgttgccaatacagctgacttggtcatctttgagacatggtacttctcatcaacagatttggcagcttgaactcctgcagagattgtatttgcaaggccaattctttgactaagctcaacaaccttagaggctgcagttgctgaaacttgatgagattcatcgtagtctttggccctagccaatgcatccttgctcaaaacaaagcccttggccaccatagttttaaccacttcctgggccatagtcactgcttctccagcatcaaaaacaaattggtttctttgggtaccctttatagccgtaaagcgatacaaattagatatcacttgaaaatgaccttaaacagaggcctccctctttttctaccaacatactcttgtaaaattgaaaagaattaaactttggttaccttggaactagattcatgttcacgagtctctgaagaactgttccaaaaatcaaattcatctctgtactgcccccatcgtgttatgcatacacgttgatctacaattgtggcaccctaaaaagataagataagaaaaccactcataaatccacaactagaaaccttggcatattaacaggaaggagtataaagaaactgagccacattaccaatctaaccatataaaagactcaaaatgttttgcatacactgttgttaacctacaattttgtaaaggagagaaacccttggaaattgttatggtgctcctcataaggaatccaacccagaacatgagagaaaatagaatctaacactttccatagaggagtatctgaatatattataacacagacaaatgtggtaaactcatgaactaaagtcattttgtttgtttctttcttctgccaaatcgttcattgcagagaataattaataatagtttaaagaaacaaaaaagttctacagccattcaacaatgaaataatcgacatggcagggagtaatagaagaaactatatactgctttcatttaaagccaaaatttacagttgggtaacaacagctgcaatggtatattcaaccatacatcattttgttaataatattaaataaataaattgacaagaaaacataattagttgataagcaagaagtgaaagttctcacactaagcaagcacgcagtgtcctgtgaataagaatctttaaaggtcacgtaggcagtacatgcataatcacctgatctattcttagacaataaaaaaattgtagggaatcattaatctccatttatgaaacactaaatacaaattgaacaaaaattcgactaaatacctgatgatttcgacatgttcgatgttaccggaaaaagagaaaaaatcagagacatctttctctgtggctttcggagacaagcccgtaacttcgactgaatatccacctttattcattttgatacgaatctagaaaagaagatttcaagattaacttccaaagggaaaggtattgtaacaccctaactaccataggcgtattacgt

SEQ ID NO: 302379 - DNA, 1063 bp, Cannabis indica
taaaataatttccaacaatgtgctcattaaacacacattcttggcaatgtaaattctcctttgatcattctcacacaggtatcctttgtgaaatggagagtatctaaaaaacatacacagttgtgatctgaagtgcattttatgagaattatagggcctctagtgttgaaaacatacacaaccaaatggttttaatattgagtaatcatgttgtgtaccaaataaacactcaaaatgattcatgttgttcaagaaaagtgtaggcagcttatttatggtgaaggtatcacactgtaaagcatgccaccagtacttgagatccaaccctgcttgagccaaaagttttagaccattctcagttatgtgtctatgtttcttttcagaccttttatttttctcatgtgtatgaggacatggatgagaaaataaaattccttgatcaattaagaacctataaaatggtttgtactctctttcaccattatcttgtacacttttaataggaaaactaaacggtttcgcaaccatgctcttaaaatgaataaacatatcaagactttagttataaagggtaaatccatgtaaacctactataatcatccatgaacaaaatgtagtactttagccattgcacatgtaaaggaccccatagaacaatatgaatgagttcaaggggttggtgggatctataagtaaatacagaaaagggtaacatatgactcttaccatgttgacaagcaatgtaaaatgatagtgtttttaaagaacctaagtgtggtaaggtgggaagtaatagattaagcaggatggtctaatttgcaatgccaattaactgctagacatttatttgtatagacaaaaacatacatgattatgaataaagtgtggaattaataaatcatatatgcactataatttaaggatcgaaatacctccagccattgaatctttgagctttagtcccacataagcatgatctgcaataaaagtatatgtaaaatatatatatacgtatatatacaacaatatttacgtgagatactccatcagtatctgcgccaca

SEQ ID NO: 302380 - DNA, 1364 bp, Cannabis indica
taaaataatttccaacaccttacacgttgaaaaccatgtcatatgcaattttgcagagctgatagctaaatcaagaaatactgaggccactatttttcgtttgaccaagccgtccaactaaaatgaccaaacacatcgaccatggaaagattcaaaacgtgttgttgacatagcacttgctcaagacagacaaaattttgaagcccgtaggaaagagaagagggcttgccttaggtttggtaccaaataaatctagccaaactccttaattttggtctgaaatgtgatgaaaaccttgggttcttccttggtgttcttggtgacgacccaaagagagagaaaggaaatgggttttgtttctttgatttttagataagttccaataatattcagcttatctaataacaataatattcagattatctaataataattaatcttaatataaacactaaaatctaatatctcataaaagacaaattatggaaaaattactaaattgcccatttttcttcaccatgaagtaaacttgaaacttaggggtattatggtctaaatttataatctcgaatactcacgatattccaaaagtctaacaataccattcatctaaatctaacttactatactatatgtatgtgactttataggccaaatgtcgcattccactattaccgggaataaaaatatgaaaaatataacattttacataaaccataattaatatacctagaattcaaataaatctccataattatgaaaataataattaaaagtctaattctaaaattaaactctaattgtctactaattgtcaaaataaaatctactggtcattacagacattcttagaaaatgtgccaaaatgctcgaggttggcatatatcaaccttggtgcttaaaatgacgcttagtgccaccttgggtgcccatgcccaaaggtaggtgcctaaaaaacatctcattgatgttaattcttctttacggtgaaaactacacccatagccagtttcctctaatttgcacatgcattacttggtgaacttgagttgatacctaggtaccaatgtcaatctgggtgcccagcatgaggaagtgaaccctcgagatgatgttggcaaaaactcaagtcatggcattgttccttattggattttaggaatcagtgtctaaagaagttcctgaaaacctaaaccttagtcgctgtgtcgcccagggtgactcaatgtcaacctaggtacctatgtctacttggtgcctccaggtagggctttctccaagattggctatggaatctaaaacttggttgtagcatgtgtctcatatatttgagtacaatggctgagctaattgcccacaatact

SEQ ID NO: 302381 - DNA, 1851 bp, Cannabis indica
tgagatctcttttttcctcgccttgttgagctactcccagctatgaacttgttgaaatatatttcatccgaatcgtcatttaattctgaaattatgatatcatcaagactcatattgtcatacaaatttggagaagttgccaaatccattggtgaactttgagtagatgatgtttggtagaatgtattccatttgggatcatcttttagcaatctccaacagtataccaacataaaatttgaattgttatcatatttatacacttgatgggcattctcaagaatttgctcatcagaccaactattgtaacgtgtttgttgtactcgtttataacacctattaaaacgtaccaccttttgatttatcttgttccaacggtctttacattgttttccagttattcgttcctcacctttgtggttggtgttgaagtattctgcgatttgatcccaaaattttgcagaaatttgatcattccccacgatcgtattaagccatccacttatgaaaagtatagttgcttccttgctccatttgagtttactttcttggcttggtttctcttcattgtgtagatccacattttccaacctttcaacacaatttgcaggttgggtcacagatacagatgttgatgataattcaagattcaaatcaacactagactttttcatacttggcgtataaatttttgaagccatttcaggttggtgtggggatggcatataaatgctatatggtggtggatttcctagtgtaaagaatggagcacgttggggtgtttcaaaatagccaaaattttggtaagggaatgagaacatgggataattttgagaattataaaaattttggtagaattgagaatattggaaattttgattttcgggattggtagcataagaattaggaaaattttggttccatggagaatattgaaaatttggatgtggagggttagttggtggaaaatttggatgtggagagttagtaggtggagaatttggattttggggattggtatatgagagattttgagaacttttggaattcatttggtaagaaaaagtaaattaagtgttgtagaagaaggtatgaaatggtatgaaaaatagataatactagtaggtattaatagtgaaaaaaattgacttttttttagaaaaataataaaacagcaacggtacatttccaacggtacattcccaacggtacaatgatgatttttttttaacctccaatggtgagtggctcccttcaaggatgccaagtgacaagtccacatatcatcaagcaaagttttaagagggaaattgaacccaactcaacagtttagtagttagcctcagtcaatattgacttgagcttacttgaacatattaaactctttcatgacaatctctgaagttaacatcggcttcaagaatataatacggaactatatagtgttagaattatttatttgtggactaatataataccataattacaatcattaattatgtgcctaatatttctcatacaaccataatgggatggttaacaactattaattatttagaggcacatgagagcacccatatgactataattggcccattgagttatagtccaccatcaattagtccttattaacccaataagctatataaccctttagggttagatgggtatgtgaaaaatatatatatatatattaaggatgaaaagtgtgtgttaaggatgatggttagacataagtgggtttgctccacaattgtctcttgattactcttcactctctagcatattgttttgtgtgttttggacttggatattgatcaatggctcaatatgatgggatgagcaatatgg

SEQ ID NO: 302382 - DNA, 986 bp, Cannabis indica
aaaaaaaaaaaaaaagaatgtggcataagctaagactataaatattaagttactacaaatggcttagtgaaaaataaaactaatttataaaaggtttgatttctttataaaatcataaagtaagagaaatgacatttttgtaaacttgaatccttgtggaaacctaaaatttgtaatattgtgtactatcacgtttatctagttacaaattaaacaaggatttttatgacaattcttaagaatggtattcttgtggattaaaaaaataattaaagttggtatttttgaaaaaagaccattatagctctttcaacgagctaaggcccaaaaccttaaaaagaagattggttaacaaaggaaaatgtgatatttttgtaacaataaacctaaaaaattcctatataatcttctattgatataatttgctaaattattcactaagaaactaaattattcactattaatagccataggactaattacgataaatcatccggaatgctagtagaggattatgcgatatctagtaactagtaacaaaattaaaaaagggctaattcactaaaagaaatgagaattttttacgacgcattcgatcaaaagcgtcatcagttaatgtgcacaatttgtgacacaattatgaaatttattcccgatttagtttctgtgacactactaatgcattgccaaaagtagataaattcggtaggaagatttggtaccaattttttatcacttttagcggcgaattgtaccatgtgtcgcaaaaagatagaaaagagaactttttctaaccaatttgtttgtagcagaatatctaaaatttatattattttgttaccattaaaatgctatcaatgagaagttaggtgaagagtcaaaccaaagggtttccctttggcggtgactctattacaattatattttaatattttttggatttgaaaattaaaagtacttattgcttttaaactatttcgtttgca

SEQ ID NO: 302383 - DNA, 2287 bp, Cannabis indica
tcgaacaaacctcccattcacacaccgatgaccaacccgtctccccgattaccacctcaacatttccaaacccaatagccttggccgctgtgtgtacggcatccatctgggcatcgaacatgttcgtgtacgtgatgccggttttagggtcacggatgccacggttgggcttgaatagagagtagttgggcattttgggattgtacccgaagtaggggtaaggattaaccatcaatggtgagttagtctcttgcaagaacttcagcattggcacgaacactgctctgtcgtagcctcgcctgaatcgagctgagcttggtggctctgagactgagagtattcctagagaatgaggagatgttacctgttgtaatcataattagtaactacatacactcatttattgttgcttaatgaaacagaaagaagaagctaaccttaatatctttaatcccttcttgaataagagcgtggtggaggcttttcatggctgggacgaggccagaaacttggaacttatcaccccaatgaagaacctcatttccaaccgcaatgtaattgattttagttgccggatgaaacggttttatgttggccgaaacccatctccgggctacctttgggtcctttaaccccacgatctcaccgttacctaccgttacggtgacggagatcccactaccggcaaaggcacggaggatgtcggggttaacgtcgaagatcttaacgcggtcaattacggtctgggtcttgagaaagttcgctacttgagccggtgacggaaggttgttggccagagtaccgtaatttactccgatggactctccggccgccgtgaagtagaggaggagaaaagaaattaatagaggagctgccatgggttgtaaggttgggggtgagattttttttttgggagaaatatggaaagttaataatgacttgctattttatagtgggaagaaagagaaaaacaggacaagaaatttaaggcggtaaagtcgtgtggcatatgtttatctttgctctgaggcaaaaaaaaatgttgtttattttgtttttgttttttcttttttgggcaggatggacagatgtttggacttatccaagggctttattttcaaaatatggatgtggtcaaattatatgtttggctactatttattttgtttttgctttataattgattattttttatattgaaaaaacagtaaccgagatgttaggtgataattaagcaaacgaaaaaggtttaagttggacaaaaatgaagtagggatttttacaactttaataacatcttcacagtagttcgaatatatggagaacgttttctgtttagaactgggctgtattgaaaagtggatgttattgaaacagattgctttggtctcttttctagtgctaaagaagattggttaaccatgtggttactattacatgggggtacgagaacattgctggatctacatttccaacggtaaagaacatccacgtgtcagcaatggaatgtgacgaagttttcctcgacaattagctaaataaaataatctctttctgttttttattaaaggaaaaaaaaaaaatcgtgctaccaaccaatttagacttttttttggtaaagggattagagaataaaaaagtgtatggagtgtttgagtggtgcagtgtgtttgagacgctttacgcggtgagcacgtacttagctagctgccaataactctctcgactctcgtctttcctttcacgttcacatttcacattgtatagtgaggagtgaaggggaggacccacaccgcccttccatcaacgtcacacctcccgaacacaccataaataaagtcatcaaacaaacacataattgttacataaattaatgataaagttaagatgtatttgtatataataaaaaatatgataagaatacatatgataatagtagttattacaatttgatagtgtaatactatcaattaagttttcttctttaaatttttaaatcaaaaatcagtttagctatttgattatcaaaagtatataattgtaataagataatatatatttatagagttaggaaggaacttaactacataatcctagttggactaggcatgttcatcaaagacatgttcatcaaaggtttcagttaactagaaaagttcacatttttgcttcacccagactttacacacagatgctaagcccattaactattgatcaccaacaatatgggctaatacatcaaagaaatatccaatcaatccaaattttaataaaaccaataaaattt

SEQ ID NO: 302384 - DNA, 1202 bp, Cannabis indica
ttaagtacttagctcaattttttttttccacaatttacagtgattttttctcataattacagttgtttttctctatagcacaattatgccaaactatccctacgacgctattatatccttttaacaattttctctttctctctctattatatccttttaatgattttggtctggaaaaataatgcttgatcaaaagaccattttaatatatgcattcttgttcataaatctcatacatgtaaaaagaccaatataatttggaagctggattggccagaacacaatagtatggattaattatttgtctttccaatgtagaatattatataacaacatttaacataaagaaaacaaaaagctgtcaagttattatatagctgtggaaccctaaacactacttatagttggattggaataatatgatactgaagcaggaaagtaatatacatccatgtatatatatagctaagctatatagacacacctatatatacttttacaaatcaaatgactaaaagtcttcatgttgtcgagtgtataggttcagttcagtgttacaatattcgactagggacactgaatttcttttattggtatcttttctaattacttgttttcaaattacttatttacttgcatttcaaaaaaaaatattacttttttttgttttctcttattacagctatatatacttgaacatttttttgataataataataaaaaaaatcaaatccagaatcgggaaaagatctccaaaattaatacaaatattagaaaaaaaacttcatcaaatatatatattatatatcgaagacagtgatattaataaaaattccctagcaatatttaaagttgtggttatattgttagttgaaatttgagttatgagatttattgttgtgatttttttttttttggtttcaaaatagatgaagttaattatgaacacatatagctatatatagagatgtaagaataggcctgctaattcagtaaatggcatagtaagtcccatcttcatcccataatttgtatggaaaggagacctaatttaattcactcatcactactaccactctccaatctaaataatatacacaaaaaattgtataatttttatagtgatgcttttgtaatattttttaattaaaaaagtagaaatctaaaaatattttttaaaaaaattatttttaatttttaat

SEQ ID NO: 302385 - DNA, 1508 bp, Cannabis indica
aaaaaaattaaaaaacatcaaaaaaagtttctttgagggagtggtctagaagatctttctcttcctggaccacatgaggacactttacacacacttatgaagatacaaggtttgtgtagttattttcattagagtttgttgtacttatgtgttacaaaaatttgtttgctcatgttgtgcattgttttattatttctcagtggtttaattcacttcattgatcagatgttaactgtcccattagcactgcaagatagtgagtatctctaagcttctatttcttatctctgatggaaaggtctgggcacttgttacattttgttggtatatttgtagtcattagatctctatcctctcaatatctcatgtcaatttgtttatttcgattattgtgccaaaacgtgtggtgacaacagttctatttgggcgtgtatatttcattttgcaaagtttttttaaaaaataataaataaaaatcatcattttttctttgcatggtcgaatattgtaagggtatcctctacttaaagccaaagaaaagtgaatcgtttttttcactttactctcttctccaagaaaccctaaagtctgaagctctcaattcactttgttcatccaaaagattctccttctctgtctataatggagaatgttgtttccatgtcgatttcccctgaagccatcaacattccaacatctgtgtatcctgtcgaatcagaagtcgtggctagtcttgctgaagaagtgttagcaatgcccatccatgtctagctattgtcccttatcagctgatgattcatgattctcctagctctccaaggcccgtatctcctccgtctccatcgttgccaccattcagtcagaagcctcgaacatttcaaggtaaggctcctcatttttcaaaaaaggcttctacttcgtcttctctcactcagccagtttcaaagagggtcactcgttcctcctcgagttcaaagtctcttgtgtcacctaattcttgaatattaaagttacaattgcaaattgatttcttaaaaaagtcagtaatttgaatttagaaattagtccaagttgttctttgagatagaattgtaaaatttaaatcgagcttgacttcactgtatggtgtgtggggaagatagtgaagacattatttttttcttgttcttacaacaagaaatgtttggaggaaatcaaagcttggcaaaagtggaaagttaaattcgagaacatatttgagctcttaggtagagtttctaaagccaaaatgagcaagtcaaggaaaacacattgttcggaaaatacaacttgatgcattgaatagacataagaaaggtgctatctaacaaaatgtctatgggggataacatttggttctcaaaaattgtacaaaaaatgtaatgatgtgagagatatagttataaagattgattttctaatgatttataattggtgtccataaatgattgttgagcaatacaatggattcttattcataaaaaaaaaaa

SEQ ID NO: 302386 - DNA, 5953 bp, Cannabis indica
tgttacattggaatagtcattcctttctttttaaaatggaatagccattccaccaaaatggtagaaagagcattccattggaatactattccaatactttaaaatgcaaccaaacaaaggaatgaaataaaaattgtttcctttccattccattccatttcattacctccaaccaaacgccaccttaatttttaacggtaataatatttaagttataattttgaacttttataagtacatgacagttaagttttaagttaatatccacgtgtcattttcttattggtatatctaaatgattttaaataaaaatacaaatttaatgacctgaaccaattaagaactctcatgtcgccattaacttgatacttatggtctggtacctacgaatgtttcaaaaatataacttaagtattatttccgtaaaaaattaaatttaaatatttatatgtattcaggagttaaatttatacaattacaccacaaatgtttgaacaaaggatttatttgtagaaattttaattaaaacttaagtgtagagtatatttacatgatattgtgcaatcacaaatatattaaagaaaaatatacatattaaaagaaacatatatcaaattttattgaaaatatttgcttacttttttctccaatcaaactttttacttgccaattgtaccattctttgaaaaggcaatgatatatattgggcctggcccgtttaagctatcaaacacgttgtgggccggaccggcctaatgaaaagggagtatagtctaacgtgagtcccatcaatgtagtaaaattacgaaaaagccctatggaaatctggtggtcaaaggtcaattccgccgaaacttttcgtttccccccaaatcccaaagaaactcacatactggtcggaatgtttttgtttttattagcttcacaagcaagtacaaaagatgccctgtagtataatatatatatatatatattcatttatacacaacacatgaactttgctcgtgtaaacttgttatttattgtacccctcaataataataataattttgttatattgaacatttttctaattaatgtcacaaagtacaaacctacctaaaacttcaaaaatgcttatcttgaatccgtgatgctatacatttatataatttaaaaacttattggttcacgtaacaattaacttttcaaatcccaactttactatttttattatttaaaatatcagttatctatgttaatattttgtaattgtgcaaattactttggcaaaaattactgatatgatgattataaaatacttgagcagcacacgtagtgcatgcgtgtttaatacacaaattaattaaagttacatatatagccagctattaacatattaattcagcttattgttattaaattaaggttatgcacctaaaaattatggtagggcagaaaaaaaaaacggtttttgagaacgtagtttgtaaagctaaaatagctgtaagtaattatataatattaaatcataataataatactgacaaataattaaaaacacaatcaacaaatgacagatatattaaacaaagagaataatgtcattgataaaagtgctaataaaaaatagagaattaaacttagcattacactcagatcttattaaataatttttttttatttctgttcttttaactttatctttttccatttgaaaattgaaaaataacagtccaaatcaggatagaggaaaagttaagaaacataactgccaaaacaaattaaatttatttgaactacgtacgtagtacacgtacgtccaaatatacccttccctattttaaatagcatgtattccaaaaattgtttttattatatatagtttgaccgactgaaaataatatctctgacgagaagaccaactagtactaaaattaaataatgttacaatatttctttttcaaacacataaattaatgaataataatcttcattttaaacttaatatatactaaaattttatgtgctactggtgttgacttttctagtatgcaaaaactagtttcgaagaaaaatataactactagtataattaagtatgattatgtataatattaattataattaattattataaatgttatgatgaaaaaagaaaaagattcgagaggttgggatttaataattttgaatgtaaaaaggactgatcttagacgaattggacggtgagatttgatttagcgccggaaaaagacaaaagcttttctattgttctgaaacgtaaacagtgtccggttcagacgaacaacagtgatccaacatgtgcattggacaatcagaaaaaatgcatatatccccagaaaataaaaataattgaaactcatgaattcacttattgtgaaattcaggaaaaatagaaacaacttcagagactcaggtggtaacataaacttgcagtttcatataacatgagatttcgtaccatatatttaacacacgaacaaacttaaaaaaaaatagactcatcatcatcatagctattgctactactactattacgttataaattataataataataataataatatttcattatatcattaattattaaataataatattatattaactataactggcagtcttaaaagaaagaagtgatgagaaaaagcgaagaacaaacaaaaaggtttttatatgtaactgaaaaagaaataaaaaagaaactcaaaagaaaaagcaaaactaattataagaacatagaattatcccattttcactccatctatgtaagaaggagaaaaaggaacttaccaaaaagaagaaaaatatatatttttttttttgtttgactgagagcttaggcaaagacgaccatgttgaaatttgtaacgtcatcattgccattaacgttttttttctctcgattcaaaaattaaactactactactaatactaccatcgatcgatcttgaccgttgattattaagtttttttttttggtgatcatgatcatcttgtgaaatcgtggactaggctaggccgatccgtaacgttgagtcgccaagagaggaaagaaatgccgttagaatcgttaacgggttcatgattttcatcgtccatgaaccgaaactcgtttcccatagccgcggctgcaggagaaaggcaagccattttctgagcttgagagtgttgttggtattgatgatgatgatgatgattgctccatggattattgttgttgtgatgctggctgaacatgtggctcggctctattaccattcccgaagctgcgccgacgttagctgtcgacgtggcggctgctcttctctcttcttttttgaatcgaatcccacaagcattgcaaagtgactgttgaaatgaccaaaagagaattaataattaaataaaaacataaataattaataattaaattaattaattaattaattaattacctttgggcctcttgggccgtttctccatagaggagtagaggtggtgtcacagttggcgcagcgccgagccaaaagaggatcactggcggcggctgagctgctgttactgttcgagccgttacgagcagcgtgtttgtgagaagatgatgacgtagtagtcgtttggtgtttgttatgattcggctgtaacaaatcccaacagaaattggaaacgcaagaatcgtttcgtcgttcggcgtggcgcattctttgctggtgtttgttattattgtcgtcgtaataatcatgatctggtgtagttgagagacgagtcgatggtgtacccagtgaaagtgtacaatcaacagaagaagaaggagatgcgaaggaatacatatcttggttattattatgataagatgtatgatcgttactataatgatcgtacggcttgggattaggcatggagaatagcatagagaaagcgttgttattgttttggttgtggtgatggtatacaccacatgaacatggtcccgccatattcccctgtgagctacagcatctatgcatcattttgatcttcttcttctctaattttctacactttgctatttgaaaattaacaaatgggatttctctggaaggtaaaatgaaaaaaacacacttgggttttgagagagagagagaaatgagaataagtgagagaagagtgatgaagtgagagatatgaggtgtgggtgttgttgtccgttagctttataagctagtaaaatgttgaaataccagtcagcacctgcagtccacgttgtcgtgaatagcaaagagaaagggatataatatatattattgatattgatacaatgatacgtatatagtaagagaacaagtgttttatttatttaataaataattataaagagaagagagagagatagagagaaagggggttggggggacccaattatttacatgttacagagagagaaagtgttggatatagagatagggatagaagactgagtcatctctagtcaggaggagtaatattaatcagtgctgagtgtgtgtgtgtgtgtgttggtgatttatgaagtggtataaggtataaacaagtgtaagaataaaaatatgttaagtcctatatccacacgattcaattaggaatatgttttgtttttgaattgggttaattaattgggttgagtgccgttattaaagaattaattaataaatgaaaattaataaatataaaaaatataaaagagaaattaattaggaaaggggaggatatgatagtgttgtttggagatgtgaaatatggtttggtcattgggggatttgggtcaaaagagcccacgtgactagggggaacagtcttccatggatctgccttctccgatcacgaggcctattttagtctcaaacccaatacaaaacatcaaaacctctgtccgtatccgtatctctgccccccctctgttctgtcactgccaccctcccaaggaaaatggaatagtccccccacacccccttcaactcccactcccttctccctctgcgtccttctcaccttcctataaactatatcaaccatccttttttacttttaataaacattccctattatattacactcactaattaacaacttaattaattcttaaattaaaaaatatctaaaaaagatcaagacacccataaattaatatcaattttcacttattttttactttaataaacacttttaaaaaaaatattataactaattatagaacgttatctcataactttagtatttcatagcaagtgctctaaattaaattacaaaaaatactaaaataacactcaaagttgtagtgtcatgttattaatataattaaatattaaattatttaattaaataactaattttgctaagcatttattggtgcgtaacaatgagactccatactttattacacacggtataatactacagcacccaatggttctacttatcatttctctttacttttattactcttcttctttagtatattctcttcatattaaatcaattcattataaattgttttattttagattcaaaagatgcatgcatggaccccatttattttattcttaattattattcatataaataatataaataattttagagtaataaatatgatttaaatttaaatagtggtttaatatccaattttattatttgtccattgttattattagtaattaattaagtgagatgggaagagaagagatgcctaattaagaatattaattaaaatgattcccacatatattaaaaaaaatgattcccacataatttattatttaatttaattttttaaaaaccaaacatcactacaaaaaattgctactttaagtaataattttttagtcacaacataaattttttgtgacgaaatataatttttagtgtaaacaaaaaattatttgtgactaaaaataatatttagacacaagttgtcactatatttagttttagtcacaacaagtattgt

SEQ ID NO: 302387 - DNA, 1256 bp, Cannabis indica
catagtgtgtaagactgtgaagaatctaaacaactgaaggagaatcgggctcagatcttggtaatactctgcgacagaaaggaacaagggttagagaggaggagtcattatattccgctgcaatcaatgtaagtttactcaaactttatatgtgtttaaattttactggttttaaaaattcatatttaggatgttaataaacatacttgttagtaaatctaggtcctggtaaaatatattccaataattttattctcaaaatttacctgaataactcgagatactgttcccgcatctgcgactctaactcccaaatcgcttccttaaccttgttgtttctccacattactttaaccaaggaaatcgtcttgttccacaacaatttatcttttttatccaagatctggacaagttgctcttcatatgacaaatccgtctgaagctcaatatcatggtaacttaaaataagtgtcgagtcaacacgtacttttatctgattttatttttaattttttttgtcaaacgatctgggaattagataactgattatttaactcgtttttctaattataatcctagtcgtatctcaaacgggaaagatatcgcaatttaattgcaagttattattttaagtgattattactaataaaattacattatttattaaaaaattaacatgagtaaattgtgtaaaaaatataacatgggtatattatatagagcataatttataaatatttattatttatgttatttattattaaaatttggatacattaaactttgtatgataaataaacaattaatctcttgcattatctatttacatgtgaagaagaaaattttattcgtcaaaatagtcctatgaaattttttatgaacaaaataattttttcaaaaaatttattagcaaaataatattatttggttatacaaataactaaaaattaaaatgcatcgtcgtaaagtgaccattatggtcattttgcaacaataaatttacacaaggcaaccattcaatgtacttattttgcgaatttcaaaaactttgatgttagtagtttggtgaattctcttttcatattgcatattcataaaactaatagatattcctaaatatttaggtattcataaaataccaattcaatccgtactatacaatttaatctaatataatttattaagtgtgaatatccacacttgtgcatattgaatattaattgatatgtaaaagtaaccaattcaatccaatccac

SEQ ID NO: 302388 - DNA, 1665 bp, Cannabis indica
caatataatctcaataagaaattatgtttgtatcctatttttatatgaaaaagagtagatgaattactaaataaaaatatatttaaataaaataattttatatgaaatagtagatgaattattaaataaaaaattattttattgatttgaatttgtattttatgtcgtgcttctgtgagaataaattcgtgtttttgtgtcatgttttcgtgctttccgtgtcgtgcttaaacttatattattcgtgttgcgtctgggcctatatttattcgtgtcgtgttgagtccaagccaatattctttcgtatcgtgccatactcacgttacttgtactcgtgttggtttcgtgttgtgcccaaaaacttaatccaaatgtacaattttagtgacggcgacctgttgattgggtacttaatcatatatatttgtaaataattgaaattaccataaattgtaatattttttttccaaaaaaattgtgagatttctctaggcaaattaacttatattgaaaatttctttcacaccttaaaaaaaaatctttcataagatacaaagacacatagattaattctttaagataatatttatcaacaccattgaaaagatcataacaaaaaggacaatctaattaataatatctttcaatgcttttgaaactaattaagctttcccatttacaaacttgcaaacgatcttagaccaacacaaccatttcacaataatatttgctagaccattaaaatacctacaaattaaaacttacatatgcaataaaaagtcttacataaatctgaaataaaaataaaaaactactatattatatttccaataacgtatatcaaaaaataaagcatgtatcatcatcaccgtcactatcactatcaccatcaccaccatcgtcatcatcatcttggttcccacggtgaatggtgacatcgaatataggtttgttgtgattagttagagcgaagacgcaaacatcacctacaaccaacctattttcctcaacgaaggttctccatccaccacaaaatctagctgttgtttcattcttaagcttatgatgtgtaaatttcacacaccaactttttccacttggaatcctaagctctatttttgaaccacttttactttttagataatccgttgcaaagaatgctggaatcctctgaaagaaaaaaccgatatgagaattaacgcaaacaattatttcataatactcaaaaataacaaaagaatttacatttttacaaatctacaatatatatttgggaaatttttatttttataatttttaaagtataaagttgtaacaacgtggtttttttttaacaattattcaattaatttttttttttataaaatttaaaaaatattagaaaaatagtataaagtaactggttactttccttatggtaaatagttaccctaagggtacatgattatccttacctaattttctcatatttttcaaaaaatttcgataaaataagtttttttttttttaaaaatcatgtttgtgacagtcagtagtcccgtgatccgtaaagggaaataccgggtaagctgtgcaatcccacaccgcctgggaaggtcaagtgggatgattctgagactgtgtaggtatgagactacacagttgaagagggcttaaatggattga

SEQ ID NO: 302389 - DNA, 2606 bp, Cannabis indica
attaaatatgccaaaaatggaattaacaaatactatcgcgatataggaagtaaactactataaatttattgtgtctctcttataattacttagctacctattcattctcgccaatctagagagcgagtgtagcttagaattctagtctaaatttctaagtcaatattatagaatttttaaacttgaaatataaattatgcaattttatgttttaaaatttaattatttgaatactaaaaactaacaataataattaagtaaaaaaaagtgacgatcaatttggatagatttttttaagaagaaagtttggatacattaatccaactaaactgacaaaattattaggcaggttaaattttttcaaattttttattgggcgaattacagataaaaattttacaacccaatatctataaaataagttataacatgaccaaatcaactgatgtacacaacaagataatacaacttttaattaaaattattattttgtcgttgatcattttttttaaaaaaaatattttagataatatacttattctttactgtttattgagaaataggaaaccggatcaaaataaaattgagctaaagaaaatatgtttaagaattaaataagatgagacttttttacgtagttggggtgttaaagaaccttagtccacgagtcaattgtcatacctatatttcgagcaataaatatatgagtttagctgtgtgacacgtttatcaacaccatgatcaatgaaattaaccagtttggcttgctcatcgaagaatctaatttaaaaatatgtgtctcaagaaatattaaatgtgaaatttcatcatgattaaagcgattgtcattgtttcaattagtagtatccgattagatcggttttacaattggtatcacagccaacttttcgattaattaatgaaattgagatcatgttgccactagattgattttaggtcgtgtgtgttgattcttgtttggtgtttttaatcttgttgtcctccatctatttgttaattgtttatggaaaactgatataaccctgtagatattttcattaaaagtgtaactagagacaagtttaagcactgtctaaccttgttgagcattcagggcatttaatgtcctcactcatttctttcggatcggagattaagtgagtccaatcagatggaattgcgggattaaactcacttaacttgtcaagtcagtaggtccatctatatgctcatcagatgaatctgaagaaagcggccgttatttataagagttggctttaataccaacttaaaggggaccccaccaacaactataaataggagtgtctctactctttcaaatgagttctgagctcagaattctgatctctaatctctaaaagctcataatttagattcagtttagagagggagagtccaagatcatagtgagtgtgtgtggaggaatgtaaaggaagtatcactcttgaagtgatttctctcattgtgagatatttcattgcaatactttgtgttaagttataatcttgggctcattctattgtgtactattgactattcctattcaataaaaatccatcattcattcattatcaagctaagttttctttgtctattttcaattaagtttaagtttttgttttgtgattggtttcagttttgaattgtgtttcttggacagcgttactgttgtaataacttattttgagagaaagaatagattatgaaaaatatttaaagaataattagactattagttgtggtagttgctttattagtggttaatgaaaacaccacacaaactggttaatcgaataattatttttggtgttggttaagagttgaatagttgtctggatctccaagctcgataccatcaccaagaaagaaaaatgtaatgattattccacatcccttgtttaaaattctccaaaaacgagctgactgcttatccaatccaatatttagttaatgtttctccaatttaaccttaatcataatatgaatatgataattcatacacttgttatcaacacaattatacccttaattttgttctgcgtatctagtggtgttgcccattattaagttcagttcattaggggcaaaatttggtataattttcttgtcattttgactaaatgtctctatgatttatgttcatgaataatatggagaaaaaaatggagtaaatcagaatgtcggtggtattttactgtcttttaattacttatgtttgtaatcataatattctcattatatatggtaatacaagaaaagttcgtaatatatattatgagattatttttatttatttatttatttatttatttattttgaaaaggcatattatgagattcaatacacctaaatgactaccaaacatgtctacaaatggtaaaaaaaaatagtctcgattgtttctgttccatttgtttttattctccattttattcctccttattaataagtaatcctgtatacatatatatttatagatattagggtgactattcaatggttacatttttattgtaaccatatagttacatttttctttgacctgtaatagcaggttactaataggtagactttctttttttaga

SEQ ID NO: 302390 - DNA, 5579 bp, Cannabis indica
tttaaataaaattttcactttgactacaaaaaagaaaaaaaaaaaaagaaagaaaacgtacaattttaataattaaaaaaacttatcttccttaatagtcaattgaggaaaagaaagagaatgactaatattcaaaccacaaatgtgatcaaagctatggtggtcagaattatcggaaaacgaaaaaggataaagtgagccttccttttgctcataggcaatgcaactagagcagaaagcaatctcaaagggaagattaatcaaaaaagatcaagactttctaaggggccatgcagttgagacattgtctgagattcgagaagcagccacggacgtgatcgaagctttggtggtgagcatcatcgaaaaacaaaaaggtggatcgcatgcctgcaggagcagcagcatggctaggggattagagaaaaggtgtgaagaggaagaactcagtggattgaaaatgataaatagaactgagaaatttcaacaaaacaacttaaacaaacacaaaatccacacaaatattagagtaaaaggaatagataaataaataaaaactctaaaatgcaaatgtaaaataaataaataaataaataaaagataaaactaattaaacattggactagaaacaaaaacatgaaatatgtgtttaaatattagatttacaaaattaaatatgacgtatcaaatgccattaaaaaccataaatgtgaaaaaatactatatatataagattatcatatttttgtaactttcttatcaaatcttatatttcatataattctcacttaatctaacatcataaatcagattatgaaacccgctatgtttctctcatgacggatagtgggagtttgcaagacaacaataattattccttattagttactttaagtattttcattacataaataaattataattttatttgtttttatatgatagtatataatgtagttattttaaatttccaataaactttttgaaattttaaataatttaaaatgttgaaatttggattaaaataactaattgcaagcacgtttgtttgaatatttatacatgtgttcaataagttatttgaatgaattgatgagaaatactttcacgtaactacattatatattaaataaataatgcttaattgtatgctgcgaagatcaaaaatatcaaaaaaataatgattatttttattattattataaataaaatacttttacaaaaaaaaaaaaaagaagcgagtagctttaaagaggtggatttgcaaaaacaatggcaaatatgtcagctgattctcctttttataaattcttcgatcgatcactcttacaattgctagatatggcttcagaaatggaggacaacaacaacccactaataacaagatacatatagaaagggaaaggcagttgttcatggaagctcattattattgttatgatcgatcaagattatctaggctatgaactttgaccaaacatcactacttgaggctcaatcagcttttgagttataatatacacattacccttactataaaaattgatattttactgagctgcactagcaaaacgaagaattgctagtactgcaagacttcttgagtcggcaaacggttgctcaaataagtttgtgaaacaatgtttgttaacgcatttgcatcggtttatgttaaaaggtgcaaacttgttgctcgcgacactcacctttaccggcaactaataacgccaatgtaaatgacttttgccagcataatgatggtgcaacactgacaaaggtgaagaaaaaattcaccacgtggcagagatcatgttttttggcaggaacattacctttcttgctggagagaaaactaggcggcgccaagtaacgcacaataatgtaggaaatgatttgctaaaattaggtagaaaaacttttaccgacgttagataacatgcaagcaaaactcttcacaagcggttctaaaaagtcaaacgacaccgtttcattttagggttctaagtgaaactttcttaatgcgtactttgacatttaccgacgcaaatatatagaaagcgtctgcaaaaatatacgattgatattaaataaccaacgcgtgcccatttcttcttcttctctttatcttcaaaacccagctacccgtacctattccccaccctcaaaactgtctattttcaatctttctttctattaaatcaatttcagataaacaatcagaacatagtaaagttgtattttgggtgtgttttttctttaaagcaaaaaagttcatttcttaattattggtaccaaaaatagccagggcagcttctatattattacttcacgtgtagatgtaaatgatgatgacgtaccagaggtgattaaatttttcctagagtatgatacatacacatatgattatatatatatatatgaatgcttccttcatttatatgcacttaaaaactatatttgtcaataattacttgaaagcagttgtcgtttggtaataagtttcatctattatcttcccatgataagtttaaccggggatatctataataagtttcaaaactgggagaagaagattaaaaggttagataacctagatttcatacggggtaatacaatggtaacaagtacataaaccatactacatttagatggaattctaccataagtataacagaacagacaacaaggcttacaaatcacagaaactatattataaatgtgagtgctcccctaatgttgcaaaacatattctgatatgttaaagcataatcattattattgcgactaaattgtgtccgctaaacagatcgccccaaagatactagatgagttttcaattacatctttcacttctcggtgttaaatttatactccaactgacccttctctttgcctgtcacgtataataaaacataaattagtatgtctagatattccaatcagaaacaccatcactatcagcgcaataactcattgagcaaataaagtttatgaactccaatacccccacccacccccatccccgggaagcctttctcataaaagataatatactcttcttaagggcttcatattcatctaaacacgtatttttattttactcctattgataaagctcggatcagaccaaccgcactaagtcgaataattgaattcaatagaagccctatagctcagacagacataatatagagagggtgccctgcaggactagaattcagattgtgtcaaattcgttaaccaagaacttatttgccatggaattgagaggaggctatcacaattatttcttgagaaagattaatgtcatattcatttgaagacaactaatcctttttcaatgaaagaaactacaatcatgcaaaatgacgttgaatcaagccattacatgagaggtcttaaagaacagggacagttgcatcacttagtttctttgattaggtagagccttgactcgagggatagcctccaattggtcactgctatactatacgagaatacagaagacaactatcttaagaaggaaaacaacaagtatcaagaggcactgcgtatagaaccaccaacatgaagataaagaagataaaaagagagccctgtggacaagtgaaatatatcaaaaacaataccttcatcaatttgactttaagtcaattagattgtatgtctagtgcgtggaaaagttggtatgaaaaagaattcttataggactaataagaattgagtcatatcattgttatgaaaaacattacctcaataacgagtgttatcaaaaacccaaggttcatgagtgaagagctcacggccattcatttccactgtccctgcagctatatcttcctcacgtttccttactgcttcagcttttctagctaatgcatcagcctcctgtgaaaaccccaaattctaaatacatttttctttacgaacttaatcacatctcttctctaactactgatgggattggagcaagaggcaaatttactatgctaattgatgaaattggaagtctttagtgttggcaagaatttttcttaattgtactaataaaaatttgagagatttattggcctttcaaggcatcaaccccaattgatgttatagtaaatgtaccattcggatttgggggattttacaattgaaatatataaatcattctagggagaaaaacccaaaaagacaacatgcaagaactacataaaaagtaggataatcgcatgaaaatcaatcgaataattgagaaaagacataatcgaaaaagggataaagtaaaacctaaaagaaagagaaagaaagaacagaaagaacagaaaaccttgcggcgtttccaggagaggaactgggattgtgtgatggcattggggttaatagtgttattagggctgagcttgttctctgcctctttaacgtcttctgcttctgcacccatttttcagtttctctttctctctgcagactcagagacgcaaccaaccagacaactacgatgccaagcaaggcatccaacacaaaatgacgtcgttttatgccttgaaatataagaaaagattctatttgcactcataaaataatgagtatactctattattaaaaaaattaattttttttttgttataaccaaaaatggcaaaaaatattacaataataatacagtgggtccgtcactattacaataatacagtacacataacaaatattacaagaatacctcttacacacaattatcaagctgcaccacccacggtttatgcttctcatcctggagcacttcatgcgatcaaacgaagatggcaaccgcaaaacaacccaaccagtcaattgaagatccaccattaattctagcaccgtgacctgagaagaagatgaaattatacagaatgtcgatcattactgattggtaaaaaaaatctacatgtaaactggtttgaaacacaaaatcaaccatcaattacgattcaaattttatcaaactaatcatcctatattcaaattacatattcaaaaaaatatagatatgaccgaacaagaagtagagttctgaccaatccaaaacaggtataatctgatatacacatatcaatacataatataatatcataattgttgtattacaattattttctaaatttttaatcttgtaattattcaatttcaatcacgacaataacaagaaattcgcattcatctagcaccaagaaactagaattgttgatttaaattttgtgtttcattagagttgcctttccattttattcacacactgataatgataattgaagacaatgctctcctaaaatataatatataacatggtcagtattttctatatttttgattggtttatttaacgttggtttacaatgttctaatatccacaagaaaaatgttaacaaaaaaaatattggtgatcagtgacaaaaaaaaaaaaaacaaaaaataataagtttaaaatatttgtgtagcagttgtctaatagttgtgctactaaaatagtattatataaataaacagtgcttagaattggaactctaaaagtttcccctgaaaagaagaatattttcaattagggggccatttca

SEQ ID NO: 302391 - DNA, 2065 bp, Cannabis indica
cctcctaagtatgggacattgtacttagcaagggcttaatctaatctttctttttcttttttctcccctggaattttttctttaaacaaggttctatgagttgaaatcatgaaaccaggttctccaaaaacctgtgattttgcccctatatagaagatcaagcgagtttttctgcactacacctcaacaatggtctatctcactcacaatagattgcttgaacatacaaacttcatagtttttcacaccaatcactaagagatcaacgctggggggcaagagctgttaagctcaaaaatgtcaaagaaatttcaaacatcatggaaacaaaggtgatggttaatagtcatgcaccaataattgttctaattaaaacagaacctgaaaagagtgggtcactcctaaagagattcgaagccatgaagtagttcatgtatggttttaagtgagccgacattgtggtagaataagattaccactcatactcaaaattttcccatggaaaacatcactatgactagcttcatagtgattgacaccaagtctacttggaaggtcaacacccagcaaccttcgagccatgtcacttatctaccacttgtttgtcaagttcttgacacggctagcatcgactgtctccttggcaaccaaatagtataatgagaatgttataacacatcattggcatttgcatagaagacctccttgactatgctaagggtatgagaaagacctccttcactatgataacagtgaaggggaagtggaagacatcattcgctatcaagacagctaaggagtgaaagaaggcctcttctgctatgaatacaacagaagggatgatgaagacctctaaggtgaaagaccaagaataaaatggagaccgcacatacaatcactctgaggtgcacccaaaacaaggaatacatcaccaccatctaggatatattaattcgggagttgatcacatcctcaattgacaaaaagaacagttagcaactgttacacaacatcattaatagtcgtcaagaataccttcttcgctgtgaagccgaggagataatgaaggcctccttcattgcaaagctaatgggatgttgaagccctcctccactgtaaagccgaaggaatgttgaaggcctcctctactacaaagccaaggggaagtagaaggcctcctatgatgtaaagcttaggagttgacgaaggcctcctctactatcaaacaaagaagatgaacaagactacctttattgaaacacatccgagggaattctgacgcactttaacactaaaatcttatagaagataaagactacattaatattcatataaacagacattgtgacaagatattcaatgctaagacaacacttaagatcaaagtaaattttgacattctaatgtcagcatgatttcacagtatctcaaatcaaaggaaattactcaaagagtcatcaacttaaaaattcaatttcctttattcaatagggaatagggattcaaaatactactcttagtgggaatgcttgaagaacataaacaattattcaagactgtcaaaattgatgcccatctggtagtttcgagagaaacaggtttagttcacatcattaagtcaactttacactacttggggggaaaatgtttacaccaagagtaaaactgatgacatgggcatcaatatttgacacatggcaagaaaaatgacatctcggagttgagtagtcccctgttatagcaggttgaccttagaggggtccctagccctacgcctaggttgattttgggaactccaaaatggaagtttggactttaataacttgaatccaatcaactatctttagtattatgtaccatgaagtcatggagtaacctaatccaagacccgagagctgaaattacatgaacctacagctaggggtgttcattggatcacatccaatggatttggacccaaacaatccaatccaattatttattcgatattgaattttgtcatccggtctaatccaatcgaattgagtcatccaatccgatcagatccaatgcatgtattggattg

SEQ ID NO: 302392 - DNA, 666 bp, Cannabis indica
tattaaaaaaatcattaattattcaaagaacatgttccgtgaacgcacttttcttatattattttttgttaatagaaatcaaagggtgacaatgtaaaatttaattaaaagcactcctctctttacgcgcactcttctcagaatccgattaaacaataacaatgacaaatttgagatcaatcctcccatacttcaaccacaacaagaataagaacaaaatcatcaaaaacatgaaatcaacgtgtttgagaaaaaaaactaaaaaaaaagcctcattgaatcttttcaaaagaccttaaagttaataaaaaaatatttttcttataagctatttttttaaaatattgtggttatagagacatttcataatttttttttatatgtaatttgagattatttcaaatgtaaattagaattgaattgatttgttatatgaagaatacaatatacatgcataattcacacgctataagtaatttcaatcacctttattcaagagtgggcatgactacacgctatatgggtacccatgaatgagtaaaattagaaaattttgagtttttatgcttaatttttatatctaattaaaaaaaattctctcatttttatatcatatgggctgagattgttttatcggtaaaaaaaaattaaaaaaaaaaaaattaa

SEQ ID NO: 302393 - DNA, 2311 bp, Cannabis indica
acagccgcatctcttttcggaaactaatcaaattatagttcttcctttttctgctttgattttttttttctttcatcattgctgttgtgattaaggttggacatttagtttaaatcatgttgtatgatagaagaaacatggaattttgaaatatctctgtttccttgcagatctttgatggaaagtaaactgaaatctggaaccactatcattgttgatcggtattcttattctggagtggctttctcttctgccaaaggtctagattttgagtggtgtaaggtaaagatattcttggtagtatttataatctgttgttcgtatttaatttctaacaatccagaacatctttgcaggctccagaaaaggggttattggctccagatcttgtagtatatcttgatataccaccggaggtaatttaagctctgtaaattttgtgctagtatgtaaattcatgagtataccagttttggatgctgccaatattgagattataacatttttacgctgaatgatacaaggttttggaccatttatggtccagatacatagatctccctgattttagatccatcttattttaagattaaacccccaggaagatatcacctttaattgcagtttctcacatggtgaaaagacatccatatcttgtctttttggtctaaactttgtgctgcaacaacattacattatgattctcagaaagccacagaaagaggaggttatggaggagagaggtatgagcagctggagtttcagaagaaagttaggcaaagctaccaggctctccatgatgcttcttggaaggtattttgtgtttcattccgcgacatgaattttaaaactgtctatctgcttggatgtattaatggcatgattcaacttttacgtcatctttagttggagtgcctctacttattcttttaatatggattgaagtgtgacaatagagagatgggctgctgcttatattgtttaccaccactagagccgatgcaactttaattgctagtatagacctttaatctctatgtttgggtgtgtggcgtatctactcactgttttaaaggtcattgactgttgaaaaagaataaaaaatccaatactagatatgcaagcaacacaatcttactgcattttgtgtgtgtttgtttttctccggatcacatgctcttctcattcattcaagatttataatatttttctctcttttgttttcgaaagcagaatctgtttaattcaaactcttacaatggaactgcctagcactaactgctagtacttagtaccggagataagattgttaccattttttgagtctaaaaatccaattgagcttttgctataaagttcaaaggctaaataaattgtatttttatatgttctctgggtgattattaataagtttgtttgatggtgtaaatgcagatagtagatgcatgtggatcagttaaagatattgagaagcagctgcaggagatagttttagagagtattggattatgccagaaagagaaacccctaacatgtctctggtcatcctaactttgtttcctgtcctttaatgagatatatgttaaggctgagttctaccattttaagggctgacatataagagttgaccaacactctactttgattatatatttattctgagtaaaaaaaaaaacctttctgggatggtctttcagagaaacttttgttaagagtggagtggaagaaaaacttgtaagaatattaatataagttttagaagagcctaccattattattattactcttttgtgcattatgataacacgtattgaaatttttaccaatactaatcggggaagcatttgcatcacattagcaaacaaaaagaaacatttacatcactttataggacaaaccccattccagtagggattatagtcttagtctataactcttaatttatgttaaattagtataattataatcatgctttttatttttcaatgcaattttattctatgttacaagaaaaatgaatagtacattgcagtgtaaataattaaatttaattttcattgcggaaaattattcaaaaatcaaataagtatttgcaaatcttttgatttcgtaatgattctatatatattgtcttcttttatttttatcctcttttttaaagtttatcatttttacctctttttctaaatattgcactaattttgcccctgtcacttcaagatactcttcatgtgactcttgttagacttttatttgggcttacattaagttttattggttttattaaaacttgggttgattggatagttct

SEQ ID NO: 302394 - DNA, 2509 bp, Cannabis indica
taaattttaataatacaatattttttttacttacaaaatattttgcagtgacttcattgacaaaaccatcagacagttgtttcgtatgagtcactctccatgcatcgaccacatgctcttcaggtggaccaccctatacgaatataaacatataaaatagtttataatgcattttaagataaactatattttaaaaataaagaataaatattattgcttacaaagttgtgacgtatagaaagctaatgatctcgtgccttgcgtcgttggatatttcattagctgcatatttgctttgttttttgtttttgtttttgttttttttgtttttttttgtttttttttttgagcggttcaaaaaaatttcactaatgaatagttcgcaaataagcttccaactctccttattcaagtggtcagggagtaattcaagaactttctcttaatcttccgatttagtgtaatgttgcttaaaccacttatgtttgatggtctttcgctcactatacctctctaccatctccgtatatagagtccatattagtaggtctcgataggaattcccatcaatattaaaataaaacagtatgataaagcaaataagaattcatattaattcttaaacgactttataaaataattaaaagctactcacccttattcgattaagaacttgatctttatattgttggggtatatcaaaaaaattgtaaggatgacctagacacaaaagggttacttgctggcccataaatcgaatataagcaatggctttagttccaactacattgcctgtactaaggtccacctcaatttctaatggtttaccaggttccctccttcattgttcaagtttattgtttgaagcaaggccacaactctttatgaccgttgattgggctttaattgttcgaggaaaaagttattctatttgtacattagaaaataatcatatattaatagtaaaaataatattagagataaaaaatatgaaacatgatttgcaggacgataatactctagaatgataacggggggccataccatccccactgtggtacgtcactatatcaactgacattatactttactttggagaagaacaatgtaaaaatataaaaatctacgaaatgcaaaataaataaataaaaattgacacaaacataaatgtgaattagaaacatagtgttattcaatcattagagttttattacaaacaaaagtaaaattaaagctacaatgaagaatcactatcatttccatcattcattaagttcccgttttcatccttaacaagttcgactagtaaatcatcgatttttttagcaacgtaatcttcatcaagctctttgtgtttgctctcaacattcactgactagttgtccggttcaacaattacagctcaaggtaaatccatagctttggtatatggtaaattaagtgtagagtaactttgttctagattttatttgtaaatataccaaagctatagtatatttgtaagtataccgaagctatggtacattcttttcaactatttttttattaactatatttgtaaaaaaaaatatgaatattttataaaagatgataatattatttaatattttatgtaagaccataattgtaaaagtagattattatttgatggtatttaatattaattacatttaatttacatatgtttaatttggaaaaatttaagtgagcttttattattattaagtaaataaaattaatcttactaattaactaatcttattattttaaataagttaaaactaatgtaaacaaattaatttttcatttctactataaaaaaatttatggtccatatcagagttagaaaagagaaagcgaatttgataaaagtaatttttatccaatatgaacaataagcccaagaattttagcataatatatatatatatatatatataaattaaatctagactaaataaaaaaaaacaatacctcttgcggcctattaggggatcttcactatcttttaagtataattacgatcatctaatctaagaacttcgcagaaaattcacaccacaatcttccaagcaagcctcaacactcagaaatagagtgagctattagattatataggatgaacaaatttatatattgtagtgtattctcaactcatgagacactcgaatttagatagagtaaatcacaatctcacaccacactagatggtgttgtgcgtgtgagatgatgagagagagtctgtgtgtggtgtgcaagaaagagaatgagggagtgaaattcaatttctattttttctgttcttaacgtatatttcaaattgttacctacattttatttatgattctatatattatttatagtattataaataaatttttttaattaattctttaaaataaaataaatatctaatttaatttgaattcagaatttaagttttaatgtaaatatctaataaatgattatcaaaaatcagttaaacctcttttattttattattatcttt

SEQ ID NO: 302395 - DNA, 2758 bp, Cannabis indica
aaaaaaagaaagattgctaccagccatcatactatattattaaataatcatattaacttattaaattttaaacacaagaaccatacaactatttgttttagttatttttttgctgggcaaagattcacaagttagattagagcatataaaagggtctttaaagttggaatgagagttggtatttgattgagtcaatgtaaacataaccttcttatcataatagatttcttattagcattaaatatacacacattataaagatgacatttttataatcaaaaaataatttgtggtgagaaaccaatgtggggggtgaccatcttagcttcacttaagtcaataatgatattttttgattgttttaaataatagtttggtcaaatgtctaatgtgagtgagtttcaaactttttcttttcttttgaattgattatattgttttagagaattactaaaaggtatagcaacttctacaattttatattattattaatgcaattaaatatcgtattaatttaataaagagaaatattaaaagacactagtagtgcctaacacctttatatatatattaatatcgttattggttcaactaaatgtttagtttgatataatttaatgtaataattttttagaagtagcgttaactaattgcaagatgatacgctagaaggtactaaacactactgatgtctaataacaatactttttaataaaataacttttataaaatatcgctaatttattgcaagacgctacctttaaataatgctgatatcttataacaatactcattagtctagagcattgttattaagaactatatgatacccaacactataccgatataagacattgtatttcgttaatgattttttatattatttattaaatcaactcgatattaatttacactaataataatataacatttatttgtcctttactatttcttcattagtctatttatctcattgacttatggctccctcaaggccagggttgacttggaataacacaagacagctatacaagggggccactattacccatgaaaagaagctctaaactcttatgttttttctctcttaagacttggtctttcattatttgcttgcttaagcttatatatttagtcctatattgctttcacaatctagttcatttttttttccttttgatgaaaagagtgcttaaggaaaaaaataacataaaaggtagaggcatttacaatgaacaagtgagaaaaggattatgctttaagctaatgaaagattgcaaagtcaagaaaagttaaaaacaagatagagagagagagagacccttttgtttattattgaatatttttttattttgctgaagaaatcaaaggcagctaagtttgaaagaaagaatttttatcttcaatcttcttcatcatcgtttaaaaaagtctttatctttgaatttgcttctttcaaaatctggttagtgagaaaaaaagcctttgctttattttcatgcctgtgtaagaatctataggagagaaagagaaagagagaaagatgggaaattgctggtgttctactcaatctgagaagaacccttctataccaagtactactggttatctcaccacaggtaaaaaaatcatttttctcttgtttcttcaccttattctattgatttgctaaattttctcatctgggttttgttgaatttttgtttatgttatagcttcttgattttgaacattgtctatgactagttgaaaggaatttgatattgtatttttaaagctttttttgacataattttagggaaaatttgccatgttaaagtagcaaaacaaccacattgaatttacaaaacactttgattttaggactgtttattggcctttttttgttgtagtaatctgatattatcctactaaggacttggaatatcaaaatttgtgggattttcttattgaacaggattatcccaaacaaccagtaataccacatcttctggaggaagtacaatctctaggaatagcaggttctctgtggtgagctatgacgagaattacccgaatgggcagatccttccctccccaaacttgaggacattctcttttgcagaactgaagactgcaacaaaaaacttcagagcagatacagtgcttggagaaggtggttttggaaaagtctacaaagggtggcttgatgagaaggcctcaggtaaaaacggaagcagtactgtaatcgcggtcaagaagttaaattctgagagcttgcaaggctttgaggagtggcaggtgacctatactttcaacttgaaaatattcacaattccttttgaatgagcaaagacctctctagttagtcatgtggattttctgtctttgtgattatagcaaatagaacacattatgagccacttgtattaaagtagtacaagatcatgatcacaaactccaatcaattatagctaagatcttaggttacgtttggttgggaggaataaaagtgcaggaataagaataggaacgggaataggaataggaatagaatagaatgaaaatgcaactaaacaaagaaattgaatgaaaattgattttggacagcctcatggatctttagaacgaaacgttttgagaatctgtaatacaggaataagaatgggaacgagaataagaatagaatgaaatttaaaatggaatagtcattctactaacaatggtggaatgcaaccgaacaaaggaatggaatgcaaatcgattcttttccattcta

SEQ ID NO: 302396 - DNA, 2204 bp, Cannabis indica
tctttccaaatattttatctttcatgtttacaaacaattaggtgattaacatgcaagtcaaatggttcaatgtgcaatatagcatattgtatcaatatctcaaagaagttgttaagtacaaaatattatttgtgtcaggaatagtagtagtttacagaagaaatctctaattattgctttcatcttgattgagtggcaaaagaaaataaaattaaagtaacaacaacttacaatattcattgacaaccgctggcattattaagcttctcaaaaacaaaatacatgcatatacatatacatatacatttttttaactagtgagtgaacacatacatttgtttaattagtgagtgaacacatacaatcactaaatatctataacttaaataaaagccgtcaaacaaaatagcgaactagctaactagggtttttgatgcaatcgtccttgtccatgtcgctgttgtcgtcgtcgttcatcggcgttaacgtccatccaagagatcttcaacctcgtgacagtttatagcagcttctccccttttcctcacaaacgtggtaccctgttaacagaaggagcctacccatcactttgttcgtcttcgccattacaggtaaccttcaaatctgtatttacttcttcaattgtgtcccatctgcaattaatttcccactcagaactccaatattattgttttcctcttctactcttcttttctatttctagtgtgataactctattttggattttgtaataacttcaccccatctccctgcacccccttggataatcattcgatctatacaaataggtaacctctcgtccctcttagatatccctagttttgctgtaggagccagtgtcacctttgtagagctcatcattcgcacacctgacatggaagagcttcgcatatctgttatgcgatccctagagataatggcatcttgtacagccttgtatataaatggttggtttcactctgttattctttgcaagatgtactgccttgttctctaatcaatcaactattaccaaaaaaaaagcctaatgccttcattctcatgtccttttcttccctattttcctcaaaaaatggatgacttatcacacactctcactaccgcccttaacctcactgagcttgaaactaaaatacattcttttactgaacaatctaactagcctgaagatgatgaccaagctgaaccttcgactttccttgctgtcaagcttttaaccactcgtcacttcaatcctgatgctttcaagaaacgacttagccaaatgtggcctgagcgtttctctatcaatgtttctgagaaagaacccaacttcttcactgtggaatttggttgctttggagatcgtcgtcgagttttcattggccagccatggcattttaattataaactcatagtcatgactcctttagaagccagatctatggtcactgctgatatgctcaccagtacccctttttggatccaagtttttggtattccattccttaaatggtctcgtgctcttgctcgaaaacttggtgaagtccttggccgattcattgaagtgggcatagcttcacttaaggagtcttggggtccttatcttcgtgttcgaatcgagatcgatgtcactcaacctttaccccagggtactgggttccatttccatgaaatggcagctctggtttggctcgattttcgcttcgaaaatcttccagacttctgtcactattgtggctgcctgagccttatagtgaatcactgtgcagatttccttgctaagtgtgactcttctttgactcctcccatgctctgatatgagcaatccttaggagccaaagtctgtatcacctcaaatcctttctatattacaagcacacgtacccggcttcgacctcatgtcgctcacctaatccttttagcctccacgcatcacctccatttgcaaccacctctaatcatttcgaaaggtccatataatgaaccaacttcagattatggcatacagtttcatagtcaatcaagcactatttgttgggttttgtgccctaaataaaacagatttcaatataattggatttactaattaataaagattagaaattacttttatgttgcatggttcacttgatttacttcatgattatgtttaatgtataaattctattaagcccagaacatatgtaaatatatgtatatat

SEQ ID NO: 302397 - DNA, 3237 bp, Cannabis indica
aaaaaaaacatatctcccaaccaatagggtgaaaggtccctttaaattaacgacaattcaacttgtgtcaccgatatttacatgtatcttttattaacttatattataaggtaattttactatacaccaaaagaattaaactgaactaataaaaaaactctcttgttttgatttatacatgggtgtcctaaaacaaacaatctttctgaaggatattatatggatattatatatataataaatttaatatacaaatataattaaaaatttaaacataacaaaattaaattataatatatttctttgcaacaatatttactaaatatgttaaatagattttttttttttttgaaaagtatgttaaatagattaacttctataaagtagtgaaaagtaaaaaaattggtctaataagttggattgtgaaagtatattaaaatattgataaaaattgctttataatagactaatgagttgaatatgacataaggatttccaactttcttgctttaatttgcactatgttattctcttatttgtcacattaattttataaactatttataataattttaagaaattattttcaaaacaaaaaatatatgtgtcaatgtgtgtatataagatagacaatatggttatttcttaacttattagtactccacataagtaaaactggggtagaatattattcaaatactaaattagtttggaattgggtggctacaaatttcttactctaattttttcccattagcatggccgagagccaatccctcataaggaccagcagcttacgtctacggtcccaatcccaaacccaaccaaagcaacaccctggccctctatttttaactcaaaacccttttaatttattttctctccttattttccactcacttattacttatttactctactctatcaaatagcctctcgacactaggcaaacccatcaaatttgggaacaaacatcaaaaccaatatcaattatcatactcttttttcaaatcttatagtcagaacctaaattataacattctcatctcaaaaccaagaaacaccttcttctcacactactctctcaactcatggggccgtacgactctgccaactcggccggcagcagcagcagcagcggaagctcttcctcttcttccacttcctttaaaaaacccaacgacatagatggcctcctcgccggtgccggctacaaggtccgatcctccgacctacagcacgtcgctcagcggcttgagcagcttgaaaccgttatggtcaactcgcctgcttcacaaattaaccacatcgcctccgacaccgtacactataacccttcggatatttcctcctgggtcgactcgcttctctctgagttgaaccacccattccctctctccgccgatctaccagatttccccgatctcgtgatcaataatccgacggagaggaacgatgtatgggcggccgaacacggtgtgcctcagccgcagcagaacattcctcctacccctcagttgaatcagcaaccactcacggtcgttacggcgatggaggaggactccgggataagactagtccatatgcttctcacgtgcgccgaatccgtccaacggggcgacctcccatttgctcgttccttaatcgagactatgcaaccgttgctgaaacgcgtcaacatcaactgcggaatcggaaaagtggccgggtacttcatcgacgcgcttagtcgccgtattttctcgcctaggggaagcattggcgccggaccgtttgaggacgaggttctgtactatcattactacgaggcttgtccttatttaaaatttgcgcatttcactgctaatcaagccatactagaggccttcaacggtcacgattgcgtccacgtcatcgatttcaacctaatgcacggtttacaatggcctgcgttgatacaagcactagctctccgtcccggaggaccgcctttgctccgattaacgggcattggccctccttcaccggacggccgcgactcgcttcgagaaattgggttgaggctggctgatctggccaagtccgtcaacgttcgattcgcctttcgcggcgtggcggctgagcgtctagaggacgtgaagccgtggatgcttcaggtcagctcaaaggaagccgtggctgtgaattcaatcatgcaactccataggctactcgggtcggatcatagctggaattctggtatcgatatggtccttgagtggatccgaaacctgaacccgaaaatcatgacggtggttgagcaagaggctgatcacaaccaagtagggtttttggatcgtttcacggaggctctgtactattactccaccatgttcgactcgctcgaggcttgctctctccagccggataaagctttagccgagatgtacttacagagagagatttgtaacgtggtatgctgcgaaggctcggctcgagttgaacgccacgagcctcttgctaagtggacgaatcgacttgttcaagctggattccagcctcttcatctcggctccaatgcgttcaagcaagccagcatgcttctcacgcttttctctgctgaaggttactgtgtggaggagaaggaaggttgcttgactctcggctggcatagccgacctctaatcgcggcttcggcttggcgagccgtgcccaatccaaacaacccacttgggattattaaaccataatagtgaaaacaatagctcagcgttgtaaatttttttccccttccctccttttttttcacaattatatattgtttttttacaagtctataattatattgtcgtttgaaatttacttttgcagagaaagaaatattctaatttggtaggccgcgctgcacccctagtcatggagctatcattttaattttaatttaagaagaaaatataatttttttagagtcaatatatgatgtcgctgtccaatttatcatctaattcattcatacgcaacaaattggacccaggatattattaaatcatggttaaatttcgaaaccaactgaacatatatatacatataaataagttctagctaggaagaaaattaaagaaaaactagaccttctcctctttcctttaagaagtagtttcagtcagtttgtagtgttagtagtagtcaacggataagatttgtggattgtggtgtgtgttatgttcattgttttatattattatataattttcttattttttaaataaaataaataaa

SEQ ID NO: 302398 - DNA, 2972 bp, Cannabis indica
atcctcactctcttttcaaataattacaaatgaacaattttattgcataaacataaactaaaaaatatttttgatttgaaaaataaaataagaagtaagtccaaattgttgagctggaggtgctattagggtggtgattgtaattgtttaagcagaattcttatttttgaaaaaattccttgtctcccgtagagccatcgaaaacacagatacaatcacaatgtaatgatacaaactatgcttagtacttggtttgaaaattgatgatgatgttacattaattattttgatttgaacgtttggaaataattcacgtgtttggtttattataataggtctttatggtactaccaaacatatgttgaattatatttagaatcatgtcatgcatgaaatggaaagtctgtcttgctaaaaaaaaaataagagcaggggtttctgattttatttattaatttggtaataagtagggtcacaatgaaacaataatttgtgaagtatatacttaagggttaattataggaaaattcttgtattttaggaaacgagttagggttgatcgtttttagcaacatgattataaattgtatagcattatacaatattgtattgacttctagaaacttcaaatgttgcaaaagttaaccaataacataaagaaaagcatttgttatttttcttttcttagtggctatatatattgttataaatttttaatttacttattttttgcctagagacaaaaaaagaaagaaaaaaaaaaaagaatgcataatatagaaaagttggagaataaaacagtgacattaaaagctaaaaaaggaaggaagaaagaaagaaagaaaatggtgagctgaggctgtagaaagtgactagctagttaggggcgaaaactccaaagaaggctggccatggccagtgctcagccgccaattggggctaagaaaattaagttacttttagtgatgaaaacatatttaattaaaaattggattttgtggagttgttagttgcgggatctgttgacgagaaaaaagtcttctccacctaaccaagagactatactcaaacaaatgagtttttttttcctagaaaactcaacaaataagtcatattatttcataacatttgaggaggtgaggaacaatgcctaccaaaatatgtagcataaaaaaatatacataaaaaatacaaagtcaacttttattatcaagtaatggataaaaataaagcatgtgtgtgtttctaaaaaaataaataaagcatgtgtgaccatctcttttcctctctacggcgaagaagaaaagaacggttcgaaacgtaaggtccaacaatgcagtggtggtggaagatctcccttccatccaagatgagggttctgagtttcctatagaagagtttcacgatccctatgaagatttggagattgaacaaggttcaacaaggcattgcgtcgaagattttgggaatagacactcacctaaatcggtgagttgggctgaggaagtggagaaaatgaatttccaatccaatgctaaggatgtttggagcaaattcaagtctaattaggtattggctccttctacttgattgaaatgtatagaaccattaaaaattggggaaaaaattattgctaggttggatttggaagaagtggaattagaagcttcaatttgaaagaatattatatatagtgttgggtgctaatcccccctttagggtgtttgaagggtttattaagagggtttggagtaatctgggtactcataagatagtgacgatgcattctgaatttacattggtaaattttagagatgaagctacaagagatttgattttggagactagtgtcattcattttgataagaaaccagtggttctacggccatggactacagatttagactcggtttgtatggtgaaatcattccaaactggatctagttgaatggtctaggattgcagtattgggggaagaacaatcttagtgctcttgtgagtataatcggcaagcctattgttatcccaaattttgtcttcgtgacgtgggatgtccatgtaagccaagacagagtacatgtggaacacagccttgctaataggacaaggtctccatgcaaggtatggcaaaactgtcaagcagcaactgaaaggagtgaagcaagccttcaatgagctataccaacatgtcttgccggccaagagaagcctataggtcgaccaaggtgagcttgtatggcttgccaagatttgggcacaagctggccggccaaaatgtgattttcagaccaagggagcttccgttcgaccaagggaacctaacctctacaagagaaaggtgtacaaagctggcctccacttgccaaaggctggcctccacctccaaaggctagcctcctcatggtaaggctgacaggaacatgacatgacctgccagatcctggcaagagcatggccgaccagacctcaacctgcagaacctgtatggccggccaacctcatcctgtaggtgcatggctggccagcctctccctgacaaggcattgatacgcatccttcacctgtgaacaataagccaagctacgaattgggccttgacaacccactaagatgctacgaaaatatctactttcaaggggcaattgggtcatttgtattcattaatttaacatgtaaatctaagattttatctactaatagtttattctatataaagggccttaactcaaccttagagacctaagtcactctaagtctcactgaagcctctaagtatgaaaccctagtctctctccctctctctctcttgcacacgcccaagtggctctctattcttctctttttctcacatgcctccaaggcttcatctctctccgattagagatcttcctactaattcatactttgtaaccttaaagagagctatatcagatcccacctatagtgatctgaatagtattatctctcggtat

SEQ ID NO: 302399 - DNA, 2348 bp, Cannabis indica
agtataaagaaaaaaaaaggggaggacagtataaatgttaattctgccgtgtggtagtaaaattgaaaagtattaccccaaatccaatatttttgtaaaatgccctaaattaatgtgtatttggtagagaatgtatgatcaattgagaaagagtagaaaagtatccaaatgttattagtactcaagtctctctttaacattatcaaaaaaaaaaaaaagtctctctttaacaaaaacaagtaattttttatttttgattttataaattatttatttttaacaaacagttttttgccatgatgccaattttcaaacaccttcttaatcttgcatttttttttttgacaaatttaattacaccaatttggttaagcttgtatctatttatttgtgtttatttttatttgttctcctatcaaaacttattttatctagatttgcatgttattatttacctattaattaccatatattattcaacgaaactgttagtcttcattacattaatgataagtatatgtttagattagattggttaataatatgatcatcatgtttaatcataatttttttttaatgcatatatataaagaactatatatagcttagtatatcctctaaaaccatattcatattcatatatgtaaaccattaatatggctcgtctactttagattaaacatgaaagtactactcaaattaaagagctataataataataatagctgtattaattattatttaattggctatatgatatatgtaggatcagtttggtggatgtctaattcattaaattaaacgttgttgacgtatacttaataattatatataatacatgtgaccaaatattaattaatcccttagaactacctagcttattttttcttgtaggaaaaaattaatgccccccacagttttgttgcttcccaaatttcgcattaaattaattaacaccttaattatataagttgattcttctaacttcaaagttccatctcttttatataaatgtatatgtttatacaatataatacaatattatgtatgtgatgaataagatgtatcataatctatgtttgggtgcatattggatgtttttcaatgcatcaaaggctttgttcttgatttgtatacttctgctggcttcattctacttctcacaaatccttcatggattagaattagatgaagattccattagtagtagtaagcaaaggttatatcgtaagaatattaattatacttgttctttttgctctattatttggatgaggtagccattatctcattaattacttttctcaacaatattactcatatatatacttttacatgatatattatgtgtaataatataattgtcaatattttgtaacatatagcagaattactttgttgctatgtataatctctacaaattatcacctataggttcgtaatttgaaaattttgatgttataaaagttatgatatgtccatataagttacatatcttttagtcttacacttaatattgagtccatataatatctatatgatcaattagaattaattttgaaaggtgatatcataaacactatataaagagatctaagatccttatattgagatgataaagtttttttataatcaataagcatttgctagaaaatacaggacttgataatttttaaagttatttccaagagagtttccttagtgcttagaaataggaaaaataaatttttggacaaaggtgataatacattatttaaattttggtgatccctactaatctatactcaaaattatgaggtactgtttatcttcttcttcatctaatattatttactatatatgttatataatatattgtgttgtaatctttatcttgtagttttcttatatatatttatgtactgtaatatttgttaatcaatctcttattttgtccttgtattatgcgttgtccatactttcgaaggacgtgttaccacctagccctaggaagggtccacttaggacaacccacgtgacatcccatgtcaaactaataccaaaaatgtacacatgcaagtaaatgcagtccgaagtagtcagtcactctgaatttgactaataataatcagtccgggacaaagtcaagatcacagaggaatatctctaggggacttgttatacagtagaacctctattcaagaatatacttagaaccaagtaaattatattctaattgagagattataactgaatagaattacattaaaaaattaaaatataaaaaatatcaatgtaacaataataacaatgaataacaatgaataatcattaatattatattataatagaattattttgtaataaat

SEQ ID NO: 302400 - DNA, 1416 bp, Cannabis indica
cgtccactaccttgccctgccttggacaggaaaccgtcaaccttgcaaccatctgatatgcataaatccagaggctctaaacagttgaaggtacccatgccaaaaagtgtgataatgttatctttgagagaatcacttccttgtgttttaagcaccacagactttacatttctacctgttgtgttagtgcatactaaccgaacccttttcgcaataagggcataggcctatttaacaaaaacagacaattgaaagagaaaccaaattaaggcaattaatcaaaagcttcgtatgattagtgaagggtagcaaatcactcagttaaggtacatatggttataacagagtacgttaatagcctaaaatgaaagaactattacaaaatacaatcacggtttacctctaagttaatctaacgcaactaatcttacttaaaaaacttaaagacctatatggacaatacacatttttcttaagcatatgacaatatacattgaaaaataatacactgcacttaaagaatataattaatggaaaaactattgaaattagtgcaatatcaaactaaataccaactcacattcagcaaggaaataagctttccgtactccttccttatatttctatgaaattctttgctccggacgggtaaattcgagaacaaattcctgacagtaacagtagttccaattttccgtgccgtcttcttctcagccaccaacaatcccgaatggtcgtaagtcaagtgcgttgcaaccgtctcgttttccgttctggtttcgatggtcaaattccccaatgagcacagggaacttatggcctcgccgcgaaaaccaaacgtagccagcgactgaaggtcggggaaatcaaccaatttagatgtgtgatgcttaagggcaatgactttgaaattgttgggcgaaatgccggagccattatcgataacctggaagcactctttgccatactcttttagagcgatctcaatgctggtggcaccggagtctaaactgttttcgacgagctccttgaccgccgacgaaagatcgagaatgacttgaccggcgcagattctgtgaaccgaagccttgttaatgggctttatagtcggggaatcggaaggaaggaacgacgcatccattgaattgcaaccctaaatcgatgataaactcaggatatgaaaatcacgattacgttcttggcaacgaatcaagtaatgggggaatttgggggggagaaaaaccctaaaccttttccaacgtcgaacaagttttaacagctttttactttcagattttgccgccaaacataagctgaagcctggaagcgggagcttcctaatgttgtcaacttgtcgtccctttttattatttatttaaattttaagaatggctttgaaagtaactgtataattac

SEQ ID NO: 302401 - DNA, 933 bp, Cannabis indica
tcaaacaatataacaaggattgaacaattgagggtgacacaaatgcatacgccctagtcaagtcaagggaagggcctatctttgggagcaaacaaatgggttggtcacatatataatacgcaattggccttgcctatactactatttaattaccgcttttgaattctttttataattattcttcattttcattagtaatttgattacattcaccatgatcctttcaaatatttgactattacatttttaagtcttcatatgtcaattttcagctaccatatatacgtcacattcagcaactgtactacactaattgcattttcacattccgttatcataatagtaaaattcaaactaataattacttagttgagcatgattatacgcacactggtaattttcgacattattaaaaaaaaattaataaaatattatatttatagagaattgcacttgatatcatctgacgacagtgctggacatgttatcacattcatcataattagttagagagttcgtatttatttatttgagtaaagagagttggtatttgaattgtgattgcaagttgcaagtattggtcatgtatgtacttgcactattgatgcataactttgtagtactatatattattgtggacttgtacttgcttactttaattaattgctacgtgttttgttgatagttgtacttattcagacaatattttttatgattaactctcttattcttagattatgattaactctcttaattgctacctttgtactacctaaggttttcacctagtgttcaggttgacattcttgattaggatttcagtttttgggtccgtcttagtgtaaatgactcaaattttatacttaaccttgaataagacctatcacgaacatgttagaggcatcagaataagaatcaaaacacttcttattt

SEQ ID NO: 302402 - DNA, 1938 bp, Cannabis indica
tatggagtgtaactttcaactctagaacttctgattttaaatatacccaaaatgaatccaatggaaactatgccaagaaataaaaaagttaaaaactatcatgcacatacattaattacaccaaaatgcataaaacttagattctgagagcttggatacttggctatattaaccttatcctcatggatatggccattattatgatgatggatatctcagccttttcagataataatgtacatgtacatcatcaatttacctctcttttttttctttagtggaaaaaaagaaactctgtcattctaagataaacatcaaaaagagccaaatggaaaataaaaagatttcatgaagaattgtgaaattgactagtgcaactttgtaggcctggcctgatgaatcaatggatgcccttgtgctgagttgagtttattatgactttgtgtactgtgttccaacttccagagaatttgggaagtggacaaattatatttccacacttttggaggttttaccaaagccatatatacattaatgagtcatatcccaccattccattctaactcaattttctcagtcccccacttgtacattattgtcactactgtatttatagtaccatatatacattagtgaaaaccagctcaaaaaccctcatacttagccaattgattcatgagattgaatgagtttattaaagttatcattaatgtactaattaactatgtgataccagtagataatggagatcactaatgtgaacatgtacaagtatagataaaaacaagaatggctgtagttagaatagtttgatgattgagttgggaaataagctggaaataccctttttcttgtgctcttgataatgtggattttgaaagagttgggttgggtggggatgatggaatttgtcaaaataggatgaccaatatgatgatgataataagataaatgctaaaaggcatcagtggtatcaagtacccttttacgtgtcaatattgctattggtttaataaagtatcgggtctcatatagtttaatataatagtttttagagagtatcgctaatcaattgtaaaaggtgctagataccactggtgctcaacaacaatgctcagataataatgagataacaaataaaagttggaattgtgaaactatgagaaaaagcaactttattgtgcctgtgcttgtgtgtgtggaacaatccaggaaaggaagaagtgcccaatccaaatagaccatttgggcgtgaagaaccaaaaagccaattggcaggtgtgtgtgtgtgaagtgtgattgtgtggactgtagagtagactgttgtggtccttttctataggctaatgtaccctattcatttcatcaaagtgtcgacactatgacttagaatcattttccttattgatattgaggattgactaatctcttttattattgtcttattgatttgattgaatcttcttttccaacataatcacaattttttttttctgttcccataatgtctcactcatatcatgtttgaatgacacaattatattttcactattttgcaaaatttacacataatatcttcttggtgattaaaaagtggttgatttccaccaattactaatatttgcattatattcattgttgtgatgtaaagcctctttttttatgaaattttttatattgaaagcatatcattaactactcatggatgtacggtcattaagtgttaatcatggtttgaattttaaatgattgtctcctcattttaagcagaagggaaagttgaagttcatgatcattaggcaactaattagctagattgattaagttgataataataataataataataatttagatatgttgttttgtttccttcctttaccacatggtagagactagagagctaagaacttttcatcttcactttggcttaaaaaa

SEQ ID NO: 302403 - DNA, 4015 bp, Cannabis indica
aatacatatgttttggactcaatagaatttatacattaaagataatcatgaaataaatcatgtgaaccatgcaacataaaatgttatttctgttctttattaactagtaaatctgattatattgaaatgggttttatttagggcacaaaacccaacagtggtctccctaaaagtgatactaaaaggttggaagagcaaattgctgcattgaccaagttggttaagaaacaaagtggagcgttatcgaactcaaaagatgaggatctggaaccctacattaggaggatcacggaaactttgctctcgtaaaactttaagatgccccacatcgagttgatgaagggagaaccaatccacgagcgcatttggccaaacacaacaagatgatgcaagtagctcccgtcagtgatgatgccaaatgtttatgcttctccttgaccctgactaagttcgcagaggattagtggaagcagttggctctgggatcaattgatagttgtaaggattcacaattggctttccgcaagtaattcatggctgcatgagaagaggacatggaagttggttcgttcaccaacgtcaagccacaacataatgagagcttgaaggcttttatttagagaatgatggaggcagccacgaaaactaaggtcagtgacgatatgaagctaatggccctctaatctggactggttgtaggctccctattgtggggagaatgcagaggaaaagagctgaaacattatgtgaatttatggcaaaagcacaaggtataattaaccttaaagatgcttacatacaggcctttggagtccctcctacagtgactccaaccacggttgttcccagttttccatcccaaactccttctccagccttgtccatccttagaccttagttttccccaactgtctatgggcctactgcatccggtctcgttcctatagagacccgtttctccgggtacgacgtggcacaaacgggatgcaacatggctcccaaacaagctaagaatgaggtcccagactctagcacgggacattcacggagaaagagaggggtaaaaattacagccgcaatgttttgtaaggaagccaagaaaggaatatgacttgaagtatattgaatgcacaagcttgatatatacatgagaaaatgtttaccaagccacatgcaacatggttcattactgaaagcctccgtgtatgtcgcatggcgggaggaataggcgcgaccagaataaagagtccaagtatcatgcagagaagggtcatactacaaacgagtgtgagtatttaaaggatgaaattgaaatgtcagtatgagcgggaaatttgggacaatgggtttgcatcccgatcatttatcctggatagggggtggttcagggacacatgatagtttcgagacagtagggcgctataaatcctccacaggggtaggacgccctcaagctctaggaattaggagtgtacatcggtcgatttgatcagtttatggtacattttattcaactcaatgtaaaaattggattacaaaaatctaagtgcaactcacccaattaaaaaaaaaataataacccgcccaatgaaatttgtcagtttggtcaggttaacccgtccaaaccaaccactaatactttttcaatttttttttatttttacatttaattgttatatttaattaattgtaataatgagacaaatatatatagattgaatttaaagttcaaatcaaccacaataaaaaaatatattagtttcaactttatattttttaattgtcatataaattatatgatatataaatatatataataaaaaattataaatatatacaaaaaaaccctcttaatcgggttggttgggttagtttgggtggattgggggggttggtattaatttcaacccgcccaatataaagattgggcgggttatatttttgttcgatttttcagtttgtattttttgtcaggttatctcggtttggtttgggcagtttacaaaagtttatttacaaccctcctaggaacatcattaccttcccttcctactccgccaactccagctggggtggcctttcttgccctgagatcagcaaccccataccctcctagttcgctccaccgcctgttgatggacatgttaaaacagtttcaggaggacccatctcgcgagaattactcgcaatgcacaaaaaagatacctgagagaagtggaggaaggagaagtgtgtgcgttggtacactctcccgcacagcgtcccaaaatgatgaacttgccgatcacctttacaaaggacaatgccaagaatgtacgcttccctcacaatgatcctctggtgattgatgcacagattgctaacaaacgagtctctagagtcttagtagacaatggaaactccattactattttgttcagatttgtattctaagcgatcagactcactgaagtagatctaactccatgccccatccaactgcaaggctttaatggtgatgcattaatgcccatgggaaagatccagctgcctatcaccctcaaagaggaaaatgaggcaagcacgtgtaaacactcaacctttgtagtagtggattgcccaactgcatataattccatactaggtcgacaaaccctaatagactttggggcagtgacttctatccgatatttatgcatgaaattcccatgtgacaatggatgcattgggactatcaaagacgaccagcgaagtgcaaaaaaatgttacaatgtgtcgacgcggactgtgttcatggtccaggaagaaatactcgttgctcccggggtagaagacttaatggcatagaaactgtcctggaagagtttatagatgagttagatctgagagttgggattgagagaaatatggaacagatggaggaggtggaagaagtgagtattagtgaagaagaacccactaggaccatcagagtgggaaagaatctacctccggtcataagagaagacgtcatcaatacagtcaagaaaaaccaagatgtgctggcttggagccattctgacatgaccgaaattgatcgaaacacaattttccatgctttgaatatctacaaagatgcaaccccaactcgccaaaaaaggaggcctttagacccggtcagggccgaagcaattaaagataaaagtcgacaagctgactgccaatgacttcctctaggaatcgttgtatctggtatggcttgcgaatctggtattagttctgaaacccaacggtacgtggaggatgtgcatagtttatagacctaaatatgccttgcccaaaagattgttttctgcttctgtagatcgatcaaacagtagatgccacgtctggatacaagtttctcaccttcattgacatctattctaggtataattagattaagatgaatatcataaatgaggaccataccatattctagaccgacaagggcgtttactgctataaggtgatgctgtttggactcaagaacttggggccatgtactaacggatggtaaattggatgttcaagaatcaactagggagaaatatggaggtgtacgtagataacatgctagtaaaatccaaaacctccgaagagcacggtcaagaccttaaagaagcctttttggtaataagaaggtacggtatgaagttgaatcccaaaaaaatgcacctttggggtctcctctaggaagttcctggggtatattgttagctctcgaggaattgaggctaatcctaaaaagatcaaggcttttatctgttggattattgttttaccaggatctagatttactaccatgtatgttgtttaacatcctaaatatgaatttctaaaacaatggaatttaaacacataaagtttaagaaactttaaattggttgcagcggaattaaatgactcctttcgctcagatctctaacccttgtatcctttttgtagcagagtatcaccaagatcatagcccgattctccttcacttgaattggattcttcacagtcttacacacta

SEQ ID NO: 302404 - DNA, 1666 bp, Cannabis indica
tttgtttttcacttacagtcttaaatctttcaaatgccaaatgatagaaaactagcaataaaagaaacacttgaattttcacattaggggccaagttactaacctttcttaggtgaatggctgatatacaactcctttgaccgagaaatctctagtaaaggagacctccggcccgaattcgctctttgattacctgcaatacttgtacccaattgttcatgtccactgttcttatcatctctatttaccaattcaccaacactaccaatcttctcaatatcatcatcacatggctgtttactactaacaccttcttccaaatgtttcactgattgatcaaccccattattccccatttccaccaattgaaactcaaaatcagcacttttactggcctagtaagtaactacccccaaaaaaatcctcaaattcaataaaaaaaacagattaacacaaacatatgatcgaacacaatcaaaacacaaaaccccactactctaaaacccttgaaaaccagttcccacaatccaaaatctcaaaaaacaaatgaaaccaataactcaaaaccctcaaagctcaaaacccagaaaccaaaatcattagaaaacgagtggtgtgaaggcgaaaaaaacaacaaccaaacggtaaaagggtttttaatggtaactgactttttgaccaaacagtgccaccccaccaattagtcaaacgcatagaaagtttggtgtgcacaaagtttaaaaaaacgcttcttttaactctctcgaaaccaaaagcaaggaaagtttgagtctttgacagcaaacaaactaaatacagaaaagggaaatcttcaactaactgaatattctgaaattctttatcgaaactaagaatatccttcaatggaaaactcaatatagaatgacactgtgaaagaagcaaagtacagtcagaagcttcgttctgtctgtgtgtggattgaagaaagaaacaacctagtttaattttcttatgtataattctataatgttttttttttccctttatgtcggttaaaagattataataaatgtatttagagtgatattatttttatacctttaacttatattattttttatgccttatagaaagacaaatgagatattgatagatagatatatagatttataatctttaataataattaatgcctttgataataatttaagacaatatttgatcttgtttaaaaagaaaaaagaaagagatatttgttcaaattttgcattattttcctccttggttttctttttctttttgtgaaaaattcatcatctttattaattgcaattcaaagtgattacatgattaaaatctagagtaacatcactcctgataacatgatcagcaactaaataggatgctcgagctaagaaatgagccactatttgcagaacgtctaataaaattgacataaacatctcgcaagtcattaacaacatcttacaatcagaaataatactcctaaaagtataaaaccataggaatagagctacgtaatgcttgcaccacagtaagactatcaatttcaatgacaaccttcctccaatcttccgtttaacccaactcagtgcctccttaacacccaaagcttccaccatttcgggttgcagcacccctgaccgacagcaggtaaaagctt

SEQ ID NO: 302405 - DNA, 4413 bp, Cannabis indica
acatcacaagttagaaagagatgctccatggtttcctccccccctccacagagaggacactttgaatcatcaatcggaaatctcttgctaatgactgctcgaaccggaagggcattagagaggatacaccaccaaagaatcttttgacgctccaaaattttactattccagagtttattccacagagaaggagcaacgtcgcggaagggggctttctccaaagcttggacaatataagctgatttgcaagagaattgcccattactctccaaagtccataaccaagtatccttgccactacctggaggacatccatcctttagaaattatattctatttctctttccttaatcggaataaggatacaaaatccagcacatacaaatacacctaaattaagaaatccgacgtgtcatgccacgtagtatgccacgtaatgttagccaacgtctctcattacccgagcaacagctaacggataagaacagaaactcagaaaaggaaaagctgagagaaaaagcaaaagaaaataccaaaaaggaaaagaatggcagcaacatgttcaattccatttccccaaaacgttttcagagaccgtttcaactcagccaaacgccactactgtctcacccaacaacgtttctactcaccatctcgtgttctttgctctggcaagtctctatattcatacatttctttttcattacacctttattgggtctctcttatatatgaattttatactataaagtttagaacttgggtactaatatggatggaaaatgaaaattttgtgtttgtgaagttagtagagatggtcatccggaggtggtgaaggagaattcgtctcatgtaaaccaaatcaagaatgtggcttgtgggattctggctgtttgggcagtcagtactgcctcacctgttgttgcagctaaccaggtttaaaacaatacatttcactgtatgggtaattaaatgcacatttggtacctagtttgtgttttgttaaaatataatgtgtttttatctaaatacaaacttggtactttctaatcaaatttgattaaaacctttttataaatatgaccaaattgcacatgattcatgtgggttttgacttaatttaagtcagcttacttgtattaataaaatttatttattaaatttagattttagggtactaaacatgtattcaaaataccaagcattattaaaaataaattagtagcacttgttgtgtcgttgtatggatgcctttgctgacattttttcttgcttgggtcaaggattgaatcccaccgtagccctttttgaagggattatgcttgactttttgaaaggctagtttgttttagcggtgtcatgggatggaaaccatgagattatcgtttaaaaaggctaattaaaaatttttgctccttgaactttgacatgtactaaattatgcccgtgaaaggtagttaaaaatgccccatgaactattgagattgttagatttaaggacttttgtttaattttagtaaaaaaatctaacatggatgaaagttcagggggtatgatttagtacatgtcaaaattcgatgggcatgatttggtagatattaaagtctgggagcatgatttaatacataaacaatcactgaaatataaaattaaatgaaattagacaaaagtctttaaatacaacaatttcaatagtttaggggacatttttaacgaccttaaaagttcacggggtatgatttagtacatgtcaaagttcagaagacaaaagttttaattagcctaaaatgacctatgttaatctagtcagtgtggagaattgtagatagtggggttatcaagagtgtgtggaatgagctcatcttgtaaaaagttatcaaatcagtgttattttgcatattgatttagaaaaccattttgtcaagtattgaaacaagctagattgcaaagcaactatcataatattttgccaaacaccttaccatgcagttatccaatgattagttattagaagattaatgttatgattgtgtttttggctgaatttgttatgttgaatggcagagactaccaccattgtctacagaggcgaatcgatgtgaacgagcatttgttggaaacacaatcggtcaggcaaatggtgtgtatgacaagccactcgatcttcgattttgtgattttactaatgacaaatccaacttgaaagggaaaaccctttcggctgcgctcatgtctgatgccaaattcgatggcgctgacatgtctgaagtggtcatgtctaaggcttatgctgttggagctagcttcaagggtaacacaactattccttcatgatattttgattcaacaacataaacacatttaaattttgttaaattaacaatgtgacaattatttattagcttaaagtaacatacaaaataacttctaaggtcgttcctacaactcaaaaattgcattacacaaccccgaatttcacattttcatgttgttagtttaacaaaactcctcatgaaagtcgtttaaggtggctctgtaactttaagaattggtggtctgtaattagtgtgctattcacatttttatcttttatactaattttttgatacaacccctttaatttctgcatgtaaatttgttaaattttatatgttgtctttgcttaaattggtctattttctaacaaatcaagtagtaatacttgtactcttaggccaaagcattttcagagattttctagttgaaacttgaaatttacacatcaaatgtatgctatagggattggaattcaataagaatattaaattgctttcatctattcatatgtttagatgttaatattgtaattgtatatgttgcaatatccaataaaatatgaagaaatagatcccacaaaactatacaaacatgtctcactttttaagtactacatttcatttttatgtgccataatgtgcaatatcaaattgaaaaatgtaaaaaagagttaggtgttagtgagttgaatgaaaatgttgttgcaggtgttgattttacgaatgcggtgttggatcgggttaatttcggaaaagctgatcttgaaggagcttcattcaagaacacagtactatcagggtcaacatttgatgatgcaaagttgaaagatgtagtatttgaggacaccattataggttacattgatcttcagaagatttgtagaaatgaaagcatcagtgaagaaggaagagctgaattgggatgccggtgaccattctttctttcattgtcctaaaacaacaacactatatatgtatctaagtaagtagatcttcttttcaagtaatcaaaataaaaaagataacaggctgagagagtgatgttcttaatcatagttttgattatgtaaacccaatttgtgttttggttcacttatatgtgtccttttgttttgacaaaatatatagaggaatgaaatttacaatttgtcatttatatataatgtgtctctgagtattcttattagacacaagagattacattagagtagttaagatttatttatagagtaatttacagtataaatacttaagtttaacttctagttgtaaataaatactaagtttaatttttgacggtaataatacttaagttataattctgaaatttctgtaggtatgttgatgttaagtattaagaaaatgacacgtgaataatgacggttaggtattattaccgttaaaaattaaatttaagtatttatttgtaactgaaagttaaatttaaatatttatgccataaattgttcttatttataatatatgtaatatttttttttctcaaaactttatcaaaaataatgaattatgtgagatttaatattaaattgtattaatagtggcattatatttcgatactagtatcagcaattttcaatgtctttaattattaggaaaaataaaaattctaaaatttataatagaatttcttaattttctcaaaaagttgataaaaatttaaaatttgcattatgatattaaacatatatatttttttctttatgcaaagacattttcattaagaaaagaaagaaaaatggttttattttatgaattaaaatattgacattttggctggtcaagcacatagtggtaccatcatagtacctcccataataatcagaatcattaatcatgcatactttgattatataagttggtgttttttagtaatgatacaaacctcattatatcaaatgggttggacaatcgagtgtaaaccaagtaattatgtaaagtcaattatagtattgcaagagttgatattatttaatgggtaatgaggatttttgttccaaatttttactttagttaaattatgttgtttaaactttttaagtggttaatttttttatttttttttgaactattaagattg

SEQ ID NO: 302406 - DNA, 4654 bp, Cannabis indica
tttttttttttttttctagaatggctcttaaaaattttaaacttgatattacaaacagagaaaaagaagagagaatgaaacagaatattgaattattatcactgaagaggaaaatacaatcagtgagctttatatagctcaagctcacttaaacaattcacaaaacaagtaaaaggaagttacaacaatttagttaactgtaactaaccaataactaacaattaacagctgaccaactaattattctcaacactccccctcaagatagagaggtaatgctcattaatctcatcttgtctttcaaattattgaatggattaagaaaagagccttagtaaagacatctgctagctgctcttttgtgagacatggctggtttcgattacaccttgttgaactttctctcaaactaaatgacaatctatctcgatatgtttagttattttgtgaaaaatagggtttgatgctatacgttgagcaactttgttgtcacagtgaagtaaggtagggccattatgttcaatatttagttctttaagaactaacaaaagccatataaggtcacatgtcgtgtttgccattgccttatactcagcttctacatatgacctagaaatagtttgttgtttcttgcttttcaaaaatgacaatgagtctccaaaaaatatataaaaaccagtagttgatcttcgagtatctggacaagttgcccagcctacatcagtataggccttgagcttcctttctgatgttgcaggaaaaagcagtccctgcccaggataacgtttgatacactacaggactctttgagttgctttcatatgtctagacttaggaacaatcaaaaattggcttaacttttttacaaagaaggatatatctggccttgtaatggtaagatattgaagcttaccaactatcctccagtatagtttaggatcttccaacttatcatctttttcatcttggcccaactttaggttagcttccattggagtagtgactggtttgcaacctaaatgcccaagatcttcaagcaattgtaatgcataaggcttttgagatatgaaaatccctttagcagatctagccacttccaatcctagaaaatacttgaggtttcctaggtctttaagttgaaatctgttattcaacttgacttttagagcttctaattcacttaaattgttgttagccagtattatatcatcaacataaatgagaagaataataaaactgtccccaacatgtttcataaacagagtgatgtgtggctgagtgatgaaaaccttcttcaatcaagacactagaaattttttcaaaccattgtcttaaggcttgctttaggcaatacaaagatttgttgagtttacaaattgcattaggtgaaatctcccccttagaaatatacccttgaggtagagtcatatacacatcttcatgtaaatctccatgcaaaaaagtattactgacatcaagttggtgaagataccatccatttatggttgcaagagctaacacaagcttaacagtaaccaaatttatcataggagcaaaagtatctgtgtagtctattccctcttgctgattgtaccctttggccacaagcctgtccttaaaccttttcacaaaaccatcagcattaaacttgatcttataaacccatttacaaccaataacataatatccatcagataaagtaaccactgtctaggtgtgatttttttcaagagcatcgatttcattatccatagcattatcccattctggtatacccttagcttggctaaaaaattttggttcaaaatgactggaaatggccaaaacaataactcaaaaatggagtatcaatctgctataatcaagaacttgagaaataggataaggagtaacattggtagaaacctgaagaagttcagatgaattgttatcaataataatgataatcttgtaaataagatggcttattcgagattctaacaggtctggtatgagaagtagggtcagaaactggtttattatcctgttgaatatcaacagaagtaatatcaacaggagtaatagcaacatgagtaatatcgatagaagtaatatcagaaatggagaaaaaataatgatatgaaccaggtaaaatttcagtgttatggaaaggggatggtttcatgaaactgaacatctttagagcaatttttttttttttttttatttagagttgagatctaacaatttgtaggttttcatgccaatggagtatcctagaaagatgcaaggagcagctctaggagagaatttagttattgacatggataaagtagaagcatatacatgacattcaaaagctcttaaatgatcataagcacgagcttttgattttagtacctcaaaaggaataatattttgcaaatttagcgtaggtgttctattgattaagtatgcaacagtagcaacccacttattccaataggttagaagaatgtatgactgaaacaagagtactcttgccacattaaatgttgatgttttctctcaacaacttagttttgttgaggtctatgaatgcaagaatgatagtgaacaattctaagagaactaaataaattaacaaattgcaattatttagaattatctaacctaacacctttgatggtcttttggtattgagttttaattaattaaatgaaatttagaatgacaacttgtgcttcagctttagttttaataaaatgcacccaagtgtatctagaatgatcatcaacaatagtaataaagtatttgtgtccccaatggtaagagtgttatatggtccccaaatgtcaatgtgaatcaaatcaaaacattctttagcaatgttatgattagaaacaaaggtaatttttttttgtttggcataatgacaaattgaacagtgaaaattaagacaaggagtattttgaaattgtaaaattttattcaatgaatgaagtttgatacaagagggatggtccaatctataatgccatatagtatcattggtaattcttgaatcaaaaactaagaaaaaaaaaggactgattttttgtttaggcaatttcaagtggaaaagttttccatgtctcttagctatcccaatcagttgaattttcgaagtgtcctgaataacacaatgaacataatagaaaatgaatatgcaagtactagattcaagcaaagaagtaacataaagcaaattaagatgaaattctagtacatataaaacgtctttgagggtaagagttggggatagcacaatggtgccaagacacgaaatcttagtagaacatccattgggaagtttgacatatgagatggatgcatctgagtaagtattttgaaacagagcaagattgtgacatacacggtgaatagtaccagtatcaaaaatctaagaaaatgcagaattagaaaggattttgccagaaaattgagatattgatagttgagcaggttgggatggattatgttgttcaaaaactctctaagttaacatattcatgagcttttgacattgagcaaaggttgcctctgcctctaatgtctattgtattttaactttttgcttcaatataatagcattttatttcaaaaaaattaattttaaataaaaataaaaattaaataatttggaccaataaaaaaataaaatgaaaatagtgatgtaacacttaaaaagttctagaattctaacagaaattatttttactgaccaaatttttatttaaatattaatttgtaaccatgagttatattagatagtatttttatcacaaattactcttatattatttagttgttttatgggttttggcatactatatggtttgacatcatgatgtactatagatctagtgttatgcaccaaagaatatccagtctaaggatcagagttttgaaaagcatcactacttgaaaatgaaaattaatcaagatatacaaacctttaataacgtgacaatttattattagataaaaagagaccccaatatgaaaactttttcactgccaccatatgaaaattcaatgagatatatcatcaaatttctctaatttaataatgtagtaaaatgtaaaaatataagttttgaaagagttgagactgagaggctgcaattatggttttcattactaatacagtacaagaagccaagccaatggattttgcatttgtgtggtgtggaaggctccacgccattggcggttggcttattattgttattatttgttaatggggtagccccccgttgttgcatgtgacaattgttgcttaaacttaggtaacactttgtgaacatggcaaactctcattggttagttcacaactctttggtaatggtagcttagctcctccaatcctttatcctttctttaacatatttacacaattaccccttccctttccttacccttctttgtattctactttagtgttgtaatactagggctgtactgtacaaaaaaatttgtaaaccgcctaaaccgaataatccgcccaaaccaaaccgaaaaaaccgataaaaattacaaaccgaaataacccgataaaattacaaaccgcccaatctgttaattgggcgggttgaaaataggtccaacccgcccaattaaaccgaccaacccgattttgcactttttttttttt

SEQ ID NO: 302407 - DNA, 2951 bp, Cannabis indica
tcatgtcttggcttttgaacttactcctcagctcttctttgctcctacaatggactacaaatggtttcatggtaaagttgtttctgggcgtgtctacatgtataaccattaatgtatggattattattactagctacttgagtaggaaactagattattatgtgcaagatagatagggttctctcccttggtttatatagggaatataaaatgctaattaattaaagagaaatattgtataagaaaagaataatatacattagactataatttaacaattattataaagttgggaggagtgctgccttaattagttctttgagcactaattaaagtagctgtatggaaatcaataacagattaatagataggtgcggctttgagagcctctagaagtttctcgttttggtacctttaaacaaagagcattgctataaagcattagtggtgcctagcaccttctcgacatgtcacgttgcgattgattagcgatattccttaaaaactattatattaaattacatggctaccgatacttagttggaccaatagcgatactgacacataggagggtgctaaacaccactggtgctctttagcatttatcttaaattaacaaattatatcaattgtttgtcttaaacttctatttacttgcattaatctaaatattactatcaacaatgacttgtcacaactaacaaaatcaggtgtcttaaaagtgtgtcatatttatacaaaatatatataacagagaatatatcttataatcctacttttgatgtggtggtaaaaaggattggtaaattaatattggtattagaatttttgccagtacaaaataaaaaatgttggcaaaaatgacttttctcagcacgtaaatgtactaataaaaataagacttttacaattgtaaatgtgtgctggtaaaactttgacttttttgacagcacaatttgttttttaccagcatagtagtaactgcactgtcaaaaataacatttcttctagttaatataaattgtttgaatcttgacttagatcggcatcctgaattattcataatcttttaaaaaattacaaaaatctcatgtcatttacggttacatgtcaaaaatgttttagtgcctatgttacataataaatatatacatggttcatttgacaagtcctataaagaatgatattgtaataaataaaaaaaaatttttttctgatagaactttatatatattgtatttattttaatatttaatacataagacataattcgtattagcttgtgttataatagagatgatctcgaaattggggtttgaggtctaaggatttgaagtttggggctgggggctggggccaggggctagggttcaggtctggggtcagggtttgggttcgggtccgagacagggatcgagatctgaggatggggtttaggttaaggttaggggtcgtggttaaggctgagtctgggtccgggctcagggttgggggttggctccggagtcagggtgggggtcgaaggccgatccaatgatgggatgggagttgggtggagtctgtgtcggatctagggctgtgatttgggtatggagctgacatctgggcatgtgtatgggtccggggttagagattaatattctcctgatatctataactaactgagtctttagtcattagttatatacattagatttatattcacttttttataattagatatgactacggtctttctaattttatgggaattgttttacaaatacataaaaataataaaaaaaaaatatgattttatttataaaaaatatggtcttttgatatatttttatgttgtatttttgttaatttattgttgattttttgttatttgtatgttattttttgttgtttagatattattttcttgttacttttatatagttttcatattatttttgtgttgtttttataaaacactataaaatgtaaaaaaatatttaaatttaaaaatatagttttttttacaaaaattaataatttattataattattacactcgattggaataaaattcatataatctcggattctaaagtagcagtccaaactttggatcagaggaagcgcattatttactggcaacttttagatttatctttatctatcttagatcttatcaatagttttcattgttgtaatcttttctttgttaagcgtgtactagtctttctttttagcagaaagagctagattctctagcgattttgcttagtacgtttttttgggaaaatggttaaggtaatagaataggtgagtgtatggtaaggtgcatgaagttctatctcaaatccaattaataatgagagtagtagctcatacatcttatatatagtatttaatttcaattacattatcaatattatgagactctacaaacaaagagaaaattttccctctgatcattcccatctttctttcctagtaattgaacttgggttctttcaaaaaaaaatttattacacgcgataacatcaatgaaaggcttatgaatttattcatttatgctatatgcttctatattatgtgcatttaatttaatataatacaattcctacactgtgtaatcatctacttcatatctttgtcaaatatatataagtagaagttaggtaagtagcttctagtaaagaaattattaggtaagtataatattagggaaatgatcccaagtctaatattttgttgcaaaaaaaagaatatagttttcatttatttcactttttcaaacatgcagtttctaatcagatttagtatgaaaacaaattatattctgcaatcgatatatgtatgggataaacaatgcttatttgcaaaagtaattataaatttagtttgactgctaaaatggttatatatatactaggtaattgttacgtgccaagccacgtagtgttagttttatttaatat

SEQ ID NO: 302408 - DNA, 1780 bp, Cannabis indica
tttttctttttagttttattttttgtgtgatggtctaataatgactacttcaggatgcatgggctatatgtaggatattcaagaagacaaactcaatggcacaaagagctctttctcattcttgggtgtctagtcctttacaaggaattattacaccaggggaattactcatgtctcaaactccaaactttactcattttagtcctcaaaatattcacctacccaactcaacacccacttttacagctcaagaaatctctccttacaagcctcctattaactcttttccaaatggagagtttcccaatgaatttatgttctctcctccatcagagggacaaacaaagtcaacaacatttgactcagcttccatgctcttaatccctgaaagtacagtagatgagttcaatggcttctcagttaatatgcatacaaccatggagacaatatcaccagaagaagaagacttgagtggtttaaagaaaaacccagaagaaattgaggtcaacaatcaatggggaggcattagatcaattggatttcctttcaatttgccacaaaatgatattaattggaaaccaactctgttttgggacacagaatcacctagtgatataatgtccacaagcaaatgttacaactagttaaaatttgattttgatgatacagaaaatcttggggtaccaaaccggtactagtaatgtagtgtactacccttttgagccttgaattaaattgtttatgtaagataagattatttattaggttcattagtacagtactactggtacctgttaggtaccttaattagatgatttcttatcttatcataaaaagctaattttgtgcttgttgattatgttttagaaaaaatatgttactgttttctcctattcttgtacagttgttgtctatatttgaatgtacatgttaggctatttatatgttgtgtttgagtgtgttggttcagttaaatgcatcattagaagaagttttatatatttataaaattttcaagaagaaaaaataaaccaacattttgtacatagtgaccactaactaaagttaccctcccaaaatttgtagaagccagatgtatgtggttgtgtatttataaagataaagaaagaaatcatgatataacatagtgtattcggtaagaaatttggataaagtttattacatgaagatatagctcgtaaagcaaattaacaataatagagttattaaactgtttaaggaacaaaatcttaacaacaacttcaactaagagtctaataaactaagagtctaataagctaccagcgatcaagcataaaagaaaaagtgtgaaatatataagatttccaaactaaataaacatctataagaatccacttaccaatagctatgaatcaccgatctttcaataaaaattaaaaaataacaatctcgttattcaaatagtaaacaagaaaaattattcattctgtttgctttaattaatttattttaagttggggttagtttttaaacttgaaaaaaactcatattttacaagtatttacataaatataaaagtccattccccacctaaaaatttcataagtaagtattattattagacaccagtaatgcacaattacgaagttacaccttgaaaatagttgataataatctaaaaaaattaatacattaaatcatgtgaaactagatactatattaatagggaaatttgattttctatacttagaaaatcaaaaaaaaatttccctaaaccaaaaatttaaaacctaaaaaa

SEQ ID NO: 302409 - DNA, 6460 bp, Cannabis indica
aatttggtcaataattgtatctaattcacttacagactttaggatactcgagtcttgtcttgtcttattcttttacttaattttggggtttagttcaataagtaaattagagaattttccaagggtttatgtcaagatttttaagttttgcttatttagcttacgtttagtcccagatctgaactccttctttttcttaactagttagtgttagcatctttttaacaatataaactgacttttagaacctgtagacaacttttgcagtttacactgagagaactgcttttgaaaggcctctcacaagtggggtggcatatgctgtaagggtcctccactctgaaagggaacaatttgagaagcagcaaggctggactatcaagagcatggatgccctcgaacaaaaccctgttcgtcaagatgagtatgcaccagaaaaattggagcccgccccaattcaagaagaatatgctcctgtcatcttcgctcaggataccatttcacacgtggtttctcttgatatgctatcgggaaaggtaattttctttcatagtttttggagacttcttgttgttaaagtttttggtttgctcattttttgattgaattgtaatcacacagattatgcattgctatatataagcaaaattcgctggcctcaaattcatctttactagaacatttttccttctcttctttaattatatctcttgatttgttatcatatgacattctcaaaacttttcatatgctgtatcacaggaagatcgtgataatgtattgcgtgctagagcatcaggaaaaggagttctaactgctccttttccgcttattaaaacaaaccgcctcggagtaatattgacatttgctgtctacaaaagagaccttccctcaaatgcaactccaaatgaaagaattcaagctacggatgggtatattttcttcaaatcacatacatgttaacagagtcttatctcttttctttatgctctaatttgttgaatttataccgaagattgaaatgggatattttggttcatttgtgatagcaaaagggcattcaatttcattcgaatatttgtatcaactagatctagtggcaattcgcaattagtttatttataatactactgttgttgcaggtatcttggtggggtctttgatatcgaatcacttgtggagaagttgctgcatcaacttgccagcaagcaaactatacttgtgaatgtatatgatactactaaccaatcacaaccaatcagtatgtatggttcaaatgtttcagatgatgggttaaagcacattagccgcctaaattttggagatcctattagaaagcatgagatgcactgcaggtaactgaattaaaatttcaattgtagctttttcgttgctatcatatgtcttctcactttgcattgctataataaggaccaaaaccatagactacatagtaattgttctgtttctcatttaaagaagggttgttcttcttctttttccatttcaaactacatcagtagatatttttgttgtaaagctacaatatgcaattcaacactatttaaaagataaaatgatcaatgtaaattcacaaagctaaatttatttttatctcagattcaaccataagccaccattgccaatggtagaaatatgtacctcagctggaattttggtgatagccctgctcattagttatatattccatgctactgtaaatcgaattgcaaaagttgaggatgattaccacgagatgatggagctcaaaaaacgagctgaggcagctgatgttgctaaatcccaggtatttttaattacagaatacctttctttaggatttttccatgtgcatgtcgatctaatcaaacttaaatcccttgtagttccttgctactgtgtcccatgagatcagaaccccaatgaatggtgtccttggtgagttttgagtttgttcttgatttgttttaatttatgtctatattttgctgcaaaataaaattatgtgtatttaaatctaacattagtaactgcacaaagcttgatatctgacatggtagttctctttataccataggaatgctgcatatgcttatggatacagacttagatataactcaaaaagattatgtacgaactgcccaggctagtggaaaagcactagtatcacttataaatgaggttttggatcaagctaagattgaatctggtaagcttgaacttgaggcggtgcgctttgacctgcgagcagttcttgatgatgttttgtcactcttttccggaaaatctcaagaaaagggagtagaggtaatatatttttccattttttgattcatctcttctctcttctaaatgcatgggatggtattgcaaacttcattgttttgttccttttatttgattgatagagacaacaatcaattaattataacaattatcattatctgaaatatgtcattttgaaacttatatgacactatttgttggacgggcagttggcagtttatatctcagacagggttcctaatatgctaattggcgatcctggaaggtttcgccaaattctcacgaatctcatggggaactcaatcaaagtaagtattttccatgtttagttgacatggaggctttgaacatttagactttcaaaatacattcaaattgcaataccttgttgagctgaacaattcttgtgttttaggcgaaaagatttaatgaaaatggcatgtattggggaattcttgctttctaaattgtgctttgttcaaaatgttgtaaacatatttattttacttgaaatcttgcagttcacagaaaaagggcacatttttgtcacagttcatcttgttgaggaggtaattgactcgatagatgttgagactgaaacctcatcaaagaacacttttagtggatatcctgttgcagatagacgccatagtttgagaggatttagagattttagtcaagaaggatctagttttcaattcccctctgatcaaataaccctcattgtctcagttgaagacacaggggtagggattcctttagaagcccaatctcgtgtttttactccatttatgcaagttgggccatctatctctcggacacacgggggaacaggtattgggctgagcataagcaagtgtttggttggccttatgaatggggaaattggttttgcaagcattccgaagattggctctacctttacatttacagctgttttcaccaatggttgttgcaatgcaaccgattataagagtcagcaaatcaacaaccaacctaatactgcattctcagaatttgaggggatgagagctttagttgtggatttcaggcctatcagggcaaaagtgtcaagataccatattgagcgacttggaattcatgttgaagtagtttcagatttaactcaaggtttgtccatgataggcagtgggaaaacaattattaatatggtccttgttgaacatgaggtttgggatagggattcaggggctcaggcttttgcagtaaaaatttcaaaagacgatatcagtgttcgtccaaaaatatttcttctagcgaattctactggctctcctagagcaattacttcaagtttcggagtttatgctccaattgtcatcacgaaaccccttaggtcgagtatgcttgctgcttcactagaacgtgcaatgggcgttagtaataaagctaatccccgtaatggagaacttcccagtttgtctctccgcagtcttcttaaggggagaaaaattcttgtcatagacgacaattgtgtgaacctcaaagtggctgctggtgctttaaaaagatatggtgccgatgtggtttgtgaggacagcggggtgaaggcactcaaattacttaagccaccccacaaatttgatgcatgtttcatggatattcaaatgcctgaaatggacgggtatgtgatctgtcattgcatttttttttaagcttttgatttgagaaatgatttaagggcaaatactcttaagtcatagtcttctagtatcataagaactccctgcaccttttcactttttttcttcatccaaataaaataatgtcttgtactaattttgctcaccataggtttgaagctacgaggagaatccgtgcaatggaagatgattttaacagtcatgttcatcatggagaaattgtggaaggttatgaaaatagaaggtggcatgtgccaattttagccatgacagcagacgtcatccaggctacgcatgaggaatgttcaaagtggggaatggatggctatgtttccaaaccattcgaagccgagcagctttatcgtgaagtctcacaatttttccagtttacttcttcaaatgggaatatacagggataaactaattgtacctgtgagatgctgaaggcttaagaacaagccagcactttaagaaattcaggaacacttcataaaccccggtttcttcccatgagtaagttcactaacaaagctttagtgcgtatagtaatttttcatttttgagtttttgctgaaattttttgctttctcttctgtctttgtttttcttttcttccagagattgattgctttctggtgatagtgtacataagggccctgcttgattgattggttgggatttagaatgtttcttaatcttttctacgagccaaagtcaaagcagatttaaattttcatgtaaagttactcttctctcctagcctttcaccgaagttggtaaactggtagtagttgaattccagttcgaagagctttgaatccagaatttcttacttggaaatagaaagaaaaacaatgacttggggtgcaccatacaacttaagaaaactaagatgtcacccttttatctgaatttaatttagtgtatctatcttagagggatgatgattctgtagagagaaagattcaattagagttttttcattttgtaagggagcaaagggagaaattgtaaggtgtatatttggttacaataaagaagaaaaatgtataaataatatttagtataggataggagttcatttttccctattattttttccctaacaagattccaaaacaaaaaactttatgttacctcacaagaattgatgtaacttatacagttcgaatgaaatttgagatacttttaattcttgtgtaacttgctatacacgtgcattaatatcagccctcttatttatttatttatttattttgaataagcataaattttagtaatgtaagaaatggtgaatgaattgtgtatattattcttgtaaataacataaatctttacacaatcttagagaaattaaattagaaaagtaggagagaaaataagttatgaaataattacaattgatcgaggttaatcatgtctagcttgtgacaaagataattaactcgtacccaatttaaaatttgtgtagaaatgtctcttaattgttatgcagttttcacatattttgtagagatcaaatcttgttgaattttctcttaaacaatatgacaattaatctcaatgtgtttagttcgctcatggaatacaggatttcaggtatgaagagcaactttattaccacactacaattttgctagtactaaagtcttaaattctacttcagtcaaaagctgatatatccacattatctcacacagattttcatagccttatattctaattttgactggatctggacacaacattttgccttttcttcttccaagagactttaggtcgtgaaaacttgctattgttttgaatattggtcgtggacacgtgtcataatcttgtgatcacggacgcctccacaagtgacttgtaccttgtgaggggtattcgtggtttttactatctttcgcgtggcgccacgcgatacgcttgaagttgcttttttctctccttcttacttggcaaagcctagcaagaaaggaagagtgcatctgacggctggatgacatgaggaagaaagatctcgatattcacgggtcccaggatcagcatatgggacctctcgtttccctaaccattagatcctttatgacctctccaagctgttgatctttttccttttcaacataaaaatcgtctgtgacgacatccttattttttttatcttttttattcaaagtctcactttttctctacaactccttttcttttcctttcctcttgccatcttttgcatgtagaaagcatttgagggtttgattcaacgtctacccgtcattcgcaccgagctttttccaaatgctgctccccttcagctaaaccggcaaagttcttcgtcaaaggaggcttttagctttcaggctggttgcgatcgttgtatcaactggctacagagttttagagtgaactttttggaatccccgactattccttctgtttttttttttttgattaaatcaatgaattgtattgcacaaaacgaattttatacaaactattgttggaaatattttacc

SEQ ID NO: 302410 - DNA, 1414 bp, Cannabis indica
taattaattaacttattagtactaaattagtttataaattacatacttggcatccttataaattagggtgttataatatggctactcataaattagctaagtttatgggtggatgagacttctcatgattagagaatattcctccaccttactattgttgtataataataggtagaggtattttctccttaaaaacaattctaaatatccaactcgaaagactaaaacttgatcatcaagcatcaagtttaagtttaatgaccaagcgattcatagtatacccatatggaatctctcagcataacacactctactctatctcttgttctcaaggcctgtgcaagattgaaagcgattgagaaaagtaggatattacattttcttattaggggcacgagtttgatgagtgatattcaagttgggactgcaattgttggcttctatggtttttgatgatgccagtgaggtgttcgaccaaatgggtttgaaagatattgtcttgtggaatgatatgatacatgggtatgttgggttctgttgttttgagaaggctattaaattgtttatgcaaatgcagaaggagggctaaaaacccaattcacatgtagttgtaggcttgctttcagcgtgtagagagttttatgaggtgagatttggacgggatatacatggttactatttgagaaacgaactgcttgatttggaccccgtgtgggaacttcttgttgaaggttttgaatatgacctggttacaataataggtaaagttcaaaagcctttaaattcatcaaatggacctttaaatttggccagaaatgatatgtttatattaaatgctttgatcaacatgtagaatgactgtggaaatttagattcatcatgtaggttatttaaaaagtctccaaacatgatgttattttgtggaattctatgatgaagctttacatcaaatatagcgtttattactatgcggatgtaaggcgtgagagaagataagataactattgctataatgttgtcttcatattcaagtttagctagtgggatgagaattggtaagagtttacatgctcatgtaatcgaatgaaaatggaaattgaaatttctcttggaaatgcactcttaggtatgtgtgttgaattaaattttgtcagggcagcccaaaatgctttaacagagatgacaggtccagatgttgtctcgtgaaacactttaattatggcattggcttgcaacggattgagagtcaatacaagctttgaaagtataactcaactcaaacacaattagatttattatggctgctagtgatgatgaaactattgggttttatgccctaaataaagcccatttcaatataatcacatttactaattaataaagataaaaaaatcgcattttatgttgcatggtt

SEQ ID NO: 302411 - DNA, 1603 bp, Cannabis indica
cgatccaagaaaaaacggtaatgagttggatcgtgggagtaaaaagcggatcaataactgatcgcgttttaccaattctgatcacgtgttaaaattaataaataaataaataatctttatttaattaaataatttttctttaaacaacccaacccaggtcggcagcggcgcgcgtggtggtccagtgtgtgagtcctcgcccatgcacataaaattgggtaccccttggggcccaaacccatatctcaaacttgcactagttttacacttcaaatgaagtgtttctatcccatgtgggactcctactcacacacttcacttttcttttctttttttttttttgaaagaaaaaattttattaagcaacactaggcttatctgctagtaaattagcagcaacacaaataggtaaacaatcagtccaaatagcagacttctgagccaaacggctccacttagctagactattagctacattattacactgtctagtagcaaaaacaaactctaaacattgaaaagaatcacgcatatgaatggctttttgaaccaattgtccccactccgtaaagttaggagaaacctgttgaatagcatggataatggtgtgactatctgagcaaacttttgctctggaaatagaccatcggattgctaactgcaggccaagaatgattgcagcagcttcggccaacagaaccgagctgcaagcaggagtgaattcaacttctgccaccacaagcaagccctccgagtctcttattactgcacttaaaccgaccccaggttgtcctaccaccagagacacacaatacactaagaccaagcatctagttcaggtttataatttcacctaatatagaaactagttaggattttcgcactctgctcagacggctcaccttgcgacattgttttgaccatataaccttacgaatttgacttcaagtccttcatgaaagttttagatatcgagatctttcaacattatattatatgtgatattctgtgtagtgtagctctagttagggaagttttattacagttacctcactaattacgaattttctattcttaaaatttcctaagttgtccatcacccaagcttgttttctttttgagtttctttgattaccaacaaagctatacatttaaattcttttattctattcgaaattattacataataccttatttaattattttagagtattctttctataagctaataggtatcacatatttacttttaagctctaaatttaataattaatcaaatgactaattttttataagcaattaaatgacaatagttatctataaaaaaaataacaataattaaatcaataacaactaactagctaataatatgtattgcatgtcacatgcccacacatgcaccatacacgcacacgtgtaccttaatctacatgtatgcatgcttgcaaaacatggatgcttaggtacattacatatcaagtaaacaattatcatgcaagaactagtttaacaacacaaatcttatttttatttactacttactaacacaatatgtatatctattctatataaagtgtgcctatataactgaaattcttagttt

SEQ ID NO: 302412 - DNA, 2749 bp, Cannabis indica
tagtgtgtaagactgtgaagaatccaacacctgaaggagagtcgggctcagatcttgataatactctatgacagaaagaaataagagttagagatttagttctgctgcaatcaatgtaaggtttcttgaactttatatgtgtttaaattctattgttttagaaattcatgtttaggatgttaaacaacatacatggtagtaattctagatcttgctaaaataatccccaacaatcatgacaatagcctcctaaacctcgtcaagtttgaagaaaactcctcaaaaatttgaagattcaatgttttgatggtgggtaatcagacccacctcctacaatttctttgtggtcactaagtttgtaacttttacctctgttagagacatgttgtagtagaccttccagtgctcttcctagtagggagttggtcagggtgagagaaaaaacataaatgatgaaaaaagaaagaaaggttcgaattaaatactctaatcccagagacgtaatcgtcagaaagcagaatagtgacacttaacaattgtttgaatatcaaggaggagagtgagatgcctatgtagacggaacccagaggtgaagatccagtactcttgtatgtctaggggatggctccaagtgttgataaggcacttcaccttgttcttcttcttcaaatggtggaaaccgtccttattcctatctttcttgattggatttgactccacctcatagaagaagagaatatcctcaaaaccaggcacctccatctcccttactttgtagaaaataaaaaatcccgccaaaagcctatagcttcgcgggatcagcgaaaagggagccatcccaactactgccacaaactgggaaaattagtctatcagtgctagatgagccccaaaaaaatatggcccctactccaatccccaaagtcctccacgcttaagttggtcttctcgcctttaacggaaagtctgatgcagaatagacagatagtgttatggaatccacaaccattttttgagtcctctagcattctgtagttgctaaatttgttgttgatgaaatttatctcccaaaatggtcctctggcttaatatgctagtgttggctcattgttggcatcgcgatcttgttccacataattggcgacagcttggattcgctctgtattctagtttcctcgtccaaaaatcactgggcctccttataaactcatgagtgtcgttctctaagtcttacgaggtcgatattgcgactcgaacaaatggagcggtgttcaaaaaagctttgattggagttgtagactctttgattttttctaaagaaaccttattcttttcacagcttggcatggtaaatacctagctagttgtgtaattcaatattggggatggacattcaccagaaaagggtttctaggtttacagacaatttttctctttaaaaatttgaaaaacacaaagaaaatggctaaagatccaaatggtcgggcctctggctatttctaagaaccatggcgatccgtctgtctccgatccaagggctcatattgaatttgagaaagcacaattctcctagatccaacagtcgaaggatgccaaagatttcatttgttgccatttatggaaccagggacgtgtgcatttatgatgatatttgcctcgggtaatttgctgacataaccagtcattagtctgtaacccaaggcaacacacgtttctttgaatcgcgtgacatacatggaccaaagaatactcgacatgtgtactccaccaacagaatatgaagggtttaggatcttctgctagatttcatcatggaatctcaaaagactcaaatcgtttgtggccccagattcgatgacaaatttgaatgatggttgcaaacctctaggactcttaagtcacaaaggcttggagtaaatgttatctgtattttcgaataggcaacacgtgtgtattcaaataagcccattaagcttaacaggcccgttcactaggactactaggttgattgaccgcccaacccttgagcagagccaaacagagtgtccagatctgatagtttcctcttagcgactaagtcgaacatatggatccaaaaggtaatcacacatttattaaacaagcattcaaagaggtaaagtaagatacctttaggggtcgtccagaaacgacaataaaaaaggcatctagaaacattcaagtgccacgaaccatcctacgtggcatacctctaacaagaattctaagaaatttggcggcttgtcccctgtgtcaggtcttgaaaaggcacacaacaaaaggaaatcccctttttgggccaacatccactactctgatattctttcaacaatccaacaactcatgcaaggctatcactgtcaatagtacgtccgcatacggacgacgatttccaacacattgggcctcacctaaccaacccaaagatcaatattaaaatgtaatctactctatcaatgggcttcccgtttacaaagggaaacttacaaaactactgtttttttaccaaatgttttcaaaaatactgggacacgacaaactgtacatttttactgtccaagcctatttttatttcttttatactgcccagacccaatatatttacttttatactgtaaacagtaacaaaacacaaacggcacctctccttcgtggttggggacaaacaaatcaacaccggaatcatagaaacaccagaaaaaaaaaccataaaatctggcaaagaaaaaaa

SEQ ID NO: 302413 - DNA, 2174 bp, Cannabis indica
tgttgtgactaaatctatttttaatcataatacttgtcgtaactaaaactaaattagtgacattatatctaaatagtatattttagtaaataatttttattgtcactaaaagtcacaactaaaaagttatcactaaagttaaatttttttttagtgtcaacatgtaatttgcttggtaaattatttataattttttcttcaatattttgttttcaatactagtttttcttcataaaaaaaagacacaacaatagtataatattactcttttttttcaagaaaaaataatactaatactcattatttttactaataaggtgatcaaatcaaccatgtcattgattagtagtataataatttcttttttgtttagaaagaaacagtacttttggctgaatggtattactattaatcgacgaaaactaaataattaattaatattttaataaatgcatacatatataatagtgaaaattcaattctttatcaatattttaaggtaaagtatagacaactttaattaaattatgtaaaacgagggtacaagatagcaatattagattatatacaccaaacttttttgttgcatattttattgaaaataaagtaagaaaattatctaaaatattagaggggaataatcttgttagacaaataaaagaccgtatctcagttggctataaaaaattaaataaaaaaattctatcaatcattctcaagagcaatatttaattattattcttataaatctagctaaaatactgatcccaataatccccaccttatactttttagtatttaatctcatatacttttgtcttctttagtatctaaataaataaataaataatttatttcttgattttctctcccactcatgctgctatatatatatactataataatttatatatttaaaaatatatttaagtgcaataatttcccatgctagcttccatgtgtcaaaagtgaataatgtgcttaaagacaaaagtcaaagggaagagagttttaaatgactaatttaaatggatcatatatttgttatcttcatagctggggtataattggggttaaagattagccaagtgttgagtatcttttaaattatcagcttaacccttccaaaactatagtacaattaaacatgatgtcatgattaattaggtgaattattaaacttacatgtcaaaatctgtataaaagttagactttatgatggtttttctcccttttttttttggaagtaaaacttttttaatgaatcatagtatctttctgaaactttttcttatagcaatccagagagaaagagagtgtgacttagtaaatttagaccacttgagaactatctgaattgttttagttccaacctcaatatctgtaaataaagatctaatatatacaacatatatacttttagtctcacctaattattaattagtgcatcccaaaataaaatattgaattatatataatttatgtatattaattatatgtgggcaaagaatttcgagtacatgaactacttaattattggtcccataaataaacatttaaaagaaaagtttatttggacacccaattcgatcataggctaaaggctaaagctacatatacactggctatagtcactttcactttatttttttttaatgttactttctttcaagcataagaaattaactttataatcaattagaaaaaaggtataaatagttataattatataacaatagtctctccaaaactcctatattttttttaattatttgtccaggctgaaaatatgtgctttatttatgttttaaaatcatttgttgtttttttttctttgcaaggaacccaattattgtttaggggtaaagtacttatctataaaacatgtatattaatttgcaattttttatttaattaatataattgaaataaatatgtttagcatttcaaataaacattaattttcttattttatctttaaaaatatatccaaaaaatttaattttatttaatttagctcacgcatttagattagaccatacattattcttttttctataacatttgaataatatatttataatacataaataataaaatattatatatttatataatatttatttatctttagacttacaaatgaacaaaatatattataaaaataataaaaa

SEQ ID NO: 302414 - DNA, 3071 bp, Cannabis indica
aaaaagaaaactgatgaacaactgaggcccttattctcctctaaatcccagagctagtgaacaaatatttataattaagaaactgaaaagaaaccaaaagttgaaatgaaaacaaaagaacaggatcatatacagtcttaatttgaacaagtgtatgttgcaaccaaacaaccatatataatcataaacaaaagggcatcaacaacacacatatacgtgtgcttcaatgccctagtataaaaaagctcatctcctcacttctccatatcatcaaacaaacttccaatatcctattttaccaagcaagtcggtttgtgggtccctatttgcatgagatacacctccacacgtaacccttgtgcgtatccacatgttttttcttctcaattatatatatttatttactttgtgcaaaacttctatttctccaagagtgccacccttagagcattctatataagtccattctatagtcctcacacactacacactgtttataggaacacaaggtatcttgccttgagctcttcaacatgataagaaaatacaaataaacatctcctctgcattctttctctctatatataccaatcgagaaacatacaatacagacacattgagttagaacgagttgattttagaatactgactaaaattgttcaaaatactgctatatatggcccaatgatgggtctaattggagctgcttcctcctctgtttgttcctccagtgaaggtgcagcagctgcaagagtgattactaggaaaatggggtaaagagaagagcaaggtgggaggtttcttggaggtaaaccttgagcctatgttagtggaagtggagaccaaagaagaagccatagtggctccgggtgaaggaggaacaaaaaggatcagcagagtgtcgttgtggttgcttctaaagaatcggaagaaggcagtgacgacagtggcctaggtgatgtcccttcagtagtttcaatggagggttttctgcaatatgatgatgaggaatttgaagatgggatgatttatgagtggaactcttggatttatgagcaagaggaccgtgcttggtgggggaacttgtactgggattggatttggtatccctattctgatgccattcgcactccaaatgggatcaactgggcttcgtatgatggagaagtaaatgactgggaatttaatatctgggagtgggcttgacttgacaacaatgacaagtataatataagttctccattagtgtaatgtattattaaatgctacaaatattactgttaatttttagtgttatatttcacttatgtctatattttctttcagagcattgctaattatagcaatcagtggtgtctagcaccttctcggcatgtcacgttgcgatacgttagcgatactctctaagaactattatattaaattatataggacccgatatttagttggaccaataacgatgctgacacataggagggtgctaaggaccattggtgctctttagcatttctctttctttcatccttctttaatttgagaaatattaagaggcatctctatgatcacaataggctaggtaatataatggtattggtattaatatcaattcgattatatctagatttaataaataatattgaaactcctaaccaattataaaatatcataaccatataatatttcacattttaaaaataacaatgcttttaatttgtatcttctctttctttcgaattaaaatatcaattaggtcattaattaatgtatgtttaagtatttgccattcttccacaacattcttcttgatcattttaatcaatatgctcaacagcattgttattttggacatcttattaaatctaaaaatttatttttatgaactataatttattttcttatgaatttaatttttatttataattttaataaaaatgatataatataatgtagcagcaacacaaatagaatgtaataacaatggttcatatttttttaaaaaaaaatttaaattaacatgttaaaatagcagacctatattattgtaattttttattatcattttcaggattatgaaagatcaatttattaaattaaaatatatatctaatctgatattaaattatttcagtgatacaataataagatagtatatacttacatgtatgttatttaaaatttttgttcaagaactatgacctatgcattattatacttaatttttttggccttttgtttttttgtttatgcttttatatgttaagtttatgccttatattacacattttgttattatatgaatttgaataattggaaatatatttaattattaagttatttattattgataatttatagaatatataaatattgaaaaatttcatattcacatatgaggcattgatcttgtaacggtacaatagaattaagatcatgtgctataactaatagtaagcaatagattaattaaaatacataattttaatcaattgttgctagtttgtttactattgcctatcattccgtgcaagatattttgatgaggaatgctaaggagacgtactctctctataaattagtgacagatgtcatcttttgagattagtgtatttgtacttaataattaaacataatattattgcattattacgtttatgtcatttcaataaaattatcctaaatagagttaaagataaatatatatcttaaacaaaattataacaccatttaaaaaaactaaacaagaaaaaagcaaaattgtaaagtatgattagtttatttaacaatttaaataatcatataaatagtaattaaagctattttatttatacgcttttttacgacattttttttattattattattagtttaatttaaaacacatatcacttatgttttgtttcaatgtaaaaaaaataaataaatcaatataactatatattggacactaaataaattagaaaataaaaaaataaagaagagaagaatatgaattgtttgtatttaaatttataataatttggttgacaaaaaattattaattagataagtaaatagatataaatagaaaaata

SEQ ID NO: 302415 - DNA, 1371 bp, Cannabis indica
gttttattcctaacaaaatatatcatctgttatcccaaatttggcactctgacgtggcatcacgagaatggtgacacgtggactctacttagagcatctgttcggatcaacatgccgagcaggatgcctcgctggcatatccataatggaatactcaacgagccgtgcagaatgagcaacacttagcgaattcaactaaacgcatcgtgagtcaccagctcaatccctataactcagggatcaacttacgtggatgtggcatacacacgatcccactatcagtgtattcagcctcaatcccacgatccttgcattcagcattgatcacacgatctttctgtttatgcgcattgtaacgagagaggaaactcttcctcctcaagtttccagccctataaatagtgaggaatgttcactgggcaaaggaccgagaaattgtacgccgaaacgctataagctaaggctatctaagaattatatattcagagatattattgtaagagctataagaaaaggaatcttcttccttattcttaagtcaatacaactaacgaggattaggctattaccgaactgctcggggctgaacctctataaaatttctgtgtcttattattgctttactacatattcttattacgacatatcgtttatcgcttatcaaaaagactcattgtcgttggctaaaagcgaagtcaacatcatcattcatcatcaagtatattattattagtcatgattaactattttgtaaaaatagctaacaagatatattaatatcaatatgtgtaaacttaaatttaactgctaaagattaaaattagttcataattttatgttatatttacattatatcacttattcgagagtaatctaaaagaaataacaattattattaaagaccgcgcaaagtgcggatttattcctagttgtttagaaaaataaagttattaagataaataatgaaagagtgatttgacaacatttattctttaattttggaaaactcaatgaaacaatgtatgcgttttttaaaatttaaaggaaacattatatagcgagaagtaaaggaaatgtaccatctaaaaataaaaagttattaaataaagacaagatagaataacttagaaaaactaaaacaaagcattgtggaactttatcctagtattcctacaattcaatagtctgaatgttgaaatgtttgtattttgcacttatcattctttctagatcttcatacaaattgtctattttttagctaacaatttcttcgtagtttttggaaaaacaagcaatgattttgcaaaattaatttttaatattgcttttatacttttaacaagcgatgtttttgcttggaaaaaaaaaata

SEQ ID NO: 302416 - DNA, 2852 bp, Cannabis indica
aatttttaacggctaaaaaagttcaaggggcacgatttagtacatgtcaaagttcgagggggggggggaggggattactaattagcattttttatttttacacttcaaaatagattttttttatatacgaaaattttcatagcaactaacggagtaatttaaatcgcaactaaaattcacataaaaactactggagcaaccatcgcagcaaccgaaaaaatagtatatggggtaatttctcaaaaattactatttttttttaataaatttatactaattatttttgttggcctctaggttgggtgagtctaggtgcaggcttaacctgttttagctcaaggccggccctacatccctccttttgcctcataatctcagtagtgtaagttgtttaaaatttcaattctctatacaagttggggcaatgtttcaacaaatgaagtttaacttccaaagaccttttgtaaaggatagtccttgccactgctttccattgtgacaaaagcaacagaatcatgtaatatggtgtggctcttgagaccggcattgtgaggctcaacgatagcatatagcatagcaacagaggcataacaagctttagtaagaagtaaaagcctctaggaaggtgaaaccatatctcagacattgatgtgaggaaagccactgtgttaaaagccaagaaacaaaaccatggtgccatgtattggaaaccaaagagggagttactatgcctaataattccaccaggtgggcttagcactgcttggaaagttgttgttgctgtcaatacagctaccactagaagggcatttctattttcatttgacatacaagattttctgaggtaagtggatgttatcaacttttcaagtgttgacatctttgtggttaagaattctgctaagattgttactctaggaagtgaagaagctcctaaagctccactttggtgtagcagattctttatgtttgcgtcgcacattggttgttcggaaatgtccagagctgtcaagtccttgaaattcttcgcgtttatgtcaatcctatttattagtaatttgaccatctgtattgttaagaatgaagaatcatagttgaaacagtcatgatgtgtaatgttggaatggaacaagggaaaacaagaacagctaaatagattttctttctatctgttgagactagcattgttttctttttaattacatgttatggaaaactagagagcttcctacttctgatctctatgacaaacaccttgtgaaatatggactatactaaccttttaacagtttaacttttgttttcaacattaaaagttcttcaaacaatttatgatgagtctttgttctaattatttttaaacacactagcataatcatttatccacgaaaactagggttgcgtttggttggagataataaaatggaaccagtgttaccaacaccttctataggtggtccccacgattggttagcgatattccctaaaagttattttcttaaattatatgagacccgatacttaattacactaagaacggtatgacaccgagaaaagtgttaggcaccagtggtgtcttttaatgattccctttaaagtattaaaataccattttggtggaagactattcaattttgaaatgaaatgatagactattctaatgcaaaatatattttttgtttatgcattttatatatcattccattctattctcattccttcaaaccaaatgcaacctaagttatttaatttaccttcagcacaataaaattgagagaataattacttgcctgagattgatttctgtatgtagcaatgtgcaaagcagtattgcctttattttcagtccattgaagaatcatttccataccaacaagctgaagccatcctaataagacttcaagggcttgacactggtcattctttacagcaatatgaagagcagcttcttttcgaatggtcaagtcttgtatcgattctggacagctagccaaaaattcagccaaaagaaaaacattgcctgtttcagctacataatgcaagggagtcttagcttcccttcccttgacgcgaacaaggtttctgtctatagctaacagttcaagtgctgtctggaatttgttgttatgtaaagcaaggtgcattgggctgaagccatgctggttttgcttccatgaaaatgttggctttaatctcatcatctctatggaaaaatggctatgtcctgctgatgcagctatgtgcataggagtatcaatgaatggtatttgatcaatgcgatctaagatacatggatcctcatttatcaaatcataaaaggcatccatgtctccctcttgagctgcttttttcaacctctgatctgtcctgtcactaaaatagaattagtcagttgaatattatagatgtatggtaacagtcaatatgtaactctattatgttcatgacaatgcaacaaagaaaaatttatttcataatattagaaattgatacacatttctacaatactaaattaagtctagaattttctacacatttgtagaaaaacatactctaaacttttagataattgtagagtaatttagaattttctagacatgtagaaatccaatagaacataggcatttctagaaaactttagtctagaagtttctagttatgcatgtttaagaaatatgtagaaatgtatggataaaatccttgaactagaaagatctagaagaaataattctagccataaagtgtaaggggtgagcaactataaataccccatcaaacttccaaattgtaaccaagcttgagtagccaaagcaagttttttactactagcctactaccttgtctcctctctt

SEQ ID NO: 302417 - DNA, 1694 bp, Cannabis indica
tttttatcctcatctcataatcacaatgtctcatgaatttagtctttgtttagtgtgtggtgaacaggaaaaaatgctgaatacttgttttttaaaatgttaatagagatgtttggcaatgataaaaaatttgttgggatggaaatcacaagggaattccctgctgtcgattttgagagggagaaccccaacaaattcttcttcttttaataaacaggtgtataccatggttattgcttctctagtatattatcttcagaaaaattaaaatgaagttttttggtttcagaaagtgatatgtttgccgacattgactaattgtattatacataatattaaaattagaattccttttattttaccaaaagcaaaaaaaatgaaataaaatgacttagactagattgagaagttataatacaaatatatatataaagttgtttttcataaatatatttatacttattatccaatcattatttaaaggattatagaacatattattgcttaattgggttgggttttcaactaaaattaactgattgcataattttattttattttttggcaaaacgagaaaaaacaaacatgacattattaagaaagcaaaagttaaacaaacattatacatatctctaatcaacatgttaatcgtttgagttgaacatgtgtaccaaataataatgtggtgtaacccccaacaagcttatattagttgataaaatatgatgccaacttcatatctaattaatgagtaatgaagacaagaggcttccactacttttcttaattaaccttataatttacccctaattaatacaacatgtcacactttccttaaacaatatatttaagccaatatgtcacattcatattgatatattacaacccaccaaagttaattacaatgctttgaaggcacaagaagaccccataagatttgtatataccatattttttggtctaataaaactattgtgtagaatttaagttccatatctatgactataacatcccttgaattacacattgaaaactataacttattccccaccaaccaccccaacaccaaacaataatatgtatatataaaaacatataatatatgtgtgtaaagtctaaaatttctagctaataaagtaggtgctcataagtttgaaaagagagagttcaataagaaatttaagtgtcaaaaagggacccaacccaaccccaatgaccccatttcattcatattatgttttcgttttctagtggtgttgccagctatgtgtggccccatttatgtttcccctaaaagattaattctataccttcaaatctcaaaatcattataattataagtttgtactgaaaagtatagttgaaaagtataataaactatgctggggtttgtgcttgcaagtgaaagaaatgatgatatatcaaaagggtacttattatttttattcaaccacattacagattcaattccaaaacgagagagatactctcaataaatactaaatagtagatgttaattccatttttggcatatttaattgacaaaaatattttattatttaatgtatatttcggctggcatacattgatatggtttccatatttgtgtaaatcaaacttgaaaggaaagttgtctagctttcctatttttgaaaaaaaggtaaaaatggtaagtttggttacccatttcgttt

SEQ ID NO: 302418 - DNA, 1135 bp, Cannabis indica
atttatattagtaatacgtcaaaatctatatgtatatatgaaaattaatattaaaattttactctttttttcttagattggatggatccattccaatccaataaatactggacctaaaatattggatagatccgatccgatccaaaaaatactagatctaaaatattagataaactcaaattaaaccaataaatatatatgaaatacattcaatggataaaaccgatccaatccaacatccattggatgttggatcgattggatgaccggaattaattggatcggatcggatggtaaaatctaacattcaatatatgattggatcagatctgaatagacctaaaaatattggatgtgatccaatgaacacccctagccaagtgcacgccaaatttgcccttcctcacaaaaacaaaactttgaaggcccttctccttgcccaagtgtattagtgatattgtttcacgtggtgttaaaaaataaaaaagaatattaataaatttatagcttaaaatgtgagagtgtgtgttgtttttgtttcttttatgtgaacttatttttttctttgacagagagaaaaggctacaaagaaataataaatttatataagatgggaaaattctacaatgtattttctaaaaaagatgcactaatgactttaatgaacttttaagctgttaaaagttatctctgaactatttaaattgttaattttaagaattttcgtttaattctattcattttttttaagatgaaatagcaacttcattgaattattaccattcagaatacaagagagcttttaaattagcccaaatattatgctcgaaaatgctacgaccaaggaaaaatcgagagtgccttacaacaacatgagcaactcgatttgttgatcgtctaatgaaaaagagatttatattgtataaagaagataacaaaaataggcaatcttgaataacaagttcgaaagtggagttcatcttttgcttactacgaatactttggacagagaccatgctatctgtctcgatctgtacattctgacattttttgtttttcagccaactgagggcttccttgataccaatggcatcaatagtttcagcagaataatcacctccttggtaacaagttt

SEQ ID NO: 302419 - DNA, 1903 bp, Cannabis indica
aaacataagaaatcaagagaagataagaaaattagatggagtattgtcacggatctccaagcttttctcttgtgtttttagggttccattcagtctatcccctctaaaattcgcgatcccttttcattaaaatagcctcactgcgacgactttagaaaagtgaaaaactagtttctgtatagtccctcgccgcagccaaaagtattgtggtcgcgactgaaaatgggctcgtcgcgaccacacatttttttttacttcaacatctctcaataaattatgcataactttcacataaaactccaaataaacttattcaagatgcgttgaaagaataaaaaaagatctaaaacctttatgttttaactttctccaaaatcggatcagaacatagttcaattcagactttaagttttagtttcattttcttgcaaaattttctctattttatagatcatcgttttttaaaatttgaccaatttatacattgtaagtgtcgaaacttaaaactaaaaaaaaaacaagagtaattctattctaaaatgtgacaatgaagaagaaaattgactctaaaaattacccgaacaataagctaaaaatagcctaatagtgggcatcattttggtcgttatttatgagtatttgcgatcctttattatcgacaggacattaccaacatgccccgccggtaatatcaatactggcggatttcaccatatcaataccagcgggagctcccaccccttcttccaccatttgttgtagtgagaacaaaaaataaaaatagagataggagatcaccttgtcttagatcaagttgtggcgtcacgctctcctgaacctcaccattaattaaaaaaaaaaaagctaacagaagtggcacaccacattatcttattcgcccactacatttggtaccccaatttaagcatcattgctttaatgaacctccatttcgacaatcatacgccttcgctatatcaaactttaaagctactaatttcttcccatttcgaaatcaattctttcacatacaatgtagactttcataccccacagtagcattatggattaatcttcctttggtaaattcactttgtgaatctaaaataattaactccaaagtctttctcaatctattagcccaacatttagatacaattttattaataacattaaataaattaattagtctaaactcctcaacattttttggcttctctacttatgattcagtgtattcaaacaaacctcaaccatctgagaactctttgcatcaacatttcattcatctcagttgttacttttggttgtacggccgcaagcaacccagccaaaatattaaattatattttatcaaaaaattgctctaattatcccaaaaatatattaaattaagaaagctattaataagtgtacatatatattacacgttcgtacagtataatatttagaactttagttaattcatatagttgtaacaactgagttattaacaatggcattcttttttaaagatattaatatgtggagacaaaataaaatttggagtcttaaaataaagtgcattgttgaaactcaataataataagtaattaacaaaggtattattatttttattttattttttgctagaaaggtaatcccatttgtaggaattttgcttggtgaaattccaagtttaacctacaccaactcaatgttcacggttaaaacgacaaggacaaaattgtcctttcaactcaattaatatcaattcacacgacaaccaagaattggtcgttttcacttgcacgacaaaggaacttgtcgttctcacccacacgacagatcgtttgattctcaaaacgatctgtcgttcttctttgaataaaactcgagagttcagagctaaccctagctcatt

SEQ ID NO: 302420 - DNA, 956 bp, Cannabis indica
accaaacgacacctatatatttttttgaaaagaggacataaactaacatactcctatgatttggggccatttactataattcccctttatatattacaatcatgcataacttggggctcgaacccaagacctacaacacacactctcctatggctacttgagcttgcctcaagtggtatggagacaatactcaattcatcattaatattacttattacgattttcctagcgcatacactttttcacaacacaaattctaacaatgggttattaaggtcgatttcaagaggaagatggtcaagtttaaaaaagcaaatagtcagtttggtgctagcggcggtagtgtatcacctttaaagaaattgaaatgaagttttgtggtataagaaaatatcaatattatcctcaattatggggtgtataaagaatgatatattaaatgtagattacctttgattttgttaaagaaaataaaaaatactaatctggaatggacagagatattatagcaggaatacttgtaatatgtatagcatagatgaacaaaaaaaaaaaatagcagcctttgtttggtgctaatagtgtgtaaatataattttggaattcatataaaaaatagagttctactagagaataaaacagatgtttacggggaaaaacaattaaatgatagaaaagtttcattgaatgcttggtgaataacaaattaattttaaagtcaccataccaaaatatagaattactgacacttttattagacatttgctaaaaaaaaattgtcataataataatactctagtgacatttgatataaaataatacttactacagttttcatttatctgcatttctataaaaatttattattaatatatttttaagaaaaagttagaaacatgctttgtaccatcttctttatttttggcccaaaatgtgttatttttctttttctgatt

SEQ ID NO: 302421 - DNA, 4270 bp, Cannabis indica
aaaataaatatgaattgaataaaaaataaagtattaaacactatttttcaaaaaataaaataaaaaaatatcctcgtatgtaaattctaaatttcagctataatattcaaatacaatcaaaattatcaactataaattctaaatttcaaaataaacactataaaatacaaactaatgtaaaatagtttaactattaacgtaatttatgtaatatgttataaataattttagtaaaaaatatgtaaattggtttattcgggttatttggacgggttagaataatattcaacccgcccaatatatttattgggaggtttgaatttttcgtaaagttatttgggttgtattttttgtaggtttattcagtttagtttgtgtggtttgttcaaattagacggtttgttaatttttttgaataaccttaaaatttactatgtgctaaatttatataaatttttgacacacatacttttttattaaatgaaatatattttagcttttcaccataaataataattctattggagatgctattcatactctttttagtatggtctcaattattctgacaataatgatttttattattattaatctaatcctaccttccccaatccaactcgcagtcgcacgttcttcattcactgtgcactacagtaagtagaataaacccacccaaaacttaccgactcagaaaaaaaataaaaagaaaaaaagaaaaaggaaacaattggtcatttcggatccttacggatcaaacaaattcaattccaacccgtgagatctggtttctacattctactcccgtgaccgtgagaatgccccccatttcatcgtctctctcccaattatacacgtaatcacccaacacaaaaacaaaatgccaaagcaagaaaatgagtgactgctgacgaaacagactctatccccatctctctctctcctttcctttccaccattaatataaatactcactcttcttctttcgcaatgaccattcacaaaaacaaacccaaaagaactcgcttcttcctccttctcgccatgtctaccctcttcctcctctctttcctctcccttctcctctttttcacccaatccgcctccgcagaccaccatcaccatcatcccaagccgcctccacaaagtttcaaacccccttcacctaagtcgtccggtgtctccgctgctccgctgatcatccagcaggcatgcaaagcgactcgcttccagcaaccttgcgagtcctcactcggtcagcccggccgggtcgaagcggattcgactccggtacagataattcaagcggcgatcggggtctcgtctgagaatctcaagaacgcaaactccatggttcagtcgatcctcgactcctccgcctcgaacgtgaaccggtcgactgccgcgaagaactgcctcgaggtgttgcggaactcggactaccgcatttcgatggccaatgatgctgtgccacgtggaaagatgaaggacgcgagggcgtggatgagcgcggcgctcctgttccaatacgactgctggtctgccctcaagtacgcgaacgacacccatttggtgaacgagacgatgtcgtttcttgattcgttgacggggctgtccagcaacgcgttgagcatgatggcgtcgtacgacgtgttcggaaccgatgtgtccaagtggggcccgccgaaaacggagcgagacgggttctgggcaagcggttccagtgggtcggagatggggtctcggggtgggtttccgtcgaagttaacagcggatgcgacggtgtgtaaagacggtggagatggttgttacaagacagtgcaggaggccgttaacgctgctcccaataacggcgttaaaaagttcgtgatccacataaaggctggtgtttacgaagagacagtgagggtcccacttgagaagaagaacgttgtatttttaggagacggaatgggtaaaactgttattactggatcattaaatgttggtcaacctggaatttccacctataacactgctacagttggtgagttctttacttttcatagctgtaaaagtaataagtgtttaaatctgattggttggtgtgtaagttaataatgtgaatgatttaaagttaaggtgatattatgacgtatgagtaacttaaggtcatgccttttggaagataaacttaacggcaacggaaaattgagtagctttttctagtgatttttttcttttggaattaatacgtaatgataaatttttgtcgttgttatgtttaaatttaaaaccggttttatatatatctggttttctttttgggttgtcgttttgctaagtgttaagtttttttcttaaacaaagatttgagtagtttggcctatagatttgatgtggtagttagttgtaacgtatcttaataatttatgcataattatacgcaggagttcttggggatggatttatggccaatggtctgacatttcagaacacggctggaccagaagcacaccaagctgtagcattcagatcagatagtgatctctcagtgattgaaaattgtgaattcttaggcaatcaggacactctctacgcacattcacttcgccaattctacaaatcatgtcgtatccaaggcaatgtagacttcatatttggaaactctgcttcatttttccaggattgccaaatcttagtctgccctcgtcaaataaagccagaaaaaggggagaacaatgctgtcacagcccatggcaggactgaccctgcgcaaacaactggttttgttttccaaaattgcttaattaatggtactgaggattacatgaagctgtatcacagcaagcctgcagtgcacaaaaacttcttgggacggccttggaaggagtattctagaactgtttttgtacattgtaacttagaagctctaatcacacctcaaggatggatgccatggagtcaggattttgccttgaaaactctgttttatggtgaattcgacaactctggaccagggtcggatttatctcagagagtctcctggagtagccgaattccagctgagcatgttagtgtatactcagttcaaagcttcattcaaggagatgactggattccttcaaattatgatggcttttttcctcataaaattaacagaaagaccaatggaggtaaatagaatgggtatcttatcattttttttttgctgtaaccagccggctagattcctttttataagattgaataattctgctggtgtatatttagttcacagattagtataagcaaaccacattgtggatttcaatatacccatatggtggatttcaagtccatatttgtataagcaaaccaaattgttagtctattgtagctagtacaacattattagaggattatggttttatagctctggctagttgatttcactgtccaaaacttcttattatccttttcttgatatagaataagaagtttatatttttcctttgtatatgaatgcgttcatgtggatcaatatcaagaacatatttgaaatatgcctccttattgttattggaaacgctgaaaacagaataatcctctattgtttaactgggaattatgcttactctttattatacctgctaattacatatgtcgtgattgtttaaactcgtgactttattgcattagttagtaggggttgactcaaagtctaagaaatatcattttcaatggattaatgctttgttttgttttctagcattctggtattggacggccattagttctgacttttcagactatttgttgaatggatatatgctcaaaattctgacacaagatatttttgcaaagaataataggactgagtaattaatattattagtaacggattcaaatttggtgtgtaattgttcgtcttaattgacaccaatagtattgttattgtttaagactcatgaaaccagatatgtccatatatgattcatggatgattaatatttggataccccatttttttaatatattaggaatatgaacaaattatttacttttaaaatgttgtaaaacactattaatgttccaacctcccattgattatgaaatctctatatttataatttttacactaaaataatattatgttatatatagtgaaactcatatttattatcactataaatttcattgaattaaaacgaactaattaatataatcacaatccaatttaagtattatgacttaatattttcttatttagtgtttatatagacggatactgaaataaatgggtagtaaa

SEQ ID NO: 302422 - DNA, 1382 bp, Cannabis indica
tttttttttttttagaattaattttaattttttttccctaagagtgtatatagttgtttttttttaaaaaataatttaggtcattgttatctgttcttttaaatgtgtatcttcaatatataatgtaaaatgacagcacataataagtacaatatgcaccacaaataaaaaataaagtttcttgattaaaaaaaaatcttatttatttattaatcaatatattatttctcacaataataaaattatttattatattaaaaagaaaaaataaatattccaaataacattttttttattaataacatgattattttcttttttattgaaccatgaatcgttgttttatccgaaactataacataatcactttcacgataaatatttcagcaagtagtttggatatgtagagtggataaggtaaaatatacgactcacacgtgtctccacgcatggaagccacgtgatcaccatattttaattcacatgtgttcagagtaaataattaaataattgtttttgtaaaataaataaatgtgtatatatacagtcacagccagcagggttcttccttccactgtttcacatttaactgtacatccattgttttggaccaaaacaaaaaccacctactatatcaaataacgtttatatataaaaaaaatagcaaaggtatttatgagaagtgtttagatatgagggactaaacaataaaatattaaaaatttgaggggcattgagaaattgggttgtgtgatattgatatattatatatggcatatgccaaagcatattgagaatctttattatggatgatgatgtggcaccaaacacaacacatatgtagtaaaatattctttaatgaaaatattccattgtttaattcgacaaaatattagttttgtaagtgaaaatataaatagtaaaatatcttttcttctttttcatctgaataattatctttcattttaatttttcttcttcaataaatagaaatgataatacaacgatagatacaagacagacacacaaatgatcagatatcttttttttttagatatttcttcgagcctgttctcaaaaaataaaaaagatatttcttcgagccatgttcaaaatattcctactcaaatcagtaattatgttttaaaatataatttctaattaataattagtattagtagcattatttttctgataataataataagagtaaatattattttagactctctattttataaaatttattaattagattttttattttgttatatgatatattaaatcttgtattttttaaatggtataaaatagtttctgaactcttttttgttaaaataaaattaaatagtaactcaatttaaaattattaaaataaaatc

SEQ ID NO: 302423 - DNA, 1084 bp, Cannabis indica
ggattggattggatgatgcccacacctacttgcgtagatagctaaatagtaaaaatataataccatatataagattgcattatttatctcatagctaattagttttgtaataaaaaaaacaattctaatatagtattagagtaaaaaaaaaactctaatgactattcattcctaatttaataataggtcaaaaaagacgaagtaaaacaaccgcttgtaatttgaagatagtgagccaaaagtgctgatggtctaaaagacgagccaaaaagagttgcttgagattcgttgtgagtcaaaagtatattatcaatctaaaaagacaaaaacaaaaatcatttataatccgttgtgaaccaaaaagtactacttgtgatcgaggtgcctaagattagtgaggaaaactactcactacgttgagccgtttgtgatcaattgtgagtaatcaaaagtttggtgaactatttgtgatctgttataagccaaaaaaatactatttgtgattgaaccgtcttgaattaataaataaaaattagctatcatcgtaagggatgttaaacgattggttttaagatgtaacttacatcatacaattcaaaccaaaaatatatatatgaaattgtaattttatatatgccactttgttagtttaggatattataataatatcaagcaataagatgtcaaaattagaaaattaaaatccgccatacctgttagaaaatagaaatattgactcatattttggttaggcattttcacatttagattatatagcaatatatagataaggaaaccaaacaatgatagattattgtatcagctcaagctatacattatattaacgaggtagatatttttaataaaagagtaatatatattatctcacttataaaataatataaaataaataataatagaagaaaagagaaagagaaattgaatgagaatttctcagttatttattacaatgaagtaaattctatatttatacaaaaatatcactaaaaaataggaaactaaatcaatgtaataaaaaaaaatacaactaaacttaatggtgataattaatttaatgatttgg

SEQ ID NO: 302424 - DNA, 1717 bp, Cannabis indica
tttttttggtacgatagtgtacgttataattatttacgactaccttaaaatttttaaaaaatttcgaataatttacaatatcaaaaattaaatttacatattttattatacaagcgattatttttcttataattgtttaaaccttatttttagcaatataaactattcataaaatttcaaaataatctttaataattacaatatatgtgattttaaaaagaaataaactaaaaaatttaactctcttaaacactgaaatagatatatgtttatgaaacgatgatttacgagtctactaaattaatttttcatattaattaatatagcattgttacacgtgtcattgaatataaatatataagagagtgagatagctttgtaagaggcaaaaactggtgcttgaagaagtggttgaactagaaatatttaaatacactcattgacgatgaagttggttgattgaatttgatgatccttgaaatgtaagcattatgattcaacactggtgcaacaccaagttgttgagccttaaagacaacaaaacaagttgttgggagctgagttgagtttagggcaattaaattggttggcagataatgaagacgagcattagaagaagattcttatttgggaatttcattattatttttaatgcaaaaacctgagaagtttcgtacttgtttcttaacaataaaaaagttgacaatttgagagaaagaaaatgaaagaaattggtgatcatcatcttgtattgatgctaagggaagtcaactctcttggttttattctatttggagagtcaaacataattttggttcaaattttagatgatggagctcaactacaaactagtcacaaggtcaacgttgacttgtataaaataccattgagtaacaatatattattaaactttcaaacagtcctgactgagagactccaaaagggtatatattgctaagtacaattttagagtatcaatgaatcaaacaatatttcatatcagatgggctttcaaaagcccaaaaacacttctggtgctatttaggcctgaactagtgagtttcagcttttaactcggaaagagctttctttccgagaagttaaaagtgaaagtagaagctcagccaaacacgacattaataactttagtcttgaagatttttatttagggccattacttcctaattcggaagcagcttttgcggcgcgatttaacacatctgaaacccaaagagctcccttggaaaaatatgtgctgttggctacaacactaccagctgccatagcagctcttccagtgaccgatgcagctgctacagctgctgtcccagtgacataagcagctgatcgagttatgtccgaaacatgaaacttctgatctacggatttaacagtttccatacttgaataaattgtgtctgtcagcccaattctgttgctaatctcagcaactttggctgctgcggtagctgaaacgcgatgagactcgtccaaagctttggccttcactaatgcatctttccctaaaacataacctttggctagcatagtttttacaacttcttgagccactgttatagcttcactaggagaagaaacaaattgatttgtgctgtaaacctgctaggacaccagacaaggtttaactgtcatcaatttttggaacataattatcattatctttcattttttggttaacagattacaagaaactgat

SEQ ID NO: 302425 - DNA, 2124 bp, Cannabis indica
tataaaattattaattaattataaggtcacctaataatagtgctagacaccctcaccttattttatacatgtatctattaattatatatcacattctttaaaaaaaaatggaaacgacaacaaaaatagtgaccatcttgaacgacacttgtgataataatgataggaaaatagtcatgacactcctgatattagtgttttaattagtgtctcatatgaaaaatattttagaatacttaactattaattaattgtaaagaaattataggagtccactctaatgtggatgctatatatttctttttagcaacatatagacaatatataatatataatgtgacatgatatatacatataaatctgcccgacatcctttttgagacgcatattcgtgggtgtccttccaataattgttatgatatacattctgctcatgtaagcaatataagccctcattaataatattctcttctctccttatgaatactactgttttatacacttgttccttatattaattggccccacactcactctctcctcaattaatccattcttctcatctcacttcctcctctcctataaaacccttctcccttcactcactcttcacgctccactttcacatatacatatatatataatcactccaacacaaaatataaacaaactcatatatatatatatatatattaaaaaattatattaactatgcttccaggagagttcacagggctctactatctcccagtctcacctgatgatcatcatcaccaaaaccctatcagcctcccaatacaaccaaacttcaacaacgtcaacatcatctctcctaattgtacctctaacaacgtcatggacccaattttccatctcaactcacaattcttgaacgccaatttaccaaactaccctcctcctcaaacgacgtcgtccgccactactctcagcaacaactccaccacctccgacgaagcagaggagatgaactaccataataacaacagcgaacagctgaggatcgtcatcgacgagcggaggcagcggcggatgatatcgaaccgggaatcggctaggcggtccaggatgaggaagcagaagcacctggacgagctgtggtcccaggtggttcgtctccgcaccgagaaccataacctaatcgataagctcaacaacatgtccgagtcccacgaccgagtcttacaggagaactctcgtctcaaagaagaagcctctgaccttcgtcaaatgttgactgctctccagatcggaagtcctaacaattacaacgacgccgttttgagagctacttctattcatgatcaagacgacgacgacgataacggtggtgatcatgactatgatcaccataatcttgatcatgagggtatggtgaatcgtaataataataataatgatcttaaccgtaatcacaatcatcgtcaccatcacaacaataatgagattaaacttccctgcaacgcggctcatcttagagctgagatctcctccactaatattgctacttcggttgatttgcttcattgagataataatatataataataataacaagaacttaagaaggattaatattattaaatgctttttagtcttcttcttttatatatatggaatattaattatatataatatatatgtatggtggtttttatgatcatggtcagtttttaattttgtgttgtataatatatgagatctgatcgagttcggagttgggcctagctagctttcgggtcgtcataccggaataactttttttacacgatcataaatccctattaattaaatatctttatatcttagtttcgtttcatgtaatatatttacgaagttagtttgaattttgcagaactaaatctccttaattaataattataaatttatcattccgcccaacgctacagtactattaataatatatataattatattaatttaatggttatcatttagtcttagatcttctcgccgcatatgtatttgttacagcatcataataaaaaatgagattattttgcaggaaatataaccaatgaatgaaaagatttaagttaaccaaaactaaatcattctattctatgtgcatatatatacatacat

SEQ ID NO: 302426 - DNA, 2780 bp, Cannabis indica
ttccatattgagcggaaccctcacttccttgctctcgtaaaatctgttattgccatgttaaaagtataagagaaaaaaaaaattacataagaaccaaataaagcacatctaactattcttcgtggtcattgagatggattctcacattacacaaaaagagatgagcaagatttgacttagttacaaatgtacaacttctaaactaaactcatccccgtaccacaatggccaacggaaaacaactgagaaaaattacttccatgtttacattgtttgaaaatctactagttgatagccatgatacttgtaacacaaatgaacataaagttcatagaagaaaaagccaaagccaaaaccagataacaaggaaagtatttgtgaaatttcaatcccgaaaaagtcagttagtttaacatcatgcatagctataggcatgattcccaagccttctatcataaaaatttgattattaaataaatcttaaatgtaaaactttagccatttcaactaattggatttattcagcaaaataccagaatctacacaaattacaaagcacccacccaaacaattaaatgaacaaatgccacatctataatatttgattataagaaaataaacacctccactacccccacccacacaaaaaagaaaatgttaccttaatgccatcaaaggaaccaatcaacaactcagccggattgcttttaacatgagataagtcttcatgcagctccattgcactccttaagttacggacaagagatagaatactaacaataaattccctgtctgctttctgccaaaatgttaatacaaaacatatcatcttcacatataaatgtttcttaaaatcaattaaggaaaaagaaaaaaaaattataatgtcatttgattattaatcgttagtgaggagtatcacctttgacatatgaagcttcacattagcaccattggccaaaggaatgatcaaatctccattcaaagtttcttcagtattgtagatataggccccacccatccaagatgcctaaacaacattcaggataaaaacaacatacttgtcatgtaagtgcacagtggaaatgaaataggacatggaaatagaactgtctcagtatgagacatcaactcacaaaaatgctaatttctttgtcggtaagatcagtgaatggctcatccaaagaaactacagaaacttcatcttcagctgcatcaaataaggaatcataagaaattccaacacattaccgaacagagtcaaacattcatacaaaaaaatataaaattaactacctggaagttgaatttcagttttctctgacccgaacgcaatcttgctactaagaatattgccagagatggcattatcttttgccaatagttcagaatctgcatgcataagacaattcacttcaatactagttcccgaataataaaagagattaaattttcattaaagttaagtgcatagaccatcaactcctctaacttccagcatgaaaacagcacgaggccgattgaatggattcgggatgagtatttgattcaactgccagacgaataaaaggaaaatatcacgaaccaagtcttacaatctaaaaaacaaggagtaactagaaaatgtatttcctactacagtaaaaccttagatgagctagcttctgaaagagtagaaggtggtgcaaatccaagcaagactgataccgcagcaccagcttctgtgtccaaaatcaaatctggctgcaagaacacaaaattggagaaaatcattaaagcaataaaaaagatatataactggagaataatcatttaattcatcattgttgaattcatgcaattacagtaacaaaaacatagatataaaacaacaatacaacagtgaaaataagggagtgaaaaactcaataattaatgtcagttcagactccatagaaatccaaacctacttttaaatctgctctataaaccttaatctagaacaaagcacataaatacaagtactaacgttgaatatcaaacaaaacctaaaacaagtagaatcagttcaacaattcttgatattcaaattacataatcaacaaagaaaaatcataattgcagataaaaaattatcaaattgaatcctgtattggcactacactgattataaatttgatgaaatgaagcaatcgcggaaaattaccttgactacatcgtccgatgctttacgaaaaaactgattagaagaattatcaatgaagaaaacagatccagtagtttcggcctaaaccaaaaatccaaaacaagaattgtcagatcgagtatctacaacatataacagagtatctaatcaaatagaaagataaaaagagagatacaaaccctagattgagcacagataagcgacaagatgagtaggaggtagaatctgtggaactccatcgaagagaaagagagagagaaatgggtcgttttctgatctatggctatgctcgacgagttaaggacgagtcagaaatttctttaacgattccaatagaggaagaaaacgacaatttgcagtgaaacgacgtcgtaatgggagaaatcgaaaacgacaagaggagcactgattgacgacgtcgtttttagattgtgggcttgtatacgtgggctgttggaaattcttgggcctaattttggaataccactttattttgttctaaatgcaattgttttttgattaaagatttataccatttttatgcgggataatttaacaaatacacaaaaacacaaaaaaattacaaaatacggtt

SEQ ID NO: 302427 - DNA, 1212 bp, Cannabis indica
aatcaattatttagaaaaaaaattaaagtggagtggggagcattggcttttttcattcaaatttatggggagcttgaagggttcgaccactaggtggtgccgactattccttaagcattgtgaatgactactcaagaagagtttgggtgttcatattgaagataaaagatgaggcctttgaaactttcatcaaatggaagaagttggttaagggtcaaacaacaataaagaaggtctaaaagttgagaactaataatggtcttgagtgatgctcaaggctattcattgcttactatgacaagaaaggaattttcaggcataaaaaagtccctaaaacccctcagcaaaatgtctttgctgagaggatggacaggacattgattgaaagagttaggtgcatgctcaaaggatcaaatttgagagaaaatactagggagaagtagtagagacaacttattatctcataaacatgtgtccatccattactattaattttaaaatccacaagaattatggacagaaaatgcccctaagctagatcacttgagattatttggttgtcttgcctatatccttatgaggcaagacaaactccaaccaagtgccctaaaacgtatgttcttgaggcaccctgatggagttaaaggctacaaattatggtgcttagaagagggacacaagaagtgcatcataagtacagatatggtattcaaagaagatcaaattgctatggcacaaatagacacatctgttaaggacaagacaagtgatatcattatcgaaagaagctcaccaattcagtttaagggtagaaatgcatcaagtcacttaaaagacatggatgatgaagatcaagttgtttcaaatggagatacaactcactctaagcttgacaactaccgattggccagggttaggtctagaagaaaaataagaccccctggtagacttcgatgtcttgattatgcaacattttccttgatcacagtagaagaaattgtaggtgttgaaccaacaacataccaagaagccacggacaactttgagagtgataagtggaacaatgctatccaagaagaaatgacttccctaattaagaacaagacttttatagtagtgaataagcctcctagacaaaagcctataggctataagtagatattaatgttggtttttatgccctaaataaaacccattacaatctaatctgat

SEQ ID NO: 302428 - DNA, 2392 bp, Cannabis indica
gatgaggagctcaaggagcttggtgatggtgagcctaataggatctactatactcgccttcaggacctttctctagtaagttataatttcaacttcattcattttctagcactgtataggctgcctgaccatggggattattgcaagtgtctggttcgtcatggatgttcctgtgtggggctagctgggcataccagtcccaaagagaggttggccatccaatgttgtaattttgacaatgatgctatcttgttttgtttttaggccttgatgaagctgtgcttagtacgtgatggctcctaggggtcctcaaatgctcttttggagcaggtgaagaccctagaggcttcccttctggtgaaggcagagccatgtctgacaaggacttggtgagagatagagtatgatttttggccaagagtccatgctcgtttctagaaacaaggagaataccactaagctgcctttatctctaggttacattctaaccttattaagaatgaggagcaactgtaagcggctattgagggccagtaggccatcagggaggagttgttgatttctcctctgagctcacttttgagttcatgttgcataatcacaagaccaaactgttatacatgggtaatgaggcttttgtggggtgcacatttgtacgaggaagggtggttttcaagagtcggtgggaagcagaccagcccgctgcctatttagaggggtcttcaaaggatatcatgacgaggggctggctagtgcacctactaagggggtggctggccaggatatttgccaccaggccggctagcatgttgaagttgatgtcggtgcaaacttcggcgatctcgatcttgcaacttctgactcgacttcacctgcccctgcacacacatagacaatatttttcattagtagtattcctcattatgtttgtataacattggcaatattttcatgttctgtatggcctatggcattttattttgagaacattacttattttcatgttccatgtggcatgtgggctttttggaacactacttattgtcaactccaaggccttcatgtttgtatctttggcctataggccctctatttttgaacattactattgtttggccctattgcatttttatcatggattgtgtgaccaacaagatggtctttaattttggctttcttcttatggccctgacatgtaagggttcgaatttactatgtcatgttgaagtatgcctgcacgacttagaggtaggtttagtagcttcttcgaagcgttaaaatttctctacataagctatctgtactagttcaatgcattgtacagtttgggtgcccctcaagtgaccatgtagacatgtctcttggtcacttgctattaaccaagtttcacagactgtgcctgggttctttcttgggaaggtaccatagcacacacattgaatgaaaagagtaactttaagaaattagtcttgtgagcaagtggtttagacacaataaatagaacgtaaacatggttttttattcattaattggtcttttcctctgtgcaacttacataaatttaatttacaagcttacattacacagatttagcttctaaaggtcatgggtgataactcttttatactctaaggttgagtagataaaactgccacttcaaagtagtgttttgtaagctagttactgatagtatttgcgaaggtgctctccattccagtatcttggtaggagaacaagctctatgttctcgttgtaccttcctaacttgtaggctccctagctagttatctctgtaacttgataggggccttcccagttaggtccgaacacttctgctgctgaatcttaattgttcaggaacactctttggagcaccaggtctcctatgaagaatttcctactcctgacttctttgttgaagtgccttgctacttcttacttataggcctacaactttatgttggcttgatctattctttcttctactttgttaagggattctgccactacaggcaatatcgccttgtagccataagctagagcgaatggagtttgcccagtggctgtcttctcgatagtcctatgcgaccaaaggacccctagggcaattcaggccagttctttgcttcctcaaggtgcttttttagggtgtcattgagggttttgttgatagcttctacctgcccatttgcttgaggatgggccacgacagaaaaggttttgatgatgccatgcctatagaaatcattgaacatgtcactatcaaaatattttttgttgtctgatacaatctctaaggaaatccgaatagacatatgttgttcttgaaaacaaagtcaaggactcttttagaggtgattgttgccaggggtttagcttctgtccacttggt

SEQ ID NO: 302429 - DNA, 602 bp, Cannabis indica
tccgccggtagtatatataattatgtgtacaaatgaacacaagcctgtaggcgattaaaaatcagaagtactggaactgcatgcatgcatatatgttttaaactactaattaattaattatcactaacaacaattattgatgaaagcgcgtccgtgtgggtgggtctactctgctctagctaatctagttggtgctaccctctacaggttgattgtacggccaacacactcatctctttattatatatgtatatactggtgtcgttttcataattaattaattacttttcttataattaattttgtatcgtagtatttggctatgaattgtgctgcttagaatttgtgataagataagtatatttggctacaatttgattcatcagccattcagtgtcttatatatgattccgattttagtttggatcattcaataaataaaatctgatctgattgtgcatgtgcctccctaatttatttaagttaattgaacttatactaattttagattaatttataatatatataaatattaatatattatttgtaacattatttatttttttattgtttatttttaatattaggagtatgttcaattt

SEQ ID NO: 302430 - DNA, 4074 bp, Cannabis indica
gcacagccgaaagctactatttggtcgtgtcagtgctcgcatctagaagaaaatagacaaactgccttcagtaaaaggtgttggacaccactaatgtcaaataacaattatttttttttttatgcctagtataacacaatttactcttcagcaacttcatttaattactcaatcattactctaacaatacatcgtcttatttaggtaaacgaatattttgacttaaacataatgatcaatagatataaatcaaaacaaaacaaaaagtaaacattacaagaaaagattttacaacttccaaaaatattggtatttttatattcattggaatcgttacaaagaactttccaaggaacaaataaactctaatcaaacccacaaacttctattctaggtggtctttgacacttaactactcacaatacaaacaagacttatgtacacttgcagaaacaatgatcgaatcaatgatcgaatcaatgtttggagcttttacttccatttagacctgaggtacttttgagctcaacaaagcctggagctagctttgttggctgtccaaataattgaacattattggagtggcccaatgaagaagattgaggcctaaactgactggcagacaagctattattggaagttgaggaattcaagagttgagtttggtctgaatggtttgaagagctgttattagtagcagtcatcggatccttgtctatcttctgatctaacagttgatgattagagtgattctcatcaatgtccattcctcgaggacccttatcgctagttgatctaaaacctgatgtaccgaatggaagttggttttgccaaagcagtgttggtcggtttggtatagaggaatgaacgccacgagaaatgcctttaccttcagcatcctctttaactcttgcctgtaggcttgtatctgaaagctcgttcggtttgttaaatttcacgtcaggctgcttctctctgtctaaagaagtagtcacttccatgaaatcaactttggttgctgaagagcggcccgaagcaattactgtagttggaaatgctctttctggaggtacagctggagtatagttagatggaagcagatcatcccaattctccaagagctccttgtagacttttcggagagtgacttcggtaaggccagtcaccttacaaatctctgcctgtgttttgcgtttgtcttcaagttggcaggctaaatatatggctgcagcagatatgctaataggatttctacgggtgcagaagcatttattgatgacaacctctccgatgtgagttgccagttcctaaaagaaaaacaagaacaagatcaagatcaagccaagtcaatgttagattttggaaaagaggaagtagaagttttatcatcacatcaaagttcaataccaaccttacaaatcacaaaaatctgagtcatcaaatggagtgatttctaatgaaagaaacctcgcaagactatctaaaaacatctcattacaaaccggagtatgtccttaaacttgtttgtgaaacaattgagtaactttatgagcatactaaaatataaagactgtgacaacctataataaatttgaataatgtagcttcaaggtttcaagaggaatggaaattaatggatcagactacaaagttaccaaagctaaatttaaaattagtgcctcgaatctcttcccttcaagcctctttcaatgtgccgtctcctaagttcacattgaacataccatgtattctaaactgaatattgccatgacatgtctcttacatcagataactatgcatcgtcacagttatgaacccaaaagtatatttggtaatttaatttgaacagttatgttcaagtggtaaaccttaaacagtgattgaagtacctgagcagatttattaagttgaagaagcgtgcaaaaccttggcatatgaaccgatatggaattgctgttaaggggctgacttagttgtagagcttctccaagaatcttgatgtattttccaatttccttctggggtacattggctgcaattgaaatttcctatgatagattaaaatcatttgtcaattcagagaagctctaaacagtgaaaaatcaaaatgtaccacagctaatcagagataaaacatactaatgtaaaactaggcttcactcactacaaccaatatgcttacacaaacacatcagttatcattgcaatagaatcatcatggaaaaaaataaactacaataactacagttcaagttaaccgaggaagcccaaaaaacaaaatataaatattgggagtgtaagcattattagagaagtggtactctcctgtgtaacacttctaaaatcgaataatctctctgaccaatctgattgaaagtaggaaacaactatgatgaaagttattgggcctaactcaacctgacaaaactagcctgttagggaaggattgccctcaccttatttagaggatcgaatatttatcaccaaccaatgtgagactttaatatgacccctcacacacagcatagactatgcgaaacaacagtgaacaaatcaatgtttggggtacccaatattgtaaaaatggaccctttttgataccgtattagaaaaatgactaagcgtaacccaccctaaaaaaatcagcttgttagagaagattggcttcaccatattaagtgggtcgagtatctctctgattattctcattgaaagtagaaaagcagtactgtattcatacatataaacatgtatcttaactgagttctgaatcatagcagtaatggttataaacacaaaatctaactgaatatagaaaatgaaattcagaaactaacctaaaacaattcatttcaagaacctttaagactgcacaaactttcaaattagtaataaaatcaataaaaataaatggtaaaaatatgtacttgtagggttctaggctcctgtgcttccctaatcgcctgaacaagagcggcagcgcaagagcttcaacactccgattcctcaaacaagtagcagagcagcaatccctgaatagctgaaaggcgtgatcagaaatatcgtaatccaatcccaaaatcgaagccacatccacaatctgcatataagccctaagattatcaaccacaactgtcgaagaagaagaattcgattgagaggaggatgacgttgacgaagaagtagattcgagtgtgcgctcgagctcggctaggtgaccggagaaagagaggcaggagcgaagaaagagcggagtgggctctagagaccaggtggagaaggcggtgatgaagccggtgggttcgaatgggtcgtcttcgtcttcgcggggctggagagttggaaggtcggaggtgactaggcaaagagggttgtcttgtgcccgttggtggaagagatgatggggctgagattggcgctcctcgaccacacggccgcaggaagagcactccgttatggacttgccggagcttgtggtggcgcaccggccttgtccggccgagcagtacggacacctcatactgataccaaacattcaacaatgtcaaattagggaattgagaaagaaaccctttctttctttctctacttctgtaaagaaacgacacgtcgtaatatattcaaactgtcgtttagtgtaagacatgttttagtattcatgtcgtttctttaggttattgtcgtatagatcaatgtttttttgtttcatattttttttttaatttctcaatttttgagtggcaaaacctctcaaatttcatttcattagcaaatccaataaattttgcggcaaaatcttctaatctccaatgttttggatatatttattatttatatttgtttacattcaaaacattaataattttttattaagaaaagcattaataattttatttgagaattttttctcatcttaattgttggagagtaatatatgaagaaaaaaaaattattaagccttttatttaaaaaaatatataatatatttgaaaaatactaaaaaaatatatacattttttaaagaaaatatattttttttagctaattagtaatttttctcccaaactttgacat

SEQ ID NO: 302431 - DNA, 2437 bp, Cannabis indica
attccagttggccctttttgccgagcccatatttggacccatgagaacgtgattgacggctacatatgggccttgtatccagacaaccattccttatcaatcttcttttttaaaataaataaataaagttaaataaaaatctaaaagaatcgatgatgtaatatgcaatccaaacactttctaataaatattagttatattataaattaagtaccttatttttttcaaattaaaattaaatcgttttaattttgataaaccctaaagtgaaaatggaaaaagagtgacagttaaaatatatcctcaaaccaaccaaccaaccacctaactaaggctgcccttatttcctccctgacatgctcttgaattgattgccagagttgcctgtaatccagctataaataaactcatatttaattaaaatatataagtttaattaatgaaataattcaatatatatcacaaattgggagtagagtacattctggcaattacgtcctggacaaactttttctcttcaatatatgtactaattatatttactagccttgacttgaaataaaatgttcttcatgacctcgttaacaatgaatactaattaaaaaaaaataataataaaaaagggaatttgttaggttgtttgatggcacaggacaaaaacctagttcaaataagtcacttagcttaagaacagaatgatctagtttctataacctaagttgactacacccacaaaaccacctcaaagacttcactccttacctgtctttcactgcttcagcatccaatgccaaaaacataataataataaataattattatgataaattactattacatataagattaaccaattaattaatcaataaatgtactcttctcttcactttacaaatgaagaacccatgtctgacaaactgtcttggatcttgtaaaagaatagtttcttcaattacttctttacaatcagtcctaaatacttttagtaagtagatctacactacatagtttcaacatcttactgcaaaaaagttggctttgtctaattcttaaaccccccttttctttttatataattattaattccatactcttcttaagaaaggcagtgattatccactaatgtgctgctttgaatttataaagtgacatttaattttttttaaaaaaaaaaacttgcagattcaaaatctgtgtttttgtaagtgagaaagtgaaggttgactaagtcaacatcactattctaatacatgaaattgaaatgcaagtacccaaaactatgaaaacttgcatattcaaaaaatcttgtaacacattaatttattagactatatttgtggttagctaaccaaaatccatttataaaaaatgtcttttgcatttttcaatcaatgtaacacattaacgtcacatacgtcggcttagtttaggtcatttcacaagacctctgtattttttttttagaaaaaaatacttgttattatgaaacaaacatataatcgtttacaataacatagtaaataggtggagggataacctccaaccaagaacaagtctcatctacccctaatgcaaattcaattaactagaccatagcgactttatttgctaaacatttaacatgtgaaataattatatcaggaaaaaaggataaaagactagtaatatcaacaatcaaatctgagaaagatgagtttgaattgaagggagcattcaaagcattagaaaccatcagtgcatttgtttctatattcataaccgtcagttgttgttgtaggtccccagttgaggctgagaaagagtgttttggcctccatttcatgtgtcagaaagtttcctttaattggcattgagagagcagcaagaacgtaacccttagcatccctaattacagcccctacaccagttgtgtttttcgaagagttgactgtcgcatccacactgagcttaaaagctcctgcagtaggcgaaaaccaaggaaccggagctgtagcagtattttcgtcttgggaagcagctgcaggtgcagcaatggtagacacatgatatgtttgttatgctgcccgaaagttctgcaggttcacatcagcgaaggtggcaaggtctttgaggggtgttgcgtgtttaccatgtacaactttatttctctcagtccaaatagcccaaagagtacaaaagagttgttccatctcagtcttggaataaaagtgtgaaaagatggatcaaatagtcaccgttgatagttgttactaattgacacaatgtgcagtaatagatattaacatattaattatatattacccattatattatgtatccaattttgaaatcataagattttattatttctattattaatataattatttatttaattttttaaaaaaataaattatcatttaattgttactaactcaaaaaagaaatgaaaaaaaaa

SEQ ID NO: 302432 - DNA, 2749 bp, Cannabis indica
cgtgatgtataggtggtgtatcaaatttccttgtgaatggcttacatttaaatcaaggtggagctacactatgttagagagtctcacattgataatgtgtggaaacttaataccatttataagatcgtaaggctactcctatcatagccaattagtttggagatgtatccccatacttcttaccatacaactcactatcctattctctaacatcatactagcagctgtcaaacttgttttccttattaatatccctcacctaacttaaatttttggcttcgccctcatttcaatattgaatcaatgatataggtagtcctcgagtggcacagatagtcatgtctgcagctgctaagtttttaacaccagttgtgctggagctgggtggaaaatgccctgctgtttttgattccttgtcatattcttgggacagagaggtaattaaaggcataaactttattgtttaggaaaaatagttaaaagtttttctttaactattttgttcatgtaatgacaaggcggctgtaagacgaatccttgtggggaaatttgggacttgtgctggacaagcttgcataacaattgatcatgttcttgtggaaaagaatttcctgcccgtattggtaagaaaacaagagctttctcacattttctgatataacaaacaagaactcaagcatggttaaaaaaaaatcacgtgttcttgttgtttaggtggacttactgaagaccaacactaggaaaatgtttggagaaaacccccaactgtcaaactccatggccaggatagtaaacaagcataatttcttgagactgaaaaatcttttggatgatcctgctgttaagtcttcaattgtttatggtggcaaaattgatgaggaaaacttgtaaaagacaactttttaagtttctctggtgaataaaattagcatttgtttagtgacaaaatcataacttttgtcaacttttatgcaggttcatcgagccaacgatcttggtagaccctccgtttgagtctgaaatcatgacagaagagatctttggaccattgcttccaatcatcacggtgaagatcattaaaagactgtttttctcttttgttttcggaacaataacttacataactactctttttctttgcttggacagttggagaagattgaagatagcatagaattcataaagctaaggcctaaaccacttgctatatatgccttcaccaagagcaaaacactagagagaagaatcatatcagagacatcttcagggagtgtgacaatgaatgatgccataattcaagtacttctttttagcattttcattatttttctttacactgaaaaagaagggttttataacaacaatttttggtgcatctgtttttttaatactaatttggacccttattatcatcattacattgcttgacttaacactggatttttcttctcatgactgttgaaaaatgcagtacgctgcagatgcagtcccttttggaggggttggagaaagtgggattggaaggtaccatggaaagttctcctttgatacattcagccatgaaaaaacagtggtaagaagaagcttcttcactgatttttggttcagatatcctccatggaatgaccaccagcttcaactctttcgtgttgcttacaactatgattacttgggtattgcccttgtcatgcttggcttgaagagagccaaaaagaattcatactctatctaaatatataaaaataaatttggatacattatgtacaagtatattgttttcatatctaagttgtattctttgtgcttttcttctaattatatattgagtcagataaatggcaatattataagtaaggagtggatgagatgagtgtattagtttgtactagtgggagctgccatattttgatgctttactaaaaggtcaaattaaattgttcatatgaaattctagctttttatttttaaaatctttccaatataaaatctaatgcaaggattttattttggaatgtgttcacgtggtttttgtgaaatgatctaagaaaatcgtaaaagatagaggactatgctgattaaattttagcaaaataaaatcgcaaaaaagtaaattaaagaagacaccgggatttatagtagtttgctcttgtgtcgcgacaataatgggctacgtctactttataatttattaattttgttcgacacaccagaattatattctcaagagtgtggacaatgatgcaaaaagaatttctaggcaaaatctatgtcaaggcgtatgaacaggaactcatgggagatcaactatctataaactcaacaataatggtggtgataatcaatgttcttgggaaaagtgaaaaaagaaaagtcaaggatagagaatggttcgcttatccttggaggaatcgtgtatatgttgttagactataatatgtaggggtgtttattggatcacatccaatgtttttaggtctatccagatccgatccaatcatatattggatgttagattttaccatccaatccgatccaatcaatttcagtcatccaatcgatccaacatccattggatgttggattggattggttctatctattggatgtatttcatatatatatttattgatttaatttgagtttatccaatattttacacctaatattttttggatcggatcgaatctatccaatattttaggtcaagtgtgtattggattggactggatctatccaatccaagaaaaaa

SEQ ID NO: 302433 - DNA, 3372 bp, Cannabis indica
aacaattatttattttattttgttgttcgtgatataggagacataatccatgtcataatcgttggtaaatgccattcctttgctagcttagtggaagaagtatacagagagagttgttgctaacaatatggatggatttttgttaatttttgtattggataatgtaatcaactaggattacatatagtatgaagaatcatttacagaaaatgacgaatttctacctgattacatgtcattctgctaggtctaggtgatacgaaggttccactgagtagtgaaattctatttatgttgaatatacagtacttgatatgtgaagtgccctgaataagcagtcaagagttacttaagagcagaaagatattgtttttctatcactttcagtgattatttaatctctccttaaccatttctatctatagctaaagtcttacagttcagcagtaagatttgaactgtgtgggttaccctatctactgaagaaatgaccaaatacagataaaggtaaccgtaggaacatagaaaccatatttacttgatttactattttttttttggactatttctcggtttgtgcttgtcatccttgcgaaggagccatgctaatcttctctgtatcgttccaattttatcggatgtcccctaagggactacttgatttactattgatttactagttacgaatctcttacaataaatcgtatatggtattgtcatcatcatatgcccggagcatatcatcaaggtcaaggaactaaaattagtactatagaattagaaaacagagttgtatctcatttacataatcaaaccaatttaaagaagccaagtttctagtattgagaatatacaataactttagcccttcttttcatacaatatagtgtagaagtgtagtatacaatggcagagagagtaaatggtttaggttaatacctaatcagaaaagccctgatttccatctatagcttctaatctccattcactcccataataagagttaggcaaacccaaccagaacttgaaagcctcagcagctctcttcctctccctcctcctatcttgcctggcttgtgaggcatgcttacttgtaaacatcctagaatgcatttccacgtaaattcgagtgtatttggtcttatttggaggtataccattctcttccatgcaagccacaatctcaagagctttcttgaagaaagcagctctaacacatatatcagccagtgtatccaacagcccttcatccggtttcagctgtggtggagaaggagacaacgacgagggatctggattatccccttccttcactttaagcctctccttcacttcattccaaagtaacagtgcatctcctggttttctagctaatgctatcccattagctagactaccataagttgctacattggggtgaaaaccatcttctttcattctctcaattagcttcttagcttcttcaatcataccaagtctacaatacccttcaaccaacatattccaggcaataatatctactttcactcgagggtcattgagcatttcatcaaacaccttgtgagctagctttggctgacccgacaaggcaaaagctttcatcaaagtggtgtagctgatcttggtaggggcaattccttttgccctcatttcattaaaaaacacaagtgccccagcactgtcatcaaccagaatacacccatcaaccaagatgttataagaaaccacatcaggctcaatccctgcctcttcagccatatccttaagcaactcctttgcttgatcaatctgcaattgcttgcagtaacccttgagaagaatattgtacgtaatcctgtttgcaggcacacctattctcgtcatctcagccagaacttgacgagctcggtccattgaccctgaattcacaaacgcagacacaagagtagtgtatgtcacatggtcaggatggctagcagtgtcatcttcatgtctcattgcttcaatcattctaaccgtatccataattcggcctactttcatataacctttcataagagttgtatacattctagtgttaggagcatacagttttgagagtaacggtggctcagaatcacttgctgtcacacaattcggaagcaacttctcaaacacatgttgcccatttctgttgggattctctacacttgtctcccttaaaatcttgcaaagatctctccttccttccctcattgcttgaacaattctctcggcagtttctaaatcatcaaaaccaacataagcagcaacaagagaatgcaatgtagtcatacacaaagggattttcttctctagaattctctccagcacaaagaccagaaggtctttcctaccaactctggcgcaaagcttaatcataacattataactcagtacatcaggctcggcattgtactcaggcaattcatcgaacagttggaggaacatcttagtgtcccccagattagcacaagcgttaagaacagcattgaaagcaccagtatccggcttcgaatcagcaaccaagtcagcgtcggagaactgccgaacacggcgggtcaccgaccggaagagcttcaatgcttcaacgggtccgtcgtcgccggaattggcgagacggctgacgactgcgctccaagattttacatgggggagatagccggagcgaagcatggacttgatgagcgaggtggcatagcgggtgtgtccagccttggcagccgctgatgccagaagcccaagagaattagcatcgagacggtggagctgccgctcttgacggaggcgcgtgatgatggactgggcgcgcgtgaggccggtgctggtgttttggtacgatagctgagagaccaaacggcttagacaagtggaactggggagatgaggggactcgttgtatgcaacccaggcgtcctctgtcttccgctgacggagaagcaatagaagagtttggtcttgggaccgagctggttcggtggaggcagaggcggaggcgagaaagatgtctatgggtttagcttggccggcggcgacttgaacccgagaagaacgaatatgattagaggaaggagtggttatgagggttgggggagatgcccagtgagctaaggggaatgggttggaagcagaagatgaagaagatggtaatgttgatagagggtttaagggtgaagatggtgaacgtggtggtggcttagcgttcatgactggtccatctatggcgagaatatagctttgagattttgaaggagaagaagataatgggaagtgagtggaagtgggatgtattacgtcgtgtgtactgtgtccgcttcttttgtttgtttcttttattattattattagggaaatttgattttctatacttagaaa

SEQ ID NO: 302434 - DNA, 2389 bp, Cannabis indica
caaaaatgaaatgaatcattgcttgtcaatttgataaatcacatgctctaccttttaagtcttccaatatcaaagctagcaatgttcttaatcttgtgcatagagatctatggggtccctctccaatcatgtcaaacaatggtttctatgttgatgattgtacacatttcacttggatctatcctctaaaaaccaaagttgaagcttctaaaatttaaaactcttgttgaaacttaattcgaaaagaaaattaagagtttaagaatggatggggatggggaatatcaatctctagaaagcattgatcacaaatattcttttgaagcattgtatgctagggaaaccaaattatgcatttcttaaagtctttggtgtagcatgcttcccttgtataagaccattccaagctcaaacatttcaattccactctctgaaatatgtcaatttgggttatagtgaatgtcacaaaggctataaatgtctcactccaataggaaaagtctacatctctagaaatgtagtttttaatgaactagagtttcctttccaatcttgctttctcaacaactatcaaccaacaaaacctgtcataattcaaagtgattccttgtctgtgctcccttctttccattttcctataggttcaccttctatagcaccaccttctccacccacttccttaagcatgcctaaagaagttccttccaaacaaacagactctcaggtaaactcttatgaccctgctcatgttatttaatctcctattacttaacaagatgctttagcgttaagaagtgagaggagaatttcatatgtcttatcttttccaccagatgatgctaccattttgtagaagatgttgctgctgctcaccctgctatcatgcatgatcctcctcaaggacatcccatgacaacttgagccaagggcgacatcttctagcctcaagtcttcattgggacatgttgtgtggaatcctagttcatctaaaccttgcagtgttgaagaagcactttcacatctaggttggagtaaagccatgaatgatgagaatactactctgaaagctaacaacacttgtgtacttttaccaccaacctcatatcaaaatttgattggcaacaagtgttagaatttatgccctgaaaagcataaatgttaagttattaatatttttttattaaataatttatattaaatattagaaaatctcttatttatatttgagattgtggcttgtagctgtatagaaaactaacaccacttaactatgaataaaatagtcaaaaacatattaaagttataaaatcttcaatcaatggttgctagtaacaattcactaatgcatgttctatggtgtaagtaatctttgttcatattactgatgtagtgagacatctaagttaatgtattgtatgtaatagagattatatatgacaatgaccgatatgaataaaattatctttattaacatgtcgtttatcataaagacctaattcatattataatacttatcaatagtagatcgacctaaatcttaaattatcatgaactcttattattagttttttttattcactcattaaagtttctcagataagataattcttacaacttatgttttgagaatctaacaatatggatggctggaaaaatgatgtacaattatagaatcccgactttcctaacacatcaaatgttggttccctttaagtgttaattctggaattggagtgttgtgcaccaattctgatgggatattgaattatacttccgctagtaaattaatgatactaaatgataaagaagtaattagaagagtaaaacagtaatttgataaaaactaattacgaaccaacacgtggagggctaatcactgaaattgattatatcaatggacactccagttaaactcattaatataattctacaattactaagagttcaattctatatttatagtagcgtaatcatgaaattattaaacaatagattatttggttgaaatagattatttggttgatgagactcaataaataatctagtttattggagcttaaaattataggtctatggtccccaaattaccatcgtgaaactgtcaagggtagggataaaagagttgtataaagatatttggaaaaatctattttgaattgacaaaatagtaattgtttatttttgtaataaataaataattttttaaattgattaaatagggaaaagataaagattgttaagataaatttgtgaagacaaaagttgtcaggaaaaaatacaccaaccttgtcctaaatagacacggtaggtgcttatagcgtatgctatccctatagagtttttttttttttagtaattaattaattatttaattaattcaattaggtaa

SEQ ID NO: 302435 - DNA, 1002 bp, Cannabis indica
tcataaactaagaattctattatatagacacattttatatagaatagatatatatatataaattgatttgttaatataacactaacataacattaatctagcccagtttaaaagtttagacaaaaaataattacataaatagttgtataatgataaattctgagagtatgtatgtacatttttaaagctattggttgtatgtttaacgtcaataaactgaattttatgtaattaaaagcttttaaataagtccttgtattacaattatacatataacttatagcctcaagcaaattgtaacttgaggggatatttgcaataatttacatagtttaaggggattttttgcaaaaggaaaaaatttagggaacaaaactttacaagatcataattcaaggacaaaaatcttatttattctttttaatataatttataaacagaaaactttaaccttttattgatttatttaaaaataaaaataaagggatttatgtcaaattttatcgattttttttttttttgaacttataaaaacatatttacatcatacttatatattaataatatttgtaaccaaatattcttaatagttaaaatattaattgaaacagaaataattaataataacctaaaaactaattacgaggttaatataaatcattacttaaaaagcataaaaagaatggttgagatacaaaatggtcctaaatttagaaattaagttagtaaatgtccatttttatatacggaatttcttaatgggtattacccatgaacggttactaaacaaatttaactatagatattaattttaaaaatatcaaaccatcaaattttgatctaataacgaataatgaaatcacaaatttgaattgctatgtttaatttaactacttaattaaaaaaataaacaaaaaatatctctttttacactatatcaaaaatatgttcataaaaaaatatttaactcaaactcaactttttcttttattatttttcttg

SEQ ID NO: 302436 - DNA, 5021 bp, Cannabis indica
tttgatggagtttgttggtctaataataagtagttttcaacctctaattaactgggtgatcatgatgatgatcatactggtttcatttgttgtactgtggagactcttaatttcaccttctctagcacacatgaaacttaggagaaatggtttcaatggcccatctccttgtttccctctcggtaatacaactgatattatggcaagtatgaccaaaaccaatgcctctaaagatggtataaaccatgatattcattcaagggtgtttccttactttgctagttggcaaaaatcctttggtaagaactaatataatctaactgataatcttactatatatatacataaataattaatgactgatcgtgtgtgtgtggtatatattataattattgtagggaaagttttcatctactggctgggcacagagccatttttatatgtggcagacccagaatttcttaaaaatgtgtctggacaagtcatggcaaagggttggggaaaaccttctgttttcaaaaacgataggaaacccatgtttggaattaacggtctcgtcatggtcgaaggtgaagattgggtccgtcaccgccatgttatcactcctgctttcaacaaggccaacttaaaggtcctctattcatacatgcataataaacccatatatatatctacccctttttcaactgttatagcataatatctaattgtaagtacgtacatatatatatatatataaacaggaaatggcatgtttaatagtggagtcagccacaaaaatgctggatggctgggccacacagataagttcaggcaacccagaaatcgatgtagagagagaggttataacgacagcaggggaagtcatagcaaagacaagttttggcataagttacgaaagtggtaggctagtgttagagaagttaagagctttacaaaccactcttttcaaaacaaaccgttttgttggggtccctttcgcaaaattcttatgcccaaacaaatcccttgaagcaaataaactgggcaaagagatcgacggtcttttgtactctatagtggaagctcgaaaggtagagtctcaaaatattacaaaaaataataataagaataatgacactcatcatcgtcaagtacacaatgacttgcttggcttgttgcttaaagaaagtagtagtaatggagtaggagctgttaagggggggagcagcttgagcacaagggaacttgtcgacgagtgtaagacgttcttcttcggcggacacgaaacgacggcgttggctatcagttggacaatgctacttcttgctatgtatcctcaatggcaagttgagttgagggaagagattaaacaagtcattggtgataaagaagtggatgccactttgcttggtggcttaaagaaggtatgattattattaatcgtgttttttctacaactttaatatattatatttttgttaagattagttatattatgattcagtgtttttttctaagttaatttgatctgttatatacggtataaaatttgtttgaacgtacgtacgtagcgtaatttttcatatattaaatcataagaacgaataagcaattattgcaccaattttgtttgttatagtaccttataatatatgatgtagtagaatattccaatatgtaatctccatgtatagccgcatcttttattattaattctatacatttttttttttataaatattagtactttcataacgatcatatcatatgtatttacattcagactcagactatcatatacaaaatgacaaatgtttgaattccgactagagagatggtcggaggtcaaaagtcaaaaggatagatattggccataatagagcaagctatatatattccacgcgtgaaagcgcgtgacaaagaaacacatgcttcccatggttttgtttttattttgtttttttagaccactctctacaccacttatcctcaaaatcctcatacacgttctccatgtccttatcatatatatcactacaaagtagccctttttctcctcttatatatatatgttccttttggtccctacacatcaccatatagtatgaacaaatcaagactttatttttaaaaaaataatcaataatttcttgctttcacaaggcaagcgtagagacaagagtgtagcttttcttgtttgtttgcatttatgatccactaattaccaattatttatacttgttttagaaaatacttttgatgtgatgccatagatgatattatactgggatgtggcctaattcattattaattaattattcaattatttttgtgtacagatgggatgggtaatgaatgaagtatttcgactatacccttcagcaccaaatgtgcaaaggcaagcaagaggagacattaaagtgggggaccgtacgatccctaatggcaccaacatgtggatcgacgtggtggccatgcaccatgacccagccctatggggtgaggacgtgaaccagttcaagccacagagatttaaagatgacatattatttggaggatgtaatcacaagatgggatttttgccttttggatttggaggaagaatgtgtgttggtaggaacttgagcatgatggaatacaagattttcttaacccttattttgtctaggttttcttttaagctttctcccacttatactcactctccagctattatgctctccctaaggcctacccaaggcttgcctatcctattccagcccctttaagttaaccctaatatatataattaaactagctggctagcactaattattactatatattgtttatgtctaagtatactgggtggttatatctagcccctcagttcattttgagggatgtagtccctcatcaatttgttatataaaatccaacagtagttagtgaacgatagtaatgagcggtaataatgaggggtatattttgtaaaacttgtaaccggttgttccgaagtgcattaatataataaatataaaaatgcattattgtactgtctgtatcaaattccatttggctggcctaattattttttctttagcttattttaactttttgaagctagtttggtaggttcggattatattgtgttaaataataagtgacattatatttgaataaaatattttattgcattaattattacgaacataaatttaaatataatatgaatcgtattatttaatatttaaaaaataattcatatatttgctcgtattataatatttacaaagggtccggggttggggaccctggccctagacccaacccaaatcctgaacccttaacttggactcagactctgacccgactctagccccagatcctggaccccaaaccctggcctggaccacagacccgaccccaaagtcagccccaaaaatcgaactcgaatttagacatcatacccaaactcaaacccggaccccggacccaacccctgccctaaactttggacccagcccctaccctgaactcgacctagaccctaacaccgaacctgaaccttgaccctagacccaaacttaaacctaaacccggccactagacctagccctgaccccgaatcctagacccggaccctaaatccgaatcctggaccctgaaacctagactcgaaccctgacctcgacccagacattgaaccccgacccaaacctcaacccgtacctcaacctggacccagccttggaccccagactcgaaccttggacccaaaccccggacccccgacccaaacctggccccagaccccgaacccgagcagggttcagagttgagtcaaatttatgctaaaaaaaatataattttatacaaggtactaatacaagttaatactaaacatagtattgtacgtattaaataatattaatacaatacaatacgtgttaattttgaggtactaaatcaggtacgtgacctaaacattcatttagattatcattgtaccacactccaagaatctctatatatacatatattaaatctaaaataaaagatgaaaggatttatttacctctataagcgaatcaggatatcatacttgatcttcattactctaacaagattacctctaagtattgtttcagcttcaacaattacttctgcaaatattccattgcttcatttctattcttccacatttatttttgaactaaatttcttagacattcaataattaatataataggcactgatctacataatatattgactctactacgtttgaagtcatcatagtgtacctcctagttgggtagtggcttctggtccaaacgcgatgtcctacattttccaagtaaagtcctatgtgaatgttaattttgtcaatttctgacatgtaatgctcaaatgagttgatcctatatgttttggcaacaaagttgatagtgaggtcatttctatgatcacaaaagtttgatttgatgttgttaagcaagtggaatatgcaagcttcgtgaaagtggtttgggtaaacgatcttcacggctttttcaatacttttatgtttgtctaatattattgtactaattttagatatgtcttgtatatatattttagtcttttgccagtaactggtttttttatcactaaatatttctcttatcttattgataaactaatcccaagagtcatcattttttgagtcccctatttcgaatgccaatatgaaaatgttgttgtttgcatccattgtagaagctaaaaataaagtccccccaaatgttgtttttaagaaggttccatctacaacaataactcgtctacaatggttgcacccccttattgaattggcgaatgctagaaacaagtatttaaaacaatctttttatttgtttccaagtgtgtgattgttcctagatttgatactttcagctaggggtgttcatcaaaccgctcaaaccgcccgcaccgcaccacacccccaaaaaaatacggtttgaaattctttgcggtgcggtcgcggtttgaatttttcctaaactgcgcggtgcggt

SEQ ID NO: 302437 - DNA, 3478 bp, Cannabis indica
atacatattatatatatatatatatatatattaaaaaaaccttaaattaaacagaaaatggtttttttgagtatataagttggtatttagttttaatggcacaattcaacttaaagatttattttgaggttggtgagatgagtcctttaatttgcatactaatggtcctaacttctaaggtaattgaaattaaaggcacacctaaaacaatttaaagaattaattactttttattataacaaaagaacttaataaaattaatgaaatttcgattttataattaacatttgaattttaacaaataatttattaaaattgttaaaaaaattatttaaacaaatgagaaacaactgataaaatttatatttcaaaaatacgtaaattagttactgctctcttaaaatcacaattgatatatattaactgtgaaacataaatcacgattaaaaatatatcaataaacaaaatattaattttgtttacaattttttaatattaatttatgtaccaaaaatatattaaatcaattttttaattaaaaataatataaaatatgtgtcaaaagaaaaatacatagtccaaatattaagaatacaacacctagatttttaaataccattttaattatatttaatttatataattaaaattgcataaattttagaaagttaggttatttaattacttttaaatacaactttattacattacaatttatctcaatataaataggaaggaaattgcatgaaaacataacattaataatactaaattaatatatgtatacatattttttatttattgatttttttttttaaaataaaattcattcatgattttaggggacgactgacccacctcgcctctatgtgggtccgcccctgtacataacactagctttgaataacaaagcttgattgtccagtccagcaaccgtgtcataccatatcagtgaatttaatgtaaaattgaaaataaaatattatttgcaacatatgaagggccttggcccctccctgcctaaataattttttagttttaatttagttttctttttttaatttttaaggccttaaaataattttttttacactttggctctcgcataattactttctgtcttcatctctaattgtgaagttaacgagacatttttaacaacactaataatttaagaaacatgatcttatcggtgacaaaattcagggaacaaattaaatacatatttattgtactaattactattatcaaatattgagtactatttacatgaaagtcatccatgtcggtcttaaccctaaaagggtcacatttttatatttgatataattttgacttgtacaaacaatttaagtcttaactaatgttattttcaaaagaaaaagaaatactacttttatttcaatgaataactaaaatattattatattaaaatgtgaataaatagaatgaaagacttttccatattttgaattaaattaaccaaaccataaccccaaacaccgacatttcatcttttatatatttaagataaaatagactaaaattaacaattaatattaatttaattaatgtgattaacacatactcaaggagtcaatggtacttatatgtacattatatttagattctagtgtaattaattacctttatatttcttaatcaatgatgacatgttattttcaatcacaaaattattaatttctcatttttcataattgcaagtttatttgacaaaaaaatgataaatttgcatgtactactatattgccaattttgtctatttatttgtacagaaatattagaaaagcatatacaaaatattaatttaaaagcatgaataatattggacaaagatgaggcaataaaaattaactattcttaattgtcacataaatatattttattttccttccataaaaataaagctatctttttatatatattgacattttgataatgtcgacaatgtctagatcaatcatagaatttaagagacacacattttgaaatttgtcaaaattaaattagattgaatttatttgacttaatttttaaatataattagtagtcaaaaagttttgtagcaatcaccacattggaaaaaattatttccaaaaggaatttaatgttattttatactcttttttttaatttatattttaataatttatgcaattttattaatagtaatatgtaatttaatcaggtgaccgatcccaaaaaaagagaatgtgatgagatttgaattcttgaccgaaaaaaaatactactaaaaatatgcctcaatgcatggtctaaatattcgtaatttgaaaaatatatttttaaacttgtgttactcgcttaaaatagtgtattaaactcaatttttactgaaatatttttacgatatcgcatactttatttataagttcattgactcatgtgcaaaaattaaatattaaaattaaatatttaattttttttcaaccaatttacaaggtattttttttaatagcattgactttcttcaaattcgaagatatttctgtgtacatttttgcttttagtgtaaagctcaaccaatattgatatcgggatcagaaaggagatccctatcaatggtaggagaaaccataactcgttagaacaattatttagtaaaatatttaaaatatatatatcttattgaaaaaatttcaatttgatcatgtaacatatttaattaataacgatatttctttttgccatattgattaataacgatgttacctaattaaagtttttcataaaattaaaatatgaaaaattattaattattattagagaatctttgtgtttagtgggaaaatgaaacaaatataattaattaaataaaacaagtcttcactagttgctgtcttaatatcaagttgctaaagcctaattaagctactattacattattaataatttggtgtaattaatatttattaatggacttgatttttcattaattaattattatctttataattataagtgtctagctagttctagcacaaaatatatatatatatacctaacttaactaaatagtcaatttattattagtttaattattaatggtgtttttatggggaatttcaagatagcttattttaattaatttgacttataagttttaagaataataaacctcgattatttcaaccacaaaaataaaataaaataattattatttattatttttgtataaaagaaattaaagaagaatgaacctcgatcaaagcaaaggtcataaaatcattaatattattaatttaattaccattacttcttccaatgtagtaaacttttccagcacacacaaacaccaatacaattaaataaataattaattaaataataataaatattgatatatctttatcccatactgtgggtgcattatttaatttggactactatatatatactaacaacacatatatctttttttttattattatttgtt

SEQ ID NO: 302438 - DNA, 6621 bp, Cannabis indica
atttatggaaaaaagaaaaaaaaaaaaaacacaattgagagagaattttcatagcaccaaaacagttaaggctaaagtacatataacagaaaatgatatctaatattcatgaaaagagaagctctaccacacccacctgcctataactatctatacgatcttttatgttgatataacatcagttcatatatatatatacagatataaaaggaaagtcctctgtcagactcatatgatatacacacacactctctttcttctctgcaacttaaaagggaaagagtgaaaaaagagagattaggttttaaaaaagactcaagaaaagaaaaaaagatacctatctttattactcacttcattatccccacacactgctatactatagtactactactctactttcatgaccatatttctggaaaattattaataaaaatatcctaaatcaataatcccatgatttctttttcttaaattaagaattgggttttctcttttgtggcttttcgagtgaagtacctgcgaatagatcaaaacaggggaacttcttctgatttgaccctcccttttcaaatcatatgatgcaaccaggcaaccctttaatgaaaaaatcaaatttttttttctttaaaacaaaaaaaaaaaagtgaagagagagagagaaggagaagaaatatcttacattctcaattcctgggacatttattggttgaattccagctaatccttgagtaagtaaactgtttcacaatagagagtcagaaaaaaatgaaactcaaaagtggaacaataatgaaaactacaaaatgcaaatctcattagtaatttgagatttgcccaaccaaaccatcaatatttgctaggtaggaacgaagttgactaatacattgtacatatgagtgttatccttcccccaaaaaaatcattcatttcattcatacctagcacgaaaagcaactccgagtgtccaatcagttgtagcgtaagcattgatgaatcttcccgcaaccatctgcataaaggagcttattataggcaattaaaaagatatacgaaaattaggtctagatagtgtttgagattgaaaaacaccccaccaaaatcagtgcggaaggaaaatagagtacctttctagcagctccccagttctcatctttaatcgaaatcggtgctccaagaagaacaactctttctacgagttcagctatcaacaatcattacattagcatcattctatcagccaggatattttaaagagggataggtgagagttaccatttttttcagtttcagctaaaaactgaagacacttgaaaataacacgtgcaccaagcgagtaacctacaagtgtcacaggcctgaaagattcatggaagccaaaacaaaaacacagaaattaaatagataaaaacttgatataggagctagcaaactcatttaagttaagactagccaacctgttcccgtgaaccccttttaacaacacttcagcaagcaatcttcctgctttgtccgatctagaaattgtcaaagttttagtaatctagtcaaaaaataaagcacaaacactaacattaacttttaaaagcctaaaatgggaagtttaaatcatatcagcaacagattatcttagcattaatgtccagaaactaggctggtgcaataatctgatggcttctagatcggacaagatgttgaatagaagagaaatgacagttaacatttaatttcatcatgaaatacaactaccaaattccatgatgagctaaaactaagccacaactgaaacccaactcctaaaacaagtctatacgcagctctcacttctagattttggtattttgtacagtaaattcatatttgcatcactggctaaaatcaaaattaatatgaagacttgaattggatgtctctaataggacaaataaaagttttctgtctaacataatcacaaaaatattatgcaatatataaaaataatcgctgaggtggttgacctgtcaaccgcaattgaccacgtgctgtctatgaaatcagtaactgcaagtaaagttgctggccaagccagtgcagccacaagtgtgcttaacacagtcatcattgcaccttgcttcatcaattccaaagcaattcctaccaaaatgtagcacctacgttatcattgtccccatactaaacagaaaatagcaatgagatttaaatcatttacttgatgtaagccaatcctggattgcagtgctgacggcaattagattcttagactcccactgcagcacatacctgaaaaaattgccacagtgataagaaggaattaagtttcaagtcctattctagatctatctaccatgttcaatgataagttctttattcataataaaaaacatacgagatggataaatttattgatagagcttccctacaaaagatttatatatagcataataataataggcgattgagttgataccctgtttcaacttccaactatgttcacaattctcgcaaacaaaaaaggtccaaacgaaaaaactatgtttctctttgtttctccaatctcccactattttatttttccacccctctagttttcttagttttcaggcaacgtgatcagagaattcttgacattcaggaaaagtgattaaaagcatatatatacctttctgagttatcatcttgtacttcccaaggccttacaaaatcctcctcattaaaaaccaatcctgagatcatgatcccaactgctaacctctggcaaacatagaaattaaagttccaatcaatcaaatttgcatgcacatgaacttttcccgcttttctgttttcgtgttgggaaagaagagagacaaaatataagattgacaaatgaaattatgaggggagattggagaagaaaaaaaatagacatggaagatttccaaataacaaccaattgttctcatcaggtgaaaaacaaaaagggctcggaaaactcactccttgattatgattttcttctcctacgactttgaattcaaactcatcaacactcccagttctcctagccattttgctccctgtaagtccagctccagcagctaggtttagcaagagcatgcaaggaaagccagttagtgttaataattcgatttagactcaggaaagaaaatcctgtcattttgggatgaattatttttcaaaacatatttctgcttttttatgttgatattacagcaaaggagcatcttcaccttaccatattataattctaacacatgattttattccactgaacataaatatataactatgttgatattacaaaatataatgagcaaggacaatacagcaatcatatataataatatgtaaggggaaacaaaaaactatctatataacatgaagtgttgaatttagtaaaaggctcacactaacaattcttctacatgctcccatttctaacaaaaggggagggggaatgatgatgcagtttattatatgggtgttccaaatatgctggaatgacttagttatactttccaatactttttctgttacatataataaataagctaaacaaaaatatcatttggaaatccaactatggagaggttgaggaagtaattaaacaggaaaagaaaaatgattttgagccgtaagtataacaaagtatggaaattgaaactgaagctgaaaagccccttagaaatgagatcaacttttgagccgtaagtataacaaagtagggaaattgaaactgaagctgaaaaaccccttagaaatgagatcaactattcacctccgaatgatgcagcaacagcaacagatccagccacagttcctgcagcactagctacagcggcaaatcctcctgccccaattactggtaccagagtacccaatgtcggagctaaggcaccaagtcctgcagctattgctggggcagctaaacctgttgaatgaaaaacaccgagcaaaatcaaaaaaccatcaagccataagaaaatcatttcaaatggaaataccaacatacatagatataaccagctccataccaccagtaattgccagcaaagttcctccagtcaatgcagccgcaccaattataccacctcgcttccacttggcccattttccttttgatgaatcgggtacttcatttgattcttccttttctttagccaatgccattgcagagcaagcaacaatcgtctcgatagcctcctgatcggagaaagcaaaaattctgaggttaaaaagaaaatgtaaagaataacaataaccttagtatactgagaaatcatgctcgtacacaatgccacttggaccatacagaaattgaacatgagaaacacatgagataggtgatatatgctgagtgtcaaaatactattccgaattctcaattacaaacatgataaagcagcaaaattccaaagcatcacatcacacaatgcacacttcggatctcatacaaacttatgctagcaactacaaacattagatgaacaacacaacaaaggacaggttttagatacaaaccatatttatccatttgacatctagccaagtagccaataaccgcagagcaacacgatgccgggcatcatatccctttcttttacgggtacttttcttgctatctacatgtgtatcagctaggcaagctgtgagaagctcatacagaaccgtcactttcctctcataacttagcattacttcttcaatgggttttttcaacaacaactttgttttcagtcaccaaatcattttcaccagtcttctgcttaaccccagttttgacacctgcttcctccaagtttgattgcacttccgctgtagaacatttctccttacactcatttacatattcacgatatttttccttcttagtctcggaagcttcaggatttttcttcatgctacgtcccatagcatcaactgctttagacaaagcaagctgttgatcttgagaagaattctcaccattttcctcctccgccaacaacctcaagaactaagacaacagaacaaatgtgatatcatatccggaaatttgccaaactaacaatatcaaaatgctaaattagaaaaataaacaaattgactttccattttgcgatcataatgatcgcacagtgtaaatttatggtaataagtaatttttggtagcatttttacaaaaacactcatctgaatcccaaaatgctctccccgcaacacaaattataatcaaagaaaagaaagaaagaaaatgaacatactgctccaacatgattcttagcaggagaagatccagcagtttcctcaagtccagaccaagccactgactcaatctccaaaaacctatcaatgcaataacaacaaaatgcttggagtttcaaattttcaaaaaaaaaagataaaaccatatatcaagtttcctcaaaatgcgatcatcaaatcagccgcagacaataaattaatcatccgattcaaaatcgaattgacaagaagaatgaacctaaatacagggcgaagaagtccagagacttcgtgaacccaaaggtcaggatcgtcggcgaccgagtcgctactggtggaagtactactactgcaactaccactactgatccgattatcggaggagggatcatcatcgtcggaggagaagaatgagcccaagggacgggtctggttgatttgggcgtggtggagagagaaagcgaagagagctccggccgcgtaacgttgggttggtgtcaaaaacgacgtcgttttggcggtggtatcagccattattattattttaactacctgaaatgaatttttctcaatgcctctctccttttatagtttttgtttgacacgtacatgtggcttttaatggtgagtgagtgtgttagtattttgttcggaataataataataatgtcaaattttatgcattaatttttattctaatttatcattagtcaaataagtgataaattgatataattattaatactggtacacaatccgcaaaggattgaaaactgaaactcttgatctgacaaccaagatcattgtcctcactgctcaagcggtcaaggttcgagagtagatgaagaaattgcaagttgaaaatgaggactttttggtgagaatggaggtcatgtagtcccaaactactattgatcctctacctcttccaacacgttttcgagttttgatcagtctaatgtagcccttggagagccttattcccgattccattattggcgaatcgagtgagatagatccgttagcctcggtaaggaaccaacaagcttaacccactgtcactaatacacaaaattctactaataatgcaggtgaacaggttctttggtggagcatagccttgagccttggagaaaaactctcaagatgttagttttttctttaatctttcctttgaatgtttttgtgagtgtacttcatgttcttcaggtatattttcatgtagttgaatggtaaattttgtttgatccttagaattttgtgtttgtatcaaatctttacgggtagtaaaaacttatacttactgtttgtccttgtatgatagttgatttgaatgggaaatttgattttctatgcttaaaaaatcctaaaattatatccctaaacctaaatgttata

SEQ ID NO: 302439 - DNA, 1977 bp, Cannabis indica
ttaaaatactatagtccaatttttcaatagataactatgcttaactttaaaataatagtaatactcatattcttatcattttggaaactaacaaaattcttagataaaaataataatttattctatgtaatcactatttccacatcaaaatttctaggcataaaataataacgaatattttggttattacagagagatgaagggttttgagagtcacctaccttttcttttcccttgtcctatacatgagtaggggatccagcatcagcaggattttccctgttatttcctccgacacattccactgagggttcataatctaaatctccttcgtcgagatctctaaacatagcttgataggcccttcgagtttataccaaaggtagacgtctgtaacttttttaggggctcagtgtccttgataggcccttttagtagccgctcaggtatcatttgggcagtctatgagctttgaccactctgagtcccatagtggtaataggtcttccatgtctgggaagctaaagtaaggcgaggtagacttccgcatacctcttaaacttgacctattcccaaattagtgaatcttctccgtgaatgggtatttattaagagattttaattagtgagcttatgagactatctctccctttttatggcacgtgtcacctgttcagaattacggataacacttaagaaaatgagagagatggaaagtaatattgttaacctaaacatgcaatggctatatatatactcattatatatttttcattcgataagagtggtattatacagtcttacacacctatatatgtatgtatatatattcatatgcatgttaatatacaatatataatagagagatttctgacttactttgttagaaaagaaagattaagagcttgcattttcctattatattatatttttttattgtcttcttcatcaaattcgagtgttaagagagtgataaggatttcataaacccatataagtttatttaattgttttagaatccatgttaggttgttaacaagcacatacttgaatagtaaaaataaaatcttggtaaaatatgctttccaacatacccgtcagtaaaacaaccataactcactcaatattactctgattgatgcaatttcaattgcctttgaaatccattttcaagatctttttacatgtgtcacgtattcatatctcaaacatgaagctctaaagtaaaaaatttgttcccaagtcaaatgcaatttttctctacaagaagcctgaaaaggatccaacagacactattctagctccaaaaattgacaatcatcatcaagagtcattttaacaacaccatcaattttcaagatcaacctacaaacattttttttcatattttttgtatacttttatttataattaaatagacttcatttcaaataaaaggagaactccattccctcatttttacatactgctaagtatccctaaggttagagtatttttctctagtttatttctctagaaacattagatctttccttagtcaattctcttgtaattctcgtgagtaataaaaattaaaagtagatgtagctccattgccatcaagagtgaactgctataaattggggtgtctctattatttgatttcctttatttattacttttctcaccaatctagcatggtgttagccaatttttatagtgtcaactatgttaaaaacttaaaatattggtatagaatggcatggacctatggcccaatgtttgaaaaaacaaacacaatacagaaattatttcaaaactatcactttgagtactatttttcattatgagcaaatattagtattgctaagggtaaatgcggatgaagtttctattattaaaacgattaacatcagtataagtagaaaagtggtattttaaaaaaaaaaaaaaaagtaaatgaatcccttatcaaataggaaaattatagtaaatggc

SEQ ID NO: 302440 - DNA, 2653 bp, Cannabis indica
aaatttgaaataatttttatattttttaaataataatattgtgtgtactaatataaatgtgccacgtgtacaagggtgtacacataaacactttatgttggccgttaactgtgaaatatagatgacccattaaatttactaacagtttagtattttgaaagattttactgttaaaatttgagcttaaaagtttaagtgcaagtaaagtgatagttgagagtattatgatattttattattaagatgtttatttaaatttaaagatatggatcttaaaaaaaaaaatgcccctaaaactcttctacacatataattgttatatttcaaactgcttaattacttatatattgcttcattttgatagtaataatttgatagttttaatagcaaagttattagtttgtagaaatagaatccactaaataaatattggtcaaatttcagctgtaataggaaaagaagataactcttatatagcttatatagcttaagcttatatagaaataaatggtgaggcctgtaaaattacggagacaaattcaggaatttcaacaaacaagataactcttcaaaaaattattgagctggattaaaatcattacagaaggaataaataaaaatgtcaaaacctattcatacacatgtaatgttgccaaaaaatctcaaaatgtttaagagttcatgccttggaacttttcagtggagatttactagcttcttctgctaaagaggaagaatcatcatgcttgcttgttaaatcattttcttctgctgtacttatttcattataactccttttctttggggccgaatttgatttctccatttcattctcatcattcttctcttttgctttctcaattgtgacatctttatcggtttgagtttcagcatcggaggtaggaaacaacggaggttcccgaccactcaatcgacaaaataccctttcaactgtttcactgatttccttacccagtccattattgtctaaaattagatcccagaccgacttagaggccttctcaagtaccggagtcctgcatcagcaaaagaattacaacttgctttgcctataaacaacttacagaaatacaaggaaacaaagaacaaactgaataaaaatttaagcaacatagaaactcactcgagttcttgtctgagtgcatcaaaaagctctctcttggtttgtttttcggcaccaggagtattaagaaccttactctgttctgccattttaatagtagtattcttgagttcttcctgtaaaggaaaagtacatacataattataaattcacaccattcctaagatttccaagacttcacaagctgcactcataacaagaaaactttgcacataagaataccataaaattcaaaacttcatcacagaaactagagtttgacaaaagtcttgtattcaggctaagcaaatttcaactaataagagcaatttggactaagaataactttacaaccagaaaggttttcacaagaacagcattaccatgttcctcataaaaaattcaaaataataataataataataattactacctaaatcaatttcaccccaacacagtatttcagctcaaaatagaccaaatttcaatgaagttgtaggacaacacaattatataattgaaaaaatgaattgctaattattattagcaaagaatgagaggagttacattggctttgagctggttgatgatcttcagtctgagagaatcaatggtgccatcgttcatcaacatttccaacacatcttctggggttatcagtgaagatgacgccatttaaacttgtaacccagatgtcctccttcaataacttcccagttcctatgaatccaaaatccaaaatcgatgtatgaaactgagagcctagaaagtttcgacttttcttcagagtttgttaaatttaataaaagaaaattctaaaataaataaagacaagtagaaaaaattgttttgcactaagtttatataacaactaaaacaaatgaattaagtagaaaaaattgttttgcactaagtttatataacaactaaaacaaatgaattaacatacaaaatagtcaaatactctgtaatttttggtttagaagcaagacaatctaatatggaaattttcgaatatcattacttgagtcagtttcaagtgcttaaaaacaaaaataaacaagccaaacgagtcagtggcatgaattcaaaacagagtttagcccccaatcaagtatcgaaaccctagtgcttgcacaaatcaaaactcaaattcaaataattaaagaatgtaacatattataaggaatagatacaaattaaactagtacctgagaagaagaaaaccttgatcttgtttggagaagcggtggtcggaggcaggggtgatggtacgtaggcgacgataggtggtggtggagacagaagcaataataggagaaacaaatatgaacgaatgatccttcttctagttttcgggtttagatttggattgggctttgattctgttttttttttcctattctttattattaggctaattagtaattattcttccaaaattttgacatgtagtaaatcgtacccttgaacttttttgaccgttaaaaattcccctcgaactattaagattgttaaatttaaggactt

SEQ ID NO: 302441 - DNA, 2977 bp, Cannabis indica
aaaattaaaaaaaaaataattaccaacataaaaatattaactactaaaaacttataattagcactcatctaaaaaataatacaagaatcctgattaggaattgtatacccattttgaattgttctatactatttgtttgagatgttaaaaaatgatcgatcagacatagatattagatcatttcaaattttaaacgaggcaggttccacacagaacaaatagccgcacacaacaaaagtgggtgggttgtcaaatgttacatattgaaacttttcttgtaaatatcaacattgtccacatatacaattaaatattaatcaattcaatacctatctatacttatctaccattaataaaattcatgtttagcttcttctcacttcataataaattaataatactataatagtttgcctagtttgccttcaagttcaattccatatttatctacaagagtcagtcacattatgattaaaaccaaaatccttgccgacacatagttgtaaatacgtgcgttcagccgtgttacctcgacttttttcgtattttttaaaatataaatcgtattgtgctagttaataaaaaaaaaaatatgtgtcgtacagtgtcataaaaaatgtgagtcgtggcgtgccataaaaaatataggccgagtcgtgccataaatatagatggcgttgtgctgtgtaataattttataggataggcccaatacggcccgtaagtctggtaatttagtaccgcaagtcttttctcatcaccatggttcaaacacgaagctctgatcttgaagctcaaccctcacgagatgccaatggtgaaaattgctcttctccatcagattcgaatgcccgaagctaaaatccttatgcaagaccgaattcccagcatcaacaaggtttactccactctcattcaagaggaaaggcatctgtgtccatggaaattacatctagttcaccaagtcactttgctggaagtaagttctcaaagtgtcataagtttcatggaaggggaagacctttttcaaccactcagaagtttgttgctcgccatgttagagtctctaaagacaagtctgaaaccatcaagatcccaccttcagatatgactacatgtccattcaagagaattctattgcaccagaacaacctgatcgacccctggtatgaattctcttgatctttctaagtagtggagaattgatcctggagccacacacaccatgtgtgccatgatatttctatgttttctcaaacctttcctaatcaatttctatcttttgttacccttcttaatggacactttgcatcggtcttttgcatagagtctgtaattttgtctcccacccttactctttcacttcaatcttttatatgtgagttctttaacaaaatctgttcagtgttctttctcatttttcaaaactcactgtatcatttaggaccccacttggaatatggaggtgaaaggatggacaacctatatcgtttcccatgtattgatcaattcaaaaccaagcgtagattttggcatttttcgattagccatccctcatgtatccaaaatcatacattaaataaagattttaatttccttctgttgatgttaaattacacaacttactcaatctttctattcactaaacacgagactctgacagctatggaataattgttataacttattttactaggattttatttattagtatgtatatatattgattattaattaataatctagaccatatttttctaaattggaatataaatatcttatgtttgagtatacttacaacgacacagcagaataattactcttttcattcaaccacttaaacatttgattctttttttagtaaagtattatcaaatgatgaatacagatcttcttttatctgaatatgtaattaaattttattacagtcttccacatggtcatgggtaccacacatgattagtgtgagcaatttctaaaaataagatgatgattaaaatctttgaggaagagaggagaaattttgaaatctctcctatgaaggaggctatttcaaaatatgcaagacaagaagaagagagccaattgatggttgaatgaatttcctctataaatgatctaattgaataagaactaaaatttcttcattatatatattttatccttaaattttaatttggttaatattagcttttgagcattgcttttttttttttaataatggggagggggatttgaatttaagatctcctttctatgagaagaagtattgaatcattaggctaagcctatcaccacagcttttgaacattgttacttttaattagttagtggtgtctaaaatcgaaaatttataatttcatacatattatataattttattacatattatatatataatttatatgtgtatgtccgacaaaaaaaaattacatatatatgattatccattttttgtgaacaaatgtatgatattatacatattattatataaatatatttattagtcttttgtaaaatatattaatattttttaagtttgtgcaagctttgatttatgggcgtctaaaatatacaagttaaagtgttaaaccatatttaaaaattattctgaataaatttaaaaattaaagaaaaatactttaggaagtgataattacaactttctagtataatttttttcagtcaatctctactttcaaaatcatatattgtaatattttttttttcaattttttataacagcattcgttagagttacaatattatttttaaaattttttttttaaattttcgaataatttataattcttaatattgtgttcaaaaacttcaaatttatttttggtactataaattatttaataattttataagtataacaaacactactataaaaaaaatattctgccatgtattttttgataccgaaattaattaaaggctaattagtaatttttctctcgaattttgacat

SEQ ID NO: 302442 - DNA, 3589 bp, Cannabis indica
aggaccaaccaagttcttctgcagggtactctcagtgaagacttgtacaagcttcaactccctgcttcaagaaaagtcactcacagtctttttccctcccagtctgtccctcccaacaacactcctccacatgtgttcaattgcactaccaccagtaatcctgtctttgacaaagccaatactgctacggtttggcactgtcgtcttggtcatccctccaagcaagttttacaaaaagttctatctactgtttctcccaatttcaaatgtaataatgttgcattttgtgattcttgtcaatatggcaaattacaccaatttgcttttaaacctgttgctaataaaactatagccccctttcaaatagtgcactctgatgtatgggggccttctttccatgtttctcttgatggctataaatactatattagctttcttgatgactttacacgatatgtatggatttttcctatgcaaattaagtctgaagccacaaccatttttactcaatttaatgcctatgttgaacgtatgtttgagacaaaaataaaaagtgttcagttagatttgggaaaagaatattagcctttgtacaaattgtttcaaaccttaggcattactaaacgaaactcgtgtccccacactcatcctcaacaaggccggttgaaagaaaacaccggcatgttgtggacattggtctcacacttttggctcaggccaacatgcctttgaaattttggtgggaagcctttacttcagcagcatatcttattaacaggcttccaacctcagttttaaagtttgtatccccctatgagaaactttttcaccaaaaacctcattacaacctttttaaagtctttggttgttcatgtttcccccttctcagaccatacaacaatcacaaagtttcctttaggtctgccaagtgtgttttcataggatatagcatctcccaaaaagggtacagatgcctacatcctattggccgaatttatgttgcacgaagtgtgacttttaatgagacagagtttccttactctcaactcttttccaaatctgtcttgacctctcagtcatctgcacctattcttatcgacacagccacttatagtgtgcctagaccttctgttccacctcatgccacaccaacaaactcacctacttctcaatcaatttcctcaagcaactctgctttaccctatcctcagcagcatactgctccacactctcagtctgtctcaattactactgagtcttcttccctaccatatcctctccacccttctcctcacaattccatcactccctcttccagttctcaatctgccaccccagaattacctcccactgtccatcagcccctccctgtggctcataacactcacagaatggtcactcgtgccaagaatggcattcataaacccaaatcttatcttgctcaaagtgttcatgagttagaaccaacatcattaaagcaagctcttgcttctccacattggaatggtgccatgaccactgaatttcatgctctcaaaagaaaaggcacctggatcttagttccttttatagatggcatgacagttgtaagcaacaagtgggtttatagagtaaaatacagcaaggatggttcagtagacaaattcaaagccaggcttgtggctaaagggtttcaacagatacctggcctagattacttcgagacatatagccctgttgtgaaaccgtgcactattcgactaattttctcactggccatcacctacaattgggacatacagcagatagacattaacaatgcgtttcttaatggtgagttgaatgaggtggtttacatgcagcagccaccaggctttattgatcctgaatttctcatcatgtatgcaaactcaataaagctatatatggtctcaaacaggcaccaagagcctggtttgacactctcaaacacactcttatacagtggggattcatcaattcaaaagcagataccagtctcttctttcatcatcacaatggccacttaattttgctactggtctatgtcgatgacatcttaattacaggctaggattccacttatatccaacacattatcaacaagttgaatcaacagtttgggctcaaagagctgggttcagtcaattattttctcggttttgaggttttcagggacacaacaggtatctatcttactcaatcgaagtacaccaaggatcttcttgccaaaaccaatctctgtgatgccaaacctcaatctacacccatgtgttctagtactaaactcagcctaactactggtgatcttctccctgatcccaaactttatagaagtgtccttggggctcttcaatatctaactctcacgagaccagacatagcctttgcagtcaataggctaagccaattcatcaaagcccctacaaccattcactgggctgcttgcaaaaggatattacgatatctagctggtactttacacctgggacttcatttcactcccatctctcgaatggaattacatggtttcactgatgccgattgggcagggtgtgtcgatgacagaaaatcgacctctggctactgtatctttcttggaggtaatttataagttggtgttcgaaaaagcaatctgtagtagccagatccagcactgagtcagagtatcgatcattggccttggctaccacagaaatcatttggcttcaatccctgttaaaagaacttcaattgcagctttcacagtgtcccataatctggtgtaataatcttggagctagttccttagctgctaatccggtctaccatgcccgcacaaaacacattgaaatagacctgcatttcctccgagatagagtcttagctcaacagctagatattcgctatgttgactctctcaatcaagtagctgatgtcttcacaaaaccactacctgcagcacctttcatgttcctatcaagcaagttgacactccaggttcccccgtgtcacttgaggggggatgttaggaatatagaaaacggttaggacagttagttaattggttaagtccgtttaaccttttctttgtccaactgtacatctaactgtattctgttttgccagcttgtgtatttcagctgctatgtagtgtaactatatattctcaatatacaattcaaaggcttacaagttcaactaagccatttcaccatcttcctctttcatctctcagttctttacattcaatctgttgattgaatcctttcactacatatcattactcaacaactcaaatcatataaaaccttccaaaataaattaaaactgtttcaattgaagtggcaatcaagttatagtatagtttctattgatagttatttatatatatatattaatatatatataaatttatataaattaatatagttcctatacataaggtgtgattcaactattagaaactattagagtgtgtttggaaagtcatggtagaattatatttgagtgtaatagagttaaggctaatcaggattgacatgtaccaaattatgtctcctgaacttttaaggtcgtaaaaaatgccccctgaactattgagatagttgga

SEQ ID NO: 302443 - DNA, 1755 bp, Cannabis indica
tattttagatttttagtgtaaaaatttctaaaatttataagcaaatcaattaatttgatatttttattttaaaatttgaattctgtctcattttgtgaaatcaatattatagaaaaagatcttttaatttaaatggactcgaattttgtattatttgatatgatgctaaaaataaagataaaaattgatatgattatattattaattacgaaacttcaataatcctaatcctacaataattagtgctctcacgtatactatataaataacgtataaatcaattttattcttccaaaattcatatctaatctcactttctctaacatctcatatcatactttttttcttcatcttttaacttcgaataaaaacatttcaacattcatcttcttcataatcataattatggaatctttaccaattagtactacttcttcaagttttcatactcgccatcgtaagggttttttattctgttgtggcggaacaacgttacttttcacaatcatagtaactttatttgttatcttgtgtttcacagtcttcaaaccaaaagagcctcaaattatggctaatcctacaggccttgaaaagattgattattcttttactcccaacatgacaataaatttagatatgattgtaacaatcgataataaagaaaactacggaagctttaagttcaagaactcgacggcctacgttaactatcgtggagacgttgttgctgaaattccaatagggcaaaatattgtccctgcacatggaaaattgaatatcacttcttcaacagattttatgattggaaaagttatatcaaatccaaattttttgcttgattttatagatggaagattgaatttgacatcaatagctattttgcatgggaaagtgaacttgtttaatattgtcaagagacatgctacggcttctagctattgtgatatttcgtttaaaattgatgataagaatattcaaactatatgcaagtctaaaattaatttgtagtttttttttttttttgatagaggaaaatttaaatttgggatcttgttagtgtgaattaagttagagtactagtgtactattaggctatgcctaactacaatcattagttttatttttttattttatttttttgttattagaagtttaataattttttatacatgttatatttaattttattcttttttattatgacaatttttcatcattttgaaatatatatatatatcttttataatgagttaagattattgataattattacaaaaaatttttttagttataataaaatttatcactaaaagtaaaaaaaaaaattaatgattaattaattataaatcatcattcttatgttgtgactaaaagtattagtcgcaaaagtacaatttcttgtgactaaatgtgtttttagttacaatacttgttgttgtgactaaaagtcacatttaggttcactaaatttagttgattttttagtgaatgaaaatatatggaagatcgattatctatctcaccacatcactcataattataaggaataatttcacaaatatataaaaacaacaaaaaaattacaaaaatacggtttcacggaattttaaatatttttacgaatttttttaattttatttacagaaaatacagttttttatgttgtattcatgttaatttcttattgattttttgttatttgtatgttattttttgttgttgttttcatgtaatttagatgttattttcatgtta

SEQ ID NO: 302444 - DNA, 3338 bp, Cannabis indica
ctgattcggctcaagtaagtgtgattgtgtaatggttttgtgtatcttgagcttgaattttattgatattcaagactgaaatcattctactagttgtttttaccttaattaagcgtgattgtgtatgtgtgtctgtgtatcttatgtgcagagcttattgatcttcaagctttctactagatagctttagctcaatttagagtaattaagttatttaagtaagatagagaaattagcttatggtggtgtttatttgttatggttgaagtgatgagcttttatttgtgatttattgtattacagaaatcccaaattttgtcgttctaattatatttttcttacttgaagttaatggagttcctagttttgttctctcttttattagattatcctttaagtggtctcagattagaattacaagcattacctttttgctcacttggtaggacaatctttgactgctattgtattattgaattgaatttgggtgccaatagtagcggtatcatctctcatacgggtacaatggttgttaaatcaatatagaaataatttagtaggacacagttatttaaagttgggaaataatttatgttccatttatttataatcaacatttaatgcttacccactgaagatgaaatgctacgtttaatatttgtttttgcgtgcaagaatgtgcttataactctagaaaatggttctttttttgtttggataatcttgtggttatgaactttatatattgttctgtatggaatttgcagcttactgtgttgttgccaaagaagctgtaagcaagcatatctcaattgcatttttggaacgaatgaaagcagactttaaaacgaggtatgggggtggtaaagcatctacagccattgccaaaagtcttaacaaggaattcgggtatgtatcattaatctcgacaggtactttggatatgcaagtactttgtatgtttcaaactaatggttttgaaaaattgcagacccataatgaaagagcacatgaagtatataattgatcatgctgaagagatagaaaagttgttgaaagtgaaggcccaagtttcagaagttaaaagcataatgttagagaatattgataaggtaatcaactgtgaaaaaaaaaatgcagcagctagaggatatattactgtgcctatgacgtttatactgatcgtttgtctgactttaattttatacttctgttcttccaaattatcttttttaaccataaccatatatgttcaacttggttgcaactagaaatttgtgcttcttactttattcttgttaacttctattttcgggaaaggggatgtatggagtttaggtgtttgttcatttgatatgggtggtaaatcagtaaaccacactaaaatagaaaatttcgctttgtttatcctcttccgagttaggagcaagagcaagtcttctttagctagctttagtttaaagattgcattaggcatccaaaatcccgatgttcagatgctccctcttgctttggtattcaaattggagtagtaccacgaaaaacaaaacatcattttcgtacccaacattgcatggtttatggtatttcaaatgcataaaaattttaaatttcattatttttgactccatccataacatcatattttgcagactattgatagaggggaaaaccttactattcttgttgacaagactgaggatctacgctctcaggcaagttgtcgaaagaacaactcactaagaattgttgaatttctcttttaataagttgctaaacagctttactctttgtaacattcaggcccaacagtacaaaagtaaagggacacaaatcagaagaaagatgtggtatcagaacatgaaaataaagcttgttgttcttggagtcctgttacttctggtactcgtaatttggctttccatttgtcatggtttcaactgcacaaattagcaggtaaaattttagactaaagaggagtttattcaaaatatacaggtcatgagcttgaatttcttagcttgtgttgaagaggggagagagagagagagagagagaaagaaaaagagagatctatttcattctggtattttcttaaaatgaaactgtacaagtgtttgagttcaatttaatatagcagcaatttatttttctaaaaatattttctattgttgaacgattaggtgagatttcttttttggtatatatatatttacgttttattggagattaaaactgagaccaatactgcaaaagtaatgagatatgaatttattcctgaaaaaataatgcttcaagaaaaaagagggggcttattcataattatacaggaactgagcttgaagctgtaaggattaggactcttccattctggttttggttacaatgaaaatgtgtatcatcaaatcaattctattgtttcaagtcaaaatatgccaattttcaaaaaaaggaaaataagaataaatatattttattccaaaaatgatgaaataacatcatttatggtatgttcgaaattgatatggataaacggcatttacagttttgtatacatttcaagttttttccttttaaaaaaaaagaacaagaaaaaaagaaaatggaagactctccttcaatcttaacaacatagccataaaggaatgggaaaacccaagtggcgttccagaatcattctatctttgacagtgaaaagttaagctatcaaaacatcataaggtctttcacgggtaactctggcctccgccataaccataaccagcaccgttggacttgacactcgcattcacctgcttcttcgaacaatttgttggacttgacacttgcattcaccagcttcttcgaacaatttgtggtgcgctttctccatcatgggcaagaggtcaaactcgaacttagcttagacaaacacaagatgggtataaactcaaaatagttctttatttgcttctaaaagcctggttgcttttagaagttctcaatagacgattagtgccaaagaacagtctcttaacatattaatggggccaggatgcaaagaaaatagtaaggggtaagaataatttatatatttttatattaaaagtggatctaacgacaattcttagtttaacgattttgtaatgttttttttttttgacaaaaagtaaatggaatgttaacattgttaattatctcaaaaataagaattgagtttctcctaatgattgacctacttatttttcttattcaaacccaaatccaattcgcccataaagaagtcgatagaccttctactgttagataaattaacaattaacccaagatctattgtatataacatagaacacaatagt

SEQ ID NO: 302445 - DNA, 2072 bp, Cannabis indica
tcaatatcaaagattaaattggattgagatactatcaaagaactattattttttaaagtggtcacaagtgttttcctgttgttcaatccatgaatcgttttcaaacaaaacttatttgatatctaatatatatatgtattattaatgtggcccaaatgggagaatgttagactttttcttaggcttacattagtgtttattagttttaataaaatataggttgattgtataggtctttgatgtgttagcacatattgtttgtgatcaatagttaataagcttaatatctgtatgtgtaaagtctagttgaagtagaagtatgaatttttttagttagctaaaatctttgatgagcaaatccaatccaactagggttatgtagctaagtcacatccctagctctataaatatatattgttcttcacaattattaataaattgctacatatttagagatctagagagaaagacttagttaatagtattacactattaaattaaggtaattgcaatcgatcaatcatatgtattattgtgtgctaaattatatacaaatttgtgtcttgggttattgattttctaatacaaaattctttcaaatgccgaaataaatagaagtatatcagtacactctttttaagggtgtactgtaaaattttcttataaatttaattacaaaatacacatttttttttttcattttaaaacctccattgagaaagaaacaataaatttagagaagaatgtactggaacaaaatcattttacactattcattttcaatgtcaagccctaagaccttcttagctaatgtaagagcaacactatacctaacaacaaaactaggaaaataaaaaagcaaactatcaacccatcccctacctacatgggatgcgtcatatgagccccaactgaacattgtctgcataaatgcctctaagatggatgttaagggtagttagggtaagagaccaaacattgtcttcacatttaagactcccaatagagccacccaaaattcgaactcctaatctctatcttctctatctcaggaatatgtaggataaggtttttgttaacagcacctactagattgcaatttatattgccctggcttccactaaaggtacagaatgaactcatttcttgctatctattataattacagaccattattcctaatgataaactacaaacgcaacaactttcaacatttattttgagttccaaattgatttaattaataaacacgttaaaatatggttaattggtttacaataattatgtgtttttttttggttgccgagaagggtgtcttgtaataattatgtttttacctttttttttcatcattcttggcgggccctataaagaattcaactctattatcactaaataaattggtaaaaaaaaaataaaaaaattggtaagaacaagaaaattccagtagtgatcggatacaattaattaattggaaaacttgttgtgttaatatatatctacatatatttggaaattttgtatataattgtggtgtatgtatattgccaccaactttaatgatgatattgagtgttatttcaaattttaaatttgtgataaaattttctttctaatagactaatagttattatcctttgacgatttttttttttcaattaaaagtactttgcttatgtttgaaagttaagattttgtaggaaaagaaaaagaataaataaagtgaaagaattcaaaagtttggaaaaaagaatttaaataaattaattttcatttttgatatgaaaaattatgttaaattattatttttttcatgtaattctttacgtatagaacatgataattaatagtgtcgaacttaccttatatagggtggggcacccaggagtaagaagaaaaattacattaaaaaattatatatttttcttttaattagatatttatcctacaaaatatatatatatttatatactaggtgattgttacgtgccaagccacgtagtgttagttttatttaatattttagttttttattttaattaataattaaaatagtataattatttgaacga

SEQ ID NO: 302446 - DNA, 2866 bp, Cannabis indica
aacatttacccccaagcttctgagactttgagttatggaagcttgtagttttcttctagattactagagtgtaattgtgacacgtaggtatttctagatcatgtggatgcacctttcgtgcttggcttttaataaaaataaggctcagaagcttttcgtgagcacacttggtattatccgcgtgtcgcatatttcttaattttttgggtgacacgtgcttgagagatgcgttccccgtggagaaatgtgtatgtcagcaaagtggtgacttgataactctttttcatgtgcactggacccaacactgataatgatggaaaatgcttcgattttggtgagagaaattaaaggttgtctctttcactccctagccatcagatgaactagggttcgttgtggagttgatctggatcgtcaatttcaaatgatacaatttggattgagatgtaaattgaagcgaggccattagtattcactttttcaccatttagtcatttttcaaacttcattagtctctaagaactcgaaccaaaacctcttcctcagaaatcacgtggaaaatatcttacgttggtgcttcgcaaccctactagtgaatgatcgaaggttttcattttcttttcgattgtcttttttaaagtcgagcacactatttctcggacgcaccagctttcgatcttaatctgtatcacccccagtcaagcgaggagttcaacatttaagtgggctgtaaccaagttatcaactgggcacacaatttttagactattctcagcaatcaacccacctcttcaaatcacgtcataagtaagtacctttgaacttgttgatttttggttttatgctaggataaaagatcgtatttttgagctctgtcccaaattttttgcatgcaattgcattagaggaggtatttcaagtgacagagttgattagggccgagaatgttggaccatgaatgtgtatatatgattttttggggaatggatgtaaaaatccaaacttggtagggatgagccctaggaatttttaggccaactttgtactcgttcactcatttagaactattaaagctttaaaggaaaatgggtgtctgaccattggattattcagtgaacgtcttgtgggttcttgacctgctacctcgaggcgtttctttgtgagggcgatgtcctttgagcaaacggtccggtggggacctctccaagtaatttcgggggaggccttccctagtacccacaccgtccttaggatattgggtgctaattttcttgggttttctttctcttttctatttagtggccaaccttgatgacgactttaaccttgaagttgcagatattaaggagatcgaggtcgagatacctgtagagatgccttgacaagaacctactcacgaggtcgccccaaagagaaaatgtagaaaaggcatcgcgaaaagtagagtaaaacccacatcgaagggtaaatctaaggcctcgtcttcatctccccccatttacaatgactccatttgggagatggactagagtaccaataagtccaggaattatggcatgatggagaatttattgagtaaagatggggttctcaatattatagggctggtgtggaataggttgtccctggtgggcgaatacacctctcaacctaagaagggttcagtgcatggagctgtggccacatatcatgtggggctcacctacccctgaggacatactttgccaatttttgcgccagagtggggatcgctccattctaactgatacctctgtcttacaaatttttatccggatggtacttgttgtgcaatatggggaagttggaacctacaaggccagacgagatcttgtattattacgctttcaaaccccagcccatgcgagccaatatgctgaaagttaatttctataagctggaaaagtatctggaggtgaggtgtcccatcagcgttacgtcgcacgcccatgacttgagcaagtactgattcttttctaccgggttcctcgtgaagagggtgccaaatatctccttagacctcaaaattcttggtaaggactttctctttagttttcacttcctcttttgtcaagatttataactaacgacatttccccacttgttgcagaaccagtgtctcagactctattaaccgaagagttgaaggttaaattcactttttacaactcaatctcggatagtgcactgaacgtgagtaacttagttaccacaaagctacttcgtgagtatagtctcattgttggtttctaaaatactgacccggtcaacaacaagggtcttgcaaatcctccttcagaaatcaaggaaaaaaattgtcgtgagtgttgcagagatcatgaaggcaaccttgcaaaaagataaacttttgatggtggattgggcacttcgccatctagatcttttgactgaggaggatgagatcactgaaaggtttttcgcagcatacccggatgaggatactttctgagctagtacctcgagaagaggtaaaaggcactttcgcctgttccatacccctagccttcccaaaatagtagaaattctcaagggtcgtaatagttgtgtccctccttcggacacgattatggtggaccctttcttgtccaatctttcccaagcttcaaagaatatggcaaatttttgaactaagaaaatataactctttttgctcagggaaaactatacgataattcaattgacggttgcattcacgcccgagtcttagtctcaacgatatgttgataatctcaaaattctttcaaaaacaaaacacatatgttgacaatatgtcgataatctatcgacaaactcaaaactacacataataatcaagacaaaccagtat

SEQ ID NO: 302447 - DNA, 946 bp, Cannabis indica
tttccatctttacttgcattgcataattatttgattgaagtaaaatattatgtatcattcgtataaataacgatccacacttcattaattgtagttattaagagaaaaatgaaaatagttgagactcgatccacatggaccaaccataacgtgtaccaaaaaatataaataacagaaaaacatgatcgatatcagtacggatatataccggcccacctttttccatgtggcatgtgtactaccttataagtacatttttattcttatctatcattattattattatttgtcaggattctaatttttattattttgaaaatgacccttacttattgtgattaaaaatacttatttaggtttatatatggttatatgatttgttttgtaagataaaactagtaccattaggtaaacattagtgatcatagccggagacatatttaagtaagaaagaaaggacaatgtcgatgaacattaaaaaaaaatgatagaaactttggaattttatgtttttaaatagttagtatactttcttaaatgtatatgattaaacagttgggtcaaaaacatggtgttatattatgttgtaatagtattagtacatatagtgtaagtaatgcatgttaacagtacttgtatatgactggccaattgaccaactcaacttataattattatgagtcttttttaatttattttctattctttcactgatatttgctttgagttaaaaaggagcaatcttttttctctctttctcattgactgtactgtccatttatacggaaagctgcacaaataaagtaaaacaaattagttaactccctcttcctagctacctacctacctccctctaatttcattcattcatttatttatttagaatattattatgttacagattggatcctgtgttttgttaaatgacaaaatagaccctgtattt

SEQ ID NO: 302448 - DNA, 4193 bp, Cannabis indica
atttaggaccttcaaatgaagacttgaatatcaatctatacatttcctgtataagcttttcaaacacctctgttagttactgctcaaattaattttaaatgtagttgtttattctttactctcgaactaccttctttgtttttctaatccactgcatcattggacttactaattgaatttatatttgatttttttattcaaaaaggattcgggggatactgccaaatagagaattaaatgttaaataacaaaatataatttagaaaaatactaaaggaaactttaaagtgtcaagcactagatcagaggtcgaatactgctattagtgaattttaatatcgagtctcacacattttaattcaataaatataaaaaaaattactaactaattataaagtgaaatgttagtatagtgttggacatcttaaagtgacaaataacacaggtccataattttagatccaaacaaaaatgagcctcattttctcatctttttaatacaatacaacttacgctagattgctacaaaaataaaataagttttcctctttatattcacatattaacattagatcatctctaatagaatatgtaaaaaattatacaatatttgtcatagaaaaataattttgtgatatatatgtactaatttttagcattgtactccataatatatataaacaaactatgatgcaaaagttaatatttaatttttaaaaagaagggtaaacagtggcataattacctaaagttttaagtttgtaagtagtataaaccaaatgttatatttttagcggcataagtacccaatgtttataaaactgtaattttcgtttaatttaataagtacagactatgttttgaatttattaaaagaacatttgatgtaactattactgtatatgtttctctctagattcaatgatcaagaatctgggccttatatgtttcatatttaagacaataacggagtgtgtactgacaaaattagagaaaaattaagtattacaaatcctgggtacttgtcgctaaaaatatacattgagtttatctcacttacaaacttaaaattttggctacttatgtcgctatttagcttaaaaagaataataactttgtcaataattttagtatggtaaatagtggcataagtactcaaagtttcaagtttataagtggcataaactcaatatttatttttaacagcataagtacataatatttgtaaacttgttagtacaaaatttattattgttttaaacagagcacatataaggcatagattcaagattttgagtctagatagaaacatgtagtaacagttcttttcaaatcgctaaaaataaaaattaaatttatactgcttataaacttaaaattttaagtacttatgtcattagttatctattttaatattttattatataaaattgtaaaaagtagttcatattataaaaatgacataaaagtacaaaataaccttttgacataatattatatcatttccacgtagtttagtaccccatagtaaaatctaatttcatctaatttcatccaaaaataaaatcttccttttctagtaaaattcaggttccaaacacacgttactgcaatgacatgatgaaaaaaaaaaatctaaataaatataaaatcatcacccaaacttgaacaataatgttaattttcattaaaaatatataagtgtgatgatgattacccttaaaattaaaatcgtagctacaacaaactaaattactttttattgctgtgttcatgaacggtcatctttggtcaagccagttgggttttagatagataagcttttttttagctcttctattctatgtggactctttaatttatatatacataggaaggttgggttggtgagagtgagactgtgtgagtgcctttccttctaggcattatcatttagaataaatacctgtacatgtacaaataatgtaagaattatatacatattaaaaaaagtatagggtttacctttagttggaccaatattggcacaggtttgatttcgttttgtgcggttgttgtttgcctactttgttttgcttttattgtgaaattggtcaacaaatataactgctacttatatagattatagcccaaacttttattgttataaattttataaatcatacactttaagagagaaaattaattggtttccttcccaatatcatacagataagttatctctttcaattttcaccaaaccaaattctatgtcattatgttataatttcataactaccggatatagtcaatcaagcccaaaccttcatttttcaacttcaataatggactcattaatcaagttacaaaagtgtaatataaatataactgaatgaagtgtaatcaatttatgactgccctatataactatttttttagtgataggggaaagtaagtggaagtggttaataaggtgtaagcactgtttaataaactagaatttcactattaaaaaatacagtgataaaggtgcttttttattattattatgtagaagttattaaactagtaggataaccacaactattcatttaaaagttttgattctggcatttagtggcataataccgaattcaatattatatgtgtgtgtttgggttgtaactagcactatgagaatgacatcctataggtatagactatagtataggagtctctttgttttctttttgttgaaattaggtgctaaggtaattatgacttagagtgagagcatataaatatatgagcattgttattggatattagtagtatctaacattttctataggtgatctcttacgattagttagcggtattattaaaagttatttttttaaattacatgagacttgatatttaattacaccaataatagtattacaccaccgagaagagtgatatgcaataataatcttttctagcaattctcaaaatatatctacgtaggcaatttgtcagcataaaagttaaattaaatgaatctcaacgcacggttatgacaattataaataagcattataactatatcatagacagatagtagatagaacagtgattgcaatattgcatcatagggttggtgcctacattaaatgcatgtgtatattttctagttacttctacattttgtatgtcttttgctttttaaattgtcctgcttctatttcttcatgaaatccatattcataaacgttaatttgttttccaaatactttacacttaaccaagtttcaaggtgtttgataatacttggttatgggatacggcttcaattctcacgtaaattaaaacgtgcatgaaataattatttacatttttttttagaaaatatacttcattcaacactgaacaacatgattgcacaaaacaaggctatgcattctgattgctatgcagctataagtgacacgtttagttgacgtttagttagaaaaaataaaaaaaataagactaatttacaatattataaatagttcggagactatatttttaagagtttgaaaaatttaagggacacaataatatatacgtcatagttttggtggcaaaaattataattagctttctttcaaaataatgaaaaaatcattctattagaatgccatttaatactttaaattgcaaccaaaataaataaatagaataaaattatattctttctattctattatatttcattacctccaaccaaacatcactttaatctgtttagagacccgtgttacaaataaaatttaaaagaattaagtgatacttttgaaaaaatcaattatcattaatgatatcaacccttttaacattactaaaaaactagttttcccgacagttttaaacagtcaagtaaagtattcatgtcggtttctataactattgcatattcgaccgtcgcaaaacaggtggaataggcgacagtttgaaactgttgctgaaaaccatattcctgacggtgtaaaatcattgcatatatactgtcgagtataggacacaattttaaaccgtcacctatataggagacaattaaaaccgtcacctatagtataagtgacattttagtagtatatgcgacggtttaacatgtgccttatagtgtaagctacgattttagctctaaaaatactatttttcagcgattttttttctgtcgttatattagaaaaatagagaaaaaaaaa

SEQ ID NO: 302449 - DNA, 3604 bp, Cannabis indica
aaaaaattattagtatataaataaaatatataataataagaaaatataataaatattattatatagttaggaaggattgaattttagaactcattttaaaagttttaccagtcccaaaatttaattttgtattaaactctatattactgaaaaaccgcctatatatatatatgctatttcatcatgtttttctttcaacatacagttcaatcatatatatatatttatatactatcggttaatataagtcctaaatatatatatatatgcatattatatatattgtaagctatatggctttaattgaatgtacagtcttgccaatatcattgttcctgctttaatttggtgaaagatcttaatataagaaaagagcatgcattttagaactactatatttgatatgataatatattttgttgttttaattaatgaattatatatgtatgtacacagcgtcgagcattggtagaggagaacactcgactccagaaaaaagtgagattatctcttcaccacttccctacctcttatactatatacactattaattactaattatatatatatgattaagtaattagtttataataaatatattggtgtatatatatacaaggtcaagttgctagatcaacagcaagaagcatgatgccaatatatatataatccatcttggcaatatattcacaggtaattatatatataatatataccattatctttatattaaaactgatcaaatatacttgcaaattttgttcattcatttattgttatatacaagtacataagtgtttataccaaaaaaaaaaaataaatgctagctatacatattttgaaatgcagggtaccagggattcacaagcgatatctcaccagtatcttctcactgtgttaagattattatgtattatagattatctatatctatctatgtttatgtattatgtatatatgtttagatatgaattataatattgtgcgagtgcgactgtatattatatatgtattgattagtaaactataagtgcattaattaattattagcaagctatctgtattattgtgagtagcttaatttatattatcgatctgagcttttcaagatgaatgtatattggcatcatactttcctttagttaaaacaaatacatatatttataattctttgaaaattgctaaagtagaccactatcattattataaaaattgttaaatcttgtgcaatttgtgaacaaggtgttgtgtagagtgttgtattgtattagtattatttaatataatactatgtttgatattgacttgtcttaatagattgtgtaaaattatactatctttaccataaattcgaccccaactttgaccttggccctaaagttggatcccatctttggccctagactacaaaccccaatttgaaccttagacctcgacattggacctggatcggggtttaggtttgggggccggggtccgggtgcgaggctgaggtcgggttcaggtacaggcactacaagaaatatcacttttgctaacttatttttgcgctggcaaaagtttggtattgcaatggcaaacagaatctacttttgatgtgttggcaaataaacgttggtttgagaacttttgttggcgcaaaatgaaaagcgttggcaaaaaaataacttttctcatacgtagataggctggtaaaaattaaaactttttccgttgtaaatgttcgctggtaaaactttgaccttcttgccagtgcagtttgcgagatacgcttgtaaaagttactttttacttttgccagcacagtagcaaattgtgctggtaaacgtaataattcttgtagtgagggtctgggttcgtggtccaagtaggggtagaaattcctgtttttgggttgtttctgtggatcgtgtttgtgtcatgtcatgttgaggcttaggtattactagaaaatgcttaacccaaatctgaaccatttattaatcatgtaagaaactaaaagacaaacccaactcgtttataaacgggttaacctaacccgatctatttatataaagaatcatgcttaattttagtaattgtagcttaaatttgtaactcctttggggtgaaatctggagtcaataacttcagaattacgattaaagtgtaatacatgacttgatagagcattgaaataactttgaaatgcaatagttgaatcgcgttaatcagatcaatattgagtgacttatggtcgttttattgaagactattctggacccagcgcctaagttgacatcaaaaaatgtgtcaaggatgtacgtattttgatgcctaagtgatatttggacatcacttagcctgtttttatgttctggtgaagctgctattttatgaaaataggaaacttgaaactcccaatttctgagtaagtcactttgttggaaacgtgaaaaatatgaagttgtcaatttgactcttctaacttcatggctcttagttattatgaaaaactagaggaacagtcaagacagaatcaaaatcgcataagcaaaacccaacacaccaggccatttgtcaacttgggcgctgggtacttttttaagagcttctgggatgtcgttttgacacttctaaggttcttgaacttcaggataaggtctcctagcccgttttagaccattttgaagagtattataagagcagaattggcatttgatgaattatcaaaaccagcaccaggtcaacctgggcgttaggctcaactttgatgcctttagcaattttgttttctccccgagattacttgtatattttttatttctaatgatgaaaaaaatgtctggaacactttttttcaaaaaactgattggaaacaacccatgttgacaatatatcaatctaggcgctgggtccagttttaggccacttagaagttccatttggtccccaaaaatagttgaatcttaatatttgatgaaaatagagaatatgtctagaagactttttagattaacttctcaaaattggcccagattgataaaatctcaacctggacgctgggccagctccaagtgccaaatagagtgtcggccccttgttctagcacccaagttgggttgtttcttctctgcaagcacttgtttccccgtttttgataaagacgaagaagatgcacaagtcagatttttaatctaatgcttggaagtagcctaagttgacatattatcaacctagacgctgggtgcccgggcactaatgctctaggtgctcaatacaaagtttgacccattcgcactaagacggtgccaaaaactgaaaccctagtttgggtttttaacttgggcgctgggtgaaatcctaggttcccaggttggtttttgaggtgttgatttgtgtattttcagctctcgaggcctagtcttgaatgcttcatggtacagaatattgaaatatagtgagttcaaaacaacttatcgcaatctgaacgcccattctggagttcccagagttaacttaggcgtagggaccccttccaggtcgacctctatgactcgggactactcaactccgagatgctatctttcttgccatgtgtcaaacattgatgtccacgtcatca

SEQ ID NO: 302450 - DNA, 1047 bp, Cannabis indica
agtatatgaggtaattccccataaatttataactaattataaacatacattcttattttatgactaaagggtttgtggataaaggtattagttataagagcatatccaatggagagctataaatatggtgtattgctattttttagaatattttactaaaagttaactttaatagtgatgtaaaatgtgtgccaaatttggctcaaaagatagcatgtgtcatattttacctcacaataaatgctattttttttattatctatttgctactcattaatactatccattaataaaaaatatttttatatttataagttattaaaataatataactaaaattaattgtttgtatattttcaatcagtatcaatggtattattaacttttatacctagtttgcatcttgtgcattattggagcacaaatacaaaaattgggctaaatatggttttgtggtatattttaaatcaaatttaactcaaaatatacaccatcgattagagatagtctaaaaatcataatttattatgactaaatgtatttttgtcataatagtgactaaaattaaattagtgacaacttgtatgtaaatactaaattttaattacaaataattttttgttataactaaaagttacatttaatcaaaaaaaaaaaaattgttgtgataaaaaagttactagtaacaacttgatcattttaggcatttaataagcttgcttggtttaaacacttgtaattagtgagccccaaatcatatatttataatcataaatgccatattgataatttgtacagtaaacggttattagatagctagtagttaacacatcatatatattttttttttggaaaattcacaggttcatatttaaatgagtgaaaattctattaataatagtcatttttgctcacttgaaattctcatcctaattaaaagactagattgagaatatagatcataataaatcacaaaaactatttcaattcgtgtattcttaagaaaggggtctaagcctttttatgtttatttttttatatatatat

SEQ ID NO: 302451 - DNA, 1086 bp, Cannabis indica
atatctctctaacaaacctagaaaagaaaaataaaaatatctagaaaagataataaaaaccaagaagagaataagaagaagaagattgagaaaaagagaaagaaggctccttctcctccaactcaaactccaactattagtaccaaaaattctcataatgatgatgagaccaaattattattattacccaaaaatacccatagtaataatgttgatgattatcccaataagaagaagaagataattagtagtggtacagaaagagtggttttgattgatcaacatgatcatgaggaggaaaagaagaagaaggtcaaagatgttgattatagaaaagctatgagtcagttttcttatttgtggtcacaacgtaagaaggaacaagagaataataataataagaataagaaacaacaacaacaacaacaacaacaacagaagcagcatcaaatttcatctacaacagcatcatcatcagcttgtaataattttggtgtcaataaggttagtgataataatagtaataataataataatattattaaatcctccggatttaaaaggcctccaagaagaatagttactcctaacaacaacaacactactactaatactacttgtattcctcaaaattatcgtcaaccaaaatcggccaaccaatgcaagaataaaaccccttttcttaatcagtatactcccaacaaattcacaaacttcagcaagttttgatgtaattaagtttttgttttttcaattttaatttccaatatatatatgtgacagctgatatatgacttatgactagattgaaagagttaatctattttttatgatattaatagctattaaccaaataaaggttgtattgtattgctggttattttgatatgatatttttggtactgatgatcatctgatggaatggaatggaatgcagtaataataataattaataaaaaaactttctttttcagtttgtaggcttttgtaagagaatcctgcaaaaaataattgttgtcatctcaccaaccacacatattctgttaatattctgttaaatttaacgattaggtttgatctcccgtt

SEQ ID NO: 302452 - DNA, 2035 bp, Cannabis indica
tttagaggatcaatttccacattaattaattaagataaaaaaaataattaactcatttctttcaataaaagtttaaataaaagatgtaaattaatcccgtttaattaactattcctctgaagaaaatctagctagctagatcatataaatatatagaaatcaagattctaattaatcttagctataaatatttaatattaattaacatgttaaacaattgtttatattaacttctgttgcatgcatgttgtgccattattcagttaatctttccttaaccttatctcatcactaattagtttctttttcatttttcctgaaaattatatattataacaaataaagtaggtgagtaatttgggggtgtgtgggactctaggagtaagtgaataatatatttatatttatataaattatggatcattgagggaaatgtgattcgaaatagggatatgtgccaaattagaagagataatgaaaattatagtgagcaagattaaaaagaattgcatgatcatatttatgattttaaggtgaaagagcacaactaattaataaattagctagtcatgacatgaaaaatgaacaaggcaactaaaatagtcaacgtggaggcaaagtaaacaaataatgctcacaattagttgtatattgttgagaatcgatcaatcaataacttacgattaagaatattagaccaataaacgcgtaattaaaaataatattattaaagaatcacaagaactagataacgaattagacaataaatcaaagagcggacaacaattaagtttaacgaattcaagtcatgtgcgattaatgctctacatctcagttcaaacaatagcaaccatatcattattaatattatttgtaaggttacaagaatttacaaaaaatcctcataaaagatacaagatgaattttctcttttaaatcttaattctctttataaccttacataatcacgattttttctcaagcttttcaaaatggtctgatacacaatagagtacaaaagtgatagctatatatagattcacatagttgctaacattagctacggagttatcatggctaattaataaattctctttcaacgccaacaacatattccacgtcaactttagaaatacaatttttgtacgaacaatctggagttatcatggctaattagttttgaggcttgatgttgtactttctggttgcaatatgttttatatgttgtctttaagagttctagagctttgtaggtgaatttgattcgttttgagtgagaaatgagattttatgaaaatctgtagtagaaaacggcaaataatttttccagaaatagtctacgtttatagcatgtagggacccaggaaaaacagtttgccatttttgggttatattcccgaaatctcttttattttttctttcttctcgatatttagggtattttcactctatttatcaatagacctattggaaagaattagaaatgttcaagtggtggattaagaattagtgaagaagccttagttagccaagctaaagttttctcagtatcagctagcaggattttactttatatatcttgagtttgcagtccgaacaatgctgaacttagaaaggagacccttgatgaagctcataccactccctattcattacatcctggtaccaccaagatgtattaagattggaaactctactacttgtggtgtagtatgagaaggatatggttgaatatgtgatcaaatgcttgacttgtcaacaaattaaggctgaacatcaaagacatgcaaggttattgaagcctttgacactttctgaatggaaattaatgggatgatgtcaccatggatttcgtgattggattacctagaaccatgggaatgtttgattccatatgggtagttgtggatcgatttaccaagtcagaaaattttctgctagtgaaaacaacgtattcagtagattagtatgtcgagctgtatgtaaaaaaatagtagaaattcatagggctccgaagttgtaacgtcccgcttca

SEQ ID NO: 302453 - DNA, 2452 bp, Cannabis indica
attgaatgaaattagataaaagttcttaaatctaacaatctcaatagttcagggagaatttttaaccggtaaaaaagttcggggcataatttagtacatgttatagttcagagaaaaaaaatatcaattagccaaatgtataactatacaataatatttgaaaatattatttataaattatacatatttttttatacccaattttaataattagaacagcacctttacaactttttagagtccctgattggtacaattgtcgtaataataggcaatgcaatttcaccattttaaggccctgatagttaccttcactatttatgaggaaaacctttataaagccttctactgagagctaacgttccaacaaattcctgcattcagaagaatcacagcactctctctctagtagagccatggctgatactgcatgcaattctcactctgctgttacggaaacagatactcaatctctggagagagttttcactctcaaacaaggcgaattaatccactacaattcccagaacgacgtcgttccatacaacgaaactacccatttcgtgtcctcaaactgtctaactactgattccagttccgggtcatctgattccgaacaaacaattcaagaatctgctgtgattcaggagctgagtcttgtctctgatcttggttgccttaaagaaagctcgttctctgattcctttgataaagaaattaaagacttcgaattgggaaacgacattgagcagctgggttttcctttagctgtggttacgggaaagaaaccgatattggaggaaattgaagcctcgattctcatggcaggcgatgctttattgactgatgaaatgagaaatgatttccaagatgaggtgaaagcaatcgattctgatcatattaaagttcccggaaacgacaatgaatttggcagtcgtttgaagatgatcagcggagatccgagatgttctttggagattcaagtggttgatgaaaccgccttgattggaccagtatcagtcccgaggaagacggagtcgattgctccatccaaatcctcaaagggtcttgtgaacaagaatagaaagatagagtttcttgagaagaaggtggcgagaggctctccaagcaggcctaaaggaaggaaaaatgtcgttgtgaagaaaggagaaagaagcaagaggttgtattcaagggaagaaatggaagccctgaggtttgtgaacattgtagaacagaggaagatgtggaaagatgtgcataccgggcttggtcctattgtacggaaagaatatgattacttgatcagctctaagcatcagaagaattttcaattcaattttggaaacaaggatgaacccacttcagttctaggtaagttcattaatttgattccttttttttaatctttgttaaagagtatcggatttgtttgtaaaaagattttgaatgatgaattatgctattattgactgagttgatacttatacttgatatattagatcatcttaatgtgtattgagttgcattgcatttactttttggtatttggtaatatttttaatgatccattctcaacaatgtgttattctttcttttccatataggctcttatctttaattcagacagaaactgttgtgctgtttaggtgttatgagttgactctaatcatcatcaaattacattgttacatgtttcgttaagaagattatgatccagctgtcagttgagaaaatatttagagtttaaagaacaatgttttatcatatggttgattggaaggaccttttatcataaatgatctgtttgtatatagatctaattatgtagattttgatgggtttaatttctactatttacaggtgcgattggtggaaggggaagaagtaaccacatgaatgtgtttgtacattgaagaatgtctcttgaaggcttttgataattcacatagttgacatatgtagatgttttctagtacttggaatgtcactattctgttattcatttttgctgtataggcatttcttcttgtaaagaaggtgatgtgtaacgttttctcttggtcagaagctagtagtggtgtcatgaaacttttttttttcattaagaaaagtaaatgacatgttacattcttttttctcttaattgaaaaatcttaaatgttgggttgggaagtgtgaactaatacttgaatgatatacactacagttccacaatgtcagaatattattccaatgggggcaaataacataaaatgtttttgctagtgttttttttttgggagcaattttcattaatatacaagtaaatgaatattatttataacaaaaaataaatataactacataattttatgaatatttataaataaagtttacgattttaatttgttgataactttaaaaaaaatgcataaaactaaatatgtaaatataaaaattaatatttata

SEQ ID NO: 302454 - DNA, 1732 bp, Cannabis indica
agatgtaaataaagttttcccaatttgtaacttctatgggatcatgtgacataaaaaaattattaatttttagttattattaatatattttataaaataaaataaaaaattatatatgaatatttgagaattgtaaaaaggtttggaaaaaattttacaagtaaaaaaattcacaaaatataatttagtaagggtaataaataataattcatgaaacaaaaaatccaaaatagcaaataatcaattattaaatattaacattaatctcatcgatgcatacttttattcatccataagaataaaggggaaaaaatcaaaaaagaaaagcttttgagtattaaagccaaatatttacataagaaacaagaatattctaaacctaaaatgaagtaaaagaaatatatattaaacatatataatctttattcatctaaatttgagaattatcaatgaagaattataatggctagggggaaaggaaagatccaaccttttgaagatgccatactcatcaagattttgtgggttcatcatcatcatcctcatcatcttcaacatcccaactcagatcttcatcttcctcagccgcattacacaaccgcttctgcaaatcaaccctactggagctccccattggtttaaactcatcgttgctcctaatatcttcaatctcatcccaaccaatatcttcttcttcctcaggttttgacacaattgaaacatcactttctttgcaggaatcactgctttgatcactagtcttactctcagacactagttcaactcctcctactttctcatcttttttcaaaccctcctctgaattatcaccactgtcactaccacttgcaatagtagaattgctactaatgaccttatcatttcctttatctgcgattttcacactcgaattgcccttttgttcaccttcttcttcttcttcttcttcttcatcatcatcaaaatcccaactcaaatcctcttcttcccctgaaatcgctctcctcacgagatttactctggcttcctcaacttctttcaacttatgaaccttgtaaaagtacctaagccaaaagatctcgctctcaatcttttcaggaacaatagtccgataaatcacgccaatatccccattttcattgatcaaattatcaatctcttccctcttttcatctaacataatactcaatttccactcctcataattttccaaatcctcgggttcctccaagtaagtacctatactgctctgaattgaacgcacttgtgcttcgaacctactgtaaggtctcgaatccaagctctttctgtgttgttgattattgtctgaggcataatcagaatcaacatcatcatcatcagcagcatcaacggctaaaagagtatccctaccgtgggtgataatctcggccgtagatttccagacagtagtgccgatgtcatcgatggcttggccaaccgactcgagcgactcctgagcgacagaggcgcctacttcaaatgaagtagggaggtccttgacggcgcgtgaggccacttcacggatgacggaggtctccttcttcaactcagagccaaactcctcgagatcgcggcggtaattgtggatcacggactcagatttggtggccaaggtcttgataagaccgccaaagctccaagcattgttgctgtcgttggaatcatcggcgtcgctttggtgtcggtatttgtgatcgtcttcgggatggga

SEQ ID NO: 302455 - DNA, 2945 bp, Cannabis indica
ttatgacccatttcaattcaggaccgcccctgacgaggcacacatgtgataaatagaataataagtcggtaaaataattgctcaagataagatcatagatgtagttattcaaagtctaaattatgcctaagcgattatttatatgaaacctacatcttgtaaattaatgaaacctgaggtttgtccacatgagtggttaccaagataagagtaaagggaataactaacattctaaaactcctataaataatgcgggggatgaccaattgagaagagtgatcatttaaagagagaatccttctttcaatcttgtatcttgtactctgtaaccaaaaaacttaataaataagataaatccatggactatgcaaattttaactacaagattacgtaaaattattgttaatgaaaatctgagttaacagtttagtactcgcattccttttttgcaaattaagactcaaaaaaaaaaaaaaatacatctccccacaagaaaaaacctgaatattttcccaacatgaaaaataattcacagaataacaatgtcggacatgaggaggcagtacatcgccaagggaaagagccacagggaactctgccctaaaaaggccataatgaaagaggaaatcttatcgaatgggattttgggagaaatgtaaattatggggaagaaatactagaataaagaaactctgatgcttatataaccccactagataccaattgtagaattggaaaatcatcaaatttgacagagacttgtagagtcaaactgaaggaacggtgaattacaatgtgaggctgctgctgcaaggacagacccaaataatacacctcctacacaagatgaacctccatttagacaattgtgagggaggcctcgttgttgagagcacaagatccccatgtcaaagagaacaatcaaaataacccttctcatccacatgaacaacaaccaggccgatccagggaagttcatgtcgacagggagaatccccaaaactcaagtgctataacttctagacaaacatgacaaaatattttggcagcttttcataagaatatgggaaacccatatgaacaaccaactactcgatcgactcgtcctccttaaccacccggaggaatttagaaaaatgaaagagacaacatgtacactttagagattgtgtggcaaacatgtttcaaagacgaaggcctgcatgaggtacctcgcaagggtctgaatcaaatactgcaatgagtgagtcagggagaacttcggggcatagctaatcatccaggtcatgtaccatgaaaaatcctccatgtagggaaagaaattcccgttgtaactatcataatgagcaagaaacagttagtaatttacaaagttacgaatctgaaagtatctctgctatctttcaacagaaaaactatatggttagcaatgagacaataagttcaataataatactaaatgagaattgggttagattgaacattttgtgataccctttatcttgtttaaccaatcaaatccatcaacacttatagtgacttcatctgaacttttcatagtatattcggagactaatttattggttatgaaatttaatctattttagcttaccaatttgcattcggtgaagaggtggccttagcttttcaatagttgaatcagtggcttcaacatcaactccaattcccaatccaacaagagatagtgcagcaacaacaacattataattgttgtgggttcccataactttcattgcatctaactgagaatcaatccctaaggcaggaacttctaagtttggaatttttacctcgggttctatttattctctttgttatttattatctttttattttttgaaaaaagaaaaagagacctatttttcctgtatattttcttttttatgattgctgatgttattgtactctttgtttgatcaaaatatttggttattttttatttgttgagattaaagatataatcaagtagtttttctgcccattatttggttatgcattggtacttttattattggccacttgactattagcaaacaaaaatagaaggtgatctttccaaaatttagttcccaaatcatacaaatattatttgatggtttacaaacatggatttagattgatttgttggtttaaaaaattatagattgtttctataaacaattttggtatgtaattagttaatagttttattgttatcaattgtagaattaataatcaataaaaatatttatataagttttataattattattttaatttttttgtattatgtatttactgttatatataaaatcattctaaaatataaaaaaacatgtagggaaaattgcatggaaatttacaatttttctttacttacatttatacttcattttataactgacaataagtgaaataaaaaatgtatttcagcaagttatgcgtcattaaaaaactgacggtataagtttttttgtgtcagttttgaaatagcacaaaattattcgtgtcacttccaaaccaatacaaaatggtaaaaagaacattgtatattttgtgtcggtttcaaaatgaaggaaattgttttttgtgttattttagaaacgacgcaaataaaaattatttgcgactgtggcttatacgccagttttgtagaccgacgtaaaatctttatatgtcacttaagacgaaaatactcatttttgtagtagtggtattaatgtagtcaaagttgccttatttgtttatggaaattttgctaaaaaattgttcaggttcactgtacctgtttgaacggactaactgtttatttaaacagattttgagcttgttgtcatcatttagttgtttttgttgcctttttaatcttaatttttttaaaagaggaagtttatttgagctgatcgtgtagggtttattggaccctatttttgtggtatcttttt

SEQ ID NO: 302456 - DNA, 1639 bp, Cannabis indica
cttgaaataaatatgaaaaaaaattaagtgtcaacaatacaataattagtggactttgagttgaacatttatatattggacctaaataaatataaaaattagtatttttataatgtgcggtgcggtgcggtttgaaccgcatattaacaattcaaaaccgcaaaccgcaccacaccgcgcagtttaggaaaaactcaaaccgcgaccgcaccgcaaagaatttcaaaccgcatttcttttgcggtgcgggcggtttgagcgatttgggcggtttgatgaacacccctaactgtgattacattaaaggaggcttttgtacttgaaagaaaagatggcggtcgtggtaaccaaagatcatcaaatatcctcgtagaagcaccattaccactatagtgccttaatcctttcagcaacaaatctcttccccacacaatccctctccatgtcatggatgaataataaccctcacttgcctccaaaatagaagagtctctaaaatatcttgctttacacacttgagccaataaagatgatggtttagttcaaattctccatgattattttgcaagtaaggcttgattatatggactgaaccttcaaaaacctaatccaacattactcttagattgacacagttgatgccaagctctccaatagatacttagtcctgcatccactgaaccccaccaatatcgggctatcaaactttcaatctcttcattcagcccttctggaatttaaaaacatgacatcaaatatgttttaatcacttggactactgctttttctgaaatctctttacccccttgcgagaacagtttttcttaataaccatgtagtcgattccacattttatcttttattgatctaaaaatttctttcttataccttcctctttgcattagcaatcctaaatatttttcaatgacatctttctttagcatgtttaatatttgttcaaacaagccactaacctcattcggcatattaggtgagaagtacaagatggatttagcgaagttaataacctgcacataaagaaaagcctaattacccactaaagaacaaacctggctcaagccattattataaagtccaaatcaaaatatatatgttataataaagccagtactaagaacatttagcttagaaaaatattacaatttacactttaagttaattaacaccatactaatatggcgtttcattcttaattatcaggttgacattaaaatttatgaaaacctaatatttactacaatacgccaataataataataaatataataataagttgcataaaagtgttaattagaattctctaaaaaatatggttaggtaaaatagaacaatatgtatactttgtgtattttttttctctttcatatgattttgagttaaattttataaattaactatcacagcttatttgttgtgatggctttaactaataaattatgtctacaaaaggcatgttatattatattagggggagagtaaaatattcgcataactacgaaattcatattatctgcactgtaccgtgtagcgtgctaattaagatagcatgatacaagtgttggaaattattttaccaggatcttagatctactcacaaatatgttgtttaacaccctaa

SEQ ID NO: 302457 - DNA, 3908 bp, Cannabis indica
cctacatctttcctctcttcctggttgcctacaaatcattattgaaatgctttgccttccatccttcgcatgagctctctgccctgctccgacccaccgttttcggccgcagacagtggatatcaacaccacatttggtccaataaccaccacgaagagaacgagcgaagatagacttatgtcttgatttagaagaagaggaaggccaaggaagcagccgaaaggaattgtaaaaagaggtccaatttttattgtaactatttaaaaaattttatgctctgtttgtttctcgagaatcataagaaggaaaatatatgattttcttttcctcttctattgaactactttttttggcatttattcaatgagccaaaagactaaattattcaatactaattcactgtgtgatgcataattaaatgtggcataatttgtttataattgtacactgttaaattgttaattgaagaatgggtttttagtagattgatgatttaggttagttaaagaaaatgcatttgctctttttcttttttgcttagaagaaaattcatttacttgtaaactataatcaaatgcatttgctttttttctttttttcttagaagaaaatgcattacttgtaaactataatcattgaaaaatacatgacaaaacataacaagtagaaatttattttggatagtttaagtagtcaaaattttgttttgttcctccaaaagtcagagaatcgagttgtttcttgattctcttgtgggattaggattaggattaggttgaaatttaccaaaaattgcttgaaaaacattgaatggcctttttgagatttgaaagtggtcagagaccattctcaagagttagatttggttatgtttaataatacccacttgtagagaaaaaaaaaataactattctagaaagggagaacatgtttcaaagtgttagcaaatgtcaatggctttaaacaagtcaaatttttgacttgttataaaataacattttggaaaaatcatttttaaatattcattccatttggtaggccacttgtgtgtttttaaacaaattgttgcttgttgcacacccttgtttttatgattattaatcttcatgactgtacctatgtgagctccttcatgttttgtactcatggatttgaactctactgtttattattttaatccaatgttaggttctcaccaacaaaagctcattttatgaaggccaaacaagaatgaagctgaggatgattaaaatgataactgggacaataatcaggtagagcttccatattgatctgcgtggaaataaaataagcacctgaaaatcaagccaaaagaatagttgaactgttgaccaaatacacattcagattagcccagaacctttaggcttttgtacttagctgttagttatttttaaaactgtctctttggcaaaagataataagagcttcatccttcgatatgaaaagtgagaactttgaagagtacaaatcatacactaatttctttacataaataagattcctttacatgcaccagacaaattaagacttttgattacaaacttactataattttgggtttacttcttgactaccaatgttttcatcctaatttctattaacaatttagtcatacgtttgggatgagttgtgtcaatatcttaacaaaaatacggcatttctaaacatgtcaatatcacgttgcaactaactcagaatgcagtcccttgcaaaaggagtctaagtcctctggagaaaaccagttcctttccatctacatagttttgattggaatgaagcaaagctcatcagtatgtgtttgtatatgataatgatatcgcagaaaataataaataaagacagacttacaaaatatggataaccctccatgctaaaattttctggagccccatccaggaacaatttaataaagtagagaacaaagttaccacattcccaatcactcctttgttggggtacctgattttgttatagtcaataaatatcaagtgagatatctcaacgaaaagaaaccaatatttgatctaggaaatcatcacaaattaatgtcaccttagggatcaagagaggaatcttgcgaagagacttttcagtttcagttctgccctcagctttaaaaatggctgatacaaatctagagacaaaaaaaaggttaaattcacaatggggcaactgttttgagacaaaacaaatcagtttttatgaagaaaaggaaaacatacttcctaatatctcgttcaagccgctttggatcagtgttttcgagagaatccagcagtaccatgcaaggtttccgggtttctgattccaaactctcatcaaagttgcataagataagaacgctccagtggtgcctaaaaagcatggcatgtgaaagcattcaaatcccaggtactgaaaaacaatacaaatatatatagatataactaacagcaataaaaatggactaaccagataacaataggaacaacaacatatttctttgtgaaaatttgcttgttttgaatccatgtcatgaccttggatttgtaggacgcttctctataccatgagaaccataaacagtcaaggtaaccaaaggaatttttcttctcctcagacaaacctctccacaataacctacacataatatttaatttaaattctcagaacaacaaacaatagaagttgttaactttcttaactcattacaacaacttactcaaagtaactttcaaagattccagaatcaagcttcttattcagtttagtgactccatggccaacatccttacgggaaattttcctggttgatcgctcacggcaagggaaatctaaaaaacattgggcagtaagtttaaagccatcaatggcttcatggtctttctttgttaaccttcttttacgagcatgcaatgttgctgataggtgttgccagcacgtacggtgccttgaaagctgatgtttaccctctacaagagcacaacaaagtcacattttaaaggcatagcctagtggcactagggcaagataccctaaacctctttgtatgttccaagttccaagttccaatcccctaatggctaattcccgatgtgtactgaaaaacatagggatcaatattgaaaaagaaagttcacactttgtaatgagcattctaacccaaatagccctaacacaacaaattttcaacaaaaacttgataaagatccgaccttttaggcaccctaaaactgaactcaaagccaaattctcaaattaaaaaccccaaaagcggagaagctaaaaaagaggaaacacttctatgtcaagattcagtttttttgttttttaaggcagaggaaatcaatgaatgaatgaaggggcaagaagagaaaaaagattaaagaaatgagtgagtgtagaagggtttacctggaacggaagagtcgaggtcgtcaaggtcgataacgacgacttgcttggttatattcttcttcctcgtcatggaactggaacacaaccccaatcaaaaaccctctgtgtctctctcttgagtctgagtttcggagattggaaaagagtgcggagagggcacactgagtagtgagtaggggtgttcacgaagtatccgaatccaatccgcacgatccaatccaatctaattcacaaaatgcggatatctgcacatggattggattgaaaaatctaaaatccgcacaagcatccaattcgcacttaattatatatatttttaaaaaattataatatgtaatatatattaattaaaaaaagacacaaacttttaatttcttaatcttttttagtagtatattgagttggtgcatttatttattttgtaataaaaaatacaagaaaataattcttatttccatagacacatacacataaagtttaaatatat

SEQ ID NO: 302458 - DNA, 3261 bp, Cannabis indica
aaaaaaataaaaagaaaaattgaatattgtgtaatgaaaggtctaaattaaccaaaaagttttattttaatggatattattattaagtgttataaagaagaatggtaagaagtttggttttcgacataataaagagttgtataaactataaacccttaaaacccaaaacccagccatttccaaactccattgctttgctaccaactctttgggtttatttctcactacaaaaaactctgcaaaggcccgaaacattccgccttactgcatcgttccccactcggacccatcatgcctgaaacggagccaggaatcgacatcctccgagcctatgagctccgtctactccgctgcactctccctcctaccacctctgatgatggttgtaccaccccctctcaccctttccactcgctgattgccgacttgctgggcttcattgaaaccggtcgctatctccaagctctgacgtctcctgatgccgcgcaactcatcttcaaactcactgattccgacccggtcgactcgctcgatgacagtgccgagtgcgccgaacttgtctactctgagttcctaaagcgagtggaatccttcttgtcggaaggcgatgacggcaaggaaaagggcttcagagttgtaatcgttatgtccatggcggtcgctgcatttctcttgttcactcaatgtaacacgactgggtgagtgggacagctccgagttaaccaaccattctttataagagttttccaatttttcaattgaaatttagtttttttttcatcttagtttgaaatttttttattgccttttatttttagaccgttggaattattgccaaaatgtcctctgccatatatagaaagcaaaagtgcagataagtttgttgagtgggataattgggctcgtaatcagctcatgtctgctgggtctgacttgcttggaaagttctctaatcttcaggtactatattgttattgttgtctttaagttattttatctttaagctattttctaaaacaggcccagaaaatataaatgatttaatttaatatatcttattttcactataagttagatgtcaagggtgcgtttgatgctccctattatgctgaattgtatagtataatattgtataaaaatgttttatatagtcagtattatgtttgtattaaaatattttttttccctttccaaagtacatagtgtttgccaatatgctgttaacgaaggctaaagacttactattccaatggaggagtacctcggctttagatgggcttaggagcatttcattgtggcttgctcgagttatacttgttcagcagagaattttggatgataggtcgtcgtcattgtttgatctcttgcaagtctttacacgtcaaactttgcttcattttggctcattagaaaaagtaacaagttattggggtgaccgtttacataaggatgagggtttagcaatagtctcgatgctttatttagaagctgggataatggaatatacctatgggcgagttgattcttgcaggtgagtgcttatgaaattatgtcatttttctgtttgcagtaactttacacattgtaatttaattcatcaaacttttatacagtgtttaaaaaaatcattcgaggcctatgcctctagacttgatctgccagtgtcattgtttaatgaatttaaattattagtctttttagctttttctagctgcttatgtgctttgttgtacatgattcaggttgaattttgaatcagcggaagctgcagctggacttgacatttctgttactggcgttcttggttttcgtactttacatcaggttaataatttatgcttgtaactgtataatcgttttcttttttcctttctcaatttgagttcttagcttgacatggcctcaataggttgagccaaaggcacaaatggtacttgttgcaaacagaaactcatcaaacaacaatgaaaattgtcaattggatagcagtggccattcaaaaacagagactagtaatgatgaaaattatgaagcctctgacattttgatcaccccaaaacttttagagagtgaaaatggacatggtactagagaaggcattcaagttgatgctgattcccctttgagtgcaatacatcaggcagtgatcctggctaaatgtcttctaattgagaagagcactcgacatgatgacatgcaaagtaagtcgtttaaggttttgttaatgtggctgtctctttctccctagggaactaatcagtgtttggtgattctatgctacaatacttgctggtgcttgctttggattctgctaaaacttaatttataagttttgttgttgctttcctgcaaaattaaaaggccacagttcttacgttgtatctaaactgtaatatcttccttgttactcagtgaaaaaaaatggtagattaagctgcaataggggcatcttttgctgacttcattcaatgttcattatttatagactgttttagggtgacatatctttatgctctgttcatcttgtgtatacaaatacatatatgcaccacgggatataatatttgtggtgcaattgtgtatcaatttctaatttttctataaatcttgagttttatatggtggaaaatattggatttcgatattccaattcttacgtttaggtgtgtgctggataatacgggcaaaatgagaatgataattaggtagaccgttgccttgcacaatatatataagaataagccgagagcatattataaacccaaaacatggtaaaactttctgctttgatgataccatgatgtaggttataccaatgctcccaaaattttaagctattcagaggtgcgcgaacaagcaacccaacatgagcttttatttcctaaaacttgagtcttgtgtgagatgcttttttgtttctgggtatgaatatctggtggttggtaacttggtagtgatatcctgctctcttgatcctaagaagactaagttcatagtattttaatttgtttgttagtcatagtttttgaacttatgtcagaatatttactgaagttttctagggccgtctgttcttaaaatgtcccttgcctttaatttgttttactttttttttttccttgaaacaaaacgactgataataataatatgaaagtatgacaatacaaataggtagttaacaaccaccagtaccacaaaactacaaatgtttcttttctatacacaaaaaaaaaaaaaaaacgaaaaaaaagaaaaaagaaa

SEQ ID NO: 302459 - DNA, 1360 bp, Cannabis indica
taacatcttttacactcttaatgttggtgataatggtggaggttactcatagtaacaagtaactcccaaaatgttataaaaagatgactaatatacattatcatatgttacattattagtttattacacatatttaatctacatattatatcattataaataatataacatgctcctcatgcaagtaacttagcattacaagacactcggcatgctttgcaaggaagtcactcagcatgctattcttggtagtcacttggcatgctttgcaaggaagacattcggcatagttcccatacaagtcactcagcatgatccccatgcaagtcactcagtatggcctttcaccatgttactctgccacacttctaaggaattcactcgacatgcacttccaatcgacatgcactcaagggaagtcactcgacatgcactcaagggaagtcaatcagcatgcactcgtgggaagtcactcagcatgcacgcaaggaagtcacatggcatgcacttctaagaaagtcactcgacgtgcactcaaggggagtcattcaaccatgaacatgcacatggaaatgtgcttccacaacaacatagttatactaggtaaaaatttctctaagtatgggaaaagaaagtagcaatagtatgatcacaaggacaaggcgagcatgtgaggtctgtagaactacgtcttctgcaagctctcaaagtaaggaggcacaagtaatggaggcaccacacctgcaaggcttgacaatccaaccaagggtacacaacaaccaccactcctatggcctgagaccacctgacaccatacaaaggtgcaaggcataagaccacctcctgcaacttgaaacttacagaccatggatgtcaccatgtcccttgggaccacaaatgtaccccaggctattagagcctataaatactcttgtctcagatgtgagagggggctgaaaaattaattttataatcacatagtttgaagcaaagcaaagaaattttttctctctaatctaaataccaattcatgtttgaattttcatttcatcttcatcttaactctaaattttgaactcatattttgataatccgaccaaaggatagttgacgagtttcgattgtcaacacaaatttacaccttcaatttggctaagagcatctccaatggagatgcaaataaatagggaaaagctaaaatatagctcatataacaaaaattatactccaatagtgtgccaaaagtgatgtaaatttagcacatagtaaattttgtacaaaatttggcacaacatctactatgatgtaaaatttacatcacagtaaatgcactatttttttatttatatttatactattt

SEQ ID NO: 302460 - DNA, 745 bp, Cannabis indica
agatagcagaataagcagcacacatgaccaccattttaagactatatttcacaaagtgtgcaaacgtaaaataagtaaaaaaaatatccaaaatgaagatacaatataccaaaaagacaatttgaaaaaagaaaaattacaaaccattacagcagagggactgcatagcgatagaactccccaacaccttggaaagcttctttagaaaaggaaattcgagttttctcaaagacagaagaatacgtaacataaaaccccaataacataacattcacccaagtagacaaactaattgatatagccgctccattctttccgatttcaaacttgtaaataagaatccaacatgtctgaatatgaaaaactaaaaccacaagggtaatcaaaagcattggaagtattgaactctgagtttggcaatatcgagttaaaggcttgaggattgctgaagcgaatagacccgggataaggcacattgaaaaatggcaagcttcaatggatattaaagggtcttgtccaacaagaaacaggaacttgtccatgaaaatccaaaggacagaaattgggaggcaaatcaatgagagggagattatggcagcgtaagtataggttcccagtttgtggtattgctctgctccaaatgcttgcccacatagagtttctaatcctccagccattcctgactaaagtgcttacacaaacacttaaatattagtacgttcactatcaacatgtgataaaaaaa

SEQ ID NO: 302461 - DNA, 6796 bp, Cannabis indica
aatatctactaaatatctaattcttttagagctaatatctaacaacttgggaagaaatcactcccaaaagctagactaagggataagggtgccgaagtagttataaaccacaaaccaatctcatacatgatgaatgtgggatcctaacaatacaccctcctttagagtcgacgtccacagcgccccactctactgtgacctactctgcggtggcccactttgggcttataatccacaagttgccccttcctcgacgtcagcccacttaaggatgcatgacttcggtaccacttgatgcaaccacttaagtagaattcactcacagaagctagcctaagagaggaaggtgcccaactagttatataccaccaaccaatcctcatagttggtcaatatggaatcttacacaattccttaaaattttagaaacaacaccaaccatgagattaaacactttatctgaacctacctcaagtgtggcattccaaaaacacacccctaaacttactagttcacattatagagcaagtgtaattatcatttctcttcaatcttcagccacaaaaatcatacatgtaatgagaaactcaaacaaaatcctgagctcacattaacagttgcaagattaagacccaagaaacattttaacctctttagtccaaagcaaaggtactccctcctcgagattagttctaattttaatcttccaaatatagtaatattgtggttacaggcctagaacccctagcacaaacacaaccattggagtcaacctcaagtggctaaatcagcataaaggcatataatggttctcatatttgccatgtttaataatgatggtaacattccatatgttcacaaagatcaaatttttgagaatcttattatgttgacagtgatataatgcttaaaaagaggagacgttgaagaaattacctgatcaccaagaaccttaagcaaagattctctctccttttctatataattatgagaggtaccaaagtatgtggaggctctagcaagggacaaatgattgaattgatttgcatctccatacttgcaacaatcttcagccaacttttttactgaattataaaaagtaaaatttcattttctaacttagaaaaatatatcaaattgaacacaaactaaatcgctacctatctccatttgctttgagcttatggatatgaatccttcaactccacgaacaatatttcgctgaaaatgctgcacagcagaactaagtattagactccatagacaattacaatagcaaagatgctgttgaatgacggtaaacatagcaggaatagaatatgtaccttagctgcccttgtagagttgtataaattttgaagttgttggttatacatgagttcagcttcatcaaccaaagctgcatcattacttaagcttcccaatcgtctcaatactgcctgcaacataaagaaatttgttctccatcagatttagcattgtgttttgattgccctaaattttgatgattacattaatcaagtataattgaacattacagattggaaagttatgggctgaaatttaaataagtggaactaaagttgcatgagcacaggaattcagtactgaattaacattaaaaataacaagtacagccagttttagagtaactggaaattagaaacgcaaacgatagcaaattattgatatgtagtttacaacatatgtacatatctggaaggtaaatcctaaaaataaagtgctagaggtataaatgaaacaacaataagctaaactcagttatgtttattattttatattttattaaagtaaactgaacttgtattgataattgaggaaatgcaagttcgatcaagcataacactccaatctctagctaaatcagaaaataattgaattatcattttattatttatcacaattcagatacaggtgtatagatagaaaataacaataagagatctatctacgaaataaattcaagctagtttaattaagtaaaacggtaaactgggcactgacacagaggattttgaatgttatttggtcaaaatgaaatagcttagtctacaattatgatattatgaagtaaaacaatcttcagagaaatatcatgttcaactatcagtaaaataatgaaagctgaggcaaatatttatagggagtgtcacatgagacattttccaaattggttactttactgcagagataaactaatgagtctatgatgcaagttaatgggatttgtctactaatagatggcacattggcagttatcctattgttgataataataagcataaagttttcaggagctagcaaataatgtgattagttgattagacatgccgccactgcacaaaacaaggccacttactctaccatgtaccaaggcagccattactataagtattggagccctgacccagcacatgtgatagcatgtgccattatatacctgtctggtcacatatcatacaacagagaacgcgagcaactcaaatgggatcttgtcacttaatatttactgataattaaatcaaagagagctaaagaggaatgatgaacaaaagggcctcgtaaatgtgacaaatgttaattagaagatgacgagtttaaggtgatgaatcatggatggaacattagagttcaagattttacaagaacaaaagttggtcgtatgcctatggacaggtttcattggtatgaaacaaaatcatctaaaactacgttcttttcttcactcaacaacacacactaaataaaaagtcgaaagaagagccgtttgacttttttcccccctttccactgattcatggatattattcttttaagaaaaacaacccaaacaaacacctttgtttgagatgtcccgtgggcgtctaatcaaagtaaaaccctcaaaaaatggtcttccaaaaagaaactattgaaaataaaaataaaaagggaccataacaatctaagaccacaccctttatttatctgtataaataatcgagcaaaagagagagtgtttgagagcattaagtacagaaatcagaaaaggccatataatgttttcttctccttctttctaagtagcctctctaaacaaactttcattgcccattcattcaattcccaccttcttgagctcaattacatgtaacaaaacaacagctacagaaactaagaagagcaagagctcaaacttaaaagtctgaaaccaaagcacttccatggtaaaattgagagggggtaataaatcgtacctgctgttgtcttgcgacttgctccctaagtttggtggcctgctttcgaatagcatccatggcggggctagatttatgaagaagaaagccctagaaggtgtttggcagacgagaaattagaaaattgaaaaagtgacaatggtttttggactttggctgtttactctgaataatgagaaagagaaagtgtgtctgaggttgataacagaaacagaaacgagtaggaattattgaatatagaagatgctaataaattaataattaaatatagaaaagtaagttatataaaaaactatagaaaagtaggatactcataaagtcataataataataataatatatgtgaataaattatttcctacaaaaaaaaatattttatataataaaaagattgcgaaaagtgttaaaagtagatagtattagtacacagctaagcaagaaccaaaggcattttagaaaaacagaaataaagtggcaagcacccatcttatatccttactagggttatttaaaatatattatactgaagagtaagggagaatataaaatgaagtaaatattaatacaatgtttttttatacagggttgttgtactatttatttaatggaaataatacagtataaattatgatttataataattttgaattataattaacaaaaatatatacatattttaacaaaaagtataaaatacttaacaaacatgacaagctagtataatataatattaagtagagttgtatgaagaaatagaaaatattaaataagttttttttattatttattctgaatagagttaaagtataaagtaaatcataattttagtaattgaaagtcttacatagttctaaagaacaacaaaaaaaaaaaaagttaaatcacactaacgtgtatggtaaatatgtggagcttaaaaataatgttgttataaattggatactattgttataataaagtaataattaaagtaatattaaatgtagatttgtaccttttacaattggaattaggataatatttaactaaagaagaagaagcatagagagaatggtcttctacctttttctcgttgaaaaccacatttcttttctattccccctgacccttttggttatttctgcttgtctcttagcttttgattgagcggttttgccgtttggtcttttcgttggtgggattctctttctggtttgtcgtatattttattgtgtgtttggtgagggttggtgtgattcgttgtcctgttgtctctttgacattccttttgtctccttggcagaagtattcacttttgtgctttttggcgagttggtgggtgattattttgtccctttgactttatctcttcagtgttggtggttggtggattctgtttcatttatggagacggttggtgagaaagttggttccacttggggtaaatgcttttctgtttctgaagcctctctctccctggctcccagcacttcagctacccaagctctgtccaaattctgcctcattgggaaagtgctgacttccaaaactttagaggagaaggaagtggaaaccctctgtgctaacctttggaaaacttgtgtgaaggttgacactcctctcttgggccatacttcctctaatgtatttcgttttggcttcgaaaaagtggcagataggaggtgggttcttgataatggaccctggtgcattaagggtaattctttggtcctccttgcttggtcctctgggttcggtccgaaggagctttcttttgataaccttcgtttgtggctccaaatacactttcttccacatgagttcttcaccagacttaatgccaacttaattggagctcaggcggggaaggtgttgtctattgatttagacgagtctaaacatgttacgtggaacaaatggattcgggtgcaggtggaagttgatgtgaacaagcccctgttttgtgggtgcttctttaagctgctaaatggtgttaatagctgggtgcagattaagtatgagaacctgggtagcttttgctatttttgtggttgtttgggacatcagaggggcgattgttcccttggttcaccggtatcgattttggatgttaagggtggtaaataccctctgtttggcccctggttaaactctagatctccgtatgctagctgcttcgtgggcaacttgcatatctcaaattctcgggcaaaatcttttgagaagaaggttaaagcagtcgttgagaatgggcggccaagggtggttaacgattctccctctccggcaccggtgggagggttggactgtggaataggcttgggttctcgagagcaggtttcgtgtttggcgccccgctcgagaaagggcgttttcctaggacccagaacagacaatacctgggttcgaaagtcgtctgagatggcgaagactagctgtgcgagggatttgcacgattcgggtaacggaaagttgaagcagcctctgggaggtgatcctgtttctgaagacttacccattatagagagaaatttgaattttaaaaagagattggagagttttgtaggtgcggttattgaggatgaggttgagaagtcaaacttcattttgtccactgggttggtgggaccgtctgctgttgggccttcaaaattagtggtatctgggcctgttgggccgttgggctgtgtcacgcctgtgaggttgccagctccccaatacacaggatatgttgtgagtactgggcttcgtggggcttcgggttgtgaggtgttgggctctgttgggagtggggccatgggagttggaggattaagagggcctcttactagccgagacgttgagctcctttccaaatacagtttggactctaaacctcttgagaagcctgttcttccacatggttcgacccatttgccctctcctggtttggacagtgaccatgtagttcgttttgaggaagaaagagccttgcctaatttttttaaggctcatgaagattatatccatgagattgagaaccttggatcccccgaaaaaaaataaaggaaatcttttggtgtggatattggcgtccaaccgacttcggagtgtaatgatagaaccactccgatcaagaaacgaaggcttgattttgaaacgctctctttaggagaagaacttggtttgtcgattcgtcgctttaagagagtcgttagagacttccccaaaggtactggcccgaatggtggtgctcgggacactaatggtgttcaatcttcggacaattattcagaggagcctcttgatagtgaggaagtggctaaaagagggggtgccttgtcccctactattatgccacctcagagtgacttcccggtctctgtgggacagtcctttagactgacggcttggaaggccaaggcaagattggcagatgtttctatcccaccttcgaatgtgatttcacttgaagatgtgggctcggtagtgggtgctaatgcggtgaagatgacccctgtggaggaggacgatgtgcctcctccaaaggagccatgagaggggtgttgggttttatgccc

SEQ ID NO: 302462 - DNA, 1820 bp, Cannabis indica
tgagaaatttttttgttaaacagcaaacattctcatcaataaaatgagtaatacaattgtcaacaaaagagaaaaattacttatctttgccaaatgatgggctactttattcccctcacgagaaataaagcaacaagaattaacttaagaactaaaagaatttagatatcaccaataataagactggataatttgttgcccttgttcaccaccattggagcttgtctgctaatcaaagagaaaacgacccacataagaactgactgaattcaaaggccaattagtctctctatatctatatttattcagttcaaactaagtgatccgcataacattagcaaaagcctcaattttcactaatgggaaatttttcgaagatgatgggaagcaaatcctcgcacttagagcacaccactaaataactttagaagcccaaatcgtattttcccaacacagaactgaataagggcagccaaaatgagcacgagtaatatatttcgtgtcctctccacaccggaaacatctagaagaaaccttgattctcctatgatgaagcacatgagacactagaagaatattgtggacaaccttcataagaaattttttattttggatgggatatgaagctgccacattttcctccaccatttggccttaactgagctagaaatagaaatatcatgagaggcttctattatagcatggtaccccgacttaacactatactcaccatacaaagtgaaatgccacataatttggtcagcaatatcacgaaaattgagaagaatgtcgaaattttgatttcaatatccacttctcaaaagatttgtttgagataatcaatattcaaatgcccatcagtggtgaaattctttacccgccataaagggccaagaacttctaggtttgtgaaaggatgaaacgtagacaaatgggggagccaagggtcatatgttggatgagtttgagacccatcaccaactctccatctaatgccaactccaacacctcctgctccaaagagtactacaccacacaaaggaaataccacccttcttttccacatgaagagaatcaccatttttaaaatagttagctttgagcactctagccatgagacaagttgggtgagtcaaaaaacatcacccttgttttgcaaccaaggcttgattaaatatttcaagattacaaaaacccaatccccttcatgtttaggcacacaaagatcttcctacttcttccaatgcatcttatgtttatcatctgttgaaccccaccaaaaagggccaccattgaacaggccaccatcgcttccatatcctgacacatgaatttaggtaacacaaaaatactcatagcatacatagggatagaaagcgcagcaaccttgataaaaacttttttacccctagttgagagaagattacctttccacacttaaaagtttttttcaaacccgatctttaatatcctcaaacatcgccttcttctttctgccaatagtcaaaggaaatccaaggtactttgacatcgctgaacacacatacaaccccataacatccttaatgtcttgcttcacagcaacaggaacactaggactaaaattgatcagagattttccaaggttaacaaattgaccagaagccttctcataagtgcgtagaacatacaacaaggcttgacattcaacaatagaagccttacaaaaaattacactatcattcgcgaaaaataagtgactaatacgaggccctctattgcttgacatgttagataaattaacaattaacccaagatctatttgtatataacatagaaca

SEQ ID NO: 302463 - DNA, 6821 bp, Cannabis indica
caacaacaacaacaacaactcaaataataacacaataatgccagattgctttgctttttttcccaactcacagagaggttttcatatgaatctcctatgcactttttttcttcttatttgtttttatgatttatagcttttggatgagaaacaaagtcaactcagcataaatcattgttttttgtcttgcctagaaaaaacaacaacataggataggacaacaagagttgttgggttgaatttgtttcctactttcttatttaatttcagtttgaagacatcatcatcatcatcatatcatagtaaagagttaaataatctgtacatgacttaactttttcttatgtcttgtccctttgagggaatttttgaatagagaaaaacaaaaagtgctgtaaaaagctaatactatatgttatcttttcatttatacatatgattcaactttttctcttattaagtacaaaaatatcaaaacaaaatcaataagcaaattttgtgaaatgacaaagattttgtttttaatgtttcaataacatatgaagagtggaatccttttgaacattgtaactagacagatttcgattttgatcattgagtattcttccacaaaacacaatcttctgcctacaaattggcattcccaccttacaaaaaagcttttctttaacctcttcgattgtattcgatctcataacatggagtgttatggtctttgagctccaagtcttaacaagaatttgaatccaacaaggctgcagctccaaattcgaattctcttcgatctcataaaaggccaagctcttgcagtcctcgagctccttccctgcgtaaaccatcttgcattcgtccacgggacaacctatgaagctctcaacgattgttttgaggttgcaaacagtgtacaagacttgtacttggaaactaagaagtttcccattcggggttcgaacaatgattggcaatgaagttgtgggatggaagatcaaatgaagggtggattcggtttttattccaagtgattccaatgtcctgtaatcttcaaggcttatcccaccatggaataaagaatactcatcttgtttgattccttcagcaacaagaatcttggatttgatttcatgaacaatatgataacctcttgcttcaacaacaatagttttcttcttgtttgagactgctgctattttgacatataatttcatccaagttgaacttatctgatgattcttgttgtccttattgtgttggttttgaatcttgtcatcaactgttgttatctgttgataaccaaaatcatcatcatcatcgtcatcatcatcttcttccaaatgggattctttgacttttcttgaattttctttctttctaattaacttggttttcaagtttctgatggttttagttgctatgaccttcaattgtgctactctcaaaactcttctgaatatgtttctctgccacaaaagaaagaaaaatggttctaatatttattgatttcaaagccaaaaacaaaacaaaatagaagttgtttgttaaaagaaagaacctgatgttgagatgaagccaagttggttgattttagtttcttgtatcctttggataaaagtctccaatgccttggtgcttccataaacaaattctattgtaaatttcccacaatgatagaaaacttgtggttgtttaaatatcataattgttaattgttattataagacccttagacttataccatgtactggttaagaaggctttatcaggctcagcaaatataatactttaaaccaagagttgaccaaattcattaaacaaagtttattaattagatagtgaagtcaatcaacataacttggttaactcaaattgcaaacactgcttctacttgacttgttcaatgaaaatataacaatctttcacactgcatataccaacaaaaatgaacaacacatcaagttttgggagctttttcatcatcaaatagctattgattcatcacaaaggaaaaaaatattgttccctctaatcagggaactaattacaaaataagtttccaatagcatcagacagatgaacactgatcaaaaacccaaataaaagcattcatatacacgagtatactccatgtcttttatacaaaaagaacaatagcccgcctaaagtcttcttctaagtgtaatgaaaggtgtagaacccaagtgaggtccaagttcaggagatgtggttgcaatgttctccagtgatcgcaagggaacaggagttactagatgatgactcggggaaatcgttccctttgctgatgacaactccttaagggctggtccattctcctgcaatgcaaggaaaaaaaaacaatctaaagtcagtcaagtgtaaaatgagaagaaaaaaaatccaatttaagtatgcaagtataagactatggtctaaacttactaaccccaactcctcccactttcaccatcaattcttgaggatcaatattttctgatccttttttcttaggcattggtgtgctgatgtgcttggatagttctctttgattcccacacagtgtgaaaatgttttgaattcggatttttcttgaagcctctgaatccttgtcatcttggggtacacttttgagtcctaaactctgaaatctttcctctaaatttgatttaagataatcttcttcccctggagtctcttgacaaatctggtgtgaaaatgtcaagggagttggactcacattagcgatggagtttaccacacaaaccttcttctcctctatgacttcttttttcacttcttcatcatcttcatcactttctttgtgttcttcctcctcttcaacttcatcttcctcataaacagtgcttagagatactttgtcaccatatgttggagcaaatagatcatttccaagagcaccattcaaagtagttgaaaggggctggttaagacctgggctgccattcttgtcataagtaaagccacgaaaaactggttcttgatcatccatgtcaagatccattgactttaccatgcttgcatcatcactgctagaataaatccccatcagcctctttgcaaatccacttccatcattttctatagatttgttagtctttatctcaatattcccttctttcgatcgcaattccaactcaatttcctccaaccgccgcctcagcatctcaagttcttgttgctgctggagtatcctttcttccattctcttcctctccaattctacgaattcattggccattttctggcattcctctaactttttgtctagttcacatttcatattctgagcccactcattcacctttgagttaacttcctcctcattttcaacagaatctctcccttcgacaagctcaagtttagctctcaaagctttgacctcttcttctttcttcattagttctttgtgagcatcatttcgttctttctcttttagcttgttctccttttgtagcttcatgataaattcatccattgcagcaatccttgatcctaaaatcacagctgaggaagaatcttcaccaccagctttatccttgatcggagtaagagggccacggactatacactttgctttggctccatattcaagggtggagatcgtcttgtgtatctcctttggatcggggctagcacaaagtatcattaacatttttgacttgtcatcctcaaaagaatccttgaatagaaacaaaaaatgaaaaagttaatcaaaacttgaacttgaaagtcacctctccagcaattgaaactgacattaatatattatggttacctgaagaagcatagtcaatttgctgtctctaaagggtacatgagagtctccattagcaatggactcaaccactcttttcaatgctatgttcccctgatttatctttcctgtctgagatttcaacaaaagaaatactcagcatttcgttcattaatgtcagtaccctgcatacatagaataacaatcatggtcttgataatcttacctgcatttttgcctcaaaaccaacttgaccagcttggtcaatattttcagaaccagccatgtcaacaagcattaaccgtcctcccactgttgggacatccaggatgacctatgcagaaccacaaacaagtatctaagcacagaatagtacaagaaaaaaaattgactggcctagtaaaacaccaaaaatttattttataccaggcaatggcttcgggagcttctttcattacaaagggtgcttttaacaatccttctcttctccaccttctgaatctcttttgagattttgccagcttcatttccagatatgtatgtagcatttttggcttttttccccatcacttctagctttacctgcaaacacaaaaatgcatcttaccaaactatagcaggctaaaacaaagtgttataaatctgttatatacactaatacaatgaactcaagttctctccccaattatacacaaaaattcacactttatgacacttaactcaacatgttagaacctataaatgtgatcacacagttgcatacagttaagaagttcccacgtgacttgtgggaactagttaatatacacaagtaaaacctataacaagtttacatacagaactcaagttctctctgccaattatacataaaaattcacactttatgcttacttaacatgttagaagctaaaattgtgttcatacagtaacacacagttaagaagttcacacaagtcatggaaacttaaagtaaactcagttaagcaaaatcatactcaatatgtttaaaaaataaaaagcacagaacataatgtaacatttccttatcatcaaaaacacatgaaattttttacctttgaattagagccatttcctttgggccaaccaaggccaaatcctccaccaccaccaccattgcttgacaagagatcatatatctcctcattataaatttccaaaacagtgacctgaacaaatgtcccaaccccaactcgctcaccatctgcatcaccttcttcatcatcatccccaagaatatctctcagagacctgtaaacaatcccaggttgtttggaacaaccaaacatggtgtgactcttccccgaaccggtgggtccgtacatcatgatagtacatttctcacccaatttgacactatttatccttgactgtacgaaatgactatagaaagacccaagatcctcttcctccgacaaggaaaccccatcaagaccgaaatcccggtacccgaaatcggcacgaactcgaatactgtgcttttgagggttaatctgaagagtagaaatgggttgttgttgttggtctttccgatctgggtaatctcggatccgggcgattacttcgacgggatgctccggtgggttgtggttttctcggagggcggagttgggattgggtgatgggttgtggtggtggtggtgtttggggccgtggaattgaagacggtgctttgaatttggggtcttgaattggctggggttgccttgattggattttgaggaaggcgtaggcgccattactaagatagaaattcaagatttgattttaattgcagatcgaattgagaagaagaagaagagagtgagagaaagagagctggaaatggaaatgaaagtggaaaagagagattaggggaaagagatggaggaaagtagccgttgagaatttaaactttaacgtttgtgtgttgttgtactacacaacacaacaacaatatagccgttgaatatagagaaaattttaaaatcaattccataaatactacttttctttttatgtaagctatataatacccttgtattttaattgttttgaaacatgtatatacataaaggccaaagatgagcagcccatatatcaaatgcaaatggggtaattgtgtatttttttatatattttttttgttgtgtttgtgtatttttatttcacatacacaaaaataacaaaaaatttacaaaaatacggttttacggaattttaaatatttttacgattttttgaattttatttacagaaaatacggtctttttatgttgtactcttgttaatttgttattaattttttgttatttgtatgttattttttgttgttgttttgatgttatttaaatatttttgatacatgacacgaaggaaacaatcctgaccctgaaacccaagaaggttaagaacatgcccaacacctaagtagagcataaggaggcactagggtgagcaggtggatcccgaaatgtgttgtttccaagtgtttgcttcaacagtctaagtggatatgttgttacaacattataacgcacaagacgagaagtaaagatatcacgtgtacatcacaagcatcacttggtcacttaggtgaacaccatatgcatccaagtggattctggaaccctagtttgttcgattctgaatttactctttaactaatgcaaacataatatgcgtaaaggcaaacgacactctaatctcgagcaacaaaacactcaacctatgaacaagttgcctggcgtgcttaggtgacacccaacacgtaggtgagcatcatgctccctgggcaacacaacatcaagggtttgagttccaaggtccaaaaagtaggggtgagcaaaaaatccaagaaaccgaccaaaccgagtaaaccgaccgtccgaataccgaaaaaaccgacaccgaaaaaactgaaaaccgaaaaaatcgccttcggttaaaaccgctttaatatggtcggttttagtgtcaatcgcaaaccgaccgattaaaccgagaaccgaccgaacatatatattatatgtaatatatattatttttgtacatattt

SEQ ID NO: 302464 - DNA, 2362 bp, Cannabis indica
ttgtgttttgggtagaattggctggggttgttttgtattggttctttttttctttggtgtatattttttaattttctcaccgtctaaaagaacaagatattttggccatgccacataagatctaaagacatgtttaactaagtaaatcgcatcaggatcaattgcattaggtattaaagcatcaggaatcaagaagatatatgtaggtcagagattgagattattacaggaagatgaaatgcaatgagtctacagtctacattactagaaagaatcaaacaaggtcaacttgaagatcctgatttaatcaaggagaaaagtgcagtggaaggtgggaagaaaacaaattttgagatttcagttaatggaagcctaaagttcaaaggaaggttgtgtatccccaacaatgatgaattgaagaaagaaattcttacagaagctcatactactccatattcgctacatccaggtacgacaaaaatgtataatgatttaaaaaatgcattattggtggccaaaaatgaagaaggatgtggtagagtttgtggcaaagtgtttgacatgtcaacaagtgaagatagagcaccaaaggccagctggtttgctacaacccatacaaataccataatggaaatgggagagattactatggattttgtagatggattgccaaagacttctaagcaacatgatgccatttgggttatagtagatcgactcacaaaatcagcacactttctaccaatacgtatgacatatactatggatcaacttgctaagttgtatgtgcaggagattgttagattacatggagtgcctatatccattatttgaaatcgagatgtccgattcacctcaaatttctggaaaagtttacagaaggccatgggaactagattaattttcaatacaacctttcaccctcaaacagatgggaaaagtgaaagaaccatccaaacattggaagatatgcttagagcttgtattctagattttccaggttcatggaataagtacctacctctcatagaattttcttacaataatagctttcaggcaaccattggtacaacaccatacgaagtcttgtacggtagaaaatgtagatctccagttcattgggatgaaatgggagaaagaagatatcttggcccagaaatagttagaagaacgacagaggcaatagagaaaataagaagaagaatgcttacagctcaaagcagacaaaagagctatgcagacaaaaaaacgaagagatattgatttctcaattggagataaagtatttctcaaggtagcacatctgaagggagtaatgagatttggaaagagaggaaaactaagttcacgattcattggcccctttgaagtgcttgagaaggtgggaaaggtagcatatagactggcattaccaccaacattgtcaagggtacacaatgtatttcacatttctatgttaagaaaatatgtgtcagactcttcacacgtgctcagttatgaaccattagagttggaacaagacttgacttatgaagaaaggccattacaaattcttgataaaagagaaaaagagcttagaaacaaaaagatttcactagtaaaggttttgtggagaaactttacagtggaagaagctacatatgggaacgggaagatgatattagaatcagatatccagatttatttgggtaagcaaatttcgaggatgaaatttatataagatcgggagtttgttatggtatttaagtttcttaattatgtaagagagccaacattgcatgattgcatgatttgcatgacactacattatttaataggtgcatattattatatggaatgcacttgacatagaaaataaatatttgagaacttttatactgattttattatgatgattaatattttaaaagttattcgtcagtcaaatactatgtgtgctcaatgatatgagataatacaagagatatgtgctattatgtgatgggcattacattttagagtggctagtaaaaataattaaatagtaaaattatgaaatctcattatttattatttaacgataatggtgtttttataaatattattattatgttattctttttattatttgacaattcgcatttagaaaaaaaaaatagttccaccgacttccccacattgtttagatatttaatagagagtcatttgactatcttgctcgagatgaagtagtccctctctcttcaaaataacacataacaagaaacatttagttaaggaacactagagcatgattgatattgttttcagttttttgttttaaaaaattgtttttagaaatgagaacaaaaaataatttttgaagtttttaaaacacaagtca

SEQ ID NO: 302465 - DNA, 3222 bp, Cannabis indica
aaatagaattcatacattatacgaataatcatgaaataaatcatgtgaaccatgcaacaataaatgttatttctgatctttatcaataagcaattatgattatattgaaatgagttttatttagggcataaaacccaactagttacttgaagacattattatattgaaatgagttttatttcgttgtgacaagaaaactccctctgctgatctagcgatttcaaaacccaagaagtatttaagaggaccaagtgccttgagttgaaattggtcattgagagagtcttgcagctggtgaagtaatgtaatgtcaggtccggttataataatgtcgtctacatagacgagtagagcaataaaattgtcatgagatcctcgagtaaacaaagtgtagtctgcttgagattgagagaatcctgctgagagaagagcatcggagagtttcttataccattgtcttgaagattgtttgagaccgtatctagatttgtgaagtttgcagaccaaattggaattgtcttctgaattaggaggagtgaatcccgggggtaatgccatgtagacttcttcttgaagatctccgttgaggaaggcgttgttgatgtcgatttggagagtgggccattatttgatagaggaaatggccagtaataacttgaaagtaaccatcttggcaacaggagagaaagtgtcaaaaaaaatctaacccttcttgttgagtgtaaccttgagcgaccagacatgccttgcatctttcaacagagtcatcactgttgtatttgatcttgtatacccaacgacaaccaatagctcttttgtgaggaggaagtttaaccactgtccatgtcttgtttcgaagtagaacatgaatctcattgtccatagcatcattccacaccttatattgtcggacttgattgtaattctttggttcgaaaagagcggtaactgcaagaataaaagctttgtgagattttgacaatttatcgtaagaaaggaatttgtgaagggggtgaggtgtggaagattgatcttgtatggaagaattgcattcataatcttgaaggtatgcaggaggttgagttgttctagttgttcttcttggtacatcatggcctgagttaggaacagtttcaggaataacagaagggtcctgagatgtgctgaggtccatgacagcagtagtatttctgggcagatcaggtgcttgaggatcaggaggcatgacagtagcagcaacaatatttctaggcagatcaggtgtttgagagttaggaggcatggcagtagcattgtgtccaggcatatcagactcttgagagatgtttgatcttttttctacagggaaatcactcacatttgtgttagacacattagtagatggaaaaactaaatgagagaaaggatcaatattaacatctgaggtgtttaatgtcagaaaaggaaagatattttcatggaaaattacatttcgagaaacaaaaatttgtttatcatttaagtcataaagtttgtaacctttaatgccttgtggataccctataaaaacacaaggctttgctcttggggcaaatttggtacgattatcagtaagagtacatgcaaaagcaaggcatccaaagtttcttagattagaatagttcggagtagtaccaaataataactcaaaaggtgtcttattgtgaagaagaggagtaggggttctgttgattaaaaaagttgctgtcattatacatttagaccagaattttattggcatttttacttggaagaaaagagcacgagccacattttataaatgttgatgctttttttcagcaatagcgttttgttttggtgtttccacgcaagtgaagtcatgcataattccaagtttcgcaaaaagatctttaaacacaagttcaggtgcattatcagaacgaaatttcttaatagtgcattggaattgagtttgaacataagagagaaactgatgcattatttcaataacatcagatttatgtcttagaagatagacccatgtaaatcttgtgtgatcatcaaccaaagtcaaaaagtatttatagtttgaatggaaactaatgtgataagggccccaagtatcacaatggacaatatcaaatttatttacagcagtagaattgctattagggaaagaaagctttctttgctttgctaaaggaaaaatataacaaggtttgttcttatgtagggagctaacactacagtttaaagtgtcacttagaagggtaagtctcctttgagatggatgtcccaatcttgaatgccaaagttcagcagtcacatagaaggagtaagcattatgagttgaagcatccatcacatagaggccactcatgaccttacctctgccaatctccctctggctgtgtttgtcctgaatagagaaatcatcagtatggaattttactgaaatggagccactgttagttatgctgctgacaaacatgatattgtatttaaaactaggaacataaagcacatcagtaagaattaaatgctcattcacagcaatggaaccactttgattaacaaaaatagattcattgtttggaagaattaacctggttttgaatatgggagacaaatattgaaataattttatattgttacatatgtgtcaggtagctcctgaatctattatccaagaatcatcatttggagcaatataatggtgggatagaatgatacctgtagctcctgaggaggagctaggatctgtattgggcataccgatttgttgattggcaaggagattcaagagttgttgatattgttgggcatttagttgaggcaaaatcgtatgtccttcatcactgtaacttttagaatctgtattggtttgaacctggttggccgaggcatccttagacttgttgttcttgaatcctggaggatatccatggatcttgtgacacttttcaatggtatggccaagcacgttacaatgcgtgcaaaagggcctgtttttctttgggggatgacttttggaaccttgagtatcatactttgggttggcattcctatcagattgaaaagcaaaggccatattagtgttggaatcatttccataagagagattacctttctggttttcttattgagtaacaagatggaaaacacgattggcttctgtaatggctccattaaaagaatgttgctgcgtatttgagaaaaatggtctgaaagtcccattaaaaa

SEQ ID NO: 302466 - DNA, 1041 bp, Cannabis indica
gaatttatctgacgattatgtttagaaatggctgtggtagctgcagaagctttctttttccattcctgtatttccttctcacactcttcagactttgatttccattctgtaagataaatttgtgaaagagtgggttcattggcatcaatttacaaataaagatgcaaaatctatcggtgtgtgaatgtatgttttccttttttttcattcttcactcactttagtaatattgaaagatcagcaaggaaatataataatagccccaagtgaaaattccacaaaacatgaatcgaagtaaaagaatgagcaattcagtaggaattccaagcaataactcagctcttgccagttaattcccaagaaatttgaagtggtaaactttcaaaatgtatcagaagttatcttcggggttcggtcaaattaaagtgacaaacacaagcgaaaagaaactagttcatagaaatgaaacatgaaatcaacatggtaactccccataaaccatgacacaccttgatttcatgtatgtaagaggttatttaagttaccttaccaatagacacaaaaaaaagaatacgcaaaatagagagcatttatatagataaattatgacgcaccttctacttcattattcaagtttttgatatcactaatatctttttccgcagataacttggctgcagtttctctttcttgaatccgctctaaatcattttctaatgcactgagagaagattcaagctcgttgattcgtgattccatgtctcgattttgttcatactccaacctggcataaaagtatatttaaagaaaaaaaaaagaacatatggatggaggattccgatcaccatgacaggaatataaaatgatgtagatttttgtttaaaaagtgcaccactcaccccttctggcaaagaaacttactatacaaccaaaataactgacgaaagcatagtgacatacagcattcattgatctaaactctaaagcatatatatgtatgtgtgtgtgtagagaatctgcttaacaaggaaataaagtaat

SEQ ID NO: 302467 - DNA, 3235 bp, Cannabis indica
tacaagtaatcattacaattttgttgtgttttttggtttctcttttcccagctgttctactcttatcaatttctgtagctgtgattccggctgcattaaggctccataatctcaaaaattggtttcgcttagctctggtcattttggtaagcgcatgtccttgtggtcttatcctctctacacctgtggctactttctgtgctctcacaaaggcagcaacttcgggtcttttgatcaaaggaggagattaccttgagatcttggctgggattaagatcatggcttttgacaaaaccgggacaatcacgagaggtgaatttgtggtcacagattttcggtctctttgtgaagatataagcttggagactttgctttactggtatacagctttatacttgttagtttgttgaagtttcaattctattagtggtacattgtacataaagtgtttaaaaggttgcttattgtactttcttgtgaacatgaaagggtgtcaagcattgagagcaagtcaagtcatccaatggcagctgcactaattgaccatggcaaatcactgtcagttgagccaaagccagaaaatgtagaggaatttgaaaactttcctggtgaaggaatccatggcagaatcgacgggcaagatgtgtacattggaaacaagagaatttctgctagagcttcttgtgaaaccggtaaagattttgaatttgatatttctggtttttagctggatcagccaatggaatttatggttttactccaatacttttaattgttgagcgtattagttggagaattgaggttttaactttaaagatttgtgtgtcaaaatgtcagttcctaccctagaaggctatgccaaggatggaaaatctgttggatacatatattgtgaaggaaagccagctggaatctttactttatccgatgcttgtcgatctggagcttcagaagcaatagcagagctcaagttaatgggcataaaaacagctatgctaactggtgatagtaatgctgcagcgatgcatacacatgaaaaggtaaatctctagattcttaataaaaaagttatttagggagccaattgtacgctttttttgggttggatcaagataccatttattgaaattaatgaaatcatttcatctttttatcttaccaatggtttccttagtctaatggggtgttcaatacatgtcatggaaagttcacattttaaaacattccagattttaccattctttgatgacttcatctacaactgcattgatttacttgtagcagtacaattaaaggagttaacaaacaatgaaaattttgaattggtatgcagttaggacatgctctcgaggtcatccacgcagaacttttacctgaagataaggctaagctcatcaatgagttcaaaaaacaaggaccaactgccatgattggagatggactgaatgatgccccagctttagccactgctaacataggtatctcaatgggaatttcaggctctgcacttgcaaaagaaaccgggcacgtgattctcttgtcaaatgacatgagaaagataccaaaagctatcaagctatcaagacaggcgacaaggaaagtgatgcaaaacatatttttgtcgatcattactaaggcagccattgttgcattggccatagctggccatcctcttgtttgggctgcagttcttgctgatgttgggacatgcatactggtcatttttaacagcatgttacttctacgagatccccattcacacaaagggaagtgctgtaaaccttcttcaacaactcatgtccacaaacatggttgcaaggatgatcacagcaaattaatacccgagaaggaccagaaatgttgctccaacgataaaaccttaaaggtttgcaaatctcagaagtgttcatcacagatcaatgtctcgaaatgccaggctagaataatcagttcaggctcttgttgtgaaaagaagagcgggaactcggctcacaagcaccatgctgtgcaacaccatcaccatggaggctgcaaaacggccagtcatgatttggagtcacagcatgcacatggccacagttgtttaggctctcaatctgttgtgaagtcatgtttggaagaaactaatcattatcataactcaaatgaaacgcatgattgttccgcaaaagatgctcaccatcaccatcatcatcatggtcatcatcactcaaagaattgtgaccattctgttttggcagagagtgaaaaactctcaattactgaccaaagcaactcaagcaaccatggtaagagccacatcagcaacgtatcatttgaaacggcagatattgagccaatttgtggtcagcagcatcatcttgaggttcattcttgttctaagaaacatgataaagaccacaacaacattgacgtaataatacatggtggaagccatgctgagtcaaagacagttcatcaggcttgtttgatgacaatggagaagagcgaatctaaaggatgttgtggaagtcataaggaggagatcccaaactctgcaaccaccaaagcttgcctgagcttggagaaaagagaatttggaggctgctgcaagagttacatgaaggaatgctgtaataataaacatggacattttagtgctcccattggagtaggcctatcagaagtgattattgattaggtaaaagataacatttggaaaaagaatagaataataatgtctccctagaaattttaaaagagatggcaacggcatcagattgaaagcagagtattgaaaggattgggaaagtgtaaaatatatttttatgtatatgtaacttctcagtacatgtttcttttcacttttttaacaaatccgtacatggtttttatcgctaagaattttatatctaatgtaaatcgatcagcttctttttttttatcaagaaggaaatgacttcattaatcaacaagcaaatacaaacaaaggagcataacaaaaaagctcccaaacaaacaccctctacttacaccctttcccctctagtcatctgcctatgaatgattgactctgaaatctataaaacataacttttttatctctttaaccacaaaagaaacagtattagagtatccctcaaatatacacttgttcctattgatccataggtggtagcaagttgttgccgagacagccacaagggctgcacatttagacccgtaaacccgaaaaacccggccacccgccccgacc

SEQ ID NO: 302468 - DNA, 2986 bp, Cannabis indica
agtttattcagtttagtttgggcaattagtgaaatattttcaactcatacttacttgatagcattagtgataacatcaaaagggtcagatccagccccaacaaacaccaaatgacttccctcaaaatcttcaacatcaggatcacctgagaaaatcagacaattttttttagactcaaattgattatcaatattgatttttgataatatgtatatgtatatatgtatgtacatatatattaccactttctaagcagatttcaagctcatcattttgattcccttgtaagaacagctctaaagtcaccttcaagaatgggtaagaaaacaagtgtaaagtgaagattgatcatcattatcaatagcttcgttagcttccacaatcaaaaattgagtctcatatggaatctcttttccataagatcccattctctgtgtcatccaccacattttgaacctgaaaacacacatgaaacgcaaccccctgtccacaaacacaccaaacattattacattatgatacacaagaacaaaaactcataaagatactagctttagaatgtaaaattcaaaagtaatttcttggggttgttttttactgagaaaagtttttaactttgcttgatttcttttattttattcagaattttaaaattagctttataagaatcgtttggcaaaataatctttatcaaaatttttataagtaaaatgactttttaaatatttttaatagtaaaatgactttatatggtcggagagacgaccatgaattacagtatgagatcataaacgactattataatcgcaaaaggatcttaaatttacattgtgttaagtaagattgttttacaaattttagtacttcatattgataaatttcacaatatgaaaatgaattagagagaaaaggctctttctttagcttttttccttaaaaaacagaaaaacaaaaagaaagaaagctataatttttcacaaatgtaacaaaagaagagttaacaaacagaaaatgcagaaaaaagttacaaactttgttatgtttttttcagaatttcaagaagagagagtgtttcaagcaattctctctcctttgatctgttcttattaataataaaaattaataaattaaatttaaaaaaatgaataaatcttcatacatttttacatatattatcattaagaagattctcaatataattgaacttaacaagtaatataaacacagaaccccaaatgaattttcaagttaaacacagaaccacaattatacacaacactataaacatatacattatacatatatagatataaaattacaaaacaaaacagaaactttttcaggcatttcttcactttctgctttgttgtgttcttaacaaaacaaaactcaaaagacatttacacaaacatataacatacattacatatatactcttatatatatatatatgggatgaaagtattaattaagcttaacttactgaagtttgccgagagagaagacacgacgactgccaatctgatcagagacaacaccaagaaaagccccatgatgatcaccggcggtgtgtgtgagaacaatgttgtcaggaacatcaaccagaacagtcttccccacccttaaattcccctccgttgccgttattcctgctcccacagtcatcttaatcaaaacccacaactcaaaatcacaacttttttgttaaatcactctctctaaactaccttcctacatatatacacatttatagtgttatatatatatatgtcagtgcctcgggtatcgtgtcaagctcaaacatttatcaagggtcctaattagaccttttgtttgaaactatatggtcgaatttttttaaaaaaaaatttatagccgtattcattatatttacagcatcatttttataaattttaaaaaaaaattgaatagtttacaatgtcgaatacaaaaattttgatattccaatttatcacgtgggttaaaaaaatttaaatgtatttttggcattataaattatcaaattcttcttaaaaatttataaagataatgttgtaagcatttcatgaaaaaaaatattttaatatgtattttcgggtgcaaaaattgactaaaaagttataataaagattaatagtagcacttctcaatatttattttcttatttaatagtaaattaataatagaggtctgctaattataatctccacatctaattttataccgtcgattatttattactaactcgataaaaaaatacttctaaagatttattttgtagtagtagtagagttaaatatcaaaagctattttcagtactgtaaattatttaaaatttttaaaaaatttacaaaaaataaaattgtaactataataaataagaaaaataatattgatgtatgtgattttgggattaaaagttcactccatctacctcatgctagacttacgtggcaagaagacaagtgagatctgacaaaaaaaaggacaagtgatatgaacacaagatcacgtgatactgtctacgtgtcgataattgattggatgaaatgtgtaaagaagtattaatattataagaagaacacgtagacgtgaggtggagaaagaaacataaaagccatgcaatgcaattattgacttcaattattaattttattatattacttatgtttatgaaactcttcaatcttagtttttaggttgtttttattggtctaatcaaatttgtaaaagctgagttggagccacgtcatatacatttgacaaaagaataggaactcatgtcctacgtgccatccaatcatatatattataatcaatatcataaattataggaaattatttatcgatacacttttatttatttcgatatttagaaaaaaaaattaatttaattttttctcatggtcatgaatattgtaattatttaaatttttttataaaatttaaaaaatttaacacgctaaaaataattttttaaaaaaaa

SEQ ID NO: 302469 - DNA, 3645 bp, Cannabis indica
aaaaaaaaaaaaaatactatacactacacaagttgaagtacgtatagaattaacgattaagaagggtgtgcaattattgatttataaacctatatagtagggctaagcactcgtgtatgtatgaagtgacattattttgatgattaattaagccaaattgagccatatataatacttaatcgccttgatctatgtacagttgacatagacctcagaacagctaaatgattaaagattgcgtggaccatccaaatctctgtgaaaaatatcataccctaaactaaatcaacgatcggaacaataattatacagatctttgatatatattattaattaataagcttatttactgctaataattatataagtagggatatatatatatatttagattgttttttgacgttgaaaccgacaatggattcgcttctacttgacagacgacagccaaatgaactggacattgaacttttttttcttttgatggaaactggacattgaacttggctcgattatatatatacaaatctcatgatcatctaatccaccttttccatcggcctaagctaagctgttttttgtttctaacactgctagttgatttagttccttgggacacatacataattttaagatttgcaaatgattatattcttttacgaaaagacttctctttctctttctatatacttatatcttatctcatgtctgatgtatacttcaactggtatactctaaaattaaattttttaatttaattcttatattaaatttataaattacatacaatccaagatttttatattcgtgtgtgctttttttttttgttcttttccaattacacaacggaaaattactttattgttaagcagggccggccctgagcataggcgggctaagtctgcgccctagctcaggggccaaaaaaaatttattttcttttataattacacatttttttatcagttttgaaaaatactacattttttctaaatgaaggtctaaaaatattttttgttctgtggcccactaaatttcaacgccgaccctgttcctaagccacaatattacaaaactatcgttcatttataaatatatgtgtgtctagaatctagattactatattggcatactatttgactttaaaacatatagaattaagttttatgagacaattcgaactaaaactaagtgtagtgtagatgaaaaattccctttgatcattcttaatttgaggcatggatattttgtaatattgtcaatggtttgcaatgttcggtgatgaaattaatattgattggccaacttagactgcgcgcgcggcaatgtgaagctcatggcacggggtcataattggaaaaacaacaaaaatataatttgacagaaatgactagttctcattggtatatagaaatcgggagtcatacaaatttagaaatttgtctcaatatatgttctctacatattcatattcttcgaacattcatttggtaaactatatgagaattgttaaaagatgagtatagtactttttgggtgttatagtgttgttgttgtaattaagtatacaatttaagaaaataaattttaaaaaatatctctaattaatttttagagcaccacctattgaagttgttaagcattgttagtgtccaataataataatcaaataatcgagtgccacgtttgctacttaataatatagcctatatataaattggtgacatgaagtagtctcttagatatgcgtatagagaactaaaaaatacccaataacttagacaaaaacctacacaatttattataggatgatgaaattaatattagaattcagattatcattctaatctcacacaatgcatttctttgtcatataagagtggccaacaatctttctttctttcatcttatttatttatttttgtatgaagggtatgagcatttatattttattcatcctttgaactcaaaattaagcacacaacaaccgtcaacacagattgaggaaaccagctattggccaatttgaatttgtggaaaaataatttaaaaattacacaatatataagaaaattataagaatttattttttatatggtataaatatataatactatagagttattttttttttttttttttacatatgtatgaaattttttattttatatttttgtaaaaaaagatagaaatcccatatttgtaaaacaatataataagttttgttggaaaagtcactagtgccgaaaaagttattttcattggaaaagtcgctgaaaaagtcaccgtcgcttaaaaaatcaccgaaaaagtcattggaaaaaccaccagaagtagatgtttcaaatataaataaaaatagtttcagttctttaacataatgaataaaaactgttcattatgcagatttttgatgagtaaaagtaataagcctttacgtaataaatatttcacagaaataataaatgtatatataacaccagatgttttaacgtggttttccagttaaatttgcatactctacgagtctatcttatttatgatatttttgaatataggatacaatgatagataatatatcttttcctctctaaaattcttcgtccctttttctgtagaatttgcccctatttataggaatataggttgatagttatttacatggatcgatttaaaatataaccgtgtaaagaccgcttagtttaatttggaattatcaaataattaaggcttaattatgaaattagatttctaattatgatttacaaatttatatggagatttatttgaattcagggcgcattatttatgccatatatgaaatttcacgtttttcatgttttgcatgttttgtgcccggtaacattagaacgcggcgtttggccaatagaattacattttagtatttttgtagtagtggggcaacttagctagacattggaaatgttgggaattattcgaagtattaggtttgaccaaaatacccttagagggcaaagatgtttttggctaatgcaacgggcaatttggcctttttccatgagttgtctttttgtcctttagtgatatctagcagatgtaattagatgatgcatttggaggactttaatagataaacaaaggttttattttatttattctaagttagaaattatccaaaactctctcccatcaagctctctcttcctctcgtctctttggataaccagcagccattcatggattttggcagctcaatccaagatttttagcaaggccttgtaggttttagtccaaggtaaattccctagctcttcctttatggtttcttaggttataagttgagattttattagttgattttgggattagggtgctttgatattttatggtgtttgattttgtattctgaagttaaattgaagttgtttaagttgatttgagttgggtttgtggctggttgtgaggtttgttcaaggttgagcttaagaggtcaaactttgttctcacgtggtgaattttgttacatagattattggctagttttattgcttgatttatacttattgtggcggttgtctagggtttctggccgtggtggtggacaccactcggccagacactattcggcctgagtatatcaaggtggttcgggaatttctagat

SEQ ID NO: 302470 - DNA, 2345 bp, Cannabis indica
aaaaaaaaaaaattgaaaattctctttctcactctctcctcttgctcaatatcattcacataaccactattgtagatgaattctgcagtgaaaaaaatgtaagcataatggtgattacttcgagactactactactattattattattaaataataaatgagatatatatccacacatcgctaattaagtactactatatatcatatatggctgattataagaactcatcaactaatttttaaaaagtaaaagttaaactcaaaactcaaaagtgagataaagatgaagataagcaaattcaaacaagagagtgatttcacagtgagagagagaaaaattgttttgtattgctttcaagataagtgattacaatattgacttttcaacctttctcacatctcaaatgaagtatttataagctctaatggcctaagaaacatcattggtcccaaagaacatggtgacatccatgatttgcgaatcgcaagttgcaagaggtggtcttacatcttgtacctttatttggtattaggtggtcccgacttgcaagagtggtagctgttgtgtacccttagtcggattgtcaaaccttgcaggtgcgatgcctccacaactcgtatctctttacttttagagcttacaaaagatgtgattttacacattttagcatgcacaccttgtccttgtagtcgtactcctattatcttcatttcccatacctagaaaaatttcattaaatatagtcatgttgttgtggaagttgcatgtggagcgacatctattaaaagggcatgtcgagtgagtgagagagacatgcatgtcgagcatgcaaatggtgtatgccgagtgacttggcaatgtgcatgttgagtagcatgcacaaggtgcatgctgagtgacttttgtatatttcttgttgagtgactttttgtatgttgcttgccgagtgagttgtggacgactgcatgccgagtgacttgagcatgtgcatgttgagtgagcttttgagaagtgcatgtcgagtgacttaagtatgtgtgtaacaccttactaatttaagcgtgttattgtgatttcttaatattatgcattgcttttctaataaaagagcttgtggaaaaatatgaataattaattttttttaattaaactttaacttgaatataaaaattaaaatgccctaacccttaaagacaccacatttgtgcgtttaaaaactagtttataataataaactaaaaatttagataaaatatgatttaataaaattttactaactaatctaaattataaaatcatggcataacccctgttttacaattggggatcccctatttgaaatattacaagacatgccattataatattatcataaaaatacatttaaaagttcagaatatttgaaatataattcttaacaacttagcaccacttgtcgtatatgttgatatgtacatttgctggagaaaattcctgactcatggttgtccaaacgtctctacctattacctgcaccacatagcgcccatgactaacaaagactcagcaagaaaagtagtaacaaaaatcatataattcaccacacaatattagcaagtaaactcacatcgtcagaatcaaataatcgtacattattcacatatttaaatttaaatcattacatatattcaaaaataataaatatcaatgtaaagagatataattaccatcctaacaataataattatagtcattactttataaagtaattattttcaccacttatcgagcaaagtaacctcaatacctcacctaacatactaatgcacttgctgttatttagtaaaattaccctgatattcagaactgataatccaatgttttatttaggattataactaaacaataatattctaatagtcatataacatatcaagtcatatttatcattttataaaataactatcattattgttgcctaataacctaataatacaacttcagtgtcctcacttagcacccatatatcacattatctaataaggcatgtcaataccctaacctgacacccatatatgacattatctaatcagacaagttgatgccctaacctggcatccatatatctctgtcattgtctaatcaaacaatcgacaagtaaaaaaacctaacaacgattcctgtttttagtcatgactttcgatgcctaacccttcggtatccaaatattgttacctaataagacaatccttttatcattgtctaattagacaatctttacatcattgtctaataagataatcttttttttattattgtctaataagacaatattttttacattacataatagtaatcaccgtat

SEQ ID NO: 302471 - DNA, 1773 bp, Cannabis indica
catgtcaaaagacaagactaaattcatatttttagtatttattggggtttagtaatagcttgaagttgatctaattacagacttatatgctgaaccatagtgtaaaggaaaaataagaaattcttgatttatgacataaatatcattgggagctctcatttcttttattacttccaataatattaagactcaaattttgtgaatttactgtcgatgtgaaaccttatagtatagtgtaagttgcttctttttctttttattatttttgtttctatttcacatatatgatgttaaatgttagttgtttctattttgaggataaataatttttattttttgacattaaattgtttctattttcaatgtgagttgtttccactttttattatatttgtttccatttcaaatatatgaagttaaatgctattttttttttatttcataaactatagtttctatttcgatgttaaatgaatttcttttttcgagattgaaattgtttacattttttaatgtgagttgtttctattttttatgataattgtttctattttacacacatatatatgagattaaatgttaatcgattctatttcaagtttaatttgttttcatttttaatgttagtcgtttctatttttgaggttaaaaggtagttgtttctatttcacatttagagattacattgtttcaattttgttgtttccatttctcaatatgagttgtttccattttttatgatatttgtttttatttaacacataaggttaagtgttacttattttcatttcgaggttaaattgtttctattttttaggttaaattgtttctatttttcaaggttaaattagttccaatttgttgtttctatttttcaatgtgcgttgtttcaattttttgaggttaaatgctagttgtttctatttcacaaactacagttttaatttttcgagtttaaattgtttctattttgttgttttcattttcaatgtgagttttttttttttttttcctattttttattgatatttgtttccttttcactaagtgctacttgtttctatttccagattaaattatttctatttttaatgtgagttgtatctatttttgatgatatttattttcatttcatatatataatggtaaatgatagttgttatcatttcacaaactataatttctatttcgagtctaactatgatcttttggaaactgcctcattattgatatttcaacacacactaatgtattggctgccagttgcttttcacattggggaatgcttattgaaaccattcactttaggatttaaaagactgatatatatgttggggagggatgttttggacctatatataaggtatttagtttcggtaatcaattgtttccattttcaatatgacttgtttccgttttcagtgtgagttgttcctaattttttatgttaaactttatttgttactattttttatgacatttctttctattgtggttaaatactactaatttctattttttataatatttattttcatttcacatatatgtatatatattaggttaaattctagttgttttcattttaaggtcatgttgtttctatcttttgaggttaaattcacgtatatgtatatatatgatgttaaataatagttgtttctacttcaagataatgttgtttctattttttgatgttaaattatttctattttcaatttaagttgttttcgttttcacgtgtgtgtgtgtgtgtgcgtgcgtgcgtgcgtg

SEQ ID NO: 302472 - DNA, 1626 bp, Cannabis indica
actttacaatatcaaaattattactaatgccaaaaaattagtagaatagttactaaaaatttaaaaattaaaaataagcaaaaaaatatgaatttgcagcccacgtaatctttctagggtttcatatataacaccgagactagcgacttatcaatattgtactggagagttatatatctcacttttcaatctctccggccgactctctcaaatatttctcagccagacagtgcaccattccgtcgaaactcttccacattaatcttattattaattgtatgcaattaatcaatttcttatatgccttatatattatgatttcagattgtatatcttacactcttataattgttggttgtatattgtactaaattaatatttacatttaatcggtattcccaatatgttttgtggtatatattgtttgttttagtcactaatgtaatttgttatttcataacatgtatgtaacttctagtttctctcaaattattatttatttgatcaaaaatatactctaatttctatcatcatcatgtttggcataaaatttttcacggttacatgctatgctacagtagtttttgttttttcttttatgcttcctttttggtagtacctaaggtctatttatttatttgattgttgtatgattgtgtaggtttaaaatgaattctaacatagtaccaccaaaacccaagtttagagcattgaaggctcaagaaatgtcgaatggaaaagttgaatttcggatgatttacgttcctcgccatagatatgcgcctcttaaaaaaatcatggatggacatctacgcaccaatctatgaagagatgaagatcgacatacgcatgaatttgagggctcaaaaggtggaattgaagacaagaaaagacacacccgacattacaaatcttcaaaaatgtgcagatttcgttcaagctttcatgctaggtttcgaggtgattgacgccattgctctattgcgtttggatgaactgtatgttgagtcttttgagataaaagatgtaaggagactaagtggaaaggcgcagttgtccgtacaattggtagagttgctggtaaaggaggtaagaacaagtttgagattgagaatggtagcaccacaaggattgtggttgcggatcataagattcacattctgggttcgtttgctaatatcaagattgctaggtctgcaatttgtctctctattttgggttctccccaacccaagataagggctaagttaagagctcttactgctagacgtactggctgagagataatgctccacgctagggttttcagagctatcttttcttgccttcgattttttatttttctgtatgtaatctttctcaagttattatctctggaattatatggaataggatgcatctgtatatgtatgttctttcagcatattaacttaattaagttttaaattattgagatttatggggatgttaaattgattaaacttcatggtgagggtgatggtacattgggttggcctatataaccttgtttatatagtcatcagggctcgttgggaacgccttgtattgtattatattgaattgcattttatgcaatatttttatgtaaaactatatgtggtatta

SEQ ID NO: 302473 - DNA, 3942 bp, Cannabis indica
cgtaattattcaaattttttttaaatttacaaaaataatattataagtataatgaacacgtatagaaattaactaaaaaattgtaatgaaaaactttacatcatgattaaattttcgagccacgtggcactatattacttatattactggttagaaagtactcattaaaaatatcaaactaattattatttagtatttaatttattatgtcaattttcatatataattaagaaaaaatactataaagacaataagagaaatattattgcttacccaaagaacagcaatcatgtcagagtctgacaatttatcttgaccattaagagagagaagaacatcaacaaagtcacaagtacttctattagatttattattggctctatgctcatcaataattcgggtcacaaaccggttcactttcggaaccaattcaaaacacctgacccgaattctctgaaagtcaaacgaactaacccaagaaagatggtcagaccaattaagcttacccaaaagctcatagccttcatccacaagcccaccaagctcctcactctcctcattctgggccgagcccaaatcatattcgcgcccaaaaaccgagcccatcatgttatgaagcgaggcccgtttaaatatatcacgaacgacacaaactccctcgtcgtttcttaaactcttattataaatggcatcaaccatttgagaagcgattccgtacctctgtttctcagcggccgagatttgtttcgggctgaacagatgtacggccgagattcgtcgcagtgtcctccaataaactccatacggggcaaacccgatagcccgattaaacattaaaccgtaagccgattccttaacgggtcggtcggcgaaaaccgagctgtttaaaatctctttagccacgtcaggattgcaagtaacgatgacacgtgtctcacccatactgtaagccatgagtcgtttcgcaccgagccgttcagccacggcggctaggttgcgatgagctaagttagccatgagattgagacttcctattactgggaaccctcgtggaccagggatagtagtagtaattttcttaatgggcttttgggctttgtaattataacggtatttaccccaagctgggccgccgggatgggcccagtagaaaacggcgattgatatccaaataatgaaagtgaagaagaagatgaggagggtattttgggaagagaaatttgagcattttgaagctagagctaaaaaccagaagctttcgaattttgtttccatggtggaaaaaggaactgactcacttgagtgagctcgttttagagagatagaagaagaaagatttttttttttggtagtaagtaaagaagtgaaggttagttggtttatatagagagagaaaagtaccgttaaaaacacgtttgctgacgttataacggtaacgtcagtatttaagagttaaaaagtagagccgccatcgttaattgacggcggggttataatatgggttctatttctaatcatgtatataattacaatgaaaggtccaaataaattacatcatctcgttaataacaaagtttgattgtttaatttttctattaattaattatgtaattttattaataataatatgttaaaatagtttacataatttaattgagatatttctattttattgagtcaaataatttattggttaattcacatagataaaattaaaatactcaaaattatgttatataaatacgattaaaacattcaaaaattatgttacagaaattaaatggtaataacaaaacacaacctgaactaaattgcattcatacctaaggaaaattagcaggtttgattggagaaaaaagacaacctccaattaaaaattttgaaacaagaaattcaatttttttttttttaatttagtaatgttttaattgtttaattttattttggttttcatgtgtgatggtgatgtggaagattgggtattgagaatatgtggccaagaccatataaaactttgagggctatgcttaacaacttaattaattttactacacttaaatttaaatgaaaattttgcaataggcacagtttattattatgtttaacaactaatttttttttattattttagtatgcttttgatagatttaaatggtattaatccaattctcaaaattttatcattttagtatatttatttgtaaaaaagttttatttgcatcaaaaaaggcacttcattctaatattttttaaattttattccttctcatattttttaaaaaatacttatataattaaaataaaattaaaatagaaaatatatgaaatcttattaaatttaaaattcaaaattatttaaaaatatatgaaaattaaaaattataatatatacaaaataatatgtaaaacaaaatttgaaaaagaaatattaaaagttattttttaaaaaaattgttttaaatttatttattttttaatattaaagtgtatttataattttgtaagttacaaataaaattgacaaatgcatactattgaaaagtatttatatatgtagtgacaagtaaagtaaatgatttgtttagttataatttgtaacagtttgtagttccgtaatttgtaatgaaaaatactcggtaagctatgtaatttcatatcatatggaaaagattaagtgtggcgattgtgagactctgtaggtacgagactacacaattgaagatgacttgtacattttgttttcggtgcccatcacttgagaacttcaaattaataatgtttgacttggagtaatcttagaatgagtgacctcctgagaagtttttttatgaaatgtgcgagtgagatcaaagcttgcaggattagtcgtcatttcaaaatgtaaaccagagagacatacttgtatacaagagtcatgagcaacgtaaaaaaatacgaccaatgaaatcttgaagcgaaagcattacatatataactcgctgtcaatacaaatctgagtctccctaaatgatgtggaccaataataatagagataactaaaaatcttattagctttcttaataatctaacattagtattacttttatgaataaaaattcatctaacattatttaattacaccttattatagaacaaaatggtggttagaagattgatcgtgatatgttgaccaatcaattaaatgtgactataattgcctatacattacccactatttaatttgtgggactattcacatttattaaattcatccctcaaattttgagagggaaattaataaatttaattcaattgttttaatatactttaaattataatacatgcatgatttacctaaaaaaaaaacagaaaaaaaaattacactttaaaatgtatattttttttatatatttttatagatttctacacagaaattcttatagcaattaacagagtaacctaaatcgcaattaaaatttatatatcaatctacataaaaattaccggaacaatccaaattataaatttaaaaaaaaaataaaaaatatatatattataatgcatgatacttaataataatattatatatgtggaatgctctcattgaccatatactttctttattattgttactttaatttattctcaaatgaattttccatgaaattgatagagttgacaaaaaaatgtccatatacaaatatatatatacatatttcaagatcatatcatataaacttttaataggtacaaatttattcatttataattttgttactttgtatttacatttcaataatttgcggcataaataattaagtcgaattttcagttgtaaataaatatataagtttaattttttattgtaataatatctaagttataattttgtaatttctgtaggtatctaattaagtaaattaccatgtggtaattcctgattggtcaaagtcattaattttt

SEQ ID NO: 302474 - DNA, 1022 bp, Cannabis indica
tttttattttttgtgtcaatatactcttaaattttatgtttgtttataaatttaaaattctaattaaattttatcattaaatactatatacttgtgtatacgttgcatatttttattttatctaaagttatttaccgtagtacctaattactatttaatcataaaatttaattgagatatcaaatttgtaaacaaaaataaacttattaccactaaatataaaaattatagagttgtatataaaaattaaaatattaaagagtttcgccagtaattaccttttttttttaagctgtttaaactaagatcaataatttaaaaaaaaatagaaataaaataaaagatggagggatcacaatgaaataaattatctaatttaattcaatgtaacatttatcaactgattattttcttttcttatgttaggttataggttgttaataaagaccaattcattattatatgatctaacaagcctattgacattgaatgactacttcctctaaggacattttcatttatgaattgagaacttgagatatgataatcataattgtgtacaacaatttgaaattgaagacatgcactctccatcctactcatccaatttacttatttatttagtggaataaaaacaagtttcctcattttttttattttcttaattactcgtgaaatatatatagggtaaatagtagtataagtacccaaagtcttatgtttgtaagtggcataaaactaatgtttatttttagcggcataagtacccaatgtttgcaaaactgtaatttttctctaattttgtcagtacaaactctaatattgtcttaaacagaacacatataaggcctaaatttttgatcatcgggcttagataaaaatatatagtattaattacttctaaatgttcttttaataaattcaaaacagagtttgtacagacaaaactggaagaaaattacagttttacaaatattaagtatttatgccactaaaaataaacattgaatttatgccactta

SEQ ID NO: 302475 - DNA, 3750 bp, Cannabis indica
ggtaaaatatttccaacaagtataaatatcaataaccataattatcatttcacatattgtctatttgacattagacctgggtgttacactcacacgcctatttacgtctatgtggcatagacccacgtattacgctcacacgtctatttacaataaggccctagaacagttcatctcggttctaattaccaagtccaaccaaattatgccttgaatgcataattctttaaataaatatattaagcgtggcataatatttaaaaaccaataatcactagggtaataactctagaccatataaccgctcactttagggtaataactctaatcccggttctcaaataatcacaaccataatataagacatgagtgccaccgcgcttaactctacgtgctaactactatcttaccagatgtctcgtatatgtggagattccaaatccccagggtactcctgaccaagtgccggtaatcctagtcacaatttccaggattcacaaatagggtaacccctgaatctatttccacataattacaaatttggcattcaaattcagataaacatatagagctcgaaacgagctttccaacgatactcgaaacacccaaattggagtccgaatcacaaagttatgatcattcgaataacgcgttcaaaactgcccagaaccacaaggcgggccgcgccactcccccaagcaggccgcggaacctgggttgaaaacccatgatttcacaggggcggaccacggtgcctgggttccaaacccgaaaatcccgtttttgcaacacgaaaccaagctcaaacatacaccaaaacttgcccaaaaacaagcacaaacacaagtttatttcccacaagattctagttatcactaatagagaattataaacacaaatatcaagctccttcaacacatatatatgcattaaaaatcataacatcatcaatcacaaataagctccaacttgagataaacataacgtaatttctcataccaaaagcttgatcatctaagccaaaatcttaagcttgaaaacaaccataaattcagcatgaactctaaagaacccaaacccaattacagaagttaaaacccccaattaatcaacctaataaatatacaagataaacaagatataaattgcaattaaggttgagctttgaggaagttgagctgaaaaactagttaaaagattacaattaagattttagagaaaaagcaatgtattatagatagtaatggtggcttactttgtgtgttctttgtttttttttttcattagtttaattcggtctttactcaagggcgagtaaaagttatgttttggaaaatttgttaggtttatttttatgcatttttagagttcattttaatgtgttttagtattttttttactttattgttcggatttatggttggttttttttttttatttgttttggaggataaatttttggatatctctatttttagtaattttagtgttcttcaagcctttttgagacaaaaatagaaaattataagggattaaggaaactccaataatgcttagttggatttcttgttatctcaattcggtcatattttgcattttatctctaaaattcgtggtctggagtcaaaagtgattactttccaatacattgaaaacttgtaagttttggatgttcaacacgctccgtttgtgattgaaaataaagtctgaatcttgaagctaattttttacacgatccattcatttatagggaaaaaaaagaatgaaagttctagatatatctttcaacttttcaaaacatcttgaatcgttcaactccgagttatatcgagagagttatggccaaatactatcggtcgtcacaaaagaaaataaaaaaaaacaagagagtcaggactcttgcaaaaaaaaaaatgggaaacttcccaaattttgtctataaaacgagttggagctaggtttcctttatcattcaaacttggagaccaattttaggctttggaggattttgggaaaccttcttaattgtgtatttaaaggggctaagagcttagatctaatactattcaaaatttagaaaaattctgagcatagaaggaaggctaggagcaaaaggcaccattggatgactccaaaaagtgttctatctcctctatctttatcttttatatttttgattgaatttgtattttcttatataatagctaattttctttaaggattattatgtgaaccacttgaatttattttatggattaatgagattgttcaatttcttcttcttcttttaatataattccatataatctattttaattttgtaattatttattggccatctataatggttatttatgaattcgaattaaaattctagaaggtgagatttgaatatgctttgattgttatagatgcaaattgatttaggatgaaagtacctaggttgtttgtattagttgatttgcttaatgctatctttgtgatcaaactttaccataggaatatagagagttttcacctagattgagtttataagtcttaacaagatactaaactatttaactaaactttcaattgaattggaagaagagaaatttaggttattgcattaggaagtaaaataaaggatagctggggatcataataatctttatctttatcattgttatttttttaaattttaattattgccttaatttatttaattttttctccaataatttttattcatcaaatagaactaaagaattaattgattcgtaattgataatcaatcctcgtgggaacgatactctatttatcattatattacgtgattcgattatgtatacttgtgtactgaatttaccaaacactgactgacagaaggacaacaggacggagtgaggtcacttcctgagccagaatatttggagggactccgagatctgacatcttcttttcaaaatgtagttccaaaatttctcggtcaaacacgtagaattcgtgcgcgtgtacatctcttaaaaaaattttcatatgaaaaataagaatatactcagcaattagcccccacgtcaaaccttagatcaaaagggaatgggggtcccctaactgctgagaagaggccccctccagattctgacatgtctagaaatcaaaaaaattcctatgccaagcatcgggtgctaattgcaccatacacaaaaggaaatggtacaagaggcaaagagaagagggaaaattgcatgatttataacccttagacagggtagccacattcaaggaagagataaacggagggtggtcgaaaaaaaccctcaaatgacgatcatgcgacatgaatatcacatttatacaaaaaatatcagcagagaaaataaaatgaaaaaatatctatggtaaacaacttacaaatgggagaagtctaagtagttggaggtactagtatgtggtgacggtaaagctatgcttgacaccatcggagacaaagctggataaaatctggtgtgcctgaaatctttgctggttaagaattctaagggaatgcgtgaaagtgaaagttcgaaaaagagggatatgaaagacacttatagacccatgaagcgatttggatcgtcccccatcctacggtcttaatttaattcacacaaaccccataatttgatagctagggaaaggtttcggaagcgtgagtatgaacaaacgattacgttgcttgagcctcagtctgacaccctgcaattaatggggtatttgttgggttttgtg

SEQ ID NO: 302476 - DNA, 2213 bp, Cannabis indica
cgttttagaaagttcatattcatggtgttaataaacatacttgtgagtagatctaagatcctggtaaaataatttcccacacattgtacgtagtggacacgtgtcgtccaaaggtttcaccttaaaaagtagagatctagaataatcttctgaaaaaaaaaaggtgtatgaggtatgcgcactacgatgtttagacacaggggacaagatttgattctatgttagaaaaaacataactatcgctgggagctgcgggtttgtatcgaaagcagatgtttgcaatccttttgggaatcaacgtccgtgataagacttccgagtacccatttgggtatcgtgtgggcagcctttgagctggggccactctgtgtctctgagtggtagtatgtcttccgtgtccatgaagctaaagtaaggcaaggtggatctccgcattccgcttggggttaatatgtcctggatcagtgaagcttctccatgccttgctttagttgtggggttttaattagggagatcacaagataatctctttcttttgtgccacatgtcatttgctcagaaacacagataatatttacccgcaagcttctgagacactttgagttgcgggagcttcctatattcttttggatcttggagatgagttttcgacacgtggtgattacttggaatgtggatgtgtccttttaatgagagcagttaccaactgagggttcaggtaccaatggtgttgttgacgtggcacacatgcggtatctttattgcatctgtttactaatatgcacgtgcagggggaacatttgctaaagaaaattgcagtgatggcaagtcgattgagatgacccttttttaatgcacgttggactcgaggcatgcaatgatgaaaaatgaatgctttgagtaggtttttaaatgccatcttttcaacttcccatctatcggatcaaatcatgctttttgagattcaggatatgggccattcatttcaaattgtatggatctggccgaagtataaatagatttcttaggcccacttttccttttttcattactttagaccttcaaaacctccatttttgaattccaagatgccttcgactctttacttcaatactttctaaacctttttttaggccgctttccaaatccagagctgttaaacctcgacctaattcaaccctagcccggtgaggattttgacatgcaagccggctacgatcgcgtgatcgacaaggtttaacactcttgggtagattcccacaaaaatctttcattccccactcatataccaagtaagtatcctgatgctttattgaatattttctatttcgtatctaggatagaaatgctttgtttaagctaggtctaggatatttggtatgtgtaaatggtggattgatgctcttagaattacattttctaagacagagttatggtgaaatctttgcgccatgggagtgttgatactgtttaaataattaggttatggcaatttatgcttcgtatacatttggatgttcttaggatttttggattagggtttgaaccatgcatgatgaaccttcgagtgagtactagatctatttattcgtctatttagagttgttaggtgtctgaaagggcttaacttttgaaatttttgcatgaaacttgctctggttttctttctggtattccgatctgtcactttgtgtcgcctggcaagaacaatcttctaggagtgataggtctagttgggacctttccaagcaattttaggggaggcctttcccgatgcccatactgtcatttggataatgggtgtctaatttcttggtttctctttcatttttccaatgatggatttgaaccaagatttccatcttaaggcagtggaaattgaggaaaatccagctggtgcttctatggaggaggtggcactgggggagttctagtggaggcccctgtctaggaactttaacaaaatagtgctatggagactactccggaggctggtggatacagggtaacccaaaaatccaaaggaaaagggaaggttaagacacagcctcctgcccctgtgtttgatgcctccatctaggagatggactagaaaatcaatagcttctgttcatactttatgtttaaatagaccatacaaagtctcttaattaataaattgaccccaaaacctcttttcttcacaattaaacccttgctaagtgaaaattcat

SEQ ID NO: 302477 - DNA, 1196 bp, Cannabis indica
tgtaaatttccctttagtttttaattacttatgtataaagaggatgtatgtatctttattatcactaataaaacgtactactaattactcatattgtcgtacagtttttgaattttttgttatcattttcgtagttatttactttgtttaaattatgaacactgagatgttcataaatcgcatgaacaaaaaatcgtaccaatctacaataacaattcgcatgaataaagattgcaccaagctacaactatgatcatataaaatgctaaataataaatgcactaagttgcatttgtaatcgcatcaaaagtataaaccgcacattaaaatatctagaaaatattttaataaatatttcgaaggatatattgttcaaaaattgcgaaatcataaaaattgtgaattccaaattttcttaaaagtaagtgcaaagtgcaagtacccttgtaccgtttttaaaaaaggaataaacaaaaaagaatgagatttttctaaggagcaaggtattgagattctctgcaactttctcagtgcatctgctactttagctacatgagcaatgtctttagaaaaaaagagtattggtcaggccttggatttcagttggagacattgtacgaaatgtgttagccatctcgactacctttgtaccaaagatagcgaagtcaaaatcaggtaacttggtcagagtaatgtaaatataattgttgacagtctggtcgtaagctttcttcttttcttccttcttgtgattcaagtcgcgggtaagattaatgatttgctcctgcaattttttaatcttctcccctgctttatctttggctagaagattattagtcttttattttttaatgcaaagattttattaaatttatttaggaaatttattctacaattaagtatttgactagaagtgacttggcagagactacatgctcaaaagttagtaatgtgatatatgttagatttaattataggctaattaggattttcgccccctgaactttaacatgtaccaaattatgcctcctgaactttgaaggtcgttaaaaatgcttcctgaactattgagattgtaggatttaaggacttttgtctaatttcattcaattttactatttcagtgattatttatgtactaaaccatactccccaaattttaatatctatcaaatcatgcccctcgaattttgaca

SEQ ID NO: 302478 - DNA, 2052 bp, Cannabis indica
catcagtaccgtccattcttgatcccatttgatggccaagattaagataattcattctcgaacccatttgattagtagtattgttactactactactatgatcatcactcaacggcggaaaaaccgccgttgaaggcggatcattgttgttgttgttattgttattattatcgttgccctcttctcgtgagagaactagggcagcagactgaacaagttcgagacagagtctcagtttgttcggttcaatatgagttaaccctggaaccgcgcctttaaatagaaaatcggaagttagggttcggagaacatcgacaggagtgataccgtcaaccgtacgaacattgggatcggcgtggtggtctagtaataccgctaccatgtcgggtgaaaccatctcggccgcaatgtgtagcggggttttgccagctggacccgccgggtaattaacatctgcagctcctaactcaagtaaagctttaaccacctcgcggctacaactttcgaccgcgtaatgcaatgccaatgcttcatctaggtttagcccttctcccattaccataagcttgactaattcgacgtcggacgagtcaagagcccgtctcattcgacggattttttgatcttctagatcggctgctgccccgagatcgtggtggtggtggccgtgatggtgaccgtgaccgtggctcccggtcgagatcaaagagcggcgcgccaaggatgattttaagcgaagctcttcgattttcgcgacgatatcgatgggcaaatgtttagctagaatttcagaaggaagacctgattttgcaactagatgtgaacaagttgtccatagttgatgcatgtcttgctttcttgaagctaatagaactttcattacatcatcaattgaagcattttcaaccataattgccaattgtttctgttaaaagaaaaaaaaaacaattttatcaaataagacaaatatataaatataattgaattgcattatttagttatgggatgtgatatataagatgggatgtttattaacattagagtagtagaaacaagaagtgagtttggtattttagttagtcttttttgaccccaaatgaggaaagttaatttcacagttcaaaaaatcaaaaataataattaaaaaaaaatagaaaaaaaaagaaagagggagagagagagaacctgagtgagtaatgcaagctgttcaacgccgaaagatctagcggcggagagggtttcaagagcaagatcaacggctgaggtacaatgcgtgtgccaacaacctctatcaccgcaattgggcctgggctcatgtttttgagggactatagagacttgtccactatacaaaaactgaagcaataacaaaaacacttcgtaaccaactgagttcacaggtatcacagccccgttactattactattcccacccacaaccctatgatggtggttgtggtggtggtggtggtgcccgtgacccgatccaccaccagaagatctagacccggatgagattattgggtcaaggcccaccgcggaaggaggagggtccggcccacaaaagaatttccggaagaaaagactccgtgcggccagaatacacctgtgtgcgtggactaatcgaccctcaacgctgaaggtgacgtcactgaaagcctgaccgttgattaatagattcaggtaatctaacgatagagatcttagcgagtcttctaagctgttcatgatctcttgatcaataatatatatatagataaggttttataacagaaaaaaaaaaaataaaaataaaaggggttttgatgaggatcaggtgatgatgaatatgatcaagattaatgggttcatatttttttgggggacttttttttggtttgaaaaatttgtgtgagatgaggaagaagaagatgaagaagaaagtgagtagtggtgtagtttttatgacattctttgtctcaatggagtaatgttgttggtgtagatagatattttgatgagagagagagagagagaaagaaatgtagagagagagttagagagagagagaga

SEQ ID NO: 302479 - DNA, 1990 bp, Cannabis indica
aaaattaattaaattaaatatttccaactacaataattaattaaaaccatgaaaataattaattaaattaattttatggacgcaattaaacctttaaaatgtacaaatttgagccttaatcagcactacatctagtttgtaccgccccatagctagaaaaattagtctacgtaggtgcataccctagggcaacaggtccgaagactgtaggagttgtgtactggctaccggccattgtgctgccgaagcttagaattatggggcaaaggctgtgctactcggtggagttagtgttggagcaactcaaaaagcttgaatataagtcttttaaattaataattccttgggctctgtacatgaatttagatggaatttcagccatttttctttgcaatttgctccagagaaaggagccaactatcaatttggactgaagggtcacaaacttcatgtcgttactgacattggtcttggccactgcttccatcattctttggatgaaggtcgtaagactctcccttttctattgtttgatattggctaaggatctaaactccatatcaacgtccttggtggtaatgaaatgtttcctgaacgtggattgcaggtccttccaaccgtgaactgatcccagaggaagcctcttccacctgccttcaatggacatggttaatgtcaacgaaaaacaaaggcacttgcataattgctggctttttctacttgcattagtcggttatattttaacagatgggcacgtgggtccgtcctgccttcgtataactctatttgtggcattttgaaattttctgctagtgccgcctctatgattcgtctaatatagggttttgcatattcctcctttgaatcggagacggcccccctttgtttccttactatcttggtcagggcgaccatctactcttccaagcacttggatccttctgttaatatggttgtggagatcatttccatgaggcatcgccctttcacctcttggctctttcccattttgtatttaggcggttacggagatctatagtggaccaaatatctttaggagaaattacctttattcccttgtcttggcttacaaaattgctagggcggtctttccatccctaaaacaacaggccttggtactagagcatcaaacatgtcgttccaatcaaccttggctcgcggatcagaagggcatcctagccctggggtaggggtggccttctttttttgcagggactagttgactagattctagttagtcttaagtacagtgggagtagtctttttctgcggttcacacgtaacacctttcccttgtcctttgcaggagtagaaggtctaacatcaactgggtccgccttttttgtggggttatttccttaggggcaggctcttctggagtgttctcctctgaaatttcctcgtgggcctcgaatctagcctatagttgtgctagtgttttctccatctggctggagatatcctcttgtgctactaatttttgttgagttattgtaagttctccagccatttgataaacctcaggatcttgttcataataatatctatctttgtaatacccatctttaatctcgttgttgtctctgccatcatcctcatcattatttttgccctcaaggtcttcttcttggtcatctatcttctcttcatcgatggggttctcaccgacaaatttctcctgatgttgggctttcttggctggacaaccaccatctttgggtttctctgatggtttctatgtgagttgctatgtgaattgtagttgcaattcaggttgctctgttggttgttatgtagattttcataaaaatgcaaaaaaaaaaaaatattgaaatgtaaaaaagaagaatcccatttttgttttcttttaaaatattaaaaaaagagttggtcaagtcaactcgctaactgccaacccgcgacacgtaaacaaataggttcagattcatttttttctacccgaaacccg

SEQ ID NO: 302480 - DNA, 5393 bp, Cannabis indica
cgataactcatcaaaaattattactacctgcgatgttaatatgattcacgactatgaatttgatgtcggtaaagagaaaactgaatgttttgaagaacttgctgaagagaacgttacagagcaagatatggaaattcaagaatttgggtgtgaagattcagaccaactttcttacactgacgaagtgtataaagatttatacgaaaaagaagaaacttttggagaaggtggcgacccagattctatgcacaacaacattttcatggctgcaacatcaacaatgagactcaaagcagatgaagcagaaaatatgatcaaacttaatgagctgacagataaagattcttgtgacaatcctaaagatgaatcaaaggaggaggatcaaacaaaggaagggaaaaatggaattcataagacagagaaagagagtgatatacttgaagaacaacaagtgtttgacgaaatctcaacactagattcacctcctgaacacattgaagaaaggatcaagtcaggtaagttggagcaagatattgatgaaaaccagaacacccaattgaagagcttcaatgaatatgaagatcaacggcagaaaaattcaccagagagggaggaaggtgacaaaaacgagaatgcaaccatggaaatggaaaacaaaacagagcagcaaaagaagaaatcatcaacaacattctcacgtctaggccaattgaaagacgaacaagaagaactccgcaacttgtgtaccaggtccagaagaggagtcaaagatttggaggtagaaacgacaagagaattcaacccaaaagaaccaaattatctaccggttgtggcagacccggaaagagagaaagttcatttgaagcaccagatgatggacgagagcaaaaactcagagcaatggatgatcgactatgcactccaacaagctgtgaccaagctcgccccagcaaggaagaggaaggttgctttgcttgtcgaagctttcgaagctgtcactccagaacggcgccaccaccaccaccaccgtcaccctacttcgcctgtgtttcaccataacgccttaagattaagacccctccaagcttgcagctgatcatggtaactataatgataattaatgctatttttctaatggattgaaatagtttggatcgagttcataaaagtttaagtagttttattaatctttgcagatgattgaggtgaaaaagtgagaacctcatgggtgaaaacattgattgttttcaaacagtgaagagggtggaaatgagattccaactttagaagatatggtttgttttaaaagttaagggtaatttcttttatataatatttatatgtaatgacattatgatatatgatatggttacaacttatatgatatgtaatgggcaaattcttagacctttaaaacaatttattttattttgtgatggtgtcgtgatttgtaacatcagcatcgcacaggtgactgtattgtatatatacatatcggctcatatatataatgtgagaatcgtactttctggtttgttacttttaatttgttttcaattttgaagtgagcatttgaagtcacaaatacttaaatcataagcaatagaaccatgtagacgtagcaaggattacttctctattgaaacaagtaaaatgagagagcggatccatgagaaaaatttagagcatttttggtattgttttatattttttgtttttaaaaaattgtttttaggattgagaagaaaaaataatttttgaagtttttaaaacacaagttggttagtgttttttaaaaacaatattgatcaaaagtaaattagtttttaaattttgttgtttttcaaaattcttattttttgtaactttggtttctgaaaactgttttaaaaacaaggcaaactttgtttttaaaaacaaatgcacttatctttctagctaagttgggtaacagtttttgcctgttaacataacatatggtacttttctagtactacctaactaactgtatattgattgcaggagattccaaaacaagagattgaacctctttatagtatctttctagctaattttggtatgaacatgctctgagagatcgagatcatttagctcttttagcatcaaaatagatttttatgttacttttacaatgttccagcaaaataacccaaaatatttataggtataggttactacgtttgtctatatatattactagttgtggtcatgtgtctattagcacatccctctctcacttattattattattattattattattattattattattattattgataagaatgaggtgactatgcacccaacttcattgaacagaagaaacgagagctacaaactaactaaagatcagtacaagtaaagataagaaaataaaaacgcagtgggaaacagaacaagattagcagttacaacaaaaaggccttagccattatcaaatgaccactcaacatagtcgtccaacaaacttggattcagatctgtcagctgaaccattccaactgtatttctagtgtgtgcctatttagatatgttacgcgccatgaaattacattttctcgagacatgaattactccctgttgaatctcttcgtcattaatgaacaatcaacaaacacagtagcaagagaaacagagacgaagagaagaagagaaagagaaataaagatagtgaaagagaagattaaaaacaaagggcaatcttatactattcagttaagagaattggcattatatagccaatgattacagttgtagttagttggaaaaataacagaattagttaaaagaaatcaacaaacaataccgaacataactaactctctctaaccaacagctaattgaatagacactcctaacacgacccctcaagattacaatttgaagtatcttgaataactgagatgtcttcaattgtaagcttggaacgaaacagaggaaacctttgagtggatattgcctttgtcagaccatcagccaattgatcttgagctggaacatgcttaacttggaccaatttttgaaagattttctctcgcacaaagtaaagaccaagctcaattgtttagtacgggcatgaagaactgaattggtcgtgagaaggaccgtactaagattgtcactccagatgacaggaggcaggatggtgcgaatgtgtaattcactgaataacgaatggatccaagcaagcttagcaattatactagcaagattgcgaaactcgacttcagtgcttgatcttgatatagtgtgttgctttttacattgccaagcattatccccataaaagattgtgaagcctgaggtggaacgtcgatcatctatgtcagtggcccaatcaacatcacaaattgctaccacttcctgtagagaagactttttgagatgaagaccatgagtgatggtgccactgagataccgtagtattctttttactgctaaccagtgtgttagttggggaattttcatgaactggcagactttattgaaactgaatgagatttcaggtcttgttatgaggagatattgaagtgatctatacaattgaggatttggaacaggttcactaccgtatgatgagagtcgaaggctactaaccattggagtaggagctggtttggcatcatgcatttgagatctatatagcaagtctcgaatctattttgcttgagacaagtgtaatccagaggttgtttgttgcacttcaattcctaaaaagtagtgtaagtcaccaatttccttgagagaaaacttgttgtcaagtgctgcaattagatgtttgattgcagtgttgttgctgccagttacaagtatatcatcaacatacacaagcactaaagtgacgtgtgttgaagtgtgttgtatgaaaagagagtggtcagatttagatgggacagaacctaggtctaaaagatagttgtggagcttatcaaaccaagcatggggtgcttgttttagaccatatagagttgtgtgcaactagcatacaagatgaggagctgaagcaagttcaaaacctgggggttgtagcatgtaaacttctttattcaacgtgccatttagaaaggcattattaatgtcaagttgcttgattgaccagccatgtgacaaagctatagacaagacaatacaaattatcacaggtttaacaactggactaaaagtttcagtaaaatcaaacccaggttgttgatgaaaacccttagcaagaagacgagctttatacctatgatgtgtcccatctgaattttctttttccctaaatacccatttgtagcctatgggagttttgccttttggtagaggaacaagagtgtaagttccatttcttgttaaagccaacatctcatctgtcattacttgattctattattcttgatggaaagcttctttgacatttcttggaatcttggttgtgagatagaccttaggcttatgaattccaaaatttccccttgtttgaaatgcgtgagaattagtggtgatttctggttgtgtagcaggaactgatgctgattcaagagcaacagatgctgattcaattacagcagcagatactggtatgacaatagcagctggtaacaagtctgttgatggtggagcactgatgttgctatcttgtgaaggagcaaaggtggtcagatcaggggcctgttgtgtcagaccagtaggtgtgattgttgatgctgaagcatatgttcctgtacttacatagcagcacttgccataggaggcatagaattattagtgttaacaggggtagtattcatgcaagaactagtgaatgtgcttgtgagtggaatttgagcaggtgtagaaaacttagaataagtgaaagaatcaacgaccaatttgggaatggtagtaaaaggaaaagatgttttatcaaaaatgacatctcttgagatgtacaattggccagatgagtctaagcacctgtacctcttgtgatttagactatatcctaggaaagtacacggggaagacctgaattgtaacttgtgttttttgtagggtcttatattgggaaaacatttgcagtcaaatgtttttagggtagtgtagtcaggtgagatattgaataacttctctatgggggatttgtgttgaagggtaggggtaggtagtctagaaagaggttctaaaggcttcatcccaatatttgagaggcatagaagcatgtgctagaagagtgagaccattttcaacaacatgtctatgctttctctcaactaagccagtttgctcatgtgtagtgggacatgggtgcctatgagtgatgccaaattgtttaagataattagtgaaggacataaactcccctccccaatctgtttgaaggcatttaatctttttaccaagttgtaatt

SEQ ID NO: 302481 - DNA, 2434 bp, Cannabis indica
tttatttagggcataaacccacatgttctttattagcacaagaagtactacactctttcaagtcaaagcagggaaaaatgggcgttatggcagtgaagaccgatatgcgaaaggcctatgatcgtctcgaatgggattttctcaaaagggttctcaaggcaaatggttttaatgacagggcgtgctctctgctgatgaagtgtgttacctttgttacttactctatccttctaaatggtgcgccgttgactcccttcaatcctaatcgcgggctgcgacaaggcgaccctttatctccttacctgttcatactgtgcagtgaggttctgtctaaaattatctctcgggctgagtctaatggttttctaagggggatttgcattgcaaaggacgcccctcctattactcatctgttctacgcagatgatgcgatattctactgtcaagcctctgaatcgagtgctaaggctcttacggaatgtttgagaaaatacgaagagtggtcgggccaaaaggttaacaactctaaaagtggtgtggttttctctcccaacactcctatcacttccagagagagtgtaaaagcgatcctagatatgaattccctgaagtcggatgaaaaatatctggggaacccattctttttcactgcccgtaggtgcgaagactttaattttctcaagaagaaaatcatactgagactggaaggatggaaatcgaagtgcctttcccaagcagggagattgactctaaccagttcggttcttcagagtatcccaaattattttatgtccacggcaagggtgccaaagacagtttgtgctgatctagatagaattgtggctcgtttttggtggagtggttcaacagataaacttcggttttgtgctcttaagagttggaacgaattatgccaacctaaaggcagtggggggttgggttttagaaaatttgaagacatgaatctagctctaattgcaaagctgttttggaaagttctccaacaagaggataagatttgggtcaggatcctgctgtgcaagtattgtaatctctcggatccttagatagtcaaaaggaagtcgggggactcgagatgttggcaaggcctcttggaggctcgtagaatttgcattctgggtgcgggaattcttgttggaggaggaaactctgcgttgtgggataggccttgggtccctgggaagtccatggaggaaatcaaggagagttttacttataatcgtacacatgcctttgtaaaggtcggtgatctctttgaggaaggaacgacaacttggaacagggatcttattgaagcttgttttcagaagagcatagctgacgctatactcaatatcactcctctggatggagagaatgacactctgttttggaaggcagtgagatcgggtaatttttctgtcaaaagtgtgtattgggtgagccaatgccataggttcaaggacactctctgaatgtggttagtcttgtggaaatttaatacccatccccgtctcaagcttctgatgtggaagatttggtctcacgctttaccggttaaaggtcgccttggtttcttggggcatcaggagagacattgtgttttctgtggtaccatgcctgaaacagtggaacatttgttctaccagtgcagctttgctaggggattatggttcaaatgcatatggggtttaagggtggacaccatgggttggaattcaattactgactttggtgagtggtggtccaaaataaaagatgaagatatgcatctacttattgtttgtttgtgcgaagttctttggtactggaggaatagcatagtgtttaatggaaaggttccggatgtagaaactatgtctagagatatctcccagcctttcagggaaatgaaatctaggggggattcgaaagagtttctttcctcatatctggaaatcggcaaatgttgcaacatgcaaacttctgagttattgaccatggattttggtaacgaagtgttttttctgaggactgatgcttctgttgtcaacactgttgcgggtttggcagtggttgataagtgtggtgttgagattggacagctttggtgtgccactgatctagcttccgtctgcagtgtcctggagggggaacttcttgctatccagcttgctcttcgcacggctctgaacaggaaccttatgaggatagtgattttatctgattccatgtctgctgtttaggctctttcgtcctgtttcctgccttttgggtggagggcgtaccctacttttgcttgttgtatgaaagtttgtcgcagttttaagtctgtttccttcattcacattcctcggtctgagaatattttggccaatgcttggctggttgggctaggtgtgctaagtgtgtgtctgttggtcttttaagggatgtggccccctttgtggctact

SEQ ID NO: 302482 - DNA, 2069 bp, Cannabis indica
tttatttatgacataacaaaataaaaatataccctcaatttccataaaaattcccctattaaaaaaattacaaacaaaaagaatgtctaaccattcctcatgtaaaacagaacatattgaaaaaaaatgattttgagcatattactcgcacttatccaagattttttttcactttgtacttattgggtaataatattttggattattaccccactattttttttttttaatttcaaatagttcagaattcatgtaaattacagtttattttcctcgaaaggcaaaacaaaatcatggtaccctatgtttaaaaggatactgtaatgtgtagctttcggtcaagcttaattatatttactactttttatgaaccgattgagtttagataaagtgcatataatacaactcaagcatgctccttacattgtttctaccaaagtctttttatgtatggaactcccttttaatacaaatttctatgtttaccatttcatattatatatattaaggataatagtgatgttattttggattatatttttgtgaagatcagaaaaccctttatatatttatttatttattttttatttttttttttgagaagcagaagaccctttattcattttcatttctttgttggaataactataataataataataaatttgtttctcatgtacaatgggatacagctataaaattgcaaacgaagggtttactctttctaaaaccaggcaacaccagatagaccaattccacaagttgtattcattattattttgttccaattgtgatatttgaggagaccataatatattgttgatactaggcacatttcttttacgtattaaaagaaatcatatatagtcactactattaaacaaaatccatggtcaaccacttcaagttacattatagttttgagaatagaaagaaagagagaattaaatcatggatggcgtaattgggttttgatgaagaagtgaggggcagtttggtaatttcaaaagcagaggaggttggggtgtggagtttgatggagggagggagtggggtcattgtccggctttgttgtgagaacgtgtgcgaataaaaaatatagacaactttttttgttgcttttggttacgcgtaagcgtgtacgctcagcagcaccacatcgagcgcccgcaccagcttcggcacacactcattcggatctgaatatatttgatgacttaatggaatggaatcgatgctttctctattggattttcttactatgacacacacttgcttttgcttagaagctactatactctctctctctctcacttattataagtcttttttgaatgggacatggtctatgttgtcgttgtcttttgttttgggctacaaaggaggaaaagttattgcggcttgtattatgttatagttaatttgcgtgtaaaactcgtgtggattgtggatatatttgtttgtgccatatgctttcactaattgagatgttaatacggtagaactcttttaaagaaaatgaatacttttttcttttgtttgaaaaaaaacaattatgataagaccaaatgacaattgattgaggtagaacaatttggtgaaatagtttgaaaagacgggaaatatttggaaagcgtatgaagttgttcagaaaatgatgtatgctaggttaaaataaaaagcaatgctttgagaaatattgaagaagaagaaggagaaacttcctactaaaagagacttttaacatggcgaaaaaaaagactccagttatccaataatattattcaatcaataaacaaattgacttatgagaatcttgctcaacaactatacgggtatggaaaaagtcatcaatctaattactgattggatatcctatcataattagatcggatgggatgttaattttgaaaatgtaatcggatcaattgttggatggcacatcttatcttataaaggagaagtatgaggctgcgatttgtcactctaaaataattttattctactctagaatttttctccttttatcatattttttaaattacattaaatattaattaattcaataa

SEQ ID NO: 302483 - DNA, 1903 bp, Cannabis indica
aacaactagaaataattgtgaaacaatcgtgaaaacttaacacagtacacagtataaaacttacacattatttttttaaatctaatgtgtctaacatccaataaaactaattattagtagggataattacatttttttttttacatttttatggttttccatagaaacaataagaaaactacataaatgtaatatgaaaataatatctaaataacatcaaaacaataacaaaaagtaacatacagataacaaaaaatcaacaacaaattaacaagagtacaacataaaaagaccgtattttctgtaaataaaataaaaaaactgtaaaaatatttaaaattccgtgaaaccgtattttttgtaatttttttgttgtttttgtgtatttgtgaaataattccttattagtatttcaatttagttttgatgattaattaaattttatgttgttttatgtaaaatgtatattaaaaattaatattaaatttttatcttttattttaaattggatgaatctaatacaatctaatgaatattggatcttaaatattggatggatccaatctgatctaaaaaatactaaatctaaaatattagataaactagaattaaaccaataaatatatacatgaaatacatttaatgaatagacactacaaaaaattgctacttttagtgacaactttttagtcacaacataattttttgtgactaaatgtgatttttagtcacaacaaaatgtcacttgtgactaaaacatagtatttaattataaattgtcactaatttagttttagtcacaacaaatattgtgattaaaaatacatttagtcacaacacattttaatttttgtgactaatatttttagtcacggaccttttagtcacaacataagaatcataatttataattagtcacaaatttggttgtgacttaaagtaaaatttttgtagtgagaatcaattctatccagtatccaataaatattagatcaattggatgactaacatcaattgaattgaattgaatagtaaaatctaacatttaatatataattgaatcgaatttaaatagaactaacaatattaaatatagtctaataaataccataatatttataaatagatatatgcaaaattgaatttggtaatatattatatctccatttctaaatgtacgtaatagccaaatgtatactaaaaagataataccaaaaaaaacttggatctcagctaattaaggacagacctattttagttccattataaattaaatcactcaatttatgtttagggtttttcaagtgctatatataattattgactttaaaaagttaattaaaaacctatttttcttcttcaactaaaatgtatgagagagacaactcctacagaatttactggacatgacttcttatctgatcgtttaagattagtaagtgtttattcaatttaattcatattattttacttataatatattcgatcggtacgagtactacaagaaatattacttttaccaatatatttttgtaaatttaattataatatggttacatattcttattcatatgtatattaaaatatgtatttatggattaatgaagaccaccaaattattacaccactagaaattaattttacaaaaccgtgtgtggagaaagtgaagaagggtcaaagttttggtctgataattgtacacgtggtaatggtataatcatattttcaaccaaattatcaccaatataagttcaaactcatcacattaatattaaattattatataattgcatagttttcaatatttatagtaggtttactatacaatattcaggatcaaaataaattaatggagaaatatcacggaataaaaaaaaataatcgaaattaatatttgtaatat

SEQ ID NO: 302484 - DNA, 2902 bp, Cannabis indica
caatagatgaattggataaatgagtttatatagagaatgattattatgtagctaggtcaaattgaaaattaaatcaaaaggaataaatatttaataataatttacgttatttagtctttggtaaaataaatattttcttttctttctctttcagtgtaatgtagataactacaaatttatttacattaaaaatggagaaatcaaaaaggtaaaactataatagtatatatgactgtgattttgatattttcaagaataaaatattacaaaaaaattaatattattatctgtattattaaatccaattttacgacgttacaaaacttttatataagtcaaataaataataaatacactacgttacaatttttttttttaaaggagttataggatttattttttttcataaattcgaacaaatacatgttttaagattttatttttaataagggtgtatttggaagtaactgtgtaattacaatgtagggtaattactaggtagtaattacacagtttagtaattacactatatttgaaaaatgcaatgtgtgtttagatatgaggtggtaattacatatgaattcgtaatatcttgtttggcaaaatattaagtaattagatgaaaaaataatatttttaatagctaatgttaatatggaaagtatttagtaattacacagtgtaattacattcaattctcatgggggccatgagaattggagagtgtaattggaactcctcaattactttcaattacactgttatagtgtaattacatggtcagacaaacatgtcaaattgtgtaattacctccacttacacacaaatttaattacattgtggctttccaaacgcaccctaagtttcaaaaatattgttaattgtgcaattatatattatattgtaacaaatatgtaggaaattacaaaacatgtccctacccctaacaaagaacacaaatcaggtatcaaggtcaattaattatcaaaaaaggtatcaaggtcaattagagttttactccgattcaaacagacctattgactccaatcaaaactacatcgttttgatcaataacaaaacccttcagaaccccttatttccttctcacgcacaatcaacgaaaccttactagagcttcgagtttctagagaagaaactcgaagcccgcattaaccttgaatcaagccaaacacccttcccagatcaaagttaaaccacacacacatattgttgggtacttcttcttttgagctcgcctcagaagaatggctcgtttccattatcagatcttcaaagatcagcacagtacaatgatggattccaaatcacaagtagcgattggtaatcctttgtttattacatgtatttctctctcaattaatgtttatctctctttctctctctaactatttgattttctctttgtgtatgtttcctcctggaaatggacctctgagccctaaccctagggctccaggactcaacgttgtaagcctcttccttctcctcttcgatatgtctttttctatttaattttctatgtatttatagaagtaggtagctcagagaatgagttgatattagttgcaacagttaactgaatttttcactaactttggttcagagatagagttagttacgttcgaaggccacttgttgtaatagtctcttttttgttgtaaatttgtaataaaatgttacgttgatctggacagtggatatggagatttattccaacaatttctacatgaatccccatatggtctggtaggctttagtttaggttttctgacagtcttggctagaacccactaggggttttgccaacctatgtcaatctctaataagcttaagcaaagcttaaacttatttagggatactaccttagccctcatgtttacaggaatcatttctgtaggcactttgtcaatctcaatttccccttgagtaattttatccatgatgaaatggtattttatctctatgtatttaatcatgtcgtgaaaaccagaatttttacataagtagacactactttggttgtctgagtagataataggatatttcttagctagatttaactgtttcataagcccatttaaccatagagcttccttgattgcctctgtagtggccgtatactcaaattgtggataaggctactattggctataattgaactctccagctagtgaagttacctcctgttaagaaaaataagctgatgatctagatctcttagtgtctctatcccttacatagttacctcaattaatgttctggtgtgcctggtatatcatgttgggttttgagccctaactaaaatcctattttaatgttatcttgaattttatttatcaataaaggaacataattattttattacttatttaatataatgcttggttcacatgtttgtttcatacatatgtttgatatataaattctattaaatcttatcaccactactacaaactgtatttttaatgtcagttttaaattgacacttatacctttagtgtcagttcatagaactgacacctattccacagtcacaaaaagtcaaattttaagtgtctattataaactgagacaaatgaattttagtatcattttaaaaccgatacttaaagtatacataaaagttttttcttttaataaatatatataattacctttccactttaactaaactccatatataattaatcaaagttgtttaggcaaaattaattagtattttctttcatacaactacaaggtgacaaatatatgtttatatatattaatggaaaattttataattcacctccctaaaagggatgtactgatatatctctatctattttagtatttgaaataattttttagtcaaattttttcttatggtcatgtaaattat

SEQ ID NO: 302485 - DNA, 1337 bp, Cannabis indica
tatttctaactaattttattaaacaataaaataagtaaataataagtttagatatttaattaaaaaacgttgaaattgctctgctagggcatcgacccagtcttgaactgaagccatggcaggtcgaggtcgcccgcgcaagccaattttccatggatctggagttcgaactgctactgatggaggagttgctaggaaacggaaagtgaaggtgaagaagaaaggaccaacgtcatctaacttggttctcaaaacgaagtcaatggcagattgaagatgaaatggaaaaatagaggagtttgactgagccaactagaaagattgaagatgttgctaaggtggtttcacctagatcgactctaaccctgctgctacagaagcaatgagttcaggaagactatgggagttttttggaagcaaccaaacaatgtgaacttcatgtgagtactagtaagaatcaatctccacctttcttcattcgaatctagttcagaatttgagtggtaagtttgatgctagtaaaagccctaagaaaaatccagtagttaagattgatatggtggatgtggaagaagaaattttgtactggatatcatgaatggtatatgttatgtgctcggggctaatccccccttggtccttttgaaggctttgcaaggagaatttggaaagacaagggggtggataaggttggtgtgcttaaactagggatgaaaccatgggagccgtatcaggactatgacaaggaagatgttagctcgtatctgatttggattcagctacatggattagaattaaggtattggggggaaagatcattattcaaagttgttggacaattagggtgccctctgatgttggatgaagtcaataagaataaagagtggcttaactttccaagggtgcttattcaagttcaaatgctactgaaattatctcatgcactaatgagatatcacaagatattgaattgaaggtgaaatatgaatggcatagtggcgtgtggtcatttttcatgaatgggacatacttctagggtttgtaggaagaaggaagtcaataaaaaagtaaaacctaagaagatataggttgctaaaaagaccactaatgtgattgggaatgagcaaaaagggaaggagataatagtagatgaaggagggtttcaaaaggtgattaaaggtggcaaaaatattacaacaatgtctcttataatagtaacataaaatgctttccaagttcttgaagagctagccaggggagaaagagatagatggagacagcaaaatgcttaaggacaatactggagggggggggggggggggggggggttcctctat

SEQ ID NO: 302486 - DNA, 4161 bp, Cannabis indica
attgaagaaaataagaagcaaaacctaacttaattcctaatgactatcactatctgcggtgccccttaattaataagataataatatatatttatatatgtatgaaaaattagtaattatttttgctatttatatatatttttaatatttttggtattaattaataattttattatatttttatgtataataaaaaaaattatattttggtgtcctaacaaaaaaaaaatattatattttagtgtgaaatagtactaaaatattgtaggaaaaaaatacaaaaaatggcatatgtaaaagaacaaaataggattgatcacattagaagatgaagtgtgagattgaccaccacccactaattttttttaaaacaaaaataaataagaggataacatgcctaaccattcattcattcacgtaatattagctatgaccatttcttaaccctctcctctgtttttctcttctcctacctaaacatacatacaatccttttattctattaaaaatttaaataaaaaaaataataatttttgcctaaatgtagtaggtactataattttatctccatttttgttccataattttctctcatctcctgaacatgggtggttctttggtaatggagtaccaccaacttctactcattctcaatacccaactcccattttctttctaacatatcttacatatccatttctcttttattttctctcccattttcctggaaaaaaacaaacttgttatttcttttcttttcttttacattcatgacaacaaaaacaaaagacacagcttgaagccacaaaagggtctctttcccattatcaaatcttggtttgtgatcattctttgttctttcttattgtcattaatcttttattattccaaactctgaccttttctttgtctttgtattgtgtgtctcatatcattacgtgcttaccacaaactggttttcattcttaatgcattttcattatcatcaattcttctttataagtttgactttgttaaattgtatattattaagaaagtaatgaatttgaacaggaattttcattgaggagggctgttctacttttgctttatccatgtctttaaagtctatcatgggacctgtctcttcagaggtaagtatagtgtaaatgtgtgtatatattgtaaaggggtgagctttaactcatgcagataaactgtttgatctcaggacaactcatttggaattccaaagaaactacaaggtgtccccaagcatgatgcagattcaggaaactatcattcccatgacaaaaaagttgagggaataatgaatcaaccaattgtctattcaacaaataattcatcatatgtaatccatcatggtgataaaaaccaaattcaaagccagatttgatcataattcacccatctaaaccagaagaagtgtatcatgattcaaaagttgtaactgattcaaccaccattaccaccactactaagtatagcccatatcctagcccaaattctaatatgcaaactacctcctcaactgggacagtaggagaaatgcctgcaaattctaagacaaataaccatggacaagtcatgatcaataggggtcgtagtaacagcttagagaactcctctacacattttaagcctcacaccggtggcgatataaggtgggatgctgttaatgcagcttctaaagggttcccacttaacctcagcaattttcgactactcaaacggctcggttatggagatattggtagtgtttatcttgttgaacttagaggaaccaaagcttattttgccatgaaggtgatggacaaagcatctctagctagtcgaaacaagcttcttcgagcacaaacagaaagggagatacttggacttcttgatcatccattcttgcctactttgtattcatattttgacactgacaagttctattgcttggttatggagttttgtagtggtggtaatcttcattctcttagacagaagcaaccaaataaacacttcactgaagaagctgcaaggtctgtctcttactttaacatgttatctttgaattctccatttcaatccattgtatttgtaatctttcttcttaaacaggttttatgcatcagaagtattgttggcacttgagtatttgcacatgttaggcattgtttacagggatttgaaaccagaaaacgtactagtaagagatgaaggccatatcatgctttcggattttgatttatcgttgcgttgctcggttagtccaacactggtgaaatcatcctctgtcaatgtaagcaatgggggtaacagcactagtaataatgggattttagatgatgaatttgctgtccaaggctgtatgcaaccatcaactttcttcccaagaatcttaccaagcaaaaagaatagaaaatcaaaatcagatttcgggctctttgtcaatggctcccttcctgaactcatggcagaaccaacaaacgttagatcaatgtcatttgtggggacacatgaatatctagccccagagatcataagaggagagggacatggaagtgcagtagattggtggacatttggtatcttcctttatgagttgttacatggaacaacaccctttaaaggatcaggcaaccgtgctacactcttcaatgttgttggacaaccattaagatttccagaaacaccacaagtcagtttcgttgctcgtgatcttattcgaggccttttagttaaagagcctcagaagcgaatcgcatacaagagaggcgccacagagattaaacaacatccatttttcgaaggagttaactgggcactagtgagatgtgctatgcctcctcatgtgcctgaccctgtagattttactcagtatgctactaaagagacaccatcatctgctgataagagaatcccagaagttaaaggtgtcaaaactaataatagtactacttcttcttctcctgatgattctccttacattgattttgagtacttttaagaccaaacatacattctttctttttccattttaatctaaaatataaatccttggaggagactttaaatgtacaaaagaggaaaagttggaaccaagttagctgtatcaattgtaagttttaccaaagttgtcttttgttttcctttaattcttttattcttttgtatttttctaaacaaatttttccttctctttgtacacatttgtatttatatatcaaagctgaagttgatggctttgtcaaaatatacatattgaatatagtttactttaaattcttttaaattaggtaagttttgttcacatgattttcaagttgttttatttttttcattccttaatgtgaataatatttgcatatacaatttacaaatggcactttttttttttttgaaaatgaaagtaatcattttattaaacgaaaatctccgttaccaaactaggcaacaactcaactggaacagtgtccaagttgaacagacgatcaaggtgagatatagaaatcctcacatactacatttgctgatcattttacaaatgacacttttgtaatgcatctaacatcccaataattttaaaacatcttctaataatttactatcttcaaattatggttcaaaaagttgtgtctttcacactattaaggggaaaaaaaagacatgaatatagtagattgttttacccctattttatatatggtaaattatttgaatttttttttttttttttaaaaaaaaaaatttaagtacaaaataatgaacaacaaccgaatgtggattgtaggcacaaccaaaaaatttccttattattctataaatggttattatagaatttttagttattattattcagaaatggttaatagtagggctattcatacaaactaaaataccgcagtttaaattcggactgcgattatatgaatcattgtagatcgtaatcgggaaaatcattttaaatggtttggctaatccggaccgtttacaacataataatttggttgcggtttataataaatagttaacagttaaatcagactggatcgtttataataaataattgatttatatatattttatatatgattatatgtataattttaattttttttttgtgttaagttttttttttttgaaaagttgtgttaagttttttattgtatgaat

SEQ ID NO: 302487 - DNA, 3539 bp, Cannabis indica
attttaataactatacatttaggaaaaaaataaaatggcattttaagcatagaatttcaaatttcccaatggtaaaaagagcattccaatactttaaaatacaaccaaataaaagaatgaaatgaaaattattttctttccatttcatttcattacttccaactaaacgtcacctaaattcaacaatcttaataacatttttaacgaccataaaagttcaagtaacataatttaatacatgtgaaagtttgagaataaaaatcctaattaacctaaaaaaaattattacaaaaaaaatataaattgataatttatttacatatttatacaataaattactctcctaacaaaaaaaaaaatataatttttgattgataaaccctatatagttataggggctagttttggttaaagattcaatttttctttctctcttctcttcgagtcttcttcttcatcttcttcttcgtaatgaggagcttgatttcgagcgctaaattggtgagtggtgctcgctccttgtggtctccgccatgtgggagtcgccgcggttacagtttgattccaatggtgattgagcactcctcccgaggcgaacgagcctacgacatcttctctcgccttctaaaggagcgcattatctgcatcaatggccctatcactgatgacacttcccatgtcgtcgttgcccagctcctctttctcgaatccgagaacccctccaagccaatcaatatgtatctcaactctcccggtggccatgtttctgcaggttttcttcttctcctcatctttttttcattgtatgatctataattatagttagggcaattgttgatttgggggttaatctttggctgattttgtttattgggtatataaccatttcgtatcaggaaagaattgtatgtggagaatggtgagagggttatgaaatttgtgtgataaatgtgcaaataactctatgataacgtttgattatataatttttaagcagtgtataactttttgattcttcttgttgattatgagtttgaatagtatggactctggtttattatgggttttgctcttttcaattcttcaattttagaaccagctttgatgtgactaatgaatatcatttcgcttttgttagaagtattagagtgcttaattgcttaacttttggccccttgaagtatttttaccaacattagggagttcttgtgctttgttcctttgctgtacaggtctcttcagttcaccctttgattttttctatccatttgtactgaaatttcgtttttttgggggttgagttaaccaacttaaagcctagcctttacatagttacctcctattccacaaaacggatttgagaaactcagcattgttgcttacacctgttactttaggtcttgggatgtttaagggattcaataaattagaagagcattagatcttttgagtttgttatttgtcttgctccattttggtgttgaaatttttgggctttaagaaataatgtcttggcactatttaattccaccaaaggttaacattttcagctggcttttggttttgggaaaactaaatactaccccatgatgttctgttaaaagtaaaccttttttaaatacttcttcaaacttgtgcgtaaatgtgtagaatgtggaatgtggtaatcatggaaatatagtggtctttgtggttggaaaggaatgataaagtttttgaaggtttagaagagactttagagcctttatgctatagtgtcaagtattgggtggctggattggtgtttgatactaaagaacaaagatttaatctttatctaatcggttagggattagtgtacttggttttaattttcttatcatcttttcttttataactttcgtacttcccgtttcgtaccaatattatcaagtccttgtttctgttaaaaaaagttttttcactctcctaggtggtacatactctgatagttaactagtaggttagaaagttgtagttgtagttgtagttttatattgaacattatcatcttcaaattatggctagtggagattttacactgacaggggtcatcaatgtgaggagaagatctaatgatttcatttaataagcaccttacagtgttcgatatccacattttaaaactaccttgtcacctcaagcttgaagaaaagctgaactattgtctgaataacaaaagaaaatcacaaaatttggttgaagatagcatcgacgtgtcattatcacatttctgtggttcatttgctgttacaggtcttgcaatatatgatacgatgcagtacatacggtcaccaatcaacaccatttgtttaggtcaagctgcatcgatgggttctcttcttttagctgccggtgccaagggtcagagacggtccctcccaaatgcgacaatcatggttcatcaaccttctggtgggtatagtgggcaggcaaaagatatgacaattcataccaagcagattgttcgagtctgggattccctcaacgagttatattcaaaacacacgggccagccaattgatgtaattcaaaagaacatggacagagattactttatgaccccacaagaggcaaaggagtttggcataatcgatgaagttattgatcaaagaccaattgctcttgtatctgatgctgttagcaatgaaggtcaagctaacaatgaaggtcaagataaagataaagataaagaagataaagtccccagtaaggattagagggtaagatctcagtgtggcacatcacttatttgaagttttataattgacactgctggattttcactctatattcctaagtgatttttatttattctatcttacttcacaagtttttagctatagattcaattgttcttcactattattatttgatctttgagtgagttcattttcatggaactcatgttgccctatatagcacccatttcaactctcttcaggccaatttttacagcaaattgaaggttgtaatatggtttatgaaccatcttttacatctgtgtaactgtatctttagattgtatatcaccgacgagcaatgaaagaaactgaaaggaatgggcaaaattagattagaaatatgatctttgatcaagtatgaaaagtagtacaatatgtcttttggttttgttttttcatttgagaaaaagaataaggttcatatggatgtgtcacttggaatagactccaatcttagtattctctcaatgaatgtacttcttttgttaagcttgtttaaccattaggcatgttatgtcctcattgatggatcaaataatttgattctaatgtatatgtatctatacatatatatgattttatttattcagttaccaaaattctattataaggtagagcactcatggcttaatgaatagtgattagctaaatgtagatacaacattcatagttttagttttagtgcgtatagctataattgtttattatttttatagtgtgttttgttgatttatgaatatatatatagaatataatatataatattttattatttat

SEQ ID NO: 302488 - DNA, 3188 bp, Cannabis indica
attaagtaaaaagaatcaagaatgtctatacctttttgtttatctgtattctaaaaatctcagagcacaacccatgatttaggattaatatttttataaggaagtttctttgcctttttattatctgtctctcctccactctcaacccaatgagctttcatgttgcatcgtcattcatccatatacccttgcatattcacatccatgttattgagaatgattagatcttccattggataaataaattacaatgtaataatttaaattttaattagcatttttcttaagaaattaaatttacagtaaacttttgacgaatgaccaagatatcattcttgtctacattatcctaattaagagtagtcagaggtatgttatctcgcacaaggtatgcaatatagttgttaaacatctttttatatgttccatctgtactactgttagttttatgaaacttcatcggaagttgagatagtttctttgataatgcaagctctgcttccacattacccccgcagtagggcctacgacccctcttcttttcacccgaacttccactctcagttctttcttgttccattctgtatattggtttagcacattttataagattaaaatacaatacatgttagtttaacaataataaatatatatgtatatatttaaattttaaaataaaaaaaaacaaacattaaagtatttttcataaaacaaaaattatttttaaaaattttattttccaattacaacatatcatcattattgactacaaaatgatcaccactatcactatcactgtcgaccacaatattttcttcatcatcaccgtactcagctaaagtgtcatcaggagtttcatcattgtcatcatcaacaacaaaacgatcataacttttaccgagtaattcattaatattagatacttcagttggataaacatctgtacattcatattaaatagtatcgaatatttgaagttcaactcataactgaaatttagaagaatttacttcttcaagtattggtacatcactagtagtgacagtatcatcgatattcgtatctgagaaatcacacatttctcgaaatataaacatagacgactctccaatcaaattcatttctgatatcttgaagataatataccaactgagcttgggatgcaagtataaagggatcgaccttgtaacatttatccttgagaaagacacttgtaaaactttcatattctttagttttactagtgttgaaccatttacacttgaatagcacaacactataactcatcaaatatttgaattcaataatttcttataactcatcaaatatttgaattcaataatttcttacaactctccataataattatctctttcctcacttgtaaccattacactgctaatttgagtcttcaactttttatcatgttcatggacgataaatttgaccccattaacaatcattcttggatagtaaaatactatcgaacttggtttgttggcaagagcataaaattcgtcagatattattattggagaagacttacgcaaatgattgatctaacaatgtcaatgtaagaacgagtacaaatgatgtgttatgtaattaaatttaagtattttatgaattcatactcgagttttaaaccaatgagggaattcagcttcttgtctacgctgaagatttgaaatgccactttgtcgtttcaactcgttcatgtgctcagcacgattaaaaggcaagtcaattaaaaataaaaacatgaatgataaatacaagttgaagattggcaattaatattaaacaagtacgtaatgtagttggatagttcagcacatttgttcaagatgtaccactctgccttttgcttttaatgtgaaggtagtagattagttattttttcctaagtagatgacaaccgaccttgaacactaaaaactcccgactagggtgagattcaactcgatcatcattccttttaggtcgattgaactggatttcaattccctgaaagtatattgaataaaatgttaatgtttcattcaccacataagcttcggcaatcgaagcttcgagatatgaatgatttctaacatattgtttgtgcaccgccatacaacattcaataggatacatctatctaaagtgcaccgggctaccaagtattgcctcgttcggaagatggataaccgaatgcaccataatatcaaaaaatgcatgagagaaaatcatttccaacatgcataaaataattacgatgtcttttttcgtcttctcaagatcattcacatttaaagtttgggagcaaagttgcttgaaaaagaagcttagattagtaagtgtctttcgaacagtcgtccccaaaactgatataattccaatcggaaacaactgttgaatcaacacattataatcatgagattttagcccataaatcttgtcatgcttaacattctttgctaaattagctgcataaccatttggaaacttgacagatttcacaaattcacaaaaatctcgacgctcggtgacactaagagtgtaactagcaagaggtttcttccacttgtccccaactttaaaaaagtgtagtttcttttttatcttcatatctgccagatcaagtcttgcttttttggtatctttcgatctcccgtcaatacttaaaagtgtacccaacacaatatcacaaacattttttttaatatgcattatatccaaattgtgcctaagtgacaagtttttccaatattcaagtttaaagaaaatgcttctcttagaccagttgagctcgataagagttcgtttacgcttcaccccccaaattctttttgttttcctagtagtcttatttctagattttgcgattgcttcaatatatcttctgatgaatactgcttaggtggaagtcaaagttctttattaccatcaaacaatgcaaatttactcctccattcataattcatatcaagaaattgtcgatgcctaatatacaaaattttattacgaattggaatagaaggagttttctcattgcaggtagggcatgccttataccccattgtgctttaaccaaacatcatagcatatgctggataattattaatagtccataaaattgatgccctcatagtgaacaaggaattgttgtatgcatctcgagtttcaacaacgttctcccacacatc

SEQ ID NO: 302489 - DNA, 2396 bp, Cannabis indica
agtaacttttgtacatgaaatggagggatgtttgttacaggaaaactaggcagatcttctgtttagtgaaagaaaaagataatgatgaagaacctcttgagaccttcttagaaatggtggccttgggaagggtatataatttggtggtatctaaaccaccagcataactcttacatgccttcatttttcttctgatattgtaaggattttccttcttagcaagatcttctatactcaacacttttgatagagatgtgaatgactgtgatttgccttggaaaaacttggaaagacctctcctgagaatttgaacaagaaaaacacattagcatagattcaaaaaaggattagtataaaaaatgtacttgaacaaatctcagatgtgaaaaacttacttgatgggtagttgggacatgagttctgacaattcatacaaaggtccattatgatcatgggataaagaaccagatgatgaaggggatgaagatgcatcatctaccaaatctgatgaagatgataatgatgatctgtttgaggaggtagaattcccaatggaggatgatgatgcagatgatgttgaattgtaggcatcatcatcatgaacatgattattattatcatcaccttccatgctaatccatctactctttttcccataatcaccatacaaacctatagagaatggactttgttgtagcatctgttcttcacaggcagccattgataagcagatcccagcaaaaaaacaagataaggaggagaaagtaatcaaaggagaagaacaacaagggagtggttgcagatattgttactaaaaaacctatatatatccaaagatgagaacttgggatatatatatatgtgtttaagtgtgtggaaacgtttatataaataaatattaataaaaaaaaggttggttttattgaatggatgataatggttgcctcccaaaaacaacaacatgtaattgacagacaaaggcatgaaagtcttatttttttaaagtaaagtaaacacttgtaatgtgtttaaacacctaaaccattggtagtatgagaaattgatgcacttcattatggtccaagtaatgtcctttgttttgtttttaatttattctttttcttttattctccatttatcatgcattgccttatcttaagattcctagttatcttctcacatggtttgaatttgttgacctttcttaatgtgtaactaataaaagaggataagctctttatctataaaagccatcgagtcacttatccacattaaatatatgagtcactatctataccgaaattgaccacatactaattttatatataaattatttgcatgattcacaaattcatagtgagtgggtcaaactcaaacctcaaaaaataaaattcttctagatgaaccaacccccctaacccacgttggaattcttccaacattgccttcttctctaataatcaaaactctctctagtacaagtcactaagtcagcataaacatttgctcaaaatctaatttttcaagttttaaaaattatatatataatttattaactaattctcatattaatggtttgcagatgtcaacttcttatttttttcctttattggtataaagtctctgtaaagagattatatggtggtgaggtgatgaaacatgcttaaggagcaaattataaaataccacaacaaccgaaaccaatctaattgggccgacacacactattgtttttagtttggtcaacacttgtaaatatagaaattaatatacacccaacatttaattaattaattaatttaattaattaaaatctacatctggtcctgtggtatgggcagaatcatcagatcgaaatagtcggtggaaacacggtagagaagctacctagctagcttgtgtaataaacaattattttattgttatctcattagttatattggctaagataagatccctaatcttaaatattattatcttcatatgtttggtatccctaatcattatttatttcgtaaaagttgattagtgatagaaatgagttgtcagtcataaacatagttatgtttcactgacacttttttttacaagaaaatttttaaagttcgaattctcaataaatttgtttattgaaaaacaataaacttgttacttactacttattattcatttcatttgctttaccacctaattctttctcaaaacttataatttctacatccatacttgataatttaaaattagtatacaatatattttatacaatctcttaaattatttgggacctggtttaattttcggcctctgaaatataatgtaaatatgttttattttttagggataattgcggtaaaagtccctaaaacttgaggttgatgccgattagtcctcaacct

SEQ ID NO: 302490 - DNA, 3279 bp, Cannabis indica
attagataaaaactatttttatcgaattttgcttgggcctttataactctaatatggacaataaaaaccaatagttgacacctgacttgacacgtcggtttctacttattaaaattcaattttgttcaaagaattgaactatttttctatagtaaatgaaagctatgactttttataggtcaaattcatagtttgataatttactgtttcaacaaggtggaatatcgacataattggggagttttgagtctcctaatttcacaaaaaatgaaatcttcaagaactagtgaacaacttcaccagaacatagaatctaactaagttgtgtgaaaatagttcttaggcatcaaaaaatacaagtttgggacttttttttgcttatccgatatccaagttgatgtcagggtgtcaacgtggtcacatggtgctgaacaagcattagtaaaatatctataacttcctcaatattgatctgattgacgtaattcaacttgcatttcagagctatttaaacattctaccaagttgtgtatgacactcatatcgcaattcttaatattttatgtccaaaattcatcctcaacatagttctaatttttttcaacacattgccgaaaaacaatcctacggacgaaattcaaaacccaaaaattgataattttcaccaatagtcaattttaatagctatatcatcattagtggcaaagatctaccgaatgtaattttttcaaatttttgtattttttattattatttaaatggaccaccttccctataaaatgagagctctctagttcatgtgacatattattctaagtccccataacgtcagagcatctctctatactttctctctctagaaattcgagccctacactcagccagtttcttattattctcgggaaaaataaaaactcaaaatagatgtagttccattattgtcgagtcacggggagtgaacttctataaatttattgtctgtcttttttatacttaactcttattatattcttgctagtctagcgagcaggtgtagcctgatatctatgtgtaaatttctacataaatagatgtagctctattaccgtcgagtcacggggagtgaacttttataaatttattgtctgtcttattcatcttaactcttattacattcttgctaatctagcgagcagggggttaattccaaaaatacattttcacctttggaaaaattggtttttatcaagcttattttgacacttgcatctagtcatgattggcaactccatgaacttgatgtcaataatgcttttcttagtagggacctaaatgacaattttttaatgactatacctaaaaggggagactttacttatcaacccattgtacaagctccaaaaatctttatatagtcctaataaacaagtattaagccagttgtttgcaaaatttactagtgctttcattaaggaatatttttttcactctatcaaatattactcattgttcataaaacaatctccttctaattttattacactacttgtttatgttaatgatgttatcataacaagcaacaatctagaataaattaagtctctcaaagtcaaactttaccataggttcatgctcaaataatttggttgctgaaggtattttttgggccttgaagttgcgaggttgacataagctttttcatctctcaaagaccttattacaacttcttaaagaatttggtaagctgggatgcacaccagctagcaggccaatagaaactaacttgaaaataaagcggggagcaagcgagttactcaccgatccaaagttattcaggaaaattattgagaaaggtagagggctacagtatgtgaaaggtaacccttgtcttggattgatgcttcctgtacagaagtatgttaagctatgtgcttatatagatgtaaattcgggatcttgctatgttctaaagacgtcaactacaggattttgcatctttattggcaaatctctaatatcctagaagagagtaagaaacaacatatagtttaaacatcctcagctgaaggtgagtatagggcaatgacacacacaacatgtcagattattttggtttttgcaatcctaaaggagttgaatcaagaacataataaaatattcagctattatgtgataacaaagttgcgattcacattgctacaaattcataccatgagaggacaaagcatattaaaaatcactgtcaataaactagagaaaaggtccaagttgtgctgattgaaacatctcacatttgatcatctaaagaacatgtggcagaccttctaacgaaaatattatttccaacataattcaaatagtttaagataaagatcgatttatagaatatatgtattccatcttgaggggctgtttcaaaattgttaagtttgcttgttgaaaatgttagttaaagtttgttataagtgtaactaaaatagttactcggagctagttttttcaacatgtataacaagtaatcatttttcaatttattcagtacataatcaattttacattattttctgtcttgaattttagctttctttcatagttttttattaatattggaatgtgttaataatgatatatcatctgttgtgacgctattgtcccacaatacacaatgttaggacaatctcacaataatggtgttgccaagagatgaaacatgtgaggagatatgtatcgagatttttagaaactaattaattagagcttaagaaagaagacaataaacaataaataataaacataagttttattacgtggttcaggtattaattatccttaatccatgagtctattttattaatttgatcgacaagtaatgaatattacaagtatttacattatgtacttgaattatgtattccgctcgttcctcttgaagaagaagctctttaggaattttcagtaaagttttaataagttaaaaatagttttttagactcccaagaggcgtcctctatctcgtgaaatgtaagggtatttataggcaatctcttcattcacgtgctttgtgggttggtcttgctagaagagattccatcgttgatctagtaggtggctactgcatcatatggtgtgctaagatgacaacccgtaccatttggatattccttatgtgtcactcaaaaacctttcctctttcggctgcccctgcaaatggctacttgaccatggacatgtttaatggtgtgcttgccttgtacttgttgggttttgtgccctaaacaaaacccattacaatctgattag

SEQ ID NO: 302491 - DNA, 1126 bp, Cannabis indica
atcaaggggagatacatcagccaaacgtttaatcaattcccatgtatgctttttgtttctagcttcaagaaaaccataaattgaagaaaaattccatcttgggccattatcaaaagacaagtaatagtcaaagttatttatattcatacataagagggttacatcaatattatcatgccataacaatattagccccatttcaaacaaacacaaagagcttctaaactattattaaaatttaaagatttcttaaaacgagtaagtacactagcagtagttttcatttcaataagaaacaatacttgaggagttttctcacacacgagcaaatgaaatcaacagaatgcacttggattctccaaaccccgtgcatgccaacaagatgaatcaaacatcttgacaaaaacattatagttgtgattcacttccacagacgaaaaggaagaatcaattacacgacattgtttaagcgtttaccgtacagaagtattgtcgaaatggaggttgaatagacgattggggtgtaagttctcttgattgtccaactaggtagaattgaacatcaaaccattttgaaaagtagtagcaatgatgggagttgtcgttgttgtgtagtaggcagcagtgggatttgacaatgttaaattgtgactgttcttaggggttgtcaatgatggatcaggaggaaaactagcaattagttatgatatttgaaattctccaatatcaagagcaaaaacatcagcgaagttaattgttgaatgattctattggccttgtgattgatttcgagggaccaacagattgaaagtggttacaacaagagtgataatgacacatgagcatttatagtggagaaagatgagtgattgagaactgagggagttagactttgcatggagacttccttggttgaaactttctgaagacctttgctaacattctcagtcgaggattctccaattaatagagcctttggacttgggggaggtcttgcatttagttgtggaatcgaagcagttaagagaaactagccaatcgtgtgatgagaggccaagcatttcctttcaaaaaattcgtctcatacctgtcataattagatgttggaagtgttggaaattatttt

SEQ ID NO: 302492 - DNA, 3962 bp, Cannabis indica
cttcctccatggaaatctttcactaattatatgctgtgattttgtttttgattacttatttgagtatttttgttttggacattatatatcagagatgtgaaaatggagtacaaattgttgaaagaaaaagtgagggaatacaacaagaaggatgcacaattctacagcaacatatttgcaaagatgaacaagtttgagcaagtcaaatcaaatgtaagttgatgaactgattttggtttggttttggttttgatctgatgaatctgttttgtttaatgatccattttgatggaatgtaaaagcagggaaaggaagaggcagtgtccatgaccattgacagcaaagcttgataatgatgatgaagatgatggtatattcttaggagttaatacaaaatgtgtgtgtgtgggttcattgattggcatataatgaaatgaaatgagagtggtttaactgtaatgagtcaaagcttgagtttttagtgtttattttaagaggattagatgaacataaaattctctttttgcccaatactcattgtaatttttctataataataaataatatatagtaacttttgaattgttatgttttgatccattcacatttaaattttgacttataaaaattatatttatttttcattaaatagacacaagagaaagatggaactaactcttttaatgaaagatccaatcttatggaaagttggaagaaatatcttgcctataaaacagcttgaaggcgttgtcctaaagactccataagacactgccttcaagttgtcttttttggtaaatctccaacctttgttactcagaagaagattttatctagatcttttgcatttgggcaaggggttggtagagtttgtagtagaaggtcttaatgtgaaatttcatatttctgcgtagcctaagctgcagccgccgccggccattgccaaattgggtacattgtaaccatttacatattaaatgacagcaatggaatgtcaatcctcgaactttatctttcaagatagggcagtgtccgataataccactcgaaaaacaccaccacaacaaggctcgatgaaaaatgctcaattgatttcagcattgaatcttttaaaagcatttacaacaatcaaatttaagtgtagctttgttcattttcattttgttgagttttgaaagttgtgtaattgtataaacacattctccaatctaatgggaattaaagttcttgtacgaaaactaataacatggtaatttagaataaataaatgatcaaacaagagactagcattttcaaattttcagcaattatgatttcaagacagtagaaaagaaaaccatcaaaacattgtaacataaaacacaaaaacaaagtagtactattttagagcaaaaattacttctcagttcacagactagccaaacaaaatcttttcaaaagttgtttctatcagtggctcataacatgtcctagacagtagtagtaccgactggcgataactaaaacaaattaactcatataaggagaaggtgtaaaaagcaagtaacacactctttaagcagcagcaccagcagcctttcccttcttcctctgaagtttcttcacgtagaactcgagttcctttccttccaagatgtatctgtcaaggaaaagaattcccttgagaaaactcgaatccaacaagtgatttcaaatataagaaaataaataagcaaaaaagtacttacccatcagctctgccacattgtccagggcgagaagagatgcaagcatacaaccttccgctactgaattgttcttcaatatgggcgtcgagggtacgagcttcttgacgcttctcaatcttcctctgaacatggttgcttttctttgcttcctctgcagctggtgcagcggcttcaccctcctgcttatacaaaatatcgattagtactaatcaaattgtattactccaatcaattgcaaatttactcactagtttgtctaaaatatgttccaaaaagataaaatctcattccaaagtttgatcaatatgtaatctactgaccagcctttaataatgactatacataataatgccgatttaactaatttcaagaacaattaagcatacctcgggggtatccttcttggcagcagcagcagcagcaggtgtcttcttcttcctaccgatgtctacaccatagtgctgaaggtaccattgcttgaatggggcagcatcaacctggatgatagcacctttcacaagggtttgagttctcacaagctcattgtttgaggaattgtagacaacatcaaggagacgagttttgcgagtaacagcttcacttccccatgagaagttaccggtatccaacctgagagctctccacttaacatttccacctctaacacgaatacgcctcacagtcttgttgcttgaaagcttagtgttagctggctgacgaccgagctcatacctgcaaataagtaaaattagaaaacaaaataaccaactaatacaagttcacaagaaaattacagctgtacaagacatttaaacctaaacccatcaacatattagcaacaacaaatgcaatcaaaacaaagtttttcagaacaggaggtcttgagttcatagcccagttagttagaccgccagtttggtaaggaagagttcttgagttcaactctcaacgaaagcccaagaaatacaaaacaggaatcacactcttcgagtcagtgccaaactcctttatgaaactcctaattttctttcaattcattgacaaacctttggtgaaatggctttacatatttatagtaccctatgacaatactaacactactataatccccatagtgtaacagtttcactatgatcaacagaattaaggctccaaaaacatggcttgaacaaatctataaaacttgaactcaaaagggcagaacattatctctacataaactcattcatgaatatgaccactaaatgaatagatcttactaagtacataaacaaacatatatctattcaaaaaccactaaacacattaacaaatcacagatcttaaatcccatttcactaaaaacaaggtaaaaccagcgacttaataaactaacaagtaatcaaatcacaataaaagaaacaaactttctcccattaacattaaaaatactactaattatcaaagttaaggaagcaaaagcaataatctttaacaaaagaaaataaagataattacttcctcttcttcctccaggccttcttcttgcctccagtggcacgccttttgtgcatagaatcacgagaaatacctaatcaaaaaacatcaacagtacaaaaacccttaaagccaccattatagaataacagaaagaatacgaataagacgatgatgaagaagatgattatgattatgaatcgaaggattacccatggctgcagacggagcttgttcctgttgagcttcttcttcttcttctgctccgcttcggctaaaaccttaacgccactcctcacactcttcttaaaagatgaaaccctagcctataaaccaatcgaaattgggctaactgggccctttgttgggccttctcattggcccagtctaatacccatcgaaattgctttacagtaataccatttatttaaaaaaaacatgtgtacgataacaaataacttcaaattgattagtgaatgatatgtaatatgaattatttcataaatacccgtagacaactaaaaatttacgtttttacggaatcttgagttttttttttaccttggactttttgaaatttttaatttgttttaatttttatctctattttcatatatttttagatataccaacttttatggatgatgtctccattagaccccttaggttatgtaaattataggctagacttaagtagagagtgatggtatattaggtaatccactcaaaaaagtgggtatattttaataaaaaaataat

SEQ ID NO: 302493 - DNA, 1300 bp, Cannabis indica
gggcacaaaacccaacaattaggacttgaagggtatgtggcatatgtgtgattcatggaaaaagtaccaatgtcaggagtgaaaacatcattcaaatgagccactgaattgctacagatatcagattttgtgccttgagatagatcagtagaaatagcagtaatgacttgaggcttgtggtttaattcgacagaaggagagaaagtttgaatggtgataaaaggtgatgcaggaagttaaatacccttgtgttggttagaagactctcgagtagtggtctcgggtgagaagggggccgagtgcataattgtgggatagttgcagtcaatgtggatcaggcaagtcaagtcaagaggggccaagcattccctttggagaaatccgttctatactgatcataacgagaagtaggcaagggtgcacccttaaggctcgatctataagccaattcaaattcaattccaatgtccgtattttcaagatggacaaaatatttgttgaaaatatgtccaatttgtccacactccatacaataattcgaaaggcgttcataacggaactccacccaaaattcatctttgattttgggaagagtgatcatttttcctctaagtattggcttagtgatatccatacgaactcgaaagcgaaggaaaggtccccaaccttcaaaacaagaatcttgaaaaacttcaagaaattcaccaataagatttcctaaggccttagcaagagattgagtcttactaaggaaagggagtcggtaagcctgaatccaaaaaggagaaaagatcatttgttgtggagtaactgtatttaatgttgatggagcaaacagaacaatatggtggccttgaaagtgccacggttccttctctaaagcctttatcttgtctcctatgcatccaaatgtgatcaagaagaaatcagagtgatgttccgaaattacagccttcaatcttccgtcctagtgttgtgccatctgtttttgcaaagttgtcagccagaccttcttggcagagaggattcgaacaaccagaacgaagtctagtctttcattcaaatcaggtgcaccttcatcagtaatggcaacaaccgatctgtcatcatcagtttaagaaacagtggatttcattctgtcaatgaatggatccatgttgaagaaaacaagaggaaaaaacaaagaaaaatcgaacaaaactggtaaaaacaggcaaaaaagcaaggagggaaagtatagaatcaaaattttaaaaaaataactaccaaaacaaacaaactgccgcagagcacaaatgtg

SEQ ID NO: 302494 - DNA, 1983 bp, Cannabis indica
caatggatggaatggagtcattttggaatcggattgtttaagggttatttctgaaattcaacgtaataaaaatatggtctctccgtatggccatataatttcagagtgtaaggctttatgtgccgagattgataacatctctcttagttttgtgaagcgatctgctaatagggtagcgcattgtttggcgcgatcctctcttcttgaggttgatcgtacgtttaatagttttactttaccttttgtaatttattctttgattttggatgatttaaagtaatgaagtttacatttttattcaaaaaaaaattataataaatattaagtttacataaaattttatatcataataattattacgattataaatttaatacaataaaaatatataatttaatacataaaaaattaaaaaaaatattatcttgtgttatatattatccgtgttttcatattaatgatatgtgcatttttcaaagcccaatatttgtcaaagcatgcccattccgaaatcaaatcaagtcaatgagtcacctatggagtcaagcaacgactacaaatctgaaggtaaaccaaacttacagacatgacaaggccagaccactttggtcctataaaagctactttgttcagaaggcgaagggcacattcaggtgtattcagataccctcatggggtaatccagatacgggcaattgatgagacagaagcctcaggagatcatcctaaggggcgctctccagacacggagttccaccatgtcaggggattgtcccctacgtcaggcctagggagtgcgtgaaccaccataaggcaaccacttttttgtacaacaccatgttctataacattctcagtacccacatagtagcttgcaacacgtggcaacataatcgttcccgagccgtacagatgacaattatctcatgattaggcctcacctaattggcctaaaagtcaatgtatattgtattttaccccatcagtgggcctagttaacacctctaaataataccgagtttgggttcactcatacccggatctatcctattaatagaacatgatcccttcatgcagggggattggggggggggggcagtgaagaaattaattttctgcttttaagagctaaaaataaagattttcaactagggaaaaatacttgtgtaaacatatctataagcttttctagctcaataataatgactcttggactaaggttcattaacgcctaaatctcgtaaaatcttagctttattcttctttaaattatttctttattaagcttaatcggtttctaaaaatctaggtaaatatatttagattggtgttagggtaaagtctgaggtcaactccgcagtctgtgcagtttggattggtgttagggtctggggttgagcttagggttaggatccagggttaggggtcgaggttcggagccagggtctagggctgggagccagttcttgggtctggtttgaggggggttagggatctaggtcaggggttaggattcgggtttgggtcaagggttgggggttggggtttggagtcagggtagggtctaggtcaaagatctaaggatggggtcggggcaattcttatacaggatcgcaattaattcacatatttttaatattttataatcaaacatattaagaatattctataacgtgtttttaatgaatattgctattaacaaagattagtaattatactaggtatgcagcagattacatgaatcattctatcaattactgtagcctttgatcctagttgctgcaaagtaataaccagtgactgacctcgatattgaactcagaaatcaattcaaaaaatactaaagtcttccacaaaggtaattttttccaaatcaaatgtgggttttataatagctaaacaaaattatatatatatatatatacatatatatatatgggtatgctcttaatgggtattacccatgtatgggtattttattct

SEQ ID NO: 302495 - DNA, 1150 bp, Cannabis indica
atccaataataattggattggattggatgggtccaaatccattggatgtaatccaatgaacactcctagttctctctcaccatgactaatcttatttctcacataccataattgccaagaaatgattaaaaacatatcaaaatcttcattattgcgtcaacttcgaagttgagagatgaaagacaatgggtctgactctttacaactcttgattttcgaccaacaagtagttttcttccaaaattttacattagacaggcaactccaaatggcgtgcatcacatcgtcaaccgcaccactattgcatctaaaaaatctaccatcctcaacaacttttctgcaaaacaaagcagcattagttggtagtcacaagtggcaaagtttccaaaaaaaagtgatttaactttctctcatattttaaattgacatccaaagtgcttcgatttacattgtatctgaactctcagttactttgatttggttcatggcactcgaaacttgctttgcacgctatactctctattcttagagaagttccagatcaatgtattgtgtacaagggagttttactgcggagactagaaataaactttgggtcttctttgctgaacactgtttttgagaaatcttcattgcattgactattggcaagtttaaggtcaataaccttcaacccctgggctaggtgtgatttaatcacatatcttgaaagttttcagccttgggatccaaggatcactaagcacatcaacatcattaccattcccgattatctatctagtacctttgcgaagaatttctttacctcatattctccaaaaaaatagagctctctgaaccacacttggaattcaaaattgacttgttggggaaataagaagcctttagaatttcagcacagagagagagtctgggttctttaagaagcgctaatattgttttgctaacatggctagattaaaaaaatacagatctcaaaatcccaactaacccttctccttggatttgcaaagcacatcccgtttacaccaatagattttacgttttactctgtaaatcccacgataattatgaagctcattttgtgcattagattgattttttttttttgtagaaagtttcactgttattataatcaaccatcgtttac

SEQ ID NO: 302496 - DNA, 3357 bp, Cannabis indica
taataaaaaatattaaaaatggcataatggtaaatataaaagtataatatttattatgattcaaattttgcatcatgctatattgtgatgcaaatttggatcacttttgattatgtgagatttttgcatcataatttagcacaccatagacttttaacaaagtgaattatattttgcatttgcattacgtatttatatctccattggagatgctcttactcattttttcgtattcttttttactccaatctatatcatcaaacattttcattcccattagagatgttttagtgacaaaaaagaaaagagatatggataaacatcataaaatataattagatatttttgagatatttcgtaacgatagaatcaataatatgctgcttagttaacttattcagtagttttgaaaaatctatacagtggaatgagaggctgagtagagtcccttcttgtattatttttcattgatataatgatactttggggactataaataggttctacttcttctatggcctctcttcataaaagggatttgtttcttggctaaatcttgtacatatttcacttctaaaagtgatgagaatgttttggccttcccttcataatacctcgaaagcccttgtctgcaatccaataaaaaaaatgtaaattaaaatatattgctcttaattggaaatatcttttgtggtaattgagcctgtaaaaaataaaacaaaaattctcactttgtagtaacttgggatttcgttgttgggtgagaaaattcatgtagtacataagtttttggagataaatttgataaggcatcatcatcatcattatcatcaagtaagtcagatgaggatactgatccaatagagctagctgattcatcagagctgaaatgtatggttttaaactgagaattggcacagaaatcttcattgagattccaatagtaaaaatcatcagctacattggcatcttcaattgcattttcacttgttttttgcacattctgagccattttacagtactcaataactattgaaaggaaaaaaaaaatgaagtaacttggtacttctttttctttctaagtttcctttatctgaatgtatttttatatacatatctgattcaaagagagattaaagtgtcttattttaatgttttccttagttgagtatcttattcattttcattactttgagatagttgtatccaatgatcaaaggcttggaataaacaaagatgcccagagaaagaaagttggacagtttggcagaatttatgcaaaggttaaagtttatgaaaacattgcaagggttctagtcgaggtactatgtgcaatgtaattaacatcgtcatattttgacttattgtaaaacattaaccacaatataaaaatatattccaaactttttcaattttcttataaactttaagattatggttactaataacagatgaaatattaaattaataatcttgatttcatcttaacttatttcgtctataaatgaattaaaaattgaaaaggctaattgtttgcatacacttttaacttcagatagattttgttcaggaactactcataaggaaatcaaacacaaataagaccagaaaagccataccctctgctgaaatgcacaagccaaaaagcattgtgttaaaattgattacatacagttacattaagaaaaacaaatggtgaaagggtactttaatacataaaacagagggaggtttggatggggataagtgctgccagcctcaagttctacgacgaagaactgtgctgtatgcaaattattcaaactgacagacttgagacagagtttccccatatcagtcttggtttcttaaggcttgttcgaactgagcatttcttcttgcacactctaagatggttttatcagcagtgatgaagtatgaagcaattgatgctgtcaacaataaattgacacaacatgagaaatcaaccacaatgaagaactcttggaacaagatgcaaatgttaaaatttaatgttattccagtatcttaggtttactaagtattaagtgatgggcatacataccagcagaaataattagcgcctgagctgtatagttgaggtttgcctttgcccaaggaactttccgaacagcgatcaactaagaacatgaaccaacacaaatcatcagatccattcgaaatatagtagaccaagtatgaatgaagatgacagtcacccaaataatttgagattatgaaggtctgcattaacttttcttttttaaaaaataggatgctctactagatactttttcaggaatgtttaactggttaatgcctacactcatggctgaaagatccaaaggtgaaggacaactaatgactcttgattctgatatggaaactacaatcattgaatcaaattagatgtgaaagccatgacatctcagttcatttatctctattaagttgcttagtaaagtatctactactttcgtcataggcctcttttgcctgttcatcatttcttcagagaagcacagtaagggtctttactggagagtgggctgtacacaaaattaaaaatgaaggcaaagaactagacaaagtcgtaaaaggtaacagtgcctgtaagaactaatgaacaaaagagagagatgttagtaaaacctctcagaaggtttgttaaaagttaaccccttaacagagagagctctttatttatagaccaatccttacaaggagtaattagacagagctaaacaagattgggaaagctgttgaaagaaaacaagaaaaataccagaacaaacctagctaaataagctaatgctatcagtgccaaaagaaggaaattctattccagggaattctaatactttgtcacaagaaaagtaagcaaaccctctcaagatatcacatcttctcttcaaatgggataagaatttagaaaagttgggagaagggttcccaaaaataagcagcagaatggaccaaatactgtaacgaaattccttctaccccattcctagttaaactaatatcaaacaaaggaaatggaatgaaaatcgcaataaagatccacttgagaaaaaactaaaacatacagtgggaacggcagtagcaacacacgcaatggaagctgccttgaatccagcacgcacaccttctgcaaaatcatgtaaccaataataaacaagagatgatggcattcttatcatatttcataccaacaatttcggtttgggtctcagattggttggttggttgctaagaaaatgccaataaaatgggcatacgaggcaacagattggagagataaaataaagtcaattgggtatttcagaaattgcatttaaaaagagatttttaagt

SEQ ID NO: 302497 - DNA, 2140 bp, Cannabis indica
tagacaagaagagttgactgtggggaacagaacagataattggacaagaaccataaacaaaaattaaatagatgaaagaaatgtataataaagaataagctaacaaattattttcagttgtattggtgcaaattcagaacatctgacacagcattcacgggttactatagctgaaaaatcagatgttcatgcacataagaaagtagaatattgttacatgatttctaaatgaaatgattatcatgaatctaaatcagtatatttaaatcatctcacttcatatcttcaacttcagcttattttcaagacacaaattattcaagagtacccatccatcgtaataatcgctcaaagatcgggcatgcctactcctcttttcgcgtcgtaagtcttctccaacaccacatctattggagtatccttaggaccagctgcaacccaagttcagaggattgtcagagcaccaatgagtgtaaatttagtagaatggtatttaaaagtgaaatgaaaggaaagaaatatgtcgaatccaagattttgcttgagaaatcttcatcattggtttcaccttagaaaccaaaaaaacaaaagtgtatccaaacaaacaagtttactaggaaagttattggttcaaactcaacttaacaaaaccggcttgttatgggaggattgccctcagcttattaagtggatcgagtatatatcaccagctaatataatatgggactttaataaagttcatattgaattggtaaactatttggatcaaatagcattttacaagaaatatgttcaagttagtttttgattacaagcaacaacagtttgattaccaacacggttggccctgaggtgaggcgagcaaggcatgcgccttggggacctgaacgcttagggccccaaaattgtaaaaagaaattatcagtataagaggtcaaggattaattcccaacatctattttttatttcttttttgagaaatatttaatgtgtagttattgagaattgaaccttgcaacttttaagagttttaaaatgtgtaccaccacaccaaagtactagaagtagaaatattgtttagataataattttgtcttagcctaatataccttaggaacgaccctgattaccaagctcatagttaatctttcaaagcctaaattcatactattaacaaatgtcgccgaaaatatcttttttcgggtaacttggtttcgaattaattgtctaagtaagagaggcaacaagtccaagcctcatgtttagtgaatagtgttaaatgatgcacaagctactacttttatgttgtatatgttcatatggttttagtacgtaccgactgtaggtctcggagtagttcttatcttcaagatctcaggccgaggaattattgatccagatgatccgatccctctggatactcttactttagtgccatcttcaagatacttagtcccaatcttacaaggtttcctgcagaaaaaaattgtaaatattcattctggatatctgaactgtaaaaaccaggaccaagcaccacaacatatgagattaaaatttatactcttgtaggctatacccggtaactggatcaagaacttgaacatttgagacatgaagaggggcttcaactgtaaagatcccaccttcatgaccctgaccttgcttgatatgtttcttaacctgtaaagatgaaaatacaagcttgtcacaaccataattttgaaaaacaatgtagaggttgatgaaacgaacatcgttactaaagggctcgagtcaaaataatatttagttcattctcgcaaggatcttaggaagaaactatggacacctataggatatgaacatcccaagactcaatttgtcttgaattacttggtgcttttatttaaggtgcacaacagaatttccacaagaaagtagtctactttgagaacataaaatatgatgtaagcaaagagataaacaatgtagagaacccaaagaaatgcaagatatcaccaaagaagaagggtaactcaaatgatcagtcatgtagtttgctttcttaaggtcttccaataactaaaaagcgtattaaaagaatccttaggaaaaaaattgtctaccgaactaaaaatttgtcgatgtctctagtaaa

SEQ ID NO: 302498 - DNA, 1375 bp, Cannabis indica
tggtctgtagggtcagtcatcgatccaggaagcagccagagtgacgtactcgtgtataagagccattcattccgtgggtgtaagggcccaatggaagcttgaagcggggacgttacacaatctatctatatattataaggtaaggatacagtagactctttaaataagtgttttgatagattctttatctgtttcaatatctatgagagttttttagtttttggttattttttttttattattacataagttgtaactatttagaacaatttataaattttcaaaaatttttgagtagtttgcaatgttgaaaataaaatttacatattttattgcacgtgcaactatttttcttacatgcgcgatagacaattgtttaaatcttatttttgttacggtaaactatttagaattttaaaatttataagtgattttaaaaaaaaaaaaaactaaattattttactaaatgttaaaacaaataaaaaatttaccaaaataatcttttacgggtctacagacatttccaatattaatatattatttaatgtataggccgtttggtgtggggtatatatcaacatggagtgtattatacatatttatatcatcattaaaaggtatttttaatgttatttattgtatttaatttatggaattttattattattattttttttttgtgattttttaaataataaatatattttaatactaataaaggtgtatttatatgggcaagatttcaaaagcgcacgtcttttatgatagtggtcaataattatttttcaacacatgaatagactattgcataattaataatttatatgaaaacttaaaattgaaggagcaaaaaataggatttaaaatagctttaattaaaagagtctataaaataagtcaatatgaatttaactataggagtggaataaccaggacaccacacctaaaagaaaactatagatgttaaagaaaattttatataaaaaatcttttaattgccttttagaaaaataaaagtcaaacatatgtaattttttattagatataattatttgaatccatattatttgttcttattttgtatttaagagaataaaaattaaaatcttcttttttaaaatatgaaccatttttctgtattattttaataaattatgggtgtagctagaaataatattataaagaaaaaaaaataagggtgaaaaaatattggagaatcactaccccatatattatttttcaactttttgtttcttttttcaaatttaaagtttgagttgttccgattgtttctatgtggaaagtatacggatttttgtggcaatttaaattccttcgttagttcgtatatgagtttctatgtagaattctgtaa

SEQ ID NO: 302499 - DNA, 841 bp, Cannabis indica
attattattattttgagaaaaatggaaatttttattaatagagacaagacaatccaacaagagtctattatatgatatgaactcaaattaaaatgacagaatgaacaaagtagcaaatcatgccacatattacttttcttcttaaacttttgaaattctttccaagtcactaattacaacgtgtataataaatggatacattttttttttatttattttattttaaggcttgactttttacaatgactcaatcaactctgacattatctcaaaaatagaaaaaaaaaaaaatcaacgtataagactttagagtactactatatagacttaggtcaagtgttttgatcttatacgcaagtgtttttgactgatgaatctataagaaatttgaaggagaagaaaagtaaaataaaataaaataaacctttgatttgcttttaattaagtgtttttataattaaagcaaataagtgaaacgtttatataaatacaaataaatgatctattgataatttaatgaaaaatatatatcaatggatatctttgacgtgtttagtttttcataaaatagttaattcaacttaatttcaaggattcattaatctaatacaattcgcataaaaaatattaatcaacatgtaaaagtaaacaattattcaatccaatttaattcatatatttatatatattttaaaaaaattatacatataactaatattttaatattaaaaaataataatttaaaaatcaaatacatattatataaatacattttaaaacttaataatagatcaaatatatattccattctaatatatgattgaggttttttttttttttt

SEQ ID NO: 302500 - DNA, 3164 bp, Cannabis indica
atttaaatattatttattttctgggatattacagtagggtttcaccctaggaagctgaccaattcatgcttgggctagggggaccctagcaggttctaggctaggtcatgggtccctggttggccctctcaaagcttgggtacgttggctggcttaggccttggttccaagcacgcgtctagttttttgtccacttttgactgttacacgaaactcattatggccttgtagccatgtgcaactttagtctcatatgaggttcccttagaaacactgtatgaaacgtaatggtgagtctattgtagtcgaatactcaacataaacatttgtccaagttgttacactagagattgtactttgttgatacccagccttgtacgattgccaggactttatctatatcttgtcactttttcaagttgctgacttcacttgaattttgtgtgtagatgattccgagtgtcaattttgggaggtgataactatgtcgacgaagatttagttggtcttccattggaggactagtgtgtagttccttgcactagcaactcctcaagcaatctcaaggttagttgtggtttataatgtcgagagtcatgcaaacatgtcgcagagctttgacctgtgacgcttatgttgctaggctggcaaccagaggcagagatggtatagttgagaaggctgcacaacctctggatggcatagagccaaggtttggcaagttttaggtgcatgtggcaaaatttgtgactcattgttgttctgagagctcggatagtgatttcaagatcgaggaggttgtgcctgtcaggaaaagactatacaaaacatgctctattttcctcaataggcctctaggttagtatggtgaagctaagaacccttgaatagccttggttaacttttcgaggttggagttgatcatgttccaggggaggtcgtagagcctaaaagttctataccatggagagcagctggaccgatggatctctccttcatcctctattagcacccagaaacttgagaagatcaaggaatgtggactggtgggagatgttgggtgtgacccccctttgagagaccaacaagccatcggttggccttcaactggatggcatggttcgaatgccatataaaggggggagcagtgttgaccctacatccttagtttagagatattgccatatacttcagagtgtgcctgacttatttcaccgtaaaaggtgtaaagtatattttagtgtttttcattctctatgctgacttaggctagcctcaaccctccccctatgagatagggtactttttcaagctaaaatctattccaaagtagaactcgacatgatacttttactttagccagataggctatcagtggttgggcgacaccaatagcacgaccttatcaaaagtgagaggacatgccaggaattattctagtgccaacctacacacgctccactccccaccctccactatataggaggaataaaattgaggttggcttgtacggaaaacttcgtggaggtatgatctataacctcctgtgtttggcattaggaaagctgagggcccgtgtagaggcccaaaaaaatccccagaggctgaggagacttgcccagaaggtgggcatactcctaacatggaagacaatatccctctctcaaagattacaaagaacatggagagaagggagaaggccctctaccaacgcttggcttgctgaggcactgttggtgatgtcactctactgattaggcctgtaggctagggttcttcctacatccggaggtaagggcaaggctgcagctagcagttcagattactcctcctccaaggatgatggtagttaatagtttatagtaccatctgtttttgttttttttagtattgaatacttgtaacttgtattctaactttgttacttttttctgaagatatagcttccaagctgagagatgttgctcaagagccatctagcagagcttcaggtcatctcagggccaaggtggcccagaccactcggtctaataatgatgtagggtcctcattacctccccctcctctggcgcatgcaacagctggtaagctaatgatgttgatcctccactaaggaaaaccccaccaccatactagccttaaggcaaagggcgcccagagccttctcgtagctgcattggcaagattctacccattgttgatagggatctctaggagcttaagaatgaagagttggagaagttgtcatctagcggtttctagaacatgactatgggaagttacatatcttgattttactaaaattgtggcactgtcaaaggctggccaaccaggtatggaactttgcaaatatggtcagcaaaggctgtagtattgggaagctggccggccaggaaagcatcacataggggctggctgggcagctcttcctctggcactaactaagtttttcttttgatttcaggcactgttaaagttcatcctctcccatggtaggaacaaggggactccagacactctttgggagaagcttaaagcccaagcatctgagcttctggcggagagggatgcccttagaaaggtacaagctcgtatcgaacagaagtaggatttcatcaatagtttggagcactttcttggtatcagaaacaaagaaaacaccacccttcctgctgaggcctctaggtaggaggtggaactcgagaagaaggacgaagcattgaaacttacccttaatggtcagcaagcaattaagaatgagtatgttggcttatccttggaggtcttttacaaggtttttctgtgtaaccccaaggttgccctgtcttacgtgggatcttctttcctttagagaacacttgctcaagggagagaactgtatcagaccaggttggtgagatcgtcatctaacttgaggattcatcgtcaggccatctcgatgatgctatagctagccagcctatggaggaggtggtcagcaaagctactgatcatgtgtttgttggaaattattttaccaggatcttagatctactcacaagtatgatgattaacaccctagatatgaacttctaaaacgattataaattacacacatataaagtatgagaaaccttcattgggtgcagcggaataatatgtctccttccgttcagatctctaac

SEQ ID NO: 302501 - DNA, 2920 bp, Cannabis indica
ataactaatcagattgtaaagggttttatttagggcacaaaacccaacacaaacaccgagaacctaacgtgcatttggcaaaaaggacccaaacactcgatcctctccctcctcattcctctttctctctctccaacacccgacccaaatagatccgcccaagtagaacttctggcaacccaaacggactcgaacccaactttcggtagagctccctgcgacccgaacaacgaccatcttgtacactcgtcctctccaatgttagagagactctgtccataggtccaatcgccttcgctatagctaccactgagaacccaaaaggtaccttttttttaaaaaagatttagatttttttgagtattaattttcattcttttgattacttgtgatttagttgtggatttgtcattgttcttgtgagattggtcaatttttttttggattatgttgattatgtggcttgtttctggtgtgctgtaaattttacattgttattgataggttaacgataggttaatgatagatttcataggattgttgataatattaccttaatttaatttcttaaaaaatttatgtttatcgataggttatcgatacaatatttatgatttatcagtggtttctagtttgccataaattcatttgttaatttggctttttatcgatactctatcgattgtttatgcttttgctaaattattttatacatttggttttttattgataggttatcaacacaatatcaattgtttatcgatagtttctaatttgatatttatcgataatgtatcgatattttgttgatattttatcgataatatctattttgtcttgattattttgtcaatttggtatttaccaataggttatcaatattatatctattgtttatcgatggttattggtttgtctcacttattttgagatacattgtatttatcggtatggtatcaataatttttcgatatgttattgatggagtctgatttgtttcaattttttttgtcaattcagtatttatcgatagagtatgaatacttcatcgaattttttgtcttgccttttccatttgattgtttgtttagttgttaattggatatcgatgttttattgatagattatcaatagtttttttaatcgtagttgatgatctgtttaattatcgatagtttatcaataatttttttttgttttaaccaatttttttttattatttgtagatgcctccaaagcttaaagttatattctttaactattttacaggtcgtgtgacatatagagacttcaatgtatttaataagattattacatcatcttcaggtgtcgaccgtgctgactaccaagatttggtggagaggttggataggattgaatctaaatagaagggtctttacacttctcaggcacagtggaaggaggcatatgagattagccacctagaattgaaggctggccagaacattatgatggagcagcttagatctattttgagtatattgtagaagaagctggcaacggatccaacaccatatccagcagcagaggcacgagatgcatcacctcccatggaagaagatgttgacatgtacccagacgattatgatctttatgtcgatgatgaaccatgtacccccatagatgccactattattgccataagtgacaatcaatcacaaggtgatagccagttaccgggtgaaggtggccagtcacagggtgaagtattggccttagaaggaccaccagtggggattcagtttgacaggaggaagagaaacaagcctacttggtttaaggactatactaagatgaagaaaaaaacttaagccttcttctcgccgtttaatctcctcagttcatcatatgagaggttgttaaatagttttcgtagttggttgtgtggggccatccccaaccatcttcttcagtatgtcaagactagtgattacagtcctacttggcttataattatattattaaaacgacagaattagattcaagattgtgtaagttaacttatattattttaaactgttacatattttttgttaatttaatttactattctaacagctcatttgtatcattatatgtagcatgtagatgtgtgcgcctatatgcttaagaggcgatgccactttttctggacacatttccctagagaggtatcattctgtctacacatgtggctggtattatacacagtgtttagaatgcacacaagagtctgagggccaaatttagatggggtgatgatatctttcaatactgtagaggtgtacaagtacatttttttttatataaaattaaagattcttaagagcattgaacaattgtcttttgattacttgttattttgtcgatagtttatcaaatgtttctattcatgttttgttttcacaggaggagttctatctaaaatgggtagaaaatgatttcctgtgcttcgtttgaatctacaagaagccaaacattggatggcggttgaggtcaacatcgagttgtggaaaataatagtgtatgactgtgattccacaatttttactaaaaaggacttggacaccatcttaaggacatgggaagagttgttgccttctttactgcatgcatctggtatagttctcgattaataaccaaacactggaagtagatatgaacgagtgtagctagcttccaaaaatgcattacaacagaactagtcacggacttgtcccgaaagtgaaaagaaggtaaatatcttaatgtagtactaaattaattataatcttatttattttgtacttatattactcatattttattttgatgtagtcatattacgagcactgctattaggtaccagtagcaccttctcgacatgtcgcgttgtgattggctagtgatactccctaaaagatattatattaaattatat

SEQ ID NO: 302502 - DNA, 2464 bp, Cannabis indica
gtttaattatttttattttgcgtaaaaataagtatattttgttgtgaattagttgtggaacaagatttaagatgagggtcatgctttttttgtgtgtatgtaatggaggaggggcgtgcttttttttttgtattattagtataaatgatctagttgggatttgaacgcttgtcctctattatatgtgtataagatagcttaaccattatataattactagcatagcttaaccattatataattactagcactaaattaataaacacatttaattaaaaatatatgttgcaactgaaaaatatatattttttctagatttatttttagggaggacaaatgtcccctcttgccccttcataggtctgcccatggttgtgatatcgaatttcaatttaatatgtgttatttatgattttttataacgacattcataccttgcccaaaatagacgtttttctttctttctttctttctttacgagctcttacttatagaagaggatcttgtgcttggacaagaagagcttgtggtcatgcatgaggagctcaagtttacacataaagaacttgtggtcgtgcatgtacagcttttgctctcacataaggatcacattaagatgaagttcacacattgggaactcattgatacaaagcttgcaccttgggagctcgacggaacaacactcacaatttaaaagcttgtgctcatacaggaggaggtcgtgcttaggtaggaactagaccactatttgcaccaattcaactcaatgtgaagtctactcatgaggcactttaggaatgacttgttcgtattctgacctctaaaagttatttggcttatttcaagtggtttttcctagattcatgtatggaacaaagctaagtttcttccacattgcaaggaggcacatttacaaatttttcatctgtttgcagttgggaatcttgaaaattatatttttaaatattttgtcaattttcctgaaggattcttccaatttaggattcttaccatgagtaacaaggcaatgagagaatgataggcttgttaagcctaacatcaaatttacttacactaggagaggtgtgagacacatggaacaagggaaggcttagtcatttgagaggtgtgatagctatggatttgtttgagggtattttcgttactgtgtaggccttttagtgccttgagcgagctattatttatcatgcaagaattgagattattatttgtatcatggagagtcttctctccctctctctcattttgtatgagaccttggtcttctttcatttattcaatatagcttctcgaaatcaatcttcaaatttctactattctattaattttcccttctgctgcttattttttttcttgataaaaactctgttgctattattgactactggtttaggagcttatcatttggtatcagagcttgtcgttcttcatgaattttggtgactacatgaatggaatcaagattttataaaaagaaagtcaggttagtgaccatggagcattactaaagactcatgggatggagcttcccatgagaaaaattctaaaaaaatttgttattgccaatagtagattcattgatgaactggcctctctccaagaaggattgaacaaaatccatggctttggtcgacatcttcaaggagtagggaccactgcaattggaggatctcgttttaatggtaggatcattggagttggtttcagtggtaggaacattggagctagtttgaatgagagaaacattaaggcaggaaagcatcgaataaagtttcaagcccagaaaattgaattacatgtgtttactagcgatgacccaaatgaatgtacatatcaagctaagcgatacttaggattacaacggctatcttcaatgaagcaattagaggaggtcgttttgtgcctggaaggggggctttaaactggtttcattgggaaaactagaggtaagttattagttaatgggaggaagtaaaatcgctttattccagggatttcatcccaagggaaatggcacaatgtacaactgatattttttctctgtcaaatgaaattggtgcaagagtacacaagtagattcaaatctctagctgcgactgctggaacgatgggagaccaggcacttcaagtagtattttttaaagggttgaagaccaaaatccaagcccctttaagaattctggagcccaaagggctgttgcacatgatggagcttgctaaataaattgaagaaaataaggccctaataagattttatagaagtgggtcgactgggccttttagttcaggcccatgacctccattgtctaatattcttctacctgagcccagcaagggaacttttgtgaacttcctgacttcttcatcatatttgactccacactgacttcttcatcgttcttcattcttcagtttatgttttaaaacatataatatatatata

SEQ ID NO: 302503 - DNA, 2975 bp, Cannabis indica
atacttgcgtatataattttcacaacagatttcgatatggaggacaactctttggccaatatcaagtagcaccaaaactagtacctcaaagcttatagcaaacacttcatggaggaaacatcaaagacaaaattcagtgatcaacaaaacctagtggccctacagatagagtcagatccctatttcagaatgaagtgcaaaggaaaggaagagagcttagtcactctctgactttttggcaagggcccaaggatttataaaagtttaggaagtttatgtctaagcttttggggtagttcttataccctccaccaatgtaaatgcagcaagattcaaggtccaattcccaactacctcatatcttgctccaactattgtgcctcccaaattgcaatatatctcaccaacagtctatggaccagctacctcaaggtaagctcctttcacatactactttttcggggtatggggagacataaatggaatgcattgtcgctaccagagctatccaactacaatagcaagcaaaggtttaagagtcatgaataagccactcccaaggaaaaagaaacaagaaaccctaaagtcaaagtgaatcttcaaaaaatgagaagaggggacatgaatcccattatattgagtacaatatctttgtggataccataaagaacatctatcgagccacttgcaacccctctattattgaaaacctcctgtgatgttcaaaggaggacaacagagatccaagcaagtagtgtaagtatcacaatgacataggccacaccacaaatgaatgcaattagctgaaggatgagatggagaacttgatcaagttgggccatctccaccaatggataagggtatcaatcgtgtatctgggaaatctaatagtataaggaaataaggttgttcttggacaacaagggtcttctaggctcccttaaggagtggtctactattagtccctgggaacacaagtccttcaagtgtcaccaactattcagcaacccagaaccacccaagctcttagaccaggaaaccattattcgtcagggattactttgccaccagtagatgaccatgttgcaacaatatttggaggtccacgtatcataaggagtaccaacaatgcccaaaaataatacctcagtgagctagacatgaaggagaagtttgtgccaagtgtaagcacctacgcaaagacctcatatgattgacttacccatcactttcaatgagaaatattatcatggagtacacctcctacatcctgatttgctggtgattaaagcctaaatttccaatagaagggtgtcacagatcctggtagagaatgggagtttagtcaaaatctttgttcaaagctacgcattttaggccatcggtttggttgaagccagtctcgctccatgtgttatccagttgaaagggttcaatgggaatgctttgatgccactaggaaagattcaacttccaaactctaagtaggggtgtagccagaagcccattctccaagttcaaatacaacacatttgtggtagtggactactccactgtatacaacataattatagtatgttccatcctagttaattttggcacagtcactttcattaaaaatttgtgcacgaagttcccatgtgacaattgcagcataagcatcgtgaaaggcaaccagaaaagtgcatgtaaatgctgaaacatatccactaggccaatcttctttgttcgtgaagaggccatggaagtggaagaaatagctcctgtgacacttgctcaaccggcattgggggtggtttgggaagaagatgaattagacctgcgagtggaggttgaggggaaaataaagccaatggaataatggtcacagcaaataatggaataaattctgtttttgacattatcgccctcatctctaagaacgttcttagttggcgttctttcttaataacctctggcagaactaattgccctttcatgtacaacaaataaatctccaatttcaaatcatatgctaacgggtcaacctccaactcttcatataaaatctcgcgcattttctgtaaggttgtgttagttttaaccatcaacgtcaaactacctttgctttcaacactccaaataccaacatacaaatataaccaaaaacacagtcgatcctataatttcataaagaatattagttaagaaataaccaaaaataaatatcaaaaacactcaagatcgataaaatatatattttggcaataaaacatcgacaaatatcgataaacaattgataaatatacaagtagaaagtaattaaaaaaatttgcaatatcatcgtgaaaatatcaaaaaacatttgttataccatcgataaaaatgttaacataataacaaaccacattcatagagcacaaatcaacaaagcatcgataaactatcgatgtactatcgataaaatatcatgatgttgagtgaatgacaaattttccaaaataatcaatatagcatcgatatattaccgacattccatcgataagaatgggataaactccaaggcgtagaaattatcaacaaaatatctcaaaattatcgatatattattgataattgtctttcctaaccttagcttgttgatcatcgataatatatcgatatataatcgagaagccattgataaattgtaaaaattctagggttcgttgaaaaatcaaatctcgcccttttaaataaaaaaaataacaaaataataccaatgcaaacaaacactacacagatttaatggtaatgaactacatactattctcaatgtttaaaaaattgtttgaaaaatacttacccattactggagttggggttaatgtactttttaccacggtcaatgtgcgtgattcgacaccttaatgctcttgtcacaatgggaccattgaccttgtgcaaataattgtagatagatagatatatatatatagaaaaagagagagagagag

SEQ ID NO: 302504 - DNA, 2285 bp, Cannabis indica
ggcataaaacccaacaggaggtacatgggtgaccttgcaaggagatcccactctttgtaagtctcccatctcattgaaggcaatggtgcatacggtcgagcaggtggggtgcagttttcgagtacattttgggtcactacattcgcaagccagtgagcaagagcagatggtgcctgaagaattgatggcgttattggaaaaatatgatacgatatttcatatgtcgtccgagttacctccgaagcgcgctgcagaacattgcatcaccttgaaggaaggagttgggccaatctccgtccgtccttatcattatgcccaaactcagaaggatgagatagaaaaatggtgagagatatgcttcagtccgacatttgtgtaccaagcaacaatcctttctcaagtcctgttttgttagttcgaaagaaggacgggagttggcggttttgtattgactaccaggccttaaatagagagatggtagccgacaaatttcctattttggtcattgatgagctcctggatgaactacaaggaacgaaggtgttctcaaagttagatctcaaatccaagtaccaccagatccgaatggcagcaaaagatgtgaagaagaccgcttttcgcacacacgaggccactgcgagttcttggtgatgcctttcagcctcactaacgcacctgccacttttcaggctctaatgaacaccattttttgagatctccttcgccacacggtgctatttttcttcgacgatatcttggtgtatagcccatcgatggaaacacatgtcaaccatttagaagaggttctaagacgccgataacaacatcaattatacgcaaactggaagaaatgcgtgtttggcactgacaccgtggagtatttggggcacatcgtctcagcccatggagtttcagctgacccgacaaaggtggcagccatgtcacaatggccaataccaaggactattaaagagctgcgatgatttttggggttaataggttattatcggaaatttgtgaggaattatggttctattgctcgccctttgacagaccagcttaagaaagatgctttcggatggacctcggaagcccaacaagcctttctccaacttaaggaggctatgtgttcagtgccggtactcgccttatccgaattttccagcccttttattgtggaaacagatgcttcaggtgttggattgggtgctgtcttcatgcaaaacaagcgccccattgcttatatcagcgaagctctatcgcctcgaacccaagtaaagtcagtctatgagcgagagttgatggctattgtgttggcctttcaaaaatggtgtccttatttgttgggtcaccgatttatagtctgcacggacctgcgaagccttaagtacctgctggagcagagattagtggcagaggaacaccagaaatggttaactaagttacttgggtatgactttgagattcaatatcgccttgggatcgagaacaaggcggctgatgcactttcacgggttctactgcccacttctctagctgccatttctgttccccaagttatttcgattctggattacaatcccaagtgcaaacggacccgatgttgtccaaagttctagctgaattgtccaagggacaagatgggggcggatatagcttggtccaaggggtcttacggttcaggggacggttagtattgccctccacctcacctttcattcctttaattttataagagtaccatggcagcccagctggggagcattcaggcatatttaagacctttcaaagagtggcgactgatctatattggccaggaatgcggaaagatgttcaaaaatttgtcgctgaatgtgccatatgtcaacaaaataagtatatggcacagtctccggctagtttattgaaccctcttcccataccggaataagtttgggatgatatctcaatggattttatggagggactgcccatgtctcatgggtttgattcaatcttggtggtggtggattgtttgacgaaatgtggccatttcatccctcttcgtcatccatacaccgcagcgacggttgctgaaatatttgtgcgtgatgtggtaaaactccatggttttcctcgttcaattgtgtctgatcgagataagatctcctaagtctcttttggaaggagttgttccgcttacaagggcgcaattgaaacagagcaccgcttaccacccctaatttgatggcaaaaactgaggtggtcaatcgctgtctcgagacctatctctggtgtttcgtggg

SEQ ID NO: 302505 - DNA, 1709 bp, Cannabis indica
ttttgtaagtaaataaaatattgtattgttaaattttaaatattatattaattatatgttctaataatgtttatttaaatagaatgaactgtgtaaggagcttgataggaaacgactcgaaagacaatttcagagggatacatttggtactgaatctgatagtagttattaattctacgtacttgaaaaagttcttggcaaagacctgacaatcaaagaggcatgggctataggatcaaaggcgaataaaaaaaaaatcatacaatcaaagtcagtcagttgcgcctcctcctccccttaataaaatatataacactgtggcaaatatatttacaattatacgtgagacattagggagtagtctgacacctgaataatgtgccaatatatataacccacgatttgataactttattcaaatgtacagtcaatcgcaatctcctagtagtttgtcttctcagagttatgcgactcctccacaatatcaacatcagccttctccgcagcagaaacactagtctggccgtccgcagcagggaaatcggttcgtatatggaacccctttgctgtcttctctgctcggctcaaattttactaattttaggatatttgggatttctttgcaagagcaacaatattttttgacccctatactcaaccaagcttagttaggggaacttacacttagtttatcgtcaaatcaactatatgttccttctccaccacaaccattggaaccttccaataataacaatacgaatcaagactttttcttcagagaccttaatgatgatattatggaataattagtttaaatttgttaaactataaatattatgttaattttatttatttagtttaatttgagacattataatagtaaagaatattattagtgttaaattataatatttagacttggttaaattataattcaattttaatttaatttattatttatatatttatatttattaatttatttttatttttaaatctttactattaccgactggcattagcggtgaggcccactgctattgatagttattagcggcgagctcaaaatccgccgctaagaactatcattagcgtccaattattagcgacgggttataatagcggattcccatcgctaataatcaatagcagcagattttggaattattagcggcggaaagaacaatgtactcatactcaaactctcttttgtgttggttgattcatttattcataacattgaacaaatttcgccaagtcaaaatatgttagaaaagtcttacattaataagtataaacttatgaatattatgtataattagtagcagactcaggatataattatagggtggactaaataaaatttatattgaaatataaaataatgtttttaaaatatatattatattttttatttgaatttcggataaagttattatatatattggaacaaattttggcatctgaataataatatgagattttataattcttgttttttgttttttggagaaattacattgtatacccattttactatacttgttttaatttttacctttattttcgtatttttaagatatacctacttttatagatgatgttcccatataccctttaggttaatataaattatgtactagacttaagtggaagatgaggatatattggacaacccacctacaaaagtaggtacattttaatgaaat

SEQ ID NO: 302506 - DNA, 8556 bp, Cannabis indica
tattatatttattaaatatatttactttttgaataaattgcccaacatacttgcactctctatttaaatctagcatataatttattttaacttaaatggtataataagtataagtatataaaaatggaatgtaaaaattaaagtaaagaagttatattgatttcctctttttaatttaagcacaaggacaaggaattttaatattgatttgatttggacgttaccatcggattatcgccacattaatttttgagtacgtactagtacaggactaattattgcatgcctagctaggagtcaaactatataagttttgttgaatatttatggatatccatttgttaatttatatacttcaattaatgtatttacgtatataggctatggcgtggtcaatgaaagagtcaacgaacaacatgttggaccagtggactatggtgaattcaaatattagcccatttgaaatagacgcagagcgagagctgacagccctaacaggagaaatcatatcaaaaataagctttggaataagctacgaaaatgggcagaaagtgtttgaaaaactaaaagccctacaagctgaacttttcaagtcaaatcgcttagtgggggttccatttagtgagttctttatgaaccgaaaacaaactcttaaagcccaaaagctcgggaaagaaattgaccaaattctcctatcaatcatagacactcgaagaaaatccataaaggaggaaaataattgccaaggagacttgttaggtttattgcttaaagcaaatgaagagaataatggtgatgagagtatggataaaatgttgacgattagggaattaatcgatgagtccaagacttttttctttggtggccatgatacaaccgcgttgtctttgacttggacgctattgcttttggctctcaatcaagattggcaaactcagttgagagaagaaattagagatgtgattggagatggagaagttaatttcacctccattgctggcctaaaaaaggtaactaattaatctaatataagtgattagtatatatttgttaaaattaagcatggattgataagtaactaattataattgtgcagatgggatgggtaatgaacgaggttatccgactatactcaccggcacctaatattcaaaggcaaactagagaagacataaaagtagaggaaaacatggtaatccccaaaggaacaaacatatggattgacattgtgggaatgaaccatgatccttgtctttggggaaatgatgtcaatgaatttaaacctcagaggttcgaaaacgacgtagtttatggtgggtgcaagcacaagatgggttttgtgccgtttggctttggtggaagaatgtgtgtgggtagaaacttgagcacactcgaatataggattatcttaaccttaatccttactaggttctcctttaccttgtcgccaaactaccgtcattctccttcaaccctacttactttgaggcctacctatggattgcctcttctaatgcaacccattagcgccacacatacataacatattgtaatttaattaatatttgatattacatattttaatttaaggagtaataaaaaaataacagctaattatatataatagcaatgtttggcacctaaaggtgcttaattataatatgcttatttctataattttaattttggttattaaaaaataactgatgacataagtgttcgataagtctacacatatagggtcctatatttttggtacatatttgatatatatgtcttattcgacccttttatctttgattgttttaaaatggaagacatacccgaaatttcattgagtgccaagctaaaagcaatgagatgagtctttaaattcttttatatattcggatttgaatgaatgctatacattcatagtagtggtattatcttaaatcaatatcctatgagtaagtcaggaatcaattcattaattaaaattagggaattaagaaaatagggaattcccttaaaaaaacgaaggaaaattccaacaataaaatatatatatatatataatacaaaatttataactaatttattactttatctttgattcattacatcgtctaataatattgtaattagggatgcatattacattgacaattatttaaaaagaataacaaataacgaataaagagatgcagataaaatagaataaagattacggttacattcaattgcaaagttaaaaaataataattatacaactaataagtaagtcttatatagacaactaacataaaagacgaaaataataaaaaagacttaataaccctaattaattattgaacaccctccctcaaattcacgatgttgttggaagaagtaacgagagtttacctaaaagaaaatcatatgcgacttagtaagaaagtaagcaagttgcatcaaagaagtaatattagaaggaaaagtaatagtgcccaacttcaaatgatgaccaataaaatgacaatcaatcttaatatgcttggtgcattcatgaaaacttgagttgtgagcaatttgaatgtcacattgattgccacaatacataggtgaagtaattatttcaaccaaacaatctctttagtagttgacgccatgacacaatacatagcttccgttgaggattcaaaaacaacaaattatttttcttgctcttccaagaaatcaggaaatctcctacaaagatacagaaaccaataaaattttttcggtttgtgagatcacaaccacgatcaacatcatagtaagcatgaaacttcagagaagagttggaaggtagtagtatcctctaaaagatggtacctagataccgtagaatgcgatgaacaacaacccagtggatagtagtagaagaagcaacaaaatgactaataatacgaacaatatatacaatgtttggacgagtagtagtgagataaaccaaactgcgaataatggtgtgatacaaagtaggatcttctaaaggagggccatcagaaggagaatattgaacattcaactcaaaaggatatgtcaattatagttctagtattagtaaggcgagcaccctcaataatgttagtaatgtactttgacatacaaagaaatcagaatacgacttgccgatgtgcacttaataaataaaactaaatcatgatcacttgagacaaaaccacgagacaaaataatagtagagaacttctgaaaccatgctcggggagcctgtttaagaccatacaaggcttttttcagcttgcaaacctctccatgcttatgatgaacattaggaggaggaaccatgtagacctcctcatgtaagtcactattcagaaatgcattctcaacatccatttgagatatagtccattggttattaaactgtggttggttacccttatgaggaggtttttactaatatctctattgttgtagagcatgatttacaagtttaggacattgagctttccaatgacctttctaatagttttgtggtactaaattagggacgcagtgaaagcatttataatgatcatcatcgtactaccctaaggatcaccatatatacatatattaaatctaaaaataaaagatgaagagatatatttccctcttgaagcgaaggatatcctcgaatctgttcgtaagttgtatcctataatggtgatgaaaaactcacaatgcgaccttccaaatctaccaccacatacaaatattagtgtgggataataggataaaactgtataatatgttcatgttttctctcaacacatgagcaggaacacttcttttctctttgagtgaaaaatggtgaaaagcttaacctttttcagatttcctaaattgtacgtatatataaatttaggatataccgacatattaattcaaactaataaaataataataaaaatttaattaaataagataattattattttaaatattaaaataataatatttaaatatttgaataaatatttataactgattctgttatagttttttattttgaattaaatattttagtttaaattaaatatctaataactgattgagaaaatctctcaattacttgaaaaattatctcattcattttgagagaatctctcgattactttgacagaatatctcacccaccgtaaatatatctgcaaccactttttaaaggaaaatttgactaatgatgcatacattaggccaaagaatctcttaattactttgagagaatatctcacccaccgtaaatatatctgtaacctctttttaaaggaaaattttgctaatgatgcatacattaaggccaaaaaaaaaaaatcaggccaaagttgatacatattggtagaatagatgtacattttgctctctctccaaaatactcctccatacactcccctcccactccaagttcatcctctttcccttcgctttttctcttacctcatcttctctctttctccctaaccaaatcaaactaaaattttgcataagtttacattttccctcttgaagctactataagtaaggtgcattagtagtgagatgttttacttgaagaagtaaaagactaattttgagaacaatcaatgggtaagtgatgttttttgattacttatgttgttggttcttatatttagtttagaatgttgttttgatgtttgatttgtggtttgttgctccgttttgctgttttttttatgtgaaaatagttgttgttcgagaattctgcatttttttctagcatcaaagtttttttcacctagtccgatggtgctcgataggggcccaatggtagttcgattggtttcttagatctaaggttacagatgatttctcaatggggtccgataggaggcctgatggtgtctgatggttgttcagttttaaggttagtgtggaggacccgattaggtccgatttgggtccaatatatgtctgatagtgtgtctgatgggtgttcaatttggaggttagtgtgcaggacctaattgggtccgatatgggtctgatataagatcaatagtgtgtctgatatggtgttagttttgaggtttatttgaaggatcccaattggatttgatagtgcgtctaatagggtgtcaattttgaggtctatttgaaggacccactctgggtctgatatgggtctgatatttgtccgatattatgcatggtcataaattatttatcttgtgtgatgatttttttttttctgaatactattttttatgtatatggatgataggcttaactgtttttgcgttctttatgtatagtggtatttgggagcttgaggacagaaattgggtttttaaccaagctgaaagtttgacattcgagattgatatgaacataacctactcacattttgttgagcttttgtatgaagaactcaatgttaagaaattgcagtatgacttgaaatagaagtgaattacaagtacatgaaagggttaatgtatcaccctaaagttataagaaatgataagcatctaagtttatatttgtctatgcttacgaagatccaaatgagtttaccccccctattggtgatgttggtgaagaagaatgtttgtattgatccttataacacaaatgccttttcatgatgagttacctaaattgaacactatgatatgaacagtttacattgtagcacaaatgccttttcatgatgattttggtgatggtccagaccctgaaggttgttttgatggaaatgatgacgtaagagacgaccaagagatagaggtccgtggatgttacaccctacattcgatccagccatcctcttcccattatttggttgtagcttgataaaacattgattactataaaattgactttcaaaattttcctaacaggcatgacattgagctcaattgctcccataggatagatctggttgttgtcaaaggaaagaactggcagagcagaaactctgattctacttttatcaagccccatgttaattaatgcaacataaaacatgtctacactgctcccccatctactaagattctgcctataagacaatattggatctgtaattggatgacaagagcatcatcatgatgcaattttactccttgcaggtttccttcggtgaaggtgattagagctattggaaaatatttctatttagaaagaatgtaattgacttcatgatgcttagctccaagcctttttactcttttgattgttcacttctcctatcaagaaaagttttctagatgaattatcggctccatgcttcccaaaatcatgggaattcacttccatatttcctcttttcccgcggtctacctaggtctactatcttatgtgtttcctaattttttcctccctgtatctctttgtatttctccctccttgattcttcattacgtattgctgaaggcctctttccttaattgttatttcaattttcctaagcaaagatctgtaatcatttgtataatgccctacatcattaagaaaggcacaatggttcatctgatctcttctcttaagtggtgccattatcttataaggatctatctatataggcttctctttattctgcaagtagatcttagaaagtgttgtattgagcttgaccttgaatttagacttcttggcctttattccatatatcctctccgatctttcccaggtctcatgtttgaatttatgtagcatttttctccagttctaagcaggggatttctatcaagtggagtggaaattaaagctactcttcctttaatctgtcttctcttacttttgggccctctctttcttttctcttgttctcattgttccatgaacttaaagactcctttttcttttctattacttttgtgattgtctttggttttaaaagaatgagttgttcactcaacaaggaacccttaagcacatttctggtgaagtaacatgctgtgtcttttgaggtcacctcactcacttcatacacgatctttaggaatctttgtaagaactatcgaggattctctctttctttcagttttgtttgatagagatcctttctttctttccttctcttagaatttcccccgtattgcataataaagagctcacaagctcataaaattaatcgatggtcccttccctcaattgtttgaatcataacatagttgattgctggattattcatttctaaagccttttactattcaaactaaaccacatgtgtttgcatagtgattattggtgccttgtgtacctattatcccaatttttgcccacacgatatggcatgtccacgaaggcaagatcaatgccacgtggagtacaacttgtcaacaagaaggccaagtcatctacacacacttcagctgacaggaagtcctagtactcaggaaggatgaggaaatgacgaaccaaccaccctaatggcagggcctatggccaacacaggctggccaacctccaactattgtagggctgaccaacctgctcctggcaggtacatggtcgaccagcttacaccttgcaggaatttggtgcacagccttcatccaggaacaacaagctaaattgcaatttgggcttcaacaacccacaagaataggagaaaatatcagctacttccctattcttgggagataattaacccttttatgacttattatttaattatgtaaataatgctttatttttctattttaagggatattagttgttaatctttatgtaagctctactatacaaaaagtattagcctaaccctaattccataagttctaagtctctaagctctcaagctctaagtctgaaactcgaactctctcttctcttctctctcacatgccctaggcactttctctcacttgagattttccacttgattctcacattgtaatcttgagagagccactttagattccacaacccttgtgatttgagtagttttctctctgatattaatacaactaaaagagaagtaagtcattacccgctaactcaagggaccgaacctctataaaatcttgtgtctcttttacttttctattcttattgtgtacacgtggtaagcattagtaataaatattactactttgttatcagttgaccaaatttaaggtcaacatttaggtgcttttattgagagcgagttgttaatttatctgatcaaacaccctggttaacacaaagagaactttcgctatagtttagattcattgggtcttcctcaagatcctatgatggctgatcctaatgtccatgttccagctacaactggaatatccacgaacccgaaagatgtggccaaccctaccatctcgtcaggtaccacaaacctggccaccatgattggtgaggtggacactaccaacacgattggtcttaatgatcaacctctgccattcacggaggaccttccaatggcacctcatactgaaagaatggccaacatggagcaacgcccaaacaccatgactgggtctggtccttgatattatgctggagagatggggccaagaattggcgagctagccattggcgagctctatgtagacttaggagaagatctcgagttagcca

SEQ ID NO: 302507 - DNA, 3888 bp, Cannabis indica
aaactaaaaatttttttaaaaaaataaaagtacaaaatcgggttggtcggtttaattgggccagttggacctattttcaacccgcccaattaacagattgggcggtttgtaattttttcgggttatttcggtttgtaatttttatcggttttttcggttcggtttgggcgggttattcggtttaggcggtttacaaatttttttgtacagccctacagagaacctcctacaaagataagaaaaaaataattgtaggtaatagttctaaacttcctatttttaatattggtaatagttgtttcactgctaatcgaatgctatatttcaaaaatatactacatgtgccctgtattgtcgaaacctcgtcagtatatctaaatttactaaagacaatgatctcattattgaatttacctttgatctttgttttgttaaggacatgggttcgaagaaacctcttcttcaaggcactcttaaagatggtttgtattagctcgagtctcaccggtctcatgccaaactctcaccctacagattcaagaatctcacccagctcatgttgtgtcagtgtctaagtctatagatactagttctttttcaaaattttgacaacaattctaccattgtaaatctttggcacaaatgacttggccaccctaataaagttattttgaataaaattcttcagtaatttcaaattcattgctctaatattgaattttgttatgcatctcaacttggtgaattacatcaatttgcattacctctctgtgaaaacatggccaaaaccccttttgatgttgttcacactaacttatggggtccctcccatcaagtttctacgggtggatataaatattatgtgtattttcttgatgaattcactagatacacttggattattccattaaaactcaaatttgaaacaccaaacatattttttgcaatttaactcttatcttgaaagacaatttgggtgcaaagtcaaaactcttcaagctgattggggtggtgaaaatcgacccctttaaacctatacttctaaaacttgggtttgtgtttaaacacccttatctccatacacaccaacaacaaggcaaagctgagagaaaacacaaacatctcactgagacggctcttaccttattggctaaagctaatttgcctctcaagttttagtgggatgccatcacatctactgcctatcttatcaattggcttccaattcaaaaacatgagtataaggcgtcctttgaattcttgtttcataccaaactagattataattttctcaagatttttggttgtgcttgcttccctttcctaaagccatatcactctcataagtttgatttcaaaacctccgcatgtcttttcttggggtacaatcctgctcacaaaagggtatagatgtcttcatccacctggtagattgtatatagctagaagtgtcacatttgatgaacattattttccttacaaaactctctttgctccctctaaatctaattccaccaaatctatctcctcaccacatttcttaccctttcctcaagttccacatctagctcctattccagttatgccccaaacaattcccaaaacttcagcttttagaactcaaacaactaccacatcttcatctcagtcccctcaacctggttttcctaaacctatctatcctccctttactggtctcaacatagattccagtcttagctcaaattttaccaatgctcatcaatctatatgtgttccacccttacaaattgcttcctctatacctccacatcctacttaatctatttcaattcactctatgcagaacagatccaaaaatggcataacaataccaagggcattagtagctaaaataacttttactaatgatgatttttatgaacatactactgtcaaacttgccttaaaatctccaagatggagtaaagcaatggatactgagtattatgcattaaagagaaatgaaatctggaccttagttccatacatagatgacatgcatattgtggaaaatatatgggtgtacaagaaaaaactcaaagttgatggatcattggacaagtttaaagctagaacagttgctaaagagatttaacagacccctagtattgattattttaatacctccagtcctgtgattaaggccggtacaattagaattgtctttaccttggcagttacttttggttggaaaattcaacaaattgatgtcaacaatgtcttcttaaatggtgatcttaaataaactatttatatggcacaacctcaagtttatgaagatgctcagtttcctaatcatgtttgcaaacttcacaaagcaatttatggtcttaatcaagctccaagagcacggtatgacaagtttaaaactgccttggaatcttggggattccccaactccgtttcagatagttccttatttcatgctcatatagacaaccagttgttaattgtgcttgtctatgttgatgatattctcattactggtgcaaatccaaggagtattcaacagattatcaccaatctccacaatcagtttgccttaaagattcttagaccagtgaacatactttcttggatttgaaatcttgcaaactctcaatctttgtcaagccaaatatgcccaagacattctcaaaagaacaaatatgcttgactcaaatacctttactacaccaatgagccctagctacaaactatccacttcaaaaagtaagtcattctcagatcctattccttatagaagcattgtaggtgcacttaagtatctcactcttactagactagctctatcattttctgtgaataaattgagccagttcatgcattctcccactactaatcactgatgtgcctacaaaagggtgttaaggtacatacaaggtactctttccagaggcctagtgttcaaagctgtaaaatgattgacccttgaagggttctcaaatgctgattgggcctgtgacgttctggatagaaagtttgtcactggttttgtgtaatgcttggagggaatcttattgcatgggcttttaggaaacaaaaagctgtctgaaggtctagtactgaatctgagtaccgagctctctccactactactactacagaactggtttggattttttatcttcttcatgaattgggtgtcaatttacctcaaaaaccaaagttatggtgtgataaccagggagctcaaatgcgagcatccaaccccgtttttcactcaaaaatcaaacatattgaagtagatattcattatattagggatctggttttgaataaacaaattgacgtgtcttacatcccttttgaagaacaacatgcggacatgtttaccaaggctctcacatttccaaagtttaattttctttgtagcaagttgtccatggaatacttctcgatcgaatagtttgagggggcatgttcgtgaaatgaatgacattgttattaacaactaactgtctaggttagttagttagttgagagtccttttatttaggttattacagtcttggtgttcttgttgtttagttctcattactctgtataatttctgtatcattctttaattgtgtaatgaaaaacacgaattgattctctctttcttcttcactctctctttttctttcttgcactctgtttctttgattctttgatcaaagtcaactatatcaatagttggaggttgacaatatcgaccccttcttaatatattactattaaaaatcttacttttaattacaactgaaattctgtattttaatatttcctgtttaattatttaattaagtgattaattaaatgcggaatgaaactggtactgaaaacagtttttccgtagttacagaatacaactctgtaactcca

SEQ ID NO: 302508 - DNA, 4924 bp, Cannabis indica
gcataaaacccaacagctatgtgatattctttggcaccaatctagtttcttggtctgcaaacaagcaacaggttgtttccaggtcaagcactgagagtgaattcagggctcttgccaatctgctgaaattaggtggcttactttcttactcagggaattacaagtctctcttcctcaatcacctatcttgtgggtcaacaaccaaagtgctactgcactggctactaatcctatgttccatgccagatgcaaacacattgaaattgatctctatttttttcgagatcaaatattagctaggcaactttctatcagatatgttccatccatagaccaggttgctaatgctcttactaaaccacttactactgattgttttcaatatctcagaagcaaacttcaaatggctaagtgaccatttcgtttgagggggatgtaaaccagtaattctgttactggtgttgttttgttgggttagttgttactttcagttagttacagtcgttattttctgttaactaactttgtactctttcttattagatcagtataaataaagtggtaagctaaccattcttggttaagcttctttggctattctctcttgttttctcttgtttactgttctgtttaatgctctgcttcttttcaatttaaggtttagccattgtcaaagctttacaatgagcttaaaacatgaagatgagattagcactacattatctaaaaaatttatcaaaatactgttcatttccatgacattttgcacattgaatcacattaaaaccttatcatgaatcagaatcaaatacgaagtaactggcaagttaaaaaaaacatcgtttatatatatacaggtgtttattggaccacatttaatgtttttagccctattcagattcgatccaattatatatttaatgttaaattttaccatccaatccgatccaattaataacttcagtcatccaaccaatccaacatccattggatgttagattggatcggttctatctgttggatgtatttcatatatatttattagtttaattttagtttattcaatattttagaccttagtattttttaaatcggatcagattcatctaatattttaggtctagtagtagtatgccaaaaaaaaaagtaaaattttacgtataacattataaaatctaattactaaatcaaactaaatgaaaatactaattagtttgattagatgttggatgcatagtattggatttttagacatcctatccaacatccgattcaatctaattggatattcaaaaataacatccgatccgatctgatcacaattaaaaatccaatatttaggagttgattgtaattaaatcggtaagttatcattgaattaaatcgatttatacacaccatatatatattctagttttcttaattttaatatccacttggagtaccgtacaactgtccaccgtagataagcctccttcacttagaagtaaggcactgtctcgtgtagtgtcgtcccattaatttcatttcgtctcttggtttcatcgaaatccagcctcatggattactttaaaacctctacatggtttctagtttttctatataaaaaaagttagagttgtctctcttttatttcaatgcatgtcatgttagagtcttaatattattctctatataactctagttttcatttgtgtagagagaaatctcatctaaatttaggttagtaaatttgatattatgatatatatttatatatttatattatataaatatatgtgtgcgtgtggactcttttcatggttttgattgctaaaatgataatcttttgacagtgatatatatcccataaaaaaatggaagatgaagagaaagcttttattgctaaagatgtcactgaagtaagtgataatgtattgtaaccaaaatctgagatattatatatattaatatatatatatgtagcttatacagtatttttattgttatatatatatatataaacagttgattggtaaaacaccattggtatatctgaaccatgttgtagaaggttgtgtagctcgaattgcagcaaagttagagatgatggagccttgtgctagcgtcaaagacaggtataataataaaattcacttcataatactaataactaaattattaattaatgacttttggtaccatatatcttttaataaacccgtattatgataatcttttggtgctttgctagccttagaggtggggtcacccccttaattaactctcccactattatttatatataatattacaaaatatttcatccacagatttattattcatttatcattatatattatagatgaaaacgttttattcgaatgtctagcactttctaaaacttgatagccaaataagtttctatgagtagagctcatgctcatcactacttttctgtttaattagaaaagtaccacattttgatctctaatggccacttactttggcactgaatgccagcataaaaattatttaagaaagatattttaaatggcaccataaacatcattttccctacctataactgtattgttacaaaagagtatatactgaaccactcgaggctagtggccataagagcatcctgttggaggtcctgagttcgagtcccaagttatatatggttgtaatatttaaacacttaaataaaaaataaaataaaataaaagagtatatactttaattatagtaaaaactttgtatatgtgattactatttatatcgttattattacatattattttgttaacagattaaaaatttaaaatgaaaggtggatatataagttagacatcactaaaagagagagaagaaaatatgtaaaattgcaccataaacagcattttccaaaaatataactctattgttacaaaagagttatactttaattatagtgaaaaatatgtgtctgtttcagcaaaagagaaaactatttatatgtgcatattataattactatttttatcattattatatattattttgttaagtacagattaaaaatgtaaaatgaaaggtggagaattttctcttgattgcaggattggatatagcatgattagagatgcagaagaaaggggtctcatcattcctggtaaggttagtaaaaatattcatgattaattaatgttcaattatattaaagcatgtcattaattaatgtgaataattattaagtaatgaatttatgaatgcagagtgttcttattgagcgtacaagtggaaacactgggattgggctagcatttatagcagccataaagggatataagctaataatagcaatccagcttcaatgagtcttgaaaggaaaaccattctacgtgcttttggagctgagcttgttctcactgacccaactaagggattggaaggagcccttgacaaggccaaagaaatacttgcaaaaacacccaatggttacatgcttcaacaatctgaaaaccctgccaacccaagggtacctactacagtactactacttaatttgggacaccattttcatcctagtgtagatatctatttttattattattgatccaaaaatttagagtaatttatagtattgaaaacaaagttcaaacattcagttgcagtttgttttcgatatcataaattattcaaaattaaaaaaaaaatgaaatacttactataactgtaattaaaaaaaaattataattctaaaaaacatagatgtcagtatagataaaatggtgtcacttctatagtattgtcttatatatatataatatcaaattcaaacaaatattacatatgtacaccaaatttatgatcagatccattatgagactactggaccagaaatttggaaaacctccggtgggaaagttgatgctcttgtttgtgggataggtactggcggtactattacaggtgctggaaaatttcttaagcacaaaaaccctcaaattaaggttaaatcattttattattctattttttgagaaatattcttaatttatatatattacctttgtgacactaattaatgttccttgatttgttttattatatggtttagctctatggtgttgaacctgctgaaagtgctgtcctgtctgggggtaaacctggtaagaatattgagaatcatatgtaactatgattgatattaataatatgaagtatgacagtttttttcttaatccttataaatatataataatttgtttggtggccttaacaaatcataaaggtccacataaaatccaaggaattggtggtgaagttatcccagaagttttggacatcaatcaagttgatgaatttgttcaagtatgccttcatagagtacatatatttgttattatatttcattagtattataactgatttacaagtcacataatataattatgtataagcttttgagaaaaatgtgaaaaataattagtacacataaatctttggattgaatcattcgtttttttgattgtagatatcaagtgatgaagctatagaaatggccagacttattgtactaaaagaaggcttattggtaagtttatttggctcattatttagatttttttacatatacatatatgtatgtacgtatattgaattttttaataaaatgcaaaatagtttaatattgtttaaattaagcaggttggaataacatctggtgcagccgcagctgcagcaattaagatagcaaagaggccagaaaatgctggcaaactcattgtggtaactaatcagtgtttattattatttgttttttaaaaaatagtaatagcatatgaaatttatttttattatcaataaaatactgcgtattctttatttttacaaaataaaaaataatgtgaatcgagaattaaaacaagataatattttggtttttgaatatgaacag

SEQ ID NO: 302509 - DNA, 3665 bp, Cannabis indica
tagatctaacgagtgatatattaatttaactagctattggctacgaaaacagtaaatactcatttaacctacgtctaccactactaaggcagacatttcttttgggagattagcttgaatgaaaagatcagtcaatctgtaataagaaaaatacaaatttaagggagttcgatttgttaggaaagaaagagtacaagtcattttatgacattttccctcagtgtaacagcatttggacagagacaggacaagggaaaatataaaactgacctgaccatagagcgaacaacaagattcctgatgagtatgttccttgaaggccgtccataagaaattccatattgatcccagccgctctttatagcaattgcatcatctccaacgctaatataacaatcctcaatcaccatatcctcacaagaatctgtttgccatgcaaatttggagctaattaatactcaatagtcaatagatacattagatagacataccactgtaacattactgttagtatttgttaatatcatcccaaacataacaatgaataagttttgacttttgagtgcctgcataatacactggcagtaggaccaatgctaagcacatgttacatgaaactgaattaagaagcagaagccagcttaccaggatcaatcccatcagtgtttggagcttcatataccggggccaaaatagtaacatttctaatggttacatttttgcagtcataaggatgaagtgtccaaaatggagaatcacgcaatgttatattagtaattacaatatcacttgaccacatgatctgtacaagtggtcccctagtgtggttgagcagcttttggcgatacttcttccaccatgtttgaccctgcccatttatggtaccgttatgccctgttggtcaacgaatataagccaaaatcagaaaatttcataaatcaaagatttaaagacacatatagggaacagtaaaatggcaaacttaatttttaagaattaatatgttgagttggtggatcatacttctcagtactgttcaatttcattgcacatttggtatacagtccgaaggagttcaggttattttggtgcatttcagttcagtgtttggaagtatggttgcttcagattaaaggcaacttgtttcagcagctgtcatttttttgggtataatagctaaaacaaaatggaaggatttttgagaatagagaaaataaggtagagaggcggtggaataatgtcaagctgagtatctggcattatggctgcacaatgataagaatttcataaacattccttacttgcaagatcagagtttttttactgtaatttttgctctctgcctctgggctgttttggtggatgaattttcccatcttatcttgcattttttatatttcagagcaataataaagggtttatttttttcagtacgctgaatttgcctaccttcctaataaaagtgtttacagaaaaatatttgcctaccttcctaataaagggtataacatatataagaaattaatcaatgcctgatacatgatagtcaaatgcaagatgacagcttttccctacttattgctactaagacttgtgagtgggggtggagtgaggaaactggtaaaaggccataatttcattttcagaaaatatttattcggctttcattaggctaaagaaaaagacatgatggttcaatggatgcaagtatttgcgacactccacaaccaaacaaataggttacctctatccacaaactcaaatagaatgccaaaatctgatgtcaaacatatatgaaatatgcttacaaaatataatacgatcagcttactattttggaagtgatgaacttctcatcaaatcaatgttcatacgatcaagcttactatgtaactcatttttggtactacaagccttttctttctttttccttttttgcttaaaaaggtactagaagtccagaagtaaaaaaactgtatccccccaaaaaagagaaatatatgttacctgtaataacaaggtctttaagattttggccatgaatcaaactcccatatcgaggcccagggtgctctctcccatacccatatgaaggcagtggaggcataagtggccaatacttctcatccttcacatataatacgagagaacatttgtaacatcagtaccaactctaacaatgtgtattgatcaggaaaacaagaataagagaaagagatagaaatctcatcaactggaacgaaaaaagatgtacaattggaaacttcagcataatgaaacttgtgtattgaaacttcacactttcagtcattttagcacaaagagtgaatcccattacttacactactatatgagcagttccactaacacatataaaactatacataatttttcgttatttggtaatattttctattcaacaacagtttcacaactgtattatagcaagcattacaacttaaatattctctaagtgtttaacaaagctagaactacatgttatcagagtgtttatcaaagctagacatgtatgttatcactgtttgaaaaaaagcaaaaccgatatgttatcagagagttttacaaagcaacattagccaacaatagcgcgaacatggtaaatgctactaataatcactaggggcatttgcataacattgccccccaaaaaaggcaaactttactaaaataaagaaaaacatttaaatacaagaacaagaactcacctgaattccaagtatttcagcatcttcggcaaggaaaagagtcatatgactagttagattaaaaggggcagtaagccaccgaccaggaggcacattaagctggcctcctcctttcttgccaagcttagaaatagccaaaacagccctctcaaaggcctcagtgttcacagtaaccccatcacccacagccccaaaatccgtcaaattgaatgccaccggtcgaagcttaggcatgggtttcgtcacggttcggccgaacaacgaaaacccatcaatcaaattcctctgccaaacgaaaagtgacaaaaaaacgaagacccagagtgtagtgaagagggtcctatgcgaggatacgaacgccggaatccatcgtcggatgtccaacctctggtggtggaaccgccctgcaggtacggtctctaccatgatgaaaagaccggaagtttgaaaacggattccgtcctgaaaaacttaatggggtcagtcgatgcttgacaagacaagaaaaatggtgatttacgatctgggtgagtaagatattgggaatatgggatctggggatccaattttttgtttgcaaatagaaaagattgatgggaattgttaagaaatagtaatagtttcgtaaaattggtgggtgaggtgttaatgatcagagtgtggtagagtttagattcttactgaaaatttgagtgtttttaaagggaaggctcttctcttctctaatcaagattgagacttggccaagatttttttgtttagagactcagatggattaacagtaggggtgttcatccgatccaatccgcacttttttggtcaaacaacatccaatccgcactaagtgcggatttcatattttggatccaatccgatccgcataagagtttaaatccaatccaatccaatccgcaatagtgcggattggatcggttattt

SEQ ID NO: 302510 - DNA, 2115 bp, Cannabis indica
taaatgcaaattcatatcaagataagcatcaaaataacacacattaagtatgtacaaactgaaaacaatgtaaggtctaaacagaaaccacagaatcagaaaatcagtaacaaaacccaattgggaattttgattgtcaatccaaatgaagattatacctttcaaaactatggttaaatgcaaattcatatcaagattataacaatacataacacacattactgacataattatacatcaaaatggactaaattttctccatttcctcatttgagcttaagcatcatacaaataagagcaagctttctattgataatggaattgaaccaaacagaaacatccaataacattcattttcttcttaaatacttgaaattaacaatgattatgttgataataaacaaaaccccaaaaaaagaatatcattaaaaatcaaatcttgagccatacctgctagttccattatccgggttgtgactgataacaacggcgtaatcaccagatgccctagcgagaacaccacggtcaccaacgtggtgctcaacgttgcaaataacagtaccttcaggaagagatcgaagaggaaggacattaccaacgacgagattagccttcttcccacagtagatgaactgaccggaatacaagccctctgcggcgatgaaaagctccttctggtgcttgtacctgaatggatgacggaacgtaactcgggcaagtggggcacctcgccctgggtcgtggatgatatcggtgaccactcctttcaggtaaccattgcgctcgccgaagtccagagacctgaaccgggccggacccttacggtggtgggtgtgggacttgaacacagatccggcacccttacgctgtgccctaatgactcgtcccattgctacggttagggttaggactagggttttgactggcgacggcgaagaagaagaaatgcttaagagtatttacataagagtcaaaattttggttattttttaaatgccctttatttttcattgaatttgcaaactagtccctataaaaaaatatttgttatttgggggacaacaaattcggattgactatgttagtgaatactattaattttcacatccaaagctctaacataagaattgttcacaagccaacttcaattccaacttgaaatgttggtatagaataataaggataaacattttagcatactaataagaaaataagaaaataaatagaaatcggtgtccaaactctagagttttttattcattaattaaaaccaaaaaaaaatccaaaagagtactagaaataaaagtctaaaatgaaactaaacactcctaaacataaacatctaaacaaaaataccctaaaacaaaaaactaagaaactaatattgctcaatctaaattagttcattgactgaggtcgtctcatactccatgcttgaagattttccacagtcacaacctcacttccattattgaacacaaacaaatgtgcattattatcaatagccaaacttggataaactcttgaagtgatgcaagtttttcctttctctccaaaactttccacaaccgaatgatcaatctacacacaataatataataattaaagtgagtaattaagttaattaaacaaaaaaatgatctcactaactaaaaatattattagtttcaatttaacataccaaacttcttagagaaagcttattatctttcaaatccacatcaacaaatccagcaaatgatggcttatacaagtttggtgataatgaagacctaagcaaaaattagatagaaaacaaattattacaatatcaaattatatagtatagtctttttaaaaaacataaaaataaatataataaacttactttgaggcatcagaacacatgagaacaacattcttttctggaccattaaatattctaaagaatacaggagtatattcttctaacttttctgaagctaatgtcaatagtccaaatggcccaataccaccttcaacatgagatcccttttgaccacaaagattttctgcattatcccaacttgggtcaaatttctcagctttctccaaacttgggaatgagaagacaacatctacatcagcctgaaaaag

SEQ ID NO: 302511 - DNA, 3311 bp, Cannabis indica
acacttttctcaaaaaaaaaaaaataaataaataaaaaaaaataatagtatattattatctctattctaaaaatacaggaattaaaaaaaaatccgacctttaagaaaatttaaaaaggatttttggataaggagaaataaactttccaattccataattgaaaagagcttgactttgaccaattaattctatccgtaaccaatttttcaagactcaaaacgacggcgtttttagattctgaagcagaacgagaacggtgtcgtttaaagtcgactgctggctttcaattagcctcgaaaagttcactttgtgttggttttgttaattgcgccaaaatcccacaaaaactcgaaaaccgccttctttctgcaatggaaattgaagctttgtatatgttgaattgatcatcaacccagctcagtttcaatgggtgagctctatacttttgtataaacttgcctaacctttttattttgtgataaggcttttcttttccatttttcactcaggtaaattgttagatagaaataattaataagctgtttggttgccgagaaaattggtatctcaagttttattgtccagtttgaaatcatcgattaattatatgtatgcccattgtttgtttctgacaaaactacccctatgtcaacaaattctgctattttctatgttccaaagcatgatttgcttctaaatgaccttaatttagagtttgcttaagctctgaaatcgttaatgatgcgaaactaatctaataaatttctacatttgtgtctagattgaacttggatttcttgttttatgttatgtatggagaaagagttgtccacttatgataaagtggtatttttctttagtgatagtgattggatgaggaaactggaacaactgaaccacaagctgaaagggttttgaatttccatgaagaacgttcagctttagaaccatgtattggtaagtatctaatctacctcagtttagagttgtttaagctctgaaatcgtgaatggtgtgaaagtaatctaattaaatttctacatttgtgtctagacttatcttgggcttcttgtttatagttttgtgtatatttgaacatgtattgggaaagagttgtcacttatgatgaattttatttttcttttgtgaaattgtgatagtgaatttggatcaggaaactggaacaactgagcctcaaactggaagggttttggatgcccatgaagaaggttcagctttaggaccatgtattggtaagtgtctaatttgccttagtttggagtttgtttaagctctgaaatcattaatggtgcgaaactgttctaattaaacttacttcttgtttatagttgtgtgtataatttaaatatgcatggggaaggcgttgttgcttatgataaatggtatttttcttttgtgatagtgaattttgatgaggaaactgtaacaattgaacctcaagctgaaaggattttgaatgcccacgaagaaggttcagctttagaaccttgtattggtatggagtttgaatctgaagaggctgccaaaaagttttatgatgaatattcgagacgtgtaggatttattgtgcgtattggcacgtgccgtcgatcagtggttgataagagcattatttctcgccaactatcgtgcaataagcaaggtttttctgccaaaactgcagataaagttggccatgttcgaaaacatcgaccgagggcgaagtcaagagaaggttgcaaagcaatgatacgggtgaaagctactaagtctggaaaatgggttgtcacaagctttgagaaggaccatactcatccgcttattgttcctgatagacgacctattgtaagttaatctcatttcagaaacaactagcttatttatgtgtaatttttacgtcttctttattagttagtttatagagtggtgatcatgtttgttagctgctgttactgctattcaatccagctagaaaatcatttggagaaatacgactacttgtttagcttatgtttgtcatttggttctgtgtcaatagaactactatgctttaagtagaggccaagagttactgtgttatatgaataacattatggattagtgattcgatatttcaatttggaagatgtacaagtacaatggttatctttctttctttgcataaaaaagcactgtttaatttactgccaatgtacaagtaaaatgttttttgttttcttttgtttcttttctctctattttgtctgataaaaaactagctttcttctcgaattttatgctttcaaaacctggttctcctactgataatgccatattcttttagttggagattgaattttagctttggtagaagatcatgaataaagattcattaatatctgtcacataaagtataggcctcacacaaaatcgagctttcaagtttagattatggaggattgagtgaattggttatgacccctcttgaaactaatttgtttacaatttacacttgcaggattcagtagatagaaggattgaggatctcacaatggaacttaagcatcaagatcatctatgtgaattatatcgcgggctactgcttacatttttgaaggatatcgatgagcagacagaaacactatcaactaaaataggacttgttgttaacaacattagagaggttgaatctggacttaagaagcctccacaaaaaagataacctgtgtcatttcttactcattgtatgaggttttggtcaacactcatctgttgaaaatttcagtttaatctgtatgaatggtgacaaaacaagtttgagaattgagcttggctgttttaatcctctaagccattctcagaaatgtatttgattgaaatgatgtaaagaaaagtttgttctagcaactcgaacagacaatatacatatatttgctttaggttatgttacggatttattataactttagtaatgcccttcttcattggttatgacactgttggaaaagtaggtatcaactatcacctcatcctttttctcaactaatcttaagactcaaaaagcaatacacaactatttttgtagcttataaatttggatggaattaggaaagatatgtataaatagaatctttctcttttattactttattttcccattcaagtttgtgagaatagtgtttcttttgtaaaaatttaaagcatttagctgagttttagttagcttgtattgtagaatagcttcaagcattgaacaagtagtgacggactgaacatttttattttttgggaacttatttatcattaaaaaatatttatacttgtattataa

SEQ ID NO: 302512 - DNA, 1040 bp, Cannabis indica
ataaattgatgtaccacaataaataactagtgacgtaaaaatattcaaacttaaacaaaagttcaatgagcatgatcagaagctttcagcctcttttgaagttcttaggtttgtatgaatgacagttgtgaaacttttacgattgtgtccatattctctgcacctaccacacttgagttgcttcctatgttcaccagctgaacgaaaccttgtcttccttggtctaccatcccttcgcttcaatttagtgggtggcagcttaacatgatttttgacgaattcaggaatattccaaaacttttcacatcctacagggaaaattaaaccattatatgtgttaataaaagcattcttcttgtaaaaatcggacacataagtataatgggacaaattttcttttcgtatggcagtacatgcatgcgagcaaggaatttcatgtaagtcccacttgcaacaggagcaacttcgttctaaaatattaacaacaaattctaagctgccatcaacaacttggtaaatctgaagaccaacagagattacctgtgtataaatagcactaatcaatatgcaaatatatgcattaaggctaattcatctatatagtttcctttgaaataattatactctaaataaaacaaacaaaatagctaaagttgacttacattcatagtcctacccaaacggttttgctcaactagttgattctctacccatgttgataattgtgtaaatatgcttgttgcttccaaatgatgcttatcaaaccattcctgaaccttttgtctcaaactttctaataaagatacaactgacaattaagaagcaacattaaatcaaaatcatctaccataaatattataaatttaaattatttgcttttttaaataactaatagtaagaataattataatagaaaatagtactacctgttgtattaagaatatttatagatagggatattggcagctaaactacctgaattttacagtttgtaacacttaaccccaaaaatcgaatttttggcagctaaactacctaaa

SEQ ID NO: 302513 - DNA, 1260 bp, Cannabis indica
cttcttcttctccttcatcatcatcttcttcttctcctgcttcttcttctccttcatcatcatcatcttcttcttcttcttcttctcctgcttcttcttctccttcatcatcatcttcttcttcttcttctccttcatcatcatcttcttcttcttcttctccttcatcatcatcatcatcatcatcatcatcatcatcttcttcttcttcttctccttcatcatcttcatcttcttcttcttctccttcttcatattcttctacttcttcttctccttcatcttcttctccttctccttcttcagaggtcaactttacctgcaattaatgtaatagtctgagatctcaataacgcttacaattttttttttttaaaaagaagagtttgaattttagttgattatttagttctaaattcaaaaaggaaacctgtatgtgcatctattgtgcaaacgtctttcacaagaaaacctttggtagcatctttcaacccaattaatgtaacaggaaagatccaatcactctcatgagcgtcgagcacaaggacgtttgattctgcaaagagtaaattaaagtaaagagcacactataataacagtaatttcgtataataaagttttgttatgttattcaaaagcacttcttcatagtaacaatatcttatcttctactaattaattacattgttagtccctagctaaaatatatacatactaccatgcatcattcgggaacatgagaaaaaattagacaatattcaaaagttccaaccttgactaactaaaatgagacttctaataaagtagtaaaacctaccaaatttaactgtaaatttaggattttgattgataacagagatgctccagaggagatttttagtcgacccagggccaggcccaggaggcgtttccaaagaatccaaacgatcagcaatgtgtagatacatcgaaagatatttcccgcgtgtggaaattgacatcctcctacacatgattattaaatctgatattatccagtgataatatataatatataatacaaaaattaaagcatatataatgatgtagttaccatttgtaacctcctgcatagaaaatatcagaatagtgcatcttgttatcaacaagcttggaaaagttttggatggtcctgttagactatatatatagtgtatgtaatatagcatatacaatgatatgaaatgcggaaaataaactttaatcatatcaataatatatgcaatgaaaggatcgatgtac

SEQ ID NO: 302514 - DNA, 1962 bp, Cannabis indica
aacaggagaaggagttgatgaagaatgagttacaaccatattcatatataaattaagagaaaaataaaaagagaaaaaacggttaatgggagttgaaaaaaaaaattgaagaacaaaaagaagaggaaaaatgaagttgggattgtggagatgaaagtgttcagctatggaggttactattttttttaaaaaaaaaaactgaaaagaaatggaaaataaaaggaaaaagaagagaaaagagagagaaatgatgtatagagcgattgatgtaatacatcaatcactgacgtgtcaaaaaggttgaattgtgtgtgcatgtggtaaaatagtaataaaatatagaagatgagtaaaaaagttagtttagccgtgtatatgtatttatgtaataaatttatcattttggatttttggtgtaaaaatttcttattatttttgtccctatgatatgaaagttttcgtagccatatataatagatctgatatagatttaatggtcataaataaatagatgtacgataataattaatatttgggttgcattagattatttattatatttttaataataatttttttaaaatatttatttataaaataattaaatattatttattttctctttcttttctcatttcctctgattatttgtttactttttttttaagcttaaaccatgagtttctaattttttttttttttgataaaaaccctgaaactttcattaagatgaaacatttagtgcaaactaatcaagataagcaggaaggtagagaaccattcaagatatactcattgtctaatcctaatcgcaccctaccatagttatgtgtaattctattactttctctagggacaaacaccactgaaagaccaggattaaacaacaatgagttacaaatactagtaataagatcacttagaatagaattattacaatacgcactataaaccttatctactatgcttttacaatctgtttcaatgatataaacaggtagcttaaccgcttgaatctaatgtagagcaaaaaagaatagcctttgcctcagcaacctctagagaaacattaccaaagataggagtaatcacacctgctctcaatgtaccacaaccagcccttgccactatccctaaactatgtttcctcaaagccctgtccaaggcagcatcagtgttaactttcatcatgccttgaacaaattaagcaggctaccgagtatcaccctaattatgttgcctttgtttaattgccacctgctgagctttctcaaattcctgtaaataagtggctgcatgatcataaagaagcacaggagtcaaacacgtcctgttatggaaaatattatttctctaattccaaagcatccataagaaacaaaagaaaatagccaaggtatacttgtcaaaactttcaaaagctttagtgatattagcattgatactaagtaatttatttgcaacataataattgtaaaaaagtgagtgcttccaagcaatttttgctctagaacattcaaggaaagcatgtgtcacaattttaaattaacatgacaaagtagacaaatgggagaaggaattatatgcctggaagagagtttaacatctacaggtacaaaattagaaagcacacgccaaactgaatgcttcactttagggggtgcaaaagaagaccaaagcttagaccaaaaatgtgtattatcactgaaagagatgaagagggaatatctctagagctcacaacaagaagataaatagtttttgttgggaatattttacaggatctagatttactaacaagtagggttgtacatcgatcggtttagtcggtttatactacataatttctaacccaacgtaaagttcggtttgtaaaattctgcatacaacctacccaattaaaaaaaaatcttaacccgaccgacggtttggtcgggttaacccgcccaaaccgaaataaga

SEQ ID NO: 302515 - DNA, 941 bp, Cannabis indica
attactatttcttttaaatacttgttatttttttttttttgttattacataatcattacaattattaatagatagtaattaatttggggagttgagttaatagcttgaactcttgtattggttgtaattgttctttttatcttactaaattactaatttaccaaaaacaaaaattattattagacttttttatccatttgaacagttatttccctaactatttggatcgaataaccatatatacttgtgcttgtagattatattactatccctaattttattttattatctctaaccaaataccacctaactacttccttttaacatttcaatgcatgcatgtccctcttgtttatttagttatttattttttctttctattatgtacaagtacaacaatcggggagtactatcacattatatgcacaattgttttacatgataatttatggggtgcttctataatgcatttatttcaaaaggatgcattgatgcatcttttacctattttagcctttagaaaaaaaattcaatccatttttttttatattcgtgtacacgttatagttatttaagatatcttacaaattttttaaaaaattagaataatttacaataaagaaattagtgttcaaacagtctatttcacacgcatataaaataaaatagtcgcgcatgtaacacattatatgaaccctatttttgacgtgttattattatttttttttttgaatttttaaaaattttattagatatcttaaataactataacgtacatgaccatgaattttttttttctgactaaaaactcttatttcgaatatcaaaacagataagagcaaccgatgtattccttttaaaaacgtgtattgttgaatgggattctttcacaaatacataaaaacaacaaaaaattacaaaaatacgattttacggaattt

SEQ ID NO: 302516 - DNA, 2991 bp, Cannabis indica
cttgtgtatgatctgcttcttaggtttccagacagtaactcacttgacacaaagttggacaaagaaatatattgatcattcttttaatttcaagattactgacctatttgattctgaggatccaagagaaagagattgtttgaaaacaattcttacacaggatctatggaaaatttatggtacataggccttatatccgtaaagttgtcagctaatatcatctaccggtttgtctttgaaactgaacggcataacggtattgctgagctgttggagatttttggcagtgtaattagtggatttgccactccattaaaggaggagcacaaaatctttttgtggagggctcttattcctttacacaaacctaaaatcagtgggtatttatcaccaacagctaacatattgtgttttacagttcatagacaaggatcaaaagttggccggtagtgtgatcaaaggcctattgaaatactggccgataacaaatagccagaaggagttgatgttcttaggtgagatggaagagattttggagaaaagattatgatcccactatttcgacgaatagcttactgcctcaacagcaaacattatcaggtataagtcttgtttgacagatatctagacattttgctcttttgtatcgcctggttgtgacttttcaggattttcgttttcttggtgggtaacaactaaatgatgtgaataactacttccttcattgttgtggtgactataactacctactacccctcctttttcaggtggccgaacgagcccacttgttgtggaacaatgagagcgttcttaatctcaccactcaaaaccggcaagcaattctaccacttgtcgtcccggctctagagcagaatactcaaaatcactggaatcaagcagtgctgaacttgacattgaatgtgaagaagatattccgtgagattgatgaggagcttgtccttgcttgtcaatgtaagttggaagaggaagcttcaagattaaaagctgcagctgagaagcgaagattaacttgggaattgcttgaaacagccgctggtctcccatccccagctactactaccactggtgctggtaactttctagttcccgtaaagcctgctacatgctctgttgcctgctaattcatgtggaataacagtatttggtaaagaaagtgaatcatagtatgagatgttggttgttggaagatatgagtttgggatgaaaaattgggtgtgtattagtgcctggatgttgtgataaattgtattagtgatccctcccttgcccttgaaatcacaagaggcccttttgcttgcaatattatgtcaatgaacgtctgatgtatattttccacaagtgctgtttgtctttactctttagcttaatatctaccttccataagttgcatttataccccttctaagaaaatattgatcttagttcaggtgttttgaaggctcttttttatttttataatatattttttttgtagaaagatgcattataaatactgttagctatagtttttctcatagttatatgatgttctttggagaggaattatgacaaattcaaaaattctatactaatattatgcaaacttgttcaagaaaagtgatgagaagctaataaagtacaagcagtattattacttaactatttaataaaaccattactaattattgtaggacaagctgaatagattggtattgcttttacccctacttatatgagaataggattcttttgtaggggcagagttgtaatgaaacaggtcataatttttatttgagttgagacgagaatgttgagacggtggataaagaaatttataaaaaggaaatgagaaaaaagaagaaaaaaaaacagataaatataagagcatgagacccacttccaagttgatatgacctgccctgtcttgtctcaaaattatttattttacacatgttccacagccactattgactgatagaattattataataataagtcatcaccacctgccactacaatttgtaacactatcattattttgaaaccaatttaagccacttctgaaatatttacgataataacaaaaagatcccaaataaaaagaaaataagatgagggtatgagttgtattaaagtcataagatcatgagattgtaaagtgtatcttatcaaaagtaatagatgtttttatactctgtattggactttctattttattaagtaaagagaaaatagtatatctttttaagtttagtgggttatctatatgtgtctcattcttttattaaattatgtatatctcatttaaaatctgaaactaaaaaaaatgtaattgtcattattgtccacatgaccatatcagatttacatgtgaatttacaaaatttgttaatctctttatgatttgatatagtttaataaaacatcaaccacctgctaccactacaatgtaatacaataaatttaaataataataaagtattaattttaaatgtctcctttaatgtgaattgtcccataaattttaaaagtgacatttgtctcttgtattataattttgacatttgtttataattatatatatttttcaattaatttgctaacaaatgatttgaaaattaataattttattaaattgtacttaggtttgtttggaatagggttgcacattgagcgagaattagcggggagtgctctctccgtctccatccccgttaatgattttaatccccattcccgcttattctccattggggacggggtgggaaatcccctaatgggacggggatggggcgggaaatcccctattgtaaaaataaagtatattttaaaaatttaaatgtataaaattattaaattacataaaagataaaatattacatattatttaatattcaatatagtaattattatacaaaaacacaacttcaaaaattgtaaaaatgatattaatatactaaaaaaaatacaaaaacatatataaaatattaa

SEQ ID NO: 302517 - DNA, 3227 bp, Cannabis indica
gtaatttagttcctattcaatgtagaccatctataaatgatcattgattatttagattgaaacaattgataactaatagcgtatctattcttggagaatagagcattctatgtaatcaagagtgcaattccaaatctatattggagtcaggaagaattaataagatagggaatttactcggtaaattgtagaactacttattgggagcttgattatataggcatatggcctctacactacttgagataatgttgtcttgtagactcaattaattagttttagttaattaattagaattataagtaagactatgtcttaattatgaatttcactaagcaaagacaaatttgagaagaaaatgagatttaaggtttatttattaattaagagaatttgaaagtttaattaacaaataactcaattggtagttttatttgataatttttcgttattattaaatagacaaaattaacatttaaaggtttaaaactagaaaaatagtattattgagaaaagataagtcaagaaataaaatgatatttttgaaacccattgcgcctctatagggttcaactatgggttgaataataggcgtatttattttatctttatttaatccattttaagtgtctaagcttaaccctaaagaaaatacaataaatagaatataaagcccttaacctaagatgcaatagctatatatatccattatatattttgcatcaaagatacacatacaatatactaaggctcacacctatatatatatatatatatatgtttatgtacatgttcatatatggtggagagaattctgattctctttatgagataaaagagagattaagagctaatattattctatagtattataaattttctatagtcttcttcatcaaatttgagtgccattagtgttgggattatgccctcacatatcaaggcaacactcaggacaatgtagaagactatgtagtatttcacattcgaaggaggagaaattcaagttcagtttttggtaatactctgcgacagaaaggaacaaaggttagagaactgaatggaaaaagacatttaattcctctgcaatcactgtaagatttacttaaacttttatgtgtttaatttgaattgttttaaggttccatgtttaggatgttagattagtaatgatcaacatacttatttagtgaaagtaagatcttagttaaatatgctttccaacagtatgaactaaaattctctgagtacactagtttagatgatattcgggaaaatgtgtacaaggcgacctgcaatatggtccattatcgaaagccacaaaggatgcctccagggggaaagaaaaaaagagatcaaaataaaaggtgcaagtatcatggagtcgtagggcacaccaccaacgtgtgtaattatccaaacgatgaaattaagactctagtcagggccaaacactagggccggtggatccgaatcccaattatctatcttggacaggggttgttcatggacaattacttgttcagggatagcaggcagctgtaaaccctccgtagggggtatgccgccctcaagctcctagaacataacttctagccctacctgctttaccagctcatgctgcagtagttctagctctgggaccaatgaaatcgtatcccccaagaatggctctgccacccattgataggcatgtttccacggtttctggaagaccacatattgcaggaagcaactagaactcccaaaaattatatttgaagtagttagaaagtgacggagaaatgtgtgctttagtgcagtcgacaccacaactgccaatcactttcacagaagaagatgctaggcatgtgtatttcctcccataatgacccgttggttatagaagctagatttccaataaaagagtttcagagtgttggtggacaatgaaagttcggtcaacatacttttcaagtttgcatttcaggcagttgggctaacagaggctgatttgtcaccttgccccattcaattccaaggattcaatggcgactcgctaatgccaattgggaagattcagctcccagtaacactaaaaggggaacataacatatgcgccttcaagcactgcacgtttgtggttgtggattctccacaacctacaacgccatactaggacgtccaatcttagttgattttggagtcgtcacttccatcaagaatttgtgcatggagttcccttgctataacaaaggtattggcgtactcaaaggtgaccaaatctgtgaaagaagctgctacaacgtctctgtctgatctgtgtttatggtcaaagaagaggttgatgttgctcctagaacagttgtacatgcggaagctgaggctgtcctggaggaggttgaagatgagttggatcctagagttgggatagagaaaatggtagaaccgttagaggatgtagaagaggtcaacatttgtgatacaaatcccaccaaaaccatcaaggtggggagaaacttacatccagtggtaaaagaaaaaattctggcgacagtagaaaagaatcaagatatcttggcgtggagtcactcatacatgatagggatcaatccgaatgttagtttccatgccctgaacattgatgagaatgccacactagtccgccagaaaagaagacctatagacccggtaagagcgaaagcagtaaaaatggaggtcgagaagttaacttccatttaattttgtgggaagcactctaccaatgtggttggccaacccagtctcagtcccgaagctcaacgacacctgggggatgtgtattgacttcacagacccaaaagactacttcccctttccgcgaattgatcaaacgatggatgtcgcgttaggatattgtaacgccttgatattttgccttattttacaaaatactaattttgatacattaattgaaaggattcaaaactttttagaaatacacagcgggttttacaataaatatgcaaaaaagtgaatgatcattcatattaaaaataaaaaaaatagctgagtgcatttttaaaataaatttacaacaccccactgagctcatattactttactttctaaaaataaaactaaggctccaccagtgttctagactgtttgttcatccatagcccctcgtaatatacatacaagaactgccccagctcatcaaacttatgttcaatgtgttgggttttatgccataaataaaactcatt

SEQ ID NO: 302518 - DNA, 3552 bp, Cannabis indica
ggtaaaatatttccaacacacttgtcaacctaagcactgggtacttactcttgagctcccgagattttatttttgatactttcaaggcttctaaacttgaggacaaggtctcctaccttgtttttgaccattccaaattcgatggttgcatcggatttggcatttgagcattcgaaggcattatcaacctaggcactgggcctagccgccctaggtcaacctaggcactaggcctagccgtaggtcaacctgggcgctggggcctgtttccaaggactcggattgtgggtttctccccaagtttgtttgaatcttcgttatttctgatgacgaaaaaaatatccggaacacttttactgagctggattggaaacaaaccaggttgaggcccagccccaagtgtcaacttaggcgatgggtccctctttggccctttggaaattttgtttggtcctcaaaaatagttgaatctcaatattttctaaaaaaaaaaaagatgctcgacagaattcctaaacaactccattttaaatggcctaggttaacaaaatgtcaaccttgggcacaggccccaagtgtcaacccaggcgctggaccctgttatttgtacctaggagttgtcctcggaaatgacctatttccccatttttgttgaagacaaagagaatgcaaaagtcagatctttgatctgatacttggaaggtgcccaaattgacaaattttcaacctgagcgttgggtgcttggggtcccggtgctcaaaaattaacttgctccaattctgattctgatgccttaaatatgtctgtggtatgtctagttgatgtcccaataattttttagaccatgcagcaccaagacggtcccgaaaaacgaaatcctagttgaggatgtcaacctgggcgccagggtgaaaccctaggtacccaagttggcttccgagttacaggttcgtgtaattttatctcccgggacttggattaggttgcttgtcttcatgatacaaaatactaaaagatagtaggttagattcaagttattgaagtctgaacttccatccccgagattccaaagtcaacctgagcgcagggctaaggtcccctcccaggtcgcgactactatgacttgggtctactaaactctgctatgtcatctttcatgccacgtgtcgtccacatcaccagagaaagtttcaaattttttttttttttataatattttttatgttgtttggatgttgtttttctgttacttcatgtattttttttgttgtttttatgttatttttataaaacacagtataaatatatatatataaaaaaaattgaatgtgaaaatgtaaaaaaattattaaaaatagtaatatgtataaattttctaatattaatcaaataactaatcaaatcaaatatacatacaaattcacgctcgggattaaaaaaaaattacatacacaaagtagtcttaattaattacaatatattacacacaaaaatccacttattaattcatagattaattacacattgtagacccaaaaccctaacataatacaagctcaaaagttttgggattttaatgagaaagaaagatctaaaaatgaccccatctacatatacttatatttatatatataaagaccttagatatcatacaaaaagaagtaaaaccctataagtgaatcaaaaaaacaaattaattattattagtctcatcaacctctagaaaattactcatccactccaaattcaaaggctcatcccataaagttgagttaaggtaataactatcttgatcaaaaatactaataatctcattcctttttgagcacccaatatcattatcataataaccattatgattatgattataatcattatgataattatgattaacctctttgatcatctcttgagccaatttcttcttcttcttagtttgtttctctttattttgcttcattatttttttgcttaaatgagaattccagtaattttttatttcgttgtcagttcgaccaggtaatcttccagcaattaatgaccacctatatataaaaatatttatattttaaaagttaatatataaaaaatgtataaatataaatgagataaataattaaattgaattaattaattatatttacaaatatacctatttcccaagagtttatgaagcctaagtattaagtcctcttcttggtcagaaatattgcctcttttaatattaggtctaagataattcatccatctcaatctacaactttttccacttctattcaaacctacaaaattatataaatatatataaatgtactcaaatccataatcaaaaattatttttgcatgtgaaatataattaattgacttatataagttcaataaaaaatcctaccaaacaataacaagaagaagtggagtttggaatgtttggaataggttatctatatcgaaacacaggttggtgctttagttagtagtgttggataaattacactcgaaaactcgtttgcacaaatttaatatttgtttgaatgatgatattgtgtggtttgtgggttggaaaaagaatctagctagagaacatatattctttggatgtcatttaagtattgctgactaatttaagtatttggttggagtggaacacaaaagttatttcgatttctttccttattcgctaaatttataagtctaagaggtttagattttgaaaacaagtttggtatatcatatttggagtaatagaaatgaagtttttgaaatttgaaaagttatacaacaaactttattgtgaagaaaatcaaagttgatgtaaggattagaattagagccataatgctcaaaaaagtactacaaaaagataaccttgtttttttaaagtgttgtttaaattgtattattgttatgtggtaatatatactcatttagaattaaaaaaaatcaataaaaaggtatttaattagtctccattaggttttgttttggacctttgaattttaaatttaaaatttaagtgtagtatataattttatgatatttgaaataattatatatatatatattgaaaaaaatgatcttgtatcaaatatatagacatattttctcttaactattttccttaagtaaaatcaaaagtgcacacaaagacaaagaaatacatatataatttagaaaatagaagagattaattagacaatagcaactccttcactacatatatatatgtatatgtatatattcattaaaaaaaaaacctgcattgatagcaagagattgccacttggttgggccatgaagttgaataacttgagcaagtttttggtcttcttctgctgtccaaaatcctgatctgttgccttctttattcttcaaagtttggatacacattttcttcctaatgatacctttgtcttctttacatcttcaataaattcttatatataggatgcttacctcctaaaaggggtccacttaatggaccaacaacctctatgtgtttcagaatttatagttatttacgttgtatttatttaagatattctgtaaaattt

SEQ ID NO: 302519 - DNA, 1200 bp, Cannabis indica
atggaatgagtttattatagttttgtgtttaaggtatttaagtaaaaagttaatatacgtacctaaatagaagaaagttagttcataaaaaaaatagaagaaagttgttccattacgatatgcatataaatatatatactgattgagattagcattgatatcacgatcactaaccagaaataatctctaccagtgaagtctgtctgaaacgtacgctaacttctctttcgagaaatttatatgcttttcagaaaaagaagggatgcttttcaatttctttttacttatatatatatgtgtgtgaatgttataattaagtgaatataaatttgtattatgtataaacataaacataatgcatatgatatccttcaaaccatattgggtatttatatgaccctttatttgatatatgatcattacatatacatttcaagaataaaaacaaaagctatttgatgtagtattttttccaatgtattgctacattctaactggtgtggtgtactctttcatttgtattagtaagaaaaaaaatgaagataataataatgaatgatcactactcatgcatggatgaattaatagcattacagttttattagaaaatgattaaaaataaaagtaatcaaataatgaatgatcatgtcaaagttcggaaaaaaaaaatatagataataaaaccaaaccataatcaaaactaacaagtaactcagtaaacacacaaacacacaagaataacactatattttacttggttcgtgatcaagattttcagcaacaattaattgaggttattttgaataattaatgtgaatttaaaaaaagtatttttacatgactgaagcatattaaaaagttttagtccacgaatcattttcattgttgtatatttttacagaaaataaatattttgatcccccttcctttatatcttgggatatttataggctcataatagtagtaaaaatgccaccatttgtcgcgcttgtacgaaccatgccttcacaatttcccaaccttggttatagagcatgatcacctattttgtgataatgtgtctgggctcaatataggtgtttggtaagattggatttttctcttactaacgatttgacagctcacaatgtagtcgtccaatgaggcatggtgttaggttatttttagttttagtatatttttaattgagttttaatcgtg

SEQ ID NO: 302520 - DNA, 1200 bp, Cannabis indica
taaaattagtagaatgattagaaaaaaaaataaacacgattaatttttttttaaaaaaaagattaaaaaataaaagacatcaaacttaaaaaaaaatacgtaaattaaaaagagatacgtagtaatttcgtcaaaacaaaaagcatctaaggcgcagagagcccagaattcactaatcaatatgatcacttaggccaaaaattcattttttaatacaatttggataaccaggccaccaactatatttgttaatagctattcaaacaaatttatcaagagtatcataaaatactacgtacattaggagaaagagtaaaactcatagttaataataatatggggtgcatcatcttttaccattttgtgaggtgagaaaacctaaaaatgttccttacttccgagagagaaaacacaaaattccaaacatgacagctttttcttccattacatattttcaagtttcgaagcttaattagactactcttcatcgatatcttttccagcttttgggaattagggttttcctatatccccacatgcaccccaatatatatttatatatatatactacattctccaagatatacataccaaattcttttaaaatataaaataataacaatgtggaagaaaatgaaaatggaaattaacaaacataaatcaaacacaacaagccccaaatttaaagagttatatataatttcaacagaagcacacttaattactaataattaatgtaaaattcattaattaattaacaaattgttgaaggcctaacttttgaagaataaaaagaagaaagaaataataaaaaaaaaggatgataaaaatgtggcccaaacatcagaaaagtggtattttgaagaccaaattgagcccaaagagcatcaggcccaaccggcccatttttctctcccagccaacagccacgacacgtggcgtcttccggttcgtctgcagaaggcgcgtcagcgccttgtctcctccgaagcccacgcgcgcgtgaagcgcacggacccttctggtccgtgtgtttcgtccactcgcccagccgagagtgggcctcgtcccaccttgttcaccaagcttcaaaaaggaagctttctcctcctttctgcatgcgccaagtgtcacttcatgacacaatttgttatttttcagccaacacaagctcgacacgtggcaccgactcatcaaagg

SEQ ID NO: 302521 - DNA, 2050 bp, Cannabis indica
tcggcagtacgatacgcacggggttgatcccattttttctggttcggtaggaatatacatataaaaggtattcttgttttattcagtgtaatattaatttgttaatttggtatattaggaaatattgcccaaaataaaaagccctaaactaataagcaaaccggcggcccatttcccaatccgtaaatcctcagcccaaattagccgtgcatctcctccgtctttcctcagagtgtccctctctgctcagaaatcgttctcgccctcctctgctctgtcgccgccaggtgctctttctctttaatgctaatgtcctcttccatttcttctctgctcttttttcactgtaacaaaatttagggtttatcaaattggctcattttttgtacgcagaaatttttctcccagtcaattcagagaatatttaattcaaagcgcttgattttgaaatcaagcaagcttaaaatgagtatctatatgaaccggttactcccccgatcaaatactagttttctcttacgcaatggaaatgccctacaagctaaagttttgcgcttgagggaagaaacgttcatggtggattctggagttgggccccccaaaatttgcacacgagatgagctgactcgggtcccagtggatggatcaaccaggtttgagaatgtggtcggttacgttgatgttaaggctggtgagtcacagattaagaagcagatgctggagaggttcttcgtggatgttgtagctggtgaatcgcaaatcaaagagcgagctgctgcgaggttcaatgatatggttggatcaatggctggtgaatcgattgttcttccaaggagattcagacagaaccgagcttggcttgaactgaacaagatgtcgcgaacgaatgccaaggtcaaaggctttattgttgagaaagtaagaggtggttattcagtagccattgctggtttcatcgctttccttccatttcgtgttatgatgaatcagaagctaagtgatcgattcaccattgagagcattaaccccaaaagtaagcagattgtggtgtttttttagaaaaccaaaaatacattaaacaaattaagcagaaattgctgtatttttattttcttagctcttaagcatttctcctaacattaattggcttacattgattgttgttctgaataagggtttgtattatttgcttggtttatatgtttgaactattttactactttttctttttctttcccatttgaaatatttgatgtatagtttatgattaagattgattgaaaacctaattcagttcttaacaagtgattattagcatgaggaatactgaaatgtggacctgcatttcttggagatcctagcagcttttcccaaatagcaaaaaagatctgttaagttttttcttatggtgctactttttgcatgatccaaaattctatttgtatagtttttggatgaacacaaacgtcagaaatctataccaataggattttgcttgatgcaacagtagacttacatattctatggaagtaaatatttttttttattattattattagtatttattggtggaaaaacatttaaaaaatttactgtgtgtttatttgccatcggtataaacaatagctcaaagtttcaaaagaatgacaaattcattttgtgatgatgcaaatttatttgatatctacaacaagatagcgtatgatagttgagttgccaatgtacttttgtaaatattggcttgattttaaccagagacgacagatccaagtatcagtctggtgaacttgtaaagtcattttcctataattattcttgaaataacaatgataatcaacatgtgatgaaaattgctcataaactttccaactatattagtatttctatttaagagtgttcaaccaatcaatcctcaatgtatatttcttattttaaatcctttctagtccatactcgagttcaaaaccaatccaatccacggtgcagattggtgggttggttactttagatacttatttttttcttttaaaaagtcttttgatcgtattat

SEQ ID NO: 302522 - DNA, 3625 bp, Cannabis indica
caaggcatgaatatagatatatgtatatattaagatgcagttgtacttgttcgctatatataatcaaagatattatcaaagacaaacaaaactagacaaactagaaccaatcagaaactaatgtatacattaaacaactaaataattcgtatatgaccattattcatgtgcaaaccagaaatcacattactcaacctttcataatttcctggaatattaaaaagatgacgagcaaatcttctatgatttatctaatcaattttcagtcttctatgttaaagtatgcttctttgacaccaaacatgtgtcatccaacccttaaatttagggttcaatgattggaaatatattacacatttactcattcatatgcaaaacttttcgtgaaacaattttgtcgtcatgcagttgctattcctagttcataatcaagcaacactacaaccaataatagttttcaggttatttctcaagcagggcaagaactcattcctgtttttatgtcttattttcctcattttggtccatttaacactcatattttgcagcatcacttattatggataatcaaagtggcaatagctttttcttctcaatcatttagctttttctttaccttacacgataacaatgtctcccaataagcattgttttgccacaagtagtaatatagacgaataaatgaacaatgcatgtaaagctcaccacccaatatagttgatgaaaaggtaagttccactgcttcatttacaattactcacattacaaatagaaaacttgtaatcttcaggttagaaattgtcatgaaaaaggttaataaaggtgggaagaaatagatacagatatcattattttaaaaaaaaaaaattgcatacaaataatttacagcggaactttcgctggtgtacctggatcacgagggtactttcttggtgtaggacgtgctttcagacatacaacggctgttctctgtccatgtggactttgagattccactgagtagaaaaggagaatataaataaagaagctgtttcgatgcatctatataaaagtctggcaataacccgagcaatatctcaagaattgtatgaagttctcatcttagaattaaggaaatctaacctacatacttaagtcaaggagaaatcaggcagacatgacaatattacacataagcccaagcattttaagtctaaaagagtccaaatattttgtaagaggaaaaaaactgaaaaacctttttatttgataacttgtcaaaacaacatgatttaatatttagccataagcccaagcaacatcaaattttattatcattcagaatactgagcactagataattttaaacggttaaaataattaatgaataacttgttagttagtagccttataaaatggcagcaaatcatgttgtttaattagttgctggtagaaaaaaaaaaaaggccttgcttggaaaaggcagacaaaaaatccccaagtcatgcttggatggaagaaagagaatggtataaaaatatttaatttgcatttcattcttttatttggttacaatttaacatacaggaatgacttttccactagtttggtggaatggttattcctccaaaaaaaatagaaggaacgactatttgcattaataccaaaatataaaagaaagaagaagtttcattcctacttatatatttttccttttactcgctttgaaattaaaattacattctattcttaatttcattctcattcttctgttttcattaccccaaaactaaacagcagctataaaactcttaaggaataaatgttaggctcttctcacatgtacaaacataccagagcatacttgcaaaatggatgcacccatcgttccaattgctctctctgcattcataacttctgcctgtgcaagcaagtcaaatcagaaattaatcttttatagatacattagctaaataaaattaaataaatagtgtagaaaaagcaagatgaagttattctaaaatataaacacacctcaggattgtggcccttggcagctacaaacaagccaccgacacgaacaagaggaaggcagtattcggctgaccatcattaaacgaaaaactgatttatattattgtaaaatacacaaagggaaccagtacaattgtgttttatgattacctaagattctcatttccgcaactgctctggccactgctacatcaaattgctctctaaataacagattctggcccaaatcctgtcctataacaaagctaataacattcatgtctgaaggaaaaggacactgatgaagatatctaaatctaaaggttccaaaaagtgcatataagtacatgcatgttcattctgtattttctaatgtaaaatgccaatttttctttagcaaaataaactccatttgagagagcttagtttcatttgactatctagaagagatacttgaacaatctttctagtacagataacatgcaaaaccaaaatatttgtgaaattcccatattgggtggaagttagatttcatacaaagctaagaggggtgggtagctcaaaagatctgaggttcaagtccctcctagataccttaacaatttcaatagtttcctggtcctcaaatgttgtagggatacccgataggcagggatcctagtttcataatatttatacatataaagcaaagagaacatcacctaatgatttctgagaagttagaaccatgtaattaaggcttaagttactgtacctccgctcttcctctcacaacttgaacatttgacaaaccaatttgaccaaccacatgccctaagaaaacacaacgcttcttcatagactccataagggtaacttcccaacctgtcctccaaacacatacaatacataatatcataagattccataagaagagcagaacttgtccaaaagattagtggacctaatagaaaccaacagttaccaggacaagcaatcgctaaaacaactccaggaagaccggcaccactcccaacatcaacaaggttaagtttattgcacgatgagctacaatgagagatgtaagagtttcgtataggaggtacgacagcaagcgagtcttccacatgtctttccatgacttcgttaacctctttaatggctgtcaaattcattttctgcaattcaatgaaatcgtaaatgttcgttttacccaatcacatatttccgagtactcttttcctcaatataattaaataaaactaatgacggagagagagagattgacctggttccattgaagaagaacgtcaacgtagagatggatttgatccttctgggtgggagttagcgtttcgaagtaggaagaggagagaattgtggaggtggataaggttctgcgtttcagtgtgcgtggagaaaacgtcgttggcctgagaatgggaaggtgtttgaagaaagtcccaagagaaaggggaactacgctctgtctaactagcattttggcgcgcgattaggtcgacccaaacttccaaatatttagtttttttttaaagagaaatcctaacagcaagttcggctttttattaaaataaataaataaataaagggataattaaaaaaaaataaaacataaaaataaaacaaaacaaaa

SEQ ID NO: 302523 - DNA, 2023 bp, Cannabis indica
taagcataaaaatttaaatttttctaatattactcattcatgaataatacaggcccattaaaaatacatctatatatatagaagtaccatggcaatatttgctaaaccatataatataataaagcattcaatttgtatataaacattgatatatataaatatatatatatttatatattcaatagtatactgtcgctaattattagcaatatattttcgaagtgtgaaaaaatgtgggtgcttttgatgtttcttataggttttattattgttttgataagtcattgggtttatagatggcagaaccctaagtgcaatggaaatgagaagttgccacctggttccatgggtttccctcttattggtgagaccctccagtatttcactccacattctttgtatgatgtatctcctttcatcaaaaagagaataacaaggtacgtacatacatacaaatacaaatatacatactggcccatataatacaaataacaaggtacgtgcaatcttaatttgttcaaatatatataatactgtacttcgttatctgtacatatatggtcatacgtatatattatatttatatgcagatatgggttgttgtttcggactaatatagtggggcaaaatatagttgtatctacggacccggaattcaattacaaaatatttcaaaaggaaggaaaatatttcctattttggtatccagagagtttcactgaaatattcggtgggcaagatatcttgacttatcatggtgtggttcataagtatctgaagaacttggttctacaccttattagccctgaaaacataaagtccacattactcccagaaatggaccaaatcactcgccaacatctcacctcttgggctcgctctgcaactgctgtagatatcaaacatgtttcttcagatgtatacatatatatattacaaatacttaataatatatgcttctttatttccatatatatatatatatattattttgatgagggagtcatattttcatgcatgcagatggtgttcagatattttgcaatgaagctgattggctatgatgacttggagggcccaagaaaactacgagagaattttacagccataatagatggcatgatttcatttcccctcaacattccaggaactgcttatcatgcatgtttgcaggtatatataaaatattttaaattatatataaaaagtaaattgtgtataaaataacagttaaaataataatatatatatcagggtcggatgaatgcattaaaaataatcaaagagaaatttgatgaaagaaaagcatcgagcaagaaatatggtgattatttggatcatttactagatgaagtgaagaaagaagatacaattttgaatgaaacagtcgctgtaaatttggtgtttgggcttctctttgccacttttgagactacttctactgcccttacattggcaatcaagttcatttctgatcatcctcaagttcaagctgaattaacggtttgcattattattattattattattattattattattattattattattattattattattatatataattgttttcatgacacaataaaatataagccaaataattggtgaattgattatatcatgagagagagaattaaagaaaggctgaggttgttatactatttaataacatagccaaatatttttttattacagaaagagcacgaggatattattaaaagccgtcagagaaaggactctcagattacatggcaggaatataaatccatgaattttacacatatggtgagtaattaattaagagcatatttttctttttaaagaattaagagtattttaattattattgcaaagttaatggatacgtgtgtgtcttttattatttatgtcgttttaaatatttatttttgtacaagagtttaggtattttttaaaattatttattaattgtattttattttatatactatgcaatatatctgttagctcttcacgcagctaatttaattttttt

SEQ ID NO: 302524 - DNA, 1342 bp, Cannabis indica
aataaataaaaaaaattattaatattaggtttgttagagagatatgtggctaacatgatttttttaatttaagaagagattataaatatttaaaagattgtttaattttttggtttaattattgagattatttgttaacgggagatcaaacctaatcgttaaatttaacagattattcttttttatttttaactatattctattaaaccaaaaattgccacacttttaatatataaagacataagattattatcagcttcatttaattagttcctttatataaggttcatttttcaaatatcgcaaccaacaaaaatgtgtacttatttgttaattagggaataagaaaactttattatatatgaatatagtaatatatctgtttgtgcttaattatcgaatagtcgcaccacacttattaagcctaacgatacacacacatataataaataaaacatacgtaatctctctcatttaaataatatgtataacctatatatatatatatatatatatcactacgttaacgagaaacgaataatcctccttggggagatccaaaggtcttggacgaacatttcgaagcttgataatgaggattcatatgtacttttttttttttaagtattatatgatattacaacgcctaattttagtacaaatttttgttaatttatcgtatatatatgcatgtaagtattattttgtgatatggtcaaaatttggtttggtatttgaccaattatatattatatattatatatatatggtggttgtagtgagggcggatccacatagaaagctgtatattaatgatatttattatagatataatattaatataattgagcaaatgagtctgcttatcaagtatcatcacttgtttagcgctacgtacagagtataatagtataaggacataattctttatatgcattttcagattgtttatatatgttgagttggcagaataatacatagatatattcatatatgggctcgttaaatttatattggactatttatagcataatttttaatttttttacttttttttttattatgggacagaatttttttaaaaatattgtgtaagttttatactcactactagagaaagggcctttatcttcggtttttaggccagtttatcttcggattttagtaaaaatcgcaaccgaagtcatttgaggcgatgacatatgttttaaaataccgaagttaaaggtgaggctacgtcttcggttattatataaaaaccgaagataaaagtaaccttcgtcttcggttattatataaaaaccgaagagaaaggtaatctatgtcttcggtttttatataa

SEQ ID NO: 302525 - DNA, 512 bp, Cannabis indica
ctatggccacttgagctcaagtggttataaatttttttcttcacttattatattagaattcttatattaagttttcttttacagtttttataattaaaatttattttgtaccaaaaaaaattaaatttcgttttttttcctcttaacctaattaacatatattatcaatgtattttttaaatatttattatgatgattattttgaaagaacttatttttgattatgaaataaaaaaattagtggtccttattttattttatttttttgccattttttataattattatattgtaagtataaaataagtttatcaaaataattatagcctttaattatttttatgatttaatatagttttctctaattatatcttttattttcttttaaaaaagagtaattaaataacacaaaaaatagaattagagagaggaggcattcataatttttttcaattaaaccacaatattatgacaaaagggtgggttgtaagggtggagagaatgacagggtt

SEQ ID NO: 302526 - DNA, 2653 bp, Cannabis indica
aatcacgtaatacgcctatgttagttagggtgttacaatttcatactcctccttcattagagtacacttccaaaagatcgtactttcacaataggttttgtctttgatctatctcctatatagaatcgttaagaaccaaaggacccagagatactacgcgagcttcgcccttgcccttacgacatcgtttaggttgaattggtttgtaaggccccttatatggaacaagatctccatgattcatctcaacagatggtacttcaaaagatgatgtctcatgaatctccacaagatacaccaaggccaaacgaaaataattgccttcgccagacactaaaaaagtggcaagaaagtccaagcagtcagtaccctacatccaaatgacagatagggtacctaggaaagcctcccccaaaacttcttagagaggtctctgccagactcatcactatcaaaatcactaccatacagcggcctgcatagtgacgaattggaaacctaaacgtataatagcaacaaaaggcccagaatttcttttcaaaggcaaagtagaacaaatgtatataacgggccaaagtggaagtaaacaaaagaacaactcataacacaaaaatgtcctacctaacccttagggccaggaaagtcttaaatcttgaacatgcattttagtttgatcataagataaaatacctctataaaaaccctaaaataagaaatgttcacctatgaacccaacaaataaattccaaacaccactaaccctaattcatagaacagtgttctacgcatgcaaggtgactaattccttcaaatatgagaactaaatttcgattgagcattaaaaaaatagtctgaaagatgaggaatacttacttgtactgcaaagaaagtgtggtggtggtggtgatgtgctgggactccactgcttacacgacgtcgatgattctcctagccccgatggcacgacagttgaaggtgacagcagacgtcgatggaatgcaatgacaaagctggaaaaaaaggaggccgaacatagaacgaagaggtatgaaaaggctgaaacattttgggcaaaaagttcatatgaaaagcaggttctctctggttaaaaggttgctgatgaagtgaagaaaattctttcaatcgtcaaaagcactatttatatggatagcaatgcctggaaggattttgaaatatacggtcctgatcaaatggattgaaagctagatcatccaatggttggggatgtgaaaggttggcatttaatgcatcagaaaaaacagaataaagcatttattaatcatcatttcatgacaacatccctaatggacctgaggacaggaaccttttcaaaatcaaccggcattcgccttcccaaggaacatgcctaaggtgaagagtgtgggcctcatgaccctactaatcgagcttcatgcttcagcaagtcctcttggatatcaccaagaacgactatcacagacactcccttcagtctcctcatgacttgtccgcaagtcaaagacacagagccaacctctcggagaaggcaacaagctcccgacactctcaagtcccgagagcttaggggtaaatgttattgctattcttggacgggttttacgtggaggtagtagaagggtccctcgtcagatcacatgccgatgtcacgaaagatatcaaagtgttcagaagaacgcttccctttatgaaagatgaagtgatccttgaggttccaaactgattcgtctactattttgaggcaaatgggaagaaaaagcattcttgattgattaggaatgggccaccctcaggagccttgagctgtacttcctggaaactccttcagacctaattcgaaactgcacccaatgattacacctattcagacaccacatcagatattgtctctgcatcagaccgtggttgtgcgcgtacgtgcctctgtagtgctatttatccaatggcttgtctgggatattacttttaaaggaaaaacttttgaatgacacgtgttcatatccttacgtgatagcctacatcaataaagcactacacaatgggagagttacctaccaaaccaacaattggatgatcctgtactactttagagcctttcttgcgtgctgagtaagaaaccctaatagggtaaagggtatgctcttattaacttttgtgcctataaacaccttcattttttatgttgagaggggtgaacaatttttattggtagaacctctatcaaatgcctagagagctctcttcttagagagaaacaaaagtaatagagagattaccattgtaaacacttgtaatactcaaacattttccaaagaaggctaatacgagtgactggtggactaaggatcattaacgcatgaaccacataaaaaatctatttgtctattatttaatattttacatttccttaagctctgattaataagtttttgaaaatcttagtaaatagtaaacaatgtgtgacttttgcaaacaaaaatgcattacatagagacatattataaatagataaataattaaaaaataattataaggtaagatctcttttgatttgtattttttatatatatctatatagagaaaaaaagggaaatttacaaaaatactacttttttaccaaatattttcaaaaata

SEQ ID NO: 302527 - DNA, 5336 bp, Cannabis indica
gttaaaataatcaaaatttcaatatatttttgtgtaaccttttaatgattctggtttaataattatcaaatttagatataaaattatacataattaaatgttaaacattgtgaattatcaaattactaaacttctattataaaattttaactttaacaatttaaaattaacaaattctatcagttacctctaaaaaaaatctctagctaacaagtagcacaccttagattggagtcacaaggttttatatcttagacacatgttaaaagtaaatccacagtctcgtaagaatatgaaaggtttaagattagaagttttaaccacgtatatacctcatgatccgaaagccttgttagtattaggaaagaaagaaacttttattcgcgacttaaaaaagatacatatgaaatcaccgatcagtagtataatattagttcatttatctgatcgaccaataaaatagaaaacttaaattgtccaaagagttgttacatctctaggattcacttttcactgcacgacattcaagggagtgacccaaattactcaaccggtaaaatagaatttgtttttacataaaaagtagttaattattatattaacctctacaagtggtgtaagctttatactaggctcgactctaggttaggcctgcatttaaggcccacccaacccaaatatcaaaacatttttttttttaaaaaaatatacataagattcacccaatctcagagttgacgcgagtattaatttgctcgacgaactgtaaatagaactgaagcataccatatactctgtcaaaatcatactagtacttggatcgtacaaattttcaatcctcaatacaatttctcactaagacatttttaagcatgctttattttatttattgaattacattttcttatgtaatattcatacaatgtaaatgattagagcctaccaattataatgtgtaaaaaaaatatcaattataaggtaatttgattggttccactaaaaaatatttagttttttccaattaaattggaaaaagtaaaagaaatacaaattattgagtaaaatactttcaaggaatgaagtctacaaacaatcataaatgttttggtaatggagtgtggcctgatgagtcttcaacaaacaagcaagtaaaccactagaaaaatatagtatggaattagaatgattaagtaaataaataagaaagatcattctaaattctaatacaagattaagtttcttaaaaagtaaataaataataataataattttattaattttcataattgcatattaaaaattttccattcccactcatttgttttcattactcccaagtagtaattgtgaacttaatattgtattcattcactttgacttcttgcttttctactttttattcatgttatatatatgaaaatacatttcaaatcatgcatatgctatctttttataaacactatagttaaagataatctaaatgtaattattatgtttgatgcaagtatccactatatactctcagtccaattgcttaagtaaataatttatcttttcaatttatgtaaaaagtagagaaaacattagattttgagccttgcagatttgaagtggttctgtttataataggcaataaatttgcatttatatttatggcaaatgttgtatcatattgctagcaaatcctactacattataatcatctctattcacagcaaccaagaaaaagaaaaaaaaagccaataactaccagaatttctctttttgaacttagccaatttcttttttgactagttatgatgcagcaaagactccacaaatggtctaggtaatcatatgaaatgatccatccatggttatgtatacctatgttgtattaaacaacagtatcataatttcaattcttaacttgtaactgtaacttaacatgttgaacaagtacctatcagttgtttttcacactttcttcgactcgggtaagagcgtccgtgagcacatcaatagtccagtctttcacatcttcctgtgtaaaacatataaacatgaagtgtaagaataatggcatttgcccatcagtgtataattccattttttttttattagatacaaaattgctaaggcacacttagataatccataattaaatgataaacaaaagtgtaaataatctgtaaacatggtctaaagaaatgaaagatgatagaattgtcaaaaagagaaaaaaagtagaatttcggaaatcaatgagttgaatgcggggttagaaaacagtgggcactagttttaagaccagtaacatgctaatatgaaagtaagcaacattaagttaactgcaagtacaaactcaggagagacaaatgaaaaataagcaacatctataagtaccgaatttttaacagacactagcattttctagccttgttatgctaactaagaagaaaatattgaggttgtgttagacaacaatagctaacgatcttaaaaaaaagcgctggagttggttgcgagatactatatatgttgcataccttgcgtaatggttcacccgttcttattcgtgcatttggacgggcaagtttggattcaaatggagtcctgggcctcacttcctgaattgcttcccactcttcacgagttagcatcctgactgtgccttgaccctcaggagcatcctctatttgcttctcaatcctctcttgtacttttgtatcactatattcatactaccaacaaaaatcaagcacattaatcattcataaccgaaaacctatgtcaagataatgcaaaacttgagccatattttggttgttactagttattccctagtagtcatacaacttatcttaacctgtatagccaaagtactattttccagtcatcaagaaaatcacacgtttttccacttttcgtgctgctaagcataccatgtaaacaaaattaaaaagataaagataaatgatcaaaacagtgcagcacatgaaattttcacatcaatgatctgaattatttagtgtaacagtgaatactccttaaaatttctcagcaatagcttgattaaaaagaattctaactcaaaatcattactaatgtgaataaagtatagtcttcttatacgaaactcattgatcaccacttgaggctagctatcttatcaacaaaaaattgccactcatggagaactgaaacaaatgtagcacagaaaatatatgcatcaatgatcttaatccttttggaaaattcactcatttgtcttcatccattaagaaatttttggtaacaaaagactatcccaaagccattagtaatatccttaattgatcattgtatattagagaggaaaaaattcaaagtaccatttaatttctattctcaaacaaggtctatcactaacagtatgtttggtaggaggtatttaaggagggaaggattgaagataatggattgggcttatccatccatagtctcatagtctatgtttgtttggtaagaaggaaagaattaagggaaggatagaggtgtgggttccaaatccacaagggcccaccaaatttagtcttctctcatttagagggattgtaaaaaattggaccacacctttccttcctctcaatttaccaaacaacttctaaggacacaccaattccatccactactttcccttttccacaccttataccaatccatccttgccgttttccatccatcattccaaacaaagcataagtaacagctttgttgaaacaacttatcaaacattacaaaggtatacagtcaaaagactataaagatttaatttttagagaaatggaataataccatataaaggagctttgcagcaatggcgatcccaatgaaagttaaggtcatgggcagagtcggggtgtcaaggtacttcagaccctcaggaaccaacaccacaaacgcatcattcttcttgatcttcttcctcttcttctccctttctgcaactttctgctttaaactttcagttggcccattgcgaggttgatgatgatgaagatgaagactatgagatacattgcgcaactggaattgcctctgaatcaacattgagagttttttacaagcaccattcatgattgctgaaatattttatttataggcttattacaaaatgagcgaatatgaacaagaacacaaacatagctacacaaggttcaatacgtgaacatttacaactctacaaatggtatgaattcaacttgtgaaattgtaaattggagaagaaaaagaccataaattcccaatgtacaagtaaaacctctatattaatccttatcagaaaatgtccacaagagattgatatggaaggactgaatccgcttcaagatgacttgttggggttcaatttccgtcaaaacttgtgagtggaattttgcaaagtgtggaggtagtcgggccggaagagacaggctacaacagactctgccccaacttctcagaattatggtgctggaatgaaaaaagataataataagcagttcaatttgattggctaattaaaaagaagatatctcatcaatgctaatagatattggttgccattgatatgcaagttctttcaccagcttattacttctctctacttgtaaaaactacaacttctgagataatggtgttgtaatgaaaaaagataataataatcagttcaatttgattggttaattatagagtaattaaaaggaagtgtatctcatcaatgtcttattaagaatatttggtttggccattgataatgccagttattttcacaagcttattactttctcctacttctaaagactctaaatactgagatggggtgttgcaatgaaaaatgataataataataataataatcagttcaatttgattggctaattgcagtaattaaaaacaagactatctcatcaatctgttaaagaatatttcatttgaccactgataaagcaagctcttttcacaaactccaaattctgagaattaaaaacaaatgataaatctgaatggaatttcaaaataataataagcagtagaatttgattgggtaattagtaatgaaaaaggagtatttgatttcagaatagtggagatattttgttacctcaacaatggtagcaccgtaagttgaggccggagaagagagggcgaggccggcgccgaggagagtggggataatgaatagagtcgtgtagtgtaattgggaatttgggagagcaataacaatccaaatgcctaaaaatgaaaccctcctctcctccccaattaaggtgtggtaacttgtatatgaatttttaatgttttaggcaaaatatatatattaaagaaaaaaaaac

SEQ ID NO: 302528 - DNA, 3272 bp, Cannabis indica
aaaataagtcaatttactaaggaagtactgccctaaaaaaatagatgtgtgctcacagagagtccaggcagtttttattagttagttgactctgttgactggagtagagacattcaggttggtgttgaatgtattatttctcgatcattcatacttttcgaccataaagaatctttatttgaaatcgtccactacatacaccatgatgtaataacaataattattgagattaacagcaaaaactgaaagaagcctagacattccttatgatacatgcacatttgttttacacgattttaactttcaatctaatctttgatataataatgcaatactatactgggcatgacttgtttcccctataccgtccctgtgcatataaatgtattgcagaattgtatcgactagctactacaaatttttgagtacacctagccattcttcttctgttagaatttatcaaatcaatctgttttggtgctgaaaaatcagtctaaattgactaactggatgttcatatcaggttctctgtgacattttaagaactggaggtcttcctggtcgtgaaattggacaccaaccagaattgttttttgcaagtgatgacctgacttaccaggtctgtttcttttgttcatattcattatcactttatgatgcttacactaataatttttaaaaattattcggttaaaaattgagaatgtactgatgaggtcttgacaaaagataggctgcttttcctgctgaacgtcttggtatgggagctttcagaatcgcactggaatctgtcttcaataagtaaggatatagaaaatacacaaatgaatgcagtattatgacacaattctatacaatcaatttagtgaataatcattttttaagtggccaaatatgcactctcttaatttcacttgtattaggctttttattattatgaattagtttcactccttttctttcttttttttttttggttcagaattcacccaaaggctctaaagtatacagcttatggtaaaccaaatccctttgtattcaacactgcagaagttttacttaggcaattagcgcaatctcttcatcataatgttcacaacgccaccaatcatgcaaatgttggaaatcaccatctcaaaacgttgtacatgatcggggataatccttcagtcgacatccatggtgcacgacaggtatgtctattcaataaagacttcttataactcaattttgtttacaaatttaatgatgaaatgactaaatggatatctaatagcatctaaactccaggcaggacatccttggttttctattttaacaaggactggagtttttagaggacgggaaaatcacccgaagtttcaagctgatctggtaatatttttagcaaacaaactatacttaaaataatgccttgcaacattcagcagccgatatctcctccgccctttctggctaaacatatttgtttatatgaagcaaaatctaaaaatgtttgtgcaggttgtggacactgtggaagaagccgttgactatattttgcgaaaggagtcttgagattctataagtatatttttctctccctcaaattttaaataatgtgggatgaaatctttgtcataattaatgaaaggggaatgaaaacccagtggcttaatttatttggttctcaatcatattttcatcgaaatttaattggtcgaagttcacgtattataacaatttatttatttattttgggactaaagatctacgtctaggggttcaaagcatatggaacaaaattgaccttttactcgtgttaataagaagagtttatttgtataccttatattcaagattgtgatttttttaaacaaatttctcattctctcatactaattttagtgatttttaaattgctatttaatagtctttaatttgattatgattattattgaatagtacagtaatgtcaaattggaggttcaatatatatctcagactttatcctatcttgattaaaaaaaagttgtattgtaagtgattcgtgatgttgagccaatttattttgctatgatacttaatcaaacacaataagatatgggtaaaagtagttatttaaggatatctctaatgcttaaaaaataatagtgccaaaataggtgttaggacatctccgattaataaaaatagttatcttattttaaaaactttttatcatttctcttatatactttaacaaaaatagttatcttattttaaaaactttttatcatttctcttatatactacatcatacaatgtagttcacatacttttgttcaactatttgagcaatccccattagagttagtcttagagtatctccagggttggtcaacattgcccacctgcacacttttaaattttaactttaaccaatttagaattttttttttttaatttttttattttcagttgagtatcagtatctaaataagaccatattttagggaaagtttcaatgatgtagtttgaggtgctgctcgtcagaaagtaagtaaggccaattagagaaaaatatatattttaaattaaagggacaagaaataatgcaatagctggcttgttttttaagaatttctttattttaattggttgttgtgattaataaattgtttaaaagaaataatgtggggtcaaatagggtaacgattaatgttatctgcattaaaagtacttatatatatatatatatatatattcttacctagctgttcaaactcttcttgaactaatgtgatactagaagtttgtctccattgttgccaacattgtcaacccactttaattggttgatttgtgatggcggagctactttgactctttttttagttgtcagtgatgacctaagccaagcaaaaaaaaagaatatataattgcatgcattttttttattaggaagaagaaaacttcattaatcaacaaactaaatgcaccctaattaattacatagactttctttttttaataaaaattgcaactttttttttttttgctctgataccaattctaagtatttttttcactaagaaaatatcacattattttaaaatccaaaattaatctatacatttataaaagtgttgattgtgtgtttataaatttcatcaagttattttaactaggctaattagcaattttcccccttgaactttgacatataccaaatcatgccccctgaacttttttagccgttaaaaattccccatgaactattgagattgttaaatttaaggacttttgtctaa

SEQ ID NO: 302529 - DNA, 917 bp, Cannabis indica
actaatcctaggtcctaacagaattttgtgtagcaatcatgtacttttccaactcgggtataatgcaccgggagtgttaatgctacaaaatttattctaatccccaaaattcagaacccgacttggactcaccattttaagcctatctctttttaaaatgtgtcatataaagtcatttctaagattattacaaatagaataaagcttcttctccccaaaattgtttgccctactcaagtagtgtttatgcttggaagggatatccaagacaacaatgtgattgcctaggaaattatccacacctttaaaaggaaaaagggaagagaggggtttttgccattaaaattgaccttacaaaagcttatgataaacttagttggtagtttgtggattgggtgctgatgtgctttggggcttcgaatagattttgtaactgggtcttgaaatgtattttaactaccaccttcaatatttgcctaaatggggccaagttggcagaattgatccttcttgtgatattcttcagggagaccctctctccccttatattttaatttgggttgttgagatattatcaaggcttattcaagagtccctaaaaatggtggtatcaagggtattagaatcagtcgcggtgggccaatcatttctcatatatttttttaggatgatttaatcttggttggaaaggctaccgtaggtgtgacagtcagtagtcccgtgatccgtaaggaaaaatatcgggtaatctgtacaatcccacatcacctagggaaggtcaagtgtgatgattctgaggctgtgtaggtatgggactgcacagttgaagagagcttaaatggactgattggtactacatatatcaacaaggtgcatcttatttttcggtagcccatcacgaaagaactccacagtta

SEQ ID NO: 302530 - DNA, 1641 bp, Cannabis indica
taatatttttatgtcctcacagtttggtcttattgttcaagatgttaagaatttacttttggattaatcttttgttgagttatgttttgttaaacgatctgcaaacaagttggctcattgcttggcaagagactcttgtttatctacaggttgtgtgcttcagttggaggattgttcctctgaagtgagttctactattttgaacaagtttattaattaataaatctcctgatttattaaaaaaaaccttcaatataattaaaagttactttaaatatatatatatatatatatatatttgtatatatagtacaatctatacaacctaacataaagtagtttaaagccttatcatacaaaataagacaagtcatataatatatttttcaaactatataacacatttagtgtataatctcaaaattatattcaaaaaagaaaaaagtaaaaaatatttaattggaaaatgctactgtttcataattatatttatttgaataaaaaaattatatttatttatccttaaatttattatatttttttaacaagaaaaaaattttattcaaaacaaacgaaatacaaaataaacaaaaagccagctgcaagaaaaggcaaccactaagggacattaccaactagcaattacattaaatatacaagtattcagcttgtttaatactaaccgaagagttcatcactctaatcttaacattattcttaatatccaaactaatcctggtagcagttttacaactaaattcaaagatacaataatttctattcacccatatattgtaaactaaagccaaggtaacaacattgaccactttttcttggaggctttttagagaagaagacagccacacataccagatccctgaagatttttggccaactgatatctcccaaccagctgctcgctttggctaccactttaatggtgaaagggcagtccaaaaaaagatgggcatgagtctctatagcatagtcacaaaccgggcattgagcagaaacaatggacaacagtttgcttaaatgatctctggtcaagaggtggttgttaatcgcttgccaacaaatgagtctatgtttaggaatactcaatttatgccaaattcttgtagcatagtctaccctctacaaggaagcatacaaaatatagaacgatttggctttgaacttccccttttgacaagcatgaggtatatccccaatctcaatagagtttcttaaccgtaaaagtttcttgaaataccagcttgcatcatgtttgaatgctatttgccagaaatctttaccttttaaatagatagtgttcacccatcggaccttgatattatctttcttgctagagatagccctaataaatttagccattaaggttatgttccatttcttaccttgtggaacccaatgcctctatatttcttcagcatacacactttgtcccaagaagagaagtgcattttgcttcagtttccttttgttccccaaagaaagtccctacaatatttatcaatgacttcagtaactttttgcaaaagaatgaataaacttgtaatgccctaaataattaggcacgctacccaaaatacttatgaagccctaatcccctaactgggattactaattaaaatagcg

SEQ ID NO: 302531 - DNA, 3088 bp, Cannabis indica
gagttaagatttttgttttagggtgtcggaaatggagaagaaataggtgggaagaagtgggtgggcatgtgggaaatagaaaagaagtaggtgggcacgtgagaaatgtggcaagaagtaggcaacgatttttttattgggctcttgtacccgacggttgaaaaccgatccctatgagggccaaataaattttacgaattccaattaaaattgtcccctattcttgtaattactgttataaactgtcaggaatagtaattttctcgacggttttaaatagttacttaatttttttagcgacagtctccaaaaaaatagtttttaggatcgtcgcgaattctgacttttgtagtagtgcagttaccttttcctcttcctctataagaaattagtttttcaagtgggattatagcatccacaagtgttccatcaagtgcaccaatagcccctgcaatacattaataagttcaaatatttataacatatattttataatacatttatgattagagaaacaatacaataaaaaaattctaataattttttgagcaattggaaaattagaatcaagattaattgtgggtactatgatctcttttgaaaagtgaatcattgattcaagaacctcaagaaaatacttgcgaacaatttgtgaagaatgttaaaatcttcatttcatgataataaattgatcattatgtgctatggtagttaaaaatattgctatcttttcttcaacttatacatgcttactatctttaatcctttctctttgtctaaagtcattagacaaaaatacaaatgcatcatgagacatccacatcaactctatgcattgtagatttgagccatataataactccaatgtgtatcttgtaccagatagagttaatgtagtatctttaactctaggtatatagttgcgtttacaatatacataccagtagaagatcattatgagtaaaagttgatctttaaaatttatataaaatctgttaagaaaattatagcgactttagaggaacaaaaataatactaggacgaaaaataaaatattcatagattattgaaataaatcaataaacttcagtacacaaaatcaaaaaaattacataatgtaacaaataaaaagttatctaagcataattataacttaatcaactatatcaaaaatatcctaattttttcccatagcttaacccaattctctattaatgtgatgtctttcatgttcatccatgcttttctatagctatcgccatcacaaagtacaccaatagtttcaatatacaaaggctcctcccatccaagtccatctaatatttccatgtagtcctcaatttcaggatcattactttttttaatcaacaacttcaatgcaacagacttcttatcatcaatatcttgttgagataagaactttcctttcttcttttttcctcctaaaggatttgaatattgagatggagaagtgtttacaacgtcattaatttggttaccaagtgcactttcttcagcaaacacaccatatttacatatgtagataaagtaacaggtcgaggaattgtacaactaggaccaactataaactccaactatcatagtaccatgaaagagtgctctacaatgttccagaaatagtaaaagagaggttttcaatgcttttgtcttttggtgtgcctatatcaaattcaaaaagagagtatgcccactcatgccaaagcaatacctagcatagtgaggaagactgtgtccaaccaaattgaaggagagaaaagctaagttcaaatcttgataatgctcgctacagtcaggaatcaagggctagagatctaaatggaaggagtcattatattttgttgtcatcaatataaggatttcttaatcacttatgtgtttatttcaatattttatgaaattcatatttaggatgttagattatagattataatcatacatgttagtaaatctagattctggtaaaacaagtgccaataattttcctaagagctttagtaataatttattttcatgaagtatggatttaaaaaaatgatttagttgatttggaagtgttcatgttggtttacgtgttaattgatgattgaatgtgaattacaaaatttttctatgaaacataatcttattttcgttctaaaaatattttatttggataccttgaaaaattttagttttacggatctcaatttggattaaaattgggaaagatatgaaatttttaaaattggaggttggcagccacacacgaactagggttttggccttgaaacccctcatcagtgcgtgaaattcagacaaattttgtttgaaatcctctgccaacactcgctcagacaacgaaagcctcgcgcacaagggaccctagaagtgacaaagtttccttggtcagggactatgcaaatctcaaccacgaccgcgatttacacacagaacaaggctgcttgcagcttttcttggcagccaagggttctttgcacgcgaaattcaatttttttgtgattttttcaccaaattttaaatttttctatttcaaaacaccaaatgtcaatataaaatattatttttaatatgtgaacctaaatatcaaagtttaaaattaataatatttaattattttaatagtgtagtattagtttttgacattttgatgtttaaatttaaaaattagttattttatattttaattaaagttagtttttaaaaatttattaattttttaaattttacagattatttagttataagattagatattttaattttagatatattttaaattaaaagatatttattttatcttcttaatttaaaatattatattataaattatcataaatatcctaaccataataattttaaattcataaatttgttattttgtgatataatttatgatttaaaaatcataagttagaaaaataatatttattacaatattatatcattttaattattaaaattttttaaataatattatatatatttaaataaccttgatgaaattttgaaaaaggcttaatataagatattttagaatataattttgaaaattatcatttatttatta

SEQ ID NO: 302532 - DNA, 2922 bp, Cannabis indica
aaggtttctcataccttttgatgtgtttattttatatcgtttttagaagttcatgtttaggatgttaaaaacatacttattagtaaatctagatcctggtaaaatatattccattagttacttccctagtactcacgagggttcatctacaaaaaaaggaatacaaagggtttgaatcggccagaggtacatatttttggaagataaaacacacctagtatgccgaccagactgattcaaaagaaaaaaggaagaaatttcattccaataacaaaatttccaagtctagaagtttagggaatggcaaaaatctggaaaattttcaaaaagccgcaaatgggcaatattagataatttctagcaaaacaaaaaaatagaagctataaaattggaagcctaaaagacctgtgcgtatattaacatcaacaattagaaaaccctaatgtttactagccttagatcatccaagaacagtctcgagaaccgatgatttcacagattcgttcagaataagttatgcatgaaattacaagaaataaaagggtgaaaggaaacttacacaatgttcatagatttttgaaagatgctttgagatggctctggtggtgtaaaatttcagcaagaactctcgaatatttttgtggaaaaaaggaaaatatggctctgatggtttgaagattaaaatggctaaaagagtgtcaagaaagctttaatccctttttataagcatttggagggataattaagtaatttgaaatttgaattttgggtttacccccaaaaaaaggacaatcaacgctcattaagaaagtgcaaacgtcatgcatgcggtacctggcaactgtcaccgtgtttcttgaggtctagcttctaagatggcattaaatgccccgaacattaaagatacattcgataaggcacatcagatcaagaatggcttgaatatcagacacatgttacctatctgatcaacttagtgaccgaataagtccacgtgcgactaggaagtacccacgcaaacttagggcaaatgttatctcaatttctgcacaaggtgatgtggcatccacttgggtgacacatggaaaagattctatagccttgatggacagaccctcctatgaggtgccgtcaaagatgatttaccagtagtaagtaatcattctacaagagctaagaatttttggacagaatgtgttacaccatctaaccagcatctattatgccgtcagctcacatacattgactagggaatgtgaattaaatgcttaacctgtatatctataagcttgcaaatcacaacaatagccttaaaatcacgggatagattcccagtaacaaagaagagaggagacctgcctagtttcccattttgttgtatttatttaaggaacataaacaagttttctattttgattcttattagttttagggaaactaatttgatgtgattcttccctataaatggtggaaccagttcactattcaggaaaacacaaattagagagaaattataaacaagaatcatagattcaagagagaattacagtgaaatcattataagagcttttgagagagatcaagaacttctttcttctcttctcacaagtcaatacaagtgataggggagtaggctattaccataatcacggggccaaacctctatagcaacttttgtgttctctttgctttatcattattatatttatcattgttattatttaattaattctaattactttaattgactcattattgttagctaaaggatggtcaacaatttcaagttagagtgtgagaagatgcagattcatattactaattattacaatatcccatcaattattgaagtgcacaaattatcctataactcgttgttggaatggagtcatgcatatgctgtgaaagaggacgagatcatactttgtggtcatcacttgaatttctttatttccctcttcctcgtattttaattcttccacttttccaaatggtcgttgttaatgctagaaaacgaaaaacaaaaatttcatttgataagcgacaattgttaaataagagagtaaataaagacaataaacactagatttttatagtagttcacctctaattttgtttgtattggagttatgtctacttaatcttttattgagtatgcaacacttagagcacttgatcttagttttgcaagcaagagctttacaaaagttaacttagagcgtggagtttgaagttagaaaggtagcttaagtttcaaagctctggatctctagaaattatatagaatgtgaaaaatgaactgaatgagccttctatataaagatgaggatgattgaatgataaaggcatgataaaggtttgtttgatgcctaaaagcctttgtttactctttttggtgaagatgaaggaaatatctgagaaatttcattaggatcacctcaaatgcactcctgatggactggtgtccacctcggggtagggtcttggattgttttggtatggattccattctattgttgcccaatgttttgctagtgcacaactagtttgaaacctagcccacgaaacagagtcagttggattggtgaaccacccgggcaccaactgagctagagaatgctcacctgggcactggtagggtttgtgcccttcaatgtatgcgttacgcaagcacatgtatactgtcattctttaagggatttgaggaatcaagattcaaacttgaccccgaaactctaaaccctagctgtcgtgttctcagggaaaaggatgttcacatgagcattgggtaccacttgggcacccccaggtggtttttcccttgatgatgattccaaggctcaggatttgattgtggcttgtcttttggagaatttgatgcatttgtgaagtcaatgttgacccaaactcttaagtctcctt

SEQ ID NO: 302533 - DNA, 1762 bp, Cannabis indica
aaaaaataattgctatttgtttatgaattaatcgattggttattatgtcatgcaaaggaaagatgagttcgctcgtaaagatgtttggttcaattttccttttttggtctcaagaagtctcaaaattctctaaacctgatattatatgtaaggacactattttttgatatattgtttgtacagtaactgagcataatgttgaaaaaattccagtttaaaatatgttttatctaatgaaagaattgttctttcttagtatgaacaataaataaaatattgatcttttatgctcataaacaactctgatccagctatttgtgtttgtgtttgcattatagcaagtatgtcattgtattagcagttctgagtaatgtggcaagagaagtgcttggttttcactatagtagcaaacctagcattattaagcgaaggggcaatcgattaagttgatcaagcactgcgaggtatgcattttttttggttgactagcatatactgaacttcatttactttagaagcaaattgtgtattcttttggcaatcactattcttttgtttaattttctattactgaatatttgaaagaagtagattatatgtgatgttcatttaaaaaaaaaatagctagatgtatagctgcagaaactatatttgtcttctataaatatgaaccaagtggttgtgttgtggtgttaagaaatataagcctataataattaatttttttttatcatgcaatgagattaggaggctgaacaataataacttgtgtgggtcatcttctttaccacaataataattaaaaaaaaaatccgcttgctttcttgtaagtaaaaaccttctctgtttcacttcattgttaaatgtgtttcttttttttttatgctactttttttatacttcttttcacttttatattacatatgagaatgaatgtactataatttgtgtagggaagcaaatatattatttgacgggttgagacttttgtggataccataggacttaagtgatgtatgagaaagtttgtctaaaattatcgtatgtggcataaggggaccgcgaatacatacttttacttgtccaaaataattatagaattatgtagttattatatgctaacttacattcgtggtatactttaacttttaactcatattgaagtcataaaagtaaaagtaagtatataatctttactataaatacaacatataagaatactttctttttaattaattttaattttttaatttgacaggttgatgacctatcccaatattgtaaggaagaacatctcttatcgcttcgacaatagtggtttaagtcaattgtttcctttgatttataaataatcagtagtattctattgtatttcttttagacattttgtttagtattttagatatttgtacacaatgtaaagtattggttattaattcaagttactattggttttaaaaattatattaatcatttattttttagttaactctttatatacgtattccatataattataaaaataaaaattagatttattatttattgtaaaaaaatgaatgaaatgtaataaacttaaaagaaaaaaattctgaaaacatacatatttatttgcaaaatgtggaataaaaggttacattttatcccatttttttaaaaaataaattaaaataaaagggtactttttatcccattttttattaaaaaagtgggataaaaagtactcttttatcccacttttctcataaaaactgggataaaa

SEQ ID NO: 302534 - DNA, 2618 bp, Cannabis indica
tacagaattcaaccccatataactatatataatcaaataatttgtactactataattcctttttttcgtttgtatatatatgagtatagatgtagctatatgtttctattgctttgttttaatattatagattattaatactttggcatatcatcattgtcttctttattcccacagaaccacaaggaacacgaattatatatgatccatattttttaaattaatttttgaattatgaatgagaaatattaaaaagtaccaaagatatatattactatccgagtattatattattattggtgcaaacatattagagctcatataatttaatgtaataacttcaataaaatatcgtcaactattcacaaaatggtaccttgtgtaatagtaatgttcattataaatgttaaaatgcaacaatagtacctaacacctcctactatattatattattggtgtaatttaatatatatcaactcccacataatttaatttaatttagtaccttatagcaattatcattttcaaaccaaattttattaattgctgccacatttatctcggaacaactcttcaattaatgagttgtccaaacttaatatatatgccataattttaatattggaaatataattagataaataacaaattattaaaattatgttcatagctaattaaaaaagttataatttatttgttgtgttaacaattttattgttacacatataaatgaatcaagcccccaatgatatatgcaatgcaagtgatgagaaatttcatttccatttccatttctaattatattttattttaataagaaaatattaattaatattatgtaattataatcatcaaatattaaacataactgtacggcctcacaaaatttactgtcatagccctcattcggcgatattgcaggccggcggagactgtgaaccacatttaatcactcatttaacaacgtcaaatatttacacacacacacacactacacttactcatgaaatgaccaaaatacccttcaattcaaatagtcaactcctcttctctcctctcctacaaataaatatatttaaataaattgcacgtcatttaagaaattaacaccacggttggtcccccattgttttaattaaattttattaatactggtttttggctaaatttaatttttgaaaaattaaataaaaattataaaaagtacgaggagaggtggcgctgtgttcccctatgtgaccacaatttaaacaaaaggggtatgatttaatttttatttatttacaaattcgatgaaaaatacgcctctttttcactgcccgaatctctctacctcaataaactaatcccaattagtttaattaattaatttttattttattagcttataaattttcaaaattgcatccacgcatacacaaatgtccgtatcaaagataatatatttaaattctaaaaaaaaattaattaaataaaaaaaatgtaaattccctttgtacaaaaagaaaaatgtggttacacttggctactgtcactatataaaatataattaattgaaatatgagtatttattggaaattaataataataataataataataataataataataataataagagaagggtcattaaaggagaaggagtgtgacagaaaagtagcgggttttccggtgcaaaggacgaagaagcaaaagctggtgcggcgacacgtggcgcaaggaaaaccgtgagattacgcatgcgagggatttagttagcggttgatcattcccatttggagatgtgaaaacaacacacacacagatagcttagccaaaccaaaagagaaagttagagagagagagagagagagaaagacaagttaggggagagacttaaatttggggttcattgcagctgtgcagagcagtagagagagaaagaaaaagagaaagagaaagtgagagaggcagtggcggtcgttgcagagagagaaacttaattgtggtgcttccttaaataaatgccacaacttaaatttaagtctctcataaaaaaaaaaaaaaaaaaaaaaaaaaacacacactataatagttggagagagtgagactagttagtagtacaagaattggggggagatcttatcaattctcaaacaaacatggattttaagataaagagatttctcttttttggggtgttttttttttgcttttagagatttttctttactctccttttgttttttgagaggtgtgtttggtatttgatatggattttcgttcacaattggggtcagtggtggaagaagaagaagaaatatggctgggttcttctctctaggatcatcttccacgtcagcagcaccggcttcagctgcagccgccgccgcagctcaagaagaagaagacgacaacaacaacaacaacaacaacagcaacaacaacaacattcaagctcatccggaaacatttttctggtacaacgttaaaccacacaacaacaataatgatcatcagacaaataataataacacaagcacaactttttgagctttggcaacaagaacaacaagcagctttactccatctccaaacgattcccactcggccccaccaccaccaccacagccacc

SEQ ID NO: 302535 - DNA, 2585 bp, Cannabis indica
tttaactgtttcagtgattgtttatgtactaaaaccatgactcctcaaactttagatatctatcaaatcatgcccctcaaactttgatatatactaaatcatgccccttgaactttcatctatgctagaatttttttactgaaattagacaaaagtctttaaatttaacaatctcaatagttcagggagaatttttaacggccaaaaaagttcagggggcacaatttagtacatgtcaaaaaaaattcgggggaaaaaaattactaattagccttatttatagagtagaagagtacaaagctaaaggagggaagatagagctggaatccaaaaaaagctaaaacagaaaaataacagtattaacaactaattacagctgaaacaaaactgttaagacaactaattgttctcttctaacactaactgtatcctactcaatctaaaaatacatctaggagaagcactgtgtcatgagtcatcagttcaactctgccaatagatcaaaatcacttctagatagtcaattaactatctccttaccctatcagttacgtgcaaaagttccttaactttttttgccatctgaaaagattaaccaaaagttcaaaccccataatagccttagctatgacattgtttgttgcacaggcactcagttgttttcaattcaatgcagtaggtgcctaggtgatctttattcactatgccacagctttttcacttttgcaaagaaaagtttgcaattaataatgcaaagtgggaatagaaatttcgagtgttgtgtgtggtcatctccattctctattctctagggtcactcaagaagagtagtataaagctatctgcctttcgagaatattgacatatccctacccagcaaccaaaacactctggaagatggtctctgtcttttagagacgcatggggatgatgaggtattaagtgtatgaggagtagaaagtactgaggcactacaacatgtcgtctgcccgaaatacttgagtaactctagtgcaattgatttcaccttggagtttccatttactgatagatggactaaacactcaactatttcttcactcattacaagttgacaatattgaggtccatcatggcatagtgactgtagtatgttcaatacatgttcttgttcctttacaccttgctctagtagttttccaatggcagcaatgttatcagcaactccaaccctggcctcctctatgctacataacttctttataatttcaatgacatacaccgaaagaagtctgtcatctaagaatagaaccaactttgggatgtaatccaaatacaccatgtggtaacctatgtccctatctgtggatagattactcagtatcttcatagcaagaatgtggaactctctagtgtgagtttgaaggacttttaacatggagggaagaacaccagaaaccaacatcatggaatgatagctctgttcatgagataaaatttctatgattgcaaggacttctccagtgatctctgaatctaagtaggatgtcaacacataaatggagtctcctaattgaaagggtggcatttcattcctgcaaggaacacccacgaagtttactatacttagatgtggcaatcacttatgcacctatagtaacacatagcatttaatttaacaaaacaaacaccaattattagttactgcattattatagaacaccaaagataaaaaggagcaagagcagaataagggtaagtacacgtaggtagtctagcttggcacataacggaatctgttggatggaaaaacaaatttgcaaacggaagttgagtttggcaggtttatccgccaataaaaaaaccgtttggggttagttgtaatcaaaagtaaaatttatggggtttagccgcaaattaccctttattattctaaaatcacttcaatcttagtttcatcatatagataaaattacctgttcttagtcaaaattgccaaaagcacttctgccccttctctttgtgcttttagattacacagttctcttgctttattcataaatttgatcaatggatttacgtaatcatccgaagttgtccaaagataaccttggtcactactatacaatttctcctttacatcctccactaccttgcactgtgattcccatgaaatttctgcaaacttgaagatcaaacctaatacatttccatggctacaatcagaagagtgagaattttgagattcagaattcatctgaataacccctcttgaagtcataatttccagcactgcctgataaatctgaaccgcaactattgctagaagagtgaattgacacattgctgatctgaagtttcaaatggcccatagaactgccaaagctgacaatagaactgtaacctgaaatctttaaccttgaaatcgaagcaggaaaaggttgtagacaaggattaggaataagaatttcatagatggaacaccattttgtgatgagtgccttcattgcacaatttggagtgactaacatgtgatcaagctttgaatagttatggggcaaagtgtgattacactcatcaaaccacctctctatccaaattctctc

SEQ ID NO: 302536 - DNA, 7833 bp, Cannabis indica
tttttaaaattaatttttcttaaatgttttaaataagatatatattttctaatattaataaactagtaaatatctctcactttacggtgaatattttaaattatatataataaattatatattttaattaataataattacttaataaaattatattaaaattaaattgaaataaattacttttttataaaacttttatttcaataatatgagaaattattatattgagtttttaatattaactcatttttaattagtttaaagataaaataataacaccagataaacaaattaataatttaactcattttattttaaatactaaagtttattttataatattgataaataactaaccttgaacattcgattcgtcccttcctctaagtttagttataaatctatttcttttattctttttttaaaaatataatattataataaaatttagttataaatattttttaataaaaaatcgaatatagttaacatcaataaacctatatgttaggaagcgcaaataaaaaatttacataaacatgatataaaaattttctcatccttcttcttgaaattagaataaataacatgataatataataatgatggaagaaattaaaactttaatatttaaaagtgtacaaaagttaaaaagccttgaaatgcttctctatacaaacacattagcttttctttttcttaatctgaatattttatagtaattcattcaaaaaattaaaagtaaactacagaaaattacaattaaaaagaagccagagaaaaatctaatatcataaaaaacatagtcataaacttcattactcctctttgacattttctctttctccaaacttaaaacaaaaataagaaaaaaattattctcatattcattgatttttcttcacttctttcttataattatgcttatatatatgtatattttgagagatcaataagttaaataatactatttatataataattctaatttattataaaagtatagtgtatattaattgttattaaaattaatgtgaatatacaatatatagaacaattacttttatttaaaattaactatcattgtatacacatgtgagattagtattagtattagtgtaagctaattagttaggtaaatctcttagtttgtttcacattagttggttatatcgattattttattaaccgacttttttttgcctacataaactctccttcttttgtattcagttaattaatacaataataaaaaataaaagcattttgctctttttctcatatggtattaaacgaattcttgcccacggcttctatggaaagacctacaacttgctcccaagatggcgatcctccatctacggtcgacaacacaacagctgagatcacttcgatcatcatgctgctatcaatctcacctcccctgttgttcctcgcagaaatccagctccaaggccttaacctaacacaaactcgaaccaagaaatggttcaaccccaggatcagtccaccattgtcgacgagcttcacacaactgctcctcaaactcaaacaaatcgtcctgtcaatgacgatctttcaagtcctttcttcctgagcacaagtgatcaccccagacttgttctcgtgtctaccgtcctcaatggcagcaaccatcaatcttgaaaaagaggtatcacaatgctctagttgccaagaacaagattgccttcatctacgactcacttcctcggccaaaaatcggtaatccttatctcaattctgtgcttagatgcaataacatagtaatgtcatagctagtaattaaactctatttctcaagaaattactcaaagcatcatgtattttgatttagccgttgatatgtggaatgatcttgctaaaagattcaatgaaggcaatggtcctagaatctttcagttacaaacttagctcacccaattacaacaaggtaatcaatcagtttcttcctactttactaagatgaaatccctttgggatgagttgaaagaatttcaaccaaccactacttgcacttgtgatgcaatgaagatttttttagattactataaccaaaatcaagttctccaattcttgactggccttaatgaatccttttcttctgttagagcacaaatcttgctcaatgaagcaatccccaatctttctcgggtgtttgccatgatcatacaagaggaatgtcaaagatctcttggctcagctgacacgattccactggctactgctaccaattctcaacctactaatccaccacgagccaagaaaccccgtccctcatgttccaagtgtgataaaccagggcatttagttgagaaatgttatttctcacatgggtttcccctggctatggggacaaaaagagacaatataaagggaaagcaaatgctaatcatgccagtacttccaagaatgatgcagatggacactcactctcatctgatctatcccaacaatgccagcacttgatctcctttctcagtcagcaactcggcaacaatcctcatgattatatggctgcaatggctcctactgcctccaatcttgcaggtaacaatcatcctttaccccaatttacatgaattttggatagtggtgccacacaccacatgtgctccaatattacatgctttacatctttttcaattcataagtttcctcagcatgttactctaccaaatggtcaaaatattcctgttctcaattctggtacagtgcatataaacccttacattactattcataatgtattatatgtatcaagtttcaagatcaatctcattttcatatctaattttgttcacaacagttctaattccatcattttttctccatacacttgtgtcattcaggatctttctcagaatgtggtgatttatactgctgaaaaatgtggaaagctatacttgctgcaacaagacacacctgtagccaatgctatttcatttcagtttgataataaatatgtgcaagcccataagcctttgggtaagcaggggagcattttggtgagccatagagcatttttctgagtcgtggagcctttatgctagtgatgggagcatccgtgcaagctgaagcatccattcgatccgtggtagagcatccatgcgagccatggtaacgtctatgcaaggggcttgcatgcgaggctacgaggctacaaggtggcaagataagggctcgcatgcgagcgtgcatatgtgcgggtgcgacgcagcaaagtaacacggcagacaaaggtacgaagcgcaaggccacctcctacacttgcgacgtgtagcctgaaagcgacatagtcccttttagggccacattgtacctcaggccattagagcctatacccatttcttagatgtgagaaggggttggaaaatcattcttgcaacttaaccttgatagcaatagaaaatttatcatttactctcaattttcaaatagcaatttgaatccatattccatctttcttttcatcttagatctgtgcttgaagcatagtttgacttcctagctaataagttagttgacgagttctcaccgtcaatagtttggcaccgtctctgggaactaaagcttaagccaagtcgtttatttacacacaacagatacaaaatgcctagacactctcatcaccttcaaaatgtagaggtttgctctgacaataagcagttgatcacttcagggcgagacctccctttgcccgtcgttagagaagaaggtgctaatggtcacaaacctcaagtaggagggataaaatgtgaatgttatcagacctcaagtaggagaagagggcacgagcgggtggggatctcaaacaaggagaggagattattatagtgaagagatcccaatggacaagaaacacaacagaataacttcctccattttaactgaaggtaatggtatgacacaaagagaggaggccccatcgtcacgaaggcaccctccaacaccaacactgcgagatctcggtaccttgcaatatcgccctcaaaaggagaactaagctaactctgtgagccataaattgtgaacttgccactatgaatacgaaataaatgatttctgcttgaagaaccaaaggctggaaactacggtggccaacatgcaaaaagtattgagcaccattctcaaaggaaaaactcaaactttgcactttctatacaaagctcaccagcaagagtgcgagatatcaaccgtatatggtgatggggggaagtccatgtcatcaacggatggtaccccaaaggatgagagcgtaaagggcctatcgtaagataagaacccaagaggttactcacaccaacatgaatctatctgtcggggtaagactgcaatgaggaaaatatcatgtggtcttatgaagggactttagccaacgaatctcatgctaggggacaccgcgcttgcacccccttttcaagagcaaaggaagcgaaaggcgtcacccctcaaccatggtggagagccttacgatgatgggatggaggagtactactcacaggctccatgcgaattgaaaggaaaacccaagtttcgctcaccaactcccaagaaaggatgaacaagagaatgaaagagcttgaagtagagatgcaggatcttcatcaaaaagatggctaccgcattaaagggaaattcgaaggatgatgagttcgatgaagaatcccctttctcaagggaaattcaaatggaaccacttccacctaatttcaaggagccttggatgacgccatatgatggtacaactgatccaagatatcatctaggagctttaacgagccaatgaagatgaaaaaggtgtcatgcaaggtaaggttcaatttacaaacatgatttggaaactgagcatccacaacaccaggtggatatttcatatagatctccattaataggtccccatttaggaaggaattattgacatcaagttgcctaatatcccaccccttggtaaaggaaatggtaagaaccattagaattgtaataggcttaaccactggaaaaaaagtttaagagaagtcaaatcctacttgttggtgaaaacctttagtaacaagtctagctttgtacttgtctagagttccatcagcattgtgtttctctctaaaaacacatttgcagcctatggcaattctattgggtggtaatttgaccaaggtccaagtattgtttctctttaaggcagtgttctcaacctacattgaagagttccagtgttgcatttgtagagtagctttaactattttagactcacaagaagctaaaaaggccttaggttttcttattcttgctttaagccttgtaatcataggatgagaatagatcactgatggttgagcacctgtaactgtggtggatacagtcgaggcagttggcagaggaatagagcccaaaaatataggcacattggtaactttagacaaagggggcatattagatgagtattgaataaaaacattgacaagggaaaactcaggagtaggcaaagcagacaaagtatagacgtgtggggaggaatatgttgcactatagatggggaggagtgaccaaaactttgtccagtaggaactaaagcatgaggagaaccgggtgtggaaggagtaggaggaccagtaggtggtgcttgaggcatgcttctgagaggcagcaaagggaaaactcttttataaaaaataacatctctagaaatgtaaagcattttattcttagagagacctttatatcctttacgggacaaactttacctaaggaaaacacatggggtaaacctgtattggagattggtttcattatgcggcttaagattgggataacacaagcaacaaaacactttgagctcattattattaggaacattgtgaattaatatttctaagggagagatgttattgatagtaataataggcattctattgaaaagataggtcgttgtcttaaaggcctcatcccaaaaatttaatggtaaggatacttgggcaagtagagtaaaccctgtttcaacaatgtttctatgttttctttttacaatcccatttcgttcatgtgtatgtggacaagctagcctatgaacaatcccactttaatctagcaaatctgtaaatgctctatactctctacctcaatcagattgtaaggtttttatcttaaaatataattgcaattccagttgggttttgatctaggtaaaagttggtaaggcctcactcttggttctaagcatatatatatttccatgtgtacttagaatagacatctacaaaaatgatataatatatgtaaccattggaagagttagtgggagaagaacccaaaaaatcagagtgtaatagctccaatggttcatgaaaagtagtggtggcaaatggaaaagataatttgtgacatttaccaagaaaacatgcatttcaaaagtatgaacaagttttatatagacctaattacagaattgagagcccttttcacaattcatgtagtagggtggccaagctaagtgttccatatggaaaaagtaaaagttcgtatagacaattgatgagtaaagtattgaggacttgactaagatgaactcatatgtgaagcatcaaaagagaaaagatgactgagtttagtgggtggaaatttttaaaggcctttatcaagattcccagctaatacgatctttttggtttcttgactgttgacaaagaaagtaaaagggtgaaacactagatagacattgttatcttgggaaaattaagagacactacgcaagttttttgtgatggaaggaacttgaagtaaattgtttagcttcaaagtttcagggaaaaaatgtgagagtaaagacaggataccaatgcgttctatattaccactttccatgtggatttacttttgtaaagtataataactactcaaactaggattggaaccatgaagagtaaggtggtgagtagcagcaaaatcaaggtaccaactatcatttgtaatagtttcttgggagacatagaatgcttgcatctcaacaagattcacaactgcattaaaccaaccaaaagatttaggacttgtagaagatttgtcaaacctataaaaacattgtttaattgtgttccccaatttctgacaaaattattattggggtttcagagaccaagaagaagattgacctctaccaaaagtgtttggactagatctagaagcattacgaggagctgccacgaccaatattgaagtttcctatagacatagagttcatgaagaaacttggatattaaggttgaaaaataggacatgtgttagcagcaaagagaatctgagaactagaatacaaattacacatataaaagtgagattgagggggattttcagtgagaaagattagcttctcaattgctaatgttaagagacttggcattcttctccattcgaatagatttagccatgagaagagcttccatctctacaacggtttaggtatccttcttggaagtgactaatgtagcaaaaagatcgtattcattacatataagaatagtgttggaaaaattctcattacaagagagaataggaggattacaatcaaaatactcaaaatacaaataaaagtatttcatcaagattacaagaaatctagaaaagaagaaggataacacacaaaaagcttgaccaaggctcaaggacctttgtcctaaaagtcatttcctccctcatatggacacttagggaaactctagaaatgctcttaaggatttatcaagcctcatatgctcagcctagtgtctaaggatgagcatatcctcacaaggttctaaccacaacaaatggtttcaacca

SEQ ID NO: 302537 - DNA, 4585 bp, Cannabis indica
tatttatttattttttatttcatttattttcttccgaactcatactataatatttaatataaaacatagcatacgtgcatcgcacgtaacaatatactagttgatatataatacttatattgctatttttattgatggcttattattggtttttcctacacttaaattttaaaaagcacatcttatatatattattagttgttgtactgcttttgaatcctagtttacctaaaaaaaaaaaaaaagaaaaaatagttgcattaaccttgtcagattgataacttaattaacttagtaaatattccggcaaaaaattaacttagtaaataagtacggttgcacctatatatataaatatatatatgagtatatgttttttttttttttaattgatttgagttatatttaaaattagttcaaatctacatccatttaaaaaatcaaatcaatccaattacatttgatttgattttcaatcttattagatttttttataagaatttaaaaaatccatttactagtatatattcgaattaatacaaatacaaataattacaaatacagttgttatatatattttacacatatatatattacacacatgctataaaaagaatatttattttcggtccttaataacgatgtgtaagtttgataacacaaacatatatccatgtcgatcaagaattaaaaattgtctcattctacatttgatagcgcgcaagtggaacaatcaagagtaatattcatgtattttttttaagtgatagtgataatatatttgtcttagctacttaaacttgcattcatgtatatcaaatattctttattatttattattatgctaacgttgttagtttttatatcactactctaacattattgatttaaacaggacatatatatttatttgtttttctcttacaaattccataatatttacgtattcacatacaagaattcttttagattctctcttttctctcgaagtagaacgtgacataattcttaccacatatatacattcaatcaatttccagctcatgccattttgacattattatatgggcgcaggaccctattatcttctgtaattttgtctgcacgtttatttatttggtgtataattttttttttcataaagaaaatattatatataaatatataaaaatatgtacaactaatattgggtttatcaaaatatcagcgaagatacatacttggcagaaaatgccgttacatgtacaaaattatataaggtatacttgttttatttaatttgatcggaaaaaaatatagcacgacgctctaaaaatgtgaaaaagagattgaatatatggaaaaatgaagctcaatcacagaatataggcttcaagcttttatagagtatatattgaattagatataaaaaaaacggagtataacaatcatgtaacagaattcataactaactttaactaacaagaaaataaaaaccaactaacaagtaacaactaatcctcactatctgatcagacgccttaatttttattatttatttattttatacattagaagtgataattacaatttggaacttagtttttactaccactaattgattagggttgaaagtgacttaataaatttaaaaagtgacctaataaatttaaaaaaacattatgtagataggactcaccaaattaatatgttttcgttttgaaaataaaatatctaacaaaattgtatgaaccaaaagttaatgatgactcatagctagctagatagagtgataatgggaaaagaacgggaacagaacactttatcaatgtatatttttctcaaagtttcatttctagaaaaaactgctaataatcatcaattaaaatttttagaaacaatatttttatttttaaataatattattgttatttattgatgcataacaaacaaaggaaagccaagtagttacattagaaacaaagggttatctacttccctgaaatcaagaacaccagtaaagttttgacaaagcaactagctcaaacagccaacttatgagctgctttattcagacttttaggaatttaaaaaatgacaaatcaagtaaagtatcaagatcgaatagcaaattattagcaaacaacattattgttaattaacattatatcaacctagcctgaccctttaaatagtaatagtactatatatatttcaaaaattgtgtgaggaaagaagaaattattatatatataatatttttttaatgaatattacttatattaatgctactaaaaaaatttaactataaatattaaacctgttaaattttgatccatagacgaataataaccaaaaaatttgaatttttatgttttatttagctatttaaataaaaaaaatattaaaaaaaaatctatttttacacaatatcaataatgtgtttatattataaaaatttgagtcaaactcctttttttttatctttttttattattattttagtcaatcgaacaaccctaactcataagtaaaaataaaagatttttttcgattgaatagaaaaattaaacatatatatatataggtgaatttttaatgggtattactaatgaatgtgtgttataaaaaaatttgagtttttatacttaattttattatctaattggaaaaatatcttatttttacattatatggactcgggttccatctgacttaaaaaaaaaataacagttgttataataaaaaaaaaaaaattaaatttaacttaaatattttttttatataaatatacttttaatataatttaaaaaagagagatattttttattttttaaattaattagtaggtaatttttttgataactaattagtggctaaattatgtcatttttttggctgggtaagctaaattatacatagaaattcaatttaaatactagtttattatttagaagtgttctatataattttagttttaaatactagtttatactttaatgttgtctatccttcgtcatcatattcattctataagtagaaactttaatatttgagaagtgaatagaaaatgaaaggaactacgcacttcaaccatcgttgaagaaaagacaggtacatatatatctattaacttcttctagaatgacaaccaatattgatatatagttatgtgttaaataatgcatgtgtgtgcagtattgtacagtgcacagcaacacagagagaataaaccaaatttgtaaggtatgacgacaaatccatcaatcgtttgggaaaataacacaatataattggccgcatttggttcctcacccaacctatttgaaaacggaaccataataattaaaaaagaaatatatatatcattcttaacgagctgtatatatctatatatattcacacaaatcttcaatattttttatttagaaatataataatcactaaacgaggctaaaagataatccaacaaaaaaaagcactactccacatgatgcgaacgtatatggccacggtttgcagaattacaagtgttaaatatgcacttggtatatatttttaaataaaaaagaaagaaagaaaaaaaaactagatatctatagtaaaacaaaattatgaaaagtgagggatcttctatttataatacacgtgacatataatattcagtgtaataagagtggtatttttccttacgaatttacgatctactagcaaattgttatagagcaatattttgataaattatcgtaaattattttgaaagatatgtgggtgtcaatatttatatttaaaataaaacatattcacctaaaaatattcaaatatatataaaataataattataataaatttttgaaacaaatcaatgaatcatagttataattattttaatttatcatatcgtgataaattttcataatatatcattttctatttgcacaataagaaccttatcgttggatttcgtaaattattactgcacataaagacgcgcacaaatatatatatacattaatattcctctcacctcaattaattataatgagtacggctgctctgatttcggagggagaccacataaaggcttctcacatttaagtttttccattggcactgaatgagtaaatgttctttaaaaaaaaaaaataatgaatgaataaatgttatccaattatattaaaagtcaacaaactttaggaatttttgtctttttttttgctaaaaaaactgtgccaggcctaataattttataaataattataatattttataattattattaaattaaatatataaaatttaatatttaattactaataacgacacttaattaacttcacagcataaaacacatattgtgtttatattgagaaatattaaaagaaatttccctacaatttataaagattcatcatcaaattaaattattcctaaatgactgctgttgcccttacaaaaagaaaattttaatttgctgcaactcccttttgaatatctccatataacaattaacatggtgaatgttgcgtgtcgagccacgtactaactgttagttttatttaagatttagatttcttgtttttttttttaaatttctgtaactaaa

SEQ ID NO: 302538 - DNA, 3024 bp, Cannabis indica
gagtttgaatcaacaagcttcagaattcagaatcttgaacaagaactcatgtcattgaagagaagccttcagtggcaaaacatttcaaagggaacttcagaaccaagctccaccaagcaacagagtttgaaaccatttggcaaagataatagatcgttaagcaaaaagattaatccacttggacaagtgacaagctgcattgggtctgtgaattttgcttcacaaaggaagtatgctagtagactacttaagatcattcgccgcttaaccttgtttagcagcagaaaaacaaagcgaaagccaggcacctctagcctacggtccaaaccactgtgagtaagagaaagagatgtatgaaactagaaaatcgacaaattttcatcattacaagagtacttgtaaagtaacttgattcaataagttttgtgtacaatgtataactctgtttctaaactttactcatactatgaataaaaattgcccataaacaaatatcttctgaaaccatattccattggttctatacatgaaaattacatcaaatcaagcagcattcatatataatggagtcatggaaagtccaatgagctccatgtaacataataaactaaaacgaaaaagacaaatacaaatagaacatattaagacacacagtaaggccagccaaaacaagcagtcattatattaagactgcaaaagtatgcattccaagttactaactaaacaactggtgggggctgcctcagtagaaatttcattcttgatcttatgagatgactcaataacacttctcgcagtatcaacaaccacttggccagtgacgtagtggaggcgacagaccggcatatagagattagcgccaccaatgagttcggtctgtgtgtcacctgtcttcctcagagtgaaaaaggccctcttgccacacatttcacagcgtgctgtcaacttggtgacagtatcagcaagcggaatcacatctagaaccgacccaaaactcctcctaccaaaagggtaagtgaaattcaacataagaatactaaactaaaccaactaaagacttgaattattttcatttttgtttatccaaatagtaccttaggtaatcaccatcaagaccagcaagaattatggtctttccatcatgatcagcaacctggctacagaaatcgtagagatcatcgaagaattgagcctcgtcgataccaattacatccaactgtaaatataaatacacaatattaaaagagaaagagacaattaattattttcttctttcaaaaagtcaaatgaacaacccattaaagattaaggaagaaagagtcaaatttactttctggtaagcatcctccccaaagttttgtctgaaagatgagagatcaggaaggacccaacatgggaatttcactccgtcgtgggtcacaaccgaatcaacggcgtatcttgtatccttgcttgatttaatcattgcaacagtcctactcatgatctttcaagtgttagaccatgaaaatcttcaaagaaaacagataagaaaattgagcagaatgaaggtacctgccgttgttgctttcggacttaacacgacgaagaagagaagtggtctttccagcgaacatgggacccataatgacgtggacttcaccggagacgacgatggtcgtttttcaaagtagaggaagggttgaaggaagaagccatagacaactgatctgagtggttaaaagagaggaagagatgagatggaataaataggaattgagttggtgttgtttctgtctttgaatttttaaagttcgaaagttttagagggaaaggaacaaataaaaagacaagagtctccaaaaattggagggaaatatttgaggaattaaatataaataatcttgtgtctgtgggtgacccacgtaaggaagacatttacttttactttttataaacttgttttgtacactattcaaaaagcttactctgatacgctttgttttaaaaaatacaacaataaattatcaaattaaaacataggtctaggctgtctaatacaatcttgacttgttttacaacaataaattttacaatagcaccttagacttgttttacggcaactaactaaaaaaaaatttttagtttaattttttttatatattcatatatgttatagttatttaagataacttacaaaattttgagaaatttggaataatttacaatattgaaaacaatgttcaaacagtctattttacacgcgtataaaataaaatagtcacgcgtgcaacacactgtttgatgtatttttcggcatgttaaacttttccaaatttcataaaatattgcaggatgtcttaaataactataacgtgcatgaccatgagaaaaaatttcactaaaaaattatttcgggtggtaaaacagacaagggtgcatcaatgtatccattttaagagggtgcattatagaattttcctaaaatcttatatattttacaatacatgaaggagaactctcttctttaatttttttttattagttttataaatattaattaactaaaaaataaattgggcttcccatgcgattatatttttttatatataattaagttataaaaatatattaaatttgatatattttttaataagatgagtaactattctactaaaattttttattttttttatataaaaaaaataaatattagtaaaaaaaaaaattcatcatacaatttcttatctataaaagaaagtaacaaagagatatcttcaaacgttataataaaataaaaaaaatagaggttggaaaatcctcacacaaaatagagatctaaaaacacaattgaaaaattttatagaaaattaattatacaactttaaaactgtttgaaagtttaagtcgatgttatcaccgtatctgacttgtaatcgccactacattcaaagtgattgttatcatcgtatcttatttgtagttttgtcattattaatcaaaaaaaaaaaatttctctgtacataaaacaaatcatatacttga

SEQ ID NO: 302539 - DNA, 1665 bp, Cannabis indica
tgtaatatataaacgcttgaataaaaaaaaaaaactattacaaggtataattaagtattttcaggtaatttaatttaataattaaataaaatatatacttaggagaattgttattggacattagtagtgtccaatactttttagatgacactatataattggttagtaatattctctaaaagttattacattaaattatataagattcaatacttaattacaccaatagtgacataacacttacgagggtgctaggcaccagtattgtcttttagtatttccctatacctatgtggcaagtcatttttaataagtgaaactcatcttaaataaagatgattagttaaaattatatgccggataaatgtgtgtaaattgtgtgtgaagatatcattactcctattataaaatatagttagctaattacaagttgttacctctaagtagtcctaggcactattgttgccttacattaatattttttttagtatttcttacactaaaagacaccagtagtgctaatcattgattagtataattaaatatcatgtctcataaaatttaatttaataattattataaaatatcactactcaattataatatatcttatatcaatccttttaaatttaatattaagtctaacaacaatgttatattttactatgtgttatgaaatagcaaagacatgaaatagcattactttttttttttctaaaaaaaataagtgataatattttttctttaaaatgcagttcattgacactcttatgttattactttaatatttttgtcttgttttcttagatgaattatttttaattggtttaaaaacttaggattaaaacaatttatttccaataatcaagttcattattttttgtttttatgcttgttgattttcattaagaaaagatcaacctaagatgatggcatttatattgaaaaaaaaattctaatttaataaatcaaataacaaataaaaacaaaaacccttaaactcaaccattcaaaaaaaaaaataatatcctattgttatacttatttaaaatatcgtataaaatttcttatctatttaaattcaaaagtgtgcaatgatactctttccctatatattttgagtatgatcttttattataatatttcataaaaaataattaataatgactcatatataggtaatatatactagtataattaatacaaactcatatatacgagctacaacaagttatgtaaacctttttggtccaatttataaaactaattctttaataatttttacaagttattgactaattagctaattttgaaaaattcatcctcatactagttatttatttcggcattcaaaaaaaattagtgaattagcgtgtattatgttgtagttattcaattaagatatcaaattttttaaaattttacagaatatttttcataattacaacttatacaattattaaagaaaattgagcaaaattatgtttttcattaccgaaacaaataaaaatacactgtaaaaacgccctataaatttagtgtatataattgatatttaatggaagtaattataagtatttgtagtttagataaaatatgttaaattacgttaagtaaatattatatcaattcaatatataattatatataaaaataatataaata

SEQ ID NO: 302540 - DNA, 1854 bp, Cannabis indica
ggcttaaagcggagacgttacataatgcttcttggccgagaaacattcatggaacttggaccaagtggtgagccatggtccaaacaagggagcgaaagacgtgtaagcgctctagatcaagccagggctcttctgggaacactcgcgtcgttggtgtcccagacaaccactaatgtagtgaaattcccccaaccgctcccacttgggtacctaggatattagcattgagcgtagagaagtatttttgtgaaagataatggatttaaattcaaaactgagaagagccaaaaaaaaacgttattaatgttctcaccaactatccattctttaagaaccagatgtttaccattaatgcaccaagacctctcctaaaagagcaatttcttgtcattaaagttgtcaaactcaaaaaggaaaatgttatgttcaccaaccacaataatactggtaatcttagcaggaattttccaagtcttcaaagcaaatcttctaacaaccttctcatccaaaggctgtaaggaaagaatcttgccataaaggcagtggttggcaagaagttcacttttgctggcacatgggttaagagcaagtgttgcctcattgattgagacacacctacctttctcgcccaacacatgtgtattgacgagatccatatgaaaacaagcaccacgtgagaaggaaaagagaaacaatgatggcactaaagtcaaccaggtaacaagatccaaggccatacactagcacgtgaggaaaaaaacaggggaaggggaataaaggaacaaaggaaagacatgataaaaggcataagacaaaaggaaagatgaataaaaacaaagactgaagaataaagagatcagagagtgtgactcatttagggcaagaaaagctcaaccacaaaaggggtttgagattctcagatggttgaagactcatcggagaaaaagttttataaaagaaaagagaagagtgaaagactcatcccttgaaaactcatcaacacccttgttggacccctctctccgtctctaaattctttaaaggctcttcacctaacatttctccatttttgaccatatatatataaatatatatatataaattctaaagtttaattttagaggatcattcttttagattttattcagcttaattattgtttatttggtttttcttaaaaactattaatattattattcttctaataaattctttatatatttatttctgccagataactacaataaaatagatagtggaacatactttcacagtttaaaaaagacttatttataccagaggtttctaaactatataagttttagaaagttagtccccaaatttcattttttggcaaattagtccctaaactatacaagttttagtaagttggtccccaaattttatttttaataaatttgtccccaaatttttattttttagcaacattaagtccctactcttagatattgacatttttattgatttttatttattttacacactttaatttatttttatattaaattcaaataatttcatttttttagttttaatatttgaataaaaataattatattaatattttttattttattttttaagtattcatgtaatatatataattatcatatttaattttttttaaagaaaatattaaaatatattttattcatatatattttattaataataaaaaaaaaagtataaacactagcaaacttatataatggctagagagaattctagccccttcacatatttatattttagcattttatattatattttattatttatttatgaaaatgtaatattataattttaataattttttaattatatatatttatt

SEQ ID NO: 302541 - DNA, 985 bp, Cannabis indica
actcgttaacttttttttttcttttgtacaatgtaaacttaccataactttaaggtataacacaaaacataaaaagaaaaaaaatccaaaaaaaaaaagtgtacgatagaggtaaaagtgtgatacagtggttttatgaggtcccaatttcgaagttatcttcccgtattaaaaaaaagttatattagctagggcaaaagtatatatatttatctatataatataaactaaaataaaattgtatgtaatgtacttacatccactttctcttccacaatgagatctttagctttttctctgagaattttgtccatttcttcggacgtcctacaaaaagaaaaaaaaaaaactcaaatcataaatatagaactcaaatggtcatatataacaatcatcaatattggagaagatcaatgaagacttcacttacattgatgaagaaggattttcttcactggaaaatactttgtgacatgactcaacacattgatcaacatcttcatcaatcttatcacaagaagaaacattattcatgaaatgtaatatttgatcacgatcatgagtttggagtggtggtagtacttcctcatgatcatgattattattattaataataataacacttttattagtagtagggcaaagattgtctttggttataatttccctattattaggtttgatggccgttacaaagattctcaaaggtttaagatttaacctaaaagcctcataaagatcttcatcttcaataagagagatttcatcataatcttcatcaatgtactttaaggaaaagtcttcttcttcccaagaaaataagttgaagagatgaagaattttgtctttcagtccacgcaagttggttattccattatttggaaaaattgtaaaacgtcgaacactattcccatatttaacctgaaacattaaattgataaagcaaatcacagattgaaattataaccaaaaaaaaaaaagaaaa

SEQ ID NO: 302542 - DNA, 3229 bp, Cannabis indica
cagaataatttacaatataaaaaatattaaacaatctatttcacacatatataacatacaaaagtcacacatgtaacaaaactgtttaaaccttagttttgagggtgttaagtttctacttaaaatctacaaaattttgaagataaatcttaaataattaactaaaaaattctaatatctaaatataccataaataaaagtacatcagtgtgcattatagaatttatataatttgatattttgccccagtataactgatattctgaatatatcattaattatagttcattatacaaaacaaaatctaatatggtattaattattattaattaatcattaattataatatatataaacaaatattattttatatatatttactttcgatttttacgatagtgatagtgaagaataaatatatatatattactcatataatatatagaaaaaaaaataatgataataattattactcgtatataatataatatagaaattaaatagtgattttactagctaatatatacacatgagttattaattcgcagggaatgacatgtatatcaaatatatatataaaaaataattaattaaaaattaattaatttaattttaagtatatatatatagtcaaacgacagagtagagtctcttcctaaccttacctcatcatatcctcctccacaagttattatatatttaacatataattattaatctatatataatattatatagtaaatattaattaatgatgacttaattaaacatcataatcattctcaaattgattgtcaaatagttgttcatacaatgtatcttacactctaaataaattcaccatttgagttgataataatttctgattgtaaacatatactttctttttctaaacagttttttctattgtctttgttaaatgacctcgaacaagttagtcaattttttaacttgtgctgtttgttctttttcaaatcgtcagttcagtgggaggttttgtcccgatacatctccatatgttattttgttatactataaaaagtactattcttgtcgattagaatttttttttagcgtataaaatagatgcttatagttgagaatacccattgattttaaagaatcgttgagaatagtcatcagtttaaaacagttaaaaaaattgaaacaatgtgtattttaattggaatctccgacaatttagaatcaccaatttaaagctctggaagccatcatttaagaatggcatttagaaccttcatgtattttaaaatgcaaggtatattaataattatcaggtgtgtacactggcagatccagaattttattcaaggaagagcagaataaacattgaaacaatacaatatataaataactatatatatttatttaaaatgggcggaaacctattttcttctacaaaattaatttttattttattattttttatattaagaaaagaaaaaaatgagcataaataagggcctaattttcattgggtatgccattgggtgccaattatttttgaaatcccattttttagtggtgttagaagatttacaaatttattaatacaacaaatttttagtaaaaaaaataatctataaataataaatattaatgatatttgctaattttgattagtgataataattaaaattagtaaaataataattaatgtcatatataataattaattataattattgaactttttttgactgtgtaagaagttaagttagttggtcactcaaaattaataatgatattttggagatttgcctaagatggagttgatttgtaaaaactgaaatagtttaaaaacaataaacagattgtgaaattatttttataattttcttctcaatgactttgtctctaaatgttgcttcatttcctcaaatggaattaatgtatcattattaattaactacaataatatcatatattaattttaacttataacatttcatatttgatatgtaaattattcacattaataaaaatgtaattattttaataaaatgttaattagttcaaattaatcaacattatttatctctctccctctctttccaaatattaaataattaaattaatagataataaaaatatgtatatataaagattatattgatcaataataataataataaataataataataataaatattattattattattaagaaagaaaaaagtaaaatgagtttggacataatgttggccaccaataggggtttttaattgaccaattttttaataattatttattgttctgttatacttttctgtattcatgataaagacctttaagcaaatacttgagttaaaaataggagcaaaaataatatgtaaaaatttctcattaaagttataatattaggctacaaatattattgtttcttaaagttgaggactatctagcctagttagggcttaattaaattttaggtaaacaaagattaaaaagtaataattactttcaaagtagcattaacaaatgtaaagggtaactaattttaaacacttcttttggtaaatataagtaaaaaattgaataataataatgaaaaaaaattaaagtgcaaaagcaataactccaattgtataaaccataaagcaacaaataacaagaatcaatcttaattgtaaataacatgaacaaataataagttttacaattgtaattatgattttgagtctagataatgtctatattatgaaaattaaatagtgatgatatatttaaaaagatgcattagggtaatgttttcttccctgggcgttaagtcttcgagcttggactcgcggcctattgccctacggggcctcccttgtggattcttcgggtgagctcaccctaagtcttggtctacccgtcctttcctaggaagacctagtaagattcaccataccctttggaaagggaggagtttttgtgagttgtcctcgacagatttgttttcttttgggggtcacccactatgactttccccttatcttggacatgcttcgagggttctattacgaaatgactcgatttttttagaggtggcatcgcattggtgttattttgtactccaattattggagccggatttacttctagagaattttttgatatatttttatgttgtacttttgttattttgttatttgtatattatttttttatattgttttgatgttatttggatgttatttcttgttgttttcgtgttgtt

SEQ ID NO: 302543 - DNA, 1890 bp, Cannabis indica
ttcttcattattattattatcatcaggttttgactcctgatcacctgcaataatatcatcatcttcatgatcagctaataatttgttttgattcatattctcttcaccatcttctgataataataataattgatcagtactctgatgatgatgctgatcaatattgttattatactcttcttcttgatcatcagtagtagtagtaccagtacttgtctcttctattccattattattattgttattgttaccaacagtatcagcttttacaaccagttcttctgagacagtggaaatatcacaaggtggagttatgagcttattaatttcatgatcatgattaatttcctcctcgtggtcgtgctcataattataatcgacaatatcagtactgacactgccaccatcatcttcatcatcatcatcatcacgacttatattactgttatctcctgatttgatcatgctcagctgatcattatcatcatgatcacctgctggtggagtagctttaatcatcaattcttgatcatgatcatcaaccttaacaactttagtagaagtagtagtcttgtaattagttggagctttttccttcctaacaaaactttctgtgctctttttggggttcttggcatacaatgtatgactactctgaggttttgtaggtctagtagtagtctttgatgatgatgatgagtgaagatagtttctggttttggatgatgagaaagatgaggagtttgagagaactgctctgtgtgaattattattaataggtgatggaggaggcttattatcaaaagaccttcttctgttgagggttggtttgttattgttattcttggggtactgtttattagttatggaattggaagtggggttagggagagagctctttgttggtttgagatagttagggacttgtttctgattaggagtactattattactagtatctgttgaagccattaaagaagatgaagctttttgagtagaattactgctattattatttgttctggggttggaatttgtagaaggcagtgtcctcttcccaggcacatgattattactactatctcttttcacttttgtagttgccataataaaaaagatgtttgattatatgtatgtgatcacagaaacctgcatttatatttacatagagaagaacaaagaatgaaaatcattatgagaaaaacatatggtagttaattagttatacttactagacaagtgtttttttttatcaacatgtaaattgttaattaagtaaaggatgattctattgaatattctatcagtaatttgtataagttgtgtatagtatttgagtatatatataacatattttgataaactagaagtcatttaacaattaaataattgtcatttaataaaaataaggatggaggtcaaagtaagcattgatatcaaacatgtgttaaagctgcaaaatgagcactactaatactatttatggtcaatttcaaccaccacttataaataaatggacattaatcattattaaatttggtgagtttgaaactttgaagaaaattcagtctaaattaatgatgcaattcatttaactgagtagtagattcatgattttacatcacctttcggtaacaacttcaatgcattcttattagattagatttaacatttttaatttaatttgattaacaattacatacatattatgataaaaaaaacaattatactcaatagtcagtattatcaaaaagaattgtaaatatgtacttgctgcttggtttatatttttcaagtttttcaaaatatacatatggtgccatcacgtgcacgcagggccggccctgaagcaaagtgggccatagggaaaaaaaaaattttgggccctta

SEQ ID NO: 302544 - DNA, 3669 bp, Cannabis indica
gaaacttaggcttctcatgattgtttctggatattatgattcgaataagaacttcaaggtgagagaatataacccatatgattatcattatgattcaaaacttgtaaccttgtctaatttgtgttgtacttatatgcaataacaataatgcaatgtacaacatgagtatcataaatcaaaacttcacatctcaaatatgatcaatatctgatctagtcatagaatttgacatttctagctatgtttattgtattttagagggagattctagtctctactgagtctgttgtgctgatgaagactctgctcaatttctttaactcaaatgcgacacttcttcctctgaaagatctccacagaccaggcaagtttctcttcttaaatgtacatctgataaactaattttgatcggtagcatttatcagatattatattgtaatcttgtttgagaagaagctatatcataagatgaatttgtaatgaaggatattatttttctaaacaaaatcattcccaactacagcataaaaaaagttggactcattgtgtgaatagctgaaaacattataacaaacaattattagtctgagatttgtatgtctatattgcattttctgagacatgaatcaagtaaacacgtaacctttgtgcaggccttatggtggagatgagagcattcgaaatcgataaagttatatcaagaaagacaattgagcatctcctaggtgaattcgggggtaatacacatgagcagccagggttgtgatcaactatgctgaacatggaaactaaggtttatcattatgtttggaatgtatgtattaattatgaacaaagaagaattaaatagagcttttatagttttcatgtttttaaagttatgggattcgataacaaagccgatttgtgatcttatgttatcttaaatgtttgtcaagatgaaaatctggtgcataaaaaaatcagtaacatgaaaagctgactagagatgaagatgtattcagcaactggtggatgagcagaactggtggatattaaaatgtgcaatgctttaatttagagggaatcaatattaccaccattttaatttaaaaaataagatccaattagaaacacaaactctttgatcattacaaaatttaatttagactcatgttaagttcttatagtgaatgtctgatttgttaaacttgcccacttctatcatttagaaaggttagtttataaatctcaaatatactaatattatcacaattcagcctcaaaataaacagaacaaataagtaaccattgaataagaacaagggtcactgaccatatttttatttagactagttcaataatttgtttttcactcaatttcttatttaccttctaattctggaaagtactctagccaaaagtgagaactaacttgaattcttcacctataagcagtggcaaaccagtcatctccactgtgctgaacttcccaaagctataaaaacttgttttgatgctagaatcctttatcaacgttcctcccgaatatagcttgtactctttcaccttcttagctttttccagtcctattagggtgattttactaatgatccacttctgagtcagagcaaattgtccattggaaatgtttgaaccaataacgaccccatcctttcctactgagctagaaaaacttactaaactccactttcctccctcctctcccatcttcacgtcctcgccatcatccaaaaacacttccccggtgctatttgtgctcatactagaaatgaccaagaggttgaaagctgttttacgagctgcttgagttgtcattgcttctccttgcagggccaagatattgccttctctaacgtgaacatttatgtgatctgcaggagcacttagcatgacatactgacctgatgttacactcacggagctcgagtagttgaacatatcaaaccagtttcctgctgggaagtatgcattgactgaatatgtttgagctttcaatacaggtgacaccaatattcctttaccaagtaaaaattgtgaactgatgttataagttttggtgtctttaggaaatgaaaagaaaagaggtcttgcaatgggagttccctttttgtgtgcgtcgtacattaatgtgtagaatgtgggaagtagccggtagcggaggccaagaaccttcctagctgatgcagccactgaattccaaagatagagctcttgacgaattgtaaacttgtctgagtgatctcttgcaaaggggtaaaaggcgcccagctgcattttacaaagtcatgcaatttattttagaatgaaagaaaacaaaatctaaagctttgcactgtactttaagaaacaaatgctgcaagattatacctgaatccatcgcctacagagctcctcggtggtgtttccactgaaaccacaaatatcagctccaaccattggaattccaaagagtccaaagttcaaaatggatggaatggtataagccaaatcgtcccatgtggctgcattatctccggtccagtgagctgtgtacttaccagagccaacaaaagttgatctagaaagtacaaagggtcttttaccagtcacattgactaaggcagcattggtgactttacattcatataagccatatagattatgtgcattatactctgttacattaccataatgcaaacatgttgccggtaaggttttattaataatcggtcgcccaaaagcattattgattttgtacggagggttgtcaagtttagaagaaggctttggaggcgagctaatgaaattggaaacctcattcatatccaaccagataccatcaaaaggaagaacatctcgaaacaatttgatctcagtacgccaatatttataagaagcaggatttaagaaatcggggaagtaaactggtccaggccaaacctcccccaagtatggaacaccatcgcgctttataaaaacatcagcttccatccctcttaagtaggtcttataagttttgttcacaccaatgcctgtgaaaggtcacaacaattattataacaaagtaatagcaagtaacaatttacactatgcacttatttgttaaagaagaaactcctctgctttttgtctgtgaataccaggatctatgatgaggacatatttctgtccatcttgatgaactttgtctacaaaacgcttcatcttttcgactggaaagttaataggatcgagagtgaaatccttataagcatccatgtagtcaatgtctgtccagataacttcaagggggattttagctgctgcataaccagccacaactccttccacatctgaaacattcttgtaaccgtagcgacattgatgaaacccttgagaaaaggaaagaaacaaaatgaggagtcttatcctttgcatttccacgcaagtaaatttttatatatagttgcaaactcatgacttctcaatttcaaattaactactcataaactcataattctttccttctttctcaacaacatcgtaaaaaccttcaaatttatttaagctcagttcaatgaaccagaaagctagcaaaatataactaagaaaaacaacaaatttagcaattgtagaacactaaattccatctatctacacagtgaaaaaaaaatatattgctaatatgttgaactccaatcaaacttt

SEQ ID NO: 302545 - DNA, 2127 bp, Cannabis indica
aatttatttttggggggtttcgcatgtatgattcttcctttctgagccattccttattctgcaatttctattttgttaattcaaatatttgatcgatttgtttggttagaactgtattattggtatacgattgaaacctacctctgctgtaatttttcttctcttcatctgctttctatctacaaagtaatgaataaaatctcaatgtgttatggggttcttgactgcagcaatgacaacatctctctcttttgtccatctatcaccattaacgtccctaaccaaagccacgacatttagtctctcattgccgtgcgaaaggaaatttttttatcgaaatggtcgatgcagtgattaggggagttcttgattcattgattagtgggtcggagcttcacagttcaaggatttggggagttctcctattccctacttattatcgtcgaagaggcaaaaattattgaaggggagttcttgattcatcgattagtgggatggagatggcaaagatgtcaggccgtgcacctaacctccatttccccaatttgattttatttcttacctttcaagtttttggatacaaagcgcgcccactctcctcttacaatcgcaaagttgtcggtggtagttggtcatgcttgctatttgattgttcatgatccccaagtaacctgtgtttttcccaagttaccttgattgtttggtactaaacagtttaaatgattgcatttgtgtgtctggttttattggtgtaatattatttttattctattgatctaatccatttgtaacataggtgcttgattagatgttgggcaagggccacactgtctttttaaggagagcagagctcaagacctttgtgaatttccgtgggaatgaggtattaagagttccattggaatgatgtgtttccctgattcattcttttttgttcaaaaacttatctgcttgtaatttgtttacatcagtggggacatttacctctggcgaccttattcattttcattgatgaaatataatttatgtatgacgatgttatttaggttgagaaaggtggagatttaacgcatgacgagactacaattatcactggggcacttgaattgactgaaaaactgcaaaagatgccatgactccaatatcaaatgctttttcccttgatttggatgcaaatcttaatttgtaagtaactgatatatattatcttggttgtttaagtagactagggatttagcagagacaaaaagaagaagagaaaaaaaaagtagactagggggcatgtctatatacatttcattccttctgacttatctctgcattatagggagacatttaattcaataatgaccatgggttacagtagagttccaatttatgctggcaatcccagaaatatgattagacttattttggtaatttcatttcttttgtatttaaagaccattttttctggaatttgatttttaaggtcactagatttttatgtttccttctactttgattatgtctatctactttatttatctttactctcagtttcgatttcataatctttcttgtatcacatgaagggaagaacatgtatatgtctacttatgatttcagactatctttccaaaagtacaaaggtatatataactatgtttttcttattactcttttttaatacaaaatattgttcacttaaattagtgaatattattaatgtagaatagagtttaagctcttagtagattgaagcataaaattcagctcatgtaaacaatggttacatgagaatggtagtggtccctcattttattgaagtcatttctcatattttctagctatggcttataattttaactcttggctcttgcagagctatagctccaggagttgttttagattcgtatgaggcctttaaacatggatcacacgtttaaggaaaagaattcaaaaggaggtgtcttatttatttgtaattgtttaaggcacacaattaagaattcttaaatatcttatttatttgttattcttcaagccacaaaattaaaaatccttaaatatatatatatataatttaaaaaactttcttaacattagtagtcttctctttcagatttccttctactttttgttgca

SEQ ID NO: 302546 - DNA, 7043 bp, Cannabis indica
cagtgctattagtttttagaaaattttagaaattttttataatttagtatattattattaattacaaactaagtaaataattattattagtttcttataactctcaaaatgataggtttcattatataactaaaataaatttatgatattatttagttcttataattggtaaagtgtaattggattagattagaaaattttaaaattgacagggaaagtgcaattggattagattggaaattttaaaattagattgacatgtaaaaataattaatttaatccatctatatttaattaaaaattttaatttatatatcattactagtttaatataaaaaataattatttaaaaatttaatacatataacataaatatattttaaaaaataatagattatatatatgtttcattctttatacatatatttctagatacaattcaaacaaaattaaaaatttatttctacatacaattttttttatttattattggagacataaaataacaataatttattttattttgttaataattatgtgaaaaaaatatatttttattaaatattaaataatttaattttgaaaattaactcatccaaaataactaattaaattcacatttttgtttggattggattggattaaatttgagttattgtgtggattgaattcgatctaaaatttgatatctgcatttagtgcggatcgaatgcactataaataagatagtgtggattgaattggatgagcacctctaaacagtaatagagttaagggctggagggtgtcatgccccaaattttttatttttttaaaaaattatatgtaaaaatatttttaaaaataaaataaaataattttatacaattttacatgtataggctttgattgaatttcgttctcgctccgctattatccctaaatgatatgacaaacattaaatattaatgtgataagatatactagttgcggtctaatgtgcttcgcaagtgagctcgtagtttaaatatatattttttttaaattgtaccgtattgattttatgttttggtatttattttatttttggatattttttagaaggaaataatagtttaatcatagtatattatagttattgaaaatttatgcaaaaactaattatgttagacacctctcaagtattatattactattgatataattaaatatcagatttaatataatttaatataaattatataatatttttttcgctagattgattaagttctagttattaacaataattttgtacaaaaggtgtaggaataaatcgtcaaattgaagacttttatgctgcaaaatgcaaataataataacaaacaaatgccttttttatttatacttttataattattttttattcatttataataataataataataataataataataataagtagctttttataataataataataattcatttataaccatatattctaatttaaaagaataaatttcaagtgttagaaaaattattttgctctatatatttccactgtctttaagaacaaatttcgatcttctaaaagtgatgaccccatccggaccactcccaccatgggaaaaaaaaaacattgaaaaccataacgtaaaaagggatgataaagcaaaacaaagtaaaagaagataggagaaggaaggacacttggagaggacacatttttcctagtcttcacacaaacatgtgtcatcgtcatgtgtgtgaggaacaagcaccgattctccaacgtccctttaacgtcctctctcttcatatataatattacataacagataagtacaaggtactgaataataaaaagaactggaagaacaacaggccagataggtgtgaaaatgcagggaagaatactactttgtgattggtggtctagagttagacggcatcaccaactccgcctcatggtatctaaaccgcccaatcgttcagccgttcatggtgctaggctacctgttcttcaccatctcaatgtgtgtccatacatactacttacctcttactctctttctttatacacactcacacatattcacttttctgaatatttactaaattttgtgttactttcttgttgggtattgaagaaggaagaagtggagaaggagatcagtaaaggaaaggaagaaaaacagaacagaaggaatgaggtggagaaggctgtggactcccaactcaaccaatctaagttcacttactacacacctctcgactgagcccagatataatgacaggctcaactgtcaatatgttgtattcagctgtatatatacataaatatatatatatatatatacttgtaccaaatgcaaatgacagataagaaaacagaaaggaactctaattatggtcatgaaagtagttacataaatcgacataaattcaagctcaacatgagccaaccttgtacactaagtaaggcagcagagctctttaatagagttcacatatgtggtcaagacatatgtaacatagtaatttcaaaaatcttacatgggatgatgctatgattttcacttaaaaactaattatcttcttatactaagatgcaccttctgctacttcaaccagcctcccgcgtatccatcttttagtaacggtaactgaattggccgcgggcgtttgctcatcctgagtttcagccgcaggcgtttcctctttgtgagtttcagcttttgctccgtttactagaggtttctctttctgttcactgtctgtgcttggttccaaatgaccattttcatttataagatccgattgcttcattaaagtctcataactaaacggagataaaccataggcgctggagtttaattgaagatgtccctcttcaccattcagtatctcatgcatatttaaatttccaaaactcaagtcttcttctttgcttgatactaaggttcgagttccattcactttttttccatctgcttctactggaacattgcctacaccctctgttccattctcaacctggctgcctagttcatctcctacaatagatgggttctcaccattcacctgggatgagctttggtctacttcaatagattccagtgatcgaattgcttcagctatgagcttcctagtctccaagagagatgcttgagcaatagggctttttgtagctgcaacctcaagggccttggcagccttttcagcttcagcaatcaataatctgaagaacaaaaataacaaagaacagacttcatatagatattttcaccagtaacaggtgaaatggcagtcaacataggaagttaaaccaaaagcctgttccgcacaagttaaaagttaaagaacttctaaaactggttggacaggataatggatgagtggctgaaaattactttgatatcagtacttgtaattcagtccaatataagagctgaaacacatacatatgaacttacctagctcgttcaatagcttcagttttcttggttcctgcagtggctcgctgtgctctaatgtttttaatcatctttagtttcgagcttgctaaaggatctttatacaatggtgcattacgtttccttgactttggtcgaggagactggattttcatctcgcccctgaaaggctggttctcttcaaatgctcttttctttgcagggcttcgtctgggagactgtgaaccgtcgcttggctttcttcttggctttctttcagttccaggttctataccatgatattgagccaaggcagaaacaacccggtcgcggtacacctgattaacaaatgaaaatacaatggagaaaagttaattggcaatagcaatatagcataaggtatcttattatatgccatacttcatcaatattacatttgccagacaatttaggagtaagaaagagtcaaagtcagattgaggccaagcaaagaaggatgcaaaccagagctttattaggattgtgggtatcttgcaaacaaatataaacgaagattcaagggatcagtatatgaagtatattttctttattttgagagttcgttaaaggagccaaggtatttttttattaatattattatctgaaagccaagggtaatatttgtttcacgtaacacaattgtattcacttacaggatcagcccatttgcgatatattgcttctgaaattttcctcctctgctcaggagacttgggtgctctcttgcttcctttaggcctaggcattgattttcgtttctcaacctgctccgaccattccctcttaagctgttcattcataatttcgtaggaattccattctagctcctcttcaccatcatacccttgcctagaagcttctgcaatcaagttctgccattcaaagtggcacatttcctgcaaaaatagcttctgtcgtcgcctttcccaacccattcggactcccaccccaatcttgactctggtctcttcactgtacaacaaataaaggagaacaaaatatcttaaaacggtacaaggaaggatgaataaacaaaaaatccattggacttgttaataatgcacctcaagccaattgaagacttaatattagaaaattggatgaaaagaagccttagaataagacataaaaaatgatgtggaataacccaaaacagacctttgagcatgtccaaggttaatcaacttcattttgacctgcagagccaatctttgtgaatagaatgaacaatatccatgtaatcaaattaggtttgcacacagtactatgaaaacaaagttctaaaattaaattgagtcctgtcaaagtattatgcaaaaacagaaagaacacaaagaataaagtaaaattttgttatgttttttttttccaggaatctattagaaatgtaaaacttactagatgtgctgcaacaactagactgttcaaagtaagttcatacagatgtgcaacttattgtactaaaggtatggaagaactttcctggagcttcatctgcagtgcctaaatattcatatgtaagttactaatttaaggttttcctttggtaggatgcacaaactcaatggcacactgccaaatcacctacatgcatgacatgatagtgaatgtggggaaaaagcactccaaagtgaaaagacatgtttaattcacatctgtgtttcgcttttcctttgactctgcacaccttaagatgactctactagaacatgtaaaattattcttacatgacatcaccttaggatcctgcattgcaattcttgttctctctcttatccgctgaagggtttctgcaaattaattaaagattgacgttaacattctagattatggaactagattggcacccaaaaaaaaatccagcttcaattatctttcttaccaggactatgctttctgcctttgttccatggcgtgtttcccttattagctttagaaattcgcattcgtcgcagcttctctttctcatccaaatcttctgaatcctcactggaagatcgagtctgaattgtaagagaacttttatctacactcaatcgtgtattgctccgatgcttatcatcattactgagagtgcactttggttcaagtgtggcaactgccttaatcaggagtctaccagtgccactaggcatctcatggggccgcccccagttaaaatttcgaatcttagttacacccaagaatttccaagcagaggataacctcttcccatttccagaaatgaatggacttgataaaactttatcatgaacagaggtttgagaaatgagtatccccaaactgttttggaaggcaggctgtgtagccgcaagctctgctaacaattggaagaacgtaaaggaacacccttagaaaacatcacaacgggaatttaaatttacccttaaatataaaatcctaaaccatttacagaattcaaactttatgatagcttatgctgcaacttatctccaattaacaacataaaattttggtgcttttttctcagagagagcaattcctaaactaaaatcttgaattttaaactaaattttccgctttgcaaataaccaaattaagggacatgttaccagcaacatagtgaccaggaagttcaagtaaaaaaggtgcaaacaattaagataagcatagtaagatttcagctcaaaactaagaagaaacaaataattctacccaataaaagcgtaaagagaagagagaagagagtaccaagtaaatgcatgggagctcattcaggcaaatccaagctcaacaacagcctaacaatgcagactcagaaaaggaagaacagtgtttgttcacaactttcataaccgaatactacaaacaacgaaactcattccaaagtggagtgtggagtgaagtagttgaacttgggttttggataggcaaaccaccggagggagcggaggaagtgattgggtgaagaagaggaaaaggctgcaactgcgagaaccacacacagagtctgtcgctcaaggcatacaaaattgtactgatatagtttgcaggagctggataacgaaaccaaatcgatagacttaatagccagcccatttcctaaatatcctacttcattatcccttttattttatttttttatataaattttttcaaaatatatacaaacgagcccagcccattattttgtgggccgagccgcatttatagagtagaaaagtacgaaactaatttcctcattattatttcggattatttcaaaaatacaccaaatcaacaaaaaagttgcaaaaatatagctgtacgaaattttatatatttttacaatttttaagatttaatttaaaaataaggtcttttgatgtatttttatattgtactttttttcattttattggtttttttatttgtaatttttttttatgttgtttggtatattttttttttaaaatgtacaaataggatcttgaactgatttttatcgaaataaaacttaataatattttgatctagatttgttatgacaaaactggttgcattttctgtatctgcgtattacaaattatcttcaagttggttatattaaaaaaataaaattgttgaaaattaagctta

SEQ ID NO: 302547 - DNA, 2005 bp, Cannabis indica
gagaaaattcctgagccgccacctctctctctttcttcttcttctttgtttcgaaatccctatgtgatagagtagtgcccacacacagcaagtagtacctcaatcatagtgtggaagattgtgaagaatccaaattcaacaaagaaggacattcgggctcaaatcttgataatactctgcgacagaaaggagacaagggttagagatctgagtggaaggagacatattattccgttgcacccaatgtaaggtttctcatactttatatgtgtttacttataatcgttttagaagttcatatttaggatgttaatcaacatacttgtgagtagatctaagatcctggtaaaataattccaacaaaaatatgccccacaagatcaagtttccaaaattttttccacacatggacagcttgaacagagcccgaagagtgagttttgtcttgaatatcagcagccaattgataccccgatttgactgagaattttccagtcaactcatggtgccaaatcatttgatcatcatgtggaaaaatagacagggaaatattaatgatcttctcaacatcaatatccaaaaataattccttaagagaaggtatatgccattgtctatcattagtaattaagttactaactttcatattcacatcattccctttgaaaagcaaacgctgaaaattgtgtggttctgtagccactgatcaatggcacaattgacttgctagccattgcctaccttccacctaagtccttgttgaagaagttctttgccccatacaaccccctccaagttagagatgaataagatccaattccaacatctaaaaaagagtcgttcttgaaataatggtgctttaataattggcctagaagagaagaaggattgccaaagattatccacgcttattttgcaagtagcgcttcattataatgcacaaagattttgaaccccattccaccttcacctttcgattaacaatgagcatgccaagttttccaatgaattcctgatctagaagcatttgaaccccaccaaaaattgttcatcaccttctcaatttgatcaattaatttcttggagagcctaaaacaactcattgcatatgtgggtatggcctgagcaactactttgagaagcacttctttcccaccaatggaaaataatttttcttgccatgttgaaagaagtttccacaacttatctttgatctcacaaaaaagtatgctttaatcatgacctgaatatgaaggtaagcctaaattctttttgtgacatggctgagtaggcatatgcaataaatgatgaaagaaattcttagtagcttccattgtgttaggagagaaagataaaacttatttgtccgtgttcaattgctctcccgaagcatgacagtaagtagttattgagcgctgaattgctcttgctgaatcactgttggcacggcaaagaatgaggctatcatctgcaaagaataagtgtgaaactgatcgaccacttcgagaaagtttcatgccatgtaaggaaccattgcgctctttattttgtagtaatcttgagagaccttcagcacaaatgatgaagaggtaaggagataatggatctccttgtcgaagccctcgttacaatataatgttgtcttgaactgaaccattgagttgaaaggagtatttcacggtggagttgttggaatatcttttacctggatctagatttactaacaagtatgtttttaacattctaaatatgaatttctaaaacaatgaaaataaacacataaaaggtatgagaaaccttacattgattacagcagaattaaatgactcctttcgctcagatctctaacccatgtatcctttctgttgcacaacatcaccaagatctaagcccgaaactccttcagttgtttggattcttcacagtcttagacactatgattgaggactaactttgtaaagcccgcttagttaatttggaaattatcagttaattatgattaatt

SEQ ID NO: 302548 - DNA, 6142 bp, Cannabis indica
ttgttttctatttgaggtgtgttattatgatttaggattaaaaatctggcaatgaatttggaatttggttttggtgtgtaatttttcttgaccgaattccgtgaatttttgaaactattttgttttggtgggaatatgtgtggaaaatcttttcttgttgggtttggatttgatggtcttctgagtttgaagtttttgaatggatgataagtatgtggctatgatactatgagagattaagggatggtatttttcatagattatttaagataatgaaatcatattgttgaaaaaatggaggaaacaaacacttatcaatctgataaataatttaacaattcatatgttgtaagttttatgctctgaagctgtcgtcactttcagttgcatgaattgctagcttggtgggcatgggaggaatattcagagttataattgaggagcaatggtaagagtttatgaaatgtaagaattccatttcatccatggcttgttcatcagttatatagagatcatgttgttctttccctttatcttcttactcttaacatattttaaatactgtattattacttataggtaagcattaatggcaagtgttgttgttgtacctcctaattgtccaagaaatgctgtacttgcttcttcaaagtgtataagttttgctgctgcaacattcaacattcgagcatgctctccccaaagtgtttgtgctaagtggaggcactattgttggtgttctattttctgtgtaattcgaccttcttcggctaataattccaagtaagttgtcaatgtacctgaataaatatggttagtgaggctagttttgctctagaggagctttttaagtattagaatgtgtttgttgtaagttcttttgcatttcgttaatgttaagaatcgataaatgtcagagagaactgatattgaagcaataaaagaaaattctctgatgtgtaccacaagtatagcatagagtaacttattaagttgaacgaacatcatcttcaccataccagtggcttgtcataattatgcatatgcatgcagtatgtgtttttgggaaaattgtaactaaagtagtagactggaaatcctctttactataattatttgaggatatcttttgatttggtacaggaagatggtgtggttggttaggagcactcttgatgacaatgtcccggatccttctccttctccttctagtggcagaaatggcagaacacggctaattagggccattcaaggttttcaaaccaggttagaagcaagaattcaggaaataaggagaggttttccacttaaattgcttttcttcttggggggattttactgcgcaactgcatttgctactgttattgggcaaacaggtgactgggacattctatctgctgccttggctgtgtttgttgtagaggggattggggcactcatgtatagagcttcttcccctttcttaaaaaagattaagagccttataacagtctttaacttttggaagactgggcttgcccttggtctcttcttggactcgttcaaatactgagtaaacctgtcaactttaaatttgatctgttttcgtttagctccatcagatggtgttgactgatgagttttcaatgcaagcatcaagcaaaactgattgggcagcacaggtatctgtaccttactggtgcaacaaaacaacaacccaagttcaaagtttcaaaactagtttgaagcaagggaagatagcgaggaggtcaaagtatgagggtggaggcaacaaggaatagcctgcccttgcttggtatgggagcccaaaagtctgatcttttgatgttatgagttttacatgatgggatgaggctgctctgctccaatggtcatgcttggtctgtaatctcttcaaactacaagagcttttgtaccataatggggctttggaagtttagaatctaaacatggtttgtgacctattggctagtccagtgggactggagcttttaccctgccattggtcgaaattgagtgcctactgtgggttttaattccgttggaatcagtacaatagatttcggttagtaggagagtagagatatcagcttcaattctgtattcatagctttgttttgttcttctttgatataccattgtacatttttgttctgcttgatatatcaaattcaaattaataaaggaaactgacccttgaaaacttaatgaagattaacaatgtagttgccgttgccaagtcaagcaaaatagctttgtaatataacaaaaagctattttttatcaataaaataattcctttacccacaaaataataatctcaccttttgttctcataatatatacatctcaagaaacagcctctctaacaaagggtataagtgaagttaagtaaaaggaatgagctccacttcatatatttttttttttatatatttacaatgggattatgtatattacatatcaaggtctcaaaaaatagtgttgccattttagtgtaatttcaaccaatagctactataactttttctgatttctctgcatcccccattttggtgaaccttatggcatcttggcacaagtaacatagtttttctgatcccatagaacatactccatcaagcgtctattccggggcctggatatgccggtagactcatgattcgttcgtccagaacaggacctcccacggtgaagtgatagagactctgaaaatttgatcctttaatcccaagcacttcatgcactggatagcaacaacaacaatagcatttggattttaacatgtgaggctgaatgtttgtttattgtaatgaaaattgaaccatcactttcaaacttagattttcatgcagcagttaagaaacagttaattattcaccagatactagcaattttgagtcatatcaaagcaataaccatgtaacaatttttcacagtgaaatgtcatgcaacgaagaattgctaggggaaaggaatctgtaccaggatcgtcgaagtagcagccaattcctgttgcagatatgccaacagcatgcgcttcaaggtacaaaacttgtcctagaactccagtctcccaaaacaatcgaggatacatccacactttctcgcgcaaaacaggctcaaaatgagctaccataccaagactgaagcagccatcacttgctatttcctgcatcaatatggatgcatgcaatatcttagcaagactgggatatttattcttttacaaacaatcatttcaaatgctcatctcctatgaaacaacacaaatccttcatacagtgtaaaaatgggggtttgaatcaagaaacaactcagagtcaaatatatttgtgacagtcaaaattcaaaatgtttctactacaaaagattcatgaattatgcacagttatctctcatgcaaaagacagaatcccctctattcataatactgtaaactattaggcccaagcaccctagggtccccaacactcgcgaagaaatgctaaatagcaccttaggatgcccaacactcgtaataaagtaaataaatatcgggtgttacatatttatattttatttaaattaaattaacttgaattatgtaaaacccgctagttaattgcactcatataacaatataatagcgtaaggcagcatgtcaccactggtgttttttttacgggtaatatagttaaaaaatctctgttttctgctaaaactcaattataatatatatttacatataaatggtataaaacaacaagaactgaaattcaacatacctgattgcacgagagccgttgagagagaagtctataatcacctacatgaagctcatataaaggaagttcatcagggcaaccctcaggcttggtccaattaaagtcaggcctcatagatttcttaagctcaccaaaatgatcttcatttctaaccaaaaaatacagaccttgaggcaaacctttcaccctatgaacaaataaagaagcatgcacctcagcatcccaagaaagagcccgaaacggcaatgccaatggcctcttttgcttctcttcatcattacccgaacccgaaggaagacaatgcagaagcatttgataaaatgtacttctctcaattacagtaactccatccatatcaactgcactccttcgttttctaactatttccctaacactaaactctttatacacaccttcactaatgactccactactctgaaatggatcaacaatgaatctactttctatatctaaaggtttcttaactgactcagctgatctatatataatatcccaacaaatatgttctttactcaacaaattaggctttcccttccaatccaacttggaaaattcagcaatggcagaactcaattcttcataactaacatcaaatccacaaaccccacttgggaaaacagctaaaacacaatcagggtgctcaaattcaatatgaggcaacttacctttaatgggtcgagaaggaatatgaaactcagggaaaatttcaagccccatgagtttcttcatatcctcatggcccaaaccatctagaaccttcacatcccaaccaatggcggccgcagccatcgacacggcagcgatagcatgacccacgtcgtggttacagtaccggaaagctcgctcgccgtatttccaagcttcgcgccagaaaatcgaagacaacccaacgaggaaagtgttctcgggaaagaatctggggaaaaacccagatgggatttccgctctaatctccaaaccatgctctttcggagcgtaatgcgccacgaaacccgaaccagaacccgaaaccgagtcaataggagggcttacaatgtaagcttcggtagggtgtagattcccgctactggggttaactctaagcgaccaggtcgaaaacccagcagttttccaagcggagagagctaaagaatcgtagagaaactgggaaatagaagatttggaaatgggttttgaaggagggagagatagaaagagagatgagtaagaaggaggagcttcaatgttggggttttgatcttgtgtggggtagtgtaggagagggagcagtggagcagattcgaatctccgaaatgggttgggttggttagcccagtcgaggccgtgaggtcctcgggcgtatttagtgaaggaatgcttggtttggttatggtatttgaggatttgagagaggttttggtgttttgattcttgtattggatgggttgtggaagatgaatgtgatgatgaagatgaagagaaggacatggtgatggggaggttgaaggtgttggtggtgagattgatgagcagagatgaatgagtatggaaatcggaaccgactagaggttgaaggaaacggtggcatcattcactcactattttcacttcaaatggaaaaacaatttgaagtgtgtgtctcatatagggacgcaattttatctctccaattagtgtttgccacggtgaaaatatataagtttagaaataatttgtggtataaataattgaatttaattttgaaatttttacaccaaaaatacaaattacacactttattacatataaacctacacacggttaaaacaacttttttaccttttctctatattttattacacatataccacatacacatcacatctatgcaccagtcacgtcaactcacctatcaaccatcatgcatccctcaatcacttccctctctctttttcttttgttttcctttgatttttttatttcatttcagtttttttttttttgaaataacaaataacctccattgttgaaccttaactccccacgattcctcaaccattttccctctcatttttgttcttcaaaattttttcaactcccactaaaccatcccataacctttttctctctttctttttgtttcccaatctttatataaaatggatgtgacccgttcttcttcatctccttcccctgttcaaaaaaaaaattcaaaatgggtttgaaatcactagctaataaagctaagggaaaacgtccttttattgaggaggaagactctgattttgctcctccattaacgaagcgtgggagagctcctcctaagaagaaaacaaaggtccgtgtgcaagaaaaaatggctgaagatgtttatgggaaaaacaataatgttggtg

SEQ ID NO: 302549 - DNA, 3313 bp, Cannabis indica
aatttattaaaaaaagatttagaagtaactgataccacatatttttcgtacaataacatagtctaataataaaactggaagaaaattactgttttataaatatgtacttatgccactatttaatcttattaataaaataaaataataaaatacaatttacatttataaatgtaaatttccctttcatctattcaatttcataaataatataaaaatccctctctctgtctcttgcaggataagcaaacctgaatttctatcagcggcggcaatggggcatatgtgactcgaaggctgtcgataccgtagtgtggaacgctctgtggaccactatggcaagccccgtgaagattagttgggtcggcacttcttgaaggttgacaacattctctcaagccttattgagatttgattgtattttctgcttttaatttcttcaaggttacttatagtagctatcctctcacttactccactggttactgtttttcaaacaattagcttgacagtccttttctttcttgctggggaattcgcttgacatttatctctgtgttttctttgcaaaaaatttgtaatatttgctcttgttgcttgtttaccaaaggatttcacaaggaagttctcttctcaaacgacaactcttgattatgttttcatttattttgtgttaattacaaacttttcatgattagtttttaaaaaaatcatgagacttgttttatgcctaatcttaagcgtttacagtgctttgggttttgtagattgatggatttagataaataatgggcaatgaaaaacctcatattttgcctgaaaaaaccttacaacctcaaacccagacatgctttcaacttctctgtcttagcatcagaaaaccaacaacttcgaactagaaggcgttcgttggccaaccttttacaactcagttcctcggaaaatcccattttgcactacaagaaagttcatgcccaatttgtcgtgttgggttttcagtatgatgtttttcttgccaactttctcttacggtatttcacaaaatctgattgtcttctcgatgcacggaaactgttcgataaaatgcctgagaggaattcaattacatggaccacgttggtttccatgtatgtccacgagggttattacgaagaagcattggtgatcttcttagagtttcggagaagttctgattggaaagctagtgagcatgtcttagctagcattatccgtgggtgtacacagttgagctcggttggccaaggttgtcaagtgcatggctttattattaaaacaggttttgagcaagaagtgtatgtgggtacttctttgattgacttttactctaagcagggtgatatagaagaagcaagaatgatatttgatggtttgtttgtaagaactagtgttacttggactacgattatcacaggttatataaaagctggaaaaagtgaagtgtctttgcaattgttttgccaaatgacagaagccaatactcttcctgacaactatgtgacatgcagtgtattaagtgcctgtgcaatgctcaagttccttgaaattggcaagcaactacatgcttatgtgttgaggctgggaatggaaatggatgcttcagtgttgaatgcacttattgattgttatgtcaagtgtggtaaagttcaagcaggacggaaactttttgatcacatggttgtaaaaaacattatttcatggaccacaatgatttccgggtatatgaaaaattcatatgatttggaagcaatgcaactatttttcgaaatggccaaatttagctggaagccagacgaatttgcttgcactagtgttcttacttcatgtggttcagttgaggcactaaaacatgggaaacaagttcacgcttacgccatcaaggtcaatcttgagtataacaattttgtgaaaaacggcctgattgatatgtatgcaaaatgctattctttagccgatgcaagaagaatttttgatggtattagtgatcccagtgttatttcatacaatgcaatgattgagggatattcaagacagcagaagttgtgtgaagcaatttatctttttggtgttatgaggcgtagattgtccaaaccaggtctcttgacatatgttagccttcttggtgtatctgctgtctcatttaacttgaaattgagccaacaaattcatggtctcatcactaaatgtggattctctttggacatatttgcttccagtgcactagtagatgtttattctaagtgtgcttgcattaaggatgctaggcttgtatttgaggaaatgaatgaaaaagatattgtagtttggaatgcaatgttctttgggtatgtccaacaatcaaaaaagtgaggaggccttaaatctctactttgatctgcagttatcaggacaaaaacctgatgatttttactttttgttgcgctgcttactgcaacaagtgagttagccagtcttcaccatggccgaaagctccataaccaagttatcaaaatgggtcttgattttgactctttcatcaccagctctatcttggatatgtatggcaagtgtggaagcattgaagaagcttgtaaaacattttctcatactagttggagagatgttgtttgttggaactccatgatctcaacttatgcacatcatggagaagcaaagaaagcacttcagatatttgaaagaatgataaatgagggaatcaagcctaattacatcacatttgtgggtgtcctatcagcatgtagccatggagggcttgtggaagacggacttggctattttgaatcaatgcctcagtttggcgttgatccagggactgatcattatgcttgcatagtttctttactggggcgagctgggaaattacttgaggctaagaaattcatagagaaaatgccaataaaaccagcagcagtggtatggaggaacttgctaagcgcatgtggggttgcaggaaacatagaattcggtatatacgctgcagaaatggcactttcgagtgatccagttgatagtggatcgtacattttgctttcaaatatttttgcatccaaaggtatgtgggttgatgtgagaagggtcaggcagaaaatggactttagtggagtggtcaaagaagctgggcagagttggattgaattgaacaatgaagtacatacctttgttgcaagagacacagcccacaccgagtccaatgccattttctcagtgttggacaatttgatgcttgagatgaaaggagtaggatatgtgcctaccaataaaatctaggggtgttcatctgatccaatccgcacttttt

SEQ ID NO: 302550 - DNA, 3022 bp, Cannabis indica
gaacaaaatatagaaaaacaaaaaactaatcttagcacctgagatattttgagcttaaaagatgcacgcccatgcaataatttacttggtttatcataagaagcaaattcaattccatcaaagcttgccaaaagaggagcttctccatcacttgttctctcaacaggtgctccattatcaaggtatacaagtgaagccacaacctatcaaatacaaaaaacaagtagatgtgagcgttaaatgtacaaatatagcaaaaatcaaacaaagtgatgtgtcatgtcatgttcaaaggacagatgaaaacctcaatttccttgcttacaggctggtcagaggtatcaaggaagaccacatctaaagaaaagttccggcgacaggatgcctgtgatatgataaacaaaagtagcaagcttcattagataatcctaatattagtggcttattaatactaaggcaagatcatgacacttgaaagattctatagtggacttatttactgtaaaaagcaaccattagaatgcaaaggctttataatcaaggttgatcagaaaatctaaaattcaaacttgtatgaaagagaatagaaatgaaatcccatagtgattgataactgattaaacgcacacagacacccccacccacacccacacatccctttctaattagtgattgaagaatgtttaaacacaaacatacacaaaacacagtactatatgacacaatatctacaaatgtccgtaaattaatattacaggataataaaagcatataaacattcagtctaaccttgcctccaatatactccaaacaccaccttggcattcttcaatctcagatgcggatgacttatcaatagataattgtaccggtggatcctggcattagaaaatcttataagaaagttatgtaaatattttttcggtgagaattgcaataagagaggaacatgaaaaaacaaaatcctcattcaaggcatatacttttacacaccttagcaaagtgatccttgatggatgaagttgtacgcaaaatttctaatttgtaaatgtaaccctgttcattggcctcatctccacctccaccaaccaaagtgatctttccaggggaatttacagcacaatctttttcagatatagaagagagagacttctctccaacacactctccatcaatgtgtagcaatatgcagtcagtcagaacctatcccccacaaaataaatatataaaggcaaagccaacaataatttcaaaacaagaccaaatagcttatatgtcactttaaagaacttctattagacatcgttcatcttccgagaaaagagataatgaaatatttgcgagcaaagaaacctatgcctatactacactatcaacatgttaaggcaacatcaattgcgccagcatcagacccaagtgcactaggtcagctcttgaatatgaagttcatataaagttctaaaaatttgttctttatcagaattccttccatataccctatgaaaacataccagcatcatcaaagtaataaagattggaagtaacaaaggccacaacacaaaaccttatgcataaataaggcgtaaaatcaatcttcataaagaactgaattataagaccatgttaatatcttctccatgtcatatattgccattctctgatgggtaaaatctagccgaaactcagaaaaaatgaagtaaccaaacaagtctctaacttatcaacagaacatacctcacatccaaaatgaacccacttttcaagaggaaactcagtctctactgatgcacacggaacttcagatgatgaagcagggttggaagaattctgagcttcattgttcaagggaagtaatggaaaaagcatcacttccttttcatttataacaaggaaaggagaatggcctgagccatcttggggaacctgcataatttgaaaaaagatgtcccaataaattgcaagaccaaaactatcatagaagaaatgaaagaaactatggtccttgcttagaagacgatatcaatgtgtagtagaattatcaatatgtataaatgtgctagtacaaatcaccttccctcatagcatgacaagaaaaaatgaagaaaaaaatttcactcatataaactgaaatgatgaaaccagattgacattgaaaacagcaaaactcagatggtacactaaaaaatacaactgaaagttctcccacctgaaatgaacacaggagaaaatataacagacttagactgtatatgattaactaaaggagcttcaagttctttctcacaactagtaatctattcaatgagtcaacaattttttattttttggtgtgtgtgtttagaaggaaataaaaaaaaagactttttttaagcttcaactaactatgaaaggaaccaaaaatttaccattgaaaaagaaaagaaaagatacatagacaccataaaccgctgtaaaacccttcaaaaagaaaaaaaaaattcttggcagaaacaaaaacgggggcattcataaaaggatataaagaggacaagttgagaccgagagaaaaagggcaatgagaaaccttttgaagaagtgtaacagggaatgcagtggagttggtgagataaatccaaaagcagacagaaaagctctcatcttctctttcgatttcaagtcttaaatctttgagggccaagtaattatctcgctccattggttcatctcccatgatgattttactcttcttcttcttcttcttcgaaacctctaaagaaaaacatgaaagggaaaagaagaaactttttggtaagagtaaccgcgaaattgagcagttttccaatggcgctgttaattgacggttggtacgctactcctctgaatgacattgggtaataatctggtgtgtcgcggtagggtgagtcactagtagggtattttaaagaccgggaataactgtgacgtggcaaacttctattggtaaagacggctttgtttttcattgactagaaacctaggaaggtaggaactaggaaacgcttta

SEQ ID NO: 302551 - DNA, 3179 bp, Cannabis indica
ttttataaaatactagtaaaacacaagtaaaaacaactcaaaacaataataaaacaactaaaaaataccagtaaaacaatagtaaaaacttaaaacagtatactacaatatgaaacttatataaaaaacacatttaaaaagtaaaaaatactgcctgataatatttttgtaaaaaaataacaaaagttagtataccatctaaatttcatttcatgttttatcccttttaaaagatcacgctggtatggcccatcagaggatagcatggtcaggtacaccgtaagcccatccaaaaactgactattatgccattgtctcttcacataattaacaagggtaaaacagtcattccgtcactagggttttcacaaaaacctaacatctccttcatttactcctctttttcaaaccctagcccctttctgtgctgagactcgcagcccttggaacatagtagaatccacactgcgccaagatgggtacctcttctcctccctcaatctatctacagttcactcaatttttctttttttttgattatttgatttgattttccagatgggtactgcttaattaattttgttctatctatcttcaccatatttgttttcaattaagctttttctaaactcgaattctgtatgatttcataggtatttctcgtgattccatgcacaagaggcgtgccactggaggcaagaagaaggcttggaggaagaagagaaagtaataaaatcttatttttcctctcacaaacagtgatgttttatttcttatttaattttattttggttgttaatttttttcttttttgggtgtgatgaaggtatgagctcggaaggcaacctgcaaacaccaagttgtcaagcaacaaaacagttaggagaattagggttcgaggtgggaatgtgaagtggagagctttgaggcttgatactggaaatttctcatggggtagtgaggctgtgaccaggaagactcgtcttcttgatgtggtctacaatgcatctaacaatgaattggtccgtactcaaaccttagttaaaggtgccattattcaggttgatgctgctcctttcaaacagtggtatcttcagcactatggagttgatattggacgtaagaagaagaccgttgtctctgccaagaaagaaggagaggtaagctagctagccattgcttaatttctcatggttatttgcccaatataatatcttttattgctgttatgtgttagttatatgtagttaatgaactgagttttagagtatgtagtaacctgtaatcaatgatggaggggttagtggatgtttgaataagggtacttcattgttcttattcctggcttttttattttttttatttactgaatgtggtgaattcgttgggtttactaggatggtgaagctgccacagctgcaactgctgctcccgccgaggaggtaaagaagagcaaccatgtggctagaaagctggagaagcgtcagcaagaacgagttcttgatgcccatattgaagagcaattcagtggcggtcgtcttatggcgtgcatttcatcgcgacctggtcagtgtggtcgttgtgatgggtaagtggcctttgttttaatcttttattttttagttttcatggtctatatcttcatttatcattgtatagatgaataatgctccgaaatttttgtggcagatatatattggagggcaaagagctggaattctacatgaagaagctccagcgtaagaaggggaagggagctggtgccgctgcctaaaattttgttacttagtctctttagattccagtttttgtttctttctaaatgttcttcaatagacaaggcaattaactttttatccattgagggtgaattattttaatcgaaacaattttttcttgtgttattattgaatgtttatgtatttttttagatgattaggtgatgatccaattacaagttaagaggtttactacctgggtaacatcccgtaatagttaagaaaacaaagtggtaatactgaagggtcaattcctagagagtttttgctttatgatttggaattaatattgcttttccaaattcaatgtctacaagaatactttgaaccatagctcccataacgtatgcatctcagcatttaattaagaacaatttttttttttgtaaaaaattatgaacaattagtggatttactttctcacttatgttacttttgaatgcctataattacccataacaagcgttcatttcctttgtacttttggttagaaagttttgaaatattaaacaatcattatatctcttagtgaaaggtttttggataaagttaaagggtaaatacatctttattttaacataaagtaataaaatacaaattgagaaagatagaagtaatatgtggcgccaacttacctattctctcccctcaaccttttactataatagaaaaatttgtgataaatatatttatgttatgaaatattatttatagatgttcaaatcactaaattaattattgccattaatgcttgattgtattttttttattacattgatttagttttccattattcttttagtcatgtttttgtataaatagggttcaccccattaaaatagataattgagaaattttcattcagtttctctttttctcttcatcttcttcctcttttcttcttatctattttatattatttcataatacgttatcagtacgagtctctgcccaagcctcaaggtaaatgttttgttaaacttcttgaatattgttttaaggcctcgaacacatcagggctgaagcaataatccccttgcgagactatttcaaggacttcctaaaccacctcgggcttgccccattccaactgaatcccatttcatatagaatcctcgcaagtttgagggttttatacaaaatcttgaattgggagtgccccactcccttggaaatagagtatctctactctgttaaggctgttccagcgaggaagattgcagcagggggtttactatcttgagactcacacaggcgattgcaagatcattgtggatttgccaaataaaacttccttcaaggatgaatttttctggacgaccggtctctcccccatcgtcacaaccacttttcgcattatacgtaagtgattatttgtacaagacttggttaaattagtcc

SEQ ID NO: 302552 - DNA, 1428 bp, Cannabis indica
tataaaaagaggtatgtttcaaataaatataaaattagcggtaaatttgattaattgatgaataaaagaggcatttttcaacttctgactatatgtatattttgtacgagttatgggtgattgagtctactaccaattggattaagattcttaaaattgggccactacaacggttttattggcctattacattttggaaaaatggtgagctcttaatgaataattataacaatctttataaagatgaaaattacagaataatagcatcatacaatgtttatacaaagcagcttaagaagatggtatatggtgttagaagcaaatttttctttacttgtgttactccatatttgaacactcttgtttcagtctagatcagcataatcactacctattttcaaatttcatcttcttcttcttgttgcgatttccatggatgtgattcggtgattattaaaatcttttgagttttttcaaattttttttatctttgtatctgtttggttagtaagaacatataagaaaaaaattatatatatatatatattttatatattaatatatttggatttatcttaattatatatttttacaaattattgttggtttgtgcccttggagtggctggttgtgtcatgcttttttaagatttgtatatgaatatgttttaagaatattaattggttcaaacccaacagaatcaattaccattcaatttgatcaaattaacaagataacttaacattgaagcgttttttttttttctcgtcattataatcaaagttgtgataataagcaaagactaataaagaattataaaaagaaaagaaatcatgtataattaatgatcatatctattaaatggtatatatataatttagcaacttcctcttattttgcttcttttaatatagtacgcattgaaatttttgtacttttgagtcttcattttcttttaatcagtgtaaatttgtagtgtctagtacttagcttacaataatttattgaaaatattttcaatacatttagtcttttcttaaaaaataaattttaaaagttgatatagcgaagaaggtcgagctatacatactcgtatgatttagtcaatcttattttgtttgcacaaatgccagaaggtgtgagattcgattgaaaccttatatagattaaagttatttgtaggttatgtagactaaactctagtgatattgttttataaatccatggtttacttactcggacagattttatgttacataatgtaaatactgtagtgtactgtacaccgaacaattgttgtgttaaacgctaaatctatacaagtgtgaagctattctcaagtaaaaatttaatgtggtgtctcactacatttaataattaaaaaaaaaaattgatatagcaagaggaggatgtaattctattaattga

SEQ ID NO: 302553 - DNA, 1894 bp, Cannabis indica
tatatatatatatattttgatgtaacatgtgatttgatctttttaatacattacactaataaaaagctgttaaatatttgtctagagtgcaaaatttccaacatcattctaaatattttcatttattaattaaatttaaaattttattgtttcattaaaaatgtaactatgataattatatatattttttgacctattataataaattattgacatagacaaaaattttatttttagactcaaattaattatatacttataataaattaattgtttaattaaaatatttaacaaaatatttttcacaactgatatataaatattttttatttataaaaaataaataaaatcaaattactatcaagtaatttattaattaatcataactatttaataatgatccaacaactactataaatataatcaccgtggttacatatttcatcacttgtttaacaatgatccaagaactataataaacgtaacttccgtgatcattacatatttgatcacaaccctttataccatgatctaacaactactattaatataactaccatagttagatatttaatcacaactatttaaaaatgatctaacaactataataaatatacttacgtacagttacatatttaatgtaatcattaaaaccgatctcatatatatcggtaaatatatagttcaaagtattcctcaaccatcctaacctaacctactaaacccattttcattatatataatgactctttaaacaatttagcataaatgttatttattgtggataaatagattattggaaaaggttgcccctatatatagtacatgatgtgactaagtaaacaaaatctgatcgatttggaatttaatatagttttgatttttatatattgtcggtcatcttatgatatttttgaaaatatatatgcaagatggattatttgactttgttgtatataaaagaaaaaaaattactaaaataataatatctccaaaagaggtgttgatgatatagattagcaatttcatataataattaataataccactggccccatcatgtaatttcatgacctatggttttgcaaagtaacatgtctttgattaatattcatgatgaaccatactaattaaattgcttaataatataatatatattttttatatataatgtagaacaaagtagtaactttgtgataaaattaatgacaattaatatgtatattcaaataatttacagaaagtgatgagagcaaaaaagtgatttgtgatccaggattctatattaaaatttatctttataattttttatattgttttaaaaaaaatcaaacttcaaaatattatcttttcaaattaagttctaaattagtaggttatgccaaaaaagtaacatgtcctaggcataaagaaagagataaaattgtagaagaaatgacttgcttattaatacatagtgttgttatttttctcacaatatttgtatataagtttacttattagaatatatatatatatatatcaaaaaccaaaatcttaaaataagctaggcccatgttttttcttcctgcctagtattggttgggcctcaatatattttgggtgaaagttagggcccaaatatcgttcattctcaagtttatacaaaatcaaaagggataagctgaaaaataccactttttttatctattaatcaaaaataccctcatattatattttattaatatatacccacttttttgagtggattgcccaatacaccctcactctctacttaagtgtagcatataatttacattatctaagggatctaatagggacatcatctataaaagtggatatatcttaaagggtataaaaatgaaggtaaaaattaaaacaaataaaggaaagt

SEQ ID NO: 302554 - DNA, 2348 bp, Cannabis indica
atcactagattagattattattaagttttattttgataaaaaattaatcaaaatcctatttgtataattttaaaaaatacaaaatctattttgtcatttaacaaaacagaaagtctaattggtaacttttgtaaaacatagagtccacataatatttaaccttaaaattatgaaggaaatgaaagagtccaattgatgatcatatccaaaatcttcttcagctcgacttagaaagccttgtaatgagagcaaaaatttgtaatcgaaaaagtcctttgcttggcttgaactaagatagcaaagcaaaatcccattactgtaaaattttgtaaggaaagaaagagtacaaacaaagacatctcagaaagacattgaagtgatctctttgtttgaaaactgtggcacactatagttgctgattagtacagttcagtattatgaagcacttcctatcggcggagaaactgtcatgtatttgatgcgtcgttggctgcttcatcaaaagaggcagccaaatactcagctaggcttggctgagaacttacattctttggagtattgtcaactttagttttgtgcatctcaaaagaggatctcgaggcttcagaagtgtacaacctactcaatggagcatccacccccttccaagtaataggtgtcaaaaacttccatggatcttcgatcatggaactatgagaaaacctctcgggccccaatggtctctccattgtagagaaacgaccacccatgcctcgtcctcctcctcttcgacctgaactatgactcaggctgttaccctgccagcgatttccactcccacctcttcctgtattaaaaggactacccattggaccaaatctaggactctgaaaattatgccctcttggttgaacaccaggaaaattataacccattgtactacctggtccatttgagggacctagatttccttgatcaagaaagtaacttccttgaaactgatgagctataggggtcatttcagcacggggtcctggaacaggatatggagctcttagcatgggtgaaccactgttgattggaggtgtgtgagtataatgatctaaggaaacatggtgactttctgtattccttttcttgttggcagtaaatgctgccataggatctgtataaaaatcaaacctagatggttcttgcgatggtgtagcagcagaggtctcgatcagtggattcgataggtgaaaaggcattgcaagagttgtttcactgtctttagaattttcagcctgatcagcttttgcacgcatcaatctcaatctttccttcctttcttttgactcctccatgtaaaaagtgagtgccttctttgctgagataggtggtggaggtttggatttggccctgggaaagtggactgaagctaagattcgattgttaatagcttggtcgcgtcgttgtcagcttcttggatggaaatggctctgcagtagaccgtgtggttgctttaaagaatggatcccgtcgtgggacagagcagcaggtcagggaggttctgtgttatcagggtcagtttgataatgttgaattcattcctgttttcggcaaactactggattgagtactgagaaaacaatccaatgtttggtacacgaggggattggatttcataactagagtactttcatcatttaatttctcttctccaggttaatttttgttcctggaaaaaacacaatcatcaattatgttcattccaacccataacttttcaaccattaagataagtacatggcaactcaaaggtgcttccctcataatcatactaaaactaaaaacaaaaaacctcctcatgtaaaccccttttatgagaaagtaccctatttccaatcaaatttatcacaatcatcaatcaatttcgaacccttaaattataaatcaggaaaacatgtgataatgataacttagcaaacttattaagaatggcacacacctgctaaatttcatttaatcttaaaaatagagcacaaactcaacaatttaaaatctattattgagaacaattaatatcacaaagtgtatcagaattccagcttttcccttgggtaaatatgaaattattctcatctcaatggttatatggattatgaaaaatggagtaccatgtcacaatctgaagtctttatgatataagaaaagagaggaaatttacctcggatggtggcggagggatctgcccgtcgggaagggtctcggcgtcgcaagaagtcggagacggagccggagctgtctagtgcaggcaggctgtcgcgtgtctggggtcagaagagaagctgaacacgggaagggaaagagagttgaaatgagatttt

SEQ ID NO: 302555 - DNA, 1313 bp, Cannabis indica
tatccaagacaactcttgtctattctttcaatgtgggacttaggttgttaccccaacagcaccaacaaaagagatgttcacatgcatgggcgccgttaacaaagatccactctgtgttgccatgtttgcccttgttgcctgccatcgctcgttaaattatttcaacggcattatttttggcatagtctttaagcattggtacaaactaaatttcttggtgatattggtaagacactaacaaaaaacattattatctatgagtctttgtcggcacaatttgaagcctacaaagcttttttaagccttacgagtgctatttcatgattctcacctctactgcaggacaggtagctctaaagcaagtactaataatcttttgaattgttattattaaccagccctaagtctttgatccttacagatctttgccaaatgtctttctatagatcgaccactctcgcatttgttgatttctatttctctgtcaactctttaatcgtagtgtgtgcctcaaccaacaacttctgcatttgtgtcatcctctctaccgtataggcttagtaggtttcagcgccatgatacttttgcattcgaattttgtgattctttccaactacttcgtacaattatatggagcaaattaagacttatctccaattgatcttgaagaaattttcatagacaacgtcaattgttgatgttgaaaattcgctcaggtaagtcattaaaagtagtaactcaatgactctctcactatttctcacggtcaacctctcccatttcgattgtcttttttgattggattcttcaaagacttcaaaggatatcctgcaaataactctttgtcgatcaagtcaatgaattgtgacatagattttagaagagaacgtagagagaattaaacaaaaatcatcaaagtgagggaattaaccctttttcttagacttctttctccatttatagtgagaatttggagggaaacaactgtaatcaattaaactaactgatttagtggttggcacattcccacttggtgcccctagctgaatttcccactcaaatccatttaagagatactcacatagactgatgacgtcagcaaatctcaactttgttagttttctatctccaagctaactcttgagccctggacgaatgttgtcgattattcttttaaatggaattgggtgtttcgatcttggactttggtgggctttttcttaattagggaatattcaaagaaaattacattagaccccttatgttaacttttatctttatttttatatttttttagatatactcacttttat

SEQ ID NO: 302556 - DNA, 2855 bp, Cannabis indica
agaataaattggatcatatttttaagaaaaaaaagtgtttaaaccgaccaaactgaggttcaaacggtcggttttaatacatgtatcagattggtcagttggttttcagattgcaccaatctagactgaaaaatcgaattctaaattttttatatagaaaaaaaatcgaccaaaccgaccgatgcttagccctacttccattaataatgggagagtcaccattttcagtaactcaaatgtaagaatttttagtgctagactttccctcggtatataacatgataatgggtcatcatggtttaactggaatggggaaataagctccataaagcatctatttttgaaattcctatctcattaatgaattggcactattaaaggggatcaagtaacaatgtggcagtggtatagctaaggcatgcagtgaagaagaaattgaagatcttgatccaaggcttgttgatgaacaatcataacttggaccagtggaggagttagaggaagtgaatatagatcccagcgaacctactaaagttgtaaaaattggtaaagggttaggggaagaattaaagtaagattagatttcttttaaaagcaaaccatgatcaattttcctgaagccattctaacatggttgggattgacctgaatgtcatttgccaccacctcaatataaatccacattatcagccaaaaacacagaagagatgtcttcttgacttcgagagacaaaatgctttaaaagaaaaagttaagaaactgttgactaacaacttcattagagagacattttatccagtctaggtttcaaatccattcctggtcccaaaactgaatggcatgtggaaaaattgtataaacttctccgacctaaatgaagcatgcacaagggattattttcctttgcccaaaattgattagtcgttgatgccacgacggggcatgaactcatgtcttttatggacccatattctggatataactatataaaaatgtacatcctagattaagaacacatgatctttattactagcacgagactttattgttatatagtcatgccatttggacagaagaatgcaggagctacataccaacatcttgtaaatggaatattcaaactcaaataggccgcaacatgaagatctgcgtagatgacatgctactaaattcagtaaaaaatgatgaccatgtaaatgatctcgcagaatgtttctcaatcttgagaaaaatcataatgaaattaaatctcataaagtgttcattgggtatctttagggagattccttggtttcatagtaaacacaagaggaattaaggaaaatcctcagaagataaaggctttactcgagatgccatctcccaagaaactgaaggaagccaatcattaatggggaaaatggcagcaataaatagatttatctcaatgtcaacagattattgcttgccattttttaacatattgtgaggcaataagaagttcaaatggtcagaggaatgtgagcaggcctttcagagcatcaaaaaacacttatcgaccccatctgtgttatcaaaattgatgaatggggagatctttttttttttcctatacatgtctgtattagaaaattccattagcgcaactttaatacgagaagagggaaaggcccaacaagcagtttattatgtaagtaaacatttactaggggtagagtccagatatccaccttttgataaactcacactgagtttaattcacggttcaaggaaactacaaccatatttccaagcgcacccaattaaagttttgacaaattatccgttgaggaaagtcctctcaaaacccaacacatcagggaaattgataaaatggtctactaaattgggatagtttgagatatcttgtcaccctcgagcaacaattaaagggcgagccttgaaattaatcagtgctcgaatcaaagatgaaaaacttccacaactctaaatctgtctccaaagccacccaatgttgttgtttctacaaaaagatgctcatgtatatggatttctctttctcccaagatggcaggaattagactagatccccccaaactaacttcaataaatactcatcccaaatgaagctagagtggtcagcaattccttcccaaaaatcccgtcaacccattaaagatgcatgaatcctgagtatctcagaatcctgagtatctctaatggacgtaatatgcatattctatggtgtacagagaatatcatctggatcatcagttctataatcatttagaagaataaaatcatctccgggagacttgggctgtggatgtggatttacctctgtatttgtccttctatgttcttccacgagtgccattagggtcttcaaatgacccataatctcagttcgccctttcaaaagagcattctaaccctgcttcaaagcaatctgatccttctcaatattctctaaccttgccaaaatggcagaatattctggtacttgagtctttgaggtgctgggatacgatgttgatgggggaacaaaacgttcctctagtggtggagatagtgaaggtggtgtagcatatctaaagatttgggttgccttcacccggtcttctaactttttttcaaggttttttgcttggctatgcatagcttcctgagtaggttgtccatcattacccaacaccagttcctccaagtccacaaataatgacgcctcacctctaatgacggtcatcacaaattattcttcattaggttgaggacataaaacggagtaaactgtcaactacaaataaaaacaaaaatattattaaattaaaatttaaacaaaataaatgtaataaaaaacaaaataataaatgaaa

SEQ ID NO: 302557 - DNA, 3071 bp, Cannabis indica
tgacgtactcgtgtataagagccatttattccgtgggtgtaaggacccaatggaggcttgaagcggggacgttacaatatgcagtattgttggcctggataatgaagctattgagtaagtaaacttgaaggagaaaggtaaactgttcagtttgcttcatgagaaaaaacttctattatgaaaagatattgtagtcctttatttaagtgtgggttgggttgttgaagattttagatttaaataaagtcccacatgaattaaacattaaatgaaaatagatttaatgagtatacatgcattattatttttttcaataaaataactttattcaaaatatctataacttcatacaacttaaaatatatacatccttacaaaaatgtgggacaaatatggaagttttcgaaatctgcattgatacaaattttacataagtaagaactttcttgaattaatgtttctctaaataaaatataaatcatcaaattagcatatgacacaaatttttgacacaaaaatgtgggacactatggatgttttggcaacagcacctaaatacaaattaatttttgatatagaaggattccgaatcattaaaaagtttctttaggaaaaatgtatcatttaattatctagaaatatatgttttataaaagatgtataagatcaatttctactataaataaacaaataagttaattcataccttttcacaaatttaaaatttaatgtgttaaatccacaagcattgattagagacttaaaatgttaagaataaagagaagagtaaaagatgaaagactttttttctggtgtatgagattttggagagggagctatacaatgactgtttgttaggatttttttaatattcactcatatactaattgctattataataaaatatttgcggcataactcctataattgtctagtttattgcaactaaccttcaattctaaaattttagtggtaaaatctctaaaactcgtagtatgttagcagtttaacatttttatccatttttaagtgttaagtaccatgttggaatgtccacgtgtacacagtgattgtctatgcggacataatgtacacatgacacaattttattggtccatgtaaataattatttaaaaaatcaaaaattaaaaaaaaaaaattgaaattaggaaaaaaaaataaattttgaaataaataaaatataaaacataaataaattaaaaactaaaaaagaaaacccctaattttggaacctaaaaactagaaaccctaattccctctcagctgcatctcccattctctccctttgttcattatcgcacagccacaactcagccattctccgaccacccccagtccaaaccaccctctgaatcaaaccccacgacccaaaaaaccccaacccgattctttttctctctctcatttttctttctttctctctcagcgtttagctcagcccaacgtcggaggtttgtctctgtccatccacggccaaaatggaagccacgaatggcttccccatcatccgaaacccaatatccatagttcccgagtcgtctaatgactgaagaagccccaggtggagagggaggtcattttcaaatttgcgccaagtttttcggcaagagaaggagcggtggaggcgttgcgagagaaggctttggatctggggttggatgaatgtgaaagtgttttcagatctgaggttctcagattttgttattttttttattgtttattttttttgtgtgtgtatgtgtgatttaagtataaaaaataaggtacggtagtggtattggtattggtaagtagtggtggttttggtggtggttgtggatgatacagtggttggtagatagtggtagtttcgatggatgttggtggtggtggatgtcgatcatgtgaagaagaaaaagaaaaaatagaaaataatgaagaaaaaaatttttgtttgaatgaaaaaactataccactgagtacggttatgctactaagctaaattgatattacttgcactacatatcaaacaattctacttagttattatgtaatatcaactagagaagactaaacacacacttatagtcaaattcttttccacttaaatattaccctaataaatacaagcacttatatacatgtcaataaaaatagtaaatatatataagcacatatccatactaaagattaaatttcgagtattacaaatataaattaaggatactctaatcaaagaaaaaacagacacaaacatacagtaacaacatgtacaaaaagacttagcaaaaagaatcaactcaaccatgacatcaacgccacaatcacttgcattctatacacgaatgaaaacaatgtacttatgtaaaaccaaaattgctggaggattggaattttgtatttttattcattataattaattctttttggctaaataagcttggagctttttagatatgccgaattctcttcttagtcgcttatttaaggctaaatattattctgaatcctctcttttggatgctaagattggacatcaaccatctatgacatggagaggaatttgttgtggtagaggcttatagggtttgagatggaaaataaggactggtaattgagtttcttgttgttctcagccttggatccctaaccattctactttccaaccaattttgttccatggaccacctactgctcttgtttcaacatacataacagaacaaggaatggaatttaccacttctcatacatagatgctagtaatattgccacaatttcattgacattttttggcaaacctcatagactaatttggcattgccatgaaagtgctatctataatgtcaaaacatgttaccatttgatagcccccttagataagttacatcactcttcagcttcaacagcttaagattcctggtgaaaaaaattttagtcctttcattttgccacagaaaatcaagatttttacttggaaggttatgcatgatgccttaccagtcgccactgtaacgtcaccgcttcacgacatgaatggttcttatacacgagtacgtcactctggctgcttc

SEQ ID NO: 302558 - DNA, 2212 bp, Cannabis indica
tacattgaaacagagttttatttagggcataaaacccaacactgacctaaaatgcgaggtcccctcacgtggggggtcccttgctggtggtgaccgtaaatgcgagcagccctcatgagggggatcgcttgttaatggtgacctcggattcaagggccatcacgaggggggatcctttgcttttggagcctaagatagggttgttcaacgaaactaaaaaactggggtttaaattcagaccgtgacaatttgaacctctatagatcataatgacgataccatttttggtggtccgattaatccagaccgttcaccgtgtaatggtttggttgtggtccgtaataagtaactaatggctaaaccaaaccggactatatataataaataattaatttatatacatatttcatatgactatacatataaagtattaactattacaactatgggttctcatttgatgatgccattgcaacgagacctcttctttgtgtactcatattcatatggtttggttgtggtccgtaataagtaactaatggttaaaccaaactggacattataataataattaatttttatatatatatcatatgactatacgtataaagtatataataaaagaaattttacaattaactatccaatttggctttcctaaaataattgagttactatattaactattacaactatgggttctcatttgatgacgccattgtaacgagacctcttctttgtgtactcatattcatatgaacaaggttgaagcaaacaagagagactttatcaccactactaacctctcaccaagggttcaacagatgagactacaatttaacatctaacaaacatctaggtactaagtgctaaggtgccacgtacaaagatgcattgcaagggacactccatacgatgtacgtgagggggaccaactgaaagggctcccatgtcactacaataccttagtaagtagtggatatataaagggtaacaaagaccaaaactacaggtgtaattacgaactaacacctggcgaccactacctgcactaccccttggaatgttgacttcatgggtacaagttagggtgtattttgtacttttaggacacttgtagcctaggacaaatagtgtttcagtaaatagaacatcttttcataaattagggggttggaaaacatattttgtaagctccatattcacaacaaatgcatgatcagtttaccttcattttcattcaagttctacatagagtttcatagctagtcattatccattactcatatcttttcatacttacattaattttctatcttgaacttggttgatgagttattttcgtaaaaatttttgcaccttctacaaaaaagacaaactccaagttgtgtttttctcatgaatcatccattaacattcgacatgccgaagtgttcattttgtctccaagacaataaaattatcttggacaataatcaactagttgtaacaagaagaagtcatatggctcagccaccagagaaaacctacgtgaagtcaatttgggtgaaggacacaatggtagtcatataaatgaaaacaacgtaaggaaacaaccccaacagtaacaaccaaagttgtggtgaccgacctacaaggagaatgaccatacctctagtcaccagagaatgcacatacctccagtcacagcagaaaacaaataagtccatgtagtggaaagacacacgaacatacaatatgggaccaccagacacaaccaaatcccacgaaggcacccatctccagtaagatcccctccgccccaaattccacatgaactgaatacttaacgtcaacgagccaaaaaggaaaaagtttactcaatgagctttagctcttgaactcgctctcacatagtggaaatgaatgacttgaggttggaaaatcaaaggttagaggaaactatgaacaatatgcaaaatgtactaaatgccttgttacaaggacgcactgatgccccactgtattagcataaaccaaaggaggtttgaagccaaaaaagaagaatgggggaacctcgaaataatccctgtatgataaatctaagtccttaccatgagggggtgcacccatgcaaagtcaacctaaaactcaagaaagacaaaacctctcacctcaaccccataaccttaaggaaaattattatccaagaggactcatgctaggggcaccc

SEQ ID NO: 302559 - DNA, 2584 bp, Cannabis indica
atatatatatatttatagagataacacatatatattaatattagagatatataataagtaaatatcatatatatcttaattatttagaaaattttaatgagatatatgaagtgtaccatgtacagtaaagatgatatttttatgaggaaatcattttttcaattatcatctatgagttaaagttaaattaataacttgattttattgtggttcaagtgtatatttaaaaaagaaaagaataaccgaagtgagtttacacgcgagaaatatccacttatcacatatattatcacaatattaattagtataatcataatacattaatataagtataatttttattattatctcctattgaccgtatctacgtttattgtatttattatgtcgtgttataattatgttcttattgatacttaaattcatttgttgacatcgaaagaaaagaagtgattcgctccgtgttatattgtaaccgcagttaattttcttaaataccgtgttaacatttattagcataaagtgttagagttagttacaattctgttagttagttttacacatacatactaacttagtatatgtatatatataatgttatttattattaattatttttatttttatcttttttctctaacatttggtatcagagactttattttgttcttagtaattttatttttttagtctctaccttttttggttgtcttgaatttttgtctttttgcttatgttaatgtagactccaactatatctttagctcacatcttttactctgatatcgtcaatgataaaagaactctcatatagatgatttgaaactgataatttagatcaagtcacaatattcttaatatggttttttaggattttattaagagagactcttgagttgaaataaaaattaataatatatatttaatttggttttgtcaaaaaaaaaaaaaaaaaaaaaaagaaaattatgagaatacaaatatattacaattcataagttgagcaaaaaggattaccatattttgtattttaataaactaattttactatataatatttttatatatataagtggttataggtatacttttagtagttttacatttttttttaataaagatgagatttcaagtttaaattttctctctctaatataaaataataataataataataataataataataataataataataataataaactaagtaggagtgatttaaattataaataaataagttaattatattgattaaacatataaatgagtgtgacatatatttttattaagaatattttgtttttcttaacaaaaatattgatatataccattaattgtgtttgtgctcatgaagaccttcattcaattatgaattatgtcgtattaaatagtgtatatatataaaaacacatttataatcatgcatgattaattaatctaagaactattattagttgtgttatatttgtatatatctacctttattgcaaatatttattagtggttgctctaggattattgaaggtaaaatgagatgaaagagagataaataacgatatatataaataccatgttgatattacgtgcaatgtacgcataataaattttctttttaattaagttcaataaaataatgttaagcacaatatatgtatattgtttaatttttttttaatttttgaaatgggtttgatattttgatctttaaaattttatttagcggctacattggtgtgtcttttgaatgtgattatatatatatgtattttatatgtacaataaaatttcgttgtgtgtcctattaagtataattgtctcttattttaattcaaaattaaacaataaagtgaaaattatgtataatatttaagtattttaaatttaaatttaaatttctttatataaaatatctacataatttttctttatattttaattcaaaattaaactaataaaattaaaaatataattaaaaatatctataagtattttaaatttctttatataaaatatcttcataatttttatttttaagttttatttagtgggatcatctctaaccatccctacattccctaaaaattaatcattatttacatttttcttaaaaacattctaagaaaagtaagaggaaatgttgctagtctaaaaatttcatatgaaatctttgactcagaaaatagccaacaccaagttattatagattcaataatagcttaaagtaaataacttgaaataaaaaagtgttaaaccttcttgccatgatgaacatcaaaacaaaaagaatagaacacaaaaaggaagaagaagaaagaatgaagatagtaaagattatctcaattcattcaatgtaacagtagagtttatatacattggacactaccgtaacaaaatccaacaaactctactaacacacaagctgtgtaaagcccacttagttaatttggaaatcagcagttgtttatgattaattaagaaattatttatagctatttaaataatttattactgttatttatggaattcagtagttgcatattctgcatttccggtgtccggtattttggaactcggcgtt

SEQ ID NO: 302560 - DNA, 3303 bp, Cannabis indica
tggaggaatggtgcaaaccgagaaggacattgttactgaaattgataattacttttccaatttgttttcttcaaatggtgttgatcatgaagctttgcttgtcttatccaccatttatactgccatcactccagatatgaatacctttctgctctagccttttacaactattgaaattgaattttttctcaaatctatggcaccagaaaagtctccaggagttgacggtatgtctgccatattttttcagcatcattgggatattgttaggccactggttactcagagtattcttagaattctgaatgagggagatgacatgaagtctattaactcggctttgattacattaattccaaagattgatcaaccaaaacttgtgagtaattatagacccatcagtttgtgcatggtgatttacaagttgggttcaaaagccattgctgccagatttaaagaggcattacctcatgtgatttctcaaaattagagtgcttttctttctcatcgtcttatcactgataatgttcttctcgcttttgaactagttcattgcctaaaaaaaaaaagacaattggggtatgcgacactaaaattagatataagtaaagccttcgatagagtagaatgatacattttacaagcagtgataattaagatgggttttgacacaaattgggtggatttggttatgagatgtgttgcatccccaaaactctctttcaatcttaatggtgcggtcaaaggttcagttgtaccaaaaaagggtcttcgtcagggagatcctttatcaccgtacttatttctaatctgttctgaagagcttttagttttgttgaagaatgaggaatctttgggtcatttaaaagggttattaattgctagaggtgcccctgccgtatctcatcttctttttgctgatgatagtttgcttttttgccaagctactgaagattcttgccaagctgtgatcagggtccttgatttttatcatagagcctcagaaaaacttctcaacataaataaaaccgtcatgtctttctcactgaatgctactcaagtaatcaaatatcgctttaataatgtgctgggtatgcctatctgtgctttccatgaaaaatatcttggccttccctcatatgctggaaaagataaaaaggaactttttagcggcatcaaagaccatatttggaaactgatgaattaatggcatgccaaaacttttttcaattggtggtagagaggtgctattaaaagttgttgttcaatcaattccgacatatgccatgagttgcttcagccttcctaaaattttttgcaactaacttgaatctatgatggctaaaatctggtggggttttaacacaaacaactcaaagattcattggaagaaatggaaattcatgtgttcttcaaaagctgacggtggtttgggtcttcgctctttcattcactttaatcaggctctacttgctaagcaagcatggagaatattggataatccttcttctttgttggcaaaggttcttaaatcttgttactataagaccgatgatttcctttcggctcaaaaaggcatctgaccttccctcacttggtaaagtatctgtgatggtaaagaactattgttaaagggcctgagatggaaaattggtacatgacaaaatattcgatgcgcttcggatccatggttgctgggtgacactacctttaccccatactcttactgtggtgatccccttttcacggttgtacactatatcttaacagataggcaatgggatacaaggatattagagaatcattttggtactattgatattgatcgtatcctttccatccctcttaatcctattcctagagaggacatgcttatttggcaccattcagacataggcttatacatttttaaatttggctaccacttagcagagagtttagaatctatgaatgtacactcatcttcatcttctcactgtcaatggtggaaccgattttggtctctacggctgcccaaaaaagttaaaatctttgcttggcgattcataaatgatgctcttcctacctctgttaaatctagctcataggatgataactaattccacttcttgtgccctttgtatgtgtgcgtgggaaggaaacacaattttttggtgtgaccgtgctaaggctatgtggaggaaatctcaattctaagtatctatgccaaatattagtaatcttaaaggctatgatattttctcacacattactgcattacacaatgatgctaatttagacaagattacatgcctaatgtggtctatttgggctgaaaaaaataaagaaattcatggaaccaagcctaaactagcgaacaatatttgttccttctttgcttctcacttggatcaatatcgcaacgccactatgactacaacagttataaatggtttagacactcatagctacaactctcaagcccaataaccatcgtctactaggccttcgcctaaatggctgccaccggctgctggtttttttaaaatgaacctgggtgcaacatgtgatactgcaggtgctattatagggataggagcactaatctgtgaccgtgttggtattgttattgttggtttctccaagacaattcaaggatgctattccccaaaagagatggagactgctgctatgtttcatagtgtgaaatgggcaattgagtatcaactgccaatacattcaattgagacagattctctgttggttgccaatgcgatcaacaacttatcctctactagatttgtaactcattttcatgatttggtagatgatattatttatcttttatcctattttcttagagtaaaggtatctcatgttaaacgagatgttaataaagcagcccatgctttggctaaatttgctcttcgattagatgaagatatttcttggttgagggaaattccctccctaatctactcgtttgttattaatgactcccaattttaataataacaattttttctaaaaaaaaataacaaacatttttaatttgtattctatgtaattagacccatattatttatattaaaattgtgtaatgttaaattaatctttacttccttatttgctttgattgttccatgtaaaagaattagtagcttattaaaccgttcattgaaaaagatgtcaaagacactttaattaacatccattcaattagaggtctaggtttagatgattttgctgctggatttttcaaaggtctttggtctgatattggtgatgacttattgtaatacccagaattaagaaatggagtag

SEQ ID NO: 302561 - DNA, 3221 bp, Cannabis indica
agtattatctcattattttaaactagtcaactaaacacagcccctcaaaacacaaaacaacaaagaacaaaagcccctcattgtggtttctaatggcatcttcgccatggtcgttgaaaccccgaatttccaacagaaaaacagagactgacacttcatcttcttctacatcactacctcctcttcccccgaataatatacatctttctcaatattacgactccggatttcatacagccccgtcttcaccaccgccggagccaccaccacctcctcccaccactactactttttcagctgatttttcatcccaaaccggaactctcattcaattgtcttctcctccttcgccactgactaccaaaccttcttcccaacttaccaccgtactacatggtatttacatattactgttaaaagggtttttctttttgtttcttttgtaaggcaaatatatctcattttggttttggtaaattttagaaagagatgctctaccgagccacaatttgctcaaaatcaagtccttttcgacacttgcgaagtcgtccatcgagaaattaagtaatgattttgaagcagggggatacaaatggtatgttaattgatcttgtaaacagctctagttttgatctgcttgctagttgagttcattacacactgaactttattacattgtataggaacttttgtatatacccaaatggggacaagagcaaagatggggaagattatatatctgtttacttggaaattttggaaacaattactctccctgctggttgggaggttaatgctatctttaatttctttctatttgatcatattcgtgacaagtatgtcggtacccaaggtagctaattcatcaaatactttaagttggaatattttcactatcgtaacatgttgcaaggaaaatgattttctctgctctgtacctttctcctcctgaaattgtgattgtgatatatgcagatgcttcagttaggagattccattgtatgaagaaacaatggggtgtggtcaaattcattgatcttgaaacatttaatgatccatacaatggttaccttgttaatgacacatgtagttttggcattgaagttttcatagtaaaaactagatcgaaagctgagtgtttaacattaatagacaatcctgtgactcacaaggccagttggagtttctctgctgtgactaaaggaacacgtaaacttctagaaactcctttcgttgttggtggagactacaaatggtatggtctgtgattaattatttggtttgtaattgaatgacccatgtaatttttttttgcttttctatcaggaggcttctattctatccaagtggttaccaaatagaagggaataagatcaacaatatcacatcagtatttcttaatgtggatacttcgacactttctgctggcactaaattacttgtgcatttcacatttcgactggaagacaaaaagaatggtaaacattttgagcgaagtggtaagattacaactcttaattcaatacttcccagcagcatttcttgattacagcattagctgtagtgctctgttttttaagttgtgtgatcacagattctataatttttcggtttcggtacttgtcattttgcagataccaaactgtttggttctgctgctcggggatttcgagagttcatatcagagactaaattccgagacccagagaatggtttactggtgaatgatgaatgcctcattagagtagagtatgaagttcttggtgtagttacacaagaatagtcaactatattgctattcagctttgcatttttttttggttgctaatcaaaggataaggatgttgttctagttaacagtgaccattttaatgctatagcttaaatgtggacattgttgtagagtgagtttgaaactattttctcgttcccttaagggaagattaggctttctaaatgcaatgaggcaatgtgttaaatataagttgaatagagaaaaccttgtaacttggcaagactgattctattgcccctccccttttctttctcaccaatttttcgaaagcacttgtaaaatctttaaattatgttcttctattattatttttattttcagagccttattttagtattgaatctccacttcttcaaaattcactaatggttttcttataaattgctcttttcctgtttcaacaacttcttgggacaaaggaaatcttttgtacgtcaatgtttcattttcttttgtttgattatcgaatattggtattcttcacatgatgtactaaatcgcttgagccatcttacaaggccaatgtgggcatcgtcttacatgaatcgagaatatgttcttttgtgaagggtaaagtatctacttgtaggagaatgaaaacacaaactaaaatgtacaaggttggatccatgggtgcaaggtggctaatggggcgcttcgagtttctcacatgcttttcgcggatgatagctacctgtattatcaagcatcagaagttgaagctcatcgggttcgagaactgctgaccaaattcgaaagggcttcaggtcaagaggtgaatttatcaaagtcatccattttcttcagcactaatactactaccacggtcagaaatgttattagccagagactacaaatgagtattgcaactgaggatagtttctatctggggctcccaagcaccatgtcctgcaaaaaaatcgttgttcttggctacctcaaagataaagtcaggaaaatgttgcaacaatgggaaggcaagttcctctcaagggctgggaaggaagttttggtgaaaactgtggtccaagcactaccgagttatgcgatgagtgtttttctcctcccaaaagaaatcagtcggagtattgaaagtatgatggcgagttattggtggcagactaacaaggatagtggaaaggggattcattggttgtcatgggataaactttgcaaacataagaaagggggaggattgggatttcgaaatctgcgggactttaacttggctatgttgggaaaacaagggtggaggcttcttacaagaccagattctttggtaactcgagtttttaaagccagatattttccccagggggactttctatcagcctcgataggctcaaacccgagttttgtttggaggagtatatgggaatcccaagatttagtaagaaaaggagttcgttggtgtattggatcaggt

SEQ ID NO: 302562 - DNA, 1151 bp, Cannabis indica
acaattttcttttttatttttttaagaaaagggtaaagtgggaagttcatgtaatcaatggaattaatttgtacaaattagtgaagggtctaaattttgatattgggggttttattaggggcaaaaaatgaaatttccctttagaaaatacaggatccattttgtcatttaacaaaacacagggttcaatctgtaacttttgcaaaacacaaggtccaaaatagtatttacccaaaaaaaaataagagtaaatatgacaattcataatttaaaaagaatgggagtggcaatcctatcagtttggtgaaattaccacacctatttttcaatccgaaattgctacaggacccatatattttattctcattgcttaaaaaaattagaaaaataaacaagttaatcaaatccattttgttcccattccctaatcccataaagtagaatatcaactaatggaaaattagattcaacaaaggtttttagtatagctaagaattggactgaaatataatcctttaggatatttggaggaattcctaacactactatagttgtatatttaggttcggcttgttcgacatttttgacacgacatgaaaccgacacaaacccaagagactcgaatagatacgaaaaaatatggcttgagcttaacacaaaatgaaaacatataagttggactactggagcacacaacacaaaaaaatatgtgttctgttgtttttatttaggccccacttaatgcgtattatttcaaatttcgcatctagaatcctaacactcatcctaaaccttaaggccaacctaccatgtccctaaactctagcctaccctaaacactaacctaatatcttaactctaaacacttatacctaacaccctaagttccaaacctcaagcttaaagtgaacctcatcacaaaaattaaaactgtaagatatggttacaagttacctaccaaagttagttaacactaacttgaaatgtggttgttagctataagttagcttgggtcggggttagttatttctgttagaggcttggatctttgcttagctataaataccattctataacttgtattatgtaacataattcattgtaatccaattcggagagagagagagagagagagagaggagagagagaga

SEQ ID NO: 302563 - DNA, 3966 bp, Cannabis indica
tttatattttttattatttttgactgaccaaaagaatgttttttttaataaataaaaaaaaaatgggattttgttagtgactatgtttgattatttgcaggcatctgtatatgaagggtttaagcaagcggttccatggaagaccaagaaaaaatgaagatgacttttccgtgagttagtctgaatatgaagcttggaaccaaaatggtcctatattttaatcatgcgatgtgaagatgacaaatattagtactacattatacataacataaaaagctgtaatgcttgtcctcttccctgttcttatggtgtaccaacattgtgaagtttttatcagtgggtctatgccttgtaggcttggctatttatttgataatgtaaattattggactaagtccactatattttgtgtatttgctaattcaattgtctatgtctagatatagcaaaatgaatgagtgacttattttgtgagtttctcccaaatggtccaaatttatagcgctctaaacccattacttttttaccacgacttttagtttctgttctttttatttgttccttggcgttgattttggttttggccgatgtgcagagtttgatttattatttatgatttgaaaagcagaggagagaaggcgagggacatgggacacggcccctaacccgcgggaaaaaaaaggcgcaaaaggcctccctacctagtccctcccataggtcccatctcatacccaccccattttggtgtaatataaaataaaagaaacaataattactcttaataaattttatgattatgtttatgtattatatatggttaaaataaggatctttgatttagtcattatatgatatatttcatggaagtaatattgtatgttgctttctcattgaatattcgattgtgagggtaggtaagttagcctggagttttatattgttgcactgtggatgtggccctggccccttcgtttgagtataccaaaatgccgaagtggtacaaaaatcatacttgatttttaagttgattatgctatttcataattttgtgttataaagaattattattatgatatagcctctccctctttagtcttccaaggatggttcactaaataattttgaagacgggtcttttagtcaaaagaataccaatcttaatctcaaacttcattttacaatttaataaggtggttgagccttatatacacaagtaaatatggtgcagttgaatttggttggacacctcacagtcattattattacctccattctttattagaaggctttgttatatactgtatcgacctgtgttgtgtatgttgataaattcagtgatggcttcgagcccaaatcttaaatcccattcattattggtttattcaaattgattaacaaacaggtaggcaagaacagtatacctctagtttggagttcactaatcttcaaaactgaccaataacaatttataatgtagaaaactactattcaaaataaatttctcttctaactcaagaaaacctaaatgggtgaatttggatgacaaggctttatattatttagtattcaaaatttactttaaaaaatgaaaaataaaaaaagaaataggcctaacaaatgggaaataacagcaaaatataggggatcatatgatgcaatcacaattcattggagtgtggaatccgaaacacgaatcagttaagctcataaaaaaggataagcaataatacgagcgaagcgaacaccatgcgtgtgcttatacaaaacagaaggaaattcaaagtattactaaatctccatgaattcactggtagagttaggattatttcaatgataggaatcataatgggttgaaaaatggactattctttcctcaatacaccatttcggccatctgcatcaccctctatttctttccggtcatacctgcaataacctgcaaattcgccaaattataaatatcagtatcacaaaaagggtagaccaggaaagaaagaaagttaactaacaaattcaaattaaagagaccaggacacaaactcagttaagtaccatgatcgcatcaaggaatttcatttcaaatttatgcaagaatgacatttaaatttaacacaacaagatattggtcaaacatggcaattatcgtcaaatgatgcagtaagaaaaggaagtaacacagcataattagatgaaaagtaatggtaaataaagacaataaagttcactgtatactaacattatttaaaccaggtggggggactggatcagcagctttataagaatccaggattggtctcaccactgctggaaggaagagacctgaaatttcaacaacaagataatcagttctttaactgtattctaatctacaatatagtacatatcttaaaaaacccaataaacaatatcatcagaggaaacacttaaaatggaaatctggtgcagagcagaaacaataaacatgtatatagacctgtcatccgaactgtcttctttaaatgatacaagctaagtgagatcaatgcttcatcagacaatagagtaacatttgcactaacaagagaagcaattctaaagatcattgatgaaaaattaacctacttaagttactataatctgtaatcccaagcgatcgtccagaactagtaccgctacatgaatagagtcatttacaacaaagcattaaaaaccgaggcctaatcatcactacttacaaaattttggctgaattaacactatacccctgatatgttaaaagtaaaatatcgaggatacattgaaaaaacaaccatgaatataaaatgttcatctgtcgagataatatattatccaatgtttcttaaattaggtattaagatccaacgattctaatattttcatgcttccttgagattagcgtgagatctcatacactaaaaaagtctaatctcttcaacctcaacaaactcaatcctcacaactgacaatccgttcttacctttcctttctcatcatgtcaggttatcgataaatttatttctgtgatgaaccagattaaataatgcatccgtgtcaagatattttaattaagcacttataagtttcaggaacaaagaacaacataaatattaaaatgatcaatggattcccaaaatgtaacgaattttgatcgccattatctacaccataaggcaaattattaatctcaagtttgaagcaaaccacatgcgtcaatggaaaaaataataaattcccagttgagttcgatcccaaggggactgaagtaatgtttactcagcaatcaaaccattcacgataaagtctacttgcaagcaatcaggtcagactcaaaacactaagattatcatcagttcaagcaaaaacgatttatgaatacaaaaggggttattccaattattgaatcaaacttgagaaaacctcaaaatttgcctttctcgtaataaactattgcacaaaaatctacagaaacaaaaatacattatttcatacacaaaataaatattaggtttccaaaattttagttctctattaccaagaaattaaaacaaatagaaacgcaatggagacaaaaaagaagaagtatttcagaagcgagtaccaaaaccagcaataaggcaagaagcagcgaccacaggctcttgaactacgaacatcttcaacctctccatcaccgccattttcccttcgatgctctgaacgactttttcgtgaatcttcttcggttactggtcgattctgagcaaggttgtgattggaatatgatcttcggacttggacttgtaatgtctcacacatgtacggcccaatatttggcagtttttggcccaataaagatataatgggccgaactacacctcagtatctactagggatattttcaaaaatatgggaaaaatgagtcctcttatgataaatatggcaacaaaactaaatgcaacaaaatatggcattaactaaggaagcaaa

SEQ ID NO: 302564 - DNA, 3731 bp, Cannabis indica
tatttggcagtgtttgttttgctcgagatgtttgtccacatgttaccaaattaaatcataactgtttaaagtgtgtatttcttagtaaaattgtcttcaaaaagagaataggtgttattatcctgatctcaacaaatatattgtttctattaatgttacttttagggaaaatacaccttatttttcatcttcacctactcctactcgccaagggaggatgacgatttgttgttatattctgtcacatcctctgcgtctgatacatgctctgacgagtttcttgttcctcttcacctgactcagtcatagctctagcaatgcctacacctccaccacctcctatcatagtgtactctaggcgtccacctcctccacctcctgtttcacgtcctacatatgcattttcgtcatcaaatctgaaactcaacgatgatcttctcattgcactacgtaaaggtaaacgcaaatgtacctatctgataagaatttcctgtcaaaattagtccaaaacatgaaatgaagaagagcagagaagagttgaggaaaaatggcagatctgccttctattgatacccaagaatttgagagcctggttccctcccaatacaattgtaattcactctaaactcttcacacccacaaaatcaaacccacacaccttttattcaattaaaccgagtatacccacaaagacccacacacaattacaactctcctaaccaacttgccaactcaacaattaattacctgtgggattatctacaactcttccgctactccttcggctgtagacaaaagtcatggtctattaatacccccctatgagtctcaccttgtcctcaaggtgaaagttggggattggtttcgaatgacatcgacgtcttcccaggtggcttcaaaaggaggaaggtgcttccacttgatgagtgcttaaggctggactttctgagtaccgggacaatggccaacactgcttcaagctcgagcaaccattcaagatctgttgtaaggctgggagggagcggagtgggatgttggtgcagtccgagggcaacgcgtaacagggatacatggaacactgggtggatggtggcatccggagacagctgcaagcgataggccgcctgtccaacccgagccaacacgggaaactgaccaaagaaacgtggtacaagtttctcattgacgcgcttagctaccgtgcgctgtcaatatggtcgaagtttgacataaaccatgtcaccaacatcaaagtgtacctcccttcgcttcttatccgcttgtcacttcattttttgctgaacatgatgcacatttgctttgagaggcaccagggtagcatcgcgatcgtgcaactgatgcttaacctctaaatctttttgtactggctggttcaaaacagagcaggggaggggggtctcggttataaagagcacggaaagagtcattccagccgagatatggtacgaggtgttgtaccaatactctgcccatgccagccacttcacccatttggtgggcttctcacctacaaaacagcataagtaagtttccaagcatctattaaccacctcgatttggccatccgatgtcggatggtatgcagtactacgcttcaagatggtgccatgcaagccaaacaattctttccaaaatagactaaggaaaatcttgtctcgatcggagactatggagcgtgggaagccatgtaattttaccacgtccctcacaaaaacttcaaccaccgtcatcgctgtgtaaggatggcgaagaggaataaaatgcccatacttggtcaagcgatctaccaccaccagaatagagtcaacaactattaatggaccatttgctcttttacccaatttattctggcccactttaattaataaacctttttcatatatctgccccaagtattctaaattaataaaattattgggtattaaagttgatcccacatgtgacccctccaaatctctccacaattgattgaagatatgttgaagtgtaactgaccccctagtttctcgtatctttctattaaaactcgtaatcgccgccacaacattactccttgcatgacgatcagtctcgagtaccgcactcttgtcgatgctaattaaatgcttccctggacgatcaacggtcaccaccgtatccaccagcgactctgcaagctctgacaccgtttccgttacttgattgtggagaattgtttcagcttctctgttcttcctactttctttactgaatcggctttcaatcattggtcgtacgaagttgtttattccatcctcactgccacctctgactgcctcaaagatctcttctcctttgtctctaccgcctccgactacttctactgtcacatctccttctatactttctttctcttctatcacagagttttttccatccccaagcatcttgttatggtcaaaatcttggtaccaacaagaaccaaaataccgtgaaatctatagcttaaatcattaagcttgaaaagcttcaaatcaaacctaccaccttcgttttctaagaccaatgattccgatacaaaactgtactcgtcgcccatcagttgaagtcttaagtgcgaaagcatgctagcttcagctgtctccttatccacgtccaagagtccgccacaacagtcacctattttcctgaaaatattcatacgtcaaagattcagaggcagttcttgtactccaatccatgaatctctacattcaactttaatgtttttcttttgcaactcccaactccattgagagaatgaaaaacagtgtgtgcccctagaacactcattttttgaattttgttaaactcaactctttccctctcatctttgcaccaaacaatacacctgtcaccaaacaattgactgaccaccaatttcctccctagctccctagagatattatagaaaatgacactccatgaggcatgactattatctcgggtaagaataatggccaacttccaattcctggtttgtgctctcaatctcatatattcataatacattggctgatgaaatctcttctctggatgattttttggtttaaaactggtgtttatggctagatataggtccttccactcaacatctcattttctccggcaaggagcctttacaaagcattctgcagctgatgaggttgtgtggccaatggtttcctcagttccttaactatgttagcccacgattgcaggttcaaggttcccccactcttcatctctactttctgctgaatagtgttctttttgacagttacttgctctcttttaatagtgttgttgagacatcgtaaaaattcaaaccaccccttcgccttttcttcttcatgaataataaacattttcatcttgttgttcctcaatatagaaagtttctccttttgtattttagaaatattccaaaaaacaactgctagagctatttcgaaaagttcttttgaagctgtctctttgccttccttccttctgctgtacttccttcatagtctcgatgatccaatccatagcatcaatagtaataacaatttcatacccaaagtgtctagttctttcacaaatacgaacaaaaccaccatcataagtcaaagtaaccatgaacgccttgtgtttggtgtggaagctctaatactttcggagtttttggacaagaaatgaattagaaatatttttccagtcattaccagtggggtagtgaccttttttcttcc

SEQ ID NO: 302565 - DNA, 2655 bp, Cannabis indica
tgtaaaataactataccaaacacttaattattcaaggttataattgtaatttcattatcaaatttttaacagaatggacattgtgttaatttttttaaaaaatggacatttattaacttaattgttagatttaaggccattttgcatcttggccttttaatacatttaaaagtaactgatactacatgtttctgtttagactcaatgatttagaatctgggccttatatatgtgccctgtttaagacaataacagagtatgtaatgatcaaattaaagaaaaaatataattttaaaaatattaagtatttatgccgctaaaaataaatattaaatttatactatttataaatttgaaactttaagtaattattatgctatttgaatgaaacaaaattaataatactgacttttagtgaccttatatagctatcttatcattacatgatagtatatataatgtcatcatatttatttgaacttagtgcgaaacttgaaaactagtaataattgaattaatcagaagttggtaagggctcctccttagtaacgtagtctatgttggtggtgttgatccccttgtagatcccatcatgcagtctcttaatctcgggattgcgtttattgtggtaataatcgcgacgagtataagagaagggaacttcacatattccgtgcgtggctacaagggtcactgtttttctagtccttggagccactttaacagcgttcatagtttcagttacagtttcagttaagtcggtggttccccattgaactgtccccgtaagctcagccgaaaactcgatctgcccacctaagtatgcaggtatcacgtcaagtttaagggttgctttggcacctaacttgagggaaacacttcccccaagagttttagattttgatttcttgtgagaaaacttaagggtcacagtgtcttctgttgtgtaactagtgttgcgagatgtcacactgtctttctcaatgacattatacacctttcctacctctgtgtggtattctacgtcgtatatgttcctttcaatcaaggtctcaaccacctccaacttcacctgatttggcatgccagtctctgcggcattaaggcaatctgttacgccatctagagtgattcccttgagaaaacgatcattcaccacactgcgcagtgccaccacattatcaccgagtttgacaggccagaatatagtgttttggaagtcagaactcttatcatcctcagtcttgtcagagtcagcccagatccaattagggctacgcctccagaattttccagtggagagattttttatacggacaaaaccatcaccaacagtgtagatcacattggctacagttgtgtctccctcatcggtgccatcaaggaactgcaggtacgggtggtttttgaaggatctgcagctgagaaacttgttttgggtaccgtgctgcttgaatgcgacttgttcaggaaatataacgatggactcaaaatccatgattttgaaaacatcgtcatagtacttattagtggagggggaggtgtaggcgacgtataggctttcctcgagtggctcaggcatcctatggtaactaacgtacctgttagtcgcgacgtgtagaagacggtataaatctggttgaccctccaattcagcatcggtagctctgataggtttgaagagtgtagatgtattcacagatttttcatcatctatgggaatgtcagccttggcatgaataaaccagccagttgtcgaccccatgacgagatacttgttggtgtggcaacaccgcaagtgcacaaattccttatttcgagctgtcaccacttgaaattttatcaaaggactgctaatgtgctctcctccaaatttcacatgcattttaaatagttttcgtttctcatcctcaaattcctccttagttaaacatctcaagtattttccattgtccatggatttgataatcacaatattgggcaatgccactacctccattctcaatagaatataaataattatactactatatatacttaaggaattatatataatggatgtgtttggaatgaatatatgaatactacaaacacagaaataagtacgtatatatagagcaacacattcctacaatacatacatattaatcaattctataaatcatatcatgtgtagtacgtgaagcccattataagtatgaacattaataaattaacacgtttttgcttataataaatattatattatagataagacttctcattttttgtagtattattatgtcgtgtggtatacgagttttgggcttcaacaataaacaactctcccacctcacaactcacaactcatgaagatcatatataaaagcatttgattgatttgatgttgatcttataatatcagatcgatcgagacatcaaataaataaatgtgcagtagtgcgaggataatgaatcattaataattcttactttgtcagtttcatcaaaagaaaccagttttatttcctggaaaaaattacattctatatctattttaatttatttgttttaattttatctcctaatttttatattttgggtacatagcggtaaaacccctaaaaatttcattttggtttcacttaacccccaaaactcaaatttgggcggtaa

SEQ ID NO: 302566 - DNA, 1099 bp, Cannabis indica
ttttttcgaacaattttccaagtaaaaaaaatgatcacgtgggcagaaagatagaaacatcatgcatgccatgtgaaaatgcctttattggaggaagagatctactaagttccacgtgagcaccaaaactataactggccaatggcatacactacacgtggacacataagttgacttttatcttaacgacttttaaatagagacttgttaaaaaagtatttccatgagatacaactggtgtacaataccttttataggtgacatcagggcggtcttaaaatttaatgggccataataataaaaaaatatttttgaacccgtatttagaaaaaaatatggtatttttcaaaattgataaaaaatgtgtaattttaaaaggggataaatttttttgggcccctgagttaggtgagtcctaggcacaggcctaacccgcttatgctcagggtcggccgtaggtgacacccaacgattatttaacgatacttttaaaagttatttttttaagttatatataagacccgctatttaattacagtaaagaaagtgttagacactactagtattttttagcaattttcttgtcaaaaggtaatattgtgcttataacatttttctcggtgttttatcgatatattaatgtagttaagtattgaatcttatattattatataataactaattgtaaaatgttacctattatagtgccggataacaaagctgtttaagtatgaataaattgtacgttaaaatgaatttgacttcacaaaactcaaacattttttttaattaacaatatactaaactcgacgtgcatggttatataaaaaacgaagaacatatttatattataaagttattggaggtgaaatttcttatgttgtaaaatttttgtaaatttaacttttttattttatttttttattgaaaaacttttttaggtttagttttttttttataaatttaaggcgtcagttaaatatcaccgaattttgaaggtaatatactataattaatttaattagtaaaattttaacgataatatatatccaactagtatgcacttcaaaatttaaaaaaaaaaaataaaattaactta

SEQ ID NO: 302567 - DNA, 1730 bp, Cannabis indica
attaggattatattataattaataaaaaatagttatttttaaattaattaatattacattttaatcaaattaattcttatgtgaaagtactttttataaaaattatttttagttattattttaactttaattttaataattatatctatgagacattcaaaccaaattcaccaatcagtattaaaatttgtattttaaaatctccaattataataagagttgggatttggtgatgggttgtgactagagaattacagtttgaatgttgcaattcgaaacatgacaaagaaagattcactatcttagctaagggtctatagaatcacataaatacaaagaaataagttccagttctaaattttctaatgctattataaatatcccattcatgtgtactagaaacatggctgttaatttcatctgctgttttttttcttctggtacgttaacattcccttaataaattgcctttatgattttgaaatggaaaaaaatacactccataaaaaacatataataatacaaatattatacttggtgaagtatatagtgacagaacgaaaacgacaccacaagctttctgattctgactcggctgctgttggcaaactagctaggctgaagaacaaaatgttgttagtgtcgtttatttatttaaaagggaccaatgagaggtctaatgtaagcaagaatgggccccaacacttacgtgataaagactagttttgatttgattgcatgtagtttttgaacagctggatttttagagtgtagactactcattattattatactaatacgtgcgtagaagtaggctaccctagtagtatggttggtatatatgtatgtatgtttacatgtaatttgacagtgaaaaagagtgtatttgtacctgactgatgttatgtatgttgataattgcgtgacccaaacgccacccttcggctaatgacctgaccgcatatatctgccataatgccatatagtccactccccatttcattttttatttcggtgaaatttcaccctatgctgtactatatgtcttcgtcaaattttaattaagtttctacatgtagagaaatcagaaattattgtataattcactctaatcagctgactccctaactttgtcaaaataaaataaaaatagagtaattttattgcatttattcaaaaagaaagttattatttagttgacaatgaccaaagtgcttgtcactgtaataagaaataaggtggaaatcagggtttgtaagaattttctgaaatactagtctatgatgattgttgaattttattttcttgattaggtccaattcaataaattaatataaataggcattatattcaaattttatatttctaaaattacataagtctaattataaatttctagaagatatatttttgagaagtgctaataattataatttcttattacaactttttagtaaactttcacgtctgaaatcacatgttagaattttattttttttatagtgatactcgttatagttatagtatcattcttgtaaatttttgaaaaattctgaatggtttacaatgtcgaaaacgttgttcctgatattcaagtttactacgcacgttcaaaaaacttcaaacagatttttggcactgtaaactatttgaaaaatttcaaaaatttacagagattatgttgtaagcataacgaacaaaacaaaaaaaaaattcaaaaaaaaaactaa

SEQ ID NO: 302568 - DNA, 4189 bp, Cannabis indica
agggcataaaacccaacatgggatgggtctaagtttcgagtctagggccaggtctaggacgaatgtgaggctggaggtagggtttagggtccagtgccgggggtggggtgcaagtggggtcctatggtcgggggtcttgttcatatgaggctctcaaagtattggagtatttttcaaaaaataaaataattaaaaataaaaataaaagttattttttcaaaattattagccaaattttttgttctcatttttaaaaatacttttatgaaaacagaaaacaaaaaataatgccaaacttactcttagctatttgacttattatgtcaaaattgccacatcaatatatagctaataaaatatccagctaatcaatatttgatccaaagataaaataatgatatataataataataataataatttgaaaggaaatacgttaataaaagaatattatgacttattttaagttgataaacgtccataactaattttttttatgcaaatgtaggacctctaatgacttgggattcataaaagaatggataataaattagctaaacttagtctgaaaacaagcaaacattattgatatttgattatgaacggacaatttattttttttttttgtataagtaaaggcttttattcgtaacaaagaaaaactcaaagtgtaatagccacaaagggggctatctcccttaaccaacatctcgagtttacactagacactctggaatagcgagcaagagaatccgctacagaattgtcatcccgaggaataaacgaaacaacacaaacatcaaataacttgactaagttacaacattcaacaaaagctgggtacgaaccccaggcaaacggcaatgcttttgtctctagagctttgactgctattagagaatccgattccacctgcacagtgtttgctttctgttcgactgcccacttcagagcctccacaattgctaggaattctgcttccagcacactgtcaactgcaatatgctgcaggatcacgaatccctcttcctgcacattctggatttgaacagtacaaaaccctgctctaccttcctgcactgaggcgtcaacacgcagctgcacatcccaacaaacttgagaatttgtggtggaaatgttgctcacagcagagtaagaatgctgtagtaacaccgagttgaactccttgaccctttgatttagcattctgattgactggtccagattcgaattgcatcccttgaaaataaggttgttcctgcattgccagatatgttctataacacaagcaccaaataaaattagagcttcattcttagactccagcatccacatgaaccattcttcaaaattcagcgtactcagattgccattgaggacccccgacggactgacaaaccataagcaacgggcaaagtggcaatccctgaagagatgcacatcgtcctcagtttgtatcccacaaaaatcacaagccttatcactctcccggacataacccagcctattctttagtgggaggcagccacttaaaattctccaaagaagcattttctgcctagcatgaattttaagcttccaaaggtccttccaaactttcttttcagtttgaaatctgtgattttgagcacactagtacgcgcttttcaccgagaaccttccgttggtacttccttgccaaaacattgtgtccctgcttccaaccaggggtcgaattttcagaatggcttctgctacttccgaggaaaagcactaccttattagttgcacattccaactctgcgtgccagggttgaataggtctgcaactgaggtgaaagcgtgtgtaacattgaaagaaaatgcctgtcgaacctcctccgggctataccttggcacccacggctttgtccaaatgtcaatcttgccatctcccactaaaaacccagtattctttacacacaagtcccgattcatcggaattcctcgccaaactttcgagtcatcttgtttggcttctacactccagaaatcttgaaccttacaatactttgttgtcaaaatattcacccaaggcttactgctattctccccttccagtaagtaccaggccagttttgccaagagtgccatgtttacatctttgaacttccgaaagcctagtcccccatttcgtttgggttgacagcagtccgcccaactcttccatgcatgataacgttccccctgctgagaagatcccttccaccagaatctagccaatatgctatccaactcagagcaaatagaaaccggtactttcatggtagacatagtgtagcaagggatactttgtaaaaccgaactgataagagtatgtctccctgctattgataattactttgctttccaaccttctaaacatgccaggaccttttctttcaagaaattaaagtcctcccttttctttgccgagtaaaaaaaagggttccccaagtatttttctttcctatcaagctgctaaatgtttagaattccatgcaccagttctttctcatcctccttgactttgggagaaaacacaatcccacttttccgtctgtttatctgttgtccagaccatttctcgtatgtttcaaagcaggttttcaaatgttcagactcctcagtgtttgcacgacaaaaaaatatggcatcatcagcgtaaaacaaatgagaaattggttgagagtctttaccaattttgattctcgaaatttgtcttctggcttcagatcgaatcatcagtttcgaaagcacttcactgcacagaatgaagaggtaaggcgaaaggggatccccctgccttaaacctctccccgggctaaacggtttcaggggcgctccgttcagaagaattaagaaagaaaccgtcgacacacactggaagatcattttgcaaaatttgtcattgaatccgttagccttgagcactctcataagaattcccattcaagtctatcataggccttatgcatatccgtctttatcgccatgaatcccctgcggcctttgatcttgttaagcgcatggagtgcttcggaagcaagcacagaacattcagcaatccacctcccaggaagaaaagccgattggaaaggacttaccaatttatccaacatcggctttaatctgtccgtgagaatgcgagctataatcttatacccaaaattacacaggctgatcggccaaaattgatcgaaggaagaaggattttcactctttgggatgaggcacaagaaagtatgatttagtttttccaccattttaccagtctgaaaaaactcctgcaccattccacagatctcctctccaactgtcccccaatacttccgataaaagactcccgaaaacccatccggccccggggccttcaaaggattaagcttccaaacaaccgccttgatttcatctttagaaggtatacggcataattcagtattgtcctcttcagttacctgacttacaaacaaactctcgaactcctcttcctcaattcggggttgttggcttgtgaaaagaacagtgaatttctggatgaaaaagtttcccattccttccctgtccagcagccattgactatcatcatttaaaagggcacagatattattccttcgtcttcggatcatggttgaggtgtgaaaaaacttggagttgcaatgaccaatcgctgcccaaagttcgcgagatttttgcttccaaatcctttcaagtttatgttctagatcaataatctccaattgaacctctgcctcttctgcagttgcctcctcactttccagggattgaagaattcccaatcgagcatatagtcttctgagttgttgatcacagaacccaaagacattcttattccacttcttgagagaaaattttgtgtcccgaagctttctgcaaactctgatacctgcttgtcccgagaaaggtttaatccatgaatccttgataacctcttcacatcgagggtccgttgtccacacctccaagaaccggaaaggataatgaagcttgcaagagaccggttgagtgtccactacaattggggcatgatccgacgccaaaatcgggtgatgtaacacatttgcttcaggaaattgcacacaccaatcagcactggctaccgccctatcaagccattttcgaacagagtttgacgcccctttttttcgcatccaagtatactttggtccta

SEQ ID NO: 302569 - DNA, 806 bp, Cannabis indica
catccaagtatactttggtcctacatatcccagatcgactccgcccgtgtctagcaggaagttttgaagatgccttccctccctgttatggtaatctttacccccctttttctccgcttcacttgcaatagcatttaagtcaccacacagcatccatttagtgttacattgtcgtactacatctgtcaaccaatgccaaaaggctatcttttctcgcccataaggggtcccataagttaagaacaaagtccaagatggtctgtgtccttcctcaatcacacattcaaagccaaaattaaacttatttcgaactttgatcttgaaatttcttctccacgcaacacagaatcctcccccaattccaatagaaggaatacaacaacactcttgatatcccagacgccttgtgatctcaatcatagcctcttcatccacctttgtttccattaagaaaattacatcgatcccctcacccccagagagcttttttaaggctctctccgccgccgaccgtcggaggccgcggcaattctaggctaggcacctcatggcgaaggtgggggcatgacattggctgcctcctcgccatctccaaaattttgcacataattgatcgggacctcaacacattgcgccagaatttggtcaagattaacagcattactagaattaccttcatctttttccttggccaacttctgggttcttctggtcttcactccagaactcctccttataatggaattgcagttttaccttttctgcatcttattaccgttacaccctacaatgtattattccttaaa

SEQ ID NO: 302570 - DNA, 5222 bp, Cannabis indica
tttttttttttcttaaatactttttttatcattaaaatatgtagtcgacctatttattattggcagtaattattatagtatatgtaagttttaatgtgatcacgaataagggatgatatcttcttgattatttaagtagataatggattaattccacattattattgttgtcatattttatatttattatttatgtttttcttttttgcaatttttatttatgttaataaccgttattttttttttaaatgggttaataaccgtatttggcaatttgtttttctttaaataaaaataataaaaaaaaatccataaaatttatatccattaatcaattaccaaaatcaattaaggattctgttcccattttcgtttgagataattccgtccttatcatcttatgaatattaattcgtttttttatttttttttttattggagagaatgattattcactttcttaaagctcttcatttcaaatctataaatacctccccacccagccatgaataacacaaaaagttcgtgagaattaaaaaaaaaaaacttagtctagatacactgaaaactagtgaatagaaatacactagcattagtgaagaagagtcagtcaggtaatggtcttatcacttaataaacttctctattatatatggttttggttgattactcttttcttcattcaaaatttcctccttttctgaaaaataatgtagccatttttcttacaaaaatgactaatgttttttttatttgtataaaggctgccgtccctagctagtcctggggcctccaaaacaaattaaatataaagaatcaaagcttaaattttgtgtgtagtttgattttattagattttaaaaagtaagcgtaccatagatatttttcattcccgctccgtgttaaaactaccagtcgtatcgtatatttttatatatttgtgtctttttttcttgtggaattttatttctctggacaaaacttttctgtctttttttttctgtttgtgaatctatgtatgtgacgcaaatataatttgtattatccattcaaaaataaaaaaaaattaacaatcatttattttacctgttactttttcaacttttcaacagtttatgtttttaagatttaaggaaatgataaggatttgttgaccaagtcaaagtttccatggctgaaattttgttttgttaaatctgaggttacaggggtattgaggtgagagttgcatgagatggaaggaggttatcacgcggacaggacagaattctcagattgttggaagatcacatggaggactccttatattatgcgtcttgctctctctgctggtattggaggtctccttttcggttatgacacaggtaatcacatctcctttctcttctcttcttctactatactatccatgaactaccttccttgatagatttcttgtcaattttatctttagtttatcatttaatgtgtatttttagtcttaaatgtagacgttttgtgtgtttaaaaaattattaatttttccttttgaaactaatgtatagaattgaaacagagaaattttttgaccacttaacatatatacgtttaaaatatgtattgtatgattgtgcaggagtgatttctggtgcactcctttacattagggaggactttgatgaagtagataagaaaacatggctgcaggagacaatagtgagtatggctgttgctggtgctattgttggtgctgcaattggtggttggattagtgattcctttggtcgaaaaaatcaattataggtgcagatatagtcttctttgctggtgcaattgtaatggcagctgctccagctccttgggttattataattggtagaatattagttggtcttggtgttgggatggcttccatgacatcaccactatacatatctgaatcttcacctgctaaaatcagaggtgcactcgttagcacaaatgctttgctcattactggtggacaatttttgtcctacatcatcaatcttttgtttactaaggtatgtttattcatatgtctatcttaatttttcaatctttctctaaaccaaagtataaaaaaatgtttttggtttaggctcctggaacttggcgttggatgcttggtgtggctggacttccagcccttatccagtttttccttatgatgtctcttccagagtctcctagatggctctacagaaaggttagagtctcaactagctcatctttaaaaatgatatacgaatgatttaatcctaacttgttcatattttcattatgatcagaacaaggtagatgaggctaggtccatcttagagaaaatctaccctgctgatcaagtagaaggagagatgaaagcattgcaggattcggtggaagcggagaaagctgaagatggagaacttggtgatggatttataccaaggttgaggggtgctcttcaaaacaaaatagtccgcaggggtcttcttgccggcgtcactgttcaaatcactcaacaatttgttggcataaacactgtcttgtactacagccccactattgttcagtttgctggatttgcttctaaacagactgctctagcactttctctagtgacttctggccttaactttgtcggttccatgataagtatgggatttgtagacaagtacggaaggagaagattcatgcttgtctccctagttggaatcattatatgcctttgtgccttgggaggagtgtttttcaaggctgctgcaactgctcctgctgttagcaactttgaatccactcactttggtggaaacacaacatgtccagcttacatctctgccccaaatgctcaatcatggagttgtatgacatgtttgaagtcaccagactgtgccttctgttccatcagtacaaataaggtacatatttaatgtctttttttttttttcttgtttgagagaaccatcttaacttaattttattactttgtcattttaacagcttcttcctggagcttgtttggctgccactcctgaaatcagagactcttgtagagcagagaaacgtacttggtactcagaaggttgtcccagcagatttggattcttggcagtattattccttggactttatatcatatgctattcacctggaatggggagtgttccatggattgtcaactcagaaatataccctttgaaatacagagggactggtggaggaattgctgcagtgactaattggtcagctaatcttttggttagtgagactttcttgaccctcaccaatgcattgggctctgcttggacttttctattatttgctgggttctcagccattggctttgtagtcatcttttttgttgtgccggaaaccaaaggactaccatttgaggaggttgagaagttacttgagaagggattcaaacctgaactaccatgctgttcgaggaaggaagatggcaagaagaatcaagcttcttctaattaagttttaaaaaaactacatttaattaaacggttcccatgaaacaacggttttcatagtttgtttcctgaggactattcgtacttttttaatattattatgcgtagttgtgtgatttcaccacttatttgttcagcacagaaaacgcttattcgtatgaaatttataagtggttttaagttttactatagttgttttttctttcaacggattattagcagtcatacttttaaattatctatgttgactagtaggaaaaaaaaaagcaaagtaaggaatgtggtgtttttcaggccaatttagcagccttgaattatggccacctccacaccataaaggcctcctaacttacaacaacatacatacaacaacatgaacatctccagcttacttattttataatacgtacttattcagctgaaatgagaacttttgtaagacctttcattggttcgagtaatgcataatggacagtggcaatgaacatttatgggtttattgagattttctcaatttcgagtgatgttcgtatggtctaatttttgtgatctttatatttatatacaaaaagaaattgtcagctcaaagctataccatttgaaattgaggaatttggtggagggctacttggatatcaaatctcttggtgtgggcttctatagaccaaatgactattattcattcgatgaggccgacaagttaatcaaccaaagcttcttcttcaatctaaggctacataatacattacataatacaatgtaatcatgtccccacaatttagccaaggtttttataatgcgtagcttttgtgttcatatagtttaatctctttgcttgcacaatataatagcgtaggagtttttaacattttcagtctgttactagacgttttacagtggttttatttttgtagatagtatccataaagcccttccagttaatactgactatggtctatggtacacaaaacaggctaaacaacacgtgatgataacaaattgtaaagaagtggtcgagtaaataaagactaataaattgaaaatttgagcacctttttggttggactccactgtcaaaatgccaaaaatgactgctgaggttttaatgtaataaataatgtgaagtagttgagttgagtactaaccaataatctttgaaggtcaggggagctaactagcctaaaaattaaattacataataattgctatttaatcttatgaaattgcagggctattaaagcagtggcaattgattaaaaaacatgaaaatgaacaatattgttctcccccaaagaattaaacaacgttacatcatagtacttgtacttgctagctaatttaaaaggtcaaaccaaattaaattccatgtacctacctcaccaagtctaaattgtgtttcattgcattataacttgattaaatatatattattcatcttgtctcctgattttcaattatatagagaaataactttgttttttattaatattttataaaactatgtttggccaaagaggtaataggttgaatgaagaggtgtgacagaaaaatagtagttgaagatgaaaagaaaaatagaaatgagaagtgtacagctaaaaacaaatatagtaagagaaatattctagtgcgtgctactgcttttattaggtaacacagttagttagaaggtaattaggttgttagaggttgttttgtatctacatcttatataaatacttctgtaatcattttctttattgtataagattgaataat

SEQ ID NO: 302571 - DNA, 4457 bp, Cannabis indica
gaaaaaacaccctgaccatgacctgagccccgacaatggaccccaaccccagccctagacctggactctgatcccaaactcggaccccaaccccaaacccaaactcggaccctgacctcagatcgggacattggccccatactcgaactccaaaccccaaacctcgaaccccaaacctcggacctcgaccttggactcggacccgagccctagccccagaccccgaactcgacactaaccctagccccaaccccgaccccagaccccagccccgaccccggaccctggtcctgaaccccagacttcagacccaacttaaagaaaaaataaaaaataaataaaataaaatttatagaatacaattttaatttttgtttttataattaaataacaaaagtagttggagaacacattttttacttttgaaaaacaaaatttaaaaaactaaaattctactttcaatttttgtaataaaataaaaaaaaaaacaaaacaaaagtattactaaatctcacctttattttaataattttgattgtatatacgtaacatcacttttgtctttattgtagggcctttttgtttttagcatctaaaaaagttatatgttaatgtttttatatgaaggtatgcaatacagttattgtaggaattcagtagttttcgaagaattctgaataatttatgatatcattaaaaataaagtttaagatatcatttgcacgcggataagataaaataggtacacgttcaaatggtttttttgaatcttattttcgataccttaaattatttaaaatttctcaaaaagtagatgtctacaatatctatactatatactctttcatataaatatatatatatatatattatatatatatagaatattggcggcaaaattatttaaattctatgattagtaacacttaaccacataaactgattttttcgtgttaaaccctctaaacttcacttttgttagctagttagcccttctgttcaaaaagctttgttaagagccactgtggacatgccacagtgtacacaagtgtacacgtgataaatttttagtggaggatattggcggcaaaactacctgaactctatcattagtaacacttaactacataagccgatcttttggtagtaaaattctcctaacctaacttttgttagctatttacctattccatccaaaacactcttttaagtgtcatggtagacatgccacggtgtacacacgtgccacataactttaattgattaaatatttaaaaaataatttaaaaattaaaaaaatagttaaaaataattttttttcttcttttctttttctttttcctcttttaattattttaactttttctccatgtaaccctaatttccagccgcactcactctctctttcgttctccttctcgcacaactccgacaagtcacctccagccaccttcaaccaaaacgaacccgaaaaccaacttcacgaccttacaaacccaacccttcaacatccttataagccccgagacccgatccttgtttgaaatttctttttctcgcctcgaccagctttgatctccctctcccacaactcttcgttgataccaccacagttggaagggttcgttggttcgtccgtgggtttgtcgtggtatggtgggttcatcacacaagaagaagaagtaacatgggaaggggagatttgatgattcaagtcgcaaagtacttaatagagccttttgaacggaagaggtaaatagctagcagaagtgaggttttgagaattttaccacgaaaatgtggttaaccgtcactaattaatcatagagttcaggtaattttgccgccaatattccatactaaaaatttgccacgtgtaaccttatgtatactgtgacatgtctattgtagcacttaacagagtcttttgatcgaaaggggtgaatagctaacatgaatgaggttaaagagttttactacaagaaaatttatttatgtggtaaaatgttactaattatatatttagattgctttgtcagtaataaccctatatatataaaatactttataatttctctatatcacgaaaataagacatgctcctacggtttgtcaaaaaaaaatgctcctacggtagcggcaaaaaaaaatacccacaagtcctctcctactcttatgggtacctctgtaagtgttgtaggtacaacctctaaaattgatgcatttttattattattattttggttcatgtaaagtttatattcacattatttttaatacgatggtacttttacaaatttgaaataactataatataatagttgggttataatttctcaactagccaatcaatattgattgagaaagtctaattattcaaacttgttcaggtggttcatttgcctatctaagagttgaacttggggacttcgtagcattcatagcagcaggcaacataattctggaatacattataggtgcagccgcagtggctcgatcatggacctcctacttcgccactctatgcaaccacaaccccaacgacttccgcatcaaactccactcactctccgaagactacagccacctcgatccaatagcggtcctagtcctcgccatcatatgcctcatcgcatgcctcagcaccaaaggctcatcacgcctaaactacgtcgcttcaatcgtccacattgtggtcattctattcatcatagttgctggcctaaccaatttcaacacagctaactacaccccattcgcaccctttggaccccgcggtatcttcaaagcctcggcagtaatcttctttgcatacctcgggtttgactctgtagccactatggctgaagagaccaaaaaccccggtcgtgacatccccatcggcctagtcgggtcgatggtgatcacgaccgtgttgtactgtttgttatccttaactatttgtttgatgcaaccttaccaacagattgataaggatgcaccattttctgtggcgtttgaggctgttggaatgaattgggcaaagtatttggtagctggtggggctttgaaaggcatgactagtgtgttgttggttggtgcaattagccaagctcgttatgtgacacacatagctaggacccatatgattccaccttggttagctcaagtgaataagaagactaagactcctatcaatgctactgtgactatgcaagttgctacagcagcagtagctttattttcaaacttagagattctagccaagctcctctcaatctcaactctcttcattttcatgcttgtgtccatgggcctcatcataaggcggtactacgttagtggggtcactagtaatgtcaacagaagaaagcttgttctttgcttagtggttatacttggttcttcaatagctacatctatttattgggccaatagtgagggttggattgggtatgtgatttttggacctttttggtttttgggcacttgggtactttgggcttttgtcccagaagcccggacccctaaaatctggggtgtccctttagtgccttggttgccttctggctcaattgctattaatattttccttcttgggtctatagataaagactcttttgtgagatttgctatgtggactggggttatgttggtgtactattttttgtttggattacatgcttcttatgatagtgccaaagaatatgagaataagatattggaggagggagatgtgtcttcagtggtcaaagattctgatcactctggtgttgctcttaaaagttagttcaagtttgtttttaggtttttaattaatgtaatattaatgctgtgcaaattgcttatgattatggtgtgatttttcctttttctgttaataataaccaacaatactagtctaaattttaaattttaagttttttttcctccctcatgactattgatgtagtatggtaatttgtttgttaactatttttccaataaaagtggtatattactatagtgtagcacataaaaaaaaagaaaaaactctagaagtaaggtattgtaaaaatttattaaatttagcacaaaatataaaagtgaagtttataataatatacatttcattgcatttaatttacaataataatgttactactattattaacgtgccatgtaagtcaaatttgacatttttgacgttttttccgaattttttttttttttatttttttttttttatttttttaaaagtaattttttgtattagtaatagtgttgataaaaaactaattagttactataaaaaaaatttatttttatatcatacaatttatgatacattttggttactctctattatttgtatgcatcttagtaactaattaattattgggaaatttacatggtatactaacttttgctatttttttacaaaaatactgccaggcggaaatttttacttttttactgtgtttttttataagtttcat

SEQ ID NO: 302572 - DNA, 4266 bp, Cannabis indica
gtacttgacttgctatgggtgggcatgagtcattcactacaggctcaaaaatttatgaagaacaatagagaaggattcaaaatagatgaagaagaaggaatggaggctctcaaaaactctagttgtctaacaaaatgtaaattaggttatatgaatcgtttggatgagaatgagaccatcctattcctttcatactatttcacctagtgttaagatttaaattatatggaataaaaatgataaaataatataaaaaataaccctataatggtcggccatataaatgggccccactagttatgatttttccaatttttcaagcatttatcttttatttcacaaatgctatattgtccaattttaatcctacaaatgtcaaaactatttatttaataattataattaattataaaaaactatcatttaacttatttattaattagactttactaagtctcttaattaacaaataaatcctaaagcctcctttcttcacaattaggtcattgcttagtgaaaattcatatataacacatagtctaattttagaattataattgattacttaaaatcaattaactcagtcttacaagcagtaatgtctcaactagtgtggggaccatgggccaatataattaagcttcgaataagtagctttagaatttaccaagtaaattctctaacttataaattcctccttgcgccactatagattttgaattgtactcttaattatatagaacactctatatgttccacgatatagatacgctatgaattatccattgttataatcctaattatcaatgatcctttgtagatgatctacatcgagtagggacaaatttatcattacacccttcaatgtattttatccttacaacacttatctatgtgtaaatgatattacagtaaactagtataattactgaaatgagtactcaaccatttatctctattaagccaagctcgaagaaagtatgacctgaaaccagagcctcagggaacaagaagtaagtcatcaccttactacattttgagttaattgacgtacattaaattggttagtctaggttaacttaaaataaatgtttatccctcatggttaattcatattaacttaaagtaaaggtccatgcctaatggttaattcacgttaacaatgccataacattaagattacttaaatcaattgattcaagtcaattaaagagttaagttcaaaaaaacccagaaaaataaggatgaatgccaagaaagggtaaaattatcagacaattaattggttcatgttaattaattacttcgagttccaaataaaaccttctgcaaaagcattttttcacaaaagcgtctaggtatttaatcgaaaaaaaaaagatttaggcctttggaaccaaaacttgacgaggctggaagcattaaaaacatagcaatgtctatgatataaaataaaaatatctcaggaattactaaataagtaccaggtactaaaaaaccccacgacaagggtatatattgtctccgcacactaaaaaagggggacccttgtcccccccaaaaaaaaagaaaaattagataaaaaaaaaagagttaagagcaattaaagcttagcataattgtccaacgcaggtgcctcttgaatttggacatcagttgggcccttcgagatcacagagtcggttgaaacaggtacctcagatgccagagaagtagaatcgtccatgttctcaccaacaaagatggtggttcaaagatcgactactccatatccttgaggtgcgcccttaaacttttctgccacttctagagccggtagattgggcagaagttcttccctatcttcagcatctaggagatcgatcatggttttattgtgctggaagagagtgtacactatgtggacaaaggcttcttccaaagccttgcagtgttggcttcctgcttctaaagacgtctcttcaaatgggagcttttgcccttcagataagtgattctcttttgggattcttcaggagccttcgtggctggaaccaattttctctcagcttccttagccttcttgaccgcatctgcctcagctgcctccaccttctactacatttgcaaatagtgattcacctttctctccaaagtagtctccctgataaatttatcttggataatctgggcttatttgtcgtactctcgagataaggtgtcaattttagtatccttctctagacatcgagcttggcctacttcacgtcgacttcgaagtctttaatgcaggtaagggccttggaatgcagatctttatacatgtctctacgctttttctctgttttggttgccttcatttcacgagccaatgtcctgtccaaagatttggacaccctttgccttatgatgtcgtccatcttggtatttgctttagtagaagctctctctacctcttctctccttcgctcaatgttggcctgctctgccttcaacacctccaagtcgtaggcctgttggacaagtagggaacaatttctctctgccatcaggccaatctacaaaagaaagtacacaagtgaatcaaaataatataaacacacaaaacatttattcatatcaaagaggtgttgaacttacaacattagcctgggcctcagggagtttaccatgtatatcagatacctacttgccatcatagtaaatttgtaaactctaagcctacagcttgttgtagcactctgttcaatagatttgctaaaaatggtgatacatcagtcccaacatgaggatgaagcctctccgccaactcaactctgttgataagaggaggggcagctttgttccatgtgccataattggcgaactcagcattacacctataagagatacttgtggacagcttcctcatctcctcaacttcacaacagtgcctcttttggtagaactgatccatagcttcgaggaaagcgttgtttccttccatcaaccgtaaaggcctgatgggaagtgtgaaaggttccaaaggcagtggaggcagctcaatcctttcgttggacatctgagtagaggtggccgacataactttagtttttggggttggagaggaggatcctaactatccattaatatccgagtgctttgcctttgaggccttctgccatcagaagttcttgatcccttccaggactcagtatccgtctcttatctcctcaaggttgccaattgtaagaccttctctttggtctccacccttgccttcttgttggtgccattgttagatgaactcgctcgcttcttattgattacaacaggcccatcgtagtcagagttgtcccctctagagctctccattggaacttaattaaatggctctatgaacagagcaggttcggtcaggtctatgatggttgtagacgcaacctctatgcccaaagcctttgcatcaacttctggatttaaggttggaggtgttggctcctcagatccactctcacaggtgtggtttttctttctatcatcaccaccacgttgggtaatttcctagatctcatctgatcgagtcatgacgctgcccaagaacttttttagtagccccatctgaagagtggctggttgatcacacaaaacgaacaaaacatccattaaatagaatcataataaaaggcatgaattttgcaacgcattataatgcaagacatcagaagggcccaaaccattaatcctagcataattgatttttcccttagaaaacagtgtgatgtcctctcgacctaaattagttttgtgctggaagaatcctgcaaagtaaatttcactaagtgcatccactctaacatgatggtgcataggagggatgaaatggttgggaatttggatgatgcagcctacttaatctacctatttactgaatgaatacctatgatgatctaaaatgaagaagtatggatcaaatcaacattgaatgatcgtctcaaagttagacacagtgggagccctgatatatatgaaaaggtatctcagcactaccagaagtgcttgctccttgagcaccttcattcgacatcacatccttaaagcagatggaaagctcttcagccttgctcaggccttctaggaattgtctcctccaatccttcagccattgttcatcagccttcactgcctttaaggcttcctcagtagtaataactgtgatggcctctttaacttcctccgagtccccctgttaggtgtaaagcccgcttagttactttggaaatttgcagttgtttatgattaattatg

SEQ ID NO: 302573 - DNA, 2688 bp, Cannabis indica
aaggttgtaattggagatactagcatctcgaaagctagattattcttttatttcatcattaataaagaaattttctttgagggactttataattttgtgtaccaatttagatagatacttttattctctaagaatatcatatcacaatttcaatacttcagaagccaactagcaaatagattccaaattagtaatcatgttttgtactattcaaaaccgtttaaggacaaacgatataaatctcacattgacatcattcgaatataccataagacaaccgatttcaaaatagtaactgtatattactatttgcaactgttaaagagaaaacaatacaaatctcatacctggaggcaaaaggaaacattcaaaagtactttcaacttttcaaaatgatgaggaagtacctgtctattgagtaaactattaaggcaacaaaaaaaattgaccattgaaaaaacaaccaacagattccgaaatagtaacgattgtacatttcaaaagagtttaatggcaaacaatacaaatctcacacctagtgacaaaaccgaacattcaaaagtacttttaacttctcaaaaatctaaaaaataggcgtctatcaagtaaacttttaagctaaccaaactaatatttaaaatttgtagaagcaacaagcaacgtatttcaaacaaacaattaggcaatgttgttcaaaactgtttaagaacgaactataaaaatctcacatattgtggcaaaaggcatcattcgaaggtacttttttactttatggcaattgtctatctagtaaacttttaaagcaacaaaaacaacctaaattatgttttctttaaagagaaggcaaccgtttatcaagtaaatttttaaggcatcaaatgctaatttcaatatttcaaaaggcaactagcaaaacagattacaaattagtaattatattcagtactattcataattgtttaaagacaaacaatacaaatctcactcttagtaccataaggcaacattcgaagatactttttattttgtaacagtagtaaatttttaaggcaacatacgtcaattttaatatttgaaaattaccagcaacatattgtacttttaattgaggaagcagctgtctattagtaatcttttaaggcatcagaaaataaacttttgaaaagacaaccagcaacaaatttgaaaaatgtatatatgtattactattgggatcaagcaaacaatacaagtctcacagatagtggcaaaagcgaacattcaaaagtaagcttttcaaaatctaaatttcaaaccaaccaaactaaattttaatatttgagaaggcaactagcaacatatttcaaaccaacagttaacctatgttgttcgaaacagtttaatgacgaacaatacaaatctcacaaactgtggcgaaaggcatcatcaaaaggcattttttactttgaggtaattgtctatcaagtaaatttttaagagaacaaaaggcaatttatttgtttaaaaaaggaactagcaacaaactccaaaagagtaattgtgttttctttaaaggagaagcaactatctttaaacttctaagacaccaaaagtcaattttaatattttagaaagaacctatcagcagattcagaactcttaaggacaagcaacataaatctcacacatagtggcatatggcaacattcaaaagatctttgaacttttaaaatatctaagtaaacagccaattatcaagtaaacttccaagacaacaaaagttaattttaacatttaaaaaacaaccagcaacaaatttctaaataattattctttgtcattcgaaactgtttaaagacgaacaatacaaatctcacaaacagaggtgaaagataacatttgagtgtactttctacttttaaagatgaggcaaatgtctatcaagtaaatttccaaacaacaatagctaaatttattttttgacaaggcaatcggtagctaattgcataatcgtaattatgtaacctttaaagaggagacaaccgtctatcaagtaaacttttaaagcatcaaaaatcaatttcaatatttcacaaggccgtgtaaatctcatgcttagtaagcatacgacaacatttgaagatttttttatttgtaaaaatgcaaggaaacaattgtctatcaagtaaactattaagataacacacgtcaattttaatatttcaggataaaaccaagaattgattccaaaatacaaaaccatatatcactattcgcaaccttaaaggcaaacaatacaaatctcacacctacatgcaaaatggaagagtcaaatatctttgaacttttaaaaaaacaacaagcaacaaatttccaaacaacaattattctttgtcgttagaaactgttttaaaatgaacaatgcaaatctcataaaccatggtgaaagataacattccaatgcacatttgatcaagtaaatttttcaaacaaccagcagctaattgcataatcataattatgaaccgtctatcaagtaaatttttatggcatcacaagtaaatttcaatatttcacaaagccaagtaacgacaaaagatacaaaatcacacacttagtactatacagcaaaaattcgaaaggtatttttatttgtatcaatgcaagagcaatcgtatatcaagtaaactattaagacaacacgacgtc

SEQ ID NO: 302574 - DNA, 3180 bp, Cannabis indica
ggccaatataaaaatgaataaaaaataaaaaaaattcatcaagtttttcaaaaaaataaatcatcataaaaaaaattatgaaataatccccatcaaatgcatatctaaattttgtgtacaatccattgtttttaattattcattggctaaatttccttccccataaaataaggtaaaaattggatgccctactatagataatccctatatttatatcacaggaaattgtattcaaactttatacatttataacctagctagcataaatatactcaattcataaattaaaaacttattttagttataattacactttaaaatttaatttattaaaacttgaattgcacacctttttaaaaagggaaaaatgtacacctcatttaataaaaaaattgggataatgtttgtggaaatgaaaatgttagaattttattattattattattattattattattattattattattattattattattattattattattattcaagaaatgagtgcaagagataacttcatgctcaatatatataaaggtcattatttttttttggtaagtgagaaattgtattgcacaagaatcaaattacaagagtcaaattaatttgaacaaatgaattgagaacactcaatttttcaaaccaaaatctattaagtatacttattttctctcttttaaaattagaaaatttatcatatatttctctcataattctatttacaactactataatagtatatatttttgactcctaaaatactaaatttcagatctcccatatagtgtaaactgttgcattaataacaattagatacacttctcagcaaaagctttgaatgatggcacatttttaactatcttaagcaaacattcaaatctttccactttgtttctagttttgcccaacaaaaaagccttctactaatttcagaactatacatgcattcaagaaaacatgatcatgagttttttctgcttggaattacgcatgtatcattagaagtgataccaaacttcgctagcggtttgctatcttttattacaagttaactaagtgataaatttatgtttaggtgcactaaactgattccaaatgaaggaattccaagctttttgcatattctcggtcggccaaagcttgagacaaagctttgaaatgttgaacttcattaaaatgaattcagcatatgatcaattttacctttagtctcattttttacttcaataattttcttccaataccaactcccactatgtgaagcattatagctccactaatcttgatcttttatgtacaccgaattgatcaatttaacccacaaattatctttctttagagcaatatcgcacacatatctccccatagttctaaagttccattgctcaatattcttaaaccccaaaccacaataggctttcggcttgtaaacattacacaagaaactaaccccgattcactagcttcaaccttacgtttctaccaaaaacttatacagatgttattgattcttcccagaatatacttaggcagaattataagatttgctcaataagtgtgtgcaactaacaaaactgagttaatcaaaatgcagcgaccagtataagaaatatttctagaacttcaggttcgaattctagccaccattttctcaataatacaatcacattcaactttagaaattcttttagaacaaatgggaatacccagatatctaaaaggaagagaacttttagcataccctgagcaatcaagaatgtactggacattatcttaagccattccaaagtaatagacatcagatttactaatattagcaggcaaaccctaaagtttctgataagctcttaaaagttcggagcatgatcattattgattggacattgcctcttgagaaaagaagaaggtcatccccaaagtataagtgattcaatttcaaaggagttcaatgcaacacaacaaggatgatgcttgaactcctttctcaaagagattttagccatcaacctagagaagttttccaatttcaagtacaagtagcaaaggtgacatggggtccccttgcttaggacctcttctagaagaaaagtagccatgaagagtaccattttaataaggaaaactttggcgtaggtacacactcaatgaccaaatccacaaaaggaagaggaaagtttagagcctctaacatctcccaaatgaatttccattccacagtgccataaactttcttcaaatctaatttgaccataaaagaaggagtattattctgccgaccatatgcttgaccaagtcttagcaaatcaaaatattgtgagcaatatactggccatgaacaaaatccccttgattagatgcaatcaaggtaggaagaatcaatcttaaccgagcacaaatcaacttagtcactgttttgtagaccacattgcaatatgcaatgggtctaaaatcacaaacactacttggacacttaaccttaggaataagagtttaggttgtagtatttacctccttaagcaactttctagtattaagcacagaaaaaaattgcagctgtgaaatcttcccctgtcaagttccatgtttcttttttttttttttgaaaaagatgctactaaaaccaattggccccaggactttagagtcgggaaatgagaatagtgtagctttaactgcctctattgtgtacgactgtataagtaaataagcttgactatctattataattggtccctcttgaacaataccagcaataacagctcttctattagctaatcttgggcccaataattgagtatcatactctaggaagcactactgcaaaatgtgtaatttgcgtcggtcaacgcatctccctaaaattgttggctgaagcaaaaaataggcagatattttatgctttagtggataaccgaagtaaaaagaaaataattagcgtcagctactacactaacgctaaaagatgaaccgaggcaaaaagtaaaaatttaaacattatcttttacattttgcttcggtggaaaagagacacaaattatttagcttcggttgcaaacagaggttaaaaagtttgtgactgttatccactgaagcaaaatgttttaattttgaaatgggcttcgggcccaattaaaaaaccctaacttaaaagataaacttaacctaaatatcaca

SEQ ID NO: 302575 - DNA, 3796 bp, Cannabis indica
atggtggtaaaggagaaagtcacagtgggtaatggtactcaactaactatttctcatcttggaaatgacatttttatttactgattctgggcagcaattattattaaaagaaatgttgttagttcctgagattgctaaaaatcttttgagtgtatcaaaactcacccgtgacaatgatgtgctaatggaattttattctgattgttgtgttgtgaaggacaagcaaacaaggaaggttcttcttaagggatgcttaaggatggcctctaccaacttcaagcacctcagttcaaaaatactgcccaaagtttaagtcaaatcgagtcaaataaagctaaatgtagcaggtttactggtgttgctgttaagacaaaaaccagtactagtaggtccaagttagaagagtctttagtatcaaaatgtgatgtgtggcataggatatcattaggccatccatcaccaagagtcttgagtcaagttttaaattcttgtcaagttaaaattgccaagaatgaaatgacacattttctgtgatgcatgtcaatttggcaaatcgcatgctcttccttttaaaaattccaatagcaaagctggcaatatccttgatcttctacataatgacctgtggggtccctctccaatcgtgtccaacaatggtttcaaattttacatacatttcatagatgattgcactcgctacacttggatttatccactaaaaaccaaagctgaaactagtgcagccttcttacagtttaaagtttttgttgaaaaccaatttgaaagaaaaattaagagacttaggacagattggggaggagaataccaagccttccaaagcacagttgttgaaagtggaatagactttcatcactcttgtcctcacacttcagctcaaaatggtagagtcgaaagacaacataggcacattgtggaaatgggcgtcacactcttagctcaagctcaaatgccattaaaatattggtgggaagcttttcaaacatctgtgtacctaatcaatagtttgccaacacctatccttgaaaacaaatcaccctttgagacactatacctcaaaaaaacccgactatgcctttcttaaagtctttggtgtggcttgtttcccatgtataagaccataccaagcacacaagtttcaattccattccttaaagtgtgttaatttagggtatagtgagtcccataagggttatagatgtctcactcccactggaaaaatctatatttctaggaatgttgtctttaatgagctcgagtttccttttaaacttggcttcctaaataattatcaacaagaaaaccagttattaaccaaagctcttcatggtctgtcctaccatctttcactcttcctacagggactctctcagccacatcatcctcatccttgggcacacttgaagaaccaccttcctctccaacacacagtcaggtaaattcacacaattctcttctttttgatctgtcacttgctgctgtttctggtgcctcgacttcaggtgttaagaggggaacatccactgacatcagtaaatcaggttcagggcaatcatctcatgagcaagccaatgatgcactaaacggtcccacaccagttgttactggacatcacatgataactcgagcaaaggcaggtatttttaaacctcgagtgttcatgggacagacaacatggaaatcagcaacaataatttcttgtgatgtcaaagaagctcttgctcaccctggatggaacaaggctatgtagtgtgaaaataatgctctaaaagaaaaccacacttggatccttgtgcctcccgaacctggacaaaatctgattggcaataaatgggttttttgtgaaaaactcaactcggatggatcacttcagagacttaaagctcgacttgttgcaaagagctttcatcaaaggccaggcattgattttggagagactttcagtccagtcatcaaggccatcacattgagaataatcctaactattgcagtgacttgtagatgggaaatcaaacaattggatattcacaatgctttcctaaatggaacacttgaggaggaggtctacatgttgcaacctgaaggctttaaggaaccaggtaaagagaactatgtgtgcaaattaaataagtcattatatggcttaaaacaagctccaagagcctggttcgacaagctgaaatcaaccttggtcagttggaattttaaaaattcaaagtcagattcatctcttttcttctacaagcatggaactgatattatcattgcattgacatatgtcaatgatattataattacaggaaacaacaacaacaagttaaagagttttattgctgaattaaacaagaaatttacactcaaagatctggctccttacattacttccttagaatagaagtttacaaagatgaaacatggctttatttgacacaaaccaaatacattgaagaccttcttcgaagaacaaaattcactaatataaagccctgtccaacccctgctacagctagaaagcctatgtctctaacagatggtgagttgctgcctaatcctacagagtatagaagcataattagtggtttacagtatttgtctcacacaagactagacatctcgtatgctgtgaacaaacttagccagttcttgaaggctcctacaactgtccattggagtggtgctaaacgggtcttaagatacttgaagggaacgatacacaaaggtctccatatcagttgtgatgagccactccacatcacaggatactcagatgctgattgggcttattgtctagatgatagaagattaatagcagggtattgtgtctactttgggaacaccttggtgtcgtggtcatccaaaaagtaacctacagtggccaggtcaagcacagagttagaataccgtgccctagctcatgttgcagtagagatttcctggattgaatcactactaaaagaactgaactttcaaacacccacggctatcacttggtgtgacaatatgggggccaatgcactggcttttaaccctgtttttcatgccagaactaaacattgaagtcgacattcatttcattcgtgacaaagtgttaaataagcaactcgacataagatacataccatcatcagaccaagttgccgactgcctaacaaagggactatcacgcttaaggtttctttcttaatagacaaacttgcagtgatgaactcacccctgcatttgagaggggatgtgaagaaatgaacctatttcccttgttttccatgtgttagtttttgtggtgttttgctgtgacaggtggctctacttcatttggcagccaatattgaagatcccaatgaagatttcctaccattgcaattacaataattagataatcattaggtgtacgaaagactcgtttttctgttagaattgtatacaactgtaatgagccttgcttggctccatcgtgtaccctcaggcccttggccttttttataaatagaattaactcagtctcctttccttgagctgagattttacattaccattgtttttctatttcttcactgatgttgcatatttttaatattctttaacaatgcatgaggtgaaagatcaacttgcatattcttaatgttgtaacaacttcgaaatattttttttaatcttttttgcatattaattagttaatttacaattaatatatcaatcaaccaatcaatatttataaagtaaaagtatgaatcagtgatatgtcataaatttgattttctatacttacatatacctaata

SEQ ID NO: 302576 - DNA, 1812 bp, Cannabis indica
  modified_base (56)..(56): a, c, t, g, unknown or other
  modified_base (180)..(180): a, c, t, g, unknown or other
tttacaaagtaccatacttagacaacaactcaacacctactcaacaatgtttaacngttgagtgtatcgagtatgacctacttataagtactaatctgccaattactcttaaaagtgtaaactacagtcattcaattgaggtttacacaacttgcaaaaaattatacatcaaactaaaanaggaccaggaaaaaaaaaaagaaaaaagaaaagaaaaaaaaaaaaatcttgaagtcatagtacacctaatgcaaatggttcatcaatccaattcaatatactacttaacgtcgattttgccaattacattaatattagggacaactatactaaatactataaacacttgaattatggttcaaatagaaaagcagtaatatgtatcctggcagttcaataggacacattaagcactacagtatggtataaaaatcttgtatctcacattatattctccctctctccaaaacctaaatcccatccagagctcagtccaccctctttaaacttgagcaacattaacagattatacaattcaaaggttcaaattatatggctctcagaagtggcaggcaatattaaggtagcgcgaaacttggccagacttccatttaggaaaggcagaaaagaatgcaaataccttcaaacattagaaatggaaaagcaaatgaaggtaagattaaactcacagttccatagtccctccaacgttagtatgtttaagggcctcattatagtcttgttcatgaaagaatatagttcctgcaatcagtctgaggatcgggttgtttccaatggctggatctgccaaccactcctttagacttgcaattgtagattcctgcaggacatggtagaattaaccatcgcaattcaccgcttcttctacaatctaaattcatacagcatttgaagaaatgatagatctaattaacttaaataaaaattcagaaacctcgcattctaaattgattttttttttaccattattacaaagcatcaatcacacaattgaagcatgaaatgttgccaaaggaacgagaaacctcggatcggagatccaaaatcaaacattcgttattcaatcaacaatttaaatttcaagatcaagttgagagagaaattaaagaaaacaaaaaccttgctttcgggactagagagatacagcgcgagcaacttcacagcttggagaggcgtagccgcagaggaatcgatctcagtgatcacaagctgataaaatggcaagaatcgaaattcatcaaactcaggggacagatttctcagttgttgaatagagtgctctaaagagaatgagagaaagagatacctggtaactgccgagagcgatgtaagatcggtagacgaggcaatcgcgttcgatggcatcttcaggggagagattggggaggtcgctgttgttaatggcagcttggtaagctcccaagtagaaatggtttctcaaattgaacaagtagtcgggcgtcgctgctgctgctgccgccattgctgtttccaacctttttttgttccttagcttttgcagttacagatctcaaacacaaaaaccaaaacgaagtcaccagcaggcagtggcgtaggcgatgtgaaattgtgaatgataatataattgtttgttagatttctgaagtttggttgttcatctcaagtgggccggatcaaccggattcggcccactttctctatcgtagccgactaatcacactacgtgcatttggtaaggggataagttgaaaaatgcctgtttttttatctattaataaaaatactctcatattaattttttattaaaat

SEQ ID NO: 302577 - DNA, 2220 bp, Cannabis indica
aaaataaaattttcttatatatttttcaaagacactaaaacatgttttttaagtacatattaagctttcccaccaaaaaaaaaggaaaatacatattttctttaacatgataaatagagtcacacatgattaacagtgtaacaagtcataatcggaagtgaaacctcctcaaactaggatagctcatcgtctaaccgaagggtatgttttgccaaactatgagttgtagaattcctatcgcgagctacataagacaaaactgcccccaaaaattcagacgataaagttataacgtcttcaaacataacctcatcacattgaaaaaataccttttcattattaatagttgtcgacagagctagcgaaactgaaaaaatatcgtttactaaaccaaaaaacacagatattagaatgacaatcttcaaaataaaaattaatataaaaaacttataatttaacacacaacccatatcactagctcaacattactaaaaaaactaaaaaatctacaaaaattctaagtataactagccaaaagtattaccctttggctagtaacaacatacaagtaccctattttaaaactgctgaaaaacaatatcaaattgattatatttaaaattaaacatatcggtaaattctctgtaattgtaagtcctccacaaaataatttataaaataataaaaaataaaactctattaccagacaatataatgaaaaaagacaacgtgaaagaacgatgataagccaattcatattaaagataaggacttaaaaagactagaaatacttatctgttaaaagtgaaaaagtcgttgaagtagaaattatgatcataaaatggatcgcttctcttacccattgaccatactacaaaactactctaaacaaataagaacaagttatataaaatggcacaaaagccacaaaaatgtaaaaagcatcaagaccataaaaaaaaattatgcaaaaacttgtaaaataatactctttgaataactaataaaaataaataaatcaccatttataaaaataataaagaacataaacaaaaagtgtataattttgcaacaataaaagaaaataggatatatacttatttggtaccttgtgttttctcaaaatacacgcttgataccttttgttttggataatgatcaattggtaccctctattttaaaaaactacaaactttggtaccttaagtgtatttaatgttttaatattcctaaattactccactttaatacattatatgattattatatcaatttattatttgagctgattcaaatataaatagtaaatttttcagaaataatatatataattgtaaattaatcaaataaaaattaaaattatttttttactataataaatgaaaataaaataaactaaaaacccaaaatataaataagttcagtagaagcactccttttagtgcctgctagtatttctccagagaggtactcctatggccccatcttcctcatcacccaggcccatcttctctttgcggaaggtcaatggcctacgtcttcctaatctcttggtacacttcaaaacattggcgatgcaatagttggaaggcaagttgcgacagtggaggccgtgaggaccgtagctctaggctcttggctgaggcacattgatgggggagatctcgtctccaatcgtagtgtgggaggagttcttgacatgtgggtgtagaaggacctctttccgtgtgagtctgcattaattttattttattttttgagataaagtctgcctcttgtttgtgagatatattatttggaatgtgactagctcgagtttaaagattttgaggttattgctcttgttcttttctagcagaaacttgaaggtggatatttgggtaatcatgaatctagtgtttaggtatttagaagattgacatcgtataacaaattaataaccaattgttatgaaatattatttatgaatgttcaaatcaccaaattaattatcatcattaatgcttgattgtattttcctttattacattgatttagtttctcatgcttttagtcatatttttgtataaatagggattcgtccatttgaaataaacaactgagaaattctcattcactttctctttatctcttcatcttcttcaccttattttgttcttatctattttattattatttctatatcattttattaacacgtttatctagcacgagtctctg

SEQ ID NO: 302578 - DNA, 1722 bp, Cannabis indica
tcaagcttaaaagaggcgataccattacgaccagctgtttatttttaatagcatgaaccaactcaaatgcaacctaaaacattgtctgtgatcaagtggtttggtaagaaagcactttgagcttcagaaataaccaaagggagggaaagcttgaaccgagagactagcaccttggtgacacgtttagagatcacattacagaggctaattggacaaaaaatcttgcatgcgttgaggtttcttgaccttggggatcaaagtaatgattgtcttgttgaggtctgtggggtcggcatgatcatttaggatgctgagaactactttggtaacgagatcatcaacaacagcccaattcttttaataaaacatggctgacatgccatcaatccccagacttttgtcagcccccatagtgtgcaaagcagagtaaacttcatcctttgtgaaaggcttaatgagtgattcattcaagtcttcgccgaccattgttggaatgtaagaaagtgtagtattaagggccgcatcatcaatgttggaggctgtgaaaatttcagcaaaataggcctgaacaacatctgcaatttcatccttggaatgaacttgttgacccgaatcattgagaagaaacttgattttgttgtttgacttccgtgaaggtgctttagcatgaaaaaatttagtattgcaatcaccacaagaaagccaatcaacccttgatcgttgttaccaatatacttcttcttgctcaagtaaatcttcaaggacagattccacactttgcaactcttggagatgttaactggtgcgagcagtagcattgtttaaatcagccacttttgattgcaaagcattgatatttttctttattttgccatacttgccaatatgccaactttgcaaattttttgtacatgagtttaagctatgtaccatagcagcaatcgggtcagcagaatgaagattattccaacttttggagatgatttcagcactttcagggtcggctagccacagtttttcgaaacggaatctgcttctgctctttgttgaagtatcagcaagtgtgtaacaagaaaaatcagcagcaatggctctatggtcagaatggtagtagtccaagtgttcgaccgttggtgtaaggaaatgagatatccaatggttgttgacaaaacaccaatctagaagctccttaagtgtatgtagagcagtacggtttttaatccaagtaaaaggatcaccaatgaaaggcacttcttgtaagaaacatttatccaaagtagttcgaaaggcttccatttgggattcacgtctcaaaccacctcccgatttgtcattgttggacaagatttcattgaatcacccatagtaatccaaggtagaagtggagcaacatcgccaaaccgctgaaataaagtccaggaatctaatttattaccaacctcaggagccccgtagaagcctgtaaaatggaagctcggccagccaataaatttcatgtaacaatcaaagaaagtaggtcccatattcaacaaagtaacatcaaccgcatctgtccagaaaagcattaaaccaccactcaatccaacccgagggacttcaagaccattggaataatgtaatagctgccagactctagaaacagaattttgagcgagttttgtttccataagaaacaaaacatggggagattgttgttggacaagcaatctaaggtgtcgtaat

SEQ ID NO: 302579 - DNA, 2393 bp, Cannabis indica
atatatatatattatgaaaacattaagtaaacatttagatttgtatcaagaaatatttcacaaaatcattttacaaaattatttttgtattaaatataacagaatttatacaatccaatttgaccaatgtaattccgcattaagtttttcaaaaattaaattaaaaataaattgaactaacaagaaaatgtaattagaagtaaataagataaatacttttaagtaggattagagtgttaatcaatttagttcacgagttaatattattaagtctactttaactaataaaataaataacacaagaatattatcaaattttcttaatcccttacatgaaggtaaatagccatatttatagggtgtattcgggttctcgggtggacccgaacccgctaattagtggccctttgtactttacacaaaaattgataacggaattgtcaaaagcgcctactacttgctagtgtgggagatctaatatatcacttcatttttaaattttggtagcatatctatctatctatctatacatgattttcttcttttaaagaattggatcataaaagttctctctctacctaattaattatataagacgctattataatatagtggctttttgcactttttaataatataatcaaggttgttagtgtatttcattttcattatcatttgtgggtccataattatatttaattacttattgttcacgactgtcatcatacaattcatataattattaatcttggatttctatttggatccctttttcatacctgatacgacctctgctgtatattctcaacattaactatatattaatgagatgcatattataaattttcaacaatatataatataaggtcaaaatcataatgcaaaattttattaatttaagtgtttataattactttatgtgaaaactagccttttgtgcatacaaagggccaagaacataaatgaatgatatattgtctcccttattgtttgttctatatacacaaaaaaaaaataacacacacagcgagagtatatgctgtttcaatattccaagtgttaataagtacgtaattgattatatatataaaaaaaaaatacctaacttattatatattattagaataatttatgttataaataattaagtttaattaaatttaatttttaacaataataaaaactataaatatatttctagaacttttataagtgttaaaattaattaaatatttatttgtatccgaaaataaactaaaatatttacacatcaaattactcatcaaattatttaattgctattattaattatattgttagcttctttcttttcttggtcagttgcgctaactacccagcaaaaggttgtccttattattagttgttaattatatatatatttatgttcgatcataatattgttatttaatactaattagtagcattaatatgtgcgagcttggacaaatattgtcattaattaaattattaagctgaattgaatttttagaataatgaacatttattattttgcatcctaatcgcagctgcttttagctaaaataattataatattaattacttacgttacatcgacaattttcagacctgcgaattgcaatacgttgttatatgttgaaaacaaatatttagaattttagattcagaatatgcattacacatgcacgaaaattatgaattatttcagtagttagtacttgatgttaatcacatatatattaaataaatcgttgatcaggccatagctacctaggttttatacaaataattgatattttaattttttttttgacaaaaattaatatcataaatatatttttttttgtcaagaatatcttaaatattatgtgttttttgaaatgaatattatgtattatatattcaattggaaaaagtatatatacatatttgatgcggaaagaaaaaaagattgtaattttgttaagtttttcttgttcacacgttgaacatttgtaggtacataaggtgtctataccacccaagaaccgatattaatagttcatttacactaaataaaaatgttcaaaattagtaatcaataaccaattaaataaatcgatatttgttttttctattaattaaaaaaacatcagttttcttttaataaattatatatagtacaaaaattttgtatcaatacttaagaaaaatactaaaacaaagttcaagattaaaataaaaaaaaagttttttaatttttacactttataacggttttttttaatttcatattacaacttaaattgtcaacaaaaaatcgtaactaaaactacctattgcaacttgcgctgcaaaccactttagaaactcaaatcgtaaaatttgaaaaaaaaaactaaaaaaataaagta

SEQ ID NO: 302580 - DNA, 3366 bp, Cannabis indica
gttacatttctgcacccaaaacaatacatactattagatcaattatatgtataacaaaatttgcttggtatataacaaaattgaactttaatggctcgtttagtacactgtataagggtcgcattgtattaaataataaataacactatgtttggataaactaatgtattgtgttaattattaatgtaagttgtagtatttaatacataacaaatagtatgtattagcttgtattataatatttacaaagaatccacgatcaacaccaatctccgacccagaaccatggacctggacccgaactagactcagactcagacttgggacctagacctagacctgaacctgggacccagactcaaatctaggcccaggacccgaacccgaacctaaacctggacccgacctgtagtcagtgttggggtcgagtatattgaaaatatattataaacttacacaatctattaatacaagtcaatattagacataatattgtattaaataatactaatacaatagaatacaatacaatccagcgtaccgaacgagccttaatagtagtgtataatgtggttaacacatgctaaaagttatgccaagttataacacaaaatataacacgaacaaaattttataccacaataaatatcactttttaatttactcttttgtcacttattaatgcaataataactttttatatttttatttatatatttaatatagtttttatatacttttaataaaaaattaatatttttgttgactttttacacatttttattaaaataatttattttactcctaatacattaaagcacaattataattaatttgaaccaaatacaacatttactcataaaatttacactattcattgagaatgtggatggtaagaatccctatatatggacatgaatttagtaacatatttaagaaaaatacttaatatgatatatattacctcataataggattgtgcattgccaaaaatgaagtctatatcaccttggatatagcacttctcaaaatagtgacggccaagggcatcaaacaatgtgtcttgtacactaatgaaagaacaaccatagaagctcactttgtctccctcaacaagtgcagctggtgcccatgtaattgcctttgcatcatcatcatccctactactctttcttacttctttcttatgattaacgttataagaattctgcacgtttaattactaattatttatcaattatatataccatcctattagtaataataataatgctaattaagatttttatccttgaatatatgcaaattatgtttctaaatttttctgactgttaaaaattttctttaaattattaaaattaatgtcgggtttaaaaacttttgttcaattcctttcaattttactaatttggtgattgtccacatactaaattatgtttctcagactttaaaatctaccaaattatgtcacttaaactttgacatgttaccattttatgcctctgaactttgattcatgttacttttcttactaaaattagttaaaagtctttgaatttaacaatctcaataattcaagagaaatttttaacgtctttaaaagtttaaacaacataatttggtacatgtaaaagttaagggagcaaaaattctaattatcttaataataataaaaatattataaaaatacggatttagttttttttttttttgaactttctatactatatattattttcatgagcttttgtaaaaatgtaatttaaaataaatcataaaaaaagtcggtataaatgtaaaaaaatatatgcaatttttaaatattttgtgtaaaaaatgtctattatcaattaaacaaccttgaattgtattttgcttgcgacgatattatcagcatggcatgaaaacgtagggcttttaacgatgtcaccagaatctccccatgcaataatcgtgttcctgctactttctccttccaaaaatatgaatggtttctctctttttatactaaccttttcactgtacgtaaaaataaaacaaaaaatatttaaaactaatgtatattatgtaaaataatatacatataaatatatatatatatatatatatatatacttacgtgtaattgccaggtttaatatggatatgaacccaagatttgttatcatctggaacagaatcaatggcttgttgcacagtggtgaaatctcctttgccagacttatcaaccgttatggttctcattgtaacaccattattaatattataaccatcactattacttaccaaaaagatgagtagtattgttatgatgtagaacaaataatatttgaataatttgtagttattattaaacttcatcttcacaattctcatcacctgcatgtaatgttttgaaatataataatatatatatatgttgtatatatggatcatacttatttcatatacatatatacaatattgaaaagataaacattgagctagctatagctgtctgtattatatttatcttaatttacgaaattataattaataatttgatgtgatgatactctgatctgtaaaattgtatatagacacaaaatattaacatctaattaataaaattgaattagctacaaatctatcttattttcaaatatggacatatatatatcgatagaatcttaacttgaaatagtttccttatataaaagaatatttattacattaatacaatattcaaatgtatgtaattatgtatacaatatatactggcaaatattatactgaattaattatgaattttcaaggatattaataataataataattgaatttgtgattaaaataaccaataaaagataagtatacagtaactctctcaaaaaaaaagggctgagtacacagtacttatatacatttagttaatatataataaataatttattaattagtgtgccacttataatatgcatatatttttttgtttcatattaatactaagttatatactcttaattttcatagtcctcaaattatatatctttgatatatttaaatttgaattactgatatttttaattgggactacaacattatgtttaattatatatgactatataattacactactaattaatttacatactcaaaataatatacacactaatgtgataataatcaaggtcaacttttatttatattatttttaagtagagatcacgtcatatttaattatatctctgaataatatacatcatataaaaatattatcatttattaccgagggagaaaataactatgactcctaggtggaaccattacaacaaaagagattttttaccttacgttttacatttgaaaaaataaaatgtgagaaaa

SEQ ID NO: 302581 - DNA, 1158 bp, Cannabis indica
aattttaaaaactttccaataagttatagtattgaaaataaaactcaaatattttattacactatttattatttttttatatattattattaaatatttgtttgaatactatttttaatgtattcatgttgagtattcaaaattaaaataaatatattaaaatttttaacggaataaataaagaataataaaagttaatatttgtaaatatattatttattatttttttaaaaaaataaaataataataatttatattatttaatttattaggaaacgtaattaaaatacttaaatggattaaattattattttgacttaaactataatatttgataattattttataaaatatattaaaaaaataaaataaaaataaataaaaaccattattcttaattacattcaaaaaaaatttatgaatttataattatttctaaatggcatataagatcatgaaacaaaattagattaaaaaataatgtctaaacaagaaggagtttagtacatatttttccaaaaatatcagaattaatattttcattatattcatatagttagtgtacgtatggccacggtacatagttttgtaattatgtgcattcttagccaaaagataatttagtatttttcctttttctttctatgtactcaaattaagaatcttgttctaagaattaactatttttatgcaagaaaatgtgaatctaacataaaataacaacttgttaaaaaataaaataaaacaaaataagtaccacagtaaatttatttataaatatcttaatatcttgcaaatttgaaataattatgattaaaattattattttttaacaagaacaaaaaaatagtattatgtttatactccaaatagtatggaaacccttcgcatctctatttgtataaaataaaaaaccaactcattaatcatattcattttcttaaataataaatcttaatattatattttttattctcaaatatttatttttcaacaataaacttactggtcaactacgtatcatgaacataataattagtgtacactgtataaagtatagttaataatgctgcacagctcataggcacataatcaatcttattttttttcttttttttataaatagattattattattagatattagtactattaatt

SEQ ID NO: 302582 - DNA, 2715 bp, Cannabis indica
aagcaatcttagcacttagaagcaaagactgaatccctctcaaactacattatcatctttctttaatctcaacacaacttacataccatttaacaacacacttaaatacacaataatacaaattagctttaaacatagttaggtagattccctccatatcaaggctgtttcttgcattttctccatcaatttcaattgagaaaacatagtaaatgtctctggtgatggtagtttagaacaccctttaggattatcatctttaagtagttgcctctatatgctgtctcttaaccaatctaaccaatcaagcacactactttcttgtgaacaaaactgcaaatcctacattaacacaaaaagataattatattagtaacactgtatgtagagtctctcagtagaacaaatagtagggaaggtaatgatgaaagcttacagaaagctggaaatctggtggagagtcaaagtcaaggttttcaaggtcagaaataccacaaggtgggatgttttttccagtcaagttagtgttagtgttaggtatgcaatcaaaagtttccttgcacaacaaagaatcatcaatgttcaataagtcataggtttcggcagcctgtgattcacccgccagccacgggaactcctccatattgttctcaccctgaccgtctgtttgagggataagaggtgacatttcgatatgatctccttcctcctgtaataaaaaaccagtcttgagaggaaaaaagacaataaaaagcttcaccaaacattcatgatatcatgtaacattacattagcctttaaagtaactaccttggcagatgactgtaatggagtagtagtgtcagccatatcatgtcgaggtgggatcggtggatttgaattcggagttttgggactggcttcatgtgctgctgctgctttcatatcagattcttcaatcagagtaatgttatcactgttttcagattgcttgtagaagatctttgagacaacatagtctccttcattttcctcttctccagttcccagatggtattggtgcatagtccaattagttctatctggcttagagcccttcttagtgcttttataaagaaccataatcttcttccaccccttttgaactccattttcgatcacaggtttagttttacctgtcttgtgccagcgcacatgctcagccgtcgaaccctgctgacattggaccttgcgacgcttcctttgaccagtggaatatgcattacatatcttatgaaagaaatgaatgcttcttccatctttcttagcacctaaaatgaaaatcagatacggtgagatctgtaatactaatcattattggtagaattatgtctaatttgagtttagaaaatgtgttgatactcaataatttgctatgttgtattagattggaattagaacaacttaccaggaagattttcaggatggtcacagtaaattccttctccctcaagtgtggggataaattcatcaataaacacatgaggaattatgtttccaacaccacattttccagacaaatgatatatgagatcttcatcagatggctcaaactttacaccagctggcagcccaggccactctgaagaaacctgcaaaagaaatgtccacaaagacacacaaagcagttcggtaaacaccacataaacgacgattggataataaattcatacgatcaggtcagttcataaacacaccaaagctaccaaagacttagctcaattggttgggtgtgtaagagatttgaattacaaaccccagctgggctaatttaccaaatggatagctaactaattgtttcattaagaacaaagaatacaattgaatagacagtgaaatcttacatcactgttgtcaatatcataatggcaatttgggcattcacgatttgctccacagtcttttatttgataagcagaagaacgagaagcactctttactttttttgcaattcctctgctgttcatgagccaactcctgtatccatgatagaatataagccaaaattatgagtttatagacagaacacaacaacaggatataatatatggcagtatgtgctcaatgcaattcactagttaaatcctatattgcaaatgaaacttagctttgtgctagtttggagaagaaactaaagtgactaaatcacattatctgctgatactaatagtttaagcctacaaactatcttctagtttgagtccactataaaccagaacagaacaaaaagttgatacttgactgtttacctaagaagaaagttatcacaatgcttacagaaatcaatcaaaagaggtataaaactgaaaacgaaaaaagcaccttataagtcagtaaaaagtacccatttttggataataaaagcatcacctcaataaaccatttccctcctttttttagttcaggttccctttttgggggttgagtattaaatggtcctccatcataatacttaataggtccccactatgaacaaactaaacccaaaaccccaaacccaaaatccctcatttaatctttttttattattatacccagtccaagtccaaggataaagactgaactgaataaaacccagtaagcaaacactagagtcagcatttcccaatttttttttcccaagattctttttttataagttaaataagcttaatctcagttaatatcccacctcaatccaaaaaaaaaaaaaaccaa

SEQ ID NO: 302583 - DNA, 2152 bp, Cannabis indica
ataacatgaaccaaatgacatactaaataagtgatgaaaatacttttgtttctttattgataatagaatgataaagattacattgaaatagagttttatttagggcacaaagcccaacagaagcttccccaaggttacactcccaaaggaaatgtaccacacaatgttgtatttaagctgcagaaaagtcgatatggtctcaaacaagctttaaggcaattgtatgccaaattgagatccatagtgttacagcaacattttacacaatttaaaaatgatcattctttgctcattcgacactaatctggtgtttttttcgctcttctcatctatgtcaatgacataatagtagccactaatggtgcacgttttaaattaaaagaccttggcacacttcggttcttccttagtctcgaaatagctcgatgtcctaaaggcatctcagtatcataaagaccttcacccttcaactcttgcaagactctagtagccttggttccaaaccagtttccactcctatggaaccaaaattaaactcagtactaattcaggggaattcgctccaaaatccatctcaatataggagtctaatttgcaaactcctctatcttataataacacggcctgaaataagtttttttgtgaataaattaagttgattccttcactcctcaccaaccacacatgactgctgcaaccagaattcttcattacttgaaaaactccccaagacaaggtctcttcttccatgcttctaaaccaccaactcttccactttaagcctttgcagatgttgattggggagcctatcttgacaccagacgatcaatctcaggttactgtattttcttaggcctttcacttatttcgtggaaatcgaaaaaatagcaaacaatctcaaagtcatcagtcgaagcagaaaatcgagcaatggcaaacgccacctctgaactcacttggctcacatccatccttaaagacttcaacatcaacatcaagctaccttcgatactattctgcgacaataatgcaaccatccacatctcaaaaaacctggtctatcatgaacaaactaagcacatcgagatcgattgtcacactatccgtgaaaaataaccaatggtaccctaaagatgaaccatgtttcttcaaaagccaaccttgcaggcatcctaacaaagcctttattcattgctcctttcaaaaaaatattgtccaagatgagtgtcacagatttctacactctattttgaggggggctgtgaagattagttagaaaattagttatttctgttatttatttatttatttatttttttatgaatcaggaatttcgttgcacaataaccttttatgttacaacctatggctcttcaaagagcaaacaactatacatcttactgtaaaaaacgaacaaattcttataaatcttgaaaccattctaattctttttgatttatacattttggcattacacaagtaattctattttttatcagccatttagttttttgcaagagtgcttgcggttgtgtagtctcctgggaccataacatttgattcctagctagccaaatcttgtaaaccaaggcagcaatgcaagttgtgtaacagcttgccttgaatttgctcagttttgctcaatcaatccatctcaaaatactcggcagggattcagctttgatcctccagtgcagccatgttttaattcttgtaagcagcatcgagcatacctgcagtcaaagaacttaatttttatttttacagttggctttatcttatatatatatatatgattcttcattgtatcattaattcaattccaataaaaaaattcttttcctctctctgaatttttaataaaagcagcaatatttattaaaaacctaagagagaaatcgtggatggatgagtgttgtgtattgtgaatcatgctttctttgggggcataatataagtaattacttatatttttaaatagaaatataaattttttattgctgtggtaaatttaattacgttatattttgtcttttactttgataaaatttttagtaagattagtactaataatattatgggaaattaaatcatgtattattttttttttaattttttttttaaatttacgatttgagtttctaaagtggtt

SEQ ID NO: 302584 - DNA, 2163 bp, Cannabis indica
aaaaattatgtaaaagtaattaaaaaaatattatttttttaaatttattacaaatgtagcattgaaatgacattaaagtgacaattaggtaagccgttatgttattattttgtttggtgtatgtaataaaatttaataaaataattaatttttaatattgtagatagttttgggactatttttaatgggatgaaaaattcaaacacaataatgcatatttttttttttttggttagaataaacactttacaccaatttttaaaattactttctcaataatattattatgtgtccttcaattttcttttttttgaaatcattatctatccttcaaattgatgtacactaatttaattagtttgaactggcttttaaagtcatgaaataatctaccaagtcatcctgattctttagtgtaagatgttcctccatctaacattgtaacatataaacatacaaaatataagaaacttgcaaatacataatttcttgaaagcatttccttacggagatgattaaacaattaactttttttaaacttacaaaaaatatcgatcttggaacatctgaggtggagatcgaaaccactgtgttagtgattaagtaacaactcttaaaagtatgagcaactgaagaaagatgtaagagacacctccaatggtggcatattctaacttttcagagccttcaatggctacaaaatctccaactttacttcgattgaatcctccttctaaccatcccaactttttgtaccctccttcgtataattttgttgttgccatcaatgacctgttatgtatcaatttataatgtgttcagtctatattattttaatattaaataattctagttaattatatatgtaatcagtaacagagtcatgaattaatttttatttattgggtactaataataatgtttttaactttttaaatgcaaatttttctaagggattttattctaattttattttaaactataatacacttttgctaaaaaaagaattgtattgtataatcattagttatccattattaataatactacctgataattaaaataaatatgtttaacaaaagagtattaccatttgctagcatattttctaaaaattattatattaaactatatagtatccgacacaagcaacaacccaatgtacccaaaatgaacccacttcttatcaggaacaagaaaatcaggaacaagaagcaacaagaagaaaatcaaaataaaacaattaattacctcagtccttcaccacaagcaacgagaagcttagtagtcttatcaggaacattttcctccactttctcgagaaaatcaggattcaaagtcgtgaaatattgtccagtccacaacccaatgtacccaaaatgaacccacttcttaatcagagtgagaacaccattgtccttgtcctcaacgaacagaggcacgtgcaccgatccagtcacgcgcgccttctctctctcccacaccggtcggatgtctaatagcacgaacccctcgtcgccgatgacggcgccggcttcgcttgggcgtacggtccgtacagtccctgatcgtatgagctctctggcattggtcttggacgcaagggcgtggactcggaccgttcgggtgacccgtttggtgtgggaaagagcgggtttcggatgctgtgacgacgtcgttttgggggtcaaagtggaagcgttgcacagttggtttgttaactgacctgacatgtttctctctctttctcttttctcttcaatggtttggtgtttcttatcctgaattgattttgtatttttcccacttgcatttactacttatataagtgagatgaggtttttgtatacgacatgtcgtttatgaaaaagtggtttttttagctaaaagagtaatgctagtagtatactaggtagagtatttttgtaatttgttattgtggaatgtaatatagttagcagtaatttgcggcataaatacttaagtttaactttcagttgcaaataaatatctaagtttaattttttgcggtaataatacataagttatatttctaaaactctgtaggtacctaaccgttaaatattaagccattaaatccacgtgtcattttcttattggaatatttgaactatttttttttaaataatgaaaatttaatga

SEQ ID NO: 302585 - DNA, 3658 bp, Cannabis indica
agttatggaactccggagagctttgtgcgctttgtgctttgtgcggtatagcctaatttttgtaaattatatatatatacattgtatttattgagtgatataatttaagatataatattttgatatatgtgttataaataaagtaatagtattgaaattaaaaacataattttctatttttaaagtacatagaaagataacgattttgtgacaaatattaaatggtagaattactaaaaccagaagtaagaaaaatggtggtcctaccaacacttataattcttcggggctcttgtaaaattcaaccgcacatttggctggtagaggctatgtaattttaaaaacaataagattttaattttattcaatgagaaaaaaggaaaatacttaatttgaaatcaatgaggcttcaaactcaaatttttagacattcgattcaaaacaaatattttatgagaagaaaggaacaaagggagaaaggagaagaacaaaggggaaaatgaaaaagagacgattgaaaagagagtggaaagagagcacgacgtcatatgactcatattatgtatatttttttatcgacacaactaatagaatttttttttgttttattctgacctaattgacataatttttttttacagaaacacaaaaagtgttttttagtgcgggaagccacactgtaagggagctccctgattggtcacgagcaaccactcgcatacctccccaatggggcacgaaattcatttgtgtcacactatagacctttgtataatttatattagaaactaaaattgtgtttatgtatttaataaaatgtataactaaatgtaagtaaattattatatatattgtaataaagttatataatgtatataaaactataaattttctttaacaaaaatgcatggtacaagagaagtaaaagaaaggggttccaaaatttagttgtttcatcacaaaattggcttttacatttgaatacttaataaataattaagaaatgttaaagggcatttatgatacttagtaattaatacatttataaagtataatattattattaatataatttaatatcgataaaatgatactttatcatagtattaagtactgtaaatcttttatatcaatgctctaaataataagtccactacatgactaagtgtaagttatttacaaactttacaaatgggtttgactattgctactatcatcaaataacaataatatatataaaaaaatgtatttaaagtagcgccggaaataataataattaaactaagttaatgcaaatgacggaagtataaatgtaactagttaggtgcaaagcaccaaactttatttttgaactttgtaccaataactttgttaaatttcttgacaaataatgtaaatcatttttaaagttggagtaaatgtcatttcagaccaccatgtattttgtaaaaattatcgattgaaccctttattttattaaatgataaaataaaacttgtattttctaaaatggtaaaataggaccctgagtttaattttcgacaacttttttttaatataattaatttgaagacaattcttaacaacaaatacaaaaaatataaacaattttctcataacacctttagatcatattattaataaatttttttttgataaaaaaattagttcaatgtcctatttatattattttaaaaaatatacagtcaattttgtcatttaacaaaatagaaggttcaattgatcatttttgcaaaatacagggtccaaaatagtatttatcatttttaatatttttttagttcttttctgactagaaaagaataaggtttttctttataaatttaatcacactaaatataaagtttattcaatcatcaaaactgtatcataaaattaatattttgtttttgatattagaggagagagattcaaacttcgaattttctttttgttttttgtaagaagaagtgtaaaactactaacttatatctacggccacatcataaaattaatacttggaagctagaaaaatgatcatttttaaaagttaaatgcataaaatcacatatcaaaaggataattgcacaaaatcaaaatagtaaacatgtcttgataccattcacatatttgcaaaatggaaaaaggaaaactcagttggttacattcgtatttatcatcagaattgttagtttttctagaaggaactaatatagtatattgggctagaataaatactaaaattaatttgtttacttctaagttctaacattgaatgagagcataaataattgaatcatatatagatatgcgcctaccttatctattgcaataatatatagtaactacatgagttattatgatccttcactaaatattgataattagagtgttgtggatattgtcccacatagaacaaatggtagagaattgagctatatataagaacatgggctactccactcattgccaattgattttgagatagaaccccatgattctcatcatagagttcagtacatccttcgtatttaatgctgaaagaaatatttaattatatactctcaatcaaagagtgaattttatgtctatagagcaaatttccaaccaagggggaagctacaaccatggccccaacatatttatgtatccttactatacatatcatgatccgaactctaagtcgtggcagttatataatatccataatttggatggttaaagattacattttgacccttacaataaaataagacttacaaataattcattaatatatattacaaaattacataagacttataattaaaataatagagtaactcctataataataatagaaaatagttgtaataaaataaatttactctttagtatatacgtacaataataatatttccacaattttgtagtcaccgaatagttagaattaataaactgaaaaataccaagataatacttatagcatctatcatatttctcatccctaactggtcatgtctatataaatgatccagaccatctgttaataattagatacatatccaatatttaaagaagagttaattaataattaaagtaggactaagctaatctcatcgttctccattaacgactttcccacatccataggtatccaactgagttcctagaagagaaatataaggggtgagcttataaatctcagtaggaagacaatcattatcaaaggaccagtagtttaataaaagttcatacatggttagctctttaaaaacaaaatatctcatcatcatgtataaacaaagtagagagaccacacccgtgcatatcacactgtccactaaacccctagctctcaataccaatcataaaaaatgacaccataaactgggaagtcgcacttgataactgccatattacgggggctcagagtcaagtcacttcctatacaaattttaggtctcacctacaggtgagtgcacaactgatctacctatgatgacacagagactaggtcgtgaaataataatatgcacaaaatcatgatcaatatggctctcatcagatttcagtataaccaaaattaggcaaacaagaatgacaaaaaagcatattccctttttactttagaaaattcggcagcataacagttgtaatttgaataaatttaaaaatc

SEQ ID NO: 302586 - DNA, 2550 bp, Cannabis indica
cgtatatacaactgacatttgcaaaaacacggtttttcaaagtaaaagagatgaatggtttttacgtgattcggacattgattatccttagtctacaagttagtgtattggccttttagacttttgaatgtatcacaaacgagttttacaataaggaaccctaatcctggctataaggtagtttcttttggtttcccttagagaaggagaaagcttagggtagagctagcagaacttcggctaaaatttcatccccttgcataaaggggtagtagggtttatataggctacagtttgggtccaaacatacctatgacccattcaaatttttattgtaaaagcaagcccgctaatagagtaaaatacacaaatacatgactatgaagcctactaagaatatccaagctgtggggcgacggttccgtactaatgaggggaccatttgttgcaggacacgtgttgcacaagtgtcacgtttggtagataaaggtatcagcggagccgtcgggcaaaaagggtgtaggcaaacgtagtggtggcgcacgcactaccatgatctaacacagggaataatatctgatccagtgttagagaggtgaacacgtctgttaaggggagatattcgcctctcgtcttgcggtagacgtccggtactcccatgcggtagacattcgactcctagtccgtgtttggcttccgagagtcatcttgtggtaggcgtccaagagcatctcacatggtttgcctctaggtgtgctcttatcctcattccaaagtctctgttccttctgtatcccaaaagactaggagaacttccaggtcttggaagaatgctatgaatgctatgtctcggaggtgaagctcttaatcttcacttggcttgggctcattccaatttgggcttgggcttaaataagagggaaggcttaggcacatttttagatagtgattacctttcggttatgccacgtgctgtcttccggaaacacagttagtatttacccccaagcttttgagacttaagagtggcgaaagcttgcagtcttccttccgggcgaccttggagtcatcgggcatgtggacaattctaaaagtagtgaaagcatttttttttctctttctgacactcgttagttgaagagtcaagagttagtgtggagaacaaccagcatcacatgtgtgtctccacttcttggattcgtgaatgccacgcgctttgggaaggcgctttttgtgtaaaacgatggaacgatgaccatttaatgttagtgtgggccccgcagtgagcattaatgttgaaaaaatacctcgatttctataaaggcattaaatgccatcctctcagttccctatccgttggatcgcatgatgtgctttttctagggagatcttagcccttaatttcaaagcacgtggattgctacttttgctatatatggtgcgagggaatcactttcaccatttttgcatttttaaatttttgagctttcatcttcgaaagcgaacaaaaactttcttttgcctatatatgtaaataaggattttatttttgcttaaacttataaaaaatacacaatacaataaagataaaatatcataataatatgacaataaattaaatgatatttttcctaaaaaagaccaaacaaataaaaagatgcaaaaaaaatgaaactaacattactaactttgattaattccccatatatcactcccaagcataccagtgcttgtcccttaattttctattccatgacagctagtgcactctaaatacaatctttatggtgatcattatgctatatcaaccaatatgaatttcatatacaagtcaataaagggtctttccagcaaattaaaattaaaaagaaaaaaaataatggaaatccataatggttctaaaataattaaaaaccataagataagcatatatgtgtagtgtgacgttgtctgtgtagcttttagttttgttctcattcattgtgtggattgagtgaattagttggatggtcagatagttggagataattatctaccttccattgcttgcaaaatacactaataaatatatatagccaagccatcttcctaatactgtatggaacttattttagggtcaaaatataatgcttatcatactattacttactatagttagagatgttgattgaaaaacaatattactagctaaattatatatgtgatctttctataagataattaaggcacgtacctactaaatgtggaatgcgttatctttttttacttatttattttttagagtaaataagaattttattttatttttctaatatagcactaatgtgactctaatttggaacagttttagtgtttagacaaaaaatacatgcatagatagaaatataacgataaattttaggaatattactagtatctatatttttagagctaatattgtataagttgaatttcagctaacaatctcctgctttgagtccggtctgtttggttcctggctggttttttttttttttttgacttctttcgtgtgtcccatcttgtgtctcc

SEQ ID NO: 302587 - DNA, 2686 bp, Cannabis indica
atacttgtgagtagatctaacatcctggtaaaataaattccaacacataatccatttgctattcagtatgattttgactggtgaacagttgagtgaagtattgtccaatagttgtcaaaatactttcaatatcggtgacaattgagccattagtgtgtgtaagtgagtgaatttttttcttggcgcgactcgaggaagcaaacagatgaaagtaacgagtattttggtcaccgagtttggtccagctgattcgagagcgctgctaccaatactcttcttctttatagagaagcctatcaagatccccttaaagttagcgacagagaagaagctcgaaattggaaggttgggaatgactttaggcagcctgaagctgagattgaactttctaaattttttgagggaggggaggcccagttaatttctgccattgtgagagagtgagggcgctatgttgaagcttgttggaaagattggagatatgatcgtggccacaggattcatgagtagggacccacgcctaatgaaggcaatcctcaataccattctccgcaagccattttttatcaaaatggaatcgttgcttagggggtcgtaagtgacccacatcctggtgaagggaaaggattaaagtttggtgatcagatccaaaataaatctccatggaggaggtgcacgttgggaaaagaggaagtccacatgaggttcgagatgccccaatccaatctttcttggatatgggtgtgatgagagtgtttgttggtctaggtgtaggggctgtcgtgaccatgaatggggtgaagagtgaacgtatataagaatttcttgaaaaagagaaaaggttgtttattaatagcacccccaattttgtcagcatgtgagagaaagtcgttaaaatcaccattaaaagccaaggcgtagtataaatagtattgccaaggcgatgaagtaattaacatgtgttagtacggttattgtggtgcagagccccatagaagccagtgaaagtgaatggacaataattaggataccgaatgtaacagtgaaagtggcttatattataagaaagtagggttacatcaacatcctgagtccataataaaaggaggccgctactacggtcgacccgggggactttaagaccattaacaaagccaagattagatctaaacttattaatagcaccaacagggagtttattctccataatgtacaaaatggttggtttaaattactgaactaaaagggagagtacactctttactccctaatccacgagcatttcaactaatgagagtcatggctcctggcggatgcactgagcaacacctgcctcatcggggttgctttcatccaaggattttgcgagactacaattgcgcttaagaagcttcctaaactcggcttcattgatgtttggtgcaaaagatgctccaagagaaaattacagcgattcagaagtcattaaatcagcaagtatagtggagaaggctcaggaaactgagacagtgtgccagtttgatccttttgtgacagaggtgatcgacctagtaaatggtgtagaaaagtttggcaaagggacattaagttgctcaatagttgtgacgtcggatagggtggtggaggagatttagggatctacagggtagtagtctctactggtgcaccagcttctattctgggtgaattgatgggcgtcagagtgggtctcattaagtgaaagattggtgggaagcatgagggagcaaggtgttgtgtgtggggatgctaaaagtgggattccatcctatcgcaaaagatggaatatgagaagccgtaggaacagataaggagcctgaagtgtttgaaggtcccgccacgaaaaggccagctgaagcagtacgggcttgactgaactgttgaatgtcataatccgatgttagggcattggaaggatgagttggcatggcctgtccttggggcaagcggacaaggtcatgagcagacattaggtgaggctggcctatgtagggtcaaagtcttgtgcgcgtattggcaatataaaaagggttggaggttatgtgaactttagcccagagggtgtgatcgtaacggagcatgagggtacagatgacgagtcacttaattaggcaagaaactcggcacaatgattcacaatatggcttagtcgaccgtaataatggcaaaagtcaaggaggttttcatattgaaattcaagccaaacaggggcagccatattggtgaagtgaaaaccggttccacaggggaggggtttgttgggttttgtgttgttaggctatttttagcctttgttttgggtcactttttatagttgttttccttctttgttattctttttggaatataattatgcttgttttctttggtttcaggtttcacacttggaatgtataaattgatcaaatttcggagaacaacaatctatagaatagagaaaattctgcaagaaaataaagctgaaacttcaagcttaaatttaataatgttataatcagattttggaaaaagtaaaaacataaaagttttagatttctttttcttctttccaacgcatcttgaatcaactcatttggagtttgtatgtgaaagttatgcacattttattaaaagatgctgaagttgtcaaattttgcttcagtagtcgcgaccaccactttccatggtc

SEQ ID NO: 302588 - DNA, 1218 bp, Cannabis indica
aaaaaaactaattacaatattaaaattatatctatgctaattaggaatttttctcccgaactttaattgacatgtaccaaatcatgtccatgaacttttaaggtcgttaaaaatgcccctctaaactattaagattattgaatttaaggacttttatccaatcttagtaaaaaaattctaacatggataaaagttcaggggacatgatttagtacatgtcaaagttcgaaaggcatgatttaatagatattaaagtctggagagcatggtttagtacataaataatcactgaaatagtaaaattgaataaaattagacaaaagtctttaaatctaataatctcaatagttctataaaaatttttaactaccttaaaagttcgggaggaaaaatcataattagtcttatatatatacctcgaatgaaatgcctttggcaacaatgttgtccgggaaggaggagaatgtagcactttcatctgttttttcatggtcgttaaatgtgataactgtctcatcacgaccgttaattccttcaagataaatatatggtttctcacgaggaatatttaccttttctctgtaaattattaattaactaattacttaatttagattatacatatataactaattagtatactatatatacatataggaattaagtaccaatattggcaccaatatcttaaaacataacattcaaatattaaatcattgagtttgaacaaaaacatgtgtatatgtatagtatcaattattattttaaaaaaatatttaataaagtcaaaaacatgttaatagtaagtaatggtatatagtagtagagtagtaggtaggtacgtgtatgtggctggagaaatttggatctttatccattgagtgtttccagaaggaatggaatcaatggctgcttgaatagtgttgaaattcccagaacccttcttgttaacagtgatgatcttcgatattgttactacttttgaagaataatctcttaataaacttcgatgttcatgactcaaactactcacaacatcaatattcactactactacaagtaataatactaaaccaaaattattaattatatataatattagagctgggagataaagctgcattttcatttgaaccaattaataaatctaataataataatcactatatatatagatacttagagagagagagagagagagtactatatatatatggt

SEQ ID NO: 302589 - DNA, 3232 bp, Cannabis indica
gcccaatacttacatcttggcaacatggtagtgcaattgtgtgggagcattaatcatagatatggaatctatagcttctattattgtttagaagtgaaacgatagtttctttagagcttggcttaacaaaataaatggaagagctcttatttcagtaattatattagtttactgaaatatcatttataagtagctaattattttaaggataaaatacattcaaatgtaaatgggaaatttgtccctactcgatgtaaatcatctatactggatctttgattgtttgggttgtaaaattggataatttatagcgtatctattcttggtgaatagaacattttatgtaatcaagagtgcaattccgaatctattgtggagttgggaggaattaataagataaaaaatttactcggtaaattctagaattacttgtcgagagtttgattatataggcccatggtccccacaatattctagataatattgtcttgtagactccattaattgattttattaatcgattagaggttttagggtttgtttataaattaatagactatgaaaagtctaattaataaatttgataattaattataattattaaatagataaaattgacatttattaacttagaatgaaaaattattattttaaaaaggaagataagttttaataaattggcaaaattgaaaccgatgggcccatatgagtatttcggccaacaagggtttaataaagccatttttatccattttttattccattttaaattctaaacataacctgaaagttacaatataaaaaaatatgtttgctcttatttttcataacacttttgactcactttgtcagacaaatagaaaatcaaagagacctttcatatattttgaattctcttcttcttcttcttaaaatttttgaaccttgagtgattgagtaattgcccatacatttcaaggaaatactcaagatagtgtggaagactatgtagtctttttgttacctgaaggagaatctaggttcaggtcttgatcatactctacaatagaaaggatctagggttagagatctgaacaaaatgagtcatattattttgttgccatcaatgtaagtttttgataaattttatatgtttaattcattgtttttaagaaatttatatttaggatgttagattataaaatagtaatctaatgtacatgttagtaaatccagatcttggtaaaatatttccaatatatctgtggtaatacacgtgtttccctcacggtccaataagactatctccataaaaaaaaaatacaacccagcttgtacgtgtcttttggaatctcccaagctagaaacttatttggaagtagctccgtcttcgcattatctgaccggttgaaataacagtttatcaaccggtccgacctcgagtaggtatttttctcctcatctattggcccctgtgtgaagttgaggcctataagcagtgcaaacttaacaatgccaaatttcatctcattctgtccaatgtaaaactgcatttcttctgctttctcaacatcaatgttccttttatgaagcatcagttggtgaaatgatactgaaaaaaattatcgaggaccaacctgacaaaattgaccgaaagggctttcctccaccctatcattcaaaccgtatttatcaaataccaatttaattattttcttgaatatatataccacttccttgataggtcacatgacctgtaaaatgctcaaagaatgaaactataaactttagaggcatctacaaaaaaaaaaaaaagtcagcaaacctatcgataaacaaccaacaaactatccataaacaatcaataactacttaatctaaaaaataattaagacaaacgcattactaacgacaaaatataaatataatatcatcaaactatcaaaaaataaccatattgacaaataatctaggcaaactacaaaccattgataaaccatagatattgtatcgacaaattcaaaattccttttaaattaaaacacaagaaaaattatcgataacccatagataaactgttaataacctatcgacaaaatcaaaacataagcaaatttatcaacaaaattatcgacaagccatagataaagtgtcgatatacaattgaaaaattcaaagttctttaacaaacaaaacctaatcaaaattatcagtaacttttccacaaaatgtcgatatcctattgacaaacatttaaaaaaaattgaaatattagttgaaaggcacaatcctaaccaaaaccatcgacaaacaatagatatcctattgataacctatcccaaacatcaaaatattaaaaagcaatgggtaagctaaaactatcaactgcccccttgatcataatcgatatcttatcgataacactgtaaaaatagaagaccaccataaacaagccacaaaatctacaaaattaaactaatcttaagaacatatacaaatcaacaatttaatctatgaaaactctaaattttattcaagaaaatttataattcgactctgttgagggattttcattgttcgtggtggtgtgatctccatctcgcctatttcttggtgatggtggtgttgttcaacactgcaaatggtggtggtgttgatttttaaacttttatacagagaaaagagcaccaatgaagggttttgagtggggacgatggttgggtgagagaagccgaggaggagttcgagtttggtttttggttgagcgagagaagtcttggttgggttttggaagtttgggttttaaacaacaattttggcagtagtggtaggtggcgaggtacgttggtggaggagagagaagccgagggaggaagagagaagagagaaagtcagtttttcggtaaaagggtatttttggtatcaaataaaattaaagtcatcaattggtaccaattaacttagggtctaaagtttgataatagaccaattttaaagtatgattaacaaaaattccctatatttttccaactcatgcatagatgataaaatgatattcgaatattacgaatgtttttcttttcaaagtaagtaatgaaataaataaatatggttatataggagggtaaatttgactaattatggattcattcgaccaaaattgttcccttaaatgtaagctattcaatattggtaaaataagttatttttttctaaaatctcatcgtagccctcccatttgaacaatcctctc

SEQ ID NO: 302590 - DNA, 1820 bp, Cannabis indica
tgagtctaggtctaggtttgggttcgaggtccgatctagtttcgggtattgatccatgatttgaggccgaacctagggtctagggttcgagttagggtccgggtgggggtccaggtttggagttcaagatttgagatttggggtctgggtctgggtccaagttcgggttcggggtccggtccgattccaggtactgatccatgatttggggccagttgtagggtccaaggtctgggtcagggttaggattctggtctgggttgaggtccaattcagggtccagggtcgtggttggggttggggttggggtccaggtctgatctggggtttgggtccgggttcatgttcagggtccaagtctagagtccgagtttgggtccgggttcaggtctgggttcaggtccgggttcaagtctaaagtccaggtttgagtttgggttcggtatctaggttcggggtttgagtccagggtcttggtctgggttcgggtctgagttcggctccgcgtctgggttcaggttcgggtttgaagtccaggtctaaggtctggggctagggttgacccttaaaccctttgcaaatattataatacaagctaatgcaagtcatttgttatgtattaaataatacgattcacattgtattaaaatttatggtcataatcaataatacaatacaataatgaaaaaataattttcttctagctgaaaataaaaagatggaaaaaagtctcattaattgttagtctaatttttctcataaaaggaatattggtgatacaaattcatgaagtgtatctttttttagtttgatgaatttaaaatcataatcatcaaagtttttgaatcttaaaaaaaaaattgttgaatagttattttaaggataggttatatttttaaaaattaccaaatatatttatgtatttttttaacgagtaatttgcggttaaatcctctcaattattatttaacttgcacttaattttccaatctcaaattttggtggcaaaaccctccaaattgctaaactgttagcaaatttaaggtgtcatctatttatctcagttaactgttaacatggattgcctacgtgtacatcatgtacacgaggcatatttatattggtctacttaatataattatttaaaaattataaaaaaaaaaaataggattaaaaaatattttcaaattaaaaaatcctataattaaaaaataaaaaaataccattaacaatttattttattttctctctcacactaatttttttctcaatgaatttatttttatggtctcccagtcgtgcctcctctctccttaaggctaaggagtcgttgtcatcggttggccgtgcatctggcatccatggctgtcgtcagagtttggttgtgcatttatagtctcgtcgaaatgcgcaggtcgtagatgatttccctcaaacggtctttgtgtttggggttgtggagatctcaaatctgagatctttgtcgtctatcgaagacattttggtggctgctagtgtgtgtctgattcatgaggggaagtatttgtactcgacggagtgggtcgagttatagagaatctctggttggtgggctttgagctcggtgggtgaccttgcttgtcggtttcaactcctcttgtcgttttgatataaacatggtggtgcatgagaaactcaaatctagaaaggaaagctcaaatttgtggatgttgatgcttgtgttttagatttctgatatttgtgtttgatcttttgtgaaaatttttagatttttttttttttttgtgcttctaatttaaattataatatatatttttttg

SEQ ID NO: 302591 - DNA, 3007 bp, Cannabis indica
tatgttacagaactagttatatttcaattataacatgtttgaattattttgtgttatttgtttttatttattatgttatagaacaagttctatttttgtttatatctgagacatctacttctggtgacttttctagttaatttttctggcgacggtgacttttttggcgacagtgacttttctagtaccggtgacttttctagcaacagtgacttttctagcaaaacttgttattgttttataaatatgagatttctatctttttttacaaaaatatagcataaaagatcccagataaatgtaaaaaaaaaatgcataatctataatattatttatttataccataaaaatataaattctaataatattccatataatttctactttttcttttcattattttgtgtaatttcaccttatttgtctggtacttcttttgtggatattgtaatagccaaaaatatggtccaaagaaaggctgaaaatgttgcctaatgtggcggagtagctgcaatgcacacaacccactaaaaccaagttagtaattagtaatcctagagaaatagggccgtgaacgaattgggccagggtccacttaccaagatccaacaatgggctctgtatttgtgtcggtcgactatcattgtgcgcccggctcgaaactaatattccaagaaatttactatataaattaaaaattttagttttacagaattttttatatatttctataattttttataaaaatagcataaaaataacaaaaaaaattaaataaaagtaacatgaaaataacatctaaataatattaaaataataataaaaaataacatacaaataacaataaattaataagtgtacaatataaaataccgtattttctataaataaaattaaaaaaattataaaattatttaaaatactgtgaaattatatttttataattttttatttttgtatatttataaaataatccctataaattattacctaattgactagtccaatcgatctcaccagcagaatcatatatatacatacatactatcaatcacttttctcatttttcttctcgaacattctggttctaattttggcctatcccaacttgttaggagggaccgcccaccgatggagaagataatatgttttctcttcatttattggcgaaaaaaattatgacaaggatggcgttgttctacttccttttatttatatatctatgtggcttgatatgtatacggtcacaatatcatctctcctaataaataactaccatacatacacatcttatgttaggccttatattaccagaaaagtttgtatatttgtaaatatatatttatataaatacagtggtgaagtcattcaaagtagtactagtagcgatgttactgtttttgtctcttctcataataaagattttctatacttcttatcccattagtaaactgtattattagatagtgaactgtatattagattgggaattattaataatatgccatatactgtaatatgtaatatgtaaaataaaacttttcgaaataaaatgaaaccttttagtcacagtaacttcacgattaatgtagaatctccttagatgctacaagctagctagtgttaaagtacttactactagataatgagcatgttattattaaaaataatcaatacaaactcatgctgatattatttgagattaaatatttaattttagatcattgatataataatatacatatacttttaatcttaaccttaatctccaataatcatattaattacacttctttgatacacacatggagaaaaggggagcttgggtgtagtgaaaattattcttctattctctctatacaatatagccacactcattttactttaatcaccaatcaagagcataaccattttttaggaggaattatgggccaattgagtctatatgcccaatgaaagagaattagttgtcttggtctaagagactaaaaacgttttagaatgtgtccataggctccagacgtgttagtatgttttgtctatttcattctggcttagtagtaatataatgtattgtcgattatataattatcattatatgttaatactgattctgagtgagcaacacttaattatattaatccacataaaatattataataacaagtttctatgtattcgacttccatgttggaatctataatactgatttgtttaataattctcttacactacaaatttttttacttttagtacaacaaaaattgtgactgaaagtaacatagttgtaactaattatacactactacaaaatagacttttgatgttggttcaagggactttttttttttttacaaaaaaaaaccgacactgaaaactaccctaactctttggtatcggtttataactgacacctataatgactttaagtgtcagttagtagaccggcactaaaagtataacctagaccaaaaagagtttaaaaaaatatacatgcagattgcgtataagtatcagttcataaccgagactaaaagatcttttggtttcggttataaactgacacttataaggcattaatttaaaacaaaaagccaaactaaaaaacccatttccaaaccctaccctaatgatataaaaacaaaatttaaagggaaacttacaaaaatactagaatttgggttaacttttacaaaaatactgtcacacggaaatctttttaaaaatactgtgtttttataaaacaccagtaaaacacaaagcagaacaacttaaaacaacagtagaacaccagtaaaacactagtagaacactagtgaaaacttaacacagtatactgcagtatgaaacttataaataaaaaagtaaaaaataccacctggcagtatttttgtaaaaaaatgacaaaaattagtatatcatgtaaatttcccaatttaaaacctacccacatctcaaactactcagcctccctctctccccccccgtcctctctctctctctctct

SEQ ID NO: 302592 - DNA, 918 bp, Cannabis indica
agtatttttataagttttccttttttaaacgaagcccgtgaacctatttagagtgaggttcaacccatgttcaatcttaatttacaaatctagaataggatgactaacacatattcaatgagatgacttatacatattggatagaatgaataatacatatatgatgaggtgacttaaacattcttagtgggataacttacactcagatgagataactaacacatcttagattagaatgcttacttccaagatgaaatacttataatatgtccaagatagaagatttacgtatcttatatgagatggatgagatgggtatagaatatgaacacttaagagagaataaataacacatgtcaaagtaagacattataatattgacacaaagtaaaacaaaaaacaaaaaaagaagagggagcaccagagaaagtcaaggttttcgtttgaaaggagaaaacaaaaataaacatgaagtaaaaagttctaagagttaggttgttcgcccactaaagcagtacgtaagctaagttcaaaacatcataagacagttcggtccaaatctagcatgggcgctagagcattcaaaagacattttcctaatacaaaaagattgtgagggaaggcacctcagatgtaccagttaccatgcccacaataaaacgctaagtagccgaatgcgaaacacataacaactaaaagcatctaaagtagtaagcctaccccaaccttttagagtattttgtcaaaacaacctttataaaaaattttatcaacaaaataacttttaaaaaattattagcaaaataaccttatatagttgcgaaaaacgaacatgaattacacagtgtaactgtaacgtccccgcttcaagctttcattgggcccttacacccacggaatgaatgactcttatacacg

SEQ ID NO: 302593 - DNA, 6554 bp, Cannabis indica
tttagtaaggaaagtctaacattgatgaaagttcaggaaacttaatttaatacatatcaaagtttgagcagcatgatttagtagctatcaaagtctagggagcatgatttagtacatggacaattacaaaattagtaaagttgaatgaaattagacaaatatccttaaatctaacaatctcaatagttcaggtagatttttaacggctaaaaaagtttaggagacatgatttagttcagaaacaaaaattctaattagccttagcaaaaagtcaaatcaattaaaagtcaagatgataacaccattgttatagacataacaacattgctaatgaaaataaaataattcatgataagcttattgttgattggagcctcggataaactaatcgttatcataagactagtggtttgtatgtgaatgaagctactaatgatagtatgtcggttatgaaacacaaacaagtgggagaagcctcgtggtggtgtcattaaaattaattgtgatgttgcgttggacattcctaatgataaaactgggtgtgattcaatcctttattgtcttaagattgctaataatgtgactcacttcttaacaaaactagctcttttacttttgtttggtaacctgactacttcagtggtattaatatctctttacagactgatttttattgattaattgtattgtctcaacattcttttttttcaagaaatttctcctgtttactcaagagatcttaatgaagctaattttctcaaatatatatacatacacacattttttttttaaacaataacataatttaaaaacaaaaattgatttcaaaaatcaatagacattacattattccaaaaattactcaagtgacatggaacgaaacgaaatgacacgtggcgttaaatggaaggctagtcggcacacaacaaatttggaaggtagaaggctagacggattaactagaagacaggaaagtgtaacgtactatgttagaactgtcgaatcagctgggacaattcatcattgatgacaaccaagcgtccaagtagttagagtgaaccgaccaatgaggattaagttgattccttttaaagaacgtcaaaaaggaaacatcttggtcagaccatccgactagaaaaatagtggactcattctagatatgcgatattaactccataatccctaaagactatgtcattataggtacctagaatcgtgggattgacagagtaatcagcctttaatgaatattttgtaattaaattatttattcacttgtaaccctaaaaatagtacctcatttcactatttatgagagatttttgacactcggagagagctattacgctgcacaaactatcatttgcaatcctttggagaatattaagaaacccacttgactctggttcttgtggtctcgatattccaatgagaaatactaagaaagaggagtagattattaccatataattggggttgaacctctataaaattcttgtgtcatttatttacttatcttaatctcatattcaaacactttcgttgtcataacattaaatctgcgttgttgttgttgactaaaaataggatcaatattttagggctttcattaagagttgaactcaagataatacactagtattctatcattttcaaattatttatttgaaacaatggtgcaaaccaaaagagcatcatccactgaaccacgtgacccaatggtcgctgatccaaatatcaaggtgcctgccaacaccaatgtggacaaccctcacaataatgctctagtaggaacaggggtcagtgactcaatttaggagcaggggttagaaactttgttgggttcaccattgatatccatgggtttaccccagacaagcaagagttaggggacaccagcaaaccatatggtggagagattgaggttagaactgccaaccgtccattggagaacacaatgtcaaaatctctgagaagctttggggcaggtccaaaatcacacaaacaacctccatcacgaccacgaggaaactcacgccaccatgaatcaggccttcgaccaacaacgacgtgagtttcaagaatggatggattccaacacccaagaaatgagggctcaataggaggaaatcaatcgtcgggtaagataagatatcgaactcatcaaacagtttccgcaatagactgagggtaacaaactaacgttcagcctcctagggaaaacagtaatagggtaaaggctccgcttatggcccgaaagaatgtccccttaatcaatagacgattggccaaacatgtcagagggctaattcaaatggccaacaaaggccgcccatatatgaacaagtcttgcccgaacattacctactcagcatgtcagaggctcgcggggacggatcatcctgcattagggaaatcaaggggtccaggtgtatgatcattgtcaaaacaatggccaacaatagcagtaaggtcaatgaagaaagaatgatcctgaagtctctagccaacgataatacactgataaatatgacaacgaggaaaagactcgggtgcgtgatgacccaaatcctagaaacaatcaccaacatggcagtcaaaataacaattttcatgctggtcaagataacaacaacaataacaggcaacttcccgccggagaataagcagataggtagaatgttggcggaatgcctcaaatagactttgtgttcaagagaatgggaccacgaccagacgattatctcatgaaagacttgaactgaatgagggagaatcgagatttaaacttttcccctccatgggaaaaccaaccgaacaaccaaggaaacttcatgccaaatgaagttctagggggacaaccggtggcacaagacagttaacagacaacctatgagaatctagggatgcaagcctaattgaatttactcacacaactaatacgaagcatgaccaacccaaaactcactgacctaaaactcaaccggagtagggcttccccattctccccaagatcaacactttggaaatccctaccaaatttaaaatgtcgacctaaatgatttacattgggaaggaagatcccctatcccacataaattatttcaaaattcaaacctacttgtaggaggtaaagggagatgcgagatgtagaattttccagcaacactgatagattccacccaatagtggtatttcaagtttccaaccaaaatatccaattcgtggaacacacttttaatttctacagccaattttccttgtctcgccaatacctactaaccttaaaggcatggtcgaagtaaaacaagtaccgagagaaccattaaaagactatatctagtgcttcatgacagaggccaccaaagtcaaatccttgattgatgaaggacgtctggccacaatgctagcaggcatagagccaaaaggaagactctgatcagacattgagcgattgactataggatccatcagagaatttttagaccaggcagattggttcataaagctcgaagaggtcgaatgaagggttgacaatgtgcacaacaccaaaccagatgtgagcaaaccaactgaaacccccacttagaataatcaaaatcactagggacaagggaataataataataacaatggcaatggaggtaagaggccaaacaatggaaatagcaacaatttcggaaatgggaagaagggaaaagttaccaacaccaatcatcctaatccttgtgagagggctcttcaattcattgccttcaccatcctcactaatactcgggaaaaagtcttcatggctactcagatggtggtaccatataggagaccccctcctatcaagaaagataaaaaaataagagggacaccactaaattttgttatttccaccaagatatgacaccgacgagtgcaacaacctgaggaaagagatcgaatttctcatccaaagaaatatttcccacctaaatcggtacgtaaagaatgaccagattcagtgaccccccaacaaagggataacgctcaaaattgtctgatgccacccctagttgatgggcatctgaatgtgatagttagaggaccctacattactggaaacactggtaaagcacgtgaaagataagctcgaacactccaatatgagaaaaaagaggaagtgttaattgtcaaagaacgaattcccaagcaaccacgtcatgatgacacatttgtgtcatttagtgacatcgatctatacacgtccattacccctccccccacaacgacccactggtcatagaaatgtaaatagcaaacatgactgtggctcgatccgtgatcgatgacggggcctcatcaaacatcctcttcaaaacaacatacaaaaagatgggcctctagctcaaagacctcgttccatgtgaatagttaatttatgattttttaggccatagtattgcacctctgggagtcatccatctctctctcactatgggaaaagtgctcactggtagcactgccatggcacaatttttggtgatttatgtaccatccgccttaaacattatgataggatgaacaacaatgtatgacttgaaggtaataacttccatttatcacctagttccccaccaaaaatgaagttgggtgtataaagggagaccagcttttggcccgccaatgctacaacatcacgctcacaaagaaaaagaaggaagacaagtttgaccaaagttaaaaggatgaacaaattgaaaacaaataagaatccgtccaaggcggggatgatgagatggatccttgctttggggaccctgatgcaaatatatggatagtagaagaattataagacatggagatagacccaaccaaaccaaccatgataatcaagatatgtcgaggtttactgacagaaataaaatctactttgatcaaatttttaagggaaaatctcaatttttttcctggtcgcacaatgacatggctaggatctatccatctataattttccacgtcctaaatattgatactcataatttcctaccagtataacaaaagaggggactacttgacaaaaaagagcctaagctcttaaagaggaagtggaaaagcttcgagctaataagttcatcatagaagcattttatccaatttgggtgctaaatttggtgttggtcccaaaacctaatggtaaattgagagtgcatagaattcaccaatttgaacaaggcatgcccgaaggattacttccagtttccaggattgaccagttggtggatgctacgaccaagcttgagatcttaagctttatggatgctaactcagaatataatcagattaagatgtatctacctgatcaggaccacacaagcttctgaacagatgttgacctatattgctacaaggttatgccattcgaactaaaaaatgttaaagctacctaccaatgcctggtcaatagaatgttcaaagatcagatcagttagaatatggaagtgtaaactctactatggttattgtagcccatgtattaacttactgttgacctttaacgataggttaattatacaaactcataatatattaaccagtaaagttttggggtaaggatacaataaatataattggcaccatgctgaacagaccttactttatccatcactgctatacctcccataccctcacttgtatatgaatttctactagagactcattgtttgtaattctttagtcagggctctttgacttatacttcctaaactacctttaaacataagtctatactctgtttaagcatttcattccatgtttgagagcaaccgaactattaataattctctttctcttttccctctaagttttccacttctaattggatgatcttcagttgtttgcaaagatgtttgctaatggagtattccgactttagaacgtccatctagaagtttcctttactagccttccagttcaagaaaatcctcaagagctaggggcatatagaggacctggatgaatgtttcaaaatcttgagaaaatacagtatgaagcttaatcccctcaagtgttcatttcgatgaggttcgggcaaattcttaaatttcatcgtaaattcccgaggaatagaggccaatccaaaaaaaaaaaaaaatacaagtccttgtgggcatgaaatcacctataaaaatcatggaagtttaaagcttaactggttagatagtcgccctcaatagattcgtgtcaaagtctactaacaaatgtgttcccttttttcaatatcctccaaggaaataagaagtttgaatggactgagaagtacaaacaatctttccaagaactaaagaaataattcgcacaacctcctttcctatcaaaacctctagatgaaaaagagttgggaatttatttggtagcgatagaatttgcagtaagtttcatcctgattagagaagaagaaggcgcccaacatcctatgtattatgtcagcaaaaggctaattgatgcaaagggctggtaccctccaattaaaaaattaacctactgtcttctgctcacatcaaggaaattactgttgggttttgtgc

SEQ ID NO: 302594 - DNA, 2828 bp, Cannabis indica
aggccagacactatgtattctacttttactagtatctttcaattgttgtacaatagcattcagattctcatctatctgctgccaaaatttcctattcctagctttccaaatgaagtacaccaaagaagtaagagtagctatcataaccctcttttagaagccaaaaaccttccttcacccaatacttttcaccaagctatccaactgggttgctgaagccttccatcccagccatgttttcatttgttgaaggcaatccatagcaaaagggcattcaaagaataagtgatcacatgtttcagcacctttatcacacaacaaacattgcacatctgcagctactttgaaccgaaacagcctttcttttgtcttcgatcttttttggattgtaagccatattacaatgctatgtttgggagtactaattctaccccaaacttccttactctacttcacttagttctcattgagacataacaacttatatccttcagcgattctatatctgctttgaatgaaagaggaaggagtagttaaagttaaaatggtacctttcaatgcaactatcttcctccaataccagctaccttgctgaggagctaaataactctaccattcagcttgtttgatgtatacactatggatccatttgacccatagattgtcctcccttgtttcaattgcccaaacgtatttaaacatcgctgccttgttccattcatcaactctcttaaagccaatatacctcctgctccttaagcttgacaaatgttttcccaagcaatttgacccggtcctgccatcaatcactgccctttccataagaatgccttacatatggcttatatgtctttgataatcttctttggaagaagcatggtttgactccagtatgtatgtatggtgagtagaaccgaattgatgaccgggaaaagaaatgtgcctggtgctccatgttctaattctgtgagtcatcttgtaaactagtataccacactcctttgaggagagtctcttagggctgatagggatacctagataagtgaatggaactacacctctctggaacctgatgcatccattatacgttgtacttcagagtctgacattccattgcagtaaatagccgatttacttggattaggctacaatcctgaagtttgtgagaacagttaagcccttgtaatagataatagatgcttttataatctccattgcagaatagaagaacatcatctgcaaaataaagtgatttagcttcagatccttgcatttatcatgaaagatgaactttggtttgtgcccaactttcttcattattctggtgaggtattccatgccaagtacaatgattaatggagacattgggtcgccttgtctcagacctctccttgcagcaaagtagccatgaagagatcaattaatcataagtgaaaatttaggcgagcgaatgcataccataatcagctgaatgaaggaattagggaagttcaaaccatgtaacatttcttcaataaagtcccactctaccgtgtcataagctttctgcaggtccaacttgattatgcagctagattttgtcagcttccttccataatgacgaacaagatcctgacaaatcaatatgttgtgggcaataaatccaccttggttttgtgataccaagttaggaagaaaataattgagccgtgagcaaagcaatttagtggctactttgtatattacattgcagcatgctattggcctgtaatccttcacagtgtttgggcatgtaagtttcggtacaagtgtaagaacagtgttgttaatttctttcaaaagcaacctgtgttaaggaaagaaattatggcttctactatctctactaataatgtcccaatttttttggaaaaggtagcttccaaaaccgtctggaccatgggctttaactcctgggattgccaacaccatcttcttaacatcttctctagtgaaaacaattgtgagaagatcagctttgtctcgtgtcaacacatttccttctcttataatcccctgcttaacattcatcctattatgcatacaagtgcgcagtaaccgcaaataataattaatgaaagcatcttttacttcatttggcttattaaccctcttcccgtcagcattggtgatagatcatgctaagataggccaccattttttctcacgagccatatattcccctaatacatgatttaccacaagctctgagtcactatagatctcaatgtattcaacacgtacctatcgagcaagccttaacccaacaatgagtgcttcatactctgcctcattgttgaaggctttaaaccaaaatttaattgcttcgtgtaagggttgtcccataggtgatatgagagcaattcttgcatcaaatagctgatcggtggttgatcagtctgcatgtaacttctagataggcttgtcttttctagtttgtcctcatagggatgattattctatttctttatttggcttgggattgtcttttgaactgtctgattctttgccagtgcatttagctacaaaatctaccaaggcttgcccttttactgctaagcggggttggtaagttatttcatattgacccaactctatatagcccattttgagtagttattgagaagcatcgaacttttcctaaatttggcgtaatgtttgacctatgtatagccaaactggatgagcttggaaatagagcctttgtaacgtccctgcttcaagcctctattgggcccttacacccacggaataatggctcttattcacgagtacgtcactctgggtgcttcatggactgatgactgacc

SEQ ID NO: 302595 - DNA, 3790 bp, Cannabis indica
agttatttctagactacttattatttctaatattaaataggaaaatattatactatgtcagcaaaggactactaggtgtagagtccatgtatcccttgattgaaaagttgaccttttgcttactagtcgcctccaaaaagctcaaaccctactttcaagaccacaccatcaaagtattgataaatcatcctctctgccaagtgcttaaaaagctggaggcatttggtaggctattgaagtgggcgatggaacttagtcaattcgacatctagtaccagttgagggtgttgataaaaggtcaagccctagctaacttcgtggtggaatgtttcgaattaagtgacctcccaaatgaaccagtcctagagttacctacctagaaagtttacgttgatggggcgtcaaatgaaaatgaagccagagaaagaatcatactgatctctctggaaggacatcaactctaaagggctctccattttaaatttcctgcctccaacaaggaagctgaacacgaagccatgctagcaggactacgattggctgaggaagttggagcccaatatatcgaagtgcataatgactcttaattggtggcgaatcaaatatttgggaaatatcaaaccaaagttgaaagaatggctgcctatgtgatgatgtttagggagttgttgcaagggtttaaaagctacaacatcagttaggtcctccaagactatttcttttgccgatatgctagcaaaactcaccatagacccagagatcatccaatatggagtggtgccagtggcccacttagaagcttcaagtattgaagcccatggggtaaatgccattgctgatcattccaacttctcgatatggcccatctaacagttcttaaatttaggggagcttctggcaaacagagtttcttcctgaaaggtccagtactaggctccccaatatgtgatactagatgggaagctttaccacaaggggttattggtgccatacctgaggtgtatagctggaaaaaagataagtgccatcatacacgaggtccacgaaggtttatgtggggaccatactttttgaccaagcttatccaaatagatcctccgttagcgttacttttagcccataatgaagaaggattgttacagtacgtctagaagtatgaatagtgccaaagatacgccaaggttccatgagtgccaccaacggaaatcatcctcatgagcaagtccatggccctttgttgtttggggaattgacttagtaggatccctccccactggaaaaggaggagtcaagtatgccatagttgctgttgaatacttgaccaaatgggtaaaggcagagcccatgaatacagttacctctaagaaggccttggactttatcattaagaacattgtgtgtcgcgtcggactaccacacaggattgtctcagacatcgagaagcaatttgatagtgatcacttcaccgacttctataaccaataaggaattgtgaggagcttctcgattgtggctagaccacaagaaaatggacaagttgaagctatgaataagattttgaaaacaacgttgaagaagaaactccaagcttgcaaagctcattagctagaagagcttccgcgagtcctctgggcatatagagcaactgagagaacttcaacggggcacacaccatatttgatggcttatgggtgtgaagcggtcctccctatagaaaccatatttccctttattagacgagacacttacgacccaacacagaaccactctttgctccaagaatcaatagattttaatgaagagctctaggaatagtcataagttcaactcaagatgtaccaaggcaagatcactaggcactttaattcaaaagtcaagagtcatacatttgacgtcagagatctcgtcttgaggagagtttttccagctttgtaagaactaggagtgggggtcttaggacctaattgggaaggaccctatgagatacaacataaagtgggaaatggaacatttcaactctacagaatggacagatcagagatccctcgcacttggaatgcagaccatttgcatcgttactaccaataggctaggggtatctaaatttaaacatccttctaaggtgtatgtaattctttgtaaaattctctttcttaatgtaaaatttgagtataatgaaatgaaaatagaagaaatttacataagaatttacatttttgtctcctacacaagctatgtttcaaacaaagtgaccaagaatttggagacgtccaaacttcctagctcacttggggggtagtatagttagctatgtgcccccaaaaacatacaatgccctgcttatttcttgtatttaatttttatttgcatttaatttcttacttttcttttattcaaactacttggttgataatatcgcttgaaatttgatacatctttaacccccttcctgaaagggggaattcctcgaagtctattgcatattcaacttggttttcacctttagtcttgaagtgggaatatcacttggattttgataagtcttcaaccctccttcctgaaagaggattcgcttgaagtctatttcatactcaacttggttcccacaaaaagcataaccaatacgttttcagccttttccctgaaaagggaacattgcctgaattctattaccgttgctttggtctattgatcatggtgaaaggtttcctacaaggagtgagataaaagaagcacgcctggaattccttcacatttctagtagctctcttatcacaagtttggaaaaaacctatcaaaatgataagccaactttgttactatagaatgaggaagcatgacctaagtgttaatacgggtcaaaccttgtctctccatgaggaactttgcttggattctatttgttgacctcaaatttgggcaaccgacagcggagtcatatttatgactaatatcaccacctgtacacaataagaacaagtaaataaaaagggacacaatattttatagaggtttgacccccttagatagcgggtaatgacctactcccattttggttgtattgatattagagataataccactcaaatcacaattattgtggattctagactggctctcttaagattacaatagtgagaatcaagaggaaaatctcaagtaggagagatgtgggagacttagtctcttctacactgttagggggcgtgtagaagagagagagagaactagagttttagaacttagagcttcagagcgtagagagcttagaagtcaaaacctagaactttagacttagagagattaggtttagtttaatgctctttatataggagagcttacaagagatggtaggtttaaaatgaggagatatcacctatttgttacaaattaaaataataaataaataacatgttaattagtccccaagaataggtaaataactggagtttatctcctatttttgtgggttgttgaagcccaatatgtagctagaagtgttgtccaggatgaaagctgtagaggcaaaaaaagtgtctgtcagggccaaagctgcccgacccttcctttgttggaggctggccggcctatgctggcaatagggctggccaaacccctcaagtttgccaatttgttatctctttatcccgcttacgtattcagactcctctccaactgatatgttgtgcatgatgacttggccttcttgctgacaagctgtactccacgtgatatcaatcttgtccacgtggatgtaacaccctaactaacataggcgtattacgtgatt

SEQ ID NO: 302596 - DNA, 4234 bp, Cannabis indica
caaaataaaaattaaaaattaagaatataatatattgcattgaacatacaaacatagtattaatctagtattaataaaatcatgaatatggttgaccaagacaactcaatgactttgcccaattcagactaatattaaagaaagataataatataaataaattgaatggtgggagtatggaacagtgttttcaaaactgagcggactaacacgtgtcgttagcacaattcttttgactcagcggagccaccgggagagaaaaaatttcgttctctacaatatttgacgaaaccaaacttctcaaatccaaaacaaattttgcattttcatttcatttaatttcatttcatttcgcagtctccttccaatccctccctccttttcttccatttccctctttccacctcacatttacgtaaatacaattttcgttcaatttaatttccgctatttctgtttctttccttctttcttttttattttaaaacattcgagacgaatcaaaaaaataaaagggaacaaggaatgatcaaggggtcgaaagcttaccgaatttcaaaccgatttttctcgctcattgtgcttcgagataaaaatttgacgtactaacgatttttcgcagatcataagtctatctgtcgtgttcgatcggcggtcggtgttgagccccgaagttggaggggaagcgatctgcggaatcggcaaggctagactattttgccaaatctgacggtctaaaaagcaaggatgccttctcacgcggatctagaccgtcagatcgaacatctgatggggtgtaagccgttgccggaggctgaggtaaagacgctctgcgatcaggcgagggcgattctggtcgaggagtggaacgttcaaccggttaagtgtccggtaactgtgtgcggtgatattcacggtcagttctacgatctcatcgagctatttcggataggcgggaatgcacctgatactaattacctttttatgggagattatgtaggtgagtcttttaatttctcactcttcatctaagaaattaatttttcttttatcatctaacttttcattttatttttgaataatttgaggaggtgttttttgattcgacgcaaatgatttgaatctgtatttggtttccccccttttttgtgtttattgattgatgaagtgagctttgtatttataatttcttttcgtacattgtttccgaattcggcatgttgattgaattgaaaaatatgcggaccatttgttgtgaatttggaggccggaatattataatatcgtttttcacttattctgtggagcaatatgttattagaattggagttgctggaaagtgaagatgaacgaatttgatcggttgtaattgaactgttttatctatcggattggttaattgttaatgtctagaaatacttaataaagaacagtaggaaaagaaaatggaagacttagcattataaagagaagtctgaaaaaaagaattttcaagttgttgggaaactgttttatttttcatttatctagcattttctctcgataggattttttttccccaaaatccatgatctaaatacatgctaaagtgttggtgagaaatatatcatatgtgtttcgttgttggtaaaacggattatggatcatgtaacacaagctgcatccattatattgacgtttcaaatcctctaacgatagtttttctcaatttaatgctgcgaacttgcagaccgcgggtactattcagtggagactgttacacttctggtggcattaaaagtcaggtacagagatagaattacaattctcagaggaaaccatgagagtcggcaaattactcaagtgtaagaaatttatttctttgttattcattcctcatagctcgttaacaatatttttttgggcgagtaatggatggaaaaaatgtgtttcagttttcctttcattaaatttggttagttacttgatgatagactctttagtttttatggatattgatgatagttgatctcagttatcccattgacatcattctaatatcctaattgatagtgcacgagtattgagaatttgaaatgatactggttcccttctctttgctcaatgtcatactttatttttggccgtcttatcaggtatggtttttatgatgaatgcttgcggaaatatgggaacgcaaatgtctggaaatattttaccgatttatttgattacctaccccttacagctcttatcgagagtcaggtttgaacttgggatacttttgttcagttaattttgtttgtacaattatacatttcttaacaatatcatctcttatgcccgtatcttagattttctgcttgcatggagggctatcaccatctttagatacattggataacattcgagctttggatcgaatacaggaggtatgtgtattaatgctcgtcttaatccaatgattggctaaatgggattgtgaacactgaattatttttcctgctgcgccttttacattgttggcgtacatctcgctgcatggttatttgtctgacatgtatgttgttgctcgagcaggttcctcatgaaggacctatgtgtgatcttttgtggtcagatccagatgaccgctgcggatggggaatatcccctcgtggtgctggttacacatttggacaggacatagctgctcaatttaaccatatgaatggactttcccttatttcaagggctcaccagcttgtgatggaaggatacaattggtgccaggtttgttaaccaaaaatgaagttgtttttcatcttatccatcattaaacattgagccttgtcaatctgtaagtattataaactttcaatggaacttttttaggagaagaatgttgtgacggtatttagtgctccaaactattgttaccgttgtgggaatatggctgccatactggagattggggagaatatggaccagaattttcttcaatttgacccagcacctcggcaaattgagccagacaacactcgcaagaccccggactattttttgtaattttcacaaaccttatccaccaactgtttgtaatccctttgttttctgctgtattactactgtagatgtgtctttaaaagaggagttaccgatgtttaagttgaaggttttaccatcaacaccattctttgtttggagtttttgtccccactgctgccttgttgataatttgctcaagaaactcttagaagaattcacagtagccaccaaatagcctgttttttgtatattgtttttgggagaggaagcggcaataacatggtttatcttgctctgtaattttgtaattccaacgtagaaagcagattcgtaaaaaaggttaagtttcaatttgactcgctgaagtggcggactacttggcagcaaattctggttcgttttactggtgtaaattgttttgggaaggagatgggctaatatgaaattgtggctgttctcaaaagaaatgcttgttgtttaattatttatttttcttttcgtgtccagatgctctgtcaatacgatttagttgtttaaaaagtgccgaatgctcctagtgtttgttgatgggtaatggagataggtaggtatttggttgcttttgtacataattaaaatttagatacggtttgtccgatttgattagctgtgggggagttatacaggtattttaagcaacgtaggctttttccaatgagttcattattttagttttcaactacaaaactgtatatttttgttttcgaaaaaaatgacacgagccccatttttgtttagcatttcacctgcgggtgatcataaaatatccaattttgcagtttggaaattttaaaatttgtatggaaatgtccttaaatttaaaaattaagttaataattgtttattttttaaaaaaattaaaaaaaaatgaccaaatataataaattagtcaataacaattataaaagtacatttattacataatattttagaaaatttatttaaaaatataaaaatgttaaaatattgctcctatacttttacaaggttcctcttacatgttttacttttatttttattttatttacactaatactttttacatatacatgatgtcattttactattattacatattatatattttctctttttctatcatttttttttaacttcatttcattttttattgtagctttttgtttgaaaatttcacccacgatcaaaattatttttgaataaaaaaaaa

SEQ ID NO: 302597 - DNA, 1804 bp, Cannabis indica
tttttatttacaaaaatatactcgtaaaactttaaaattataataatatattttacttaacaaaaaagtaaaaaataacaagaaattaacattacgacaattataaataaactataaaataactaaagaaacggtttaatgcttttattgaagtgatatttttataaataaaaaatgaaaaacataaaaatgaaaaaaaaaatcgtattcaagtatttttatattttttgttttaattttagtaaattatgtaaatttttcattaatttatcttctaatcactagagttgtagattttacactagagaatagattcattaacttacaaattttagtttcctatagaaccttcctttatcaatgttaagtaacaaaaaaaattaaaaacatattaacatttgttttgcttaaaataaacggtatcacgtgatgcagatcttttctctacccattcggtctatggcagtcccagagactacatgctagctataggagccttatacctcattctgtcttacttgaatcattggtacttacacctcatgaggattcttatcccaaacaacaagtcatccttcaagggccaaacataattcttcacaaatgaggggtctgatgagagttgaacctttgacccaagcaaaagagaatgccaataaaagcctcttaccactacaccacacaacacgtggtttaaaatatattaacattattgaactggttttgaggggtgacgcctaatacaaaattttcattattttaatttttgaatgtaaaatgtttaaaagattgggactttattatgtgtagaaaaaaaaaacattaaatggggcgttgggccttataagtggtaattcgtgttagcatattgtgttcatattgtgttgaggtcttaagtttattgaaaaactatcaacacgaatgctggcacgaacgcaacccatgacaacaaaaaatttataaaatataaacatgaacactggcacgcataaattttatgtcgtctcaaacccaaaatcttgtgtcacgtttgtattgtattggcgcgttgtaagctaaattaatatttcagtgttattgtatcatatagaattcctaaatgtatttaaacattgacacaaacaaatacgactcacataattttcgtatgtaaaatctcatatcgtatttgtgccaatccaaattgtcgtccccactgggcctcccatgtagatattgatcataaaaattccaagattgcaacgtaaactttaactactcccaaacaaaagacaattagttttgtttttttaaaaaaaaaaatatttattgccattattgcttgacataattgttgagtttcttatctcacagactcacatgtagttgggattatatccgttattgttattattagtatttaaaaacaaaatagtaataaatctgagtggaagcctagctaattaagtgaacattgatgtgaagcatgtgcataaagattaatttattagccggtattgaaagcaacccaataacctacaaaattaatactactaattaaatagtttggagaatgatgagaagaatattatgagttaggtcaaatgaagttcaactcaactaaaattatataaatatatatattatatgtttagggactattacggtaggtattgggtaaaataatcaatagggataataatttataacatttgatttaatctaatagctcaaattaactcttgaaaactacaccataattaatatatttatttatttataattaatcttgaatattattaattatagatttaagtaacaaaac

SEQ ID NO: 302598 - DNA, 1553 bp, Cannabis indica
tttaaaaaaattctttagattttgtagacatcagaatcgggctctacagtagcaaatcaggaccagatagaaaactttctaaattaaactaagatcaactaaatttagacttaaaacctgaccaaattaaaatttatttgatctgttactaataaaggacaaaactaaaatcatcaattagaaaagagaaagttaaattttccaaaatttagacaactttccataagagaattttcttctcttacaagaaatttcataaaccaaagagaccaaaattaatgtaataaaaataatttaaatactcaataaaaaatacataataattaaaacatattttgacaattaaattgccaaaaaaaaagtaacctaacacaaacaaacaaaaatatagaactttaggagaaagtaatactataacatacattattgaaaaataaacatatataataaaaactaattaaataagtagtttagacttgtgtaataactagcaaatagtcagcctcctttgagttgtcttctttgaccaaaaccccagcactgcaaagaaggactttaagctcatcaacgtctagtgcatggaattgcatagagtacattataccagaaaccacctcttcttgaaacacaccaattatctttacaaaggccaaattcagagatgggtaattcttattctcgttatgaaattcgatggcaaaacgagcaagctccttcatctttggatcactctcagatccttccacttccctcagttttcccactatatcttccattatattatcaataacttttatataaatatattaacttctttgtttttcttatttaggatcttgatcttctctctcaaagttctctatatttgtgtattgtttttgcttaattatatcaatattggacattatttatatactaattcatttatgcatgtttggtgttctattgtttcgtgcctttgttgaatgaatcacatacaaatagtcttcattattattataatgaaagtgtacggttttttactatgtagttttaagacctctgactttcatatcttttgaattgggtttatccaattgattgagttgtttaaacacatctacacatatataatatttggttgattttttcttttcttccatattatatatattgtttgtttataaaaatactaaacaaggaaaagatggcaggtactaagtattgaaactttctctttttgttgaattgagattatatatacatacacagccgcccatatgtgcttaaatacatgtacgtgtggcttgttaaactcgactagattttaatttgtatattttttgttatgataattgataaataacccaactggaattaaataaggcattgtttgaaagtaatgctgtaatggaagagaaatgaatacatatataagaatagtaatgagaatgataataggaataaaaatcgaatggaattaaattaaaattgcataattgataaaagaattaggggaattactttatatactatttttaattttttttttcaaatttacggtttgggtttct

SEQ ID NO: 302599 - DNA, 5093 bp, Cannabis indica
agtatttttgtaaatttccctattctattggaccctacgttttgtacagcccagcaaaatagagctttatgatgttgatgttttaatcagtgacctactttgaactcgaactacgaattccaaagtgaccgtactacattataaggtatagtttattcagaactcactcagaacgtacattttccttttggaatttgttaagctataagaattatcaatttgcaaacatcttggttaatacaaataaaagttacaagaagagtgatatcccaaacatagcaaaatataagcctcaaaatatgaaatcaattgtttattacacatttaaaagaagaaaaaaataaggggcgcgcccataagaacaaaattacactagccaatattccactgacaacatagctcgtctgcattttcaatcacttttttaagttttgttgttttcatcttctagcaaaatgcaaattctaggcaactatactcggagcagtatccaagtcaaaaacagtaaatatataaaatatgaagagggcttatctagcaaattaattgaacattaaatgttattttgcaaatctgaagaggtcttattcacgcatacccgtctttttccctttgtaaccacccttttgtgccttctgtcctgaagcttttgcagttccttttcctttcagaaacttaccagtcttgcccttctttggattgcccttgcctttggccttacttgctctcaagtcttttttcattcgtggatcaacaagttttttacccttgccgaccctaacttgaacacccttctttgcaaccactaattcctttttaggcctcttaggctcggccttccggtatagttgttcaatttgcttgctctttgaacgatcagatatgtctgcctgatctgaaattatgttggccttcttccgcaccttctcaagcctcttcatggcaactcgcttctttcgagccttggcctctgcaacttttttagctggccgggcatctatttctttgaaatgtgctttcatagcattaacctcttccttcgttatcggcttaatggaatggcggtgcttcctttcctcctccaaaaaccatttgggcaaaccctcatcatcaaacatgtacctattatatgcatcatcgagcatttgttccctcggttttttcatgagcatcttctttgcacaagctagaatctcagcttttgcgtcaacatcctcatctgattcatctgaagatgagtcatcacttgaatctgttactggagcaggaactatctcaaaatcatctttttccaatgattgatgttgagaatgattggatgctacagcacggtttcctaactttaccgcgtcctttacaggcaaaggaaccttcttctctggcatggtagcctgcatttcatcttcactatcaaacttttccaagtctccctcatcaacagcttcagcaaagatatcctgactaaaccacttgttcgtgatctcttcttgtgtaggcacttcaccatcatcaagtggtaccatcagaggatttccttcctgatcaccagggtcttgatctgaatcataatcacatatgacattttgattatcatcatcaccaccctgcagtccccgcccaaaaaaaaaaaaacagagccacaattactaaaacaatacacaatgagaactggctccataccacttccacactctttaacaagaagaataaatgtgccatttactttatttcttattcattaacaagtagctcttgcaaaagatgacaaaaagcattttaaagaagccactgagatcaaagaaagaacaagaatataaactccaaagaacaattactggaatgcaagaaaaggcagaaacaaaatgacacagaaaaagtcatgtgaaaatggtgactctttgtagtcatgtgagggatgtttaatcattttcaatacaatcacaagaacatacctccagaacatcatcagaatgcatttctttcgcacgcttccgctgctttgtacttccttccttcttggacatatattgttcataagcctgctcaagaaactcttccattttttcatcatatctgtcatccaaatacaaaatttaatcaggacacagcaaatgcttcaatcaatatcaggcttatcccagataagacagtagaaaaaaaccttctccgttcttcatcagaatctatatcactggatgaatcaagttgagcctcatcatgtatttcttcattgtcactatcacccaagtcaccattctgatcctcattttccatggaatctaccaccacaagatctttcttaccctgaaaaaagtacacttataaagcaccatagaacattttctagtatattcagaggaaactaaaaaaacatcaaaaagatcttctaaaaaggcaaaagcacattggaattttatattgtctagaaagatcttctagaaagaagctcgagtgcagaggaaaataaaaatccaacattaaagcataagaatatatacattaaccccacaaacctaatgtggagggaggtgtgaaaatctacaaacatcgctaatactatcaaaaccattaaccaacaatacagaatacttcaatgttgaaaaaaagaaaaatcagcaaggaaaagagtcgataacatcacataaatacatgatcactttttccaacctactaataattcaaatgaggcttatctgaatctgatttaattatttatatacatgttatttttagttttaaaaaaataaatataaatatacatgttatttatgctatttgttactatgtagtaatttataataacttcgctatacagtagaaagatcaatattatatccataacgaaaaacaagtttggagatagagcaactttttaaggtatttattgtagatgacaaacatatattgacaatacataggcatcatataaacccaaacttaagcatagtgggaaaccccaggacttagtctgtagtacagtgaaagcataccttcatagaagagagagaaaataactcatggtcaacatagccgtcatccaatgcatctatttgcatcccatttgcctttcgtgccttgtcctagattagaacaaaggcaagtagcaacaaatcatgaaaccgtgtcagttgtatttagatagaagagagagaggagagatgcatatataaaggcagaaaacttccataggaaaaacaatagacattctctttccatgataccatgtaagttggtgcagttgagagagagagattcatatatgaagacaacaaaccttggcttttctcttagcaagcagctttttcttccgcttctgcttgcggtccatggcgtttgttagctcctccatctcattgagtactttctcttcttcgtcctccttagattcatcttgagcagctatagaagcagtagcttcagtcttttctgaagaagacaactcctttctaatctgcatcctccacctatataattgaaagtggaatgtcaaaaattgagtttcagcacaagaaaatccaagtacaaatacatagagatgcacatgttgcaattagataaatacgtgctcctcctctacagtgaaaataatagcacagaccatttgaatgatatgaaaagctgcagtcagcagggtatactggcctaatgctgagcagatttgaatcaatgacaacccatcatgactctttggagccaacttcataaagaaaactaaacagaacaaacttcatgaagaagtaacaaactacccagatttaaaaagacaatttaacctggtaaagtgatcaatagattctagcttaacatatgccccaactctcccagcccaaacacaaatagaggggaaaaaacatgaaaacatgcagttatttttacaaaaaataaataaaataaaattacaaaaaaactaaagagaagaaagtatagagaaaaaagattgcacatcttacttcaacaggtgcttaaaatcttgtttccccaggacacgcagatcatcacataaaattttaacctgcccaataatgaaatttataacacttgaacaataacctctccaagggtattaaaactgctaaatgacaataataacaaagagaaaacaacaacagattaggaatatacctcttctgttgttaaagcatgaccttgaatgtgcaaagaagcctcatccttaaaacttatagaagtaacagaaccaaggatctcaagaggaatgtcagaccaaataaaatctgcagccgttgacactttcctcaaagttgtgtctccgtcttcatatctataattaaactgtgatcagcacaacagagacacttactatatatttctacttatttgaactttccaaattgtacaactgcagaacttaaattaaatgatgtttagaaacaattcttacccatcacggtgtctcttttgcttagagcctctcagtacatccactacctatgttaacaatttacaaatataagaaatacatagtttaaagaaaacagtactcctgtactaagggaaattaatgtgtaaacggaatgaagttattattattagttacttctaattagatttacctttttggggggttctatagatccctgaaataaatgtttcacatcaagaatgcgtggatcgatctttgcaggagccttatatttgaaagcaagaagatatgtctctgcagacgaggaacgacttgctgctggtttgtgaacctcaaccctttcaaacagctgcaatgattaccaggagtagattacaggcatatccaagtaaacatattagtttggatgaaagaaaaagagaacacacccttgaaaggcaatacttgacagactcgtagtcttgagatcggaagacctgatacggaaaacaaaaacatattcagcattatgctccaataaaaaattataaaatgttttgtaaaaaatcaattgtttattaattaatgttgatttaatattaattaaaaatatacaaaaagtaatatctttttctctatattttattggttggctaaagataataataaaatcataaataagaaatctagcatttcatatgatagctaaaaataaaaataaaaaaataacaat

SEQ ID NO: 302600 - DNA, 1039 bp, Cannabis indica
tatttttagtcacaatacttgttgtgacgaaaattaaactagtgacaatttataactaagtactatgttttaatcacaagtaatattttattgtgactaagagttacatttagtcacaaaaaaatatattgtgactaaaaagttttcactaaaaataacagttttttatagtgtgttattgaaacaatccaatgcacaatgaagagttgcttacagcaagtgaaaaggaatgtgaaacaaagaatccaaagtttattaattacaaagattactatagaagaaagggattggattaattctctacaaaattgtatctagattattctggccttttttaggtgatgtttaatttgtaaatttaatatttgtgagcaataaaacctttctaattcaggaaaaaaaaagaagggtattttctttcttttcatttaccaaataaaagcacttcattatttcatattaatgaataaagaaaagaactatatatatgctatattccttttcttaatttttttgaaaggtcaattgtttaatttgttgttcttgctggtaaacaatactacgacataacatgtaacctcatcatacacacgtaatacaacatacatcattattatatgtataaatatatatatataaatattcactactaactttattactaaaattaaaaatatatatatatgactaagaaaaatattgaaatgtatataatatatcacacttttgcattggcattaggtatagaatgcatctaaatcgacataatttaagtattgtacttgttatggcgaatcttattttagtttcaaaaattatgaaatacgaatattttacaatttttacattgttacaaatcgagtttgaaacaattgatttcatgcacgcattaaaaacagagtatgtgtgcaataaattgtttgaattctaataaaatatttacagcatgtttggtattattttctgttttttgttttaaaaaattgtttttagaaatgagaacaaaaaatagtttttgaagtttttaaaacacaagtca

SEQ ID NO: 302601 - DNA, 1394 bp, Cannabis indica
tgtgagtagatctaaggtcctggtaaaataatatcgaacacaaacagtctattttacaagcataaaaaataaaatagtcacgtgtgtaatacactatttgaacgtaattttcggcgtgttaaacttttccaaatttcttaaaattttacaggatgtcttaaatgactataacgtacatgaccatgagaaaaaatttcactaaaaaattatttcgggtgctaaaacaaacaagtatacatcaatgtatccattttaaggggatgcattgtagaattttttcaaaaaactataatttataatttattaattttagtcggtatgtaatattgcgattcttctccatgttccaccattacatcaatactcctattctatcaattcaggtgagaagaatttactttgttattgagtttgaatggtttatgcaagagatgagaacgatcaattcaaattgaagccacccaaataaaatcaattacgagctttccttgcaagaacgatttaggttttttgtcgctatttcccaattgagatttctctggcctagacttttcttctccaataatattgcgattttccaaacaataacatatgcgtaatgcgactgagtgaaagagcatccctaaaattgagcttccctcatgattagaagttgtgttgttaccagcaattccacaaaatcaagaagccaatcgcaaaaagttctaatcgctaagcattaaatctaacaggttcttttttttttctttcaaaaaataataataaatggaatgtgggttttcgcttattagtccttacttaaaatagtttatctttaatatctaatttcgtaatcttttccccgttttaattgcagggtgaaatatttattacttcttcatttgcacgcgtagtgttcttgaaagtcagtaaattcccccaagatgagaaggtttggaacttaatttacctcataaaagcatggaatattagcaatgaggtatgaacttaattgtaataatatattttgtaggtatgttataggcagagaattgatattagaagagttgcaggtagttagaattaattgaaacaatatattttgtaggtatatttctaccataattatctttaattttttatgaagaaagaaaatttctattaatcgaactgagccaattacatccacaagaggattcctcatcaaaagagaaacttacaagtcaattttattcatgctagacaactttctttcttctacaagattaagtttatttttgaagctctctttaaatgtactatctatacaactatgattcatacacattttcttatttatacacaaattttaatttagataaatgccataaattacacctcctaacatatttttatgaacataatataatttttat

SEQ ID NO: 302602 - DNA, 1530 bp, Cannabis indica
aaaattaaattaattataaataaattattttgtaattaaaaaattatcactaaatgtagttatttgttgttgtgacaaacaagttacctaaatagctaccaaaagaagataaaaaagaattgattaaagaatgtaaatgtttgttcttaaaattaaaaagaaaataattaatatgtaaataatattgttaaaaaatgtaattttatcactacaactaattactagttagctaatttttttaaaaggaactaggtgcttgtaaataattttataataacaacccttaataaacattttatttaaacttttgacattactattatattttatgtactttgtattttataaataaattagtggaaattacaaattttatagaaaaaaaaaaaattatactttttgtgttgaaaatatccctttttttattttatggaaaaattaaaaaaaaatataaaaacatcaagtaaaagtaaactcttatggtattcagagtgataaccagttactatagagatattaccttatattattttttccatatttttaaatttttctctataattttcctataaaatattttttttgttatatttttataaatttatactttaaaaattataaagatgaaaattacccataaaactacgctcgtatattatttattattaatacctaaaaaaatggtataaagtcatgacgaccaatttaattaaaacgacatgaataaagcccacaaaatacttcattttgaattagtgatacataaattcctacctaacaagtcaagtaattaacataaaaaatatataaagtgattaatttgctttttttttttcttcaaggaaattgattaatttgtttgttttttattatgtgaacaaaacaatacatataaattcattctcagaaaaccaatcacctttcaattacttttggttactttgctatagaggattgctattaagtataatagttcttttctaacgagtgtgtcactttgttattaattagcgatactccctcgttaagagttaatacactaaattatagagcattgctattgggcaaccagtggtgtttagcaccttctagacgtatcactttgcgattggttagcggtactccataaaaattattatatatgggactcgatacttaattggatcaatatcaatattgacacgtaagaaggtgctaggtaccagtagtgccttttagcttttctccaaattatatgggacacaatatatttaattacaccaataagtaacttttaacatttctcctttgctatatatgtatatagagaattactaaaaaaatattactggcgtctagtgttgctgaaaattatgtttatacgcaagtgtacgcaatcaagtagtatctcacgcaagtgaggtcgaaccacagggaattggattaagtactactaaactatacttatgattctattcggtaaaataataagattgcaatttgaaagtaaataactcaaaaattaaagagaaaataaacgaagattaatca

SEQ ID NO: 302603 - DNA, 3329 bp, Cannabis indica
  modified_base (3277)..(3277): a, c, t, g, unknown or other
acactatgtttagctagaattgtacttcacatttttcttcttctttctttagtggaattcatgtaaatattctatatatatataacaattttggatgtttgattttctcttgctccttgtgctcttgtattgtatgttatttcatcgcttattttaaatgaaatttcagtaattgacttcatcttggcctttatttatttttttaagaatactcattatatattagagaaaaaaaaaaaggtggcttttgcttggaggtaataaaataaaatgtaaatgaaataatttttttttccatttttttatttcgttgcattttaaagtattagaatgacatttcaatagaatgttttttccacaattttagtggaatgattattttattttgaaaaggaaggaaacactattccattttaacaagaaaaaaaatttattgatttttttatcaattttttttataagttttaaattttattaaattctatttttatttctatttttatattttcatttctcccgattaatcgctacctaagagtgaagagattattttttcaaaaaaaaaaaaagaaagaaaaaaccttttaaaatttttacagtgattaatttaataaagcaattttttcacttaaacataaaaaaataacaaatatacgattggattgaaattttataacaaatatatgagggattcttattttaatgacaataaatacaatacttgctcaaaaacaaaaattatagtgatgacattgttgttgaaccaagctctttcaaactacaaatcaacaacacaatgcttaatcctaaccaaacttccaacgattaggcagattgaataaaacaaaagaattaattaaaaaatgtcaatggatgaacaacaaaatctcttaaaaaaatctgcataaaaataggtatcaaacattagaaatacaaaaattgaaataattagaataagatctatactacataaggtgaaattattgtttcaatgttgtagatcattcaagaatagattgaaaaattgttggtcgaaactccttattaaatctaaaattaaattcaaggtattgtatttttatatgatatattaaaattaattttgatgatgcaaatacttaagttaaagttaaagttgatttattgtgaatttttagcaaaattgatttcattcatagcctactattgtgaattatcttttgatgaattgaattgtctactgctgattgttcatttaatatgtgtagtaatttgttttgatgaaataaacaatttaacgttgatttattgttaattttacaaaattggttttttttattgcctaccattgattggtaattaaattttgataataataatgtaaaaaaatagatatgattattgttgatttgctagtttaatttatgtaattaatttattttattcatctataatataatttaaattgagtttcatatattttatggtgttgatttgtagaaaaatagaatcattactagttctagttcaaagtaatggacattggagtgagaacaattaatacataggtttcaaagctactggatttgcattacacaaaattacaaatttatagaattggtggacaaactgttgcgaaaatataattgcaacaggaacacaacaaacctacaaatatagtttcaggtacaatctggatacccagtactaaagatcacggatgatgaaagctttgatttttacttgcagttaaaattaagagaaaaagacatgataaagcatcctttgtgcatgaaaaatggtccccaacacaaatccaacaacataaatatccttttttaccgaggtgggcaaaatggcaaggcaagaaatccacatgcttgaatatgaaactcaatcagggagaacaaccacacatcaatacacagaaaacacaaagaagataatgaaacattcgactttgttgactatacacaaatggttactgtagaaatgatggaaaaaataacaagacacacaattgatcaagaagaaatcaatgatgaagcattggttatcatagataaacaacatctaaaaattgaaaaagtacatatctacaaagataaagaaatattgaagagtgtcctcaactactttgcaataaaataataatttcaatacaaggtcataaaatcttacgctaaagaatttcaaattgactatttggataaaaattgcaagtggtcactaagagcgtcaaggaatggtacaacagagaatttcattgtaagaagatacaatgaagaacacacttacttactaagcattagaattggaataaaaggcaagcatatgcaaaggtgagcccggtgacttggacgaatagtacaaataagacattaagctcgggacaaaggagcataagttgtatttttcaaaatagtacaaataaaacattaagctcatcgtagttctattttttttttgcaaaggagcatatgcaaatgctcgggactttgaaacattcatccaggtcagcagataaggtctcgatggtttcctcaaagcgatcagcagcttcgaggtcctttgtcaatacggtgaccttcttctcagcggcaaaaagcttcttgttggcctcacccaactcatggcgaacagctgcagtctccgccctggcctcctcaacttccttcttggccaagtccgccttcgccctcaaggtgttggacagagccgtactcttggaagtagcagatttagcccgggagtctgataggctcttcgtatcagcacagtagcttgccgactacgatcttcgatttctgcatggtgagcccttaacgcctccatctctttgtctctccacttggcgaacatacgcctctgttcgtcaaacgtgaggtttactgcggcacgtaattcctcctgatcgtgatgcagggtattgttgtggccctgcatgagtccaagcacagcacggaggttttgcaattcggttccatctccgatggtcgtctgggcgttgatccctggtggaacagtcatgttatgaacgtcctggctatgtgcggaaccgttgtttccggtctcttacacaccaggctcagtttcagtaacaggagttgttccatcattcaccacgctcccccgtctttccaggattgacagcgggtggaaccgtcgaactccctgggtcctgcaacatcggatccagcatctgtgagttcgttgggtcgggacaagcctctacgagtttgcaccatcgtgtcgaaagagcgatctgtgattctgctctcaatgaaagcaccaaatnttgacttcgcttttgccaacgcaatgagtctttttgtatacgcgataacgat

SEQ ID NO: 302604 - DNA, 4006 bp, Cannabis indica
gtatactaaactgattttttattaaaataaaaattaaataataaacctgatctagagttattataacaaaactgagtacattttttgtatctattcgtattaaattaattatattaaaaaatatatataaaattgagtttagtatattattttatattattttaaaaaattattattttttaaaatagagaatccaattttaaaataatattaatacctttaaataatgtaattttgactattatgtgtttttttttttttttgggtgtagtatattaaactccaaaccacatgtgattgtgcttttcatgaatttatttataatatgtgatttttagtctcattaataaaaatattaggcttcctacttccatgcatttttttaattttatttttagaataatagtatatattcttttaaaatatagtgatagatctgatctgtccatgttaataataataataataataataataataattgaccaaaattaattagtacttcaatggtcaatgtttatgtgagattttttctctttctaaaaggtccttaaaaggaattattgttaaaactttcataaacaaaactatatcttatcatcttttaacaatttgcaatttaaaagttgatctaattatatcactcaaaagaaatatggcatcaaaggcaaagcccaaatctttcacattagctaatatttggattttattagattttctttactattttaggagaaatgataaattttttctgaattattatttaattttaatcataatctaattagtgtacgagtttcaaatcttacaaacaaaaattaataatgagtctcaaatatttttattaaataattaattattataaaaaatttattaatcatatataagacgctatcaaattacaaatattattggcgtttaataataataataatctgtctaaaataaatataattaattgaaaaattatcacggtcaccgtcatattattattacttttctattatatataaaatgttaattaaaatttaacatgtattaaattatgctcttatttttaaaggcagttaaatattatcttgaattattgaaattgttgaatttaaagatttttatctaattccattcaattttacttatgtggcgattgtccatgtactagatcgttctccttgaactttgatatctacaaaatcgctcctccctaactttgacatgtactaaattgtgtctgaatttccattcacgtcaaactttcattagtaaaattgaacaaaatttcttaaattcaacaatctcaatagtttaaaagaaatttctaacaacttgaaaaattcaaaaaatatgatttgatatatataaaaattcaaggtacaaaaatttaaattaatatataataaatatatagtgcatttatggatacacaaaggggtctaactagccaagcttaaattccttttcactcactcaaccgacatagaacaattatattagcacaaaggggtctaaattgttccttttcttaaattcctttggcatcttttatatattagcacatctaaacaaaatctaattaacattataaaaattgttcaaatttagtactaaatatagtatgagctaaaattagcatagaataattttttaattacctattttctatcaattgaaatttctatttatttaaaaatttaaaaattttatttactcattttaatatttttaataaaatattattaaatatgttgttttttcgaagttaagttgcactttgtgttagattttttatttgagtttacattatttttattagttttatgaaaattttggttggttggatagttatttcttttgttgtgttagcctatattattagtaatcaatagttaatgggcttagcatctatgtgtgtaaagtctaggtgaaacagaaatgtgagtttttttaatgaactgaaacttttgatgagcagatccagtccaattaagattatgtaattaaatttcctttctaactctataaatatatattgttttatcacaattatatacttttaataattagataaacaaaattgttcttaatttagagatctatagaaaaagacttaattaatagtattacactatcaaattgtgataattgatatggatcaaaaaaaaatatgtatgcataattattatataattattatggtattctatattgtatataaatttagagaaatgttaaagggcactagtggtgcttaacactctcttatgtgtcagtatcgttattgatccaataaagtatcgggtctcacatagtttaatataataatttttagagagtatcgctagccaatcacaacgtaacatgtcgagaaggtgttaggcaccactagtgcctaatagcaatgctcataaatttatatcttgagttatatattgactatattttaaactaaatttaatataaaataaacaccattggaaattatcttactcgattttgataacatgcatccactatttcttatttaatcaaattaaatcaaactaacaaatattataataatatgatcattccttgagtttaggaaggcacatagtttggaacttaatacccattaacatagatacataacatttccccaaaactactaataactcaaaaactagtaaaacacataaatatatttatacactcttttacttataattaaattatttatttttgttttattttaatttattattatttactaccccaccaccattattgattggacaatgggacatggtgagagtaaccttaaagaataattgttttaaatcttttataaaagctgaaatttaatatgtatgtacctcacggtgtcttatattaagtatcaaaagtttaaatatatttaaagattaatgtaacttcttagcttgtttttattgtgcagaagtttttgttctaattgttacaattatgtaatctaatgtttcattaattaatgtataatacattaaaactaaaatttaatttgttggtataataagagagcaacttgatcgagtttaatattctatattatgtaacagtatacacatacaatgtaataaaaataaacattataagaatgttgatgctaaaaattagtcaacatcatttcgttagattggtgaaaaaaataataagagacatatagtaaataagagaggcactgtaatttataatagtttactcctcatgtcgtgatggtaatggagttgcgtctatttcgaatttttatttatcacaagaattataagataattagctaagaaagagatcttagattctagtaaaacttgagagttgttgtgatcttatggagacttaacaaactatgaaaaatgagctggttgaaactctcaatttataggcaaggagacccatttaaatattaataaaatattccaaaaaaatatatataaaactctcattgtatagacaaggggatcttttataaaaaaaatatgaaatattcattattggatgatcttgaccattgattgagatctagtggttgagatgactcatgttatttgtgtttttggagcagtgatgtaagcacttccaaagtccactattagcgaaggcatgcccatccctaggctatcaagttaataactcagcccatgagcggagtcaagctatggcttcgcttccaaatatgcaagcccagttacatacataacaaggtcgaaccactctagttcggaggacgctgtctggatcagaagacaaaaaagtctgctaggattaacctggataccctcatggggtaatccgggtgtgagtagtcaaagatatatcctgacggttcccagatatcacctcccatggtgcctaccagacacagggccccactgtgttacgattttgtctcctacttagacccgtaaagtgcacaaaccaccaaaaagagatcaaatttttgttcaacgccatatctttaagcgagttatggtcattttactaaaggttgttc

SEQ ID NO: 302605 - DNA, 2139 bp, Cannabis indica
gcagaaatcactatcagtgcaagcatatgtaaaataatgaaaaaatgcattagaaaaataatcatactaaaatgaaaaagaataatgatgaataagttttaacctgaattagaagatttacgatgtcgctcacagtccgaacttcaaattcagagagattttctacatatacaccctttttaacatcctcacgcagctggaaaaagaaaataaagaatagagattgataataaattggaaagtatggcatttctcaaaagacagcaaattaaccagacttacaagcaaattagtacatgagggatcaaggagatctgtgatctgttcattgtaaatctctaagaaagaacacttgcaattgtatgttaatttctcatccctcctgctttcctcttcctaaaaatagaaaggtatatggcaacaacactgtaaacttgcacatacattgtgaaggaaaactagccaaaattgaatacttacagcttggatcctagcaaacaaaaattcaaatatgcgtggtgtcattccccgatgtggactgggcttgacttccaagttttcaatatccccaagcattgtatatgtttttccacttcccgtctgcatcattgaaaccctcttgatgattaatagtccaaaaaaagtgaaatacttgacttactattattagcacaactggtattactatacaaaaattaccactctgtagaagtaatagataaggctggtcagcacaaattagtcatgcaaaatccatatgtatggttattcaaaatattattcaaatgcacaatatatgatgggttgcatacttgtcaaacagtcatagtagcagtatttataacttatcatgcactgcattgcagagtgcataaagagaaagaatttgctgtgaactgaacttttacttgctgtaaaataggtagttgtcacaacactttgtgactatgtacacttcacgaatataatcagtatttcaacaaaacctagacttaacaaaggcatcaatgaaatgacaaatgttaaacaagcttcaataggactacacaatagtagactcaatatatcatcaactaggtagtgtttgagttttgaaagaaagaaaacgaaagaaaacacccaaattgtttaaaaggctagtatgtatatggatttacctgtccatatgcaaacatacagctattgtaccctgacaggcagttctccaccatgggaagacaggccatcctgaaaagcatttcctgcaagtcatagctaaagcaagtcagctcatcaattcaagggcagaaggttaagaaaataaagtgttagtactattcactactctatccggacctggtctactgtttcacatgctacatggtcaaatgtgaacctagtttctggatggccaatccaagaaatggtgttaaagctttcttgcttcaagcacctactgtatccgtttgtgcttcgctccatgctattaagaggacgaacacgaataaccacctgcacaagtgttcccaatcccatcatcagaatttatcaaatcaagcaatatattactagcaaactacgcatacccagttcacgatttccctaaatcatcaataaaaagtaggatcaactgtcttaaagaatgaaagaaagaaaagccaagagaatcattacctgtacattgtgctccatccagaacgatggattttccttcaaatcgaagtgaggaacttcgactgtattaaccactgtacacgaaccagaaggaataggcgtgcctttgtacaatggagcaaaatttgcctgtcgggcaccaccagttccatccaccttgctccggagactagaacccggaggtttagaaacgcttttagtaggcgtgctctgcgtggaattggtctctgaaaaattcgaaccagctctcccaactgttctcgttgtagttcgaggcgtcatgttcgcaaaacctccattactaactccagctccccggacttgtacatcgtcacgcaaatcaccggcagtagctccaagctcgttcttctgcgccgcccacccgaatcgttgcctagctgaaatcccagctccatacttgtcgggcgtccgaagaggcaatgctggatctgcaactctggttttgaccttactcggagtcttatc

SEQ ID NO: 302606 - DNA, 1942 bp, Cannabis indica
agtatttttgtaaaatgccctatctaattggatcagatgttaaatggagtgcccaaaaatctaatacatacaacatacaaaatctaataacttttcataaaagtgcaagcccacaagcaagcccattagcttccacagcaaaaacacccttaaaatccaagagttgggctagtccatctatttttattttttgacatttagttttggagaggaaaataaaattaggtctcttttgataaataatttctctaaggaattgaacatttcgttggttctcaagctctcggtaattccaacttaatacatttataattcttggcgggactgaaaatcagtacccgtcccaatcaagttttttgcaccctccacttaatcctcagatgtaacctccatgtctacattaatttccatagcagcttgattgtttgaaattggaaggcccaaacccacacccactgaccctcaggcccaatagactcctcacggtctgtcctccttctttttgcatcttaaaaagtcaaccccgtatttgagtcttctaccaaatcttccacatttatctcctccaaatttggctcccccataattaggaatttacctttatttttaattaccatagaggtagtaatattttgattaattccataaaagttaaaccctaattttcctccatgctacatcaaccttccacgattcttgctagtaacgagacaccaaccggagcaccatgctggctgctcgaaccaccagtactgacggggctattttttgtagctaggcccgatcgtagccaccttgatccatctgcgtagttacgacgttgcggagctgcttgtaactccaaaccataactttttacaatttgatctttccgagtatcgaataaccgctcgcaaaacctcttcgagtgaccaaagagcccacaaataaagcaaaaggttgggaggtcttcatacttgaatgtaacgtgacatacatggccgccttgaatttccaacttcttcttcttcttctttaacggcaagttcactgatagcttgacgagaatatgaaggtaatcccgccacacacctgagagattattggggtccgatttgataaaattgccagcataatttttgatgccactaattatcctttccgtcataaaaccaacagacatgttatgcaatttaacccaaagctctaaccctattaattgaaccattcgtggattgacccctggtttaacacgtctaaagataaatgtcgcacaatcaaatatccatcggctgccctcgataacacgtgcgatatccacttcgggaaaaggaacaggttcggatccaattctttgaaatatagcccacgacttggctgccaaagtatagccattttattctgcataacttggaaattaatggatcgattagtcaaaaagcaacccacaagaagccgtcaatcgtcaatttctgataacttgtttgcacccgcatcgaacaacaaactttcatcgtcttcatcctctatttaaaaggttgcatactgctcctccatatgcgagctatggggttgtctatgactcataacaaacaattacacgaaataaaccaaatgaaaaatcaaagcacaaacgaaacaccaggaatcaatcggtaacaatcagacaaacaaaagaataacccaccatgtcaatagacaagactcctatagagttctcactggtttagttttggtgatattgatgatatgatataatgataatcacaaacttttattctaatgcataattttagtaccataagactaacagttaatccgataaatgtgatgatttttttttgaagttatgaattcgtttaacgacatcttagactttgattatttttgcttcttgtgtatattaaatttcttcacgagaaagaagaaggggaaagacgaagaggtgttccaataggtaaac
